United States Patent Application Publication US 2008/0034453 A1 - sequence listing, part 15

SEQ ID NO: 115465 - DNA, 255 bp, Glycine max
gcagacaaacaagtagttgagaactaagaagaaggatatggcttcctcaatgatctcctccccagctgttaccaccgtcaaccgtgccggtgccggcatggttgctccattcaccggcctcaaatccatggctggcttccccacgaggaagaccaacaatgacattacctccattgctagcaacggtggaagagtacaatgcatgcaggtgtggccagcaattggcaagtagaagttcgagactctttcctactt

SEQ ID NO: 115466 - DNA, 251 bp, Glycine max
tccaaatgcaacaaagtatctcaagacaattgtaagcttcggaaaggttacccctgaacaaaagcaagaagttgaaaattctgggttggaaatatattcatgggatgaattcttacaagtgggtcaaaatcagagttttgatcttcctattaagaaaaggagtgacatctgtacaataatgtatactagtggaactactggtgaccccaagggagtgttgatatcaaatgagagtattattactctcttag

SEQ ID NO: 115467 - DNA, 252 bp, Glycine max
aacaagtagttgagaactaagaagaaggaaatggcttcctcaatgatctcctccccagctgttaccaccgtcaaccgtgccggtgccggcatggttgctccattcaccggcctcaaatccatggctggcttccccacgaggaagaccaacaatgacattacctccattgctagcaacggtggaagagtacaatgcatgcaggtggtcgcaccaattggcaaccagaagttcgagactctttcctacttgcca

SEQ ID NO: 115468 - DNA, 254 bp, Glycine max
ggagagccagcaaaactgatcaggcagagataccgtgaagccgcagacttgatcaagaagggaaagatgtgtgctctcttcatcaacgatcttgatgcaggagctggtcgtcttggtggaaccacccaatacactgtcaacaaccagatggtgaatgccaccctcatgaacattgctgataaccccaccaatgtgcagcttcctggtatgtataacaaggaagagaatccccgtgtgcccatcatcgtcaccgg

SEQ ID NO: 115469 - DNA, 254 bp, Glycine max
gcaaaagcaagaagaactagtctaagcagaaatggcctcttcagtgatggcatctgtggccctcaaacctgcccctttcactgttgagcagtcctcagttagaggccttccctccctctcaaggaactcctcttcattcagagttgtggccaagggtggcaagaagatcaagactgacaagccttatggcattaatggtggcatggctttgagggaaggagttgatgcatctggcaggaaaggaaagggaaagg

SEQ ID NO: 115470 - DNA, 258 bp, Glycine max
ccggagtgacatttgatgatgttgctggggtggatgacgccaagcaggactttatggaggttgtggagtttctaaagaagcctgagaggttcactgctgttggaggctcgcataccgaaaggagttcttcttgttggtcctccaggaactgggacgacactgttagccaaggctattgctggtgcactggtgttccattgttctcaatatcaggttctgagtttagttgagatgtttgttggtgttggtgctatctcg

SEQ ID NO: 115471 - DNA, 110 bp, Glycine max
cagcagaactgatcaggcagacataccgtgaatccgcagacttgatcaagtagggaaagacgtgtgctctcgtcatcaacgatcttgatgcaggagctggtcgtcttggt

SEQ ID NO: 115472 - DNA, 248 bp, Glycine max
cacgggtggtgcctctcttccatctccccagccaaaacctctctcaggaaggccacattacgcccttccgtcttcgcaacccttaacactccttcttctccttcctcttcatcttccttcccctctctcattcaagacaggcctgtttttgctgctcctgctcccatcatcaccccaactgtgagagaggatatggcaaaggaatacgagatagctattgaagaacttctgacattgttgagggagaa

SEQ ID NO: 115473 - DNA, 142 bp, Glycine max
gaaagtcgcacttgtcgtggtcaccggcgaccgtggtctctgcggcggtttcaacaacgcaatcatacagacagctgaggctagaatcagggaattgaaggagcttggcttggaattcactgtcataagtgttggctagaag

SEQ ID NO: 115474 - DNA, 252 bp, Glycine max
ggttgctgtaggagataagatattgaagtagtgctaagtgcctaacacctgcagtgaacaatggcctctgcatcagcatctcttctcaagtcttcacttgttcttgacaagtctgagtgagtgaagggacaaacacttcgccaaccttctgctgcatcagttgtgagatgcaaccccaccaccccatcaggcttcaccatcagagctggttcctatgctgatgagctcgttaagaccgcgaaaacagtggct

SEQ ID NO: 115475 - DNA, 251 bp, Glycine max
cgataaccatgaaaatgatccagagctgaagaagattcgtgaagagcgtggttacacctacatggatgtttgtgaggtctgcccagaaaagttgccaaattatgaacagaaaatcaaaagcttctttgaagagcatcttcacactgatgaggagatccgcttttgtgctgctggaagtggctattttgatgttagggatcgcaatgaagcttggattcgtgtgtgggtcaagaaaggaggaatgatcatct

SEQ ID NO: 115476 - DNA, 254 bp, Glycine max
cgattggtgaggtaaacttgaattgaagtgaagaaggagatggctgcaacctcttccttgtgctcatcgaccctccaatcccagatcaatggattcttccttcacaaaacctctctttcccatacttcttccctcactttctccaggaggaaaatttcaaccacagtgaaggctacatctcgagtcgacaagttttcaaaaagcgatatcattgtctctccgtccattctttctgcaaacttttcaaaattggg

SEQ ID NO: 115477 - DNA, 258 bp, Glycine max
attatacccttgcagcctgttggtcgcttggtcctgaataaaaacatagataatttctttgctgagaatgaacaacttgcattttgccctgccattgtggttcctggtgtatactactcagatgataagatgcttcagaccaggatattctcttatgctgattcacaaaggcacagacttggaccaaactatctgcaacttcctgctaatgctcccaagtgtgctcaccacaataatcatcatgaaggtttcatgaat

SEQ ID NO: 115478 - DNA, 254 bp, Glycine max
cgggtttactccttctcgcgccaacccagttgcgagcttggtggtgtagatccttgctgtggccaacgagtataaggccgtaaggctttctggtcgcttacagcaccgttgctgaggattgggctcatttttcgccacctatcttctttatcattctccatggccttcttgggtaactctgcggttaagggagcgtccattaaggtcattagtgacgccaccgcctcctttcctgccaagtggatccctgaaat

SEQ ID NO: 115479 - DNA, 111 bp, Glycine max
tgcaattgccatgaacagaataggtggaaaatcaaattcaggggaaggtggggaggatcctattcgctggaaaccacttacagatgtcgtagatggttactctccaactct

SEQ ID NO: 115480 - DNA, 260 bp, Glycine max
tggcgatctagaccagaatgtcaacgactcgcagctctacgatctgttcaaccaggtcggccaagtcgtttcggtgcgcgtctgcagggaccttactacgcgtcgttcactcggttacggctacgttaatttcagtaaccctcaggatgcggcgagggcattggatgtgctgaatttcactccacttaacaacagatctattaggatcatgtattctcatcgagatcctagtcttaggtagagtggtactgcgaatattt

SEQ ID NO: 115481 - DNA, 256 bp, Glycine max
  unsure (1)..(256): unsure at all n locations
gtcaacgggcgagtanacccgtacagcgcaaggaagctgattggtgggatccccctgtgggttgcaccgccgaccgaccctgatcttctgtgaagggttcgagtgagagcatacctgtcgggacccgaaagatggtgaactatgcctgagcggggcgaacagaggaaactctggtggaggcccgcagcgatactgacgtgcaaatcgttcgtctgacttgggtataggggcgaaagactaatcgaaccgtctagta

SEQ ID NO: 115482 - DNA, 248 bp, Glycine max
cgcgcggagaagacgtggttcaccctctcaaggtctctttggaggacctttatcttggatcttccaagaagctctccctctccagaaatgttatatgctccaagtgcagtggcaagggttctaagtctggtgcttcgatgaagtgtgctggttgtcaaggaactggtatgaaggtttctataagacatcttggcccatccatgattcagcagatgcagcatgcctgcaatgaatgtaagggtactgga

SEQ ID NO: 115483 - DNA, 79 bp, Glycine max
cgcgggaggaggtgcccatagaaaaatgaattaaccggtggagctcatattaaaaaaatgatgtttatactttctccct

SEQ ID NO: 115484 - DNA, 261 bp, Glycine max
tctttcctttctccattttttcttcagcgcctttgctacttcgcaacacaccacaatggccaccaatgcactcgctggcacatctctctccatgcgatctctccttcctcaaacacaggcatttacctcaatttctggcctgagatctgcttcaatttccagctttgggagaaagaatgtttcttttagcttgcagccacgctcgattcgccttaaaatttcctgtgctgctaaaccagagacagtagagaaggtgtgcaa

SEQ ID NO: 115485 - DNA, 254 bp, Glycine max
aaccactcttaatttctctctgccttgctcatttacacacctctccaacctttcactttcagctttatttgaatccctctctctcctttccaaatggccagcgttgaggttgcacatcaaacaccaacaacagtgccagaaaatgaaacaaccgaggtaatcaagacccaggaaacaaccccggaaccagtaccagccactgaggctcctgcaacagaacaagcagcagctgaggttcctgctcaagaagaaca

SEQ ID NO: 115486 - DNA, 249 bp, Glycine max
  unsure (1)..(249): unsure at all n locations
gtggataactcaatgtataacattcccactggacctagtgactacccgtctgctggaaatgaacctggtganaataatgagataaaaggtggaaggcctggtccatacatgcaacctcctccctggacgagccagaaccagaaccagagggctccacttgacgtcaatgttgcttatgtggaagggcgggatgctgcggaaagaggagcctctaatcaacctctgacacaggacttcttcatgtcctcg

SEQ ID NO: 115487 - DNA, 253 bp, Glycine max
ctcaaagaagaaagaagaaaatccagcgaaagtaaaaccagcatccgagaaagatgagcagcatcggaacaggttacgatctctccgtcaccactttctcccccgatggccgtgttttccagatcgagtatgctgccaaagccgtcgataacagcgggactgttattgggatcaagtgcaaagatggggttgtgttgggcgttgagaagcttattccgtcgaaaatgatgcttccgggttccaatagaagaat

SEQ ID NO: 115488 - DNA, 250 bp, Glycine max
ctctcacgttttccgcttcagttttctcgggaaaatcatggtgaaaggtccaggcctctactctgacattggcaagagagctcgcgatcttctgttcaaggattatcagaatgaccacaagttcaccatcaccacttacacttccaccggagtggaaatcacttcaactggagtcaggtaaggtgagatatatttggccgatgtcagcactaaggtgaagaacaagaacatcacaactgatgtcatagtg

SEQ ID NO: 115489 - DNA, 74 bp, Glycine max
cagaagcaaatggcttcctcaatgatctcttccccagctgttaccactgtcaaccgtgccggtgccggcatggc

SEQ ID NO: 115490 - DNA, 256 bp, Glycine max
gcagaagggagcgatcgctgcttcagaggagaatagtgcactgttcccaatattcattttgacaataatggccattcctatagtgccatatacaataacaaagttgtgccgttttaccagtcagaaatcagagagcattcactgtcagtgctctgagtgctcgcggtccgggaagtaccataaatcgatattcaagaggatttcaaatgtctcaacctgtagtaacttgacattgttactactttgggtggttatg

SEQ ID NO: 115491 - DNA, 255 bp, Glycine max
tgcactcgtcttctcttgcggctagggttttagcgcagttctatctagatttaaggaagatgggtaaggcaaaggttcacatcagtattgtggtcattggccatgtcgactctgggagatccactaccactggtcacctgatttacaagcttggaggcattgacaagcgtgttattgagatgtttgagaaggaagctgctgagatgaccaataggtctttcaagtatgcctgagtgctggacaaacttaaggctg

SEQ ID NO: 115492 - DNA, 256 bp, Glycine max
cttctcaatcgcaaattttctcccccaaatcgtagatctacggttccattggtgtagtgtggtaagatgggaggaggatttagagtgcttcacttagttaggccatttctctcgtttcttcctgaagttcaaactgctgacaggaaagtgccatttagagagaaggtcatatacactgtgatctctcttttcattttcctggtttgtagtcagctccctctatatgggatacactcaacaacaggtgctgatccat

SEQ ID NO: 115493 - DNA, 260 bp, Glycine max
aagaacctcgttttgttgaatatttcagatgtgcaactcctgagttggagtatggaagaatgaacattggcagtcgtccatcaaagcgaaagccaagtggaggaattgaatcactacgtgctattccttggatttttgcatggacacaaacgaggtttcatttgccagtgtggcttggttttgggtcagcatttaagcatgtagttgagaaagatccgaagaatctccaaatgcttcaggacatgtacaatcaatggcct

SEQ ID NO: 115494 - DNA, 254 bp, Glycine max
cctacttgctacttcccacttccattcttttcttaaccagctaggatggtgagtgttgaagagattcgtaaggcgcaacgtgcagaaggccctgccactgtcatggctattggcaccgccactcctcccaactgcgtggatcagagtacctatcctgactattatttccgcatcaccaacagcgagcacatgaccgagctcaaagaaaaattcaagcgcatgtgtgataagtcgatgattaagaagcgatacat

SEQ ID NO: 115495 - DNA, 255 bp, Glycine max
gcgttgccattctcatcctcttctttctctctctaccattgccatggatccctacaagcaccggccatccagcgccttcaattctcccttctggactacaaattctggtgctcctatttggaacaacaactcctctttaaccgttggagctagaggtccaattctgctggaggattatcatcttgtggagaagcttgcaaattttgatagggaacgtatcccagaacgtgttgtccatgccaggggcgctagtgc

SEQ ID NO: 115496 - DNA, 252 bp, Glycine max
cccattttcttcgtagccaaacactctgaaattctcagttatgtcgtggcaagcgtatgtggatgatcacctactgtgtgaaatcgaaggtaaccacctcactcacgccgctatcatcggccaagacggcagcgtttgggctcagagcaccaacttccctcagttcaaacctgaggaaataactgccatcaataatgactttaatgagcctggatcacttgctccaactggattgtatatcggtggcaccaa

SEQ ID NO: 115497 - DNA, 251 bp, Glycine max
atctaagtgagatacacagtagttaggtagcaagcataagtgtctaaccttagaaacatatctgctacatatcgtgtgcattttggaattgtgccactaaaattctattcatctatggctgcctcatcttatgctatgcaatcaatccttgcaaaccctatgatccgcatttccagcgggtctagggagaaccattttggtgttcctgcttatcacatgagaaggaatgttggcctgagagttaggtccat

SEQ ID NO: 115498 - DNA, 252 bp, Glycine max
aacactcataacacaaagcacaaagcaaagctcatccttgagttaaaaaatggcagcagcttcttccatggctctctcatccccatccttggctggcaaggccgtgaagctgggcccatcagccccagaagtgggaagggtgagcatgaggaagaccgtcaccaagcaggtctcctcaggaagcccatggtacggcccagaccgagtcaagtacttgggcccattctctggcgagcccccgtcctacctaac

SEQ ID NO: 115499 - DNA, 254 bp, Glycine max
tgaggctcggggagcttgctcttctagagcagccttttattaaggatgacagtgttttagtgaaagacttggttaagcaaactgtagctgcacttggagagaacattaaagtgcgccgttttgttcggtttacgcttggggagacatctgaaaaagaaacaacagtaccagcataactttaggataagtaccatcaagcatgaatggtaactggggaattcatatgcatgttccaaaagcatatatgcaagaga

SEQ ID NO: 115500 - DNA, 261 bp, Glycine max
tagatcatacacaacaataaaagacaacccagagagcgcgtcttaataaacgctcttctctgaaaacccccatttcttttcttctttcttcttctctttcgcttcttcgatcttcgatcttcgtcgctgaaaatgagagagtgcatttcaatccacatcggccaggccgggattcaggttggaaacgcctgctgggagctttactgcctcgaacacggcattcagcctgatgggcagatgccaagtgacaagaccgttggt

SEQ ID NO: 115501 - DNA, 256 bp, Glycine max
cattgccaaagctcatggaggtgtatctgtatttggcggagtaggtgaacgtactcgtgagggaaatgatctctatatggaaatgaaagaatctggagtaattaatgaacaaaatattgcagaatcaaaagtagctctagtatatggtcaaatgaatgaaccgcccggagctcgtatgagagttggtttaactgccctgactatggcggaatattttcgagatgtcaatgaacaagatgtacttctatttatcgaa

SEQ ID NO: 115502 - DNA, 253 bp, Glycine max
atcgaatagatagataggtgaaaatggcgcagtgtgtgaccaacacattcgtgcaaggaaaaccctttcttccagttgcagcagctcccactaaaaatgttcggagagcggttcagtgcggtgtgtggtgcaagaagaaggagatacacccgcaattctacgaggaatcgaaggtgtactgcaacggggagctggtgctgacgacaggtgggacccagaaggaatacgtggtggacgtgtggtcggggaacca

SEQ ID NO: 115503 - DNA, 253 bp, Glycine max
acacaactccactcttagctgccattggtttttctacttccatttctcttcctttctaagcttttttcgattacccatttggagattctgtcctaatggctcttgctccttccaaagtttcctccttttccgggttttctcccaaacccagtgttggggatgctctgaaaaatccaacttgctctgtttctctgagctttgcgaatgtgatacttggaagcagaaaccttagggtttgtgcctcaactgtgcc

SEQ ID NO: 115504 - DNA, 254 bp, Glycine max
gattgtgcgagttggcgaggaaggcggttggggcgggggaatcggttcggagatatcacgtgaacctgtctgttttcacgtccgttccagacgcgtggggaattgaacaggtgtttcccattatcccaattcaccgtttggacgaaaagccttcggtgaggggtattctctcggacttgacttgtgacagcgacgggaagattgacaagttcatcaacggagagtccagcctgccgcttcatgagatggaagga

SEQ ID NO: 115505 - DNA, 252 bp, Glycine max
catagatgttgtggctgatgttagaagtgaacggattgtagtcttgggaggaaatggctttgttggttctgccatatgcaaggcagcagtgtccaggggcatagaagtaataagcctaagcaggtcagggcgacctacttattcggatgcttgggtagaccaagttacttggatttcaggagatgttttctatgtaaactgggatgaagtacttgttggagctaccgcagttgtttcaacacttggaggttt

SEQ ID NO: 115506 - DNA, 253 bp, Glycine max
gaaactgaaactcccgatttcaaagccccagatgctgtccctccttggagggatagcaccactggtcttggccagaccctccctcgcagaagaaattgagaaagcagcactctttgacttcaacctcacccttcccataataatggtggactttctgctgctgatggttgccttggacaagatatggttcaccccgcttgggaaattcatggacgagagggacgcggcgatcagggagaagctgagcagcgtg

SEQ ID NO: 115507 - DNA, 268 bp, Glycine max
ggaattctgctcgagatttctcagtctctgtgtttgcggctgaggattccgaatgagtgaccttcttcgtttctcgtaaagtttaagtaatcatgggtaaggataaggttcacatcaacattgtcgtcattggacatgtcgactctgggaagtcaactaccactggtcacttgatctacaagcttggaggtattgacaagcgtgtgattgataggttcgataaggaggctgccgagatgatcaagaggtcattcaagtatgcctgggt

SEQ ID NO: 115508 - DNA, 255 bp, Glycine max
ctctttgcttttggtttggcttttattgtaacccttcctattggtgtcattcaagcaactaccaaccagcaacctggatatgacattatagcacagttcatgattgggtatgtccttcctggacaaccaattgcaaacttgctcttcaagatttacgggagaatcagcaccgtccatgctctctctttcttgtcagatctcaaacttggccactacatgaaaattcctccacggtgcatgtacaccgctcagctg

SEQ ID NO: 115509 - DNA, 253 bp, Glycine max
tcattttccaaataagtatcttcgtagttgcataagtcaagagaagaagtgaagtggctgcaatggcttcaagtcaggtagaggtgacccttttgggagttgtgggaagcccatttctacacagggttcagattgctctcaagttgaagggagttgaatacaaatatttggaagacgatttgaacaacaagagtgatttgctcctcaagtataacccagtttacaaaatgattccagtgcttgttcacaatga

SEQ ID NO: 115510 - DNA, 81 bp, Glycine max
gaacaagtagttgagaactaagaaggcgaagcacatggcttccgcaatgatctcttccccagctgtcacgactgtcaaccg

SEQ ID NO: 115511 - DNA, 251 bp, Glycine max
agtgcctaacacctgcagtgaacaatggcctctgcatcagcatctcttctcaagtcttcacttgttcttgacaagtctgagtgggtgaagggacaaacacttcgccaaccttctgctgcatcagttgtgagatgcaaccccaccaccccatcaggcctcaccatcagagctggttcctatgctgatgagctcgttaagaccgcgaaaacagtggcttcaccagggaggggtattttggccatggatgagtc

SEQ ID NO: 115512 - DNA, 258 bp, Glycine max
aagaagactcctcaatcatccatagacatggccaccgtcacttctgcagcagtttctattccctcattcactggcctcaaggcaagcgcaggcaaagtgagtgccgccgcagttaaagtctcagctccccaagccacaaggttctgcggcatcaaggcttccctcaaagacgttggagtcgctgttgtggccactgctgcgagcgcagttctagctagcaacgccatggccattgaagtgttactgggcactgatgac

SEQ ID NO: 115513 - DNA, 255 bp, Glycine max
atcctccatggttcttatgaagatgaaggagattgcggatgcgtatctaggttccaccataaagaatagagaagtcactgtgcctgcttacttcaacgactcacaacgtcaagccaccaaggacgctggtgtcatttctgggctcaacgtgatgcgaattatcaacgagcctaccgcggctgccattgcttatgggctcgacaaaaaggccactagctctggggagaagaatgttctcatttttgatctcggtgg

SEQ ID NO: 115514 - DNA, 249 bp, Glycine max
ggttacacctggagctgagtccaaggacaaggccagtcctcagacagttgctgattacaccctcaagctccttcacaggagaattccccctgctgtccctggaattatgtttttgtctggtggacagtctgaggttgaagctaccctcaacttgaatgccatgaaccaatctccaaacccgtggcacgtgtcgttctcgtatgccagagccctccaaaacactgccttgaagacatggggaggccgccc

SEQ ID NO: 115515 - DNA, 248 bp, Glycine max
ttttctacttgttctgcagctgcaagatgtacccagacttgagctacactgagtcaaccaccaccgagaccttggtcatgggagtggcacctgttaaggctcaatttgagggtgctgaaatgggtgtgcccgctgagaacgatggctgcaaatgtggaccaaactgctcctgcaacccctgcacttgcaagtgaggtgttgggagagcaagcttcaagcagagatagcccttaattaggaataatgat

SEQ ID NO: 115516 - DNA, 256 bp, Glycine max
attcgcacgcattgcttcgcctcacaacagcagctgcagcagcaatggctcccaaacgaggtggaaaggctccggctcttgccgctaagaagaagcctgagaaggtcacgaatccgttgttcgagaagcgtccgaagcagttcggaatcggaggggcgttgcctccgaagagagacttgactaggttcgtgaagtggccaaagaatgttcaaattcagaggaagaagaggattctgaagcagaggttgaaggttcc

SEQ ID NO: 115517 - DNA, 254 bp, Glycine max
gccaagtgaaagtgagaaataataaaaatcaaagagcataatgtcagggatcattcacaagattggggagacccttcatgtgggagggcacaagaaggaggaggagcataagggtgagcaccatgctggagaatacaaaggggagcaccatggtgaacacagtagtgagtacaaaggagagcatcatggtgaacacaaagctggagagtaccatggtgagcacaagccagagcacaaagaggggttcctagaca

SEQ ID NO: 115518 - DNA, 253 bp, Glycine max
cagagaatggcaactatgactggtgtgagcctttcatgccccagggttttcttcaacgcatcagcctcaccgcaaaacgcgcatgctgtaaagttctcacttccacccagccaagcagtgcgaccgggtagtatcaagttgggtcgcgtgatgaggatccgacccgttcgcgctgcgcctgagcgcatatcggagaaggtggaggagagcataaagaacgcgcaggaggcgtgcgccggcgatccgacgagcg

SEQ ID NO: 115519 - DNA, 252 bp, Glycine max
gcttttgatgaaacaaccacattagaggatgttgataatcttttcaaagtttttgctggtggaaagcccgtctccttcacagctgcatctcttgcaccagaagttcagagtgcgattccttctggattagttaggaagagcccttatctgacgcaccctatctttaacacgtaccaaactgagcatgagttgcttaggtacttgtataggctacaatcaaaagatctctcactatgccacagtatgatccca

SEQ ID NO: 115520 - DNA, 248 bp, Glycine max
cagggtattacaaggcaattgaagccataggtaaagcatccacattttatacttgggtgttggtgtctggggtgttctaccatctttataaccaatcatcttaccaagcactggatgagattagcccattgactttctctgtggggaacacaatgaaaagagtggtggtgattgtgtcttcagttttggtgttcaggaatccggttcggcctcttaacggccttggatccgccattgcaattcttggg

SEQ ID NO: 115521 - DNA, 249 bp, Glycine max
cattgacttaagctaccgcaccattagttcttcttggtctgaaccattaaactagactcacacgcgcacccatcaccgtctgatctcgatcgcacggacaatggcgtaccgcagcgccatcgtgcgcagagcccaagaggccagccaccgcgacacatggcgagccgctctctccgaattcatctccacactcatcttcgtcttcgccggctccggctcctccgtggccgtcaacaagctcaccgtcga

SEQ ID NO: 115522 - DNA, 248 bp, Glycine max
tacaaaggttgctgtaggagataagattgcagtagtgctaagtgctaacacctgcagtgaacaatggcctctgcatcagcatctctgctcaagtcttcacttgttcttgacaagtctgagtgggtgaagggacaaacccttcgccaaccttctgcatcagttgtgagatgcaaccccaccaccccatcaggcctcaccatcagagctggttcctatgctgatgagctcgttaagaccgcgaaaacagt

SEQ ID NO: 115523 - DNA, 250 bp, Glycine max
catttctctacttgcgaagtgtacggaaagacgattggagcctttctccctaaagatagtcctcttcgtaaggatccggcatactatgttcttaaagaagacgagtctccttgcatttttggttctattgaaaaacagaggtggtcttatgcctgtgcgaaacagttgattgagaggctgatttatgctgagggtgctgaaaatggcttggagttcacaattgtgaggccttttaactggattggacctc

SEQ ID NO: 115524 - DNA, 256 bp, Glycine max
gttgaggctcaagatggtctttctgttcaagaatggatgaaaaagcagggcgtacctgaacgggtaactgatgaggtgttcatagcaatgtctaaggcactaaacttcatcaatcctgatgaactttcaatgcaatgtatattgattgctttaaaccgatttcttcaggagaaacatggttctaagatggcctttttggatggcaatccacccgaaagactttgtatgccgatagttgatcatattcagtccttgg

SEQ ID NO: 115525 - DNA, 249 bp, Glycine max
ggcgaatcccccaacagcttgttcaacatcataggcaacttgctcttccccttactcgcattcgcgggcctgttcttcctcttccgcagagcccaaggcgggcccggcgggcctggcgggctgggagggcccatggacttcgggcggaacaagtccaagttccaggaagtccccgagaccggcgtgagcttcgctgacgtggcaggcgcggaccaagcgaacttgaattacaagaggttgttgatttct

SEQ ID NO: 115526 - DNA, 253 bp, Glycine max
ctgaaccaaatcatcacacacacatactaagaagcaacaattcttctacaatggatctcctccttctggaaaagaccctcataggtctcttcctcgctgcggtggtcgccatcgccgtctccaccctccgcggccggaaattcaagctcccaccgggcccactccccgtcccaatcttcggcaactggctccaagtcggcgacgacctcaaccaccgcaacctcagcgatttggccaaaaaattcggtgacat

SEQ ID NO: 115527 - DNA, 249 bp, Glycine max
gtaatttctgccagcctcaaaaaagacttgctctgcctctgccactctctgagtaggactacactgccatggctgcctcagtatccactgttggagctgtcaacggagctccactgagcttgaacagctctggagctggagcttcagttcccagttcagccttctttggcaccagcttgaagaaggttattgcctcaagggtccctaacgtcaagatttcttctggaagtttcaaaatcgttgccgcgg

SEQ ID NO: 115528 - DNA, 252 bp, Glycine max
gtgcattcaatggccaccacagcagctctatccggaaccatggtgagcacctccttcatgaggaggcaacctatgaccaccacaagcctaaagacattccccaacgttggtgaagctctttttggtctgaaaagtggacgaggtggtcgtgtcacttgcatggcctcgtacaaggtgaagctcataaccccagaaggagaagtggagtttgaatgcccagatgatgttttcattgttgacaaggcagaggac

SEQ ID NO: 115529 - DNA, 250 bp, Glycine max
cctaattgtttaaacctaattctcatttcttcatcgttcgattcttctcctcctaaagatgcagatcttcgtgaaaactttgaccggtaagaccatcacccttgaggtggagtcctccgacaccatcgataacgtgaaagctaagattcaagacaaggaagggatcccacctgaccagcagagacttatctttgcgggtaaacagcttgaggatggtcgaacccttgccgactacaacatccaaaaggaa

SEQ ID NO: 115530 - DNA, 250 bp, Glycine max
cttcaaaacactcataacacaaagcacaaagcaaagctcatccttgagttaaaaaatggcagcagcttcttccatggctctctcatccccatccttggctggcaaggccgtgaagctgggcccatcagccccagtaagtgggaagggtgagcatgaggaagaccgtcaccaagcaggtctcctcaggaagcccatggtacggcccagaccgagtcaagtacttgggcccattctctggcgagcccccgtc

SEQ ID NO: 115531 - DNA, 249 bp, Glycine max
agaagccgcacccaaaggtgacggggaacaaaattaaacataccatactctctgcttattagtcattgaacttcccttctgtaatgttttcaaagggagaaggtgttgaatgctaatctcaatgttactgagattttgggcattcgtgttcttcgttatgaattgtggatgtactgggctattttagtttgtccttccatttatacgcgtttctgaactgcctattttcttaatgacactgaaatttcc

SEQ ID NO: 115532 - DNA, 248 bp, Glycine max
gggagaagagtgaactcaaagcgacagtgctgaaaaagtggagcagataacagcttctctagggacatcatcatctgatggcatcccatcatcagaagcctcagacaggatcaaagctggtttcattcacttcaagaaggagaaatacgacaagaatccagctttgtatggtgaacttgccaaaggccagagccccaagttcatggtgtttgcttgctcagactcaagggtgtgcccatctcatgtgc

SEQ ID NO: 115533 - DNA, 250 bp, Glycine max
ggaactgaagcaatatcccttggtcgtgttggggatgatttctggtgcactgacccttatggtgatccaaatggtacattttggctacaagggtgtcacatggtgcattgtgcatacaacagcttgtggatgggcaatttcatccacccagattgggacatgttccaatctactcatccttgtgctgccttccatgctgcctcaagagccatatctggtggccccatttacatcagtgacacagttggga

SEQ ID NO: 115534 - DNA, 271 bp, Glycine max
ctccaagttcctaccatagtgctaggaaagtgagtgagagaaagagatcacatagcagaatggcttctactcaatgtttcttgcaccaccatgctcttaccacccctgccagatccccatcacaacgcatcatggttagcaccaagcctaaccagcttgtttgcaaggcacagaagcaagaggatattgatgtcagcccaatctctcgccggttagctctaaccgtgctcattggtgctgctgctgttggctccaaagtccaacctgctga

SEQ ID NO: 115535 - DNA, 268 bp, Glycine max
caaaggttgctgtaggagataagattgcagtagtgctaagtgctaacacctgcagtgaacaatggcctctgcatcagcatctctgctcaactcttcacttgttcttgacaagtctgagtgggtgaagggacaaacccttcgccaaccttctgcatcagttgtgagatgcaaacccaccaccccatcaggcctcaccatcaagagtggttcctatgctgatgagctcgttaagaccgcgaaaacagtggcttcaccaagggggggtatt

SEQ ID NO: 115536 - DNA, 266 bp, Glycine max
actggtttagctgttgcgttgaagcaggccactactcccgaatatagagcatatcaagagcaagttctcagcaacagctttaaatttgcacaggctctgagtgagagaagctatgagcttgtctctggtggaaccgagaatcacctggttttggtgaatctgaagaataagggtattgatggctccagagttgagaaggtgttggaagcagttcatattgcagctaataaaaacactgttcctggagatgtgtctgccatggttcc

SEQ ID NO: 115537 - DNA, 267 bp, Glycine max
attgaattcaaaaactaagttcatttcttgtgctttgctttattcctcaaaaccaaacatgtcgaacacatgcggcaactgtgactgcgctgacaagactaactgcaccaagggaaacagctatggtgttatagtagagactgagaagagctacatcgagactgttgacatggatgttccagcagctgagcatgatgggaagtgcaagtgtggcactaactgcacttgcacggactgcacttgttggccattaaggaatatgtatga

SEQ ID NO: 115538 - DNA, 260 bp, Glycine max
tacaactacaaaggttgctgtaggagataagatattgaagtagtgctaagtgcctaacacctgcagtgaacaatggcctctgcatcagcatctcttctcaagtcttcacttgttcttgacaagtctgagtgggtgaagggacaaacacttcgccaaccttctgctgcatcagttgtgagatgcaaccccaccaccccatcaggcctcaccatcagagctggttcctatgctgatgagctcgttaagaccgcgaaaacagt

SEQ ID NO: 115539 - DNA, 261 bp, Glycine max
ctcgagccggttgtgaaagcagagaagtgagatacactaagttatcctcataaatacactctaattaggtggcaagataagtgtctaaccttagtaacattgccacatattgtgttcattttggaattgtgccactaaaattctattcaattcatctatggctgcctcttcttatgctatgcaatcaatcctggcaaaccctttgatccgcatttccagcgggtctagggtgaaccaatttggcgttcctgctttgcacat

SEQ ID NO: 115540 - DNA, 260 bp, Glycine max
  unsure (1)..(260): unsure at all n locations
ctcgattgcaagtgatccacgatacactctacgcttcacaaaaccttcaaacccaattccacagaatacatcacaaaaancatgccaccaaagcccttagactatgggtcaataaatgaaaacgtgaagaagagtcaatatgctgtcagaggtgaattataccttcgagcttctgaacttcagaaagaggcgcaaaagattatctttactaatgttggcaacccgcatgcattgggacagaaaccactgagcttccctcg

SEQ ID NO: 115541 - DNA, 256 bp, Glycine max
gggagctgttgtttggattttggagcatagggtgaatgatgaatttaggggaccacccaaaaaacaagtagttactgttttatggtttagtttttcaacaatgttcttttcccacagggaaaatacagtgagcacacttggccgctttgtgttgattatatggttatttgtagttcttataattaactcgagttacacggcaagtctaacctcaatcctcacagtgcaacaactttattcgcccattaaaggcatt

SEQ ID NO: 115542 - DNA, 253 bp, Glycine max
ctcataacacaaagcacaaagcaaagctcatccttgagttaaaaaatggcagcagcttcttccatggctctctcatccccatccttggctggcaaggccgtgaagctgggcccatcagccccagaagtgggaagggtgagcatgaggaagaccgtcaccaagcaggtctcctcaggaagcccatggtacggcccagaccgagtccagtacttggggccattctctggggagccccgtcttactaaccggtgaa

SEQ ID NO: 115543 - DNA, 260 bp, Glycine max
  unsure (1)..(260): unsure at all n locations
gcggctattctgaaggactgggataagtatttatcactattttggcagctggttccacctagtgaagaagatacccccgaggcaaatgccaaatatgacacaactacggcagatcaggtcacttatcagtctgcttagggtaacaatctaaggttacattacattgattacgccaggctatggagccattgttgtgtccctgatttgtacaggaattggagaggctatcaattaggtgganatgcctagccaaatatggg

SEQ ID NO: 115544 - DNA, 263 bp, Glycine max
ctctacctttactgctactatgttgctgggacagtaggccttatgagtgtcccagtaatggggatagcaccagaatcaaatgcttcatcagagagcatttataatgctgcattggctctaggcattgcaaatcaacttaccaacatacttagagatgttggagaagatgctagaagaggaagagtatatctcccacaagatgaattggcacaagctggcctttcagatgatgacattttccgcggaagagttacagacaaatg

SEQ ID NO: 115545 - DNA, 242 bp, Glycine max
gccagcaacctatgagcaaatcaaagctgctatcaaggaggaatcagagggcaaactgaagggtattttgggatacaccgaagatgatgttgtgtctactgattttgttggtgataacaggtctagcatatttgacgccaaggccggaatttctttgaatgaaaactttgtaaaacttgtttcctggtatgacaacgaatggggttacagttcccgtgtgattgatttaattgcccacattg

SEQ ID NO: 115546 - DNA, 258 bp, Glycine max
attccttttcttcttgcactctgccctttgggaggagtttgtaacatggctgctctacctactgcggagcttagtgatgcaaatgcaacacatgtagcaagtggtgatgtgagggtgctgcatccagtgttcaaggtttatggccaggccacggcattctccggccccattgtcaccgtgaaggtgtttgaagacaacgtgttggtgagggagcttgttgagacgataggcgaaggaagagtattggttgttgatgga

SEQ ID NO: 115547 - DNA, 259 bp, Glycine max
gttttcttaaaatttcttccttgccactgccagtgtgtcaccaccatggccaccgtcacaacccaagcctccgccgcgattttccggccatgtgcctcgaaatcgaggtttctgaccggctcttccggtaaactcaaccgggaagtgactatgaggccaatggggtgccctccttctgcctctttcaaggttgaagccaagaagggagagtggttacctggcttggcctccccaacttacctcaatggcactcttcctg

SEQ ID NO: 115548 - DNA, 137 bp, Glycine max
gtgatttcagtgagtgatcggtgttcacttgatctcatcataatcgtcagcgtcaattgacgaagatgccgatcagaaacatcgccgtcggaaggcctgaagaggcgaatcaccccgacacgttgaaggcggctttg

SEQ ID NO: 115549 - DNA, 245 bp, Glycine max
gctgggcatgcttttaatactttcccaaagatgggtgatacatggataccggaagacatttttgaaatgaagcctttgattcggaatttctttgagaatacatcaactgtacagcttgatcaccgtatacttgcaactgcaactctgatttctgtgggcattttatggtggtcaacaagaaagctggagatacatcctgcagtaacgatctgtgattggaggtgctgttggcatggcagctcttc

SEQ ID NO: 115550 - DNA, 250 bp, Glycine max
agattacatacgttatcgtaaaatcacttcaaatatgaatgatcggtttccagatgcaacccttgatgaacttaatgcaagtgctgcaacctgcattatttgtcgtgaagagatgacgacggccaagaaacttgtatgtggacatctttttcatgttcattgtctccgatcatggctagagcggcagacacttgccccacctgcagagccttggttgtaccaccagaaaatggggaaacttcagctgcag

SEQ ID NO: 115551 - DNA, 255 bp, Glycine max
aaagcattgaattcaaaaacttaagttcattccttgtgttttgctttcttcctcaaaaccaaacatgtcgaacacatgcggcaactgcgactgcgctgacaagactagctgcaccaagggaaacagctatggtgttattgtagagactgagaagagttacatcgagactgttgtcatggatgttccagcagctgagcatgatgggaagtgcaagtgtggcactaactgcacttgcacggactgcacctgtggcca

SEQ ID NO: 115552 - DNA, 237 bp, Glycine max
ctggacatgcaggaacagtgatgacagatggtgagagcaaaagtttagtggcatatcatgaagttggtcatgctatttgtggaactttgactcctggtcatgatgctgtgcaaaaggtaacactagttcctcgcggtcaagctcgtggacttacatggttcattcctaacgatgacccaactctgatctccacacaacaactctttttaagaattgttggaggactaagtgggaagg

SEQ ID NO: 115553 - DNA, 263 bp, Glycine max
ctcgttcttcttcgtcgttatcttcttcttttgttgtttgtgtgtttgttcttttctctcacctgaaaatgtcttgctgcggtggcaactgtggttgcggaagcgcctgcaagtgcggcaacggctgcggaggctgcaagatgtacccagacttgagctacaccgagtcaaccaccaccgagaccttggtcatgggagtggcaccagttaaggctcaattcgagagtgctgaaatgggtgttcccgctgagaacgatggctgc

SEQ ID NO: 115554 - DNA, 258 bp, Glycine max
tgaactcgaagtgatccactccaggtgggccatgctcggagccttgggctgcgtcttcccggagttgctgtcccgcaacggggtgaagttcggagaagccgtgtggttcaaggccgggtcccagatcttcagcgagggtgggctcgactacttgggcaacccaagcctgatccacgcccagagcatcctcgccatctgggccacacaagttatcctaatgggtgccgttgaaggttaccgtattgctggtggcccctc

SEQ ID NO: 115555 - DNA, 261 bp, Glycine max
aatgttgcattcctttgcttatttatgttgggtaaattagaagactgccttcaactgttggtagacagcaatcgaattccggaggcagctttaatggctcgatcttatctcccaagtaaggtctcagagatagtggcaatttggagaaaagacctcaataaggttaatccaaaagctgctgaatcattggctgatcctgaagaatatccaaatttgtttgaagattggcaggttgcactagctgtcgaatctaaagctgtg

SEQ ID NO: 115556 - DNA, 256 bp, Glycine max
aaaatttcttccttgccactgccagtgtgtcaccaccatggccaccgtcacaacccaagcctccgccgcgattttccggccatgtgcctcgaaatcgaggtttctgaccggctcttccggtaaactcaaccgggaagtgactatgaggccaatggggtgccctccttctgcctctttcaaggttgaagccaagaagggagagtggttacctggcttggcctccccaacttacctcaatggcactcttcctggtgac

SEQ ID NO: 115557 - DNA, 251 bp, Glycine max
gtcttgcccttctctcttcaactccaaacacaagacatcatcatccatggctgcctccgtctccactgtcggagctgtcaacagagctcttttgaacctgaatgggtctggacctggggtttcagctcccagttcatccttctttgggagcagcttgaagaaggttattggctcaagggtccccaacacaaagatttcctctggaagcttcaagattgttgctgtagaagagaagaaagagattgaagaga

SEQ ID NO: 115558 - DNA, 255 bp, Glycine max
cgccccagaactcactgcagggtattacaacacccgattccgtgatggctacctccccattgctcaaatgctggcgcgccacggtgccatctttaacttcacctgtatcgagatgcgcgatcacgagcagccacaagaggccctttgtgcacctgagaagctggtgaagcaagtggctctggcaacgcagaaggcacaggttccacttgccggcgaaaacgcgctgccacggtacgacgagtatgcacatgagca

SEQ ID NO: 115559 - DNA, 249 bp, Glycine max
gttatctgtttcccgccatatatccaataagctttaaccatgtctgcctttgttggaaagtacgcagatgagcttatcaagaatgccaagtacatagccacacctgggaagggcatcttggcagcagatgagagcactggcaccattgggaagcgcctatcgagcattaacgttgagaacattgaggccaaacgacaagctcttcgcgagcttctcttcaacgctccagatgccctccaataactctct

SEQ ID NO: 115560 - DNA, 231 bp, Glycine max
cttggttaatggaagctccgagcatggcggcgacggagcgcacggtgttgcagttctcttcttcgcagagcctctcgacgaaagttcaccctctcgttgtcttcaacatctgcgcttgctacgtccgtcgtctcgaccaagcggagcgcgtcatcggaacgctactcggctccattctccccgacggaaccgtcgatgtccgcaattcttacggcgttccgcacagcgagt

SEQ ID NO: 115561 - DNA, 254 bp, Glycine max
aaatttaagtgaggagctagagaatgatgatgaagtctgctatgtgtgcagtggtggttgtagcacttcttcttctggcggaggtggggcccatggctgaggctgtgacatgcaccccaacagagttgagtccgtgtcttccagcaatcacttccggtgctaaaccttccaatgcttgttgcacgaagcctgaagcagcaaaaaccctgcttatgtcggctactcaaaaacgctaacttgaagcagtatgttac

SEQ ID NO: 115562 - DNA, 252 bp, Glycine max
caacaatggtggatacaccatcgaggttgaaattcatgatgggccgtacaatgtgattaagaactggaattacactgggttgattgatgcaatccacaatggtgaagggaaatgctggactgccaaggtgttctgtgaagaggagctagttgaagcaattgccacagccacaggacccaagaaagactccttatgcttcattgaggtgattgttcctaaggatgacaccaataaagaattgcttgaatgggg

SEQ ID NO: 115563 - DNA, 253 bp, Glycine max
atcagaaaccgaggaagaataatttttcctacattctccgttacttatgtttacttgattgtgtcatgttctttatttccaataaaggttattgtaggccccatgtgttgttgaactactatactgtgcgaatggtgcatgcttgctggaccagtatgtatgcctcagtgcgttttgtgatttgcggttctaatgtaattttgtttttggttgttgatgattatgttatatgttgtcttgataatataatagt

SEQ ID NO: 115564 - DNA, 260 bp, Glycine max
cacatttccattgatggtgacactgagattgcattcactgagaatgttgatcagcgttttgaagcacttggatggccatgtaatttgggtgaagaatggaaatactggatatgatgaaattcgtgcagccattaaagaagcaaaggctgtcaaagacaaacccactttgatcaaggtaaccactaccattggatttggttctccaaacaaggctaattcctacagtgttcatgggagtgcattaggtgctaaagaagtgg

SEQ ID NO: 115565 - DNA, 113 bp, Glycine max
cctaatatagcaaaggaaatgcatgttggccacctgagatctaccattattggtgatacattagctcgcatgcttgaattttcacatgtagaatgtgtaatccgtagaaatca

SEQ ID NO: 115566 - DNA, 244 bp, Glycine max
gacgagatcgacgccgccccggaggaacgcgcccgcggcatcaccatcaacaccgccaccgtcgagtacgagaccgagaaccgccactacgcccacgtggactgccccggccacgccgactacgtcaagaacatgatcaccggcgccgcccagatggacggcgccatccttgtcgtctccggcgccgacggccccatgccccaaaaccaagaacacatcctcttagccaagccagtcggtgtcc

SEQ ID NO: 115567 - DNA, 244 bp, Glycine max
aagggggtggcttgcaacccaaaattcctgaggcaaaagggtcaatcaaagctattcgaagtgtggccttcttcattcccttgtatgaactttacctcacatatggtgggatttttaggttgacctttggaccaaagtcctttctaatagtatcagatccctctattgcaaaacacatattgagagacaattcaaagtcttatgccaagggtatcttggctgagatcctagactttgtatgggg

SEQ ID NO: 115568 - DNA, 258 bp, Glycine max
cactacttctcactctccctctctaatagtaatagtaatatacataagtaacataaccaatggaagcgcgtgcaggagccaatcagcgtattgcaagaatctctgctcatcttcagcctccaaatttccaggaagggagtgatgttcttcttaagagtgctgagtgcagagcaaagggtggggcacctggattcaaagttgcaattttgggggctgctgggggaattggtcaacccctttctttgctgatgaagatga

SEQ ID NO: 115569 - DNA, 257 bp, Glycine max
atcagactagagagagtaagagtaagagaagagatggaaagagtagcatcagtatctcggccactgaaaatatacttcctcccattcttctcaccggggcacctaatccctctggtccagctggctcgcttggtggcggcacgaggccagcacgtgaccatcatcaccacccccgccaacgctcaactcttcgaccagaacatcgacaaggacaccgcctccggctaccacatccgcgtccacatcatcaagttccc

SEQ ID NO: 115570 - DNA, 242 bp, Glycine max
aagcaaatatggcatactctcaacttcaaaaggtggaaactagcctgcagatcaaggcttctgctgaacagttctatgatgttttttgcaacaagccacacactattgccaacatttcaccagaaaatattcagtcagttgaagttcataaaggtgaatggggcaaagagggatcaatcgtctcctggaactatttacatgagggaacatttgtgtagccagcaagtgcttgaaggcataga

SEQ ID NO: 115571 - DNA, 248 bp, Glycine max
ttttgaagaatggtgatgctggttttgttaagatgattccgaccaaacccatggtggttgaaactttctctgagtaccccccacttggtcgctttgctgtcagggatatgcgtcaaactgttgctgtgggagtcatcaagaacgtggagaagaaggatcctactggagccaaggtcaccaaggctgcccagaagaagaagtgaatcgtgcggtttggttcatcaggggatgtcgtttcttatggttac

SEQ ID NO: 115572 - DNA, 247 bp, Glycine max
gattgttgtgactcgttcttcttcgtcgttatcttcttcttttgttgtttgtgtgtttgtttattgtctcacctgaaaatgtcttcctgcggtggtaactgtggttgcggaagcgcctgcacgtgcggcaacggctgcggaggctgcaagatgtacccagacttgagctacaccgagtcaaccaccaccgagaccttggtcatgggagtggcaccagttaaggctcaattcgagagtgctgaaatgg

SEQ ID NO: 115573 - DNA, 251 bp, Glycine max
gttttgctagtggtacttctgctttttcaagtgcagtggcagctactgagacttcaagatcttcagaggagagggtctatgaagtggttctgaagcaagcagctttggtaaaagaacacaaaaggggtacaaaaatagctttggatttggacaaagatgttgaggctgatttcaacaatgtggatctgttgaatgcggcttatgatcggtgtggtgaagtttgtgctgagtatgccaagacattttactta

SEQ ID NO: 115574 - DNA, 246 bp, Glycine max
tgtcttgcaattgaagttgaagtcttgcccttctctcttcaactccaaacacaagacatcatcatccatggctgcctccgtctccactgtcggagctgtcaacagagctcttttgaacctgaatgggtctggacctggggtttcagctcccagttcatccttctttgggagcagcttgaagaaggttattggctcaagggtccccaacacaaagatttcctctggaagcttcaagattgttgctgt

SEQ ID NO: 115575 - DNA, 241 bp, Glycine max
gattgatgactttagtgttgaggatgcctcggaggttaaaaacattgagagggtcacgaatcatgatgtgaaagcggtggagtacttcttgaaacagaagtgtcaatccaatgctgaagtggctaaggtgcttgagtttttccactttgcttgcacatctgaggatataaataatcttgcccatgccttgatgctgaaggaaacaatgaattctgtcatgtttcctgtcatggataaaata

SEQ ID NO: 115576 - DNA, 246 bp, Glycine max
aattcgactcgtcatcttatcttaaaagttattaagagcttatgggtatctttctgcgcgcttttcccaattaagtagttcttccttttctcaaagcaaaaaaaatgttcatcgagagtttcaaggttgagagtcctaacgtgaagtacacagagactgagattcagtccgtgtacaactatgaaaccactgaacttgttcacgagaacaataatggcacttatcagtgggttgtcaagcccaaaa

SEQ ID NO: 115577 - DNA, 245 bp, Glycine max
ttcttacaaggctctactctactgcttcaccttctgctctagaaaattcagtggtgatacatggcttcggctactctctctgtagccaaaccagcccttcaggcaaatgggaaaggcttctctgaattctctggcctccgcagctcatcaggcttccttcccttttctagaaaatcttcagaggatttccattctgtcattgccttccagacctatgcagttggaagcagtggaggatacaagaa

SEQ ID NO: 115578 - DNA, 252 bp, Glycine max
gtcaaacttcaacatggagaatatatctctctcggaaaggttgaggcagcactatcatcatgtgattatgtggacaatataatggtttatgcagacccctttcacaattactgtgtggctctagttgttgcttcacaacagtccctggagaagtgggcccaacaagctggtatagattaccaagatttttctgatctgtgtaacatacctgatactgtcactgaggttctgcagtctatttccaaggttgca

SEQ ID NO: 115579 - DNA, 252 bp, Glycine max
gtgaagtatggtgctggaattggccctggtgtctatgacatccactccccaagaataccaccaactgaagaaattgctgacagaatcaacaagatgctggcagtgctcgagaagaacatcttgtgggtgaaccctgactgtgggctcaagacccgtaagtacactgaggtgaagccagccctcacaaacatggttgccgcagcaaaactcatccgcaacgaacttgccaagtgaatggtataagaaagtaga

SEQ ID NO: 115580 - DNA, 253 bp, Glycine max
gaactgagctacgtggacccagaaactgaccctgagagcatcacggagtgggaactggacttctgctccaggcccattctcgacgtcagagggaagaagatttgggagctcgttgtgtgcgacaagacgctgtcgttgcagtacaccaagtatttcccgaacaatgtcattaacagcattaccctcaaggatgctattgttgccgtcagtgaccagttgggtgtcccgttgcccagaaacattcgcttcttta

SEQ ID NO: 115581 - DNA, 239 bp, Glycine max
agatggagaagtatcagatctggagcaggagaatagcgttggcagcgtttgcgtttgctctgctgttccaatcggcctcagcagacgacgtcgttgtgctctctgaagataacttcgagaaggaagttggtcaggacagaggagctctcgttgagttctatgctccttggtgtggacactgcaaaaagcttgctccagaatatgaaaagcttggtagcagcttcaagaaagccaaatct

SEQ ID NO: 115582 - DNA, 244 bp, Glycine max
gttatctctctctctctctctctctctccctctctccttccccaagatgtcgagcgccgatcccgagcaccgagaagaggaggaggcacccgccgtcggcgacgacgaggacaccggagcacacgtcgctcccatcgtcaagctcgaggaggttgctgtcaccaccggcgaggaggacgaagatgcaatcctagatctcaaatcgaagctttaccggttcgacaaggatgggaaccagtggaag

SEQ ID NO: 115583 - DNA, 242 bp, Glycine max
ctagtatccgatcctctgtcctctcgaagctttcatcgttcaacatattctcaccatctcagtcatgggcctgctatcttgttttaggtctaccgtcctgagaaaatgttccaaaggaagctctggcatgtcaagattcctgtatacgaacaattttcaacgaaacttgatttcgtctggtggcaatgaatcgtattatgggtattttaacaggagatcatacacttcactttatatgggaa

SEQ ID NO: 115584 - DNA, 240 bp, Glycine max
aaaattatactccaaattatttgcactgttaatatcaaaataacggtgttcatatttataggtgttgagtcatttgacattgatctgaaggagcagaaggtgacagtgaaaggaaatgtggagccagatgaagttctgcaagccgtttccaaatctgggaagaagactgcattctgggtggatgaagcaccacaatctaaaaacaagcctttagaaagtgcacctgttgcctcagaaaac

SEQ ID NO: 115585 - DNA, 250 bp, Glycine max
gtaatagtaatatacataagtaacataaccaatggaagcgcgtgcaggagccaatcagcgtattgcaagaatctctgctcatcttcagcctccaaatttccaggaagggagtgatgttcttcttaagagtgctgagtgcagagcaaagggtggggcacctggattcaaagttgcaattttgggggctgctgggggaattggtcaacccctttctttgctgatgaagatgaacccattggtttcagttctt

SEQ ID NO: 115586 - DNA, 250 bp, Glycine max
aattgtttaaacctaattctcatttcttcatcgttcgattcttctcctcctaaagatgcagatcttcgtgaaaactttgaccggtaagaccatcacccttgaggtggagtcctccgacaccatcgataacgtgaaagctaagattcaagacaaggaagggatcccacctgaccagcagagacttatctttgcgggtaaacagcttgaggatggtcgaacccttgccgactacaacatcgcaaaaggaatc

SEQ ID NO: 115587 - DNA, 252 bp, Glycine max
catcatccatggctgcctccgtctccactgtcggagctgtcaacagagctcttttgaacctgaatgggtctggacctggggtttcagctcccagttcatccttctttgggagcagcttgaagaaggttattggctcaagggtccccaacacaaagatttcctctggaagcttcaagattgttgctgtagaagagaagaaagagattgaagagacccagcagaccgacaaggacagatggaagggtcttgcct

SEQ ID NO: 115588 - DNA, 237 bp, Glycine max
cctagatctatcatcatggtcatggagcttcacaaccacacccctttctctatttacttcattacctccattctctttattttcttcgtgttcttcaaattagttcaaagatcggattccaaaacctcctctacctgcaaattgcccccaggaccaaggacactacctctcatagggaacatacaccagattgttggctcactgccggttcattactacttaaaaaatttggcagat

SEQ ID NO: 115589 - DNA, 239 bp, Glycine max
ctatcatggccacggcaacagcagctgccacctcgtcctttatggggacgcgtctactggaggctcactccggagcggggcgagtgcacgcccgattcggcttcggcaagaaaaaggctcccgccccaaagaaagcctccaggggatcgggccgagacaccgacagacccctttggtatccgggcgccaaagcgcccgaatacctcgatgggagtcttgtcggagactacgggttcgat

SEQ ID NO: 115590 - DNA, 239 bp, Glycine max
cattctcatcctcctctgtctctctctctccaccattgccatggatacttacaagctccggccatccagcgccttcaattctcccttctggactacaaattctggtgctcctgtttggaacaacaactcctctttaaccgttggagctagaggtccaattctgcttgaggattatcatcttgtggagaagcttgcaaactttgacagggaacgtatcccagaacgtgttgtccatgcca

SEQ ID NO: 115591 - DNA, 241 bp, Glycine max
tgaaagttaagaagtagcaaagatgtttccattcgggcacaagggtcaaaagataaaggggactatggtggttatgcagaagaatgtgttggatatcaacagcatcaccagtgttgacgggatcgtcggcaccggcttagacttcttaggcagtgcactcgatacagttacttttttagcctcctccatctccatccaacttattagtgctaccaaggctgatggtgggaaaggaaaagtt

SEQ ID NO: 115592 - DNA, 240 bp, Glycine max
ctctttctctagtcctgttatttctcagcgcgtaaagcatggctttgttggtggagataaccacgactggtcgcgagtacaaggtcaaggacctttcccaggccgacttcggccgcctcgagatcgagctggccgaggttgagatgcccggcctcatggcctgtcggaccgagttcggcccctcccagcccttcaagggggcccgcatcaccggctcgctccacatgaccatccagaccg

SEQ ID NO: 115593 - DNA, 246 bp, Glycine max
gcgcagtttaaaggagagttttgatcaggcgatacagagagatgatgtcaaggcaattgttgttacaggtgcaaagggaaaattttctggaggttttgatatttctgcatttggtggtattcaagaggcaaaagagcgtccaaaacctggttggatatcagtagaaatcatcactgatactattgaagcggctaggaaaccatcagtcgctgccattgatggccttgccttgggtggaggattaga

SEQ ID NO: 115594 - DNA, 250 bp, Glycine max
gttgcattatcacaaacacctcgtccctcacaatgcagctagcaatggcggccaacgctgtcgtttcaccgtcgccgttccgacctcagccctttctccggtcatccttctccggcgtctccgtcaagctcactccccaatccataacgctttcacgctccaagcccctcaccgtcttcgccgccaccaagaaggccgtcgccgtcctcaaggggacctccgccgtcgaaggcgtcgccactctcatcca

SEQ ID NO: 115595 - DNA, 251 bp, Glycine max
attttaaggtggagagtttacacgtgttgccgttccactcgtcggagcgctggcagctacacttcaacgaggtcaaagagacctctaagctcgttgtgatagatttcacggcgtcgtggtgcggcccttgcagattcatagctccggtatttaacgagatggccaagaagtttagcaacgctgagtttgtcaagatcgatgtcgacgaattacctgatgtggctaaggattttaaggtggaggcgatgccg

SEQ ID NO: 115596 - DNA, 251 bp, Glycine max
cacaacataaattaaataaataaataaaattaaactaagctaaattcctttctctctctttctttctcttcgagggtttgggtttctcttcctccctggaagaaaaagaagagtcaccgctacgacgccgttcgtgcttttttgaggtgccacagtcatgtttgggcgtggtggaccaaggaggagtgacaactccaaatattatgatattctcggggtttccaaaaatgccagtgaagatgaaatcaaga

SEQ ID NO: 115597 - DNA, 237 bp, Glycine max
caggatattgtgaatgctatttgtgacgatgatgacatcaaagccatatcttttgttggttcaaatgttgctggaatgcacatatatgctagagctgcagctaaagggaaacgtgttcaggctaatatgggggccaaaaatcatgcagttgtaatgcctgatgctagtgttgatgctactgtaaatgctttagttgctgcaggttttggtgctgctggacaaaggtgcatggctctc

SEQ ID NO: 115598 - DNA, 241 bp, Glycine max
ctgtttcccgccatatatccaataagctttaaccatgtctgcctttgttggaaagtacgcagatgagcttatcaagaatgccaagtacatagccacacctgggaagggcatcttggcagcagatgagagcactggcaccattgggaagcgcctatcgagcattaacgttgagaacattgaggccaaccgccaagctcttcgcgagcttctcttcaccgctccagatgccctccaatacctc

SEQ ID NO: 115599 - DNA, 240 bp, Glycine max
cgttgccattctcatcctcctctgtctctctctctccaccattgccatggatccttacaagctccggccatccagcgccttcaattctcccttctggactacaaattctggtgctcctgtttggaacaacaactcctctttaaccgttggagctagaggtccaattctgcttgaggattatcatcttgtggagaagcttgcaaactttgacagggaacgtatcccagaacgtgttgtcca

SEQ ID NO: 115600 - DNA, 242 bp, Glycine max
ggaatcaacgccatcatgatgagtgctggagagttggcaagtggaaatgcaggagagccagcaaaactgatcaggcagagataccgtgaagctgcagacatgatcaagaagggaaagatgtgcgctctcttcatcaacgatcttgatgcaggagctggtcgtcttggtggaaccacacaatacactgtgaacaaccagatggtgaatgccactctcatgaacattgctgataaccccaccaa

SEQ ID NO: 115601 - DNA, 247 bp, Glycine max
  unsure (1)..(247): unsure at all n locations
gttagaagaggttgcataactgaacaaacaaagcaaccctatgtcgaaggtggtttgtgtcaccggagccagtggcgccattggatcatnggtggccctcctcctcctccagcgtggttatacggtccatgccaccgtccaagacatcaaggatgaaaatgagacgaaacatttggaggaaatggaaggagcaaagagtcgtctccatttttttgaaatggatcttcttgacatcgactccattgcc

SEQ ID NO: 115602 - DNA, 246 bp, Glycine max
gcagaatatgagaagaaatacagtgaggaagctgcagagctgaaggctattattactggtgaattaccagctggttgggagaaagcacttccgacatacactccagaaagccctgctgatgctacaagaaatctgtctcagcaaaatctaaatgcccttgttaaggttcttcctggtctacttggtggcagtgcagatcttgcctcttccaacatgaccttgttgaaatcatacggagatttccaa

SEQ ID NO: 115603 - DNA, 248 bp, Glycine max
actacttctcactctccctctctaatagtaatagtaatatacataagtaacataaccaatggaagcgcgtgcaggagccaatcagcgtattgcaagaatctctgctcatcttcagcctccaaatttccaggaagggagtgatgttcttcttaagagtgctgagtgcagagcaaagggtggggcacctggattcaaagttgcaattttgggggctgctgggggaattggtcaacccctttctttgctga

SEQ ID NO: 115604 - DNA, 249 bp, Glycine max
gcagaaagcaagctcatcctagagttttaaaaatggcagcagcctcctccatggctctctcttccccatccttggctggcaaggccgtgaagctgggcccatcagcccccgaagtcgggagggtcagcatgaggaagaccgtcaccaagcaggcctcctccggaagcccatggtacggcccagaccgcgtcaagtacttgggcccattctctggcgagcccccgtcctacctcactggcgagttcccag

SEQ ID NO: 115605 - DNA, 249 bp, Glycine max
gtgagatacacagtagttaggtagcaagcataagtgtctaaccttagtaacatatctgctacatatcgtgtgcattttggaattgtgccactaaaattctattcatctatggctgcctcatcttatgctatgcaatcaatccttgcaaaccctatgatccgcatttccagcgggtctagggagaaccattttggtgttcctgcttatcacatgagaaggaatgttggcctgagagttaggtccatggct

SEQ ID NO: 115606 - DNA, 234 bp, Glycine max
aaattagttcattctctttgcgcagttccctacctctcctttcaagatgcagatcttcgtcaagaccctcaccggaaagaccatcacccttgaggtggaaagctctgacaccatcgacaacgtcaaggccaagatccaggacaaggaaggaattcccccggatcagcaacgtctcatcttcgccggaaagcagctcgaggacggccgtaccctcgccgactacaacatccagaa

SEQ ID NO: 115607 - DNA, 237 bp, Glycine max
gcaattgaagttgaagtcttgcccttctctcttcaactccaaacacaagacatcatcatccatggctgcatccgtctccactgtcggagctgtcaacagagctcttttgaacctgaatgggtctggacctggggtttcagctcccagttcatccttctttgggagcagcttgaagaaggttattggctcaagggtccccaacacaaagatttcctctggaagcttcaagattgttgc

SEQ ID NO: 115608 - DNA, 236 bp, Glycine max
atcagctttgaacgccgaagaaggttcatccaatccccgaagcccttcaccgcattgcaaccatgtcgatgagaaaggtcagagagccaaaggaagaaaacgtgactctgggcccagctgttagagatggtgaacatgtctttggcgtcgctcgcatctttgcctccttcaatgataccttcattcatgtcactgatttgtctgggagggaaacgttgtccgcatcactggtggaa

SEQ ID NO: 115609 - DNA, 237 bp, Glycine max
acctaggcacccagagacgaggaagggcgtagtaagcgacgaaatgcttcggggagttgaaaataagcgtagatccggggattcccgatataggtcaacctttcgaactgctgctgaatccacgggcaggcaagagacaacctggtgaactgaaacatcttagtagccagaggaaaagaaagcaaaagcgattcccgtagtagcggcgagcgaaatgggagcagcctaaaccgtgaa

SEQ ID NO: 115610 - DNA, 239 bp, Glycine max
ccaaatttaaaaccccctccggagcgaattctcggcggctggttccgaaagccacggcggctcccggggccaagaagacagaaaagccgcacgagagagtccagcgagtccacagcgtggaggagttcgagtcggcgctcgaatccgccaaagacaggcttgtggtggtggaatacgctgccagcgacagcgaggagagcagccagatataccctttcatggtggagctgagccgcagc

SEQ ID NO: 115611 - DNA, 238 bp, Glycine max
ggcttcgaaacgcatcctgaaggagctcaaggatttgcagaaggatcctcctacgtcatgcagcgcaggtcctgtggctgaagacatgtttcactggcaagccacaatcatgggacctgctgatagcccatatgcaggtggtgttttcttagtttcaattcattttcctcctgactatcccttcaagccaccaaaggttgcttttcggactaaggtgttccacccaaacatcaacagc

SEQ ID NO: 115612 - DNA, 238 bp, Glycine max
cactttcttttttcccgcagtcatgggcaaggtcaagatcggaatcaacggatttggaagaattggccgtttggtggccagggtggctctgcagagagacgatgttgaactcgttgccgttaacgatcctttcattaccatcgattacatgacatacatgtttaaatacgacagtgttcacgggcactggaagcatcacgatgtcaccgttaaggatgagaagacccttctcttcggt

SEQ ID NO: 115613 - DNA, 245 bp, Glycine max
aaacagaaggctaagagagaatatggagagtagtgagggaattaggtgtaaggtatgcgtgaccggcggtgctagttacataggctcttgccttgtcaagaagcttctgcaaaagggctacaccgtccactccaccctcagaaactttaaggacgagtcaaagataggccttctgagagggttgcctcatgctaatgatgagagactggtgttatttgaagcagacatatataaaccagacgagt

SEQ ID NO: 115614 - DNA, 244 bp, Glycine max
atcagctttgaacgccgaagaaggttcatccaatccccgaagcccttcaccgcattgcaaccatgtcgaggagaaaggtcagagagccaaaggaagaaaacgtgactctgggcccagctgttagagatggtgaacatgtctttggcgtcgctcgcatctttgcctccttcaatgataccttcattcatgtcactgatttgtctgggagggaaacgcttgtccgcatcactggtggaatgaaggt

SEQ ID NO: 115615 - DNA, 246 bp, Glycine max
ctcttatcttcctaatactatcagaatttttagcatactgccttcaacgaagagatttgatcctagaagggagtgcaatttgcggaaatattcttatctcctccctgctgatataataggaatccagagtcattttagccaggatgaaattgattttcatattttggagttcaacagtatacttaatgtttttgagggagagcatcctttccataattatactgttcggtctaagtacaggaaaaa

SEQ ID NO: 115616 - DNA, 236 bp, Glycine max
ctttttgccattcccatccaaggggcagacaggcagggacgggtgagtacctcctggccacggagacgtcttcccatcattagtgaatagtggaaagcttgatgtgctattatcacagggtaaggagtatgtgtttgttgccaattcagacaacctgggtgctgtagttgacttgaaaatcttaaatcatttgattgagcacaagaatgaatactgtatggaggtcactcccaaga

SEQ ID NO: 115617 - DNA, 247 bp, Glycine max
gaaaaacaagtagttgagaactaagaagaaggaaatggcttcctcaatgatctcctccccagctgttaccaccgtcaaccgtgccggtgccggcatggttgctccattcaccggcctcaaatccatggctggcttccccacgaggaagaccaacaatgacattacctccattgctagcaacggtggaagagtacaatgcatgcaggtgtggccaccacttggcaagaagaagtacgagactctttcc

SEQ ID NO: 115618 - DNA, 246 bp, Glycine max
tgcaattgaagttaaaagccttagccttccctacaactccaaacaccaagacatcatcatccatggctgcctccgtctccactgtcggagctgtcaacagagctcttttgaacctgaatggttctggagctggagcttcagctcccagttcagccttctttgggaccagcttgaagaaggttattgcctcaagggtccccaacagcaaggtttccggtggaagcttcaagattgttgctgtagaag

SEQ ID NO: 115619 - DNA, 247 bp, Glycine max
attttatacaggcagaaagaacaattcagtgatggagttggctatagttggattgatggccttaaggcccatgctgcaaaacatgtattgaatccaacctttttactacaattcaatgatggggtttgctattgtcatgaaatttattttgcttataattggttcttgtcaatttttccataggtgactgaaaaaatgatgcttaatgctggtaacatttacccccacaacaccccaaaaaccaagg

SEQ ID NO: 115620 - DNA, 235 bp, Glycine max
ggctgcctcactacaagctgcagctaccttcatgcaacccaccaaggttggcatagcctctcgcaacctcaaatctacacaatgcatttctaaggcttttggcttggaacctgctgcagctaaactcacttgctcccttcagcctgatctcaaagaatttgctcaaaaatgtgtcgacgctaccaaaattgcaggattcgcccttgccacctctgctctcgttgtttctggagca

SEQ ID NO: 115621 - DNA, 234 bp, Glycine max
atggatattgtgccccagactatgcaatgacgggtcaattgacgttcaagtctgatatttatagctttggagttgttcttttggagatcatcacaggcaggaaggcgatcgacaatacaaagcctgctaaagaacaaaatctagtttcatgggcaaagtctttattcaaaaaccgtaaaagattctgtgagatggttgacccattgcttgaaggtcagtatccaatgagaggtt

SEQ ID NO: 115622 - DNA, 240 bp, Glycine max
gtgttcctgtttttgttcttcgatggcggcaacctcaacatcactggcttctcaactctacattggcctgcgccgcccctgcctcaagctcgattctttcaattctcaatctttctctctcttcgaccctaatcttcgcctatccctctctccacccaaaccctcacgcgccgtcatcgccatggccggcaccgggaagttctttgttggtggcaactggaagtgtaacggaacaaaaga

SEQ ID NO: 115623 - DNA, 257 bp, Glycine max
gaaccactttgttcaagagttcaagagaaagaacaagaaggacattagtggaaaccccagagcacttagaaggttgaggactgcttgtgagagggccaagagaacactttcatcgactgctcagaccaccattgaaattgattctctatacgagggaattgatttctactccactgttactcgtgccagatttgaggagctcaacatggatctcttcaggaaatgtatggagccggtggagaaatgtttgagggatg

SEQ ID NO: 115624 - DNA, 240 bp, Glycine max
gtggttatggcggtggcagagaccgtggttactctcgtggtggtgatggtggtgatggaggctggagaaactaaggcttgatgtcgtcaattagggtttatgattatgccccgtatttttagttgttgtggtttgagttcgagtttctttatggtttcgtgttaccgtggttcttgtttttgaccaatatatctggttgtttatagttgatttagtgaaatgataatcagtaattggagt

SEQ ID NO: 115625 - DNA, 248 bp, Glycine max
ggggaggccgaagggtgtcactcccaaatacagcttggcacctcttgtgccccggctttctgcgctcattggtatccaggttgtcaaggctgaagacagtattggtccagaagtagaaaagttggtggcttctcttccagatggaggtgttcttcttctagaaaatgtgaggttttacaaggaggaagaaaagaatgatcccgagcatgcaaaaaagcttgcctctctggcagatctgtttgtgaatg

SEQ ID NO: 115626 - DNA, 246 bp, Glycine max
aatttaagctgagggcacaacagtcagtggtcctgctccagagtggagaagagaagtatcacaatgcatggcagcaaatttgtgatattagtaaggctgaatttgaaaaggtctatcaacgtcttggagttctattggaagcaaggggagagagctactataatgatttaatccctccaactttggagagattggataaattaggactgattgaagaagatgatggtgctcgtgtgatatttgttg

SEQ ID NO: 115627 - DNA, 246 bp, Glycine max
gaagcatctaagtgagatacacagtagttaggtagcaagcataagtgtctaaccttagaaacatatctgctacatatcgtgtgcattttggaattgtgccactaaaattctattcatctatggctgcctcatcttatgctatgcaatcaatccttgcaaaccctatgatccgcatttccagcgggtctagggagaaccattttggtgttcctgcttatcacatgagaaggaatgttggcctgagag

SEQ ID NO: 115628 - DNA, 246 bp, Glycine max
catgaatttcattcacagggatgaggaggttaattacttcccttcaaggtatgatcctgttcgtcatgcagaaacgttccccatacctcctgctatctgcagtggaaggcgtgaaaagtgtggaattgagaaggagaacaactttaagcagcccggagagagataccgatcttgggcacctgacaggcaagatagatttaatcgccgatgggttgatgctttatctgacccacgggtcacccatga

SEQ ID NO: 115629 - DNA, 250 bp, Glycine max
aaacactcataacacaaagcacaaagcaaagctcatccttgagttaaaaaatggcagcagcttcttccatggctctctcatccccatccttggctggcaaggccgtgaagctgggcccatcagccccagaagtgggaagggtgagcatgaggaagaccgtcaccaagcaggtctcctcaggaagcccatggtacggcccagaccgagtcaagtacttgggcccattctctggcgagcccccgtcctacct

SEQ ID NO: 115630 - DNA, 250 bp, Glycine max
ctcgagccgtttatcttttctctatagctccgtccaaacatgactctccgcaaccaccaagagctcttggttgctcttgcaattctatattttcttgccacctcactcccttcagtttcagctcatggcccatatgcatgggatggggaggccacatataaattcactacttaccaccctggccaaaactacaaaggtttatccaatgtcaaaaactacttccaccatctcggctacatccccaatgcac

SEQ ID NO: 115631 - DNA, 253 bp, Glycine max
ggggaagaggaaaagaggattagagggtcgccacgtttagcaataaccaaaccctctctactcttttttcttctccttctcttcgctagggttttagcttcttcctcttcacttcgttctttttcgcctctacaatgagcaacgacaaggacacattcaacgtcgccgatctcacttctgctctcaacgaggacaatagagcagaccttgtcaatgctcttaagagcaagatacagagtttggctggacaaca

SEQ ID NO: 115632 - DNA, 246 bp, Glycine max
atttacgcttctcttctctgcagcaactatgcctaaccctaaggtcttcttcgacatgaccatcggcggtcaatctgctggccgcatcgtgatggagctctacgccgacgtcactccccgcaccgccgagaacttccgcgcgctttgcaccggcgagaagggcgtagggcggagcggcaagcccctccactacaagggctcgtccttccaccgcgtgatcccgagtttcatgtgtcagggtggcga

SEQ ID NO: 115633 - DNA, 245 bp, Glycine max
gtagttgagaactaagaagaaggaaatggcttcctcaatgatctcctccccagctgttaccaccgtcaaccgtgccggtgccggcatggttgctccattcaccggcctcaaatccatggctggcttccccacgaggaagaccaacaatgacattacctccattgctagcaacggtggaagagtacaatgcatgccggtgtggccaccaaccggcaagaagaagttcgagactctttcctacttgc

SEQ ID NO: 115634 - DNA, 245 bp, Glycine max
cttgctgttggtactgttcatcagcatctaatccagaatggcctgcgaatgtcagcttcaattgtagcagatactgctcagtgctttagcactcaccagtttgcctgtttaataggatatggtgcaagtgctgtgtgtccgtatttggcattggagacatgtcggcaatggcgtttgagtaataaaactgtaaatctgatgaggaatggaaagatgcctactgtatcgattgaacaggcacagaa

SEQ ID NO: 115635 - DNA, 246 bp, Glycine max
atccaacggaccaggagctggtgttgcactatctctgccgtaaatgcgcgtcgcagcctatcgccgttcccatcatcgccgaaatcgacctctacaaatacgacccctgggacctacccggtaacattatcttcaacttctgatatattcttattcttaattcttaattcattcattttttgaattgttattgtacaggattggcttcctacggagagaaagagtggtacttcttttcaccacggg

SEQ ID NO: 115636 - DNA, 243 bp, Glycine max
aactacaaaggttgctgtaggagataagatattgaagtagtgctaagtgcctaacacctgcagtgaacaatggcctctgcatcagcatctcttctcaagtcttcacttgttcttgacaagtctgagtgggtgaagggacaaacacttcgccaaccttctgctgcatcagttgtgagatgcaaccccaccaccccatcaggcctcaccatcagagctggttcctatgctgatgagctcgttaag

SEQ ID NO: 115637 - DNA, 243 bp, Glycine max
gggaagaccgcattggtgtttgcaccggaattttccgcactgatggtattcctgaacaggacattgtcaagcttgttgacaccttccctggccaatccattgatttctttggtgcactgagggccagagtatatgatgatgaagtgaggaagtggatttctggtgttggtgttgacagtgttgggaagaagcttgtgaactcaaaagatggacctccaacctttgagcagcccaagatgactc

SEQ ID NO: 115638 - DNA, 245 bp, Glycine max
ccaaaccaacacctttcaaaatgcaaacatccttaacctttgctgcccccaacgttgtgcctttggcacaaacaaagagtttctcccatgttgccatcttccctaccaatttgaaagccccacgctcttcacctcgttactctccgatcagggttgcaatcgtggagcctgacacttcaactgtggactacaactctgcgttctcagtgtttccagcggaagcatgcgaaactgttggaggggaa

SEQ ID NO: 115639 - DNA, 243 bp, Glycine max
gcatcttcatttccgtcaactcccagctggaattaatgccattgtagccattgcctgttactctggttataatcaagaagattccgtcatcatgaaccaatcgtcaatagaccgtggattctttcggtctctgtttttccgttcatatagagatgaagagaagaagatgggaaccctggtcaaagaagattttggccgtcctgatagagctaacaccatgggaatgagacatggttcttatga

SEQ ID NO: 115640 - DNA, 251 bp, Glycine max
ggaagctgctgagatgaacaagaggtctttcaagtatgcctgggtgctggacaaacttaaggctgagcgtgaaagaggaatcaccattgatattgctttgtggaagtttgaaacaacaaagtattattgcacagttattgatgcgcctggacatagggatttcattaagaatatgattactgggacatcccaagctgactgtgctgttcttatcattgattcgaccactggtggttttgaagctggtattt

SEQ ID NO: 115641 - DNA, 248 bp, Glycine max
cggggataagattaaagattcaacaatggcctctgcttctgctactcttctcaagtcatctcctgttcttgacaagtgcgagtgggtcaaaggccagacccttcgccaacctctcgtgagatgtaacccttcctcagcatcagctctcaccatcaaagctgcttcctatgctgacgagctcgtcaaaaccgccaaaacagtggcctcaccggggcgtggtattttggcgatggatgagtcaaatgcaa

SEQ ID NO: 115642 - DNA, 248 bp, Glycine max
acaatacttcgtgcccgtgatccacctcgacccatttttgatcacattgaatacaagcccccaccagccatgaagactcaacaagctactaatgcatcagcagctgtctctattttcagactcacgcgtgaccagctcaacacactgaaagccaaatccaaagaagatggcaacacaatcagctatagttcttatgagatgttggcgggtcacgtgtggcgaagtgtaagcaaagcaagagcacttcc

SEQ ID NO: 115643 - DNA, 245 bp, Glycine max
cttgcaattgaagttgaagtcttgcccttctctcttcaactccaaacacaagacatcatcatccatggctgcctccgtctccactgtcggagctgtcaacagagctcttttgcacctgaatgggtctggacctggggtttcagctcccagttcatccttctttgggagcagcttgaagaaggttattggctcaagggtccccaacacaaagatttcctctggaagcttcaagattgttgctgtag

SEQ ID NO: 115644 - DNA, 244 bp, Glycine max
aacaaagaaaaaaaaaaacccttagccaacacaaccatcatggccacctctgctattcagcaatcagcattcactggtcaaactgctctgaagcagctcaatgagttcgtccgcaagaccggtggcgccggcaaaggtcgcactaacatgcgccgcaccgtcaagagtgctcctcagagcatttggtatggccctgaccgtcccaagtacttgggtccattctcggagcagattccatcatacc

SEQ ID NO: 115645 - DNA, 248 bp, Glycine max
aaaaccatcaaattttggaaggttcaagaaaagaaggtcaagaaagtttctgacatgaatgttgatcctaaagcaatgggaaatggctctattgctagttcaagtaattccagtagctccaaatcatatcttgcaaatggagtatctccagatggaccatacaattatttaaacaacgatttctcatttccaccagaaggcgtaccttctctaagattaccattggtaaccagccatgagaccagttt

SEQ ID NO: 115646 - DNA, 247 bp, Glycine max
ggatgcatttctatttctaactaattattgtgcttattattattgttgagaaagaaaagaatggcaaagttaataaaattctttgagttgaacacaggggccaagattccttctgttgggttaggcacttggcaagctgagcctggtgttgtagccaaagctgtcaccacagccattctggttggatacaggcatattgattgtgctcaagcgtataacaatcaagcagagattggttctgctctta

SEQ ID NO: 115647 - DNA, 243 bp, Glycine max
tggcgcactaccctgaggcttctcttctcttctcttctctgtcgtgagtcaccatggtgagggttagtgtgctgaacgatgctctgaagagcatgtacaatgctgagaaaaggggaaagcgccaagtcatgattaggccatcctccaaagtcattatcaaattccttttggtgatgcaaaagcacggatacatcggagagtttgagtatgttgatgaccacagggctggtaaaatcgtggttg

SEQ ID NO: 115648 - DNA, 241 bp, Glycine max
aaaaaaaaaaacccttagccaacacaaccatcatggccacctctgctattcagcaatcagcattcactggtcaaactgctctgaagcagctcaatgagttcgtccgcaagaccggtggcgccggcaaaggtcgcactaacatgcgccgcaccgtcaagagtgctcctcagagcatttggtatggccctgaccgtcccaagtacttgggtccattctcggagcagattccatcatacctgac

SEQ ID NO: 115649 - DNA, 240 bp, Glycine max
catggccaccgtcacttctgcagccgttgctattccctcattcactggcctcaaggcaagcgcaggcaaagtgagtgccgcagttaaagtctcagctccccaagccacaaggttgggcatcaaggcttcgctgaaagacgttggagtcgctgttgtggccactgccgcgagtgcagtgctggctagcaacgccatggccattgaagtgttgctgggtggtgatgacgggtctctggcttt

SEQ ID NO: 115650 - DNA, 240 bp, Glycine max
tggatcgttatgagaatgattggagtgttgtgaaacgagggtgggatgctcaagttcttggtgaagccccttataagtttacaaatgctcttgaagctgtcaagaagctgagggcagaaccaaaggccaatgaccaatatttgcctccttttgttattgttgacgagagtgggaaacctgttggtccgatagttgatggtgatgctgttgttacattcaacttccgagctgatcgtatga

SEQ ID NO: 115651 - DNA, 242 bp, Glycine max
ccgctttcatcttctcatctcttctcttttccctgctaatcatggcaaccttgtcaactgtgaaggtttccccccattgcatgtttcaaacagcaagcaaaaatccatccactgttgccaccacaatgaagtgcccttcttcttttgggtctgtgaagagcatttccagatcttttggcttgaagtcatcctcttcatttagagtcactgccatggcttcttacaaggttaagctgattggc

SEQ ID NO: 115652 - DNA, 245 bp, Glycine max
catggccaccgtcacttctgcagccgttgctattccctcattcactggcctcaaggcaagcgcaggcaaagtgagtgccgcagttaaagtctcagctccccaagccacaaggttgggcatcaaggcttcgctgaaagacgttggagtcgctgttgtggccactgccgcgagtgcagtgctggctagcaacgccatggccattgaagtgttgctgggtggtgatgacgggtctctggctttcgttc

SEQ ID NO: 115653 - DNA, 246 bp, Glycine max
gcatcttctgtggctcaagtggtgaataccttacaagaaagaggagcaatggaatacactattgtagtagctgaaacagcggattctccagctacattacaatacctcgccccttatacaggagcagctctggctgaatattttatgtaccgtgaacgtcacactttaatcatttatgacgatctctccaaacaagcacaggcttatcgccaaatgtctcttctattacgaagaccacctggtcgc

SEQ ID NO: 115654 - DNA, 246 bp, Glycine max
cccaaattcattttaatcctaattctgcacttcttgatcattcgatttttctcctcaagatgcagatattcgtaaaaactttgaccggcaagaccatcacccttgaggtggaatcctccgacaccattgacaacgtaaaagctaagattcaagacaaggaagggatcccacctgaccagcagagacttatctttgcgggtaaacaacttgaggatggtcgcacccgtgccgattacaacatccaaa

SEQ ID NO: 115655 - DNA, 241 bp, Glycine max
cgattgcaagcaaaaatattgaatgtggtagatgtttcttatggtggggaaaatggattcaatcaagctattgagctatctgcagagattttatcaaatgtgaagttcattcaagagaaacgcttgatagggaaatattttgaagagatcagccaggacactgggaaatatgtctttggggttgaggacactttgaaggcactggagatgggtgctgtggaaacactcattgtatgggaaa

SEQ ID NO: 115656 - DNA, 240 bp, Glycine max
cattgacaaaaaggtgtatgacacttggaggaaaatgtggctttctaaaggagaggagcatgaggcagggaagaaggagtttatctctatctttaagcagctagaagagacactgagtgacaaagcttattatggaagtgacacctttgggttccttgatattggtttgatccctttctacagttggttttatacctttgagacatatggtaacttcaaaatggaagaagagtgtcctaa

SEQ ID NO: 115657 - DNA, 240 bp, Glycine max
gacggattctccaacactctcaccaggcgtgggtacgcagtagcgacacaaagcgcaacaagaggaggagcagcctccatcagcggcaagtcaggggaagacaaggtactaggaggaggtgctgaaaaggtttcgtgggtcccagaccctgtcactggttactacaaaccggagaacatcaaagagattgatgttgctgagctgagagccacggttttgggcaaaaaattcaaccactag

SEQ ID NO: 115658 - DNA, 238 bp, Glycine max
catttgcatgctttctgactcctggaatgaacattcgccttgttggagaggctaatgattatgttgggaagggcattgctggaggtgagttggttatcactccagtcgacaagaccgggtttgaacctgaggatgcagctattgtagggaacacttgcttgtatggtgcaactggtggacaggtcttcgttagagggagagctggtgaaagatttgctgtcagaaactcacttgctga

SEQ ID NO: 115659 - DNA, 238 bp, Glycine max
gcccagcatggccaccgcaacagcagcagccacctcgtccttcatggggacgcgcctcctggaggcccactccggggcggggcgggtgcaggcccggttcgggtttggcaagaagaaagccgccgccccgaagaaagtttccagggggtcgggctctagctccgataggcccctgtggtatccgggcgccaaggcgcccgagtacctggatgggagccttgtcggagactacggattc

SEQ ID NO: 115660 - DNA, 237 bp, Glycine max
gaaatcgagctctttatttggagaatctctaagagtggcatccaaatcaacactaaaggtttcaacgacaaagaatacttcactcgtgaccagatgtgaaattggtgacagtctggaagaattcctcacaaaagcaacaccagataaggggttgatcaggttgttggtgtccatgggagaagcattaagaacaatttccttcaaagtgaagacggcttcttgtggtggaacacaatg

SEQ ID NO: 115661 - DNA, 240 bp, Glycine max
agaagagcatcactgaactaacaaagcaaccctatgtcgaaggtggtttgtgtcaccggagccagcggcgccatcggatcatgggtggtcctactcctcctccagcgtggttacaccgtccatgccaccgtccaagatatcaaggatgaaaatgagacgaaacatttggaggaaatggaaggagcaaagagtcatctccatttttttgaaatggatcttcttgacatcgactccattgcc

SEQ ID NO: 115662 - DNA, 241 bp, Glycine max
gagaaatggcgatggcaatggcgcttcgcaggctttcatcttcaattgataagcctcttcgccctctcttcaatgcgggttccctctactacaagtcgtctttgcctgatgaagctgtttacgacaaggagcgacccggagttacatggccgaagcagttgaatgcttcacttgaggtcgttgatcctgagattgctgatattattgagcttgagaaagctaggcaatggaaggggctgga

SEQ ID NO: 115663 - DNA, 246 bp, Glycine max
ggaaggggctagaattgataccgtcagagaatttcacctctgtgtctgtgatgcaagcggttggatcggttatgaccaacaaatacagtgaggggtaccctggtgcaagatattatggtggaaatgagtatattgacatggctgaaacactgtgccaaaagcgtgccctagaagcttttagattggatcccgctaaatggggagtgaacgtgcagcctctgtcagggtctcctgcaaatttccacg

SEQ ID NO: 115664 - DNA, 245 bp, Glycine max
acaagtgtttctgtaaccatggcatccaccactctatcccctacaaccccttctcagctatgctcaggaaagagtgggattttcagtccctcacaggcacttcttgtgaagccagtgaagaggcagatgatggggaagagcaagggaatgagaattgcatgccaagccaccagcattcctgctgatagagtccctgacatgggcaaaagacagctcatgaatctgcttcttcttggtgccatttc

SEQ ID NO: 115665 - DNA, 250 bp, Glycine max
cttctttgtgcatgctcctcgtttccatctaaaggggagaggaggtgagtgagaaaaagtgagtgaggtttctagcttctactgttgagtaaacatgactatggaagagggcagggtagagagcgaggactacacacaagatggaactgtgaacattaaagggaaacctattcttagatccaaaagtggtggttggaaagcttgctcctttgttgttgtatatgaggtattcgaaagaatggcttattat

SEQ ID NO: 115666 - DNA, 250 bp, Glycine max
gctggccatatagttttgaattccatcttcgggtgtctcttacaacagatggggacctgactttgatatctagagtcaggaatataaatggcaagccatttagtttctcatttgcatatcacacatacttattggtctctgacataagtgagataaggattgaaggtctggagacactggattacctagacaaccttttccaaaaggaacggtttacagaacaaggagatgcaataacatttgaatctga

SEQ ID NO: 115667 - DNA, 245 bp, Glycine max
catgaatttcattcacagggatgaggaggttaattacttcccttcaaggtatgctcctgttcgtcatgcagaaacgttccccatacctcctgctatctgcagtggaaggcgtgaaaagtgtggaattgagaaggagaacaactttaagcagcccggagagagataccgatcttgggcacctgacaggcaagatagatttaatcgccgatgggttgatgctttatctgacccacgggtcacccatg

SEQ ID NO: 115668 - DNA, 244 bp, Glycine max
catttctccatttccattttctctctcacttttcaagaatcgtaagctatgggaaagtcttacccaactgtgagtgctgattaccagaaggccgttgagaaggcgaagaagaagctcagaggcttcatcgctgagaagagatgcgctcctctaatgctccgtttggcatggcactctgctggaacctttgacaagggcacgaagaccggtggacccttcggaaccatcaagcaccctgccgaac

SEQ ID NO: 115669 - DNA, 250 bp, Glycine max
gttttgtgtgtgtgcgagaaatggcgatggcaatggcgcttcgcaggctttcatcttcaattgataagcctcttcgccctctcttcaatgcgggttccctctactacaagtcgtctttgcctgatgaagctgtttacgacaaggagcgacccggagttacatggccgaagcagttgaatgcttcacttgaggtcgttgatcctgagattgctgatattattgagcttgagtaagctaggcaatggaaggg

SEQ ID NO: 115670 - DNA, 251 bp, Glycine max
gcaagaagaaagcagagcctctactacatcatcacattcacatttcagtaccttctctttctcccagtctctcacacacaacaattgaagaagaaaatggttgacaatgattcgctctcggaattcctcgcatctgcggtcgacgcggctcagaaagctggcgagattattcgaaaaggcttctaccagaccaaaaatgtggaacacaaaggacaggttgatttggtcacagaaactgataaagcatgtga

SEQ ID NO: 115671 - DNA, 161 bp, Glycine max
atcatagttgagtacattgatgaggcttggactaatgttccctccatccttccacaaaatgcttatgatcgtgctaatgctcgattttggtttgcctacattgatgagaagtggtttacgtccttgagaagtgttctagtggctgaagatgatgaggcaaa

SEQ ID NO: 115672 - DNA, 246 bp, Glycine max
caaaatttcccaggaaaagaaggtgctggaagtgcatgttgagaagggtatgcagcagggtcagaagattgtttttgaaggacaagctgatgaagctcctgacacaatcacaggagatattgtttttgtattgcaagtaaaggatcacccaaggttcagaagggaacaagatgacctctttattgatcaaaatctcagcttaactgaggcactctgtggctttcagtttgccgtcaaacatcttga

SEQ ID NO: 115673 - DNA, 157 bp, Glycine max
tttcactggaagaccactagtggtataaagtgtctattggaggaagaggccattaaggtgggaggagccaaccacagccatgccactcaagacctccatgattcaattgctgctggtaactatcctgagtggaaactgtttgttcagacaatagatc

SEQ ID NO: 115674 - DNA, 241 bp, Glycine max
atcagctttgaacgccgaagaaggttcatccaatccccgaagcccttcaccgcattgcaaccatgtcgaggagaaaggtcagagagccaaaggaagaaaacgtgactctgggcccagctgttagagatggtgaacatgtctttggcgtcgctcgcatctttgcctccttcaatgataccttcattcatgtcactgatttgtctgggagggaaacgcttgtccgcatcactggtggaatgaa

SEQ ID NO: 115675 - DNA, 246 bp, Glycine max
gccctctgccgtgggaggagtttgtaacatggctgctctaccaacggcggagttagtgacgcaaatgcaacacatgtagcaagttgtgatgtgagggtgttgcatccagtgttcaaggtttacggtggggccactgcgttctccggccccgttgtcaccgtgaaggtgtttgaagacaacgtgttggtgagggagcttcttgagacgaaaggcgaaggaagagtattggttgttgatggaggagga

SEQ ID NO: 115676 - DNA, 250 bp, Glycine max
agcaactgcagcaatggctcccaaacgaggtggaaaggctccggctcttgccgctaagaagaagcctgagaaggtttcgaatccgttgttcgagaagcgtccaaagcagttcggaatcggaggggcgttgcctccgaagagagacttgactcggttcgtgaagtggccaaagaatgttcaaattcagaggaagaagaggattctgaagcagaggttgaaggttcctccagctttgaaccagttcaccaaa

SEQ ID NO: 115677 - DNA, 250 bp, Glycine max
gcaagctcatcctagagttttaaaaatggcagcagcctcctccatggctctctcttccccatccttggctggcaaggccgtgaagctgggcccatcagcccccgaagtcgggagggtcagcatgaggaagaccgtcaccaagcaggcctcctccggaagcccatggtacggcccagaccgcgtcaagtacttgggcccattctctggcgagcccccgtcctacctcactggcgagttcccaggtgactac

SEQ ID NO: 115678 - DNA, 247 bp, Glycine max
agaaaaacaagtagttgagaactaagaagaaggaaatggcttcctcaatgatctcctccccagctgttaccaccgtcaaccgtgccggtgccggcatggttgctccattcaccggcctcaaatccatggctggcttccccacgaggaagaccaacaatgacattacctccattgctagcaacggtggaagagtacaatgcatgcaggtgtggccaccaattggcaagaagacgttcgagactctttc

SEQ ID NO: 115679 - DNA, 243 bp, Glycine max
aacttttctgaggaagttgctattcttgatggctactttggcaagcttagtgcaggaagcaatgcttatattttgggtggccaagacaaatcacagaactggcatgtctactctgcttctgcagattctgtaactccatgcgacaatgtttacactctagagatgtgcatgactggcctggatagagagaaagcacaggttttctacaaagaacaatctgcttcagctgccattatgactgtt

SEQ ID NO: 115680 - DNA, 244 bp, Glycine max
cggctcgagtgttgtaactttttgattcctaaattctctaaaattcgaaattctaatttcgttaggggaaagagattgtttgtgtgtgagtgagtatggctggaaaaggcgagggtcctgctatcggaatcgatttgggaacgacgtactcttgcgtcggcgtgtggcaacacgatcgtgttgaaatcatagccaacgatcagggtaacagaactaccccatcctacgtggctttcaccgacac

SEQ ID NO: 115681 - DNA, 250 bp, Glycine max
ctatccctcactaggagctcttctccattggttcttcatctgcatgcacacacttgcatagttttggaaaccaagaatttttgaagggtagcatcaacaagaagttctggaaatggagatcaccaatgtcagcgagtatgaagctattgcaaagcagaagttgccaaagatggtgtttgactactacgcatctggtgcagaggaccagtggactctgcaggagaacagaaatccttttccagattttgtt

SEQ ID NO: 115682 - DNA, 249 bp, Glycine max
gggtattgaaggtctattcaagaaaaacaaggtaaactatgtcaaaggttatggcaaatttgtttcaccatctgaagtctctgtcgacaccactgaaggtggaaatactgttgtgaaaggcaagcatattataattgccactggctcggatgtgaaatcattgcctggcgtcactattgatgaaaagaaagtcgtatcatcaacgggggctcttgctttgactgaaatccccaagagactcgtagtcat

SEQ ID NO: 115683 - DNA, 199 bp, Glycine max
tggccacccacgcggctctagcttctacaaggatccccactaacaccaagttcccatccaaggcttcacactctttccaacccaatgcgcctcaaagagacttgaggtgacagattctctgggctagatccacttcatgtgtgaatagtaacgtctaaatctcttttgactgtactcactatccagacatgacacactc

SEQ ID NO: 115684 - DNA, 246 bp, Glycine max
ccaagcttccatggcttgaggtcttcctccgcctctgctctcccccgcaatgccctctcccttccttcatccactcgctctctctccctcatacgtgctgtttccacgcctgcgcagtctgaaactgccactgtcaagcgcacaaagtcgaaatattcaaagaacaaagcaatttcataagatatcctcttaacgaggacattttgacggatgctcctaatataagtgaagccgccactcaattga

SEQ ID NO: 115685 - DNA, 241 bp, Glycine max
aacaagtagttgagaactaagaaggagaagcaaatggcttcctcaatgatctcttccccagctgttaccactgtcaaccgtgccggtgccggcatggttgctccattcactggcctcaagtccatggctggcttccccaccaggaagaccaacaatgacattacctccattgctagcaacggtggaagagtgcaatgcatgcaggtgtggccaccagttggcaagaagacgtttgagactc

SEQ ID NO: 115686 - DNA, 239 bp, Glycine max
cgttatccttctttttttctccttgaactcgaatattcactatggcagatgaggtggttctgctagatttctggccaagtccatttgggatgagggtcaggattgcacttgctgaaaagggtatcaaatatgagtccaaagaagaggacttgcagaacaagagcctttgctcctcaaaatgaacccggttcacaagaaaatcccggttctcatccacaatggcagacccatttgtgaat

SEQ ID NO: 115687 - DNA, 240 bp, Glycine max
tttcattcacagggatgaggaggttaattacttcccttcaaggtatgatcctgttcgtcatgcagaaacgttccccatacctcctgctatctgcagtggaaggcgtgaaaagtgtggaattgagaaggagaacaactttaagcagcccggagagagataccgatcttgggcacctgacaggcaagatagatttaatcgccgatgggttgatgctttatctgacccacgggtcacccatga

SEQ ID NO: 115688 - DNA, 255 bp, Glycine max
gacacgaaatggatatatccataccatatatcttggatttatttttatgaaataattaaatatggcaaaacctatatctaaaaagggttcgcgtaaaaatgtacgtattggttcgcgtaagcatactcgtaaaataccaaagggagttattcatgttcaagctagtttcaacaatactattgtaactgttacagatgtacgaggtcgggtgatttcttggtcctccgccggtacttgcggattcaaaggtacacg

SEQ ID NO: 115689 - DNA, 246 bp, Glycine max
cattacattagattggtggtaatggcagcgtcactacaagcagcagctactttcatgcaacccaccaagttgagcaggagcaacactttgcagcaaaagtctactcagtccatttccaaggcttttggtttggaacctgttggagctaaaaaggtcacatgctcccttcaggctgatcttaaggacttggctcacaagtgtgttgatgctaccaaaattgcaggattcgcccttgccacctctgcc

SEQ ID NO: 115690 - DNA, 246 bp, Glycine max
tcattttccaaataagtatcttcgtagttgcataagtcaagagaagaagtgaagtggctgcaatggcttcaagtcaggaagaggtgacccttttgggagttgtgggaagcccatttctacacagggttcagattgctctcaagttgaagggagttgaatacaaatatttggaagacgatttgaacaacaagagtgatttgctcctcaagtataacccagtttacaaaatgattccagtgcttgttc

SEQ ID NO: 115691 - DNA, 244 bp, Glycine max
ctttgcagaagaagtgaatgcaaaggtcttctttgagacctgaacaacgaggtccaccactgagacgtttgcagaagaagtgaatgcagcattcagagagagtgcagacaatgagctccagggaatcctctctgtgtgtgatgagccacttgtgtctgttgacttcaggtgcactgatgtgtcctcaaccgttgactcatcgttgaccatggtcatgggagatgacatggttaaggtgattgct

SEQ ID NO: 115692 - DNA, 244 bp, Glycine max
aaaattggacgcacagcaaaaggctcatgtgtctcttcccatggacacattcaagagttatgttcttaaggagccgattggagtcgttgctttaataactccttggaattatcctctgttgatggctacgtggaaggttgctcctgctctggcggccggctgtgctgcaatattgaagccctctgagttggcatctgtgacatgtttggagctcgctgaaatttgcaaagaagtcgggcttcct

SEQ ID NO: 115693 - DNA, 242 bp, Glycine max
gtgatgataagccagggttcttgaagaagcttgcattgaagtttaaggagccagagaataccacattgtttattcttgacaaatttgatgggaactctgaactggttgcagagttggttaccattaatggatttaaagcagcttatgcaattaaggatggtgcagaaggaccgcgaggatggaagagtagtggtcttccttggatagcaccacggaaaacattgagtttggacaatctgaca

SEQ ID NO: 115694 - DNA, 240 bp, Glycine max
accattgctcgcgcaatcgagcttcccgatcctatggagaatgctggtgcagctcttatcagagaggttgctagcaagactaacgactctgcgggtgatgggactaccacggcttcggttcttgctcgcgagataattaagctggggcttctcagtgtgacttctggggcaaatcctgtgtctcttaagagagggattgataagactgtgcagggtttggtggaggagttggagaagaag

SEQ ID NO: 115695 - DNA, 242 bp, Glycine max
cagtaagatagtcaaccaggtcgactactattttagtaatgagaatttagttaaagatgcattcttgaggcagaacatggatgaccagggctgggttcccataaaattaattgcaggcttcaacaaagttatgcatttgactgacaatatccaggttatattagatgctattcaaacttcatctgttgttgaagtgcagggtgacaaaataaggagacaaaatgattggaggagatggatta

SEQ ID NO: 115696 - DNA, 241 bp, Glycine max
agtcttgcaattgaagttgaagtcttgcccttctctcttcaactccaaacacaagacatcatcatccatggctgcctccgtctccactgtcggagctgtcaacagagctcttttgaacctgaatgggtctggacctggggtttcagctcccagttcatccttctttgggagcagcttgaagaaggttattggctcaagggtccccaacacaaagatttcctctggaagcttcaagattgtt

SEQ ID NO: 115697 - DNA, 241 bp, Glycine max
aaggcagaaagcaagctcatcctagagttttaaaaatggcagcagcctcctccatggctctctcttccccatccttggctggcaaggccgtgaagctgggcccatcagcccccgaagtcgggagggtcagcatgaggaagaccgtcaccaagcaggcctcctccggaagcccatggtacggcccagaccgcgtcaagtacttgggcccattctctggcgagcccccgtcctacctcactgg

SEQ ID NO: 115698 - DNA, 233 bp, Glycine max
gtaactcgttcatcttctgttgttgttctgtgtttgtgtgtgtcccatctctcacctgaaaatgtcttgctgcggtggtaactgtggttgcggagctcctgcaagtgcggcaacggctgcggatgctgcaagatgtacccagacttgagctacactgagtcaaccaccaccgagaccttggtcatgggagtggcacctgttaaggctcaatttgagggtgctgaaatgggtgt

SEQ ID NO: 115699 - DNA, 245 bp, Glycine max
gcctgtgatggcttatcctccgaccggggcgggatccagttcgatgccttatgggacaccacatcctcccccgccgccgcctgtggcaggatcaggaggatatggatatccacctcagcaggcgtatggtggatacccaccccaacagggatacgggtacccacctcaggcggctggttacggatatccacaacatcaatcaggttatggatatccgcaacagcctggatatgggtacccacctc

SEQ ID NO: 115700 - DNA, 245 bp, Glycine max
acccacgcggctctagcttctacaaggatccccactaacaccaagttcccatccaaggcttcacactctttcccaacccaatgcgcctcaaagagacttgaggtgacagaattctctgggctaagatccacttcatgtgtgacatatgctaacgatgctagagaatcttccttttttgatcttgtagcttcccaactcactcccaagaccaatggatcatcaactcctgtgaggggagagacagt

SEQ ID NO: 115701 - DNA, 242 bp, Glycine max
ggtgcatgcaaagcaatgcctgtttcaataagatgtgagcaaagtacccaggaagggaacagtttagatgtgtggctaggccggctagccatggttgggtttgcagtagccatcactgttgaaattgctaccgggaagggactcctagagaactttggactcacaagtccactgcctacagttgcccttgcagtaacagcacttgtgggtgtcttgacggctgtttttatcttccagtcagc

SEQ ID NO: 115702 - DNA, 241 bp, Glycine max
tacaaaggttgctgtaggagataagattgcagtagtgctaagtgctaacacctgcagtgaacaatggcctctgcatcagcatctctgctcaagtcttcacttgttcttgacaagtctgagtgggtgaagggacaaacccttcgccaaccttctgcatcagttgtgagatgcaaccccaccaccccatcaggcctcaccatcagagctggttcctatgctgatgagctcgttaagaccgcga

SEQ ID NO: 115703 - DNA, 241 bp, Glycine max
cgcagttcccaaattcattttaatcctaattctgcacttcttgatcattcgatttttctcctcaagatgcagatattcgtaaaaactttgaccggcaagaccatcacccttgaggtggaatcctccgacaccattgacaacgtaaaagctaagattcaagacaaggaagggatcccacctgaccagcagagacttatctttgcgggtaaacaacttgaggatggtcgcacccttgccgatt

SEQ ID NO: 115704 - DNA, 241 bp, Glycine max
cgactacgaccgcttggaagaaaaagccctagacttcaggccaaaactcataatctgcggtggcagcgcgtaccctcgcgattgggactacaaacgtttcagggaagtcgctgataagtgcggagcattgcttctctgcgacatggcgcacactagcggccttgtggccgcgcaggaagtgaacagccccttcgagtattgcgacattgtgaccaccacgactcacaagagcttgcggggc

SEQ ID NO: 115705 - DNA, 237 bp, Glycine max
cggctcgagcgcaaattgatgatatttgggtgttgatgcgcttctgtcatttggtttagattcaggatgaaaatgtcactggtttggcctctcttaacgaggcgaggattcagcacaagctctgagaatcttgttgcttctgtgctctttgagagattgccagtggtcattcccaaaattgatcctgtggtttatgcatttcaagaattctcgtttcgatggcgacaacaatatcaa

SEQ ID NO: 115706 - DNA, 236 bp, Glycine max
aagccttctttggccaaactgatgctgagggtggttttgattccaatgctgtggcaactgcaaatatcttggagagttcaacgcctgtcgttgatgggaaacagtactacagtttgactgtgttgacaaggacagctgatggagatgaaggtggcaagcaccagctgattacagcaacagtgaaagatggcaaactatacatttgcaaggctcaagctggagacaagaggtggttt

SEQ ID NO: 115707 - DNA, 216 bp, Glycine max
aattgaagttaaaagccttagccttccctacaactccaaacacaaagacatcatcatccatggctgcctccgtctccactgtcggagctgtcaacagagctcttttgaacctgaatggttctggagctggagcttcagctcccagttcagccttctttgggaccagcttgaagaaggttattgcctcaagggtccccaacagcaaggtttccggtg

SEQ ID NO: 115708 - DNA, 256 bp, Glycine max
ggagttagtttgcgcaattgtagaaggaaggttccttgcataataaagtgtgaaaagaaagatgatgaagttgaacacattcagaatgtttcagttgagcgtccaccctattacagttacttggactccacctccggccagctcgagccggcctccggtgcccgagcgagtattccgggccaagagtattggcccgatggaactgctattcgtctgagggctgcaagggcacctgctccaactgctgaatcatcaa

SEQ ID NO: 115709 - DNA, 255 bp, Glycine max
tacaactacaaaggttgctgtaggagataagatattgaagtagtgctaagtgcctaacacctgcagtgaacaatggcctctgcatcagcatctcttctcaagtcttcacttgttcttgacaagtctgagtgggtgaagggacaaacacttcgccaaccttctgctgcatcagttgtgagatgcaaccccaccaccccatcaggcctcaccatcagagctggttcctatgctgatgagctcgttaagaccgcgaaa

SEQ ID NO: 115710 - DNA, 255 bp, Glycine max
attttctctcgaagcaagaaaaatgttcatcgagagtttcaaggttgagagtcctaacgtgaagtacacagagactgagattcagtccgtgtacaactatgaaaccactgaacttgttcacgagaacaagaatggcacttatcagtgggttgtcaagcccaaaactgtcaaatatgaatttaaaaccaacacccatgtccctaaactaggggtaatgcttgtggggtggggtggaaacaatggctcaaccctcac

SEQ ID NO: 115711 - DNA, 256 bp, Glycine max
cttctttggagcaggcagtcaaagaagtggctttgcttcaagaggaattggagaagaaaactgccgagtttagagaaacaagtgccgttcttcaggttaaagagtcagagcttgttgatgctaagctagaaatccagcgtttgaaatctgaaaaggcttctcttcagggtatcttggaggagaaagacttggagctttccagtgctaggaaaatgctgggggatgttaaccaggaaatctatgatcttaagatgct

SEQ ID NO: 115712 - DNA, 256 bp, Glycine max
ttcctctttctctgttctgaaaccactcccgcctcgtcgtcaccatgccgcaaggggattacatagagcgtcacagaagagactatggctaccgtctcgatcacttcgagcggaagcgcaagaaagaggcgcgtcaagttcacaaacgctctgcaattgcccagaaggctctgggtattaagggcaaaatgattgccaagaaaaattatgctgaaaaggcacagatgaagaagactttggctatgcatgaagaatc

SEQ ID NO: 115713 - DNA, 254 bp, Glycine max
gaaactgtctttatgtcagagggttgagttggaggatcccgttgagaatattggtgccaagttggtgagacaagcggctgccaagacaaacgacttggctggtgatggaaccacgacctcggttgttcttgctcagggtcttatagcggaaggtgtcaaggttgttgcagctggggccaaccctgtgctcatcacacgtggcattgagaagacagcgaaagctcttgtatctgagcttaaacagatgtcaaaag

SEQ ID NO: 115714 - DNA, 242 bp, Glycine max
cttcacaagagtacaagaggatgatgcctgggagaatcattggggtcagtgtcgattcttccggaaagactgctttgaggatggcgatgcaaactagggagcagcatatcaggagggtcaaggccaccagcaacatttgcactgctcaggcactgcttgcaaacatggctgccatgtatgctgtgtatcatggacctgaaggcctcaagagcattgcacaccgtgttcatggtcttgctggg

SEQ ID NO: 115715 - DNA, 254 bp, Glycine max
gacaaggccagtcctcagacagttgctgattacaccctcaagctccttcacaggagaattccccctgctgtccctggaattatgtttttgtctggtggacagtctgaggttgaagctaccctcaacttgaatgccatgaaccaatctccaaacccgtggcacgtgtcgttctcgtatgccagagccctccaaaacactgccttgaagacatggggaggccgcccagagaatgtgaaggcggcacaagatgcact

SEQ ID NO: 115716 - DNA, 162 bp, Glycine max
cggctcgaggccaactccagaatgattgttagagttgcagacgtgcaaagagtacgataaggatgtgattttggattacctgaaagaactaatccttttcttgcaatattatgttgtgtgtacccataactccatgaatgcaactcgttgacctatctcaat

SEQ ID NO: 115717 - DNA, 253 bp, Glycine max
caactacaaaggttgctgtaggagataagatattgaagtagtgctaagtgcctaacacctgcagtgaacaatggcctctgcatcagcatctcttctcaagtcttcacttgttcttgacaagtctgagtgggtgaagggacaaacacttcgccaaccttctgctgcatcagttgtgagatgcaaccccaccaccccatcaggcctcacaatcagagctggttcctatgctgatgagctcgttaagaccgcgaaa

SEQ ID NO: 115718 - DNA, 249 bp, Glycine max
ctacactaactaaagccgagcagcgagagagagaaaccctagcaaaaatgccggctggtcacggtttgagatcccgcaccagagattccttctctcgtcccttcaggaagaagggtaccatcgccctcaccacatacctcagaacctaccacgtcggcgattatgtcgacgtcaaggttaacggcgccgtccacaagggaatgcctcacaagttctaccatggccgcaccggtcgcgtctggaatgtca

SEQ ID NO: 115719 - DNA, 254 bp, Glycine max
ccaaaccacagccagtctctactccttcaccaaaggtgagcaccaagttttctgatgtgttggcgttcagtgggccagcacctgagaggatcaatggaaggttggccatgattgggtttgtgggtgcaatggcagtggaagtagccaaagggcaaggtgtgtttgaacaaatatccaatggtggtatcccatggttcttgggaacaagtgtggtccttacccttgcttccttgattccactcttccaagggatc

SEQ ID NO: 115720 - DNA, 253 bp, Glycine max
ctcgagccgttccataaacgggtggtgcctctcttccatctccccagccaaaacctctctcaggaaggccacattacgcccttccgtcttcgcaacccttaacactccttcttctccttcctcttcatcttccttcccctctctcattcaagacaggcctgtttttgctgcccctgcccccatcatcaccccaactgtgagagaggatatggcaaaggaatacgagaaagctattgaagaacttcagaaattg

SEQ ID NO: 115721 - DNA, 252 bp, Glycine max
aggtgccttcagtgttgaatgtgatgctgtggatccagctgatgtggatgctatagcaaagactgtcaaaagggcccttgcagtctatggaactccagcttttacagaaataataaagaactgcatggctcaagatctttcctggaaggggcctgctaagaagtgggaggaagtgctgctaagcctgggagttcctggcagtgaacctggaagtgatggagaagaaattgctccacaggcaaaggaaaatgt

SEQ ID NO: 115722 - DNA, 257 bp, Glycine max
ctttcttctcggtccagtgtctctttcaaagtgctgctgctgccagcattgacctgagctagagcagtaaccgtcatcaccactgccagtacggtaccatggctgtgcttcaatctttcgtttcggtccacccagattctcacttccccatacagaacctcccctacggagtgttcaagccccaatccgcttctcctcctcgtcccggcgtcgccatcggagacttcgtcctcgacctctccgaaatctcttccgct

SEQ ID NO: 115723 - DNA, 252 bp, Glycine max
  unsure (1)..(252): unsure at all n locations
ggctgattcacctattgaacatgctcttgctgaggaggatgcggaatgttgcatctgcctttcttcttatgatgatggggttgagctaagagaacttccttgcggtcaccattttcactgtgtctgtgtggatnaatggctgtatattaatgctacatgccccctctgcaagtataacatcttaaaaagtagcnacctcagtcaagatgaagtgtagaagatcgatgtcaggaaagttttggcgcccatgtt

SEQ ID NO: 115724 - DNA, 249 bp, Glycine max
caaataacaaaagcatagcggatgcagaggaaaatcttttgacttgcttagccgacttattttcacagataagttctcagaagaagaaaacaggtgtcattgctcccaaacgatttgtacaaaggttgaaaaaacagaatgaactcttccgtagctatatgcaccaggatgcccatgaattcttgaactttttgttaaatgaacttgttgacattctggagaaagaggcccagtctgcaaaaaatgatc

SEQ ID NO: 115725 - DNA, 249 bp, Glycine max
gcattattcaatggccaccacagcagctctatccggaaccatggtgagcacctccttcatgaggaagcaacctatgacgaccaagagcctaaagacattccccaacgctctttttggtctgaaaggtggacgaggtggtcgtgtaacttgcatggcctcgtacaaggtgaagctcataaccccagaaggagaagtggagtttgaatgcccagatgatgttttcattgttgacaaggctgaggaagaagg

SEQ ID NO: 115726 - DNA, 217 bp, Glycine max
tcttcttcgtctcaaacctcttcgttccttcgattcattccatttcttccaaaatggccaaagacccagttcgcgttctcgtcactggagccgcagggcaaattggatatgctcttgtccctatgattgctaggggagtgatgctgggtcctgaccagcccgtgatcctccacatgcttgacattcctccagcagcagattctttgaatggggttaa

SEQ ID NO: 115727 - DNA, 249 bp, Glycine max
cgttgccattctcatcctcttctttctctctctaccattgccatggatccctacaagcaccggccatccagcgccttcaattctcccttctggactacaaattctggtgctcctattgggaaaaacaactcctctttaaccgttggagctagaggtccaattctgctggaggattatcatcttgtggagaagctggaaatttggatagggaacgtatcccagaacgtgttgtccatgccaggggcgcta

SEQ ID NO: 115728 - DNA, 252 bp, Glycine max
ggccaggacaagattcgtcccttgtggaggcactacttccagaacactcagggtcttatttttgttgtagacagcaatgatagggacagagttgttgaggccagagatgagttacataggatgttgaatgaggatgaactgagagatgccgtattgcttgtgtttgcaaacaaacaagatcttcctaatgcaatgaatgctgctgagattactgacaagttgggtctccactctctgagacagcgtcactgg

SEQ ID NO: 115729 - DNA, 244 bp, Glycine max
atggccaccacagcagctctatccggaaccatggtgagcacctccttcatgaggaagcaacctatgacgaccaagagcctaaagacattccccaacgctctttttggtctgaaaggtggacgaggtggtcgtgtaacttgcatggcctcgtacaaggtgaagctcataaccccagaaggagaagtggtttataaccgcccagatgttttttccattgtagacagggctgaggaagagggctttg

SEQ ID NO: 115730 - DNA, 252 bp, Glycine max
ggggaatttagacgcggcgatagagcaattgctgaacgtggagaagcagatgaggctcgccggtgacgtggcgggtaccagaaaagcagccaccgatattttgcagctctgcttcgatgcacgagcctggaaaacactcaatgaccagattgtcgttttgtcaaaacgacgtggccagctcaagcaggctgtaacagctatggtgcaacaggctatgcaatatattgacgagacaccagatatcgaaactcg

SEQ ID NO: 115731 - DNA, 250 bp, Glycine max
caattattgaagacacgttattaatgggggcagattattacgagacggaggctgataagaggtttctggctgccaaaggcagtgttccaattggtataggcaggaactctcatatcaaaagggcaattattgacaagaatgctcgaattggggaaaatgtcaagattattaacagtgacaatgtccaagaagctgcaagggaaacagatgggtatttcataaaaagtgggattgtcacagtaatcaagga

SEQ ID NO: 115732 - DNA, 251 bp, Glycine max
caaggatcccgaaggtctcttcccctgtattcttggccatgaagctgcagggattgtggagagtgttggagaaggtgttactaatgttcagcctggggatcatgtcattccctgttatcaggctgagtgtggggagtgcaagacttgcaaatcagggaagacaaacctatgcggcaaggttcgttccgccactggagttggggtcatgctcaatgatgggaagagtcggttctcgattaatgggaagccta

SEQ ID NO: 115733 - DNA, 252 bp, Glycine max
tctacaaggttgcatcaatatcacttagtccaaatgttccagcacaaatatttatgggagttatgctccatccacctcaacctggagatatttcttatgacaaatttgttagggagagcaccggaatacttgaatcactgagaagaagagcaaggctaatgactgatggattcaacagttgcagaaatgtggtttgtaattttactgaaggtgccatgtattcattccctcaaatacgtttgccgccaagag

SEQ ID NO: 115734 - DNA, 246 bp, Glycine max
atggcttcctcaatgatctcttccccagctgttaccactgtcaaccgtgccggtgccggcatggttgctccattcactggcctcaagtccatggctggcttccccaccagaaagaccaacaatgacattacctccattgctagcaacggtggaagagtgcaatgactgcaggtgtggccaccagttggcaagaagaagtttgagactctttcctacctgccagaccttgatgatgcacaattggca

SEQ ID NO: 115735 - DNA, 250 bp, Glycine max
ctttaatcacgcactatcagtacaacaactcactcactaagctaaacaatttcatcaagcctgccatggcttcctcgtgtgcttcctctgccattgcagctgttgccatctccacaccaagttcccagaagaatggatcactcttgggaagcacaaaagcttcttttcttagtgggaggaaactgaaggtgaacagttttacagcaccagttggagcacgatccagcactacagtgtgtgcagttgctga

SEQ ID NO: 115736 - DNA, 243 bp, Glycine max
gcacagaagaattaacacgtatatagcaagcatggcagtcacactctacgaccttagctctgcctctgggttgaagaagcttgatgagtaccttctcccacgcagctacatcaccgggtaccaagctacaaaggatgatcttactgtttatgcagctttgccaactgctccatcagatgaatatggaaatgtttccaggtggtacaagcacattgatgctttgttgagaatctctggtgtttc

SEQ ID NO: 115737 - DNA, 248 bp, Glycine max
ccaatatagcccaagccctatacaaccaaaccctaacacacacccatttgattcagtttccatggctagcctcaaggttgcatttttggctgcagtgctctgcatggttgtggtgagtgcacccatggcacatgcagctatcacgtgcgggcaggtgacgatagcctgatcaattgcatcggttacctccagaacggaggaacgccgccgtcgggatgctgcaacggagtgaagagcctcaatgccgc

SEQ ID NO: 115738 - DNA, 248 bp, Glycine max
gtagttgagaactaagaaggagaagcaaatggcttcctcaatgatctcttccccagctgttaccactgtcaaccgtgccggtgccggcatggttgctccattcactggcctcaagtccatggctggcttccccacagaaagaccaacaatgacattacctccattgctagcaacggtggaagagtgcaatgcatgcaggtgtggccaccagttggcaatcagaagtttgagactctttcctacctgcc

SEQ ID NO: 115739 - DNA, 250 bp, Glycine max
ttgagaactaagaaggagaagcaaatggcttcctcaatgatctcttccccagctgttaccactgtcaaccgtgccggtgccggcatggttgctccattcactggcctcaagtccatggctggcttccccaccagaaagaccaacaatgacattacctccattgctagcaacggtggaagagtgcaatgcatgcaggtgtggccaccagttgtcaagaagaagtttgagactctttcctacctgccagacc

SEQ ID NO: 115740 - DNA, 253 bp, Glycine max
ccattctctctgtgtatttccctacctctcccttcaagatgcagatcttcgtcaagaccctcaccggcaagaccatcacccttgaggtggaaagctctgacaccatcgacaacgtcaaggccaagatccaggacaaggaaggaatccccccggaccagcaacgtctcattttcgccggaaagcaacttgaggacggccgtacccttgctgactacaacattcagaaggagagtactcttcacctcgtcctccg

SEQ ID NO: 115741 - DNA, 250 bp, Glycine max; identical to SEQ ID NO: 106552

SEQ ID NO: 115742 - DNA, 248 bp, Glycine max
cttcgccaaccttctgctgcatcagttgtgagatgcaaccccaccaccccatcaggcctcaccatcagagctggttcctatgctgatgagctcgttaagaccgcgaaaacagtggcttcaccagggaggggtattttggccatggatgagtccaatgctacctgtgggaagcgtttggcttcaattgggctagagaacactgaagctaaccgccaggcataccgtaccctccttgtgacagttccagg

SEQ ID NO: 115743 - DNA, 247 bp, Glycine max
gttttgtttcccataccatagaagaagcacaaagagaagcattagcactaggagcagcaacaactagtctcagctgaaatggcctcttcagtgatggcatctgtggccctcaaacctgcccctttcactgttgagaagtcctcagtgagaggccttccctctctctcaaggaactcttcttcattcagagttgtggccagtggcaagaagatcaagactgacaaaccttatggaattaatggtggca

SEQ ID NO: 115744 - DNA, 245 bp, Glycine max
agaaggaagctgctgatcagtctatgaaagcatatgagtctgctaccgctgcagcagaggctgatttacctcccacacatcccatccgattgggtctagctttaaatttctctgttttctattatgagatcttgaactcccctgaaagagcctgtcatcttgcgaagaagcttttgatgaagctatttctgagcttgacaccttgaatgaggagtcatacaaagatagcaccttaatcatgcaac

SEQ ID NO: 115745 - DNA, 246 bp, Glycine max
aaggaaagaggacaattacttttttgcactgtcaaaatatcagaaggcattggaggatactctgaataaaaatccgaattttgtgcagccatctttccgtttaaatgaggttcaaagttggatcaacagtggcttgagggacttttccatttcccgagcatcagttgattggggcattcctgttcccgatgacaagacccagactatatatgtatggtttgatgctttactaggctatatatcagc

SEQ ID NO: 115746 - DNA, 248 bp, Glycine max
aactttgcccccttgtaaaacttcttattgtgatgtctaaaagcgaagacttgaagcttttgggaggctggttcagcccatttgccctgagggtgcagattgcccttaacctcaagggtctagaatatgaggttgttgaagagaccttgaatcccaaaagtgacctgcttcttaagtccaaccctgtgcacaagaaaatcccagttttcttccatggagataaagtcatttgtgaatctgcaatcata

SEQ ID NO: 115747 - DNA, 246 bp, Glycine max
gctgtggttaacaggaagagaccctcaattcttgcactttctaggcaaaagttgacccaacttccaggaacttctattgagggagttgaaaagggtggctacaccatttcagacaactcatcaggtaacaagcctgatgttattttgattggaactggttctgagttggaaattgctgctgctgctgctgaggatctaggaaaggaaggaaaagctgttagagttgtttcttttgttagctgggaa

SEQ ID NO: 115748 - DNA, 244 bp, Glycine max
taaaagccttagccttccctacaactccaaacacaaagacatcatcatccatggctgcctccgtctccactgtcggagctgtcaacagagctttttgaacctgaatggttctggagctggagcttcagctcccagttcagccttctttgggaccagcttgaagaaggttattgcctcaagggtccccaacagcaaggtttccggtggaagcttcaagattgttgctgtagaagagaagaaagag

SEQ ID NO: 115749 - DNA, 245 bp, Glycine max
cactttcttttttcccgcagtcatgggcaaggtcaagatcggaatcaacggatttggaagaattggccgtttggtggccagggtggctctgcagagagacgatgttgaactcgttgccgttaacgatcctttcattaccaccgattacatgacatacatgtttaaatacgacagtgttcacgggcactggaagcatcacgatgtcaccgttaaggatgagaagacccttctcttcggtgacaagc

SEQ ID NO: 115750 - DNA, 246 bp, Glycine max
gaacaagtagttgagaactaagaaggagaagcaaatggcttcctcaatgatctcttccccagctgttaccactgtcaaccgtgccggtgccggcatggttgctccattcactggcctcaagtccatggctggcttccccaccaggaagaccaacaatgacattacctccattgctagcaacggtggaagagtgcaatgcatgcaggtgtggccaccagttggcaagaagaagtttgagactctttc

SEQ ID NO: 115751 - DNA, 249 bp, Glycine max
gtgaggagttgattcctgagtatttgggctttgtcaagggtattgttgattctgaagatctcccactcaacatttcaagagaaatgttgcaacagaacaagatcttgaaggtcatccgtaagaacttggtcaagaagtgccttgagctcttctttgaaattgcagagaacaaggaggattacaacaagttctatgaggctttctctaagaacttaaagcttggtatccatgaggattcccagaacaagg

SEQ ID NO: 115752 - DNA, 243 bp, Glycine max
cactttcttccatacacataaccatgtcttctcagactgttgtcctcaaagttggtatgtcatgtcaagggtgtgctggagcagtgaacagggttttgggaaaaatggaaggtgtagagtcatttgacattgatctgaaggagcagaaggtgacagtgaaaggaaatgtggagccagatgaagttctgcaagccgtttccaaatctgggaagaagactgcattctgggtggatgaagcaccac

SEQ ID NO: 115753 - DNA, 247 bp, Glycine max
ggacctggaatggaacgagcagacttgttagacataaatgggcagatttatgcagcgcagggaagagcattaaatgccgttgcatcccgcaatgtcaaagttatagtagtgggaaacccttgcaatacaaatgcattaatttgcttgaagaatgctcctaacattcctgccaaaaattttcatgctttaactcgtttagatgagaacagagcaaaatgtcagctagccctcaaggcaggtgtgttct

SEQ ID NO: 115754 - DNA, 246 bp, Glycine max
tcagtgttgaagaagcgcaagagggaggaggaatgggcgttggccaagaagcaagaactcgatgctgccaagaagaagagagccgagagccgcaaactcatctacaacagagctaagcagtacgctaaggagtacgatcaccaggagaaggaattgattcggttgaaacgcgaggccaagctgaaaggtggtttctatgtggatccagaggctaagctgttgtttattattcgcattcgtggtatt

SEQ ID NO: 115755 - DNA, 247 bp, Glycine max
gttatctctctctctctctctctctctccctctctccttccccaagatgtcgagcgccgatcccgagcaccgagaagaggaggaggcacccgccgtcggcgacgacgaggacaccggagcacacgtcgctcccatcgtcaagctcgaggaggttgctgtcaccaccggcgaggaggacgaagatgcaatcctagatctcaaatcgaagctttaccggttcgacaaggatgggaaccagtggaaggag

SEQ ID NO: 115756 - DNA, 244 bp, Glycine max
ctttgaaattgcagagaacaaggaggattacaacaagttctatgaggctttctctaagaacttaaagcttggtatccatgaggattcccagaacaagggaaagattgctgaattgctcaggtaccactccaccaagagtggtgatgagctgacaagcctcaaggattatgtgaccaggatgaaggaaggtcagagtgacatctactacatcaccggtgaaagcaagaaggctgttgagaactcc

SEQ ID NO: 115757 - DNA, 245 bp, Glycine max; identical to SEQ ID NO: 115613

SEQ ID NO: 115758 - DNA, 246 bp, Glycine max
atcatgtcgaggcccatgttgcttgtttttttgctgattatacttataatcacctcacagttcgagtggaagcagcagcttgtggccgatgttgactctaaccccaacttgcctcagaagcagcatcagatttctaaggctgaagaaaccgttaaggagaagattattttagtgcaagagaagaatattcgaaggctgaatgagctagtgcggcatctccaggaacaactgcagcagtgtagagga

SEQ ID NO: 115759 - DNA, 245 bp, Glycine max
aaagattggcttggctttggcttaatttgtttcctaagaagaagaagaagaatggaagagaagcagagagtgataatagtgggagcagggccttcggggatatcggcggcagcatgcttcacgaaacagtcgattccgtacataatcctggagagggaagactgttccgcttccctgtggaagaaatattcatacgagcgcctccacctccacctcaggaaacagtactgccagcttccccacaa

SEQ ID NO: 115760 - DNA, 246 bp, Glycine max
gcaaaatctctgatcagtgctggaggagaaacattcagttatcagattttgattgttgcaactggctcaacagttataaggctgacagatttcggtgtagaaggagctgatgcgaaaaacatcttttatttgagggaggttgacgatgctgacaaattgtacgcagcaatcaaggcaaagaagaatgggaaagctgtggttgttgggggaggatacattggtctggagcttagtgcagtgttgaaa

SEQ ID NO: 115761 - DNA, 126 bp, Glycine max
ccgcaaacaaacagtgagccatggccgtcggaaagaacaagcgcatctccaaagggaaaaagggtggcaagaagaaggcagctgatccctttgccaagaaggattggtatgacattaaggcccctt

SEQ ID NO: 115762 - DNA, 114 bp, Glycine max
gagaagagctgggtgccaagtttgatattgtagatgttccagaagatcttcaagagcaggctcaggaataccgagcccagatgatagaaaccatagttgagttcgatgaccagg

SEQ ID NO: 115763 - DNA, 253 bp, Glycine max
gtgaaagatggcaaactatacatttgcaaggctcaagctggagacaagagatggtttaagggagcaagaagatttgtggagagcacagcaagttctttcagtgttgcctaagaacttatcagtggagtgctattctgcatgtgaatcatcttgaaggggtgtgtatgtgttgaattatgtggccactttttgtccacaagtttcagtttttgaggctgttggttggagtaagcactttgattcttaatttttc

SEQ ID NO: 115764 - DNA, 132 bp, Glycine max
gaagaacaagtagttgagaactaagaaggagaagcaaatggcttcctcaatgatctcttccccagctgttaccactgtcaaccgtgacggtgccggcatggttgctccattcactggcctcaagtccatggc

SEQ ID NO: 115765 - DNA, 206 bp, Glycine max
cccctatctctcaccaacttccgctacttcctactccaaccactttcttttttcccgcagtcatgggcaaggtcaagatcggaatcaacggatttggaagaattggccgtttggtggccagggtggctctgcagagagacgatgttgaactcgttgccgttaacgatcctttcattaccaccgattacatgacatacatgtttaaa

SEQ ID NO: 115766 - DNA, 203 bp, Glycine max
cagaaagcaagctcatcctagagttttaaaaatggcagcagcctcctccatggctctctcttccccatccttggctggcaaggccgtgaagctgggcccatcagcccccgaagtcgggagggtcagcatgaggaagaccgtcaccaagcaggcctcctccggaagcccatggtacggcccagaccgcgtcaagtacttgggcc

SEQ ID NO: 115767 - DNA, 169 bp, Glycine max
ggagaaattggatttgtaagtgagcctggaattggaagtactttttcctttactggaactttcagaaaaggagaaagcacgtctctggatgcaatgcggcagaataatcattttggttcagagttccaagaattgagaacattagtggtagatagaagaaaaatccgag

SEQ ID NO: 115768 - DNA, 255 bp, Glycine max
aaaagccttagccttccctacaactccaaacacaaagacatcatcatccatggctgcctccgtctccactgtcggagctgtcaacagagctcttttgaacctgaatggttctggagcttgagcttcagctcccagttcagccttctttgggaccagcttgaagaaggttattgcctcaagggtccccaacagcaaggtttccggtggaagcttcaagattgttgctgtagaagagaagaaagagattgaagagac

SEQ ID NO: 115769 - DNA, 162 bp, Glycine max
cttaggtggcacatttttgttttcctttcaagtgtctcccatctatccacacgaagcaccaaaggttaagtgtaagacaaaggtctatcatccaaatattgacttggaaggaaatgtttgtctcaacatcttacgagaagattggaaacctgtccttaatat

SEQ ID NO: 115770 - DNA, 253 bp, Glycine max
aggagcttcaagaggctaagactgcataccccaacggcttcatccgtatcatcggattcgacaacgttcgccaagtgcagtgcatcagcttcatcgcctacaagcccccaggcttctaagtgtgaaaaatttgcaaagcatttgtagccgccaccccactttgtttgtttgtacttaaactacattcccatttgtttttgctttttgagatttcatcatcctgtatttttggtttctgttttcggacttcaat

SEQ ID NO: 115771 - DNA, 150 bp, Glycine max
ggggaatccgtcaacgcccttggggaaaatgggcagctgagattcgggatccaagaaagggggttcgtgtctggcttggaaccttcaacactgctgaagaagctgcaagagcttatgatgctgaagcacggaggattcgtggcaagaaag

SEQ ID NO: 115772 - DNA, 171 bp, Glycine max
atggcaatggcgcttcgcaggctttcatcttcaattgataagcctcttcgccctctcttcaatgcgggttccctctactacaagtcgtctttgcctgatgaagctgtttacgacaaggagcgacccggagttacatggccgaagcagttgaatgcttcacttgaggtcgtt

SEQ ID NO: 115773 - DNA, 256 bp, Glycine max
caaagcagcacccatttggatcctctcttctcttctttgatctccgttaccctttttgttttctcaacagagagagagagagagaatctttcgaagttcgtttgcgtgtgttgtgtggtcagtcaccgatggcagcaccacctgcgagggcacgtgccgattacgattacctcatcaagcttcttcttattggcgatagcggtgtgggaaagagttgtctgcttttgcgattttctgatggttccttcacaaccag

SEQ ID NO: 115774 - DNA, 240 bp, Glycine max
cggggataagattaaagattcaacaatggcctctgcttctgctactcttctcaagtcatctcctgttcttgacaagtgcgagtgggtcaaaggccagacccttcgccaacctctcgtgagatgtaaccctccctcagcatcagctctcaccatcaaagctgcttcctatgctgacgagctcgtcaaaaccgccaaaacagtggcctcaccggggcgtggtattttggcgatggatgagtc

SEQ ID NO: 115775 - DNA, 249 bp, Glycine max
tacttggccaacacaaaggctgctgagcagtggggatcaaagttacattcattctgtgtaggccttgagggctcaccagatttgaaggctgcaaaagaggttgctgactatctaggcactgtccaccatgagtttaccttcactgttcaggatggaatagatgccattgaagatgttatctaccatattgacacatatgatgtgactacaattagagcaagcacacctatgtttctcatgtctcggaag

SEQ ID NO: 115776 - DNA, 252 bp, Glycine max
gagatcattaccttttgaagtcgattaagaataagattgattactgtagattacacgggattgaaattgtgtataatttggctcatttggatgtggaacttgctgggtattgggctaagttgcctatgattcggaggttgatgctgtcgcatcctgaggtggagtggatttggtggatggatagtgatgctttttcttactgatatggtgtttgagcttccaatgtctaagtatgatgagtacaatttggtg

SEQ ID NO: 115777 - DNA, 255 bp, Glycine max
ctttgaaattgcagagaacaaggaggattacaacaagttctatgcggctttctctaagaacttaaagcttggtatccatgaggattcccagaacaagggaaagattgctgaattgctcaggtaccactccaccaagagtggtgatgagctgacaagcctcaaggattatgtgaccaggatgaaggaaggtcagagtgacatctactacatcaccggtgaaagcaagaaggctgttgagaactccccattcttgga

SEQ ID NO: 115778 - DNA, 117 bp, Glycine max
cactttcttccatacacataaccatgtcttctcagactgttgtcctcaaagttggtatgtcatgtcaagggtgtgctggagcagtgaacagggttttgggaaaaatggaaggtgttg

SEQ ID NO: 115779 - DNA, 170 bp, Glycine max
tgaaaacaagagtgagacagagaaatccataccagtaacgaagaaagatggcgaaaatcctacacctgcaaaagctgaagttcctgacaacgagtttgagaagcgcataagaccagaggttatccctgcaaatgagataggggttacatttgcagatattggtgcgttgg

SEQ ID NO: 115780 - DNA, 160 bp, Glycine max
gtgacagttccaggacttggtcagtacatctctggtgccattctctttgaggaaactctctaccaatccacaactgatggcaggaagattgtcgacgtgctcctcgagcaaaacattgttcccggtattaaagtcgacaagggtttggtaccccttgctg

SEQ ID NO: 115781 - DNA, 107 bp, Glycine max
agaaaaacaagtagttgagaactaagaagaaggaaatggcttcctcaatgatctcctccccagctgttaccaccgtcaaccgtgccggtgccggcatggttgctcca

SEQ ID NO: 115782 - DNA, 138 bp, Glycine max
gagaactttgataagggactcatatacccaccattcaccatcatcagaaagatttcagcacacatagctgccaatgttgctgctaaggcttatgagcttggcttggccactcgccttcctcaacctaaagatttggtg

SEQ ID NO: 115783 - DNA, 115 bp, Glycine max
cttaagcctagcatggttacacctggagccgagtccaaggacaaggccagtcctcagacagttgctgattacaccctcaagctccttcacaggagaattccccctgctgtccctg

SEQ ID NO: 115784 - DNA, 255 bp, Glycine max
gaagaacaagtagttgagatctaagaaggagaagcaaatggcttcctcaatgatctcttccccagctgttaccactgtcaaccgtgccggtgccggcatggttgctccattcactggcctcaagtccatggctggcttccccaccaggaagaccaacaatgacattacctccattgctagcaacggtggaagagtgcaatgcatgcaggtgtggccaccagttggcaagaagaagttcgagactctttcctacct

SEQ ID NO: 115785 - DNA, 248 bp, Glycine max
gcggaggcgtatctaggttccaccataaagaatgcggttgtcactgtgcctgcttacttcaacgactcacaacgtcaagccaccaaggacgctggtgtcatttctgggctcaacgtgatgcgaattatcaacgagcctaccgcggctgccattgcttatgggctcgacaaaaaggccactagctctggggagaagaatgttctcatttttgatctcggtggtgggacttttgatgtctctcttctcac

SEQ ID NO: 115786 - DNA, 124 bp, Glycine max
cttctcttgcggctagggttttagcgcacttcttctagatttaacgaagatgggtaaggaaaaggttcacatcagtattgtggtcattggccatgtcgactctgggaaatccactaccactggt

SEQ ID NO: 115787 - DNA, 248 bp, Glycine max
tggaattgctttaggccatgggagacatacaaagcagatctttccattgatctggagaagcaccatgctccaaccacgtttctggacaaaatggctttttggactgtcaaggttctcagataccccaccgatgtgtttttccagaggcgatatggatgccgagcaatgatgctagaaacagtggctgcagtccctgggatggtagcaggcatgctacttcactgcaaatccctaagaagatttgagca

SEQ ID NO: 115788 - DNA, 121 bp, Glycine max
cgtgtgttccgaagacgcgaaggctgcgttcactgctcttaccgttagtttactctttaaatcgtccttggctgaacccagatcaattccctcctcttctatgtaccctactcttgaagta

SEQ ID NO: 115789 - DNA, 249 bp, Glycine max
gtctcaagcaaccatggcaatggcaacccaagcctctctcttaaccccacccctctccggtctcaaagccagcgaccgcgcctccgtgccatggaagcaaaactccagcctctccttctccagcccgaagcccctcaagttctccagaacaatcagagcagcagccgccgacgagaccacagaggcaccagcaaaagtagaggctgcaccggtcgggttcaccccaccagaacttgacccaaacacccc

SEQ ID NO: 115790 - DNA, 244 bp, Glycine max
tgttgatcgagataactagaaacagtgtgatgaaaatgaaggtccttgttttcttcgttgctacaattttggtagcatggcaatgccatgcgtacgatatgttccctctccgaatgaacactggctatggtgcccgtactccggaggtgaaatgcgcaagttggaggcttgctgtggaagcacacaacatctttggctttgagaccattcctgaagagtgcgttgaagcaacaaaggaatacat

SEQ ID NO: 115791 - DNA, 132 bp, Glycine max
ggaaggaagagtgagcgtgaaagatgccttcggcgaggctttcagggtcaccaaggctcgacgttgctattgacatgggcaatccatttctcaatctcactgttgatggtttccttaagatcggagctgtcg

SEQ ID NO: 115792 - DNA, 263 bp, Glycine max
cacagttcggaggagaagaaaatagtcgttcgagatggcccgtacgaagcaaactgctcgtaagtccacaggaggaaaggctcctaggaagcagctgcaaccaaggctgcacgtaagtctgcaccaactactggtggtgtgaagaagccacatcgttaccgtcctggtaccgttgctcttcgtgagattaggaaataccagaagagtaccgagcttttgatcaggaagctccccttccagaggctggttcgtgaaattgctca

SEQ ID NO: 115793 - DNA, 260 bp, Glycine max
agcattgaattcaaaaacttaagttcattccttgtgttttgctttcttcctcaaaaccaaacatgtcgaacacatgcggcaactgcgactgcgctgacaagactagctgcaccaagggaaacagctatggtgttattgtagagactgagaagagttacatcgagactgttgtcatggatgttccagcagctgagcatgatgggaagtgcaagtgtggcactaactgcacttgcacggactgcacctgtggccattaagga

SEQ ID NO: 115794 - DNA, 261 bp, Glycine max
cactcataacacaaagcacaaagcaaagctcatccttgagttaaaaaatggcagcagcttcttccatggctctctcatccccatccttggctggcaagccgtgaagctgggcccatcagccccagaagtgggaagggtgagcatgaggaagaccgtcaccaagcaggtctcctcaggaagcccatggtacggcccagaccgagtcaagtacttgggcccattctctggcgagcccccgtcctacctaaccggtgagttccc

SEQ ID NO: 115795 - DNA, 264 bp, Glycine max
gggactttcactagccgcagcagcctcaggaggagaataaggatgtctcacaggaagttcgagcacccaaggcacgggtcactgggatttctccccagaagcgtgctgctcgtcacaggggaaaagtgaaggcattccccaaggatgacccatccaaggcacccaagctcactgcattcttgggttacaaggctggtatgactcacattgttagagaggtcgagaagccaggatcaaagcttcacaagaaggaaacatgtgagc

SEQ ID NO: 115796 - DNA, 259 bp, Glycine max
acacgctgttcctacaatcattccaaatgtgcccttccggtcgcaccctcctcccttcctccgtctccgatttccgaccggcattcgacgtcctgatgccgaccgcgacggcaaaatcagccgcgacgacctccgcgccttctacgccggagtcggcggcggaggagatgacgtgatcggggcaatgatgacagtggctgacaccaataaggacgggttcgtggagtacgaggagttcgagcgcgtggtctcggcggag

SEQ ID NO: 115797 - DNA, 262 bp, Glycine max
cacaaagaaagaacaagttcaacaaatcatcaaagacattaaggagttcaaagaaagcactaaggttgacaaggtggttgtacctgtggacagccacacagagaggtacagcaacgtagttgtgggactaaacgacaccatggaaaacctctttgcttccttggacaggaatgaggctgagatttccccttccaccttgtatgccattgcttgtgttatggaaaatgttcctttcatcaatggaagccctcagaacaccttt

SEQ ID NO: 115798 - DNA, 259 bp, Glycine max
gaggatagagtatagagagcaacataggaagtgaagtgtaggtaagtgagagccatgaagggttatgagccccgttcaagctcttcatgtgcacttgcaagctattgaagagaagatgcataccaaattgtatttttgcaccttactttaggtctgatgagtgcaagaagtttgcaaaggtgcacaaggtgtttggagccagcaatgtgagcaagattctgattgaagtgccagaagagcagagagaggacacggtgaa

SEQ ID NO: 115799 - DNA, 257 bp, Glycine max
ctctactctactgcttcaccttctgctctagaaaattcagtggtgatacatggcttcggctactctctctgtagccaaaccagcccttcaggcaatgggaaaggcttctctgaattctctggcctccgcagctcatcaggcttccttcccttttctagaaaatcttcagaggatttccattctgtcattgccttccagacctatgcagttggaagcagtggaggatacaagaagggtgtgacagaagcaaaactgaa

SEQ ID NO: 115800 - DNA, 263 bp, Glycine max
ctttctctcttctctctccacccaaaccctaactcccgaccctgatcccctctcgtatccgtcatgaaaggaggaaagtccaagaccgaatctaaagagccgatcccaaacttgctgtgaataagaagggagccgccaccaaggctaggaaacccgccggcaaggggaaggcagcgaaagaccccaacaagccaaagaggcctccaagtgctttcttcgttttcatggaggagttcaggaaggtattcaacaaagaacatcct

SEQ ID NO: 115801 - DNA, 256 bp, Glycine max
aggaagcaggggtgcggcgcgtggtgctcacgtcctccatctccgcggttacgccgagccccaattggcccggcgatgttgccaagacggagagtgctggaccgacgttgaatattgcaagcaaaaggggttgtggtatccattgtcgaagactttagctgagaaagctgcttgggattttgctaaagagaatgatttggatgttgtggtggtgaatcctggcactgtgatgggtcctgttattccaccaaggctt

SEQ ID NO: 115802 - DNA, 150 bp, Glycine max
actgagaatgttgatcagcgttttgaagcacttggatggcatgtaatttgggtgaagaatggaaatactggatatgatgaaattcgtgcagcattaaagaagcaaaggctgtcaaagacaaacccactttgatcaaggtaaccactacca

SEQ ID NO: 115803 - DNA, 258 bp, Glycine max
ggatcatcaactcctgtgaggggagagacagtggccaagttgaaggtggcaatcaatggtttcggacgcattggtagaaacttccttcgctgtggcacggccgaaaagactcaccccttgaggtcgttgttgtcaacgacagtggtggtgtcaagaatgcttcgcacctgcttaaatatgattccatgctgggaacttttaaagcagatgtgaaaatactggacaatgaaaccatcactgttgatggtaagcccatca

SEQ ID NO: 115804 - DNA, 258 bp, Glycine max
cttgattaccttgttggggcggtatcatgccccaaaaggccatatgctgccattgttggtggttccaaggtctcatctaaaattggagtgatgagtcacttttggaaaaagttgagattcttcttcttggtggaggaatgatcttcacattttacaaggcacaaggtctttcagtgggttcatcccttgtagaagaagataagttggatcttgctacatcactacttgcaaaagccaaggaaaagggggtgtctctct

SEQ ID NO: 115805 - DNA, 181 bp, Glycine max
tctttacttgttgggctgttctgatcttctctcatagcaatcaaatcacactcccatcttctcatctcgtaaaccctaaaccccgttttcagtacatcgagatcgatcgaacatggatgaggagtacgatgtgatcgtgttgggcacgggtctcaaggagtgcattctcagcggtcttctc

SEQ ID NO: 115806 - DNA, 256 bp, Glycine max
gaaaaattttcagtgaagtatgttggagctgcagcaatgtattttgtgtctaagaaactgaagaaaaaatataacattactgatgaacgtgtgctctttatgaggcagcagaaacatgggtagatgctctggatggccgggagttccttggagggtctaagcctaacttagctgacctggctgtcttcggggttttaaagccgatccgctatttgaggtctggcaaggatatggtggagcatacacgtattggcga

SEQ ID NO: 115807 - DNA, 250 bp, Glycine max
tccagaatagaaagacttacaggtttgcaattgtcatttgtcaccaaacaattgttgttagctctcacaagcaagcttcagcaacgacaagaagaaagtagtcttacagttggacttacatggtgatagaatcaagcaaaaagctatgaaaacagcatctggcctttcaggggttgaatcagtttctgttgatatgaaagacatgagaatgatcgtgttgggggacattgatccagtgagtgcagtgtcg

SEQ ID NO: 115808 - DNA, 258 bp, Glycine max
cagaaaaacaagtagttgagaactaagaagaaggaaatggcttcctcaatgatctcctccccagctgttaccaccgtcaaccgtgccggtccggcatggttgctccattcaccggcctcaaatccatggctggcttccccacgaggaagaccaacaatgacattacctccattgctagcaacggtggaagagtacaatgcatgcaggtgtggccaccatttggcaagaagaagttcgagactctttcctacttgccag

SEQ ID NO: 115809 - DNA, 258 bp, Glycine max
attccaatatattccattctctctgtgtatttccctacctctcccttcaagatgcagatcttcgtcaagaccctcaccggcaagaccatacccttgaggtggaaagctctaacaccatcgacaacgtcaaggccaagatccaggacaaggaaggaatccccccggaccagcaacgtctcattttcgccggaaatccacttgaggacggccgtacccttgctgactacaacattcagaaggagagtactcttcacctcg

SEQ ID NO: 115810 - DNA, 117 bp, Glycine max
aggcagaaagcaagctcatcctagagttttaaaaatggcagcagcctcctccatggctctctcttccccatccttggctggcaaggccgtgaagctgggcccatcagcccccgaagt

SEQ ID NO: 115811 - DNA, 254 bp, Glycine max
agaaggaagctgctgatcagtctatgaaagcatatgagtctgctaccgctgcagcagaggctgatttacctcccacacatcccatccgattgggtctagctttaaatttctctgttttctattatgagatcttgaactcccctgaaagagcctgtcatcttgcgaagaagcttttgatgaagctatttctgagcttgacaccttgaatgaggagtcatacaaagatagcaccttaatcatgcaacttctcaggg

SEQ ID NO: 115812 - DNA, 124 bp, Glycine max
ctcgttcttcttctcttgttgttctgtgtatgtgtctgtttattctctcacctgaaaatgtcctgctgcggtggcaactgtggttgcgaagctcctgcaagtgcggcaacggctgcggaggctg

SEQ ID NO: 115813 - DNA, 254 bp, Glycine max
cagccatggccacccacgcggctctagcttctacaaggatccccactaacaccaagttcccatccaaggcttcacactctttcccaaccaatgcgcctcaaagagacttgaggtgacagaattctctgggctaagatccacttcatgtgtgacatatgctaacgatgctagagaatcttccttttttgatcttgtagcttcccaactcactcccaagaccaatggatcatcaactcctgtgaggggagagacag

SEQ ID NO: 115814 - DNA, 251 bp, Glycine max
ctttcaagcacctccttggtgacaccattgtggaaattcaagttgaggtgggaccggcaagtgagctgcgttacccttcttacccagacaaaatgggacatggaatttcccaggaattggtggtttccaatgctatgacaagtatatgttgagtagcttaaaagctgctgctgaagctgagggtaagcctgaatggggaagcacaggccctactgatgctggacactataacaactggccagaagacactc

SEQ ID NO: 115815 - DNA, 256 bp, Glycine max
gtctgggcagaggttttcttctaccttgctgagaacaatgtcctttttgagggtattctccttaagcctagcatggttacacctggagccgagtccaaggacaaggccagtcctcagacagttgctgattacaccctcaagctccttcacaggagaattccccctgctgtccctggaattatgtttttgtctggtggacagtctgaggttgaagctaccctcaatttgaatgccatgaaccaatctccaaacccgt

SEQ ID NO: 115816 - DNA, 253 bp, Glycine max
gattgacttcccaaagcagaagattgttgttgctggtgctggaagtgctggaattggggttcttaatgcagcgagaaaaacaatggaaggatgttgggtaataatgaagtagcttttgagagcgcaaagagtcagttttgggttgttgatgcacagggattaatcacagaaggacgtgaaaatattgatccagatgcccttccttttgcaagaaatttgaaagaaatggatcgccaaggactgagggaaggag

SEQ ID NO: 115817 - DNA, 262 bp, Glycine max
tggttgtaggccttaatgacaccatggagaatctcttggctgctgtggacagaaatgaggctgagatttctccttccaccttgtatgctattgcctgtgtgatggaaaatgttcctttcattaatggaagtcctcagaacacttttgtaccagggctgattgatcttgccatcgcgaggaacactttgattggtggagatgacttcaagagtggtcagaccaaaatgaaatctgtgttggttgattttcttgtgggggctgg

SEQ ID NO: 115818 - DNA, 250 bp, Glycine max
tgaccctgcccaacatcaaggttcctctcattcttggtatctggggaggcaagggacaaggaaaatctttccaatgtgagccttgtcttgccaagatgggaatcaaccccatcatgatgagtgctggagagttggaaagtggaaatgcaggagagccagcaaaactgatcaggcagagataccgtgaagctgcagacatgatcaagaagggaaagatgtgcgctctcttcatcaacgatcttgatgcagg

SEQ ID NO: 115819 - DNA, 252 bp, Glycine max
gtggcttcaccagggaggggtattttggccatggatgagtccaatgctacctgtgggaagcgtttggcttcaattgggctagagacactgaagctaaccgccaggcataccgtaccctccttgtgacagttccaggacttggtcagtacatctctggtgccattctctttgaggaaactctctaccaatccacaactgatggcaggaagattgtcgacgtgctcctcgagcaaaacattgttcccggtatta

SEQ ID NO: 115820 - DNA, 142 bp, Glycine max
aattgaatggatcaattataccatcagaacgtccagatcatatgatgtttgaggtatggaacccactaggaatagttggtgtatcactgctttcaactttccatgcgctgttctaggatggaatgcttgcattgctttagtc

SEQ ID NO: 115821 - DNA, 225 bp, Glycine max
ccagcggcaacttgttgctcgtaccccagtcttttatcggctggaacaattggacaatggtgttacttctgttgggtatatacgcctcaaagatctcaatgcattggccagaaaagacttggtcattgcaatgaaacgacttcaagacatgggtgcctcatatttcatattggatctcagagacaatcttggtgggctagtacaggccggaattgaaattgcaaa

SEQ ID NO: 115822 - DNA, 228 bp, Glycine max
taaacctgagaaattcagacccaaaaaagctgctgttttgatctgcctattcgaaggggatgatggggatctaagggtcattctcaccaagcgctcttccaagctttctactcactcgggtgaagtggcattgcctggtgggaaaactgaggagggggataaggatgatggggatactgcaaaaagagaggcaaaggaagaaattgggttggacccggaacttgtcaa

SEQ ID NO: 115823 - DNA, 229 bp, Glycine max
aaagcatctaagtagtaaacccaccccaaagtaccctccaattgatgacacccatttctgaaggatgtcaaggggtgtattaagtatatgctaaataagaggtgctaagaatgtagtttatagtttgcaaattattgcaaggattgctcttagcttcttcatttcaagcatttgtttacactttacagtgctatggcaaatataagagtatcatggatgtagaacggga

SEQ ID NO: 115824 - DNA, 226 bp, Glycine max
attcatcaacgacccctcttctgtgcccacttccaaatcttctcctctcgctatgggttgcggctcctcccttccagataggggctcaaggcagttgggtcgacccaattcagagaatggtggagggcaggacgccaagaatctgagggtcaagcttgttctcttaggtgattctggtgttggtaaaagctgtattgttctacgatttgttcgtggtcagtttgat

SEQ ID NO: 115825 - DNA, 231 bp, Glycine max
agccgctcctgctaagactaaggttacaaagccaaagcaaaaggttgaagatggtatctttggcacttctggaggatttggttttactaagcagaacgagctctttgtgggtcgtgttgctatgcttggttttgcagcatcactgttgggtgaaggaataactgggaaaggaattctagcacaattgaatctggaaactggaattcccctttatgaagcggacctcttctt

SEQ ID NO: 115826 - DNA, 231 bp, Glycine max
gttgaaaataaaaaatggcagacggtgaggatattcaaccactcgtctgtgataatgggacaggaatggttaaagctggatttgctggggatgatgctccaagggctgtgtttcccagcattgttggtcgtccccgtcacacgggagtgatggttggcatgggccaaaaagatgcatatgtcggggatgaagctcagtccaagagaggtatattaactctcaaatatccca

SEQ ID NO: 115827 - DNA, 233 bp, Glycine max
tccaaaccctaacactcctcttcctcttcgatcatcacctctccacaatgccgccgaagttcgacccctcccagatagtcgacgtcttcgtccgcgttaccggcggcgaagtcggcgcggcgagtttccctggccccgaagatcggtcccctcggtctctcccccaagaagatcggagaagacatcgccaaagaaaccgccaaggactggaagggcctccgcgtcaccgtcaa

SEQ ID NO: 115828 - DNA, 232 bp, Glycine max
agctcctctccactggttcttcatctgcatgcacacagttgcatagttttggaaaccaagaattcctgaagaagggtagcatcaacaagcagttctgaaaatggagatcaccaatgtcagtgagtatgaggctattgcaaagcagaagttgccaaagatggcgtttgactactacgcatctggtgcagaggaccagtggactctgcaagagaacagaaatgccttttccaga

SEQ ID NO: 115829 - DNA, 232 bp, Glycine max
cttcttctcggacaagttcggtgtgaggtctataaggaacagccccggagaaatgatggcagccctgtacctacaagtcagtattataagtcaagcactaatttttgtgacaaggtcccgcagctggtcctatgttgaaagacctggtcttctcctactgagtgcttttatgattgcacaactggtggcaacttttctggcagtgtatgctaactggggcttcgcaagaatt

SEQ ID NO: 115830 - DNA, 227 bp, Glycine max
ctctttttctcaaccaaaaggggttcaattctagctagttctattacatcgtccgctaccatgaacatggcgatcgtgcttctgttcatggttatcgcagtttcatcagctttagacatgtcaataatatcacatgacaacgctcatgcggatagggccacgaggcgcaccgacgacgaggtgatgtcaatgttcgaggagtggctggtgaaacacgacaaggtgta

SEQ ID NO: 115831 - DNA, 226 bp, Glycine max
gttttctatgtttggtttgatgcacctattggatatgtctcaattacttcgtgctacacacatgaatgggagaaatggtggaaaaacccagagaatgtggagctgtatcagtttatgggcaaggacaatgtgccattccacactgtgatgtttggatctactctacttggaactagtgaaaattggactttaatgaagactattagtgttactgaatacttgaatt

SEQ ID NO: 115832 - DNA, 228 bp, Glycine max
agagcttgtgcactgcagatgggccatgttgggagctgctggcattttcatcccagaattcctcacaaagattggtatcctgaacaccccttcatggtacactgctggagagttggagtacttcacagacaccaccacactcttcatagttgagctctttttcatcggttgggccgagggtagaaggtgggctgacatcatcaagccaggctgtgtcaacactgaccc

SEQ ID NO: 115833 - DNA, 225 bp, Glycine max
gaaaaacaagtagttgagaactaagaagaaggaaatggcttcctcaatgatctcctccccagctgttaccaccgtcaaccgtgccggtgccggcatggttgctccattcaccggcctcaaatccatggctggcttccccacgaggaagaccaacaatgacattacctccattgctagcaacggtggaagagtacaatgcatgcaggtgtgaccaccaattggcaa

SEQ ID NO: 115834 - DNA, 230 bp, Glycine max
gcacaatttctctgagttgttttgtgagataatagcacatagcataacaagggaaggagtattaacaaccgcaaacctgaagagaaaaagagcagcagaagaagaaacaccaacgatgggtgtggattactacaagatcttgcaggttgataggagcgccaaagacgatgacttgaagaaggcttataggaaacttgctatgaaatggcaccctgataagaaccccaaca

SEQ ID NO: 115835 - DNA, 231 bp, Glycine max
ctgcatcggaagaaaccctagccactctcccggcgtcacgatgcagatcttcgtgaaaaccctaacgggtaaaacgatcacgttggaggtggagtcttcggacaccatcgacaacgtgaaggccaagatccaggacaaggaaggcatccctccggaccaccagcgcctcatcttcgccgggaagcagctggaggacggccgcaccctcgccgactacaacatccagaagga

SEQ ID NO: 115836 - DNA, 234 bp, Glycine max
ttgcaattgaagttgaagtcttgcccttctctcttcaactccaaacacaagacatcatcatccatggctgcctccgtctccactgtcggagctgtcaacagagctcttttgaacctgaatgggtctggacctggggtttcagctcccagttcatccttctttgggagcagcttgaagaaggttattggctcaagggtccccaacacaaagatttcctctggaagcttcaagatt

SEQ ID NO: 115837 - DNA, 229 bp, Glycine max
gaggaatgatcttcacattttacaaggcacaaggtctttcagtgggttcatcccttgtagaagaagataagttggatcttgctacatcactacttgcaaaagccaaggaaaagggggtgtctctcttgttaccaagtgatgtggtgattgcagacaaatttgcccccgatgcaaacagcaaggtcgtgccagcatctgccatccctgatggctggatgggattggatat

SEQ ID NO: 115838 - DNA, 227 bp, Glycine max
gcaacacactgcactgtgtggaaagtaagcatggcaagagtggtggcactccaacagaaccaactatctttctctcccttagcttcctctctttttgacttcagtggaaccagacttcaaactcaacttcagttcaagagaaaactatgccatccaaaagggtctttctacgtctcggcatcgagcaccaagaaaatcctaataatgggaggcaccaggtttattgg

SEQ ID NO: 115839 - DNA, 238 bp, Glycine max
ctctgaaagatgatcttcctgaaagggataggactgatctttacaagacatacttactttattgtctaactggtgaagtgacaagggttccatttggtgctcagatcactactaagaaggatgattctgagtatcttcttctaaatcagcttggtgggatcctgggattgagtagtcaagaaatagtggaagtgcacaggggtctagctgagcaggcttttaggcaacaggctgaggt

SEQ ID NO: 115840 - DNA, 222 bp, Glycine max
aaccaatcatctttagttcttcagtaatttattgtgggattctattctaagattttgagaatgtctagctgtgggtgtggaagcagctgcaactgtggcagcaactgcggttgcaacaagtactcttttgacttgagttacgttgagaagacaaccacagagactctagttttgggtgttgggcctgtgaaggccaattggagggtgctgaaatgggtgttg

SEQ ID NO: 115841 - DNA, 227 bp, Glycine max
cagaagaacaagtagttgagaactaagaaggagaagcaaatggcttcctcaatgatctcttccccagctgttaccactgtcaaccgtgccggtgccggcatggttgctccattcactggcctcaagtccatggctggcttccccaccaggaagacccacaatgacattacctccattgctagcaacggtggaagagtgcaatgcatgcaggtgtggccaccagttgg

SEQ ID NO: 115842 - DNA, 228 bp, Glycine max
aaaagccttagccttccctacaactccaaacataaagacatctacatccatggctgcctccgtctccactgtcggagctgtcaacagagctcttttgaacctgaatggttctggagctggagcttcagctcccagttcagccttctttgggaccagcttgaagaaggttattgcctcaagggtccccaacagcaaggtttccggtggaagcttcaagattgttgctgt

SEQ ID NO: 115843 - DNA, 229 bp, Glycine max
gcaattgaagttgaagtcttgcccttctctcttcaactccaaacacaagacatcatcatccatggctgcctccgtctccactgtcggagctgtcaacagagctcttttgaacctgaatgggtctggacctggggtttcagctcccagttcatccttctttgggagcagcttgaagaaggttattggctcaagggtccccaacacaaagatttcctctggaagcttcaag

SEQ ID NO: 115844 - DNA, 226 bp, Glycine max
ggaactgaagcaatatcccttggtcgtgttggggatgatttctggtgcactgacccttatggtgatccaaatggtacattttggctacaagggtgtcacatggtgcattgtgcatacaacagcttgtggatgggcaatttcatccacccagattgggacatgttccaatctactcatccttgtgctgccttccatgctgcctcaagagccatatctggtggcccca

SEQ ID NO: 115845 - DNA, 224 bp, Glycine max
atcaggcctcaccatcagagctggttcctatgctgatgagctcgttaagaccgcgaaaacagtggcttcaccagggaggggtattttggccatggatgagtccaatgctacctgtgggaagcgtttggcttcaattgggctagagaacactgaagctaaccgccaggcataccgtaccctccttgtgacagttccaggacttggtcagtacatctctggtgcca

SEQ ID NO: 115846 - DNA, 223 bp, Glycine max
gtaatcaatcatcttttgtttgttcttcagtactttagtgtgtgatttaattccaagattttgagaatgtctagctgtgggtgtggaagtagctgcaactgtggcagcaactgcggttgcaacaagtactcttttgacttgagctatgttgagaagacaaccacagagactcttgttttgggtgttgggtctgtgaaggcccaattggagggtgctgaaatgg

SEQ ID NO: 115847 - DNA, 224 bp, Glycine max
gaagttaaaagccttagccttccctacaactccaaacatcaagacatcttcatccatggctgcctccgtctccactgtcggagctgtcaacagagctcttttgaacctgaatggttctggagctggagcttcagctcccagttcagccttctttgggaccagcttgaagaaggttattgcctcaagggtccccaacagcaaggtttccggtggaagcttcaaga

SEQ ID NO: 115848 - DNA, 226 bp, Glycine max
gtacaaccttttcaactccgaaggcgagccacgatgtcaggaagaggaaagggaggcaagggtttgggaaagggaggagcgaagaggcaccgtaaggttctgagggacaacatccaggggatcaccaagcctgcgattcggcgcttggcgaggcgtggcggcgtcaagcgtatcagcggtctcatctacgaagagacacgtggcgttctcaagatcttcctcgaaa

SEQ ID NO: 115849 - DNA, 226 bp, Glycine max
caacaacacaaggccatcatcatggcagctgcttctcctatggcaagccaactcaagtccaccttcactaaaactcttgtagctcccaagggcctctctgcctcttcaccactccacctcctgccttctaagaggcaatttagcttcactgttagggccatccaatcagaaaagccaacctatcaagtgattcaaccaatcaacggtgatcccttcattggaagct

SEQ ID NO: 115850 - DNA, 226 bp, Glycine max
gtcaacagagctcttttgaacctgaatgggtctggacctggggtttcagctcccagttcatccttctttgggagcagcttgaagaaggttattggctcaagggtccccaacacaaagattttctctggaagcttcaagattgttgctgtagaagagaagaaagagattgaagagacccagcagaccgacaaggacagatggaagggtcttgcctatgatatctcag

SEQ ID NO: 115851 - DNA, 225 bp, Glycine max
  unsure (1)..(225): unsure at all n locations
tctcgagccgattcggctcgagattgaagttgaagtcttgcccnttcctcttcaactccaaacacaagacatcatcatccatggctgcctccgtctccactgtcggagctgtcaacagagctcttttgaacctgaatgggtctggacctggggtttcagctcccagttcatccttctttgggagcagcttgaagaaggttattggctcaagggtccccaacacaa

SEQ ID NO: 115852 - DNA, 223 bp, Glycine max
gaactaagaaggagaagcaaatggcttcctcaatgatctcttccccagctgttaccactgtcaaccgtgccggtgccggcatggttgctccattcactggcctcaagtccatggctggcttccccaccaggaagaccaacaatgacattacctccattgctagcaacggtggaagagtgcaatgcatgcaggtgtggccaccagttggcaagaagaagtttga

SEQ ID NO: 115853 - DNA, 222 bp, Glycine max
caatttcacccttcacacgtggtggtggtgttgttcttcttctcttcccctttctttttcttcttctgagcttgtttaagctctttctatttgattccattaacatatattattacaatgtgtggtattcttgctgttacttggttgttctgatgactctcgagccaaaagggtccgcgtgcttgagctctctcgcagattgaagcaccgtggccctgactg

SEQ ID NO: 115854 - DNA, 219 bp, Glycine max
gtgacttgagaatggccttgccagtggtcgtcgacgcagagtacctcaaagaggtcgacaaggctcgccgcgatctccgcgcactcatcgctaacaggaactgcgctcctctcatgcttcgattggcctggcacgatgccggaacttacgatgctaagaccaagactggtggacctaacggttcgatccgtaacgaggaagagtattctcacggcgcca

SEQ ID NO: 115855 - DNA, 222 bp, Glycine max
cactcttcttctcttgcggctagggttttagcgcagttcttctagatttaaggaagatgggtaaggaaaaggttcacatcagtattgtggtcattggccatgtcgactctgggaaatccactaccactggtcacctgatttacaagcttggaggcattgacaagcgtgttattgagaggtttgagaaggaatctgctgagatgaacaagaggtctttcaagt

SEQ ID NO: 115856 - DNA, 223 bp, Glycine max
ggacaagcttgttgttcacatctccaagaacttcatgaccctgcccaacatcaaggttcctctcattcttggtatctggggaggcaagggacaaggaaaatctttccaatgtgagcttgtctttgccaagatgggaatcaaccccatcatgatgagtgctggagagttggaaagtggaaatgcaggagagccagcaaaactgatcaggcagagataccgtgaa

SEQ ID NO: 115857 - DNA, 224 bp, Glycine max
gcttctcctatggcaagccaactcaagtccaccttcactaaaactcttgtagctcccaagggcctctctgcctcttcaccactccacctcctgccttctaagaggcaatttagcttcactgttagggccatccaatcagaaaagccaacctatcaagtgattcaaccaatcaacggtgatcccttcattggaagccttgaaaccccagttacatccagcccctt

SEQ ID NO: 115858 - DNA, 221 bp, Glycine max
aaatcttcaaagctgatgctgtacttcattttgggacacatggttcccttgaattcatgcctggaaaacaggtggggatgagtgatgtctgttaccctgacagtctgattgggaatattccaaatgtatattactatgctgcaaacaacccttctgaggccaccatcgccaagcgcaggagttatgcaaacaccattagttatctgactcctccagcagaa

SEQ ID NO: 115859 - DNA, 222 bp, Glycine max
gaccatttgagagatgtgtttggcaaagctatggggcttagtgaccgagatatcgttgctctgtctgggggtcacactattggagctgcgcacaaggagcgttctggattcgagggtccctggacctctaatcctcttattttcgacaactcatacttcaaggagttgttgagtggtgagaaagaaggcctccttcagctaccttctgacaaggcacttttg

SEQ ID NO: 115860 - DNA, 218 bp, Glycine max
gtgcctaacacctgcagtgaacaatggcctctgcatcagcatctcttctcaagtcttcacttgttcttgacaagtctgagtgggtgaagggacaaacacttcgccaaccttctgctgcatcagttgtgagatgcaaccccaccaccccatcaggcctcaccatcagagctggttcctatgctgatgagctcgttaagaccgcgaaaacagtggcttca

SEQ ID NO: 115861 - DNA, 218 bp, Glycine max
gcgggatcagcacaagattgcaaaatgaagttcaacattgcaaatcccaccactgggtgccagaagaagctggaaatcgatgacgacctgaagcttcgagcattttgggacaagaggatctcccaggaggttcttggtgatgctctgggtgaggagtttaaaggatatgttttcaaaatcaccggtgggtgtgacaaacaaggattccctatgaagca

SEQ ID NO: 115862 - DNA, 220 bp, Glycine max
tgggagaagaggtcgagtttcacagcagcaatggtgtacgtcaaggctcagaaatcaaaagcctacttcaagagatatcaagtcaagttcaagagaagaagagagggaaaaaccgattaccgtgccaggattcggttgattaatcaggacaagaacaaatataacactccgaaataccgatttgttgttcgctttagcaacaaggacattgttgcacaaa

SEQ ID NO: 115863 - DNA, 222 bp, Glycine max
aaaatcaacaaaccaaaaaggtaaactttttgcaacaaccatggttgcaatggcagcagcaacagcatccacccagttgattttctcaaagccttgttccccttcacgtctatgccccttccaactatgtgtctttgacactaaacaagcgctatcaagtggcaggagaaggcatgtggggggttctggagttaggtgcatggctgtgggggaagcagcaac

SEQ ID NO: 115864 - DNA, 221 bp, Glycine max
gctgtgtctggggaaatttgcgttgtttttcgcggtacagctcacacacactgaacggtaagtatggcggacaaggctgttacaatccgaacccgaaagttcatgaccaacaggcttctttccaggaagcagtttgtcgttgatgttcttcatccagggagggcaaatgtttccaaggctgaacttaaggagaagctagctaggatgtatgatgtgaaaga

SEQ ID NO: 115865 - DNA, 220 bp, Glycine max
gggaagaccgcattggtgtttgcaccggaattttccgcactgatggtattcctgaacaggacattgtcaagcttgttgacaccttccctggccaatccattgatttctttggtgcactgagggccagagtatatgatgatgaagtgaggaagtggatttctggtgttggtgttgacagtgttgggaagaagcttgtgaactcaaaagatggacctccaac

SEQ ID NO: 115866 - DNA, 220 bp, Glycine max
gccgagtcatcctgtgctgctcttgttgttgcttccatctcttcttttggggtgaatcatgagttgactgctatgttataccctctaattatcagttctgtgggtatccttgtttgtttgctcacaactttatttgcaactgacttctttgagatcaaggctgtaaaggagattgagcctgcattgaagaaacagctcatcatttccactgccttgatga

SEQ ID NO: 115867 - DNA, 219 bp, Glycine max
gagagacgtcgcaatggggaggaggcctgcaaggtgttatcggcagataaaaaacaagccataccccaaatcacgcttttgccgtggtgttcctgatcctaagattagaatttatgatgttggtatgaagaagaaaggtgttgatgagtttcccttctgtgttcatctggttagctgggaaaaagaaaatgtttcaagtgaagcattggaagctgctag

SEQ ID NO: 115868 - DNA, 218 bp, Glycine max
gtagagaagcactcttcgttcttcgactgtctacgatctgctttctctgaattgtgaaaatgtcgctcggagaaactgcttgttcatacgcagctctcatccttcatgaagatggaattagtgtaactgctgacaagatcagcaccttgttgaaaactgcaaaggttccagtagactcttattggccaaccttgtttgctaaacttgctgagaagaaa

SEQ ID NO: 115869 - DNA, 222 bp, Glycine max
ggggaaccaaaccgaaaccctaaccctaacggagagatggcggacacttggcatcgatattcgggacggagaaggacagggtgaactgtccgttctacttcaagatcggcgcgtgcaggcacggcgaccggtgctcccggcttcacaccaagccgacaattagcccaacattggttctgtcgaacatgtaccagaggcccgacatgaacatgagcattatca

SEQ ID NO: 115870 - DNA, 173 bp, Glycine max
gctccagaaaacaaaacagagcaaagagagagtgtgtgaaaagtgaaacaaaaaacagaacaacaatggcgacacttaaggttcctcagcctcttccccccgttgcagatgattgtgagcagctccgaaaagccttctcaggttggggaactaacgaggagctgattgtatcg

SEQ ID NO: 115871 - DNA, 284 bp, Glycine max
gaagatttgcattcgccgacttctcacttctaaatctcccagaccaatttaagagctcctttgactttattgatgggcatgttaaaccagtggttggaaggaaaatcaattggttgaaagctggacttatagaatcatggtttgtgataaccgttagtccaaactatgctaaagaactggtgtcaggtccagacaaaggagtggaattggacaacatcattcgcaaaattgatgatgatggtcgtttggttggaattgtgaatggcatggatgttcaggagtgg

SEQ ID NO: 115872 - DNA, 289 bp, Glycine max
gaacaagcagcattagcaaccaagcaagagaatggcgacgacagcagccttgtgcggcactatgatgagcagctccttcctgaggagaaaagcagtggtcacaagcctgaaggcattccccaatgctaacgcagtgtttggtgtaaagggtggacgtggaggtggtgtgactgccatggctagcttcaaggtgaagctgataaccccagagggagagaaagaatttgaatgcccagatgatgtatacattcttgaccaggcagaggaggaagggcttgagcttccctac

SEQ ID NO: 115873 - DNA, 290 bp, Glycine max
agctgccggagataaagctacaacatatactaaaaggatatggcttgaccttgctgatgcagtgtctttatcagcaggtgaggaagtaacattgatggattggggaaatgccatagtgaaggaaatagagaaggaccaagatggaaatatcatagggttgagtggtgttttgcatctagaaggatctgtgaagaccacaaaattgaaactcacttggctacctgagatagatgaactagttagcctgacattagtggagtttgattatctaattacaaagaaaaagcttg

SEQ ID NO: 115874 - DNA, 146 bp, Glycine max
gttttaatgatggcagcagcctcctccatggctctctcttccccatccttggctggcaaggccgtgaagctgggcccatcagcccccgaagtcgggagggtcagcatgaggaagaccgtcaccaagcaggcctcctccggaagccc

SEQ ID NO: 115875 - DNA, 280 bp, Glycine max
atccaggaatagcaacaccgattgcggcccatgcaaaaccgcccaattacatgtttttcttcaagttatttgaatctccaaatctagcacaaaagttacatgtggaagagtggatcccaactctgaacgatgcacttatgatagcaatgcagttagcaaaggctttgcaatatctgcataacctcgggattgtgcatagagatgtgaaaccggcaaatattcttcttgacaaaaactttgtccacacctcacagattttggtttggcagaatacaagaat

SEQ ID NO: 115876 - DNA, 285 bp, Glycine max
ccgcgaacagaggccaggctatgaaaggcacaccgttcaccacgctctccagaatagagttccagccgcagtgggtcaagaacccacccgtggatggatggcccaatacctgaggctgcggagcccaagactgaaccaaaaaccctcttccttttgttctctccacgaacccttccggtaagaactgcaagggatccgcttggctctcggcgctgaagtacgtcgcgttggctatttcttcgtttgggctcttcaccacccacagaaaccgttgctcactttttt

SEQ ID NO: 115877 - DNA, 285 bp, Glycine max
ggcgtcaaactgtggctgtcggagtcatcaagagtgttgagaagaaagaccccaccggagccaaggtcaccaaggccgctgccaagaagaagtgattgcatttgggcaattttgctagcacatgtgatcatcatcgtggttactcctttatagtagttttatccttgcagagtcttaggtgttttgtttaagttatatttttaagtttctgccgatttcatgtagccgtaactttcaaaactaggttcttgatcggcggtggtcaattttcattgctgtttgttt

SEQ ID NO: 115878 - DNA, 167 bp, Glycine max
gagaagtgagatacactaagttatcctcataaatacactctaattaggtggcaagataagtgtctaaccttagtaacattgccacatattgtgttcattttggaattgtgccactaaaattctattcaattcatctatggctgcctcttcttatgctatgcaatcaa

SEQ ID NO: 115879 - DNA, 142 bp, Glycine max
atggtggatacctaggcacccagagacgaggaagggcgtagtaagcgacgaaatgcttcggggagttgaaaataagcgtagatccggggattcccgatataggtcaacctttcgaactgctgctgaatccacgggcaggcaa

SEQ ID NO: 115880 - DNA, 166 bp, Glycine max
ccataaagggttgctccggcgtaatccacctcgcatgtcctaacatcatcggtcatgtcgaagatcctgagaagcagatactggagccggcgataaaaggaacagttaatgtgttgaaggcggcgaaggaagcgggggtggagcgcgtggtggcgacttcgtcgat

SEQ ID NO: 115881 - DNA, 115 bp, Glycine max
agaacaagtagttgagaactaagaaggagaagcaaatggcttcctcaatgatctcttccccagctgttaccactgtcaaccgtgccggtgccggcatggttgctccattcactgg

SEQ ID NO: 115882 - DNA, 283 bp, Glycine max
caacaatccagcgttccttcgacgcgcgctacacccgccacgcgcgcgactcgctcggcgaattgcctgacagcttcaccatcaccgacccctccatccccggccaccccatcgtcttcgccagcacgggcttcctcaagctcacgggctactccctccgcgaagtcctgggccggcccgcagccatcttccagggcccacgaacatcccgaaaatccgtaatcgaaattcgcgaggccgttagagaggagcgaaacgcgcaggtcgttttactcaactaccg

SEQ ID NO: 115883 - DNA, 152 bp, Glycine max
aaaaattaataagttagaaaaacttcgtaagtttatttttgatagaaaaatagaaaggatccaatttgagcaaggttcaaaaaaatggttggaattagtaaaactgttttgatcaaaagtgtagccgcaggaattaaccttctatttgtatg

SEQ ID NO: 115884 - DNA, 285 bp, Glycine max
gaagaatcagagaatggcaactatgactggtgtgagcctttcatgccccagggttttcttcaacgcatcaggctcaccgcaaaacgcgcatgctgtaaagttctcttttattgtattttgtccagcagattctatgacttgacaggactgcagaatggaattctgaagcgagggagagagattttcctcactggttgctacctccgaactcccactggaggttctggacattcacgtcttttgccaacagagtatcttgtgattctattggatgaagacttccaa

SEQ ID NO: 115885 - DNA, 201 bp, Glycine max
  unsure (1)..(201): unsure at all n locations
agaagaagcagaaagagaagcattagcaaaaggaagaagaactagtctaagcagaaattacctcttcagtgatggcatctgtggncgtcaaacctccccctttcactgttgagaagtcctcagttagaggccttccctccctctcaaggaactcctcttcattcagagttgtggccagtggtggcaagaagatcgagactg

SEQ ID NO: 115886 - DNA, 273 bp, Glycine max
cacctttgttcactcttcttctcttgcggctagggttttagcgcacttcttctagatttaaggaagatgggtaaggaaaaggttcacatcagtattgtggtcattggccatgtcgactctgggaaatccactaccactggtcacctgatttacaagcttggaggcattgacaagcgtgttattgagaggtttgagaaggaagctgctgagatgaacaagaggtctttcaagtatgcctgggtgctggacaaacttaaggctgagcgtgaaaga

SEQ ID NO: 115887 - DNA, 277 bp, Glycine max
gcaatggtgatagtgaggtacagcgtactatgctggaacttctcaatcagttggatggatttgaagcttcaaacaagatcaaggttttgatggccacaaatcggattgatatcctggatcaagccctccttagacctggacggattgaccggaagattgaatttccaaaccctaatgaagagtctcggctggatattttgaaaatccattcaagaagaatgaatttaatgcgtggcattgatctgaagaagattgccgagaagatgaatggagcatc

SEQ ID NO: 115888 - DNA, 280 bp, Glycine max
gggtggtgcctctcttccatctccccagccaaaacctctctcaagaaggccacattaggcccttctgtcttcgcaaccgttagcactccttcttctccttcttcttcttcttcttcttccttcccttctctcattcaagacaggcctgtctttgctgcccctgcccccatcatcaccccaactgtgagagaggatatggcaaaggaatacgagcaagctattgaagaactccagaaattgttgagggagaagagtgaactcaaagccacagctgctgaga

SEQ ID NO: 115889 - DNA, 279 bp, Glycine max
cttaaaagttattaagagcttttgcttttctttctgcgcgcttatcccaattaagtagttcttccttttctcaaagcaaaaaaaatgttcatcgagagtttcaaggttgagagtcctaacgtgaagtacacagagactgagattcagtccgtgtacaactatgaaaccactgaacttgttcacgagaacaataatggcacttatcagtgggttgtcaagcccaaaactgtcaaatatgaatttaaaaccaacacccatgtccctaaactaggggtaatg

SEQ ID NO: 115890 - DNA, 166 bp, Glycine max
gtaaattaagagcatggctgcacaagctcttgtatcatcatcatctcttaccttctcagccgaggctacaagacaaagtcttggaccaagatcactccaatctccatttggcttctcaagaaaagcctcctttcttgttaaggcagctgctactccccctgtcaag

SEQ ID NO: 115891 - DNA, 280 bp, Glycine max
cacaactccactcttagctgccattggtttttcttcttccatttctcttcctttctaagcttttttcgattacccatttggagattctgtcctaatggctcttgctccttccaaagtttcctccttttccgggttttctcccaaacccagtgttggggatgctctgaaaaacccaacttgctctgtttctctgagctttgcgaatgtgaaacttggaagcagaaaccttagggtttgtgcctcaactgtgcctctctcaggggtgattttcgaacccttc

SEQ ID NO: 115892 - DNA, 273 bp, Glycine max
ctagtttcttacaagcctctactatactgcttcaccttctgctctagaaaattcagtgctgaaacatggcttcggctactctctctgtagccaaaccagcccttcaggcaaatgggaaaggcttctctgaattctctggcctccgatgctcatcaggcttccttcccttttctagaaaatcttcagaggatttccattctgtcattgccttccagacctatgcagttggaagcagtggaggatacaagaagggtgtgacagaagcaaaactga

SEQ ID NO: 115893 - DNA, 134 bp, Glycine max
gaactaagaaggagaagcaaatggcttcctcaatgatctcttccccagctgttaccactgtcaaccgtgccggtgccggcatggttgctccattcactggcctcaagtccatggctggcttccccaccaggaag

SEQ ID NO: 115894 - DNA, 275 bp, Glycine max
aaaattacgatcccgatttctttaaccgttggattttaatgaaatttggatatgttgttcgaaattcaattgcgcacactttcaccgttgagatttgcgagataatatttgtggaggaagaaaaaggaatcgcatgaaaacagtacaagtggatgcttcaatctcttcttcgtctctctgatgtttgggaattctatcggaactatcggaggaataactggaggaatctcagggaaccgctagagatgtcgctatcaccatcgaaagacacgtga

SEQ ID NO: 115895 - DNA, 276 bp, Glycine max
gtttcttacaaggctctactctactgcttcaccttctgctctagaaaattcagtggtgatacatggcttcggctactctctctgtagccaaaccagcccttcaggcaaatgggaaaggcttctctgaattctctggcctccgcagctcatcaggcttccttcccttttctagaaaatcttcagaggatttccattctgtcattgccttccagacctatgcagttggaagcagtggaggatacaagaagggtgtgacagaagcaaaactgaaggttg

SEQ ID NO: 115896 - DNA, 278 bp, Glycine max
gccgctacgttaaaacctacaaatacaccatggaaaacgacgccggtttccctctcatccccaacgtgttctccggcttcaactccctcgtggcctccgcggcacgtggctccctctccgctgcacgtttcttaacggggcagtttaaccctcctaacggcattggcctggccaacaccagcttagccttcttcgggaatcgtctcttcgcgcttggcgaatccgacctcccttacgtcgttaacgtaacccctgacggcgacatcgaaaccctcggc

SEQ ID NO: 115897 - DNA, 281 bp, Glycine max
ggctcgggatgctattggggtcacttccttgtacattggatgggggttagatggctctgtttggatttcatcagaaatgaaaggcctgaatgatgattgtgaacactttgagtgttttccacctggtcacttgtactctagcaaagaaagagggttccgcagatggtacaatcctccttggttctctgaggctattccatctgccccttatgatcctcttgttttaagacacgcctttgagcaggcagtcataaaaaggttgatgactgatgtgccttttg

SEQ ID NO: 115898 - DNA, 143 bp, Glycine max
ctagtttcttacaagcctctactatactgcttcaccttctgctctagaaaattcagtgctgaaacatggcttcggctactctctctgtagccaaaccagcccttcaggcaaatgggaaaggcttctctgaattctctggcctc

SEQ ID NO: 115899 - DNA, 273 bp, Glycine max
  unsure (1)..(273): unsure at all n locations
gaaattgcaatgcttcacccggcggcactgatagcatcgtgtccttatccttatccttatcctgggcggcatgagttaccctcagcctcagcgtcaggancagccagagtcgctgttccaatgccaaatctgagaggcaaagcggttgttggtgttggttccagaatgataaggtgcatggctaaccccagaagagttcaaatggtggccaagcaaattaggagagagctttctcatatgcttctcaccgataaagtcttgcagtatgctgtt

SEQ ID NO: 115900 - DNA, 272 bp, Glycine max
caaaggttgctgtaggagataagattgcagtagtgctaagtgctaacacctgcagtgaacaatggcctctgcatcagcatctctgctcaagtcttcacttgttcttgacaagtctgagtgggtgaagggacaaacccttcgccaaccttctgcatcagttgtgagatgcaaccccaccaccccatcaggcctcaccatcagagctggttcctatgctgatgagctcgttaagaccgcgaaaacagtggcttcaccagggaggggtattttgg

SEQ ID NO: 115901 - DNA, 149 bp, Glycine max
gtgggacttttgatgtctctcttctcaccatcgaggagggtattttcgaggtgaaggccactgctggtgatactcacttgggaggtgaagattttgataacagaatggtgaaccattttgttcaggaattcaagaggaagaacaagaag

SEQ ID NO: 115902 - DNA, 112 bp, Glycine max
caaaacactcataacacaaagcacaaagcaaagctcatccttgagttaaaaaatggcagcagcttcttccatggctctctcatccccatccttggctggcaaggccgtgaag

SEQ ID NO: 115903 - DNA, 270 bp, Glycine max
aacaagtagttgagaactaagaaggagaagcaaatggcttcctcaatgatctcttccccagctgttaccactgtcaaccgtgccggtgccggcatggttgctccattcactggcctcaagtccatggctggcttccccaccaggagaccaacaatgacattacctccattgctagcaacggtggaagagtgcaatgcatgcaggtgtggccaccagttggcaagacgaagtttgagactctttcctacctgccagaccttgatgatgcac

SEQ ID NO: 115904 - DNA, 268 bp, Glycine max
cttcaaactcaacttcagttcaagagaaaactatgccatccaaaagggtctttctacgtctcggcatcgagcaccaagaaaatcctaataatgggaggcaccaggtttattggtgtgtttttatctaggctccttgttaaagaggtcaccaggtgactttattcacaagaggtaaagcgcctgtcactcaacagttgccaggtgaatcagacaatgattatgctgatttttcttccaagatcttgcatttgaaaggagacaggaagga

SEQ ID NO: 115905 - DNA, 264 bp, Glycine max
cgccattgaattcttcttccatttctcttttttctgcatacccatttcgtttttcttcccaaatggccctttacttgctccaaagttttaagcttttatctactcgcccgttgtgggtggtggtgatgttccgaaaaagctccttattcttctttattgggtctatctaaaggtgatggtggaagcaggagctcgagagtgtgtgctgcttcaaatgcacgccgcaccactcgactggggtcatatatgaaccatttcacgagc

SEQ ID NO: 115906 - DNA, 260 bp, Glycine max
cggctcgagtgcaaaacgagaagtatccaacaatgactaccacccgtgttgctatctgtctttgctttgcattcctttactacgcggctgaaggagccaaggttagtttcaataacaagtgctcatacacggtatggccagaaccctaaccggtgaccaaaagccccaattatcaacaactggtttcgagttgggtccaggagcatccaactctgtggaccttccatctccatggtccggtcggttctgggcccgaacag

SEQ ID NO: 115907 - DNA, 261 bp, Glycine max
gagaaatagagagagaacttcaagtgagggtgagagtgacacaaatctagagagagcactagtactctaaaagtctattatattcttcaaaatatgaccatgcatcgcgagtcttgggcttttgtcttcggcgttatgggaacatcatctcctttggagtgttccttgctccattgccaaccttttaccaaatctacaagaagaaatccactgaaggtttccagtcacttccttatgttgttgcactgttcagtgcaatgc

SEQ ID NO: 115908 - DNA, 262 bp, Glycine max
gccaaaaggggatttgaaatcaataagcaagactgctggtcacagcatgctttatgccatgtccttcagtataagtgctgttttagagaagctgttaagttcatggaagaatgttcatcatcatggggttcttcttcatctttatgttgacacacaattggtggcatgtagcactttgttacttagaaggtaatgctccgagacaaagagtgctagagatatatgacaattatatatggaaggagctagaaagaaatgattc

SEQ ID NO: 115909 - DNA, 263 bp, Glycine max
agaagatcgaggatgattatgtttctggggagacaatcgggcaaggcaagttcgggtctgtttggttgtgtaggtcaaaggttagtggagctgaatatgcgtgtaagaccctgaagaaaggggaggagacggttcatcgagggttgagatcatgcaacacttatccggacattctggggttgttacactgcaagctgtttatgaggaagctgaatgctttcatcttgtgatggaactgtgctctggtggtcggctcatcgatg

SEQ ID NO: 115910 - DNA, 261 bp, Glycine max
tcccgccgcaactcacactgtcttccttctctagggtttttagctcctccaaattcttcgcccaacatggttcttcaaaatgatattgatttgctaaatcccccggctgagcttgagaagaggaaacacaagctcaagcgtttgttcagtcaccaaactctttcttcatggatgttaagtgccagggttgcttcaacataaccactgtctttagccactctcagactgttgttgtatgcggaaatgccagaccgtctgtgc

SEQ ID NO: 115911 - DNA, 263 bp, Glycine max
caacaatggctccgaagaaaggtgtgaaaggttccgttgtagcagcgaagaagaaggttcaggagaaggtgacgaatcctttgttcgagaagcgtccgaagcagttcgggatcggaggcgcgctgccgccgaagcgggacctacgcggttcgtgaagtggccgaagaacgtccaaatccaacgcaagaagcgcatcctcaagcagaggctcaaggtccctcctgcactcaacctgttcaccaaaaccctagacaagaatctcg

SEQ ID NO: 115912 - DNA, 232 bp, Glycine max
ttcttgcacaaggaatggattatggagcagtgggataaaaacttttacatcacttctattgcagggagcaacaatggcagctctcttgtggtgatgtcaaaaggtacgcagtatactcaacaatcttacaaagtgagtgaactttccccttcaaatggataaacaagaagtggagagaaggttttcatgtcacttcaatggctactgctggaagtcgctggggtgttgtaat

SEQ ID NO: 115913 - DNA, 261 bp, Glycine max
ccccgaactccaagcttggtggaaagaacttgtccaagtgggtcatggtgatttgaaagataagccatgttggcaaaagatgcaaacttgtgaagagttgattgaagcctcggccaccctcatatggatcgcttcagccctcatgcagctgttaactttggacagtatccatatggaggtttaatcttgaacaggccaaccattagcaggagattcatgcctgagaaagggtctgctgagtatgctgctttggctaagaac

SEQ ID NO: 115914 - DNA, 262 bp, Glycine max
tcttcttctcttgcggctagggttttagcgcagcttcttctagatttaaggaagatgggtaaggaaaaggaccacatcagtattgtggtcattggccatgtcgactctgggaaatccactaccactggtcacctgatttacagcttggaggcattgacaagcgtgttattgagaggtttgagaaggaagctgctgagatgaacaagaggtctttcaagtatgcctgggtgctggacaaacttaaggctgagcgtgaaagagg

SEQ ID NO: 115915 - DNA, 266 bp, Glycine max
ccgaaactttaatgcggtttctaaaagcaagggactgggatccttgcaaggcacataaaatgttggttgactgtttaaattggagggtgcaaaatgagattgacaatatattatctaaaccaattgttcctgctgatttataagagcggtgcgtgattcacaactcataggattatcaggttactcaagagagggtctgcctgtctttgcaattggtgttgggcttagcacatttgacaaagcactgttcattattatgtgcagtc

SEQ ID NO: 115916 - DNA, 261 bp, Glycine max
ctcttcatcaagctccgctccaacacaggggaaaatgagggagatccttcacgtgcagggagggcaatgcgggaaccagatcggttccaagttctgggaagtggtgtgcgacgagcacggcatagatccgacggggaagacgtcggaaactcagatctgcaactcgagcgcgtgaacgtctactacaatgaagcctcgtgcgggcgcttcgtgccacgcgcggtgctgatggacctggagcccggaaccatggacagcgtg

SEQ ID NO: 115917 - DNA, 262 bp, Glycine max
attttgatggggagctgtttccacgttacctgagctttgtgaagggtgtggttgattcagatgaccttcctctcaatgtttctcgggagatccttcaagaaagcagaattgtaaggataatgagaaagagacttgtcagaaggcatttgatatgattcaagaccttgctgaaagtgaaaataaagaggactacaaaaaattctgggagaactttggtaggttcataaaattaggttgcattgaagacactggaaatcataag

SEQ ID NO: 115918 - DNA, 262 bp, Glycine max
ggcttatggtggatacctaggcacccagagacgaggaagggcgtagtaagcgacgaaatgcttcggggagttgaaaataagcgtagatccggggattcccgatataggtcaacctttcgaactgctgctgaatccacggcaggcaagagacaacctggtgaactgaaacatcttagtagccagaggaaaagaaagcaaaagcgattcccgtagtagcggcgagcgaaatggagcagcctaaaccgtgaaaacggggttgtgg

SEQ ID NO: 115919 - DNA, 236 bp, Glycine max
gtttcttacaagcctctactatactgcttcaccttctgctctagaaaattcagtgctgaaacatggcttcggctactctctctgtagccaaaccagcccttcaggcaaatgggaaaggcttctctgaattctctggcctcgaagctcatcaggcttccttcccttttctagaaaatcttcagaggatttccattctgtcattgccttccaaacctatgcagttggaagcagtggag

SEQ ID NO: 115920 - DNA, 253 bp, Glycine max
gtaggagcaatagcttctgaatttgaacccagaactgaatttgagaagaaaatggctgctctagtttatgatgatgaagttatggaagctcataaaaaggatggttctaagcttcttgaaatgaacaaggtctctattgaaatgagaaggataggcaaatcggattgctaaaatgcggagcttctttttcgtcatgaaatgaaggcaaagcatattaaaaagatcagtctagaacattcatctttgttgaaga

SEQ ID NO: 115921 - DNA, 266 bp, Glycine max
attcaacacaatctgtatcaacaaatgagccagttgtatctgtagattggctttatgataacctgaaggagccagatatcaaggtactagatgcttcgtggtacatgccggatgagcagaggaatccaattcaagaatatcagttgctcacattcctggtgcccttttctttgacgtagatggaatagcagatcggactacaaaattaccacatatgctgccatcagaggaagcttttgctgctgctgtttctgctcttggcattg

SEQ ID NO: 115922 - DNA, 261 bp, Glycine max
aaaaaaaaaaaatagcaacaaaaacaagaaaaaaggttacctctttcaattttatcccttgttgtgagcttaattcaatttctgctcacacataatggcttgcacgctcgctgattcattactcctattcaagggttctatcagaaaccagttctgaggagagacattgctgcccggtactccccgggtatatttagtctaaacagtaatgggcttatccagaaaaggttcaggcgtcaaaggaattttgttactaggaat

SEQ ID NO: 115923 - DNA, 261 bp, Glycine max
aattgaagttgaagtcttgcccttctctcttcaactccaaacacaagacatcatcatccatggctgcctccgtctccactgtcggagctgtcaacagagctcttttgaacctgaatgggtctggacctggggtttcagccccagttcatccttctttgggagcagcttgaagaaggttattggctcaagggtccccaacacaaagatttcctctggaagcttcaagattgttgctgtagaagagaagaaagagattgaaga

SEQ ID NO: 115924 - DNA, 260 bp, Glycine max
cttctcttgcggctagggttttagcgcacttcttctagatttacggaagatgggtaaggaaaaggttcacatcagtattgtggtcattggccatgtcgactctgggaaatccactaccactggtcacctgatttacaacttggaggcattgacaagcgtgttattgagaggtttgagaaggaagctgctgagatgaacaagaggtctttcaagtatgcctgggtgctggacaaacttaaggctgagcgtgaaagaggaat

SEQ ID NO: 115925 - DNA, 265 bp, Glycine max
ggcagaaagcaagctcatcctagagttttaaaaatggcagcagcctcctccatggctctctcttccccatccttggctggcaaggccgtgaagctgggcccatcagcccccgaagtcgggagggtcagcatgaggaagacgtcaccaagcaggcctcctccggaagcccatggtacggcccagaccgcgtcaagtacttgggcccattctctggcgagcccccgtcctacctcactggcgagttcccaggtgactacggctggga

SEQ ID NO: 115926 - DNA, 258 bp, Glycine max
gaggccagggtctgtagtgtgcgggtgggtttgtttatctcaaacacagaacagaggtgtagagaagaaagctctcaaaagtatggcggcggagtcatcactgagggtggcgactcccactatttgcaacctcaatggtctcagagaagaccaaccactctctctccgcttcgcttcatgggttttagccctcgaccctctcactctctcacttcctcttccctttcacacttcttcgggagcacaagaattaactcc

SEQ ID NO: 115927 - DNA, 258 bp, Glycine max
caaagacccagttcgcgttctcgtcactggagccgcagggcaaattggatatgctcttgtccctatgattgctaggggagtgatgctgggtcctgaccagcccgtgatcctccacatgcttgacattcctccagcagagagtcgttgaatggggttaaaatggaattggtggatgctgcattccctcttcttaaaggtgttgttgctacaaccgatgtggttgaggcatgcactggggtcaatattgcagtgatggtt

SEQ ID NO: 115928 - DNA, 260 bp, Glycine max
aaaacaagtagttgagaactaagaagaaggaaatggcttcctcaatgatctcctccccagctgttaccaccgtcaaccgtgccggtgccggcatggttgctccattcaccggcctcaaatccatggctggcttccccagaggaagaccaacaatgacattacctccattgctagcaacggtggaagagtacaatgcatgcaggtgtggccaccaattggcaagaagaagttcgagactctttcctacttgccagacctcg

SEQ ID NO: 115929 - DNA, 258 bp, Glycine max
ataacttcaaaaggaagcctaacgaggttcagtccttgatggaattgatgcgggaaaagattgaagagttacttcaacaagaaagtcttatcaatgaatacggtgttcgattacatttcattggagacttgcaactatgactgagcctgtcagggcttctgtggaaaaagcaatgagagttactgctcacaacaaccagagagttcttttgatttgcgtagctatacttctcgtcacgagattgtgcatgccgttcaa

SEQ ID NO: 115930 - DNA, 258 bp, Glycine max
caaagagaagcattagcactaggagcagcaacaactagtctcagctgaaatggcctcttcagtgatggcatctgtggccctcaaacctgcccctttcactgttgagaagtcctcagtgagaggccttccctctctctaaggaactcttcttcattcagagttgtggccagtggcaagaagatcaagactgacaaaccttatggaattaatggtggcatggctttgagggatggaactgatgcatctggcaggaaagga

SEQ ID NO: 115931 - DNA, 251 bp, Glycine max
gagagagggaagacggttgtggggattcgatgggggccaccgttcactcgccgctagtcacttatgcttccgtcatatctctgcttacactctgtcctccgtttgtcatacttctatggtacaccatgactcttgctacggatctgtttccgagacattccattatttaaggcagaatgggttgcagggtttgctacatatatggcccacccccactcccaacgactgcaaaatcattgcagtctatgctg

SEQ ID NO: 115932 - DNA, 258 bp, Glycine max
gatctcttccccagctgttaccactgtcaaccgtgccggtgccggcatggttgctccattcactggcctcaagtccatggctggcttccccaccagaaagaccaacaatgacattacctccattgctagcaacggtggcgagtgcaatgcatgcaggtgtggccaccagttggcaagaagaagtttgagactctttcctacctgccagaccttgatgatgcacaattggcaaaggaagtagaataccttcttaggaag

SEQ ID NO: 115933 - DNA, 260 bp, Glycine max
ttgtcttttaaggtcgtagttgggcctgagtttgttgttcctccatattcaaatgtatctctgttacagcagccaattgaggaagacagtgacgaggagcttgaatatgctgatagtactagtgtcataggcagccaatggataaatcagatgtagagattgcttccaaagtattggagacacattttagtcctgcctcggagttgggtatgggtggggctggtcatgtgtggtcaacatgtgaaggaagccatgaagaa

SEQ ID NO: 115934 - DNA, 259 bp, Glycine max
cattgttacaaccaaacacaatgatgatgaacagtatgtttgggagtctcaagctggaggttctttcactgtcaccagggataacactggtgaggttcttggcaggggtactaagatcactctctacctcaaggaaatcagcttgagtaccttgaggagcgtcgcttgaaggatctgatcaagaagcattctgagttcattagctacccaatttctctttggattgagaaaactactgagaaggagatctctgatgatg

SEQ ID NO: 115935 - DNA, 257 bp, Glycine max
gtttgatggagctgtacaagagcctcgaaagggaatcagaagtggtcatgtacctggtagcaaatgcatcccttttgcccagttgttagatagttcacagacattgttaccagcagatgagttgaagaagcgatttaacaagaaggcatctctgtggaaagcccagctgtgacttcatgtggaacgggcgtaactgcttgcattcttgcattgggtcttcatcgtcttggaaagtctgatgttgcagtttatgatgg

SEQ ID NO: 115936 - DNA, 256 bp, Glycine max
ttttagtggcaactgatgttgcctcacgtgggcttgatataccaaatgttgatcttgtaatacattatgatcttcccaacaattcagagatatttgttcatcgttctggacgaacaggtcgtgctggtaagaaaggactgctattcttgtgtatacagaagatcaatcgagggctgttaagcttattgagcgtgatgtgggcagtagatttacagagctaccacgtattgctgttgatagtgcatcagtggacatg

SEQ ID NO: 115937 - DNA, 256 bp, Glycine max
gcgatggcaatggcgcttcgcaggctttcatcttcaattgacaatgctctgcgccctctcttcaatgccggttccctctactacaagtcgtctttgcctgatgaagctgtttacgagaaggagcgacccggagttaatggccgaagcagttgaatgctccacttgaggtcgtggatcctgagattgctgatattattgagcttgagaaagctaggcaatggaaggggctagaattgataccgtcagagaatttcac

SEQ ID NO: 115938 - DNA, 232 bp, Glycine max
agaaggagtcaacccttcaccttgtccttcgtctccgtggtggcatgcagatcttcgtcaagactctcactggcaaaaccataaccctagaggtcgaaagctctgacaccattgacaacgtcaaggccaagatccagacaaggagggaatccccccagaccagaaacgtctcatcttggcgggaaaccatcttgaggccgggcgaaccctggcggattacaatatccagagg

SEQ ID NO: 115939 - DNA, 257 bp, Glycine max
aaaggattgaccgtgagagcttcctccttgcacttcagatggcagtggaagccgataatccttattttcgattgggttacaacagcttgggtgcttttgcaactatcaaccatcttcacttccaggcttattatttgctctgcccttcccaattgagaaggcccccactaagagaattgcaagtgtaaatggtggggtgaagatatctgaactgttgaagtatccggttagaggctttgtctttgagggcggcgaaa

SEQ ID NO: 115940 - DNA, 244 bp, Glycine max
aaagattagtttttgtcaccaataactcaacaaagtctaggaagcaatatggaaagaagtttgaaacacttggcctgaatgtcagcgaggaggagattttcgcatcatcctttgcagctgctgcatatctgaagtccatgatttcccaaaagataaaaaggtttatgtcatcggagaagatggcatcttgaaggagcttgagcttgctggataccagtaccttggtgggccggaagatggtggg

SEQ ID NO: 115941 - DNA, 259 bp, Glycine max
acgtgcctttactacctttaatgccttttggaagaaatgcttgcacatgcaaatggatattgtttcagttgttcctccatggcaattaattccagctgaaggaaaagttgaggaatgtccactggaggagcttggtctgaaaatgaatcagaaaaaccaagcaatgcattactaggacgggcatggtcgccgggttggagaaatgctgacaaggctttaacagaattcgtggagcagcatctactagactactccaaga

SEQ ID NO: 115942 - DNA, 256 bp, Glycine max
agaggtttggggtgccaatggggtatggagggcctcatgcagctttcttggccacttcacaagagtacaagaggatgatgcctgggagaatcattggggtcagtgtcgattcttccggaaagactgctttgaggtggcgatgcaaactagggagcagcatatcaggagggacaaggccaccagcaacatttgcactgctcaggcactgcttgcaaacatggctgccatgtatgctgtgtatcatggacctgaaggc

SEQ ID NO: 115943 - DNA, 255 bp, Glycine max
ggcatccaccactctatcccctacaaccccttctcagctatgctcaggaaaaagtgggattttcagttcctcacaggcacttcttgtgaagccagtgaagaggcagatgatggggaagagcaagggattgagaatgcatgccaagccaccagcatttccgctgatagagtccctgacatgggcaaaagacagctcatgaatcttcttcttcttggtgccatttcactccccactgctggaatgcttattccctac

SEQ ID NO: 115944 - DNA, 256 bp, Glycine max
ctcgattatttgaattgaagataaataagagaataaggcgttgttttgttgtgttgcgttgcgttgcgttgtgtgggtgtgaagctgggaaaatggggagagcctttgtgtatgtgattcttggaggaggcgtgctgctggctatgctgctcttgaattcgtcaagaaaggagtctctcatggtgaactgtgtattatttccgatgaaccagtggctccttatgaaaggcccgcattgagcaaaggatttttgctt

SEQ ID NO: 115945 - DNA, 255 bp, Glycine max
ctcttccattaacgggtggtgcctctcttccatctccccagccaaaacctctctcaagaaggccacattaggcccttctgtcttcgcaaccgttagcactccttcttctccttcttcttcttcttcttcttccttccttctctcattcaagacaggcctgtctttgctgcccctgcccccatcatcaccccaactgtgagagaggatatggcaaaggaatacgagcaagctattgaagaactccagaaattgttg

SEQ ID NO: 115946 - DNA, 272 bp, Glycine max
atttggcaaggggagaccaccaccgcaatgtttgcattatacctgtctcagcacacggaacaaatcctgctagtgcagctatgtgtggaatgaaaattgtctctgttggaactgatgccaagggaaacattaatatagaagagctgggaaggctgctgaaacacacaaggataacttatctgcacttatggtaacatatccttcaacccacggtgtttatgaggaagtattgacgaaatttgcaatatgattcatgataatggaggccagta

SEQ ID NO: 115947 - DNA, 275 bp, Glycine max
  unsure (1)..(275): unsure at all n locations
agcggaggnaggggaagaagaagggagcgagctttgtgatcgattgcgcgaagcggtggaggataaaattatggacattgcttctctggagaagttccttcaggagaggattaaggttggcggcaaggccggtgcactcggcgatccattactgtcactagggacaagagcaagatcaccgtcacctccgacagcaacttctgtanacggtatctgaaatatttgaccaagaagtacttgaaaaagcacaatgtgagggattggctcgcgtgatt

SEQ ID NO: 115948 - DNA, 265 bp, Glycine max
gaaaaacaagtagttgagaactaagaagaaggaaatggcttcctcaatgatctcctccccagctgttaccaccgtcaaccgtgccggtgccggcatggttgctccattcaccggcctcaaatccatggctggcttccccacgaggagaccaacaatgacattacctccattgctagcaacggtggaagagtacaatgcatgcaggtgtggcctccaattggcaagaagaagtcgagactcttcctacttgccagactcgatgatg

SEQ ID NO: 115949 - DNA, 265 bp, Glycine max
aagtagttgagaactaagaaggagaagcaaatggcttcctcaatgatctcttccccagctgttaccactgtcaaccgtgccggtgccggcatggttgctccattcactggcctcaagtccatggctggcttccccaccagaaagccaacaatgacattacctccattgctagcaacggtggaagagtgcaatgcatgcaggtgtggccaccagttggcaagaagaagtttgagactctttcctacctgccagaccttgatgatgc

SEQ ID NO: 115950 - DNA, 276 bp, Glycine max
gcataggattggtgaggtaaacttgaattgaagtgaagaaggagatggctgcaacctcttccttgtgctcatcgaccctccaatcccagatcaatggattcttccttcacaaaacctctctttcccatactccttccctcactttctccaggaggaatttcaaccacagtgaaggctacatctcgagtcgacaagttttcaaaaagcgatatcattgtctctccgtccattctttctgcaaacttttcaaaattgggagagcaggtgaaagcagtg

SEQ ID NO: 115951 - DNA, 278 bp, Glycine max
gtggaatcagcaactatgaatatgatgcggaggttgaagagcattgcttctgggaggacttccatttcttcagatcctggaggggattctaactcaaaaagggccaagtttgaaccagaaactgaagggaaggccgatgagaaacaaataccattgaaacaatctgcacagatcaggaacaacctatagacacatcagaagaaacttccaatgtaggcacatccgatgtatctacagtagctagaactgagaagtcaggtttcgatgagcttcctaaa

SEQ ID NO: 115952 - DNA, 227 bp, Glycine max
gttgagaactaagaaggagaagcaaatggcttcctcaatgatctcttccccagctgttaccactgtcaaccgtgccggtgccggcatggttgctccattcactggcctcaagtccatggctggcttccccaccagaaagaccaactgacattacctccattgctagcaacggtggaagagtgcaatgcatgcaggtgtggccacagttagcagaagaagttgagact

SEQ ID NO: 115953 - DNA, 267 bp, Glycine max
tgaaggagcttcaagaggctaagactgcataccccaacggcttcatccgtatcatcggattcgacaacgttcgccaagtgcagtgcatcagcttcatcgcctacaagcccccaggcttctaagtgtgaaaaatttgcaaagcattttagccgccaccccactttgtttgtttgtacttaaactacattcccatttgtttttgctttttgagattcatcatcctgtattttgggttctgtttcggattcaatggaattaatggatgag

SEQ ID NO: 115954 - DNA, 258 bp, Glycine max
ctcgtgcctctagggttatcatatctccatttccatttcctctctctcagtttccaagaatcttaagctatgggaaagtcttacccaaccgtgagcgctgattaccagaaggccgttgagaaggcgaagaagaagctcagaggcttatcgctgagaagagatgcgctcctctaatgctccgtttggcatggcactctgctggaacttacgacgtgagctcgaagaccgtcgttccttcggaaccataagcaccctccg

SEQ ID NO: 115955 - DNA, 272 bp, Glycine max
gttgaaggaggacaagctaccatgttggacattgatttcggaacttatccctttgttacttcttctagcccatcagcaggcgggatatgcactggtcttggtattgctccaagggtagttggtgatttaataggagtggtgaaggtacacaacaagagttggttctggtccttttccaactgaaattttgggtcaggaggtgatctcctcagatttgctgggcaggagtttggcacaactactggccgcctcgacgtgtggctggtcgatat

SEQ ID NO: 115956 - DNA, 252 bp, Glycine max
agagaatccccgtgtgcccatcatcgtcaccggtaacgatttctccacactctatgcgcctctcatccgtgatgggcgtatggagaagttctactgggcaccaacaagggatgaccgcattggtgtctgcactggaatttttcgaccgattcaattcctgaacaggacgttgtcaagattgttgacaccttccctggccaatccattgatttctttggtgcactgagggccagagtatatgatgacgaatga

SEQ ID NO: 115957 - DNA, 266 bp, Glycine max
aagtagttgagaactaagaagaaggaaatggcttcctcaatgatctcctccccagctgttaccaccgtcaaccgtgccggtgccggcatggttgctccattcaccggcctcaaatccatggctggcttccccacgaggaagacacaatgacattacctccattgctagcaacggtggaagagtacaatgcatgcaggtatggccaccaattggcacagagagttcgagactcttccctattgcaaactcgatgatgcccattggca

SEQ ID NO: 115958 - DNA, 266 bp, Glycine max
agggtttaaattgattctttctggagaattagatggtcttcctgaacaagccttttatttggtaggtaatatcgatgaagctactgcgaaagctacgaacttagaaatggagagcaatttgaagaaatgactttaaatctttggtactgacccccaatcgaattgtttgggattcggaagtgaaggaaatcattttatctactaatagcggacaattggagtattacactcatgcgctattgcacagcgtagatatagtatttgag

SEQ ID NO: 115959 - DNA, 271 bp, Glycine max
caacatttctagagaaatgctgcagcagaacaagatcctgaaagtcatcaggaagaacttggtcaagaagtgcattgagatgttctttgaaattgctgagaacaaggaagactataacaagttttatgaagccttctctaagaactgaaacttggtattcatgaggattctcagaacaagacaaaacttgctgaattgctcaggtatcactccaccaagagtggtgatgagatgaccagcctcaaggactatgttaccaggatgaaggaag

SEQ ID NO: 115960 - DNA, 277 bp, Glycine max
ttcaaggtatgatcctgttcgtcatgcagaaaggttccccatacctcctgctatctgcagtggaaggcgtgaaaagtgtggaattgagaaggagaacaacttcaagcagcccggagagagataccggtcttgggcacctgacagcaagatagatttgctcgccgatgggttgatgctttatctgacccacgggtcacccatgagatccgcagtgtctggatatcatactggtctcaggctgaccgttctctaggccaaaagatagcttctcatctca

SEQ ID NO: 115961 - DNA, 270 bp, Glycine max
cctcaccctcatgcgtacgcgttccttcatgtttttggaaaccaaatggcaagagtagcaaagagcgtactaaggtttcatgtgcagctcacaatgataataagaatccgttggttggaatcggtattggggttgtaacgtctgtgtgatgggtttaactgcattggatgcggacgccacgagaatcgaatactacgcaacagtggcagagcctttgtgtgagtacaactatgttaagtctggcctcggctactgcgatattgctgaagg

SEQ ID NO: 115962 - DNA, 275 bp, Glycine max
catgaacacgctactgagtcgggtgaaggggataaggtgtcatcagcactcattgggagagttgatgctatgcttcaaaatcttgagaaggaaatagatgacgttgatgcgaaaatcggtgaccgttggaggctgctggacaggattatgatgggaaagtaactcctgaggaggtagcctctgctgcaatgtacttaaaggatacattgggaaaggagggtatccaagaactcatcagcagtctttccaaagatagagatgggaaaattcttgtt

SEQ ID NO: 115963 - DNA, 275 bp, Glycine max
gccttggtgacttgaattatcctttgatttctgatgtcaccaaatccatatcgaaatcttatggtgttctcattcctgatcagggaattgcattgagaggtttgttcattattgacaaggaaggggttattcagcattctaccttaacaacttggcaattggtagaagtgttgacgagacaaagagaactctccaaggcctacagtatgtgcaggagaacccagatgaagtttgccctgctgggtggaagcctggggagaattccatgaaaccag

SEQ ID NO: 115964 - DNA, 271 bp, Glycine max
cagattcccctctttcgaatttcgatactttgatcagatccacaacacttcttcatccatgacgcttggttcttcaggatccagtgtcgtggttccaaggaacttcagattgctggaggagcttgagaagggagaaaaaggaatggagatggcacagttagttatggaatggatgatggtgatgacatctacatgcgctctaagtctggaaccattattggtccctatgatactgtacatgaaggaagaattatccattgaactgtttgtg

SEQ ID NO: 115965 - DNA, 210 bp, Glycine max
atatgagagagcacaggctcgcttctgggctaggtttattgatgagaagtgtgtgttagctgtatggggagctaccgtggcgcaaggagaagagaaagagaaagctgtgggtgctgcactagagtctctggcacttcttgagaggaaattcaagggaagaagtattttggtggagagaagattggttatcttgatattgcagctggctgc

SEQ ID NO: 115966 - DNA, 261 bp, Glycine max
gtgagcatccccaacggtccctctgctctggcagttaaggaagctgcctggggtctggctcgctatgcagcaattgctcaggacaatggattggtcccaattgtggaaccagagatcttgcttgatggggagcatggtattacagaacttttgaagtagcaaaaaaggtctgggcagaggttttcttctaccttgctgagaacaatgtcctttttgagggtattcttcttaagcctagcatggttacacctggagctgagt

SEQ ID NO: 115967 - DNA, 273 bp, Glycine max
gaagaactccagaaattgttgagggagaagagtgaactcaaagccacagctgctgagaaagtggagcagataacagcttctctgggaacatcatcatctgatggcatcccatcatcagaagcctcagacaggatcaaagctgtttcattcacttcaagaaggagaaatatgacaagaatccagctttgtatggtgaacttgccaaaggccagagccccaagtttatggtgtttgcttgctcagactcaagggtgtgcccatctcatgtgctag

SEQ ID NO: 115968 - DNA, 273 bp, Glycine max
gcagtacgttggcctctggaacggtaagcgaatctccgccaatcttccttacaaggttcagtttctcaccgacatccccggtcgtggtcctgtcaagttctttgcccacctcaaggaagatgaattcgactatctttagtcatgtactgcactgcactgccctgcacgtcactgttgttgtgtccctgtacttgttggtaaaagcaatggtatccttcggcaaatctgtcttttgaacctactatgattttactgacctcgaaaactcaactc

SEQ ID NO: 115969 - DNA, 228 bp, Glycine max
agaataccccctcttttgctgcatcagaggagttgtaaattaagagcatggctgcacaagctcttgtatcatcatcttctcttaccttctcagcggaggctgcaagacaaagtcttggaccaagatcactccaatctccatttgcttctccagaaaagcctcctttcttgttaaggcagctgctaccccccctgtcaagcaaggatcagacagacctttgtgggttgc

SEQ ID NO: 115970 - DNA, 271 bp, Glycine max
  unsure (1)..(271): unsure at all n locations
cttcgtctcaaatctcttcgttccttcgattcgttccatttcttccaaaatggccaaagacccagttcgcgttctcgtcactggagctgcagggcaaattgggtatgctcttgtccctatgattgctaggggagtgatgttggtcctgaccagcccgtgantctccacatgcttgacattcctccggcagcagagtcattgaatgggggtaaaatggaattgggtggtgctgcattcctcttctaaaagtgctgttgcacactgatgtggt

SEQ ID NO: 115971 - DNA, 276 bp, Glycine max
gacaaaaccatactccagggaatatgcagccttcccagctccttggctccgtactgcaaagttctggcctaccacaggacgtgttgataatgtgtacggtgaccgcaacctcatttgcacccttctcccagcatcacaggctgtgaagaacaagcagctgccacagcataatgtgttcaaatgacaactattttcatttcccgttgtacataaactcttattccctatcatacagttcttgcacttgttgaatattgcttcatcatatgtgacaat

SEQ ID NO: 115972 - DNA, 274 bp, Glycine max
ggatttgttagtgaagcaatggctcaaaccatgttgctcatgtctagtgtctctagcagttattccgtggatttgaagaaagaccttttcctccaattgcagagtcaaagtttaaggcctaagttctctcagctctcattcacccacttccatcatcaacttcttccttttcttcacccgtacattcacaactctggccctcttcaaatctaagaccaaagccgctcctgctaagactacggttacaaagccaaagcaaaaggttgaagatggt

SEQ ID NO: 115973 - DNA, 256 bp, Glycine max
agaagaagcagaaagagaagcattagcaaaagcaagaagaactagtctaagcagaaatggcctcttcagtgatggcatctgtggccctcaaacctccccctttcactgttgagaagtcctcagttagaggccttccctcccctcaaggaactcctcttcattcagagttgtggccagtggtggcaagaagatcaagactgacaagccttatggaattaatggtggcatggctttgagggaaggagttgatgcatct

SEQ ID NO: 115974 - DNA, 250 bp, Glycine max
gaagatcaagactgacaagccttatggaattaatggtggcatggctttgagggaaggagttgatgcatctggcaggaaaggaaagggaaagggcgtttaccagtttgtagacaaatacggtgctaatgtcgatggttacatcctatctacgacaccaaggactggtctccaaccggtgatgtctacgctggcggtacgactggcttggctatctgggctgtgactctacttggtcttcttgctggtggtg

SEQ ID NO: 115975 - DNA, 274 bp, Glycine max
cacccacgcggctctagcttctacaaggatccccactaacaccaagttcccatccaaggcttcacactctttcccaacccaatgcgcctcaaagagacttgaggtgacagaattctctgggctaagatccacttcatgtgtacatatgctaacgatgctagagaatcttccttttttgatcttgtagcttcccaactcactcccaagaccaatggatcatcaactcctgtgaggggagagacagtggccaagttgaaggtggcaatcaatggtt

SEQ ID NO: 115976 - DNA, 240 bp, Glycine max
caaagaaaaaaaaaaacccttagccaacacaaccatcaagctccacctctgctattcagcaatcagcattcactggtcaaactgctctgaagcagctcaatgagttcgtccgcaagaccggtggcgccggcaaaggtcgcacaacatgcgccgcaccgtcaagagtgctcctcagagcatttggtatggccctgaccgtcccaagtacttgggtccattctcggagcagattccatcata

SEQ ID NO: 115977 - DNA, 264 bp, Glycine max
ggcttatggtggatacctaggcacccagagacgaggaagggcgtagtaagcgacgaaatgcttcggggagttgaaaataagcgtagatccggggattcccgatataggtcaacctttcgaactgctgctgaatccacgggaggcaagagacaacctggtgaactgaaacatcttagtagccagaggaaaagaaagcaaaagcgattcccgtagtagcggcgagcgaaatgggagcagctaaaccgtgaaaacgggttgtgggag

SEQ ID NO: 115978 - DNA, 273 bp, Glycine max
tatagcccaagccctatacaaccaaaccctaacacacacccatttgattcagtttccatggctagcctcaaggttgcatttttggctgcagtgctctgcatggttgtggtgagtgcacccatggcacatgcagctatcacggcgggcaggtgacgaatagcctgatcaattgcatcggttacctccagaacggaggaacgccgccgtcgggatgctgcaacggagtgaagagcctcaatgccgccgccaagaccaccgccgaccgccagacgg

SEQ ID NO: 115979 - DNA, 273 bp, Glycine max
gaaaaagcgttccacgcagcctttccttatctgcatcacaactttgtggagacaagattcccacagattcagttttattggcaccaaaaataggtcgcagtccagttatcgttactcctaaagcagtttctgattcccaaactcacaaacgtgccttgatcccgatgctagcagaagtgtgcttggcattatacttggaggtggtgctgggactcggctttatccactcaccaagaagagggcaaagccagctgttcctcttggagctaacta

SEQ ID NO: 115980 - DNA, 249 bp, Glycine max
accaatatagcccaagccctatacaaccaaaccctaacacacacccatttgattcagtttccatggctagcctcaaggttgcatttttggctgcagtgctctgcatggttgtggtgagtgcacccatggcacatgcagctacacgtgcgggcaggtgacgaatagcctgatcaattgcatcggttacctccagaacggaggaacgccgccgtcgggatgctgcaacggagtgaagagcctcaatggcgg

SEQ ID NO: 115981 - DNA, 231 bp, Glycine max
caatatagcccaagccctatacaaccaaaccctaacacacacccatttgattcagtttccatggctagcctcaaggttgcatttttggctgcagtgctctgcatggttgtggtgagtgcacccatggcacatgcagctatcagtgcgggcaggtgacgaatagcctgatcaattgcatcggttacctccagaacggaggaacgccgccgtcgggatgctgcaacggagtga

SEQ ID NO: 115982 - DNA, 244 bp, Glycine max
agccaccgtaccgtgttgcctctctgcaatctacagccaaaatgcctttcaagaggtacgttgagatcgggagggttgcccaaatcaactacggcaaggaatatggcaggctcgtcgtcattgtcgacgtcattgatcagacagagctcttgtcgatgcccctgatatggtgaggtcccaagtcaatttcaaaaggctttccctaaccgatattaagattgacattaagaggggtcctaagcag

SEQ ID NO: 115983 - DNA, 253 bp, Glycine max
gaagaatcactcccttatccatttccacaccacaccatggcatcaaccaacgctctctcttcagcctccattctacgctctcccaaccgccagtctctgacccgaagagcgaaccataatggaagagtaaattaccggaaccgaataaccgtttctccgtgaaagcctccgccaaagagattgcctttgaccagcattcacgctctgctatgcaagccggcattgacaagctcgacgacgctgttgggctcat

SEQ ID NO: 115984 - DNA, 267 bp, Glycine max
aaaacctctctcaagaaggccacattaggcccttctgtcttcgcaaccgttagcactccttcttctccttcttcttcttcttcttcttccttcccttctctcattcaagacaggcctgtctttgctgcccctgcccccacatcaccccaactgtgagagaggatatggcaaaggaatacgagcaagctattgaagaactccagaaattgttgagggagaagagtgaactcaagccacagctgctgagaaagtggagcaggttacagc

SEQ ID NO: 115985 - DNA, 268 bp, Glycine max
aacagattgctcttgcaatttcttcaccaacttccatgtgggtttcttgggttactggggatgcacagattggcctcaacgtgaccccagtagatcctgcatctgttggaagtgaggtgtggtatgggaaaaagagtggaagtacacaagtgttgggaaaggtgattctgttgtttacagtcagttgtatcccttcgaaggcctatggaattacacctctggcatcattcaccatgtgaaactcaaaggtcttgaacctggaaccaga

SEQ ID NO: 115986 - DNA, 247 bp, Glycine max
  unsure (1)..(247): unsure at all n locations
cagatcgtgagaggggcagtagccgagattccgtgagttgcaaaaatgaagacgattctttccaccgagaccatgaacatcccggacggcgtgagcatcaaagttcatgccaaggtcatcgaagttgagggcccccgcggaaattggtgcgagacttcaagcatttgaatctcgattttcagctcattactgacganaacggtaanagcaagctgaaaatcgacgcgtggtttggttctcggaaaac

SEQ ID NO: 115987 - DNA, 270 bp, Glycine max
gtgatgggtgaacttttaggtcttaaatggattaagaggaagaccaggctatgagcatctcaatgagcaactccatattttgattgaggctgatttacctgctaatattgttgacataaggctccggcaggctcaggaattatagaagaactactcaaacctgtggaagagtctgaggactatattaagaggcagcagttgcgtgaattggctatgctgaattcaaatttcagagaagagagtcccggaccaagtggaagtgtatctcca

SEQ ID NO: 115988 - DNA, 244 bp, Glycine max
caactacaaaggttgctgtaggagataagatattgaagtagtgctaagtgcctaacacctgcagtgaacaatggcctctgcatcagcatctcttctcaagtcttcacttgttcttgacaagtctgagtgggtgaagggcaaacacttcgccaaccttctgctgcatcagttgtgagatgcaaccccaccaccccatcaggcctcaccatcagagctggttcctatgctgatgagctcgttaaga

SEQ ID NO: 115989 - DNA, 262 bp, Glycine max
gtgggggccggagaaggaggaggcgtacggcggcggcgtacggtggaggagaaaccgacgaatcgagacggagacggagaagctgaagaaggccttggtggattcgttttatggcaccgatcgtggactgaaagcagagcgaaacgagagcggagatcgttgaactcatcacacagctcgaggccaagaaccctaaccctgttcccaccgacgccttgactcttctcaacggaaaatggattctcgcgtatacatcctttgc

SEQ ID NO: 115990 - DNA, 269 bp, Glycine max
tgcacacacattcagtcataacgtaaaatatgaaattagacactatcttcgcctttatcgtagtttatattctgctggtaacctcatcagagttccctagtgttgctgcagatgatgttagcagcatcatcagtgcttccaatttgagcaattgctgaaacacagaaacgatcaaatttgtgaggggaagaacggattctacagctacaatgcttttgtcactgctgccagaacctttgatgggcttggcactacgggtgatgttacac

SEQ ID NO: 115991 - DNA, 268 bp, Glycine max
ctcgagccgctttgagagagagagagggaggagggagagtgttgacgctccatcaagatgggtatttctagggattccatgcacaagaggcgtgccactggtggcaagaagaaggcatggagaaagaagagaaagtatagcttgggcgtcaggccgcaaacaccaagttatcaagcaacaaaactatccggaggattcgtgttcgaagtggcaatgttaaatgcgaggcattgaagttggaatacggcaaatactcatggggtagtga

SEQ ID NO: 115992 - DNA, 267 bp, Glycine max
gcattgaattcaaaaacttaagttcattccttgtgttttgctttcttcctcaaaaccaaacatgtcgaacacatgcggcaactgcgactgcgctgacaagactagctgcaccaagggaaacagctatggtgttattgtgagactgagaagagttacatcgagactgttgtcatggatgttccagcagctgagcatgatgggaagtgcaagtgtggcactaactgcacttgcacggactgcacctgtgggcattaagggatatgtatg

SEQ ID NO: 115993 - DNA, 270 bp, Glycine max
gccttatgtcatagtattatcattcattctcatctttctctcttctctctccacccaaaccctaactcccgaccctgttcccctctcgtatccgtcatgaaaggaggaaagtccaagaccgaatctaagagagccgatccaaacttgctgtgaataagaagggagccgccaccaaggctaggaaacccgccggcaaggggaaggcagcgaaagaccctaacaagccaaagaggcctccaagtgctttcctcgttttcatggaggagttca

SEQ ID NO: 115994 - DNA, 270 bp, Glycine max
gccatggctgactccgtctccactgtcggagctgtcaacagagctcttttgaacctgaatggttctggagctggagcttcagctcccagttcagccttctttgggaccagcttgaagaaggttattgcctcaagggtcccaacagcaaggtttccggtggaagcttcaagattgttgctgtagaagagaagaaagagattgaagagacccagcagaccgacaaggacagatggaagggtcctgcctatgatatctcagacgaccaacaag

SEQ ID NO: 115995 - DNA, 268 bp, Glycine max
cggcaacgttagggagtccggagacgtcggcgggggccccggaaagagttatcttttctgtttaacagcctgcccaccctggaaacggctcagccggaggtagggtccagcggctggaagagcaccgcacgtcgcgtgtgtccggtgcgcccccggcggcccttgaaaatccggaggaccgagtgcctcccacgcccggtcgtactcataaccgcatcaggtctccaaggtgaacagcctctggtcgatggcacaatgtaagcaaggg

SEQ ID NO: 115996 - DNA, 258 bp, Glycine max
cacacactgtgtttgtgaaactctcacacagacaagtcacaacaacaagtttctgttggtccaatggcatcagcaacacaccttttgaaagatgagctggacatcgtgatcccaacgatcaggaacctggatttcttgagatgtggaggccattctttgagccttaccatctcattattgtgcaagatggagacccttcaaagatcatcaaggtccctgaaagctttgactatgagctctacaaccgcaatgacatca

SEQ ID NO: 115997 - DNA, 227 bp, Glycine max
cttcttccatcggcgcggcacccacacacacagttcgtcggaatggcaagggtgattcgcgctcagcgtaagggtgctgggtcggtgttcaagtctcacactcactaccgcaagggtccggcgaggttccgcagcctcacttctgcgagcgcaacggctacctcaagggcgtcgtcaccgacatcatccacgaccccggtcgctgcgccctctcgacaaggtgcatt

SEQ ID NO: 115998 - DNA, 241 bp, Glycine max
cactgtccaccatgagtttaccttcactgttcaggatggaatagatgccattgaagatgttatctaccatattgaaacatatgatgtgactacaattagagcaagcacacctatgtttctcatgtctcggaagattaatcacttggtgtcaaatgggttatctcaggagaaggatctgatgagatctttggagggtatttgtacttccacaaggcacccacaaaggagagttcacagagaa

SEQ ID NO: 115999 - DNA, 268 bp, Glycine max
ggctaaccaaccctgacactccttcttctccgcttcctcttcgatcatcgcttcagaatgccgccgaagttcgacccctcccagatcgtcgacgtcttcgtacgcgtcaccggcggtgaggtcggcgcggcgagttccctcgccccgaagatcggtcccctcggtctctcccccaagaagatcggagaagatatcgccaaggaaaccgccaaggactggaagggcctccgcgtcaccgtcaagctcaccgtgcagaaccgtcaggcca

SEQ ID NO: 116000 - DNA, 261 bp, Glycine max
agcggaggcagcgggaagaagaagggagcgagctttgtgatcgattgcgcgaagcggtggaggataaaattatggacattgcttctctggagaagttccttcaggagaggattaaggttggcggcaaggccggtgcactcggcgattccattactgtcactagggacaagagcaagatcaccgtcacctccgacagcaacttctctaaacggtatctgaaatatttgaccaagaagtacttgaaaaagcacaatgtgaggg

SEQ ID NO: 116001 - DNA, 282 bp, Glycine max
cctaatcggagagtctcccgctgactgcgatcggatttcatggctcctaagaaagacaaggctcccccaccttcatccaagcccgccaagtctggtggtgggaagcagaagaagaagaagtggagcaagggaaagcaaaaggagaaggtgaataaccaggtgctgttcgatcaggctacctatgacaagctcctctccgaggcacccaaatacaaactcattactccttccattctctctgaccgtttgaggattaatggatcacttgcaaggaaggctatt

SEQ ID NO: 116002 - DNA, 266 bp, Glycine max
aacacaacaacatatggaggtgctaagggtgcaaaccatagcttccaaatccaaagatgctgccatcccagccatgtttgttagggcagagacagagcaaccaggcatcacaaccgttcaaggggtgaaccttgaggtgccaattattgattttagtgacccagatgaagggaaagtggtgcatgagattttggaggcaagtagggactggggcatgttccaaattgtgaaccatgacatacctagtgatgttataagaaagttgc

SEQ ID NO: 116003 - DNA, 267 bp, Glycine max
ggcctagccagctagcgcttcttctctcgcattccgtggagatctagtgctgccaaacctcgctgaaaattagggtttcgtttcggaggtagacgaagatgttcggaagggcaccgaagaaaagcgacagcaccaggtactacgaaatcctcggcgtttcgaagaacgcttcgccggatgatttaaagaaggcttacaagaaagccgccattaagaaccaccctgacaaaggcggtgatcctgagaagttcaaagagcttgctcaag

SEQ ID NO: 116004 - DNA, 263 bp, Glycine max
ggaatgttcccaattctctgtttttttgcttttgtccatttttgtgggaatttgtttagcttctactgaggaacaggaaagggacaggattgccaagctgccaggacaaccagaaaatgtgctatttgcacactactcaggctatgtgactgtgaatgaagaagctgggagagcattgttctattggctggttgagacaccagctagtattgaaccaagttcaagaccactagtgttgtggctcaatggtggacctggatgct

SEQ ID NO: 116005 - DNA, 259 bp, Glycine max
ctcatacaaaggttgctgtaggagataagattgcagtagtgctaagtgctaacacctgcagtgaacaatggcctctgcatcagcatctctgctcaagtcttcacttgttcttgacaagtctgagtgggtgaagggacaaacccttcgccaaccttctgcatcagttgtgagatgcaaccccaccaccccatcaggcctcaccatcagagctggttcctatgctgatgagctcgttaagaccgcgaaaacagtggcttca

SEQ ID NO: 116006 - DNA, 259 bp, Glycine max
cagaagaacaagtagttgagaactaagaaggagaagcaaatggcttcctcaatgatctcttccccagctgttaccactgtcaaccgtgccggtgccggcatggttgctccattcactggcctcaagtccatggctggcttccccaccaggaagaccaacaatgacattacctccattgctagcaacggtggaagagtgcaatgcatgcaggtgtggccaccagttggcaagaagcgtttgagactctttcctactgcca

SEQ ID NO: 116007 - DNA, 266 bp, Glycine max
caagcaccggccatccagcgccttcaattctcccttctggactacaaattctggtgctcctatttggaacaacaactcctctttaaccgttggagctagaggtccaattctgctggaggattatcatcttgtggagaagcttgcaaattttgatagggaacgtatcccagaacgtgttgtccatgccaggggcgctagtgcaaagggtttctttgaggtcacccatgacatttctcacctgacatgtgcagatttccttcgagccc

SEQ ID NO: 116008 - DNA, 264 bp, Glycine max
gaacaagtagttgagaactaagaaggagaagcaaatggcttcctcaatgatctcttccccagctgttaccactgtcaaccgtgccggtgccggcatggttgctccattcactggcctcaagtccatggctggcttccccaccaggaagaccaacaatgacattacctccattgctagcaacggtggaagagtgcaatgcatgcaggtgtggccaccagttggcaagaagaagtttgagactctttcctacctgccagacttgat

SEQ ID NO: 116009 - DNA, 265 bp, Glycine max
gagagtttcaagcgtgatatgagggatttggaagagcttttgtcaaagttgaatcccatggctgaggaatttgtgcccccatcactaaccaatactcatggctacctacctggacctggtgccggtgctggtgccgggtttggttaccctaataattttatactgctcaataactttggtgatgctaacggtcaaactaacagaaggaggaagaatggctataatcatgggaagcgaagagtgaatcataaaatggatatggaga

SEQ ID NO: 116010 - DNA, 263 bp, Glycine max
ttaagccatgcatgtgtaagtatgaactaattcagactgtgaaactgcgaatggctcattaaatcagttatagtttgtttgatggtatctactactcggataaccgtagtaattctagagctaatacgtgcaacaaaccccgacttctggaagggatgcatttattagataaaaggtcaacacaggctctgcctgttgctttgatgattcatgataactcgtcggatcgcacggcctttgtgccggcgacgcatcattcaaat

SEQ ID NO: 116011 - DNA, 262 bp, Glycine max
atgatactactaagcttgctggccttcttgagaacttcattaagaaatatgtccagtgttatggttgtggaaatcctgaaactgagatcataatcactaagaaccaaatgatccagctgaaatgcgctgcttgtggttttgtgtctgatgttgatatgagagacaagctgactaccttcatcattaagaaccctccagaagttaagaaaggatccaaagacaagaaggccatgaggagagctgagaaggagagacagaagga

SEQ ID NO: 116012 - DNA, 264 bp, Glycine max
tattcctcactaggagctcctctccactggttcttcatctgcatgcacacagttgcatagttttggaaaccaagaattcctgaagaagggtagcatcaacaagcagttctgaaaatggagatcaccaatgtcagtgagtatgaggctattgcaaagcagaagttgccaaagatggcgtttgactactacgcatctggtgcagaggaccagtggactctgcaagagaacagaaatgccttttccagaattttgtttcggccacgt

SEQ ID NO: 116013 - DNA, 264 bp, Glycine max
gaaacctctaatcgaaagattgaaatacttgaagctttgagtgaatcaagtacaaaggaggttgctaatgaaggcgacaatgtggagagtaaaggtgaaaaccccccaccgttggctggggccaatgtcatgaatgtcatattggttgcagcagaatgtgctcccttcgtcaaaacaggtggtcttggagatgttgctggatcattacctaaggctttggctaggcgtggacacagagttatggttgtagtacctcggtatagt

SEQ ID NO: 116014 - DNA, 262 bp, Glycine max
tactgcttcaccttctgctctagaaaattcagtgctgaaacatggcttcggctactctctctgtagccaaaccagcccttcaggttggaagcagtggaggatacaagaagggtgtgacagaagcaaaactgaaggttgccataaacgggtttggaaggattggaaggaacttcttgaggtgctggcacggtcgcaaagactcccctcttgatgtcattgccatcaacgacaccggcggcgtgaaacaagctctcacttctca

SEQ ID NO: 116015 - DNA, 261 bp, Glycine max
gtctcacttgactcgattgcaagtgatccacgacacactgttcgcttcacaaaagcttcgaatccaattcctcagtaacatctgcaagaagtcttctccttcaccatgccaccaaagcctttagactatgggtcaataaatgaaaacgtgaagaagagtcaatatgctgtcagaggtgaattataccttcgagcttctgagcttcagaaagagggcaaaaagattatatttactaatgttggcaacccacatgcattggga

SEQ ID NO: 116016 - DNA, 257 bp, Glycine max
cttctccattggttcttcatctgcatgcacacacttgcatagttttggaaaccaagaatttttgaagggtagcatcaacaagaagttctggaaatggagatcaccaatgtcagcgagtatgaagctattgcaaagcagaagttgccaaagatggtgtttgactactacgcatctggtgcagaggaccagtggactctgcaggagaacagaaatgccttttccagaattttgtttcggccagtattcttattgatgtg

SEQ ID NO: 116017 - DNA, 247 bp, Glycine max
tatagcccaagccctatacaaccaaaccctaacacacacccatttgattcagtttccatggctagcctcaaggttgcatttttggctgcagtgctctgcatggttgtggtgagtgcacccatggcacatgcagctatcacgtgcgggcaggtgacgaatagcctgatcaattgcatcggttacctccagaacggaggaacgccgccgtcgggatgctgcaacggagtgaagagcctcaatgccgccg

SEQ ID NO: 116018 - DNA, 262 bp, Glycine max
cttgatttgatcaagggtggatttcccagcggaaaatacctctttgctggagtggttgatggaaggaacatctgggccaatgaccttgctgcttctctcactaccttgcagggtcttgagggcattgtgggcaaagataagcttgttgtgtccacctcctcctcccttcttcacactgctgttgatctagttaacgagaccaagttggatgatgagatcaagtcatggctagcttttgctgcccaaaaaattgttgaagtta

SEQ ID NO: 116019 - DNA, 264 bp, Glycine max
cattgctccagcttttatggacaaacttgttgttcacattaccaagaacttcatgaccctgcccaacatcaaggttcctctcattcttggtatctggggaggcaagggacaaggaaaatctttccaatgtgagcttgtctttgccaagatgggaatcaaccccatcatgatgagtgctggagagttggaaagtggaaatgcaggagagccagcaaaactgatcaggcagagataccgtgaagccgcagacttgatcaagaaggg

SEQ ID NO: 116020 - DNA, 260 bp, Glycine max
aaaaaagagaaacaaatggcagcactgggtggctttaccgacatcaccggagcacagaacagcatcgatatcgaaaatctcgctcgctttgctgttgatgaacacaacaaaaaagagaatgcagttctggagtttgtgagggtgattagtgcaaagaaacaagtggtttctggcaccttgtactatatcactttggaggcaaatgatggtgtgacgaaaaaggtttatgaaactaaggtgttggagaaacatggttgaac

SEQ ID NO: 116021 - DNA, 262 bp, Glycine max
gttgtcgatagtgaaacttgaaagagtaaagacagcagagtgcgtacaagctctggaacttttctggccagaggtcgtgataagattgtcaggaatattgagaaaaaaatttctgactttactttcattcctgttgagcatggtgaaggacttcaagttctgcactatgaagttggacaaaagtatgagcctcactatgactactttcttgatgattttaacactaagaatgggggtcagcgtatagcaacagtgctgatgt

SEQ ID NO: 116022 - DNA, 257 bp, Glycine max
aagagaagcattagcactaggagcagcaacaactagtctcagctgaaatggcctcttcagtgatggcatctgtggccctcaaacctgcccctttcactgttgagaagtcctcagtgagaggccttccctctctctcaaggaactcttcttcattcagagttgtggccagtggcaagaagatcaagactgacaaaccttatggaattaatggtggcatggctttgagggatggaactgatgcatctggcaggaaagga

SEQ ID NO: 116023 - DNA, 251 bp, Glycine max
gttgttgtggtgtttcatttgtgaaactaacaacaacacaaggccatcatcatggcagctgcttccccaatggcaagccaactcaagtccaccttcactaggactcttgtagctcccaagggcctctctgcctcttcaccacttcacctcgtgccttctagaaggcaatttagcttcactgttaaggccatccaatcagagaagccaacctatcaagtgattcagccaatcaacggtgacccattcattgg

SEQ ID NO: 116024 - DNA, 260 bp, Glycine max
gtgattatagactatctttatataataatataaataagaataaaaaaataaaaaaaaaaaaagaatctatataaatataaaaataatatatataaggtacaaatagtaaatcgaggtacccattttatgataaactttccttccatttttgttcctctagtaggcctagtatttccggcaattgcaatggcttctttatttctttatgttcaaaaaaacaagattttttagatacagaaaacaaagtaaaattctggggt

SEQ ID NO: 116025 - DNA, 260 bp, Glycine max; identical to SEQ ID NO: 115538

SEQ ID NO: 116026 - DNA, 261 bp, Glycine max
catagcatctcctttaccaccattctagatatcagagaactttgcagctctcttaggtttttaaaaaacaccacgcaaacagcaagatggccacttccgacagtaacatgctactaaattatgttccagtttatgtgatgctcccactcggagttgtcaatgttgacaatgtttttgaagacccagatggccttaaagaacagctcttgcagcttcgagctgcgggtgttgacggggttatggttgatgtgtggtggggga

SEQ ID NO: 116027 - DNA, 257 bp, Glycine max
gtttccttcatcttcttcttcttcttctatctctctacaacacacttttttaagtgattcgttcgcagaaacatggcttcttcgtttctatccgcagcttcgcacgctgtctcaccctcttgttctctgtccaccacgcacaagggaaagcccatgcttggaggcaacactttgagatttcacaaaggacccaattccttctctagttcaaggtctagaggtcggatctctatggctgttgcagttaatgtatctcg

SEQ ID NO: 116028 - DNA, 261 bp, Glycine max
gtgcattattcaatggccaccacagcagctctatccggaaccatggtgagcacctccttcatgaggaagcaacctatgacgaccaagagcctaaagacattccccaacgctctttttggtctgaaaggtggacgaggtggtcgtgtaacttgcatggcctcgtacaaggtgaagctcataaccccagaaggagaagtggagtttgaatgcccagatgatgttttcattgttgacaaggctgaggaagaaggcattgaactt

SEQ ID NO: 116029 - DNA, 259 bp, Glycine max
ctagtttcctacaaagctctactctactgcttcaccttctgctctagaaaattcagtggtgatacatggcttcggctactctctctgtagccaaaccagcccttcaggcaaatgggaaaggcttctctgaattctctggcctccgcagctcatcaggcttccttcccttttctagaaaatcttcagaggatttccattctgtcattgccttccagacctatgcagttggaagcagtggaggatacaagaacggtgtgac

SEQ ID NO: 116030 - DNA, 255 bp, Glycine max
acgagtacatcggcatggtgcggcgcgaggtgctggacgcttacctcagggaccgcgccaaggagtacggtgcgaacgtcatcaatggcttgttcttgaaaatggatattcctaaggataagaactccccctacgttctgcattactctagctacgatggcaaaaccaatggggctggtgagaagcgtaccttggaagttgacgctgtcattggcgctgacggggctaattctagagtcgccaagtctattgatg

SEQ ID NO: 116031 - DNA, 259 bp, Glycine max
agaagaacagagagagatccatccatcaattccaatggccgatcagctcaccgacgaacagatctccgagttcaaggaagccttcagcctcttcgacaaggacggggatggttgtattaccaccaaggaacttgggaccgtgatgcggtcacttggccagaacccaactgaggcagagctgcaggacatgataaatgaggttgatgctgatgggaatggtaccattgatttcccagaattcctgaatctcatggctcgc

SEQ ID NO: 116032 - DNA, 259 bp, Glycine max
cacagtcacacttttgtgaaggcctaggattgctgagtcaaacttgaattgaaggtgaagaaggagatggcagcaacttcttccttgtgttcatcgaccctccaatcccaaatcaatggattctgccttcacaaaacctctctttcccatcctcgttccctcactttctccaggaagaaaatttcaaccacagtgaaggctacatctcgtgttgacaagttttcaaaaagcgatatcattgtttctccatccattcttt

SEQ ID NO: 116033 - DNA, 257 bp, Glycine max
gttgcgaccatcctcagttacctgaccaaggcccctctggttccaccgagtacgccagtggttaatgcactgtcaaagcagcgagctatgctggaaaacatcctaagggcttgtgttggattagctcctgagaacaacatgatcctggagtacaagtgaagttcaaagtcttaagagtaatggtttgggatactgtagttgaatgagatcaaaacttaactcatatcccataccctcttttctgttatatatttatg

SEQ ID NO: 116034 - DNA, 252 bp, Glycine max
ctcccaccaacttcaccgtcttcttcctcgatcatgtctcacttcaagggcaagtaccatgatgagcttattgccaatgctgcttacattggcactcctggaaagggtattcttgctgctgatgagtcaacagggacaattggcaagcgtttggccagcatcagtgtagagaatgttgaatccaacaggcgtgctcttagggagctgcttttcaccgctcccggtgctcttaaatatctcagtggtgtcatc

SEQ ID NO: 116035 - DNA, 247 bp, Glycine max
ggagaagcaaatggcttcctcaatgatctcttccccagctgttaccactgtcaaccgtgccggtgccggcatggttgctccattcactggcctcaagtccatggctggcttccccaccaggaagaccaacaatgacattacctccattgctagcaacggtggaagagtgcaatgcatgcaggtgtggccaccagttggcaagaagaagtttgagactctttcctacctgccagaccttgatgatgca

SEQ ID NO: 116036 - DNA, 261 bp, Glycine max
attcctcactaggagctcctctccactggttcttcatctgcatgcacacagttgcatagttttggaaaccaagaattcctgaagaagggtagcatcaacaagcagttctgaaaatggagatcaccaatgtcagtgagtatgaggctattgcaaagcagaagttgccaaagatggcgtttgactactacgcatctggtgcagaggaccagtggactctgcaagagaacagaaatgccttttccagaattttgtttcggccag

SEQ ID NO: 116037 - DNA, 258 bp, Glycine max
ccatggccagggccaaggtgtttgatatcgacctgcagaaacagttgaggccgtacatggaatccatggttccactccccggaatctatgacccggatttcattgctgccaaccaaggagaccgtgccactaacgtaatcaggggcacaaagaaagaacaagttcaacaaatcatcaaagacattaaggagttcaaagaaagcactaaggttgacaaggtggttgtcctgtggacagccaacacagagaggtacagca

SEQ ID NO: 116038 - DNA, 261 bp, Glycine max
agaaaaatggcagaaacaaagttgagctccttcaaagacaaaagatggtcactccatggcatgacagctctagtgacaggaggcacacgaggcatagggtacgcaatagctgaagagttagcagaatttggggcagctgtgcatatttgtgcacgtaaacaacaagatattgataaatgtttagaagaatggaataagaaaggacttcccataacagggtcggcatgtgatgtactatctcgtgaccaacgtgaaaattta

SEQ ID NO: 116039 - DNA, 257 bp, Glycine max
agcagaccgacaaggacagatggaagggtcttgcctatgatatctcagacgaccaacaggacatcacaagaggaaagggtttggttgactcccttttccaagctccacaggatgctggaactcactatgctgtcatgagctcctacgagtaccttagcactggacttcgccagtacttggacaacaacatggatggattttacattgctccagcttttatggacaaacttgttgttcacataccgagacttcatgac

SEQ ID NO: 116040 - DNA, 255 bp, Glycine max
cgagaaagtgagaggagagagaaagtagcagatcctccatggcctccaccaaggaacgtgaaaacttcgtctacgtcgccaagctcgccgaacaagccgaacgctatgaagaaatggtggaagcaatgaagaatgtggcgaactaaacgtggaattgacggtagaggagcggaaccttctgtcggttgggtacaagaacgtggtgggtgctcgtagggcttcgtggaggattctttcctcgattgaacagaaaga

SEQ ID NO: 116041 - DNA, 257 bp, Glycine max
cattgctacatagggctatatagcataaacatttgagtcttcattgcacaatgtcaacctcttccataaacgggtggtgcctctcttccatctccccagccaaaacctctctcaggaaggccacattacgcccttccgtcttcgcaacccttaacactccttcttctccttcctcttcatcttccttcccctctctcattcaagacaggcctgtttttgctgcccctgcccccatcatcaccccaactgtgagagag

SEQ ID NO: 116042 - DNA, 258 bp, Glycine max
gtttccaacatttcttgcttcataattcaagtgaggtcataacacaacacaaagtgttgccaacttcgtggttcatattggttggttcagttaagagtgtggagaacaaagaagatacttagattatggctgctcgtaacatcgagaagatggcctcaattgatgctcaactgaggttgctggcgccacgcaaggtgtctgatgatgacaaactcgttgagtatgatgccttgttgttggatcgtttccttgacattc

SEQ ID NO: 116043 - DNA, 253 bp, Glycine max
  unsure (1)..(253): unsure at all n locations
gcggaaaatggttcaattgagctgaacaagtttgtgttgttttgtttgttgttgctaatacaagtggcagtttctgaaatcatttttgaagagcgatttgatgatggatggcgaagtaggtgggtgaaatcagactggaaaagcagtgagggcaaagcaggttcattcaagcacacagctggaaaatgggctggtgatccagatgacaaagtattcaaacatccagtgatgccanacactttgccatctctgc

SEQ ID NO: 116044 - DNA, 251 bp, Glycine max
attcattcaagattcagcaagtgcgttttggaagcagagaccgaaatacttcgagatggcccgtacaaagcaaactgctcgtaagtcaactggaggaaaagctcccaggaagcagcttgcaaccaaggctgcacgtaagtctgcaccaacaactggtggtgtgaagaagcctcatcgttatcgccctggaactgttgctcttcgtgagattaggaaataccagaagagcactgagctcctaatcaggaagc

SEQ ID NO: 116045 - DNA, 259 bp, Glycine max
ctcataacacaaagcacaaagcaaagctcatccttgagttaaaaagtggcagcagcttcttccatggctctctcatccccatccttggctggcaaggccgtgaagctgggcccatcagccccagaagtgggaagggtgagcatgaggaagaccgtcaccaagcaggtctcctcaggaagcccatggtacggcccagaccgagtcaagtacttgggcccattctctggcgagcccccgtcctacctaaccggtgagttcc

SEQ ID NO: 116046 - DNA, 253 bp, Glycine max
gcgtaaagctcaaagctttttgacagtttgagcatttcagacaaacatgggggatgatggaaagaagattagtggagagggggggttagtgaaggttgagccaaaacccagcaatggtttcacctcaaaagtggttgatttgttggagaaattggtggtgaagttcttgtatgattcttcactgccccatcactacctcactggtaattttgctcccgtgagtgagacccctccaaccaaggaccttcctgtc

SEQ ID NO: 116047 - DNA, 257 bp, Glycine max
agaacttgttgggtctgctgagaattcatgttgaaaaaggtgtcaatcttgccatcagggatgtggtgagcagtgacccttatgttgtcatcaaaatgggcaagcagaagctgaagactcgggtagtcaataagaatctaaatcctgaatggaatgatgacttgaccttgtctatctctgaccctcatgctccaattcatctacatgtgtatgacaaggacacatttagcatggatgacaaaatgggggatgcagag

SEQ ID NO: 116048 - DNA, 256 bp, Glycine max
ggcttatggtggatacctaggcacccagagacgaggaagggcgtagtaagcgacgaaatgcttcggggagttgaaaataagcgtagatccggggattcccgatataggtcaacctttcgaactgctgctgaatccacgggcaggcaagagacaacctggtgaactgaaacatcttagtagccagaggaaaagaaagcaaaagcgattcccgtagtagcggcgagcgaaatgggagcacctaaaccgtgaaaacggg

SEQ ID NO: 116049 - DNA, 259 bp, Glycine max
tgaaaagatgagtaagcttcagagtgatgctttgcgtgaagccatctcaggaatcatggccgattccaaggagaagaatcgcaaatttgtggagaccatcgaactccaaatcggtttgaagaactacgatccacagaaggacaagcgtttcagtggctccgtcaagttgccccacatccctcgccccaagatgaaaatttgcatgcttggtgatgctcagcatgttgaagaggcagagaagataggactggactggatg

SEQ ID NO: 116050 - DNA, 256 bp, Glycine max
attagcgttgccattctcatcctcctctgtctctctctctccaccattgccatggatccttacaagctccggccatccagcgccttcaattctcccttctggactacaaattctggtgctcctgtttggaacaacaactcctctttaaccgttggagctagaggtccaattctgcttgaggattatcatcttgtggagaagcttgcaaactttgacagggaacgtatcccagaacgtgttgtccatgccaggggag

SEQ ID NO: 116051 - DNA, 255 bp, Glycine max
aacaatcacagcatctggtgatcttgttcctttgtcctacattgctggtttgctaactggtagaccaaactccaaggctgttggaccctctggtgagattctgaatgccaaagaagcctttgaattggccaacatcggtgctgagttctttgagttgcaacctaaggaaggccttgcccttgtgaatggcactgctgttggttctggcttggcctcaattgttctatttgaagccaacatcattgctgtcttgtc

SEQ ID NO: 116052 - DNA, 247 bp, Glycine max
cttctaaaaaaataaaattaagaaattttcatggtaaccattcgtgcagatgaaattagtaaaattatccgtgaacgcattgagcaatataatacggaagtaaaaattgtaaatacgggtacgtacttcaagtaggcgacggtattgctcgtatttatggtcttgatgaagtaatggcgggtgaattagtggaatttgaagagggtactataggcattgctttgaatttggaatccaaaaatgttgg

SEQ ID NO: 116053 - DNA, 255 bp, Glycine max
gtcctaaaagagttattgtggcagttgctgctgcaccaaagaagtcatggatccccgctgtaaaaggtggtgggagtttcatagacccagaatggcttgatggctcgctaccaggtgactatggttttgacccactaggactaggaaaggacccggcattcctgaaatggtatagagaagctgaactcattcatgggaggtgggcaatggctgcagttgtaggcatcttcattgggcaggcatggagtggagttc

SEQ ID NO: 116054 - DNA, 253 bp, Glycine max
aaactttcgaaagattttatccaattgaaattttaaaaatgactgggataaacttaagaattcaattattgaaattgaataagtaaacaatttaattggattggtcgaatggtatcaaaaaaatggagtactaactcccatttcttatttattattgaattaaccgatcaacttgctttgttatcgaacatttctttttgatttcaaaaattttccggaaaaaatctgtatctatttttatatgcgaatcaat

SEQ ID NO: 116055 - DNA, 251 bp, Glycine max
cttgtttcaccaatggctgctgcggttagtgctgcagtctctttgccatccaccaagtctacctctcttccaagcaggacctccctcattgccccagagagagttgtgttcaagaaggcttcattgcaaaacagagatgtttctagcagtggacgggtagtttccatcagagctcaagtcaccactgaggcaccagccaaggttgaaaaagagtccaagaaacaggatgaaggtgtggttgtgaacaattt

SEQ ID NO: 116056 - DNA, 256 bp, Glycine max
gttattgataatttgaaaagagtattttatggaagaattaagttattactcaacaaatttgaatttgaattttttaaaggatgagatcaattcagaagtactttttgtattttttatttatttaaagaaatgttaaaatgtattttattttttctttattaaatgtatttattttaaaatttgtttttttagaacagacagaattcaataggtctaattcagaaccgtccgataaaatcgaatattatctacctta

SEQ ID NO: 116057 - DNA, 239 bp, Glycine max
attgaagttaaaagccttagccttccctacaactccaaacacaaagacatcatcatccatggctgcctccgtctccactgtcggagctgtcaacagagctcttttgaacctgaatggttctggagctggagcttcagctcccagttcagccttctttgggaccagcttgaagaaggttattgcctcaagggtccccaacagcaaggtttccggtggaagcttcaagattgttgctgtag

SEQ ID NO: 116058 - DNA, 230 bp, Glycine max
actgttgccaaggatgctgttggaaatgatgtaattgcagagaattggctcaaggcacatggacctggtgaccgaacccttgcacaaggattgaagggagatcctacctatcttgttgtggagaaagacagaacccttgcaacatatgcaattaatgccgtgtgcactcaccttggatgtgtacagccatggaatcaagcagagaacaattcatctgcccttgccatgga

SEQ ID NO: 116059 - DNA, 231 bp, Glycine max
agccaagtgaaagtgagaaaaaataaaaatcaaagagcataatgtcagggatcattcacaagattggggagacccttcatgtgggagggcacaagaaggaggaggagcataagggtgagcaccatgctggagaatacaaaggggagcaccatggtgaacacagtagtgagtacaaaggagagcatcatggtgaacacaaagctggagagtacatggtgagcacaagccaga

SEQ ID NO: 116060 - DNA, 226 bp, Glycine max
gttgttgtggtgtttcatttgtgaaactaacaacaacacaaggccatcatcatggcagctgcttccccaatggcaagccaactcaagtccaccttcactaggactcttgtagctcccaagggcctctctgcctcttcaccacttcacctcgtgccttctagaaggcaatttagcttcactgttaaggccatccaatcagagaagccaacctatcaagtgattcagc

SEQ ID NO: 116061 - DNA, 231 bp, Glycine max
cttctctgcctttaatcttccttcttatggaaccaaactttaacaacaacccaaagatgttacagaaaaagtggctttctactgctttgaatgtgagaagccaaggatcaggcagtgaaaccatagtctttgctcatggctatggaacagaccagtccatctgggagaagatcactccctcctttgctgaaaactaccgggttgtgctgtttgattggcccttttctggag

SEQ ID NO: 116062 - DNA, 228 bp, Glycine max
caacccttctcagctatgctcaggaaagagtgggattttcagtccctcacaggcacttcttgtgaagccagtgaagaggcagatgatggggaagagcaagggaatgagaattgcatgccaagccaccagcattcctgctgatagagtccctgacatgggcaaaagacagctcatgaatctgcttcttcttggtgccatttcactcccctctgctggaatgcttattcc

SEQ ID NO: 116063 - DNA, 231 bp, Glycine max
aaacaaagaaaaaaaaaaacccttagccaacacaaccatcatggccacctctgctattcagcaatcagcattcactggtcaaactgctctgaagcagctcaatgagttcgtccgcaagaccggtggcgccggcaaaggtcgcactaacatgcgccgcaccgtcaagagtgctcctcagagcatttggtatggccctgaccgtcccaagtacttgggtccattctcggagca

SEQ ID NO: 116064 - DNA, 230 bp, Glycine max
ctataaaacctctatcttcttgtcattcggtgtctattcccattatcttcctctaaaccctaaacaactctttctcttcttccgtcgctcgttgttctccctcgcgtagatcgacaatggcggacacagagacgtttgctctccaggctgagatcaaccagctcctcagtctcatcatcaacaccttctactcctaaaaggagattttacttcgtgaactcatcagcaac

SEQ ID NO: 116065 - DNA, 225 bp, Glycine max
ggaatcttgagaaatggcaggggacaggaagagcaagattctgttcatcggagggactggttacatcggaaaattcatcgaggaagccagcgccaaagctggccacccaactttccttttggtgagggagtccactcttcccaaccccgcaaaatcacccctcatcgacaatttcaaaggcctcggtgtcaatcttgttttaggagatctatacgatcaccaaag

SEQ ID NO: 116066 - DNA, 230 bp, Glycine max
ggagcggctggaggggcccgcggaggaggcgatgaagtgggaggcggcggaggagtggaggaggttggatgaggtgaggaaggaggcgaggaagggggtgctgagcggggaggtggcggaggtgactgcggtggcgagggaggtactgaaggaggaggaggaggaggtggtggaggaggagagggccagggagagggataaggaggacgagagggagaggagggagttcg

SEQ ID NO: 116067 - DNA, 233 bp, Glycine max
atttcacttgagacagttatctttatctacgcaagagaagaatagaaaatggatatcaggttgatggatttggactctccattgttcaacactctgcaccgaatcatggatctgacagaggacgcagagaagaacttgaacgctccgacgcggacatacgtgcgcaacgcgaaggcaatggctgcgactcctgcggacgtgaaggagtaccctaactactacgtgttcgtgat

SEQ ID NO: 116068 - DNA, 233 bp, Glycine max
aacgggtggtgcctctcttccatctccccagccaaaacctctctcaagaaggccacattaggcccttctgtcttcgcaaccgttagcactccttcttctccttcttcttcttcttcttcttccttcccttctctcattcaagacaggcctgtctttgctgcccctgcccccatcatcaccccaactgtgagagaggatatggcaaaggaatacgagcaagctattgaagaact

SEQ ID NO: 116069 - DNA, 221 bp, Glycine max
aggtctcatctaaaattggagtgattgagtcacttttggaaaaagttgacattcttcttcttggtggaggaatgatcttcacattttacaaggcacaaggtctttcagtgggttcatcccttgtagaagaagataagttggatcttgctacatcactacttgcaaaagccaaggaaaagggggtgtctctcttgttaccaagtgatgtggtgattgcagac

SEQ ID NO: 116070 - DNA, 230 bp, Glycine max
gtctatagtcatctccattgttctcttcattacccacacacacaaaagaaacaacactccaagaggaccaccaggtcctccacctcttcctctcatcggcaaccttcaccaactccacaactcatccccacatctctgcctatggcaactcgccaaactccacggtcctctcatgtcgtttcgcctcggcgccgtgcaaaccgtcgtggtttcatcggccagaatcgccg

SEQ ID NO: 116071 - DNA, 231 bp, Glycine max
attgaagttgaagtcttgcccttctctcttcaactccaaacacaagacatcatcatccatggctgcctccgtctccactgtcggagctgtcaacagagctcttttgaacctgaatgggtctggacctggggtttcagctcccagttcatccttctttgggagcagcttgaagaaggttattggctcaagggtccccaacacaaagatttcctctggaagcttcaagattgt

SEQ ID NO: 116072 - DNA, 227 bp, Glycine max
cttggagacaaggttcctggccctgtgaaagagaaggttgaagcaaaactaggagagcttaaagacgccatttctgggggttcaacccaagctatcaaggatgccatggctgcactaaatcaggaagtcatgcagcttggtcagtccctttacaaccaaccaggagctgcaggcgcaggagggccaacaccaccacccggtgccgactctggcccctcagaatcctc

SEQ ID NO: 116073 - DNA, 228 bp, Glycine max
tcaccattgactagtatcattaagatggctaattcctacttatccttgcttgtcttgatccttgtagctctgctcctcacccctcaagggcttgctgatgaatctgattcttactataagccaccagtttacaagaaaccaccagtgtacaagcccaagcccaagccacccattcacaagcccaagccacccgtttacaagcccaagccacccgtttacaagaaaccc

SEQ ID NO: 116074 - DNA, 230 bp, Glycine max
tgagagagggtctaacatgtgttgtctcagtcaaggtcccaaatcctgagtttgaaggacaaacaaagacaaggttaggaaatccagaggtgcgaaaagtggttgatcaatctattcaagaatatcttactgagtatttagaattgcatccagatgttcttgattcagtactttctaaagctcttaatgctttcaaggcagctctggcagcaaaaagagcaagggaattg

SEQ ID NO: 116075 - DNA, 226 bp, Glycine max
cgtgacgttgctattgaaggagggggcagggaatttcaattatatgtatctggtgtattcacggggagatgtggcacagcactagatcatggtgtcgtggctgttgggtatggaacagctaaaggtcatgattattggatcgtaaggaattcatggggttctagctggggagaggatggtcacatcagattagaaagaaatcttgctaacagcagatcaggcaagt

SEQ ID NO: 116076 - DNA, 228 bp, Glycine max
tgggatcagttatggctctgtgttcagtttttttcaattttcttcttctgcttcttctttctttcaccaaagaagctttaggtgtttcagagcaagaagctgacagagtgcatggactacccggacagcctccggtgaagttcaaacaatattctggttatatcactgtcaatgaaacccatggaagagcactcttctattggttctttgaggccactcataaaccag

SEQ ID NO: 116077 - DNA, 229 bp, Glycine max
cagtgtttttcatttcatcgtgcattcaatggccaccacagcagctctatccggaaccatggtgagcacctccttcatgaggaggcaacctatgaccaccacaagcctaaagacattccccaacgttggtgaagctctttttggtctgaaaagtggacgaggtggtcgtgtcacttgcatggcctcgtacaaggtgaagctcataaccccagaaggagaagtggagttt

SEQ ID NO: 116078 - DNA, 231 bp, Glycine max
ctctgcgtttctgacagtgttactgtgtgtgttttccgcggaaaatcaaaatgggtatcattgaaaagatcaaagaaattgaagccgagatggctcggacacagaaaaataaagccacagagtatcatcttgggcagctcaaggctaaaatagcaaaattaaggacacaattattggagcctccaaaaggttctagtggaggtggagaaggatttgaagttacaaaattcg

SEQ ID NO: 116079 - DNA, 230 bp, Glycine max
gacagcttccacagtaccggaagcaaaaattctcggccagattccctaacatgttgcctgaggcattggacctgttagaaaagatgctgatctttgatccaaacaaacgcattactgttgatgaggcactatgtcacccatatctttcatcactccacaacatcaatgatgagccagtctgtcccaggccattcagttttgattttgatcagccaacgtgtgctgaagag

SEQ ID NO: 116080 - DNA, 227 bp, Glycine max
cgatgagtcaatcgcgcgtttgacttcatcaggctcgctcaaacacatcgatttgatgttcttggaccactacaagcccgcttacacaaccgacctcaagctttgcgaagagctagggctcatcaccaaaggctcagtattggccgccgacaatgtcatcaagccaggcaatccgccatacctggagtatgtgcggtccagtgtagatgagaaagtgaagaaggcaa

SEQ ID NO: 116081 - DNA, 230 bp, Glycine max
accatttcgagtccaacgcagacgccggtgcctccaaaacctaccctcagcaagccggtaccattcgcaagaacggctacatcgtcatcaaaggacgcccctgcaaggttgtggaagtttcgacttccaaaactggaaagcacggtcacgccaagtgccactttgttggaattgatattttcactgccaagaaacttgaggatattgtgccctcttctcacaactgtgat

SEQ ID NO: 116082 - DNA, 227 bp, Glycine max
gtttgtattataaagaacacagctacattggctgggtcattgttcactttgcatgcctctcaaattcatattgatttgcctactctcactgagaaagacaaggaggttataagcacctggggtgttaaaaacaaaattgattttctgtcactgtcatatactcggcacgctaaagacgttcgccaggctcgcgaatttctttccaagttaggtgatctcagccagac

SEQ ID NO: 116083 - DNA, 223 bp, Glycine max
caaatttccacgtttacactgcattgcttaaacctcatgaaagaatcatggcacttgatcttcctcatggtggccatctttctcacggatatcagactgataccaaaaagatatctgcagtctcgatattttttgagacaatgccatatcgattgaatgaaagtacaggatacatcgactatgaccagatggagaaatctgctacactcttcaggccaaaatt

SEQ ID NO: 116084 - DNA, 226 bp, Glycine max
agcaacactgcactgtgtggaaacgaaacatggcaagagtggtggcactccaacagaaccaactatctttctctaccttagcttcctctctttctgacttcagtggaaccagacttcaaactcaacttcagttcaagagaaagcaatgccatccaaaagggtctttctacgtctccgcatcgagcaccaagaaaatcctaataatgggaggcaccaggtttattgg

SEQ ID NO: 116085 - DNA, 226 bp, Glycine max
gaaatctcttggagtttgacaaataggagatacactgagaaatgtgtttcctatgctgaaagccatgatcaggccattgttggagacaagactgttgcatttctcctaatggatgaagaaatgtattctggcatgtctagcttggttgatgcttctcctattgttgagagagggattgctcttcagaagatgatacacttcataacaatggcattaggtggagagg

SEQ ID NO: 116086 - DNA, 225 bp, Glycine max
cacttccaggcttattatttggctctgcccttcccaattgagaaggcccccactaagagaattgcaagtgtaaatggtggggtgaagatatctgaactgttgaagtatccggttagaggctttgtctttgagggcggcgaaatgctggaagatctatcaaacgttgtttcagatgcatccatatgtcttcagaactgctacatactttcaatgttcttatctctg

SEQ ID NO: 116087 - DNA, 227 bp, Glycine max
ggaatcttgagaaatggcaggggacagccagagcaagattctgttcatcggagggactggttacatcggaaaattcatcgtggaagccagcgccaaagctggccacccaactttccttttggtgagggagtccactctctccaaccccgcaaaatcacccctcatcgacaatttcaaaggcctcggtgtcaatcttgttttaggagatctatacgatcaccaaagtt

SEQ ID NO: 116088 - DNA, 224 bp, Glycine max
gtgaattttgagaatgctgatgatgctgctagggctgttgaggctctcaatggcaaaaattttgatgacaaagaatggtatgttggaaaagctcagaagaaatctgaaagggagaatgaattgaaacaacgatttgagcagagcatgaaagaagctgctgataaatatcaaggcgcaaacttgtatgtaaaaaatttagatgatagcttggtgatgaaaaactt

SEQ ID NO: 116089 - DNA, 220 bp, Glycine max
gttgagaactaagaaggagaagcaaatggcttcctcaatgatctcttccccagctgttaccactgtcaaccgtgccggtgccggcatggttgctccattcactggcctcaagtccatggctggcttccccaccaggaagaccaacaatgacattacctccattgctagcaacggtggaagagtgcaatgcatgcaggtgtggccacagttggcaagaaga

SEQ ID NO: 116090 - DNA, 223 bp, Glycine max
aaaggttgctgtaggagataagattgcagtagtgctaagtgctaacacctgcagtgaacaatggcctctgcatcagcatctctgctcaagtcttcacttgttcttgacaagtctgagtgggtgaagggacaaacccttcgccaaccttctgcatcagttgtgagatgcaaccccaccaccccatcaggcctcaccatcagagctggttcctatgctgatgagc

SEQ ID NO: 116091 - DNA, 226 bp, Glycine max
agtcagtgcaggttcaaaaccttgcataccctgcaaacccctctgaccctctccttgtggattggatcaaataccctgggaaccccgttttggtgccaccaccaggcattggggccaaggactttcgtgacccaacaacagcgtggctcacctcagaagggaagtggcgaatcaccataggttccaagctcaacaaaaccggcattgcgttggtttatgacactga

SEQ ID NO: 116092 - DNA, 227 bp, Glycine max
gaaaaacaagtagttgagaactaagaagaaggaaatggcttcctcaatgatctcctccccagctgttaccaccgtcaaccgtgccggtgccggcatggttgctccattcaccggcctcaaatccatggctggcttccccacgaggaagaccaacaatgacattacctccattgctagcaacggtggaagagtacaatgcatgcaggtgtggccaccaattggcaaga

SEQ ID NO: 116093 - DNA, 196 bp, Glycine max
tgggtcaaaacttcaggtctattggtaagaatgttagtcctattgaggtcaagttcactggcaagcagccctatgatttgtgagcacacaactctatcttcatcatcatcatcccccgtgcttcctttatatgctatatattctcatgtgatatcatgtacctattgtcaattttattatgccacaaatattgctt

SEQ ID NO: 116094 - DNA, 225 bp, Glycine max
gatggcaatggcgcttcgcaggctttcatcttcaattgacaagcctctgcgccctctcttcaatgccggttccctctactacaagtcgtctttgcctgatgaagctgtttacgacaaggagcgacccggagttacatggccgaagcagttgaatgctccacttgaggtcgtggatcctgagattgctgatattattgagcttgagaaagctaggcaatggaaggg

SEQ ID NO: 116095 - DNA, 227 bp, Glycine max
agaataccccctcttttgctgcatcagaggagttgtaaattaagagcatggctgcacaagctcttgtatcatcatcttctcttaccttctcagcggaggctgcaagacaaagtcttggaccaagatcactccaatctccatttggcttctccagaaaagcctcctttcttgttaaggcagctgctaccccccctgtcaagcaaggatcagacagacctttgtggttt

SEQ ID NO: 116096 - DNA, 228 bp, Glycine max
agaacaagtagttgagaactaagaaggagaagcaaatggcttcctcaatgatctcttccccagctgttaccactgtcaaccgtgccggtgccggcatggttgctccattcactggcctcaagtccatggctggcttccccaccagaaagaccaacaatgacattacctccattgctagcaacggtggaagagtgcaatgcatgcaggtgtggccaccagttggcaaga

SEQ ID NO: 116097 - DNA, 229 bp, Glycine max
ggttatcatttctccatttccattttctctctcacttttcaagaatcgtaagctatgggaaagtcttacccaactgtgagtgctgattaccagaaggccgttgagaaggcgaagaagaagctcagaggcttcatcgctgagaagagatgcgctcctctaatgctccgtttggcatggcactctgctggaacctttgacaagggcacgaagaccggtggacccttcggaa

SEQ ID NO: 116098 - DNA, 226 bp, Glycine max
ttcaaacctaggaagttggaagtcatggcagcaacattgatggcagcaacaacaagttctggtactcttaaagcaactcctttccttggccaaggcaagggtgccaatgccaatgctcttagggatgttgtctccatgggaactgggaagtacaccatgggcaatgatttgtggtatggaccagacagagtgaaatacttgggacccttctcagctcagacccctt

SEQ ID NO: 116099 - DNA, 222 bp, Glycine max
ccacttcgttggaacctccactttcagtgaatacactgttctccatgaaggatgtgtagccaagattaaccctaatgccccacttgacaaagttgctattgtcagctgtggattctgcacaggttttggggctactgtgaatgttgcaaaaccaaagcctaataatactgttgctgtctttggcttaggagctgttggtcttgctgcctgtgaaggggcaag

SEQ ID NO: 116100 - DNA, 226 bp, Glycine max
gcctctcttccatctccccagccaaaacctctctcaagaaggccacattaggcccttctgtcttcgcaaccgttagcactccttcttctccttcttcttcttcttcttcttccttcccttctctcattcaagacaggcctgtctttgctgcccctgcccccatcatcaccccaactgtgagagaggatatggcaaaggaatacgagcaagctattgaagaactcca

SEQ ID NO: 116101 - DNA, 229 bp, Glycine max
gttttcttaaaatttcttccttgccactgccagtgtgtcaccaccatggccaccgtcacaacccaagcctccgccgcgattttccggccatgtgcctcgaaatcgaggtttctgaccggctcttccggtaaactcaaccgggaagtgactatgaggccaatggggtgccctccttctgcctctttcaaggttgaagccaagaagggagagtggttacctggcttggcct

SEQ ID NO: 116102 - DNA, 256 bp, Glycine max
cgaagggctatatagcataaacatttgagtcttcattgcacaatgtcgacctcttccattaacgggtggtgcctctacttccatctccccagccaaaacctctctcaagaaggccacattaggcccttctgtcttcgcaaccgttagcactccttctcctcctcctcctcctcctccttcttccttcccttctctcattcaagacaggcctgtctttgctgcccctgcccccatcatcaccccaactgtgagagag

SEQ ID NO: 116103 - DNA, 250 bp, Glycine max
gcgagatatggcgatggcaatggcgcttcgcaggctttcatcttcaattgacaagcctctgcgccctctcttcaatgccggttccctctactacaagtcgtctttgcctgatgaagctgtttacgacaaggagcgacccggagttacatggccgaagcagttgaatgctccacttgaggtcgtggatcctgagattgctgatattattgagcttgagaaagctaggcaatggaaggggctagaattgata

SEQ ID NO: 116104 - DNA, 248 bp, Glycine max
gtcaagaaggagctcgaccttgttcccaccgtcccacaagcttccctcgctcgccagaaatacaccgatgactgcgaggctaccataaacgaacagatcaatgtggagtacaatgtttcgtatgtttatcatgcgatgtttgcctacttcgatagggacaatgtcgcgctcaagggtcttgccaagtttttcaaggagtcaagcgaggaggaaagggagcatgctgagaaattaatggaatatcaaaa

SEQ ID NO: 116105 - DNA, 249 bp, Glycine max
taaattctcaaaggcaccaatttcattgctcagagttcccaaattctccccaagagataaaatgtctctaatcccaaacttcttcggtggccggagaaacaatgtgttcgatcctttctcactggacgtgtgggatcccttcaaggattttcctttcccaaatacgctttcttcagcttccttccctgaattttctcgggaaaattcagcatttgtgagcacccgtgtggactggacagagaccccaga

SEQ ID NO: 116106 - DNA, 252 bp, Glycine max
agaaaataaaattaagaaattttcatggtaaccattcgtgcagatgaaattagtaaaattatccgtgaacgcattgagcaatataatacggaagtaaaaattgtaaatacgggtaccgtacttcaagtaggcgacggtattgctcgtatttatggtcttgatgaagtaatggcgggtgaattagtggaatttgaagagggtactataggcattgctttgaatttggaatccaaaaatgttggtgttgtatta

SEQ ID NO: 116107 - DNA, 251 bp, Glycine max
cgagagatgccgcaatgctccaatggaaggtgtttccttcaccatcgaagacttcactgctgctcttgacaagtacgacttcgattctgaagttggcggcaagattaaaggcactgtgttctacacagataacaatggagcagttgttgatatcactgcaaagtcttcggcatatttgccactgcaagaggcgtgcatccacagggttaagcatgttgaagaagcaggcttagttcctgggttcaaagagg

SEQ ID NO: 116108 - DNA, 250 bp, Glycine max
tggagctgaccagcaaccttgtccatgattgtagggtgttggacctgatcaaccatgtttgctttcctttcacaaatcaaaagggtattgagaagttatgatggagcctaccgccacccagctatgtaccaaagaccctcttttgggaattactcgaatgctgcattgcagtttcctgtgatgcccacatgcaaagctaccatggatttgtctgctactgcaacatctgcctcacccgtctttgttgctg

SEQ ID NO: 116109 - DNA, 249 bp, Glycine max
tctgcctgtaagagtgaaaaatccttctcttttccttctctcaagtctcaagagatttcatcatggctccaaagaaggacaaggctccaccaccttcctccaagcccgccaaatctggcggtggcaagcagaagaagaagaagtggagcaagggaaagcaaaaggagaaggtgaatatcatggtgctgtttgatcagggcacctatgataagctcctttctgaagctcccaaattcaagctcatcactc

SEQ ID NO: 116110 - DNA, 249 bp, Glycine max
gcctcttccaacatgaccttgttgaaatcatacggagatttccaaaagaatactcccgaagagcgcaatgttagatttggtgttagagaacatggaatgggagcaatctgtaatggtattgctcttcatagccccggattcattccatactgtgcaactttctttgtcttcactgactacatgagagctgccataaggatttctgcactgtgtgaagctggagttatttatgtgatgactcatgattcg

SEQ ID NO: 116111 - DNA, 249 bp, Glycine max
tggtactttgtttttgaaaaagggccatgacgatgaaggagagctgtttgaattcaaaactgatgaggagcaagtaattgatgggcttgacagagctgtgttgactatgaagaagggtgagatagcattgttgattataggacctgaatatgcttttggttcatcagagtctcagctggaacttgcagtggttccacctaactccacagtatattacgaggttgagctagtatcatttgagaaggagaa

SEQ ID NO: 116112 - DNA, 247 bp, Glycine max
tatttttcaagtaacttaaggtttcaaacctaggaagttggaagtcatggcagcaacattgatggcagcaacaacaagttctggtactcttaaagcaactcctttccttggccaaggcaagggtgccaatgccaatgctcttagggatgttgtctccatgggaactgggaagtacaccatgggcaatgatttgtggtatggaccagacagagtgaaatacttgggacccttctcagctcagacccct

SEQ ID NO: 116113 - DNA, 251 bp, Glycine max
ctatgagtgccttatcgctgtggttatcatcttcttcttcctcgttcttagatctcatcgttctctacgccgcacgccgaaaccatggccggaaaaggagagggtcctgctatcggaatcgatctcggaaccacctactcttgcgtcggtgtgtggcaacatgaccgcgttgaaatcatcgccaacgaccaagggaacagaaccacgccgtcttacgtcggattcactgacaccgagcgtctcatcggtga

SEQ ID NO: 116114 - DNA, 255 bp, Glycine max
ttcaaaacactcataacacaaagcacaaagcaaagctcatccttgagttaaaaaatggcagcagcttcttccatggctctctcatccccatccttggctggcaaggccgtgaagctgggcccatcagccccagaagtgggaagggtgagcatgaggaagaccgtcaccaagcaggtctcctcaggaagcccatggtacggcccagaccgagtcaagtacttgggcccattctctggcgagcccccgtcctaccta

SEQ ID NO: 116115 - DNA, 249 bp, Glycine max
ctcacttgactcgattgcaagtgatccacgacacactgttcgcttcacaaaagcttcgaatccaattcctcagtaacatctgcaagaggtcttctccttcaccatgccaccaaagcctttagactatgggtcaataaatgaaaacgtgaagaagagtcaatatgctgtcagaggtgaattataccttcgagcttctgagcttcagacagagggcaaaaagattatatttactaatgttggcaacccaca

SEQ ID NO: 116116 - DNA, 247 bp, Glycine max
  unsure (1)..(247): unsure at all n locations
cctcccatggagtctatggnaagttcctgagccttcttgaacaacccggtcctccccttcgagaacatgacttgtctgctgttggcattgttgattcttttgatctcgatctnccctcgacccattggctnaattnctcgcnctctcagagcacnaacangcccaactgaacgagaaattagagctggngttttnggaggagtagcaattcgncggttgcngatgcgaagganggcaccacactaag

SEQ ID NO: 116117 - DNA, 248 bp, Glycine max
cttttccaagctccacaggatgctggaactcactatgctgtcatgagctcctacgagtaccttagcactggacttcgccagtacttggacaacaacatggatggattttacattgctccagcttttatggacaaacttgttgttcacattaccaagaacttcatgaccctgcccaacatcaaggttcctctcattcttggtatctggggaggcaagggacaaggaaaatctttccaatgtgagcttgt

SEQ ID NO: 116118 - DNA, 247 bp, Glycine max
gcatctcctttaccatcattctagatatcagagaactttgcagctctcttaggtttttaaaaaacaccacgcaaacagcaagatggccacttccgacagttacatgctactaaattatgttccagtttatgtgatgctcccactcggagttgtcaatgttgacaatgtttttgaagacccagatggccttatagaacagctcttgcagcttcgagctgcgggtgttgacggggttatggttgatgtg

SEQ ID NO: 116119 - DNA, 250 bp, Glycine max
acatcgttcttcatttttggcattacaaaactaccgtgtctggtaaagggttcgttaacatttccagtgcaaaaagttgttagctaaaagaagaccacagtttttagtgttgtagacggaagagacgagttaacatgcaaattcagtgtgatgtgtgtgagagagctccggcaacagtgatttgttgtgcggatgaggcagctttgtgtgccaaatgtgacgttgaagttcatgctgcaaacaagcttgc

SEQ ID NO: 116120 - DNA, 251 bp, Glycine max
gatgaaccagcgacacttacatcccgtgcgacgcaaattttggtcacttgcaggcatcagacttcctcacatatgcaataggatccttaactcaaaacgttttacctcaattcaacactgcatttggcatcaatacatgagtttgatagcatcgaggacgtgcattgtctcttccgatggcggagattatctcccttcagatgtactcagctgcattagccccatatcggtgatccgactaatcttccgca

SEQ ID NO: 116121 - DNA, 195 bp, Glycine max
catctctcacgacgttaggcttttccgctttgccctcccctccgacgacctactcatgggtttgccagttgggaagcacatattcctatgtcccccgttgacgagaaactatgcatgcgagcctacactccaaaaagcagtgttcacgaagtgggatacttcgacctcgtcgttaaggtttacttcaaaggggtg

SEQ ID NO: 116122 - DNA, 243 bp, Glycine max
cttccccatatggctcgctactccttcctcttggccctccacctcctcctcttcgccgccgtgtccagcgccgccgacgacatcctgatccgtcaggtggtgccggatgccgtcggcgaacggcggcgtaggaggaggaccacctgctgaacgcggagcaccacttcgcgagcttcaaggcgaagttcgggaagaagtacgcgaccaaggaggagcacgaccgtcgcttcggcgtcttcaagt

SEQ ID NO: 116123 - DNA, 245 bp, Glycine max
ttgaagggttattcagaagaccccatttcccctgctaggctttttgaagtggttgccgatgatctgctaactctcaataaaaatcttcagtcgattgtaggagcagaaaatccagttttgatgtctgcagctgagcagatttttagtgctggtggaaagaggatgagaccagctttggtgttcttggtgtcaagggcgactgcagagttacttggcttgaaggaacttactgcaaagcatcgacg

SEQ ID NO: 116124 - DNA, 247 bp, Glycine max
gcgagagatggcgatggcaatggcgcttcgcaagctttcatcttcaattgacaagcctctgcgccctctcttcaatgccggttccctctactacaagtcgtctttgcctgatgaagctgtttacgacaaggagcgacccggagttacatggccgaagcagttgaatgctccacttgaggtcgtggatcctgagattgctgatattattgagcttgagaaagctaggcaatggaaggggctagaattg

SEQ ID NO: 116125 - DNA, 243 bp, Glycine max
  unsure (1)..(243): unsure at all n locations
gttatgtctgcagcagctgtgcatctgacgcctgtgactttggagttaggtggacaatgcccagccataattgattctcgttcttcttcttgggacaaagacgtggctgtgaagcgaattttggtggcaaaatttgagggcttctnacggggacaggcatgcatagcaatcgattatgtccttgtggagaagagcttcagttctacattggtgacattaatgaaggaatggattaagacactg

SEQ ID NO: 116126 - DNA, 247 bp, Glycine max
gacggcattgggaagaagcttgtgaactcaaaagatggacctccaacctttgagcagcccacgatgactctggagaagctcttgacgtatggtaacatgcttgtccaagaacaagagaatgtcaagagagtccaattggctgacaagtacttgaacgaggctgcacttggaaatgctaacgaggatgctattaacaggggaactttcttccaatcttgaattggaggcaaagcaaacttggcaagta

SEQ ID NO: 116127 - DNA, 247 bp, Glycine max
agcataccatgaccaccaaggatccaaaatccgtgtacgactttgttgtcaaggatgctaagggagatgatgtagatctctccttttacaagggaaaagtccttctgattgtcaatgttgcttctcaatgcggcttgaccaactccaattatacggagctgaatcaattgtatgacaagtataaagaccaaggcctggagattctggcatttccatgtaatcaatttggtaagcaagaaccagaaag

SEQ ID NO: 116128 - DNA, 248 bp, Glycine max
tcttaactcaacttctgctacccactctcttcttccaagtccaaccacgcttttctctacagtcatgggcaaggtcaagatcggaatcaacggatttggaagaattggccgtttggttgccagagtcgctctgcaaagagacgatgtggagctcgttgccgttaacgaccctttcattaccaccgattacatgacatgcatgtttaaatacgacagtgttcacggacactggaagcatcacgatgtca

SEQ ID NO: 116129 - DNA, 249 bp, Glycine max
agctttcacatccaacaacaactactcaactaccaaaactctattcttcaacctcaaacctcaaatcaacttcatcaaaatgcagttcaccaccatcgcctctctcttcgccgccgctggccttgccgctgctgctcctctcgagtctcgccaggacaccgcatcctgccctgtcaccactgagggtgactacgtctggaagatctccgaattctacggacgcaagccggaaggaacctactacaacag

SEQ ID NO: 116130 - DNA, 251 bp, Glycine max
tttctctcttctctctctgtccgaagatggcttcacgcaggttcgtatcttctctgattcgatcctcccttcgtagatctcaatcgaaaccctcgatttccgcatccgcatcgaggttcacgtcatccaaccgtgcctctccgcacggttacttgctgaaccgcgtcgccgaatacgctaccgcggcggcggctgctaccgctcctccctctgctccgcctccgggcaagaaggaggttagcggcggcggg

SEQ ID NO: 116131 - DNA, 246 bp, Glycine max
gtgccttatcgctgtggttttcatcgtcttccttctcttatatttctttttcgttttgtcttcgccgcacgccgaaacaatggccggaaaaggagagggtcctgctatcggaatcgatctcggaaccacctactcttgtgtcggtgtgtggcaacatgaccgagttgaaatcatcgccaacgaccaagggaacagaacgacgccgtcttacgtcggcttcactgataccgagcgtctcatcggtga

SEQ ID NO: 116132 - DNA, 245 bp, Glycine max
gtgttaagacatttaagtgaggagctagagaatgatgatgaagtctgctatgtgtgcagtggtggttgtagcacttcttcttctggcggaggtggggcccatggctgaggctgtgacatgcaccccaacagagttgagtccgtgtcttccagcaatcacttccggtgctaaaccttccaatgcttgttgcacgaagctgaagcagcaaaaaccatgcttatgtggctacctcaaaaacgctagct

SEQ ID NO: 116133 - DNA, 246 bp, Glycine max
gcttcaccttctgctctagaaaattcagtgctgaaacatggcttcggctactctctctgtagccaaaccagcccttcaggcaaatgggaaaggcttctctgaattctctggcctccgaagctcatcaggcttccttcccttttctagaaaatcttcagaggatttccattctgtcattgccttccagacctatgcagttggaagcagtggaggatacaagaagggtgtgacagaagcaaaactgaa

SEQ ID NO: 116134 - DNA, 239 bp, Glycine max
cccttttataattaaaattaaccatagttaatataatggggtcggggattcaggtttcgttttctgtgttgtgtttgttagggttagtcattgtgggtgatcatgctgcgtatgctcaagactcaccaacagactttgttaatgcacacaacgctgcaagatcacaggttggtgttccccatatagtttgggatgacacagttgcggcttttgcacagaactatgctaaccaacgcaaa

SEQ ID NO: 116135 - DNA, 247 bp, Glycine max
ggattttatcaaaatcgctgattttggcctagcccgagagatcagttcacaaccaccctacactgagtatgtctccacacgatggtatcgtgctcctgaggtgctgcttcagtcttatctgaaaacctctaaagttggtgagtgtctgactgggagtttgggactaactaatggtgtcatttatgttcttcactaacgctttctgcattgatgatgatgatgagtaccattctaccattttgtttat

SEQ ID NO: 116136 - DNA, 244 bp, Glycine max
ctcactaggagctcctctccactggttcttcatctgcatgcacacagttgcatagttttggaaaccaagaattcctgaagaagggtagcatcaacaagcagttctgaaaatggagatcaccaatgtcagtgagtatgaggctattgcaaagcagaagttgccaaagatggcgtttgactactacgcatctggtgcagaggaccagtggactctgcaagagaacagaaatgccttttccagaatt

SEQ ID NO: 116137 - DNA, 243 bp, Glycine max
tgacgaagtgaggtagtggatttctggtgttggtgttgacggcattgggaagaagcttgtgaactcaaaagatggacctccaacctttgagcagcccaagatgactctggagaagctcttgacgtatggtaacatgcttgtccaagaacaagagaatgtcaagagagtccaattggctgacaagtacttgaacgaggctgcacttggaaatgctaacgaggatgctattaacaggggaacttt

SEQ ID NO: 116138 - DNA, 242 bp, Glycine max
accttcctctgcacaatctccttcaaaaagcttctcatccatggcgaaaacgctcatttcgtctcaatcgttcatcggcacaccgctcccctcactccctcgccaccacctcccccaccgcaccaggctcgtcgccaccaaagtcctcgtcagcctccacgaaattcccccaatccactccataagccgcaacattgacttcgccggaatcgtgactagagccgaagccttctctacacgct

SEQ ID NO: 116139 - DNA, 237 bp, Glycine max
aaaagttagggttcacaacttttccttttccttttgcttgcgaatctgaatcaaataatcaatcatccattcattattcatcatgtcgtcggcgaagaaaatcacgctgaagagttcggacggcgaggctttcgaggtggaggaggcggtggcgctggagtcgcagacgataaagcacatgatcgaggacgactgcgccgacagcggcatccctctgccgaacgtgacgagcaagat

SEQ ID NO: 116140 - DNA, 244 bp, Glycine max
ggacttggcaagctgaacctggtgttgtagctgaagctctcaccacagccattcaggttggatacaggcatattgactgtgctagtgcgtataagaatcaagcagagattggttctgctcttaagaagctttttgatgatggtgtggtgaagcgtgaggacttatggatcacttccaaactctggtgttcagatcatgcaccagaagatgtgccaaaagcattggataaaacattacaggaatt

SEQ ID NO: 116141 - DNA, 246 bp, Glycine max; identical to SEQ ID NO: 115750

SEQ ID NO: 116142 - DNA, 246 bp, Glycine max
cggctcgagctcgctctctatcttccacttcttttcaagctgcttctctacgtcactcactagggagaaactctggcatgtggggacacttgaacagattcagcactgcagcagcagttgaggatttaatcactccacaagttccaatatcatacactacgcatctgataaatggacaatttgtggatgctgcttcagggtaaacttttccaacatatgacccacgcacaggagaagtgcattgct

SEQ ID NO: 116143 - DNA, 245 bp, Glycine max
caacttgctccctcagaagcgaagaagaagccacagagtactagtctcctactctcacccgctagacaaatatggcatctcacatcgttggatacccccgtataggtcccaagagagagctcaagttcgctctcgagtctttctgggatggcaagagcagcgccgaggatttgcagaaggtatcttctgatctcagggcatccatctggcagcagatggctgatgctaggatcaagtacatcccc

SEQ ID NO: 116144 - DNA, 249 bp, Glycine max
atgacatcatggaatctgttgagagaagacctttctatttgtacagcaagccccagataactaggaacgttgaagcctataaggatgcattagcagggttgagttctataattggttatgccattaaggctaacaacaatttgaagattttggaacatttgaggcacttgggttgtggtactgtgcttgttagtgggaatgagcttaggttggctcttcgtgctggctttgatcccacgaggtgtatct

SEQ ID NO: 116145 - DNA, 251 bp, Glycine max
ggaaccattcacttcatatgtaactcctgggtttacaattcaaaacactacaagactgatcgcattttctttgccaacaatacatatcttccaagcgagacaccggctccacttgtcaagtacagagacgaagaattgaagaatgtaagaggggatggaactggtgagcgcaaggaatgggataggatctatgattatgctgtctacaatgacttgggcgatccagataagggctgaaagtatgcacgccc

SEQ ID NO: 116146 - DNA, 254 bp, Glycine max
cgttgccattctcatcctcttctttctctctctaccattgccatggatccctacaagcaccggccatccagcgccttcaattctcccttctggactacaaattctggtgctcctatttggaacaactactcctctttaaccgttggagctagaggtccaattctgctggaggattatcatcttgtggagaagcttgcaaattttgatagggaacgtatcccagaacgtgttgtccatgccatgggcgctagtgc

SEQ ID NO: 116147 - DNA, 261 bp, Glycine max
ggagatggaggtggcagggaagctggagaaggtgcagaaggcgctcgagggtgccgttaatgatttggagctcatggggaggctcttggatgagttcgatttgcttcagaggagggcgcagaatgtgaacttggatgaggttgatgccaagattagtaagttgatgcctgagcttggttttgctcctgaggattctgataggctggtcgcgtctttcagtggaggctggcaatgagatttgtctcggcaagattctacttc

SEQ ID NO: 116148 - DNA, 89 bp, Glycine max
cacatctccaagaacttcatgaccctgcccaacatcaaggttcctctcattcttggtatctggggaggcaagggacaaggaaaatcttt

SEQ ID NO: 116149 - DNA, 259 bp, Glycine max
gacaggagaaaccctcttcggcttgacacgagcctcgaagtggatccttcgcgacacgaaaatgaccctagcacccatgttgctgctggagaaccacccaattcacctgaaccctgcgcactacatcagtgagattattagagaaggcacaaaaattgcactgcctctcttaaagggcactggcatgtgagcaatttgagatgacgggtttgggatcctgagtataataggttgttcaatgagggcatggtgtgcactg

SEQ ID NO: 116150 - DNA, 263 bp, Glycine max
  unsure (1)..(263): unsure at all n locations
ctcagaaaagccgtgttctttgtaatcgctcaatgcttcaccttttccgcatatgctgcaaggtttgaaatcacaaaccgatgcacatacactgtctgggctgcgtctgtgcctgttggcggtggcgtgcaattaaacccgggccagtcatggtccgtggacgtgcctgcaggaacgaaaggggccccgtttggtccccgaaccggctgcaacttcgacggttcggtccncggtggatgccagacggtgactgcgggggtgtc

SEQ ID NO: 116151 - DNA, 261 bp, Glycine max
aacactcataacacaaagcacaaagcaaagctcatccttgagttaaaaaatggcagcagcttcttccatggctctctcatccccatccttggctggcaaggccgtgaagctgggcccatcagccccagaagtgggaagggtgagcatgaggaagaccgtcaccaagcaggtctcctcaggaagcccatggtacggcccagaccgagtcaagtacttgggcccattctctggcgagcccccgtcctacctaaccggtgagtt

SEQ ID NO: 116152 - DNA, 250 bp, Glycine max
gaaggaatatacaatgctctccagaaattgggtattgactggagctttgttggttcccagcttgaacttgaaggagtggactcgtttaagaagagctttgacagcctcctggattctctgcaagagaaggcaaactctcttaagttggtcagccattgaagtgtgaacgtcatagttagtaatgcagtgctatgtatgaagtgatttatggattaataaaaggcagtggctgtgcattttgtgctgctgt

SEQ ID NO: 116153 - DNA, 260 bp, Glycine max
ggctacactagcagctctaaacgtgctggggaaggttaaagggtacccagtttggtttgatgccaataaggtggaaccattcctcaatgagaatgctcgaccaccagctgcatgcccaagcattgttaatgcaaaagccctgggtttgccaacttcaaagctataaacacacatggttcaagggcctcaaattgcacaaatggccaatttatgtgtgtagggctaggctctggggctagtctgttctttattgtgtatgt

SEQ ID NO: 116154 - DNA, 263 bp, Glycine max
gcagacttaacaacagcacaaagcgggttactgtcagttcaagctaccatctctctctctctttcttagtgcctccttgccagaagttaaaatggcgcaagaaactttcctattcacatctgaatcagtgaacgaggggcaccctgacaagctctgtgaccagatctccgatgctgtgctcgctgcatgcttggagcaggaccctgacagcaaggatgcctgtgaaacctgcaccaggaccaacatggtgatggttttcggag

SEQ ID NO: 116155 - DNA, 252 bp, Glycine max
tatagattggtacagaaaccgcattgatgggaagcaagaagttatgatagggtactcagactcaggaaaagatgcaggccgtctttctgcggcttgggcgctttacaaggctcaagaagaacttgtgaaggttgctaaggagtatggtgttaaacttacaatgtttcatgggagaggagggactgttggaagaggaggaggtccaactcatcttgctatattgtctcagccaccagacaccattcatggctc

SEQ ID NO: 116156 - DNA, 130 bp, Glycine max
agcaaaaggccatataatttttttttatttgacataatgtccgggatcatccagaagattgaggagaccctccatgtgggagggcacaagacagaggagcacagaggagaacaccatggtgagcacaaag

SEQ ID NO: 116157 - DNA, 262 bp, Glycine max
gctatctatttatctatagcaagtgcgtcatgagacacgtggtaccctagctagagtgccattctgtggtttctttctttcattctttctgcatcacatcacaatttgcggtgtctcgtgtcccttatcttctttgctctccaaaaatctcacacacacacgtatctagcaaatgggttctcaccaacaagaaccatggctattggagaatgggaaaccaagggtattgaccaaggagaccaggcatggccgatctgcacac

SEQ ID NO: 116158 - DNA, 263 bp, Glycine max
cttttgtttgttcttcagtactttagtgtgtgatttaattccaagattttgagaatgtctagctgtgggtgtggaagtagctgcaactgtggcagcaactgcggttgcaacaagtactcttttgacttgagctatgttgagaagacaaccacagagactcttgttttgggtgttgggtctgtgaaggcccaattggagggtgctgaaatgggtgttgcagctgagaacggtggctgcaactgtggatcgagctgccactgcga

SEQ ID NO: 116159 - DNA, 255 bp, Glycine max
aaattcatgaccctcctttcacctcacccaaacatccttcaaatcttccatgttttcgaggacgaccaatatctctccatagtaatggatctctgccaaccccacacgcttttcgaccgcatggtcgatggtcccatccaggagtcccaagccgccgccctcatgaagaaccttctggaagctgtcgcgcactgccaccgcctcggcgtggcccaccgcgacattaaacccgacaatatctgttcgattcggcgg

SEQ ID NO: 116160 - DNA, 263 bp, Glycine max
cgaagaagaaacaatgtcttgctccaatctgacaatgttggtgtcctcaataccttccctttccgacccctcgaacctctccttccgctctgtcctgaacccttttcagctccctacacaaaacccagcttcatgcaccccttcacgctcctcaagcacccaaattcagtgtggtctgagagaactgagaacccgcattgagtctgtgaagaacacgcagataatcacggaggcaatgaagcttgttgctgcagccacagtga

SEQ ID NO: 116161 - DNA, 252 bp, Glycine max
tggctgcctcactataagctgcagctaccttcatgcaacccaccaaggctggcatagtctctcgcaacctcaaatctacacaatgcatttctaaggcttttggcttagatactgatgcatgtatactcacttgctcccttcagcctgatctcatagagtttgctcaaaaatgtgtcgacgctagcaaaattgcaggattcgcccttgcgacctctgctctcgatgtatctggagcaagtgcagatcgtgttc

SEQ ID NO: 116162 - DNA, 263 bp, Glycine max
agaagactcctcaatcatccatagacatggccaccgtcacttctgcagcagtctctattccctcattcactggcgtcaaggcaagcgcaggcaaagtgagtgccgccgcagttagagtctcagctccccatgccataaggttctgcgcgatcaaggcttccctcaaagacgttggagtcgctgttgtggcgactgctgcgagcgcagttctagctagcaaggcatgggcaattgagtgtactgggcactgatgacgggtctct

SEQ ID NO: 116163 - DNA, 237 bp, Glycine max
gacatctgaaacctccgtgttggtgttgcatatccaaaccctactttggcaattgatttgctcaagggcagaagattaagatggtactggcggagttctgtgcgtgcatttcgcgtgttctccagctgatgagcaatgcgacagtcatcgacgagccggagctccacgatcgcgtcaacgacaatcatcgcgctcttctccactccgatgttcaattcaagcttgctccgcgaaatg

SEQ ID NO: 116164 - DNA, 259 bp, Glycine max
ggaagtagaataccttcttaggaagggatggattccttgcttggaattcgagttggagcacggtttcgtgtaccgtgagcacaacaggtcaccaggatactacgatggacgctactggaccatgtggaagctgcctatgtttggttgcactgatgcttctcaggtgttgaaggagcttcaagacgctaagactgcataccccaacggcttcatccgtatcatcggattcgacaacgttcgccaagtgcagtgcatcagc

SEQ ID NO: 116165 - DNA, 261 bp, Glycine max
accgccccaatctctgcagcgccttcgatctagaaaacatgactaagagaacaaagaaggctggcattgttggaaaatacggtacccgttatggtgccagtctgcgaaagcagattcaagaagatggaagttagtcagcacagcaaatttttctgtgaattttgtgggaagtatgctgtgaagaggaaagctgtaggaatatggggatgcaaggactgtggtaaagtgaaagcaggcggtgcttatactttgaataccgca

SEQ ID NO: 116166 - DNA, 256 bp, Glycine max
gcagatagcaagctcatcctagagttttaacaatggcagcagcctcctccatggctctctcttccccatccttggctggcaaggccgtgaagctggcgacatcagcccccgaagtcgggagggtcagcatgaggaagaccgtcaccaagcaggcctcctccggaagcccatggtacggcgcagaccgcgtcacgtacttgggcccattctctggcgagcccccgtcctacctcactggcgagttcccagtgactac

SEQ ID NO: 116167 - DNA, 260 bp, Glycine max
tccattcggctgtgatctaaacctgcgttgcgctaaacgccaccgttttcactgtctctgagaatggaggcactaagtcgctccgtggaagatctattcgaggatttccagggccgcagagccggcatcatcaaagcccttacgaccgatgttgaagatttctacagccaatgtgatcctgagcaggagaatttgtgcgtatatggatgtcctaatgagcaatggcaggtaaatttacccgctgaagaaggtcctccaga

SEQ ID NO: 116168 - DNA, 249 bp, Glycine max
gtgactacaattagagctagcacacccatgtttctcatgtctcggaagattaaatcacttggtgtcaaatgggttatctccggagaaggatctgatgagatctttggagggtatctgtacttccacaaggcacccaacaaggaggagtttcacagagaaacatgccgcaagatcaaagcactccaccaatatgattgcttgcgagccaataaatcaacacttgcttggggtctagaagcccgtgtacca

SEQ ID NO: 116169 - DNA, 261 bp, Glycine max
gaaatgccaaaaactgggatcgtcctactgctacttacgttgaaaaatgcaagtttcctgaagatggttcatcaccaaagtctctaagatatattcggaagtatgggtagctgatgttcatcgtacgttgctttatggaggcatctttttgtaccctgttgacaaaaaaagtccaaatggaaaacttcgtgtcctgtatgaagtcttcccaatgtcattcttgatggaacaggcaggaggacagtctttcacgggcaagga

SEQ ID NO: 116170 - DNA, 261 bp, Glycine max
cttcaaaacactcataacacaaagcacaaagcaaagctcatccttgagttatcaaatggcagcagcttcttccatggctctctcatccccatcctttgctggcaaggccgtgaagctgggcccatcagctccagaagtgggacgggtgagcatgaggaagaccgtcatcatgcaggtctcctcaggaagctcatggtacggcccataccgagtcaagtacttgggcccattctctggcgagcccccgtcctacctaaccgg

SEQ ID NO: 116171 - DNA, 126 bp, Glycine max
gcaaatccttggtcaatgcagacggtattatagagaaaacattcttgtggggtaggtactctttggaaatgtctgctgttatttacaaggactgggtgttcactgatcaagcattgcctaatgatc

SEQ ID NO: 116172 - DNA, 259 bp, Glycine max
aagtagttgcgtactaagaaggagaagcacgtggcttcctcaatgatctcttccccagctgttaccactgtcaaccgtgccggtgccggcatggttgctcctccattgcctcaagtccatggctggcttccccaccagagagaccaacgatgacattacctccattgctatcaacggtggaagagtgcaatgcatgcaggtgtggccaccagttggcaagacgaagtttgagactctgtcctacctgccagaccttgat

SEQ ID NO: 116173 - DNA, 241 bp, Glycine max
tctagaggtgtgcaaaagaagtctagttatagtagtagtaaatcatggttctacgaagctcccctcggatacagcattgacagacgttagaccaaacggtggaatcaagaaattcagatctgctgcttagctccaactgcgctcgcaaaccttcctgatatccatccaaattgatagttcattgcatgcaaccatagttttattaggtttattcttctttgttttcaattaggtatttgct

SEQ ID NO: 116174 - DNA, 261 bp, Glycine max
ggctgccaacacattgatgagttctgccatctcagccttcccatctctcctttcctcctcaaaatccagatttgctgctgcagttcctctttccagctttgctgtcaccaatgcctcttcttctcgcttttccatgagtgctgactggatgcctggccagcctagacccccctaccttgatggttcagcacctggtgactttggattcgaccctcttcgtcttggtgaagtaccagagcatcttgagatgtgcaaagagtc

SEQ ID NO: 116175 - DNA, 254 bp, Glycine max
cttgttttctcttgttcattcatctcacttccaattaaggaacaagcttcccaccaatttgaatcactaatggtccatctttctccaacctcaaggttctctctgctactgtcgccgacggattctccaacactctcaccaggcgtgggtacgcagtagcgacacaaagcgcaacatgaggaggagcagcctccatcagcggcaagtcaggggaagacaagtactaggaggaggtgctgaaaaggttcgtgggt

SEQ ID NO: 116176 - DNA, 257 bp, Glycine max
tacaactacaaaggttgctgtaggagataagatattgaagtagtgctaagtgcctaacacctgcagtgctcaatggcctctgcatcagcatctcttctcaagtcttgcattgttcttgacaagtctgagtgggtgaagggacaaacacttcgccaatcttctgctgcatcagttgtgagatgcagccccaccaccccatcaggcctcacaatcagagctggttcctatgctgatgagctcgttaagaccgcgacaac

SEQ ID NO: 116177 - DNA, 257 bp, Glycine max
gcagaacaaagtgctattcttatacttcttttcttgagactttctgtgctgtgctgccatgggtgtgacacagttgaaccccacttgctcaaaacctacgtcttcactcatctcagctctcttggctatcatggactcttcctagacatcgccactgcacttttgcgccacttcatagtactcaacaagctaggatttcctgttctgttgcaccaaatgaagtgcaggtgcgaactgtgaaaacccaggatcccaag

SEQ ID NO: 116178 - DNA, 254 bp, Glycine max
  unsure (1)..(254): unsure at all n locations
ttcttcccttctgtaacatgctaaacgacatcgttctgagtgttnacatcatcgtgatactcttcatatggtttctctctgataattcccaagatgatcatatattcatatcgagtcaactccatgacgatgactcagtgagttgcactgctaccgacccagaccttaactacaagctggtgatcggaatcttgaaccaccccggtgacggtgcctctggccggctctgcatcgccaccggggtattttagatc

SEQ ID NO: 116179 - DNA, 272 bp, Glycine max
tcttgctgctgttacttgccctgatgccagtgtgcgttattgtgatgttgacgaaaatggggttcgacacttggccctttgtcgtgtaataatggggaacatggagattcttcggcctggcactgatcagtatcatcccagtagttgtgaatatgataatggggtggatgccattgaatgtccacaatactatgtggtgtggaatatgaacatgagcacccacatctatccggaattcgttgttagctttaaagtctcgtctgacgctgaag

SEQ ID NO: 116180 - DNA, 271 bp, Glycine max
attgaattcaaaaactaagttcatttcttgtgctttgctttattcctcaaaaccaaacatgtcgaacacatgcggcaactgtgactgcgctgacaagactaactgcaccaagggaaacagctatggtgttatagtagagactgagaagagctacatcgagactgttgacatggatgttccagcagctgagcatgatgggaagtgcaagtgtggcactaactgcacttgcacggactgcacttgtggccattaaggaatatgtatgaaaatg

SEQ ID NO: 116181 - DNA, 280 bp, Glycine max
aagcatctaagtgagatacacagtagttaggtagcaagcataagtgtctaaccttagaaacatatctgctacatatcgtgtgcattttggaattgtgccactaaaattctattcatctatggctgcctcatcttatgctatgcaatcaatccttgcaaaccctatgatccgcatttccagcgggtctagggagaaccattttggtgttcctgcttatcacatgagaaggaatgttggcctgagagttaggtccatggctgaggaagagcaaccaagtcag

SEQ ID NO: 116182 - DNA, 280 bp, Glycine max
aaacatgtgactgacaaaatgatgcttaatgctggtaacatctaccctcacaacaccccaacaaccaaggaagcatattactacagaatgatctttgataggttcttccctcagaactcagctaggctcaccgttcctggaggagcaagtgttgcatgtagcacagccaaagctgttgagtgggatgctgcttggtctaacaaccttgatccttctggtagagcagcacttggagtgcacatttcagcctatgaaaaccagaacaacaacaagggtgtag

SEQ ID NO: 116183 - DNA, 284 bp, Glycine max
tcggacaactattctcgcgtactacacaggctttgttttacaactacaagcaacttcccatccagcggatgcttgattttgacttcctttgcggcagggaaacaccatcagttgctggaataattaaccctggttctgagggatttcaaaaacttttttttggtcaggaggcaattgccatcccagtgcatgctaccgttgaagcagcttgtgctgcacatcctactgccgatgtcttcatcaactttgcttcatttagaagtgctgcagcatcatccatggct

SEQ ID NO: 116184 - DNA, 281 bp, Glycine max
ggctttgcatttcatttgagagagagagcgtcttacctttccattatcaaaatggctgtttcggctatcacaggagcgaggctaaccctagggatagggttggcgatacctctttcctctcccacgcgctctcgaaccgtcgcaatggccgtatccgtcgaccccaagaccgacaacaaactcactcttaccaagtccgaggaagctttcgctgctgccaaggagctgatgcctggaggtgtcaactccccagttcgtgccttcaaatccgtgggtggtca

SEQ ID NO: 116185 - DNA, 285 bp, Glycine max
attgctacgaagggctatatagcataaacatttgagtcttcattgcacaatgtcgacctcttccattaacgggtggtgcctctcttccatctccccagccaaaacctctctcaataaggccacattaggcccttctgtcttcgcaaccgttagcactccttcttctccttcttcttcttcttcttcttccttcccttctctcattcaagacaggcctgtctttgctgcccctgcgcccatcatcaccccaactgtgagagaggatatggcaaaggaatacgagca

SEQ ID NO: 116186 - DNA, 275 bp, Glycine max
caactcaagtccaccttcactagaactcttgtagctcccaagggcctctctgcatcttcaccactccacctcctgccttctaagaggcaatttagcttcactgatagggccatccaatcagataagccaacctatcaagtgattcagaccaatcaacggtgataccttcattggaagccttgataccccagttacatccagccccttgattgcatggtacttatcgtacctcgtcgcatacaggatcgcagtgagcacattactaagagggatcg

SEQ ID NO: 116187 - DNA, 271 bp, Glycine max
ctaataatggcttcacttatgaccatattgatgggactaaagtagggggcaccatctttgaccagaatggcttcaggcacactgctgctgatcttctgcaatatgccaaacccactggaattaccctgcttttggatgccactgtgcataggatcttgtttagagtcaaagatagatcaaaaccaatggcccatggagtggtgtttagagattcattcgcttctaggcacaaggcgtacctgaagcccgatccaaggaacgagataatcgt

SEQ ID NO: 116188 - DNA, 284 bp, Glycine max
acagtgtgatccatccacaagtggaaaaccgatccctttcctcacagtaatgctacactaattaacactgtctatctagagtgtttgtccgatccatgacccatggcgccagcaactccaagatttgttgtgccaatagacttgaagaagaatccatgggaacaaaacgctcgtctccataaccgatggcaccctcacataccgcacgttgcggctgttaataccggtgaagtcttcagggtagagatggtagattggacacgacgtgctattaaagacaacga

SEQ ID NO: 116189 - DNA, 290 bp, Glycine max
  unsure (1)..(290): unsure at all n locations
gaccgtcgccaccggccgcgtagagcgtggcaccgtcaaagtaggggaaactgttgacgttgtaggattgagagagacaagaaacacaacggtcacaggtgtggaaatgttccagaagattctagacgaagccctcgccggggacaacatggggctgttgctgagaggggttcaaaagacggacatccagagagggatggtgttggcgaactcggcacgattacgccgcacaccaagttctcagcgattgtgtatgtattgaagaaggtagaangtgggagacattcact

SEQ ID NO: 116190 - DNA, 139 bp, Glycine max
gtcgcgtcactcgagccacacgcttcatctgccatgggctcattgggtgggttacgaaatgtgagcggcatcaattgttcttatcaaagagggtccaaaagtcaatgccaggttcgtgctgaagccgccagcatatcca

SEQ ID NO: 116191 - DNA, 251 bp, Glycine max
cccaatcgtagccgtcgcactctgagattacagcgccgtctccgatcaccgacaatggcgacccaaatgagcaagacgacaaggttcgtagctgatggagtgttcttcgctgaactgaacgaggttctgacaagagagttggccgaggacggttactccggcgtggaagttagggttacgacgatgcgctccgagatcatgattagagccatcagaacgcaagctgttctcggtgagcaggggaggagaat

SEQ ID NO: 116192 - DNA, 273 bp, Glycine max
gattatccaattgtgtccattgaggatccatttgatcaggatgactgggagcactatgcaaaattaacagctgaagttggccagcaggtgcagattgttggtgatgatctccttgtcaccaacccaaagcgggtggagaaagcaatcaatgagaaggcttgcaatgcgcttctgttgaaggtgaatcaaattggtagtgtaactgaaagtattgaagctgtgagaatgtctaaacaagctggttggggtgtcatggctagccacaggagtggt

SEQ ID NO: 116193 - DNA, 223 bp, Glycine max
ttaaagtgcagatacacagtagttaggtagcaagcttaagtgtctaaccttagaaacatatctgctacatatcgtgtgcattttggaattgtgccactaaaattctattcatctatggctgcctcatcttatgctatgcaatcaatccttgcaagccctatgatccgcatttccagcgggtctagggagaaccattttggtgttcctgcttatcacatgacaa

SEQ ID NO: 116194 - DNA, 265 bp, Glycine max
ccaatatattccattctctctgtgtatttccctacatctcccttcaagatgcagatcttcgtcaagagcctcaccggcaagaccatcacccttgaggtggaaagctctgataccatcgacaacgtcaaggccaagatccaggacaaggaaggaatccccccggaggagcagcgtctcattttggccggatagcagctagaggacggtcgtagccttgctgactgcaacattcagaaggagtgtactcttcacctcgatctccgtc

SEQ ID NO: 116195 - DNA, 286 bp, Glycine max
gcttctctatcactcttgtcaaattccacaaaaaccaagtactacaagggaagaagaacttagctacaagctaaggaaggatcaaagagaatggctcaagcaatggcatcaatgactagcttacgtggttcctctcaggctgtgttggaaggtagccttggctccacacgcttgaatgtggggagtggaagcagggtggcctcagtcacacgtgcagggttcacagttagagcacagcaacaacaagtgaatggtggtgaggtacaaagtagccgtagggcagtgc

SEQ ID NO: 116196 - DNA, 286 bp, Glycine max
accaaacatgtctccttcatcattgtgctctcttcaaacgttcccgccaatatctcacgcattgcttaaccgccaccacaaaccggcgcacgatagcaccgccggcgtacggagaagaacgccttacgtagtttgcgctgaaaaaggcagcagagcttcgacgcgaagccagatgattaccacgccactctcaaagctctcaactccaaaggcagattcccaagaaaatcacttggccagcattatatgttgaatgctgacataaatgaccaacttgccggtgcgg

SEQ ID NO: 116197 - DNA, 281 bp, Glycine max
ggctcagacttcgggtcgactcatctttcagaatgtgtagtcgtgtcgttcaggatcttaacttgatcagtgtgcagtgtccaaatcataagggtaggttgcaaattgcaatggctaagcatgatgttgagggtggttcctgctctgcagaggactaccatgatcctcctccagcaccgttgattgatgctgaggaactcacacagtggtccttctacagggctatgattgctgagttcgttgccacaatgctgctcctttgcatgacagtgctcactgtg

SEQ ID NO: 116198 - DNA, 272 bp, Glycine max
cttcaattcattctagttctggattccgactagccgcgttgactcggttccgtttttcattctcgcggatctaatattaaggaatagcttaagggcacattacaatgaaggcattgattctggttgggggatttggaacaaggctgaggccactgacactcagtttccctaagcctcttgttgattttgctaacaagcctatgattttgcatcagatagaagcccttaaggccattggagtgactgaggtagtgctagccatcaattaccaa

SEQ ID NO: 116199 - DNA, 257 bp, Glycine max
cgagacatggcgatggcaatggcgcttcgcaggctttcatcttcaattgacaagcctctgcgccctctcttcaatgccggttccctctagtacaagtcgtctttgcctgatgaagctgtttacgacaaggagcgacccggagttacatggccgaatcagttgaatgctccacttgaggtcgtggatcctgagattgctggtattactgagcctgagaaagctaggcaatggaaggggctagaattgataccgtcaga

SEQ ID NO: 116200 - DNA, 272 bp, Glycine max
gctcatactgctgttactctcttcagccaattacgttccatccaattctgaatatgcctcgtacttctgcgtctctgttttggaactgtacaaggtgtcggaagacgatcatctcgattactatggcttctaatctcagtacctacaattgcctgcgccatgtggaatcaatgaagcttcttccatcaggtgcgggtcacatttcacacttgaatgctgttatacttggtgtatctctcgccagtgaagacgatgacttcgttcttccaagt

SEQ ID NO: 116201 - DNA, 267 bp, Glycine max
cttttacatttgcaacttcgttagagatggaatacaggagtgacatctttggggagagaggcattttacttggtgctgttcatggtattgtggaatccttgtttaggaggtacactgaacatggaatgagtgaagatttggcctataacaacactgtcgagtccattacaggaactatatctaaaataatctcgactaagggtatgttggctgtatacaatgctttatctgaagatgaaaagagggaatttgagaaagcatatagtg

SEQ ID NO: 116202 - DNA, 280 bp, Glycine max
gcagcttcttccatggctctctcatccccatccttggctggcaaggccgtgaagctgggcccatcagccccagaagtgggaagggtgagcatgaggaagaccgtcaccaagcaggtctcctcaggaagcccatggtacggcccagaccgagtcaagtacttgggctcattctctggcgagcccccgtcctacctaaccggtgagttcccatgcgactacggctgggacactgctgggctttccgcagactcagacaccttcgccaagaaccgtgaactcg

SEQ ID NO: 116203 - DNA, 281 bp, Glycine max
tgcaattgaagttgaagtcttgcccttctctcttcaactccaaacacaagacatcatcatccatggctgcctccgtctccactgtcggagctgtcaacagagctcttttgaacctgaatgggtctggacctggggtttcagctcccagttcatccttctttgggagcagcttgaagaaggttattggctcaagggtccccaacacaaagatttcctctggaagcttcaagattgttgctgtagaagagaagaaagagattgaagagacccagcagaccgac

SEQ ID NO: 116204 - DNA, 257 bp, Glycine max
ctcgttcttcttcttgtgttgttctgtgtttgtgtttgcattatctctcacctgaaaatgtcttgctgcggtggtaactgtggttgcggaagctcctgcaagtgcggcaacggctgctgaggctgcatgatgtacccagacttgagctacactgagtcaaccaccaccgagaccttggacacgggagtggcacctgttaaggctcaatttgaaggtgctgagatgggtgtgctcgctgagaacgatggctgcaaatg

SEQ ID NO: 116205 - DNA, 271 bp, Glycine max
tagacatggccaccgtcacttctgcagccgttgctattccctcattcactggcatcaatgcaagcgcacgcacagtgagtgccgcagttaaagtctcagatccccaagccacaaggttgggcatcaaggcttcgctgaaagacgttggagtcgctgttgtggccactgtcgcgagtgcagtgctggctagcaacggcatggctattgaagtgttgctgggtggtgatgacgggtctctggctttcgttgccaacaatttctccgtggcctc

SEQ ID NO: 116206 - DNA, 274 bp, Glycine max
ctcactcgcaagcaaaaagaaagaatcccaggcgaggagaaagatggaggggaaggagcaggatgtgtcgttgggagcgaacaagttccccgagagacagccgattgggacggcggcgcagagccaagacgacggcaaggactaccaggagccggcgccggcgccgctggttgacccgacggagtttacgtcatggtcgttttacagagcagggatagcagagtttgtgggcacttttctgtttctctacatcaccgtcttaaccgttatggga

SEQ ID NO: 116207 - DNA, 283 bp, Glycine max
ggcaagcattggcagcaaaagcagcagatggtctttacagggaatgacagctctcgtcaccggtggatccaaaggaatcggatatgctatcgtggaggagttggcacagcttggagccactgtgcacacttgcgctcggaacgaagctgaactcaatgaatccttaaatgaatggaacacaaaaggatacagagtaactggttccgtctgtgacgtggcgtctcgtgcagaaagacaagacctcatagctagagtctccaatgagtgtaatggcaaactcaat

SEQ ID NO: 116208 - DNA, 263 bp, Glycine max
cttctttctttttctgtgagcctttctttcaggttcttaacttgatcagtgtgcagtgtccaaatcataagggtagttgcaaattgcaatggctaagcatgatgttgagggtggttccttctctgcaaaggactaccatgatcctcctccagcaccgttgattgatgctgaggaactcacacagtggtccttctacagggctttgattgctgagttcattgccacaatgctcttcctttacatcacagtgctcactgtgattg

SEQ ID NO: 116209 - DNA, 268 bp, Glycine max
acacagctccactgagcttgaacagctctgacgctggagattcggttcccagttcagccttctttggcacaagcttgaagaaggttactgcctcaagggtccctaacgtcaagatttcttctggcagtttcaaaatcgttgcggcggagaaagagcttgatgagcaacaacagacaaacaaggacagatggaaacgtcttgcctatcatatttcagatgaccagcaagacatcacaagacgaaagggtatggttgatctcctcttcca

SEQ ID NO: 116210 - DNA, 258 bp, Glycine max
gtagacacaatgtcttgctccaatctcacaatgttggtgtcctcaaaaccttccctttccgatccctccaatctctccttccgctctgtcctcaacccttttcagctcccttcacaaaacccaacttcatgcactccttcacgctcctcaatcacccacattcagtgtggtctgagagaactcagaccccgcattgattccgtgaagtgcactcagtgcatcatcgaggctatgaagcatgtggctgcagccagcgtg

SEQ ID NO: 116211 - DNA, 299 bp, Glycine max
cggtattcggctcgagaagcatctaagtgagatacacagtagttaggtagcaagcataagtgtctaaccttagaaacatatctgctacatatcgtgtgcattttggaattgtgccactaaaattctattcatctatggctgcctcatcttatgctatgcaatcaatccttgcaaaccctatggatccgcatttccagcgggtctagggagaaccattttggtgttcctgcttatcacatgagaaggaatgttggcctgagagttaggtccatggctgaggaagagcaaccagtcagctg

SEQ ID NO: 116212 - DNA, 260 bp, Glycine max
ccattctctctgtgtatttccctacctctcccttcaagatgcagatcttcgtcaagaccctcaccggcaagaccatcacccttgaggtggaaagctctgacaccatcgacaacgtccaggccaagatccaggacaaggaatgaatccccccggaccagcaacgtctcattttcgccggaaagcaacttgaggacggccgcacccttgctgactacaacattcatgcggatagtactctacacctcgtagtccgtctccgt

SEQ ID NO: 116213 - DNA, 256 bp, Glycine max
gtagcttcttccatggctctctcatccccatccttggatggcaatgccgttcagctgggcccatcagccccagaagtgggaagggtgagcatgaggcagaccgtcaccaagcaggtctcctcaggaagcccatggtacggcccagaccgagtcgagtacttgggcgcattctctggcgagctcccgtcctacctaaccggtgagttcgcaggcgactacggctgggacactgctgggctttccgcagacccagaaa

SEQ ID NO: 116214 - DNA, 267 bp, Glycine max
gtctcaacttctgctcttccaactcctacaacgcttttctctgcactcatgggcaaggtcaagatcggaatcaacggatttggaagaattggccgtttggttgccagattcgctctgcaaagagacgatgttgaactcgttgccgttaacgaccctttcattaccaccgattacatgacatacatgtttaaatacgacagtgttcacggacactggaagcatcacgatgtcaccgttaaggacgagaagaccttctcttcggtgaca

SEQ ID NO: 116215 - DNA, 260 bp, Glycine max
tacaactacaaaggttcctgtaggagataagatattgaagtagtgctaagtgcctaacacctgcagtgagcaatggcctctgcatcagcatctcttctcaagtccacacttgttcacgacaagtctgagtgggtgaagggacaaacacttcgccaagcttctgctgcatcagttgtgagatgcaaccccaccagcccatcaggcatcaccatcagagctggttcctatgctgatgcgctcgttaagaccgcgatgacagt

SEQ ID NO: 116216 - DNA, 257 bp, Glycine max
gggcatacaaggattcttgttgcaacagatttggttggaagagggattgatattgaacgtgtcaacattgttataaactatgacatgcctgattccgcagacacatacttgcacagggttggtcgagctggaagatttggcaccaaaggccttgcaatcacatttgtttcttgttctactgatgtcgatgttctcaacaatgttcagtctaggtttgaggtgatataaagcagcttcctgagcagattgatacctct

SEQ ID NO: 116217 - DNA, 247 bp, Glycine max
ggtttccggtggaagcttcaagattgttgctgtagaagagaagaaagagattgaagagacccagcagaccgacaaggacagatggaagggtcttgcctatgatatctcagacgaccaacaagacatcacaagccgaaagggtttggttgactcccttttccaagctccacaggatgctggaactcactatgcagtcatgagctcctacgagtactcagcactggacttcgccagtacttggacaaca

SEQ ID NO: 116218 - DNA, 250 bp, Glycine max
gtcttcgtcagggccgacctcaacgtcccgctcgacgacaaccagaacatcaccgacgagaccagaattcgcgccgccattcccaccatcaaacacctaatccaaaacggcgccaaagttattctctccagccacttggggaggccgaagggtgtcactcccaaatacagcttggcacctcttgtgccccggctttctgagctcattggtatccagttgtcaaggctgaagacagtattggtccagaagt

SEQ ID NO: 116219 - DNA, 249 bp, Glycine max
tgtgttgcttattcttttttccacaaccttgaatgtttaccgccccgccggataaggagaaggagaaggaggatctgcgtcgcaggcactgttcatcgccatgtctcgggttgataacagaaattcctcagccaccaagcgtgctaggactgatggtagtcgtagggaagatgattggacatgccccagctgtggcaatgtcaatttctctttcagacaacttgtaacatgcgtaattgcactcaacca

SEQ ID NO: 116220 - DNA, 251 bp, Glycine max
cacacttttgtcaaggcataggattggtgaggtaaacttgaattgaagtgaagaaggagatggctgcaacctcttccttgtgctcatcgaccctccaatcccagatcaatggattcttccttcacaaaacctctctttcccatactccttccctcactttctccaggaggaaaatttcaaccacagtgaaggctacatctcgagtcgacaagttttcaaaagcgatatcattgtctctccgtccattcttt

SEQ ID NO: 116221 - DNA, 254 bp, Glycine max
catagacatggccaccgtcacttctgcagccgttgctattccctcattcactggcctcaaggcaagcgcaggcaaagtgagtgccgcagttaaagtctcagctccccaagccacaaggttgggcatcaaggcttcgctgaaagacgttggagtcgctgttgtggccactgccgcgagtgcagtgctggctagcaacgccatggccattgaagtgttgctggtggtgatgacgggtctctggctttcgttcccaa

SEQ ID NO: 116222 - DNA, 255 bp, Glycine max
gattcgctcgccttgcttcgccacacaacagcaactgcagcaatggctcccaaacgaggtggaaaggctccggctcttgccgctaagaagaagcctgagaaggtttcgaatccgttgttcgagaagcgtccaaagcagttcggaatcggaggggcgttgcctccgaagagagacttgactcggttcgtgaagtggccaaagaatgttcaaattcagaggaagagaggattctgaagcagaggttgaaggttcctc

SEQ ID NO: 116223 - DNA, 257 bp, Glycine max
caagaactctccaaggatcctccttcccacgaaattcatttggtgggaaaatccaagaagagggtggaatttcaagccagggaagatggattatttcaatgcaccaggaagaaaccatctctttgttccggggccggttaacatcccggaccagatcattcgggccatgaacagaaacaatgaggactaccgttctccagcaattccagctatgaccaaaacacgcttgaggatgtcaagaagattttcaagaccat

SEQ ID NO: 116224 - DNA, 253 bp, Glycine max
tgacaagggagtgcatcttaacaatgacggaattgaaacgcatcttatgatggaaacatctggtcatggtgctctcaaagaaaatcatttccttgatgacggggcttacatggtggtgaagattataattgaaatggttaggatgaagcttgctggatcaaatgaagggattggtagtcttatagaagatcttgaagaaccgtatgaatcagtggaattaggataaatatcatctctgaacctcgacttgcta

SEQ ID NO: 116225 - DNA, 249 bp, Glycine max
tgtcaaatggagggaatttcaaatgaagcatgctcacttgccggtcactggggtctaggaaagctcattgctttatatgatgacaatcacatttccattgatggtgacactgagattgcattcactgagaatcgttgatcagcgttttgaagcacttggatggcatgtaatttgggtgaagaatggaaatactggatatgatgaaattcgtgcaccattaaagaagcaaaggctgtcaaagacaaaccc

SEQ ID NO: 116226 - DNA, 245 bp, Glycine max
gaagtatcagatctggagcaggagaatagcgttggaagcgtttgcgtttgctctgctgttccaatcggcctcagcagacgacgtcgttgtgctctctgaagataacttcgagaaggaagttggtcaggacagaggagctctcgttgagttctatgctccttggtgtggacactgcaaaaagcttgctccagaatatgaaaagcttggtagcacttcaagaaagccaaatctgttttaattggcaa

SEQ ID NO: 116227 - DNA, 244 bp, Glycine max
ctcgagccgcgcacgaatatcttgttgtttggagcgatccgagaaaaactctgtaaacatgttggtttaccaggacctccttacaggtgatgagcttctctctgactccttccgttacaaggaaattgagaatggaatgctgtgggaagttgaggggaagtgggttgttaaaggagcagttgatgtagacattggtgcaaacccttctgctggggtggaggagaagatgagggagttgatgatg

SEQ ID NO: 116228 - DNA, 248 bp, Glycine max
agcatgctgattttcccggcagcaacaatggaacaggtctcttccaaaccatagttggtttgaagataagagatctatatgagcagctaatagccagcaaggctgagactccagtagctgcaaaagcttaggaattgaacctgccataatatatatacatagatcgatcgagcaacgcagccaaattgagttctctcatcatcaaaatcatcatttctttcttctttcatgttttccacaattccact

SEQ ID NO: 116229 - DNA, 247 bp, Glycine max
actgcttcaccttctgctctagaaaattcagtggtgatacatggcttcggctactctctctgtagccaaaccagcccttcaggcaaatgggaaaggcttctctgaattctctggcctccgcagctcatcaggcttccttcccttttctagaaaatcttcagaggatttccattctgtcattgccttccagacctatgcagttggaagcagtgaggatacaagaagggtgtgacagaagcaaaactga

SEQ ID NO: 116230 - DNA, 250 bp, Glycine max
atccgggaagaccaagcctgaaagggaaccggatcttttctctttaagctcaccaaagcttgatgagaagccactcttccctttgcttcctactaaagacgggatttgctcgtcggggcagaaagctgttgtttctggcaacaaaagaggttttgctgataccatggatgggttttctcaggggaagtttgctggtaatacagggatgaacgcgggctatcacctagaccttctggagctcaaccttctg

SEQ ID NO: 116231 - DNA, 253 bp, Glycine max
ccaagctttattcctcatgtctttcagaggcctcagccggccaaatgcctcatcaggcatgggtgttgctgatcacagcaagaacaccttcatggaattgaagcagaagaaggttcaccgttatctgatctttaaggttgatgagaagaaaagggaagttgtggttgagaagactggtgacccggctgagagctatgaggatttcgctgcatctttgctgagaatgattgcagatatgctgtctttgactatg

SEQ ID NO: 116232 - DNA, 252 bp, Glycine max
gatctggtgttattgttgagggatctctagttgcagagcctgttgcaactccccctgctgcagacacaaaggctgctgttgctgaggatgacgatgatgatgatgtggatttgttcggtgaagagacagaagaagagaagaaggcagcagaggaacgggcagctgcagtgaaggcatctacaaaaaaaaaagagtctgggaaatcatctgttctgttggtgtgaaccatgggacgatgaaactgacatgaag

SEQ ID NO: 116233 - DNA, 254 bp, Glycine max
tgacactgttcaggaacaagaccttaaggaattccgacaatggggaagcagaactcctggacatcctgagaactttgagacccttggagttgaagtgaccacaggtcctcttggtcagggcattgccaatgctgttggattagcactagctgagaagcacttggctgcacgatttaacaagcctgacaatgagattgttgaccattacacatatgttaattgggtgatggttgtcaaatggagggaatttcaaa

SEQ ID NO: 116234 - DNA, 250 bp, Glycine max
ccgaatgagagcatcaaactcttcttcttcgatttccattgcgaacgttactttttcttcttctttctcttcattttcttcgctcttcgatcttcgtccggggactgctccgaataccaccaccaccactcgccgatggccacgatcggaggcttacacgactcccaaggctctcaaaacagcgtcgaaaccgaagccctcgctcgattcgccgtgacgaacacaacaagaagcagaattcgcttctgga

SEQ ID NO: 116235 - DNA, 248 bp, Glycine max
atcatacaaagcattgaattcaaaaacttaagttcattccttgtgttttgctttcttcctcaaaaccaaacatgtcgaacacatgcggcaactgcgactgcgctgacaagactagctgcaccaagggaaacagctatggtgttattgtagagactgagaagagttacatcgagactgttgtcatggatgttccagcagctgagcatgatgggagtgcaagtgtggcactaactgcacttgcacggact

SEQ ID NO: 116236 - DNA, 244 bp, Glycine max
tgcaattgaagttaaaagccttagccttccctacaactccaaacataaagacatcatcatccatggctgcctccgtctccactgtcggagctgtcaacagagctcttttgaacctgaatggttctggagctggagcttcagctcccagttcagccttctttgggaccagcttgaagaaggttattgcctcaagggtccccaacagcaaggttccggtggaagcttcaagattgttgctgtagaa

SEQ ID NO: 116237 - DNA, 256 bp, Glycine max
  unsure (1)..(256): unsure at all n locations
agctcacgaagcttctcggcctgaggccctccgtgaagcgcctcatgatgtatcagcagggctgcttcgccggcggcaccgtactccgcctcgcgaaggacctcgccgagaacaacaagggatgcgagggctgctcgttagtctagctccgaagataaccggccgtagacgattccgcgagcccactccggacacgacacctgcgactacgctncgtgaggcacagtgcatgtctccggagattggcgaccgcagc

SEQ ID NO: 116238 - DNA, 249 bp, Glycine max
ggcactccaacagaaccaactatctttctctaccttagcttcctctctttctgacttcagtggaaccagacttcaaactcaacttcagttcaagagaaagcaatgccatccaaaagggtctttctacgtctccgcatcgagcaccaagaaaatcctaataatgggaggcaccaggtttattggtgtgtttttgtctaggctccttgtcaaagaggtcaccaggtgactttattcacaagaggtaaagcg

SEQ ID NO: 116239 - DNA, 251 bp, Glycine max
cagaaaaacaagtagttgagaactaagaagaaggaaatggcttcctcaatgatctcctccccagctgttaccaccgtcaaccgtgccggtgccggcatggttgctccattcaccggcctcaaatccatggctggcttccccacgaggaagaccaacaatgacattacctccattgctagcaacggtggaagagtacaatgcatgcaggtgtggccccaattggcaagaagaagttcgagactctttcctac

SEQ ID NO: 116240 - DNA, 254 bp, Glycine max
gatagactgatgcagttgatcctaagagcagacacaagggaaagcttgagacagagagtttgctacaagcaaggggtgttaattggacatctataaggccagtctacatctatggacccttgaactacaaccctgttgaagagtggttcttccatagattgaaagcgggacgcccaattcctatccccggctcaggaatacagataacccaacttggtctgttaaggatttggcaaaagcttttatccaggttc

SEQ ID NO: 116241 - DNA, 257 bp, Glycine max
gttgaacaagggtttctctgtctgcttcttcactttctctcgtttcaatcgaaaccaaaacaaaaacatgggcagaaaattcttcgtcggtggcaactggaaatgcaatgggaccactgaggaggtaaagaagattgttactactttgaatgaggctaaagtccctggagaagatgtcgtagaagttgttgtgagccctccttttgtgttccttcctgttgtaaaagtttgctgcgccctgatttccatgtttcggc

SEQ ID NO: 116242 - DNA, 244 bp, Glycine max
gcgagcagtttcagacacagagagaggggtttgggattggagggattgacgctgcgtctcttcctcttctctttcgatccatccctcattcctaatcctccaatccaaccacctcagcctcacactcacatatacacatatctgaacgcgtatcgtccctcctatggcttcaaagcgcatcctcaaggagctcaaggacttgcagaaagaccaccaacttcttgcagcgctggtccagtagctg

SEQ ID NO: 116243 - DNA, 244 bp, Glycine max
gcaaagacgagcaactgggcaggaatatgctgaacttatgcacgaatttatgacagcagtcaagcaaacttacggggaaaaggtcctaattcagtttgaagactttgcaaaccacaatgcttttaatctgcttgagaaatatagatctacacatctggtctttaatgatgatattcagggaacagcatccgtggttcttgctggactagttcatctctgaagttggttgggggtaacttagctg

SEQ ID NO: 116244 - DNA, 244 bp, Glycine max
actatccatacatagccacttcacactcactcactcttgttgccttcatggccaagccagtgtccattgaggtatggaacccaagtggcaaatacagagttgtcagcaccaaaccaatgcctggaactcgttggatcaatcttctcattcaaaatgatgttcgccttgaaatatgtaccgagaagaaaacgattttgtcagttgaagacacattgctttgattggtgataagtgcgatggagtt

SEQ ID NO: 116245 - DNA, 196 bp, Glycine max
atttgcaattgaagttaaaagccttagccttccctacaactccaaacacaaagacatcatcatccatggctgcctccgtctccactgtcggagctgtcaacagagctcttttgaacctgaatggttctggagctggagcttcagctcccagcaccagccttctttgggaccagcttgaagaaggttattgcctcaa

SEQ ID NO: 116246 - DNA, 248 bp, Glycine max
tacacctggagccgagtccaaggacaaggccagtcctcagacagttgctgattacaccctcaagctgcttcacaggagaattccccctgctgtccctggaattatgtttttgtctggtggacagtctgaggttgaagctaccctcaatttgaatgccatgaaccaatctccaaacccgtggcacgtgtcattctcgtatgccagagccctccaaacactgccttgaagacatggggaggccgcccaga

SEQ ID NO: 116247 - DNA, 225 bp, Glycine max
gaggaagtggatttctggtgttggtgttgacagtgttgggaagaagcttgtgaactcaaaagatggacctccaacctttgagcagcccaagatgactctggagaagctcttgctgtatggtaacatgcttgtccaagaacaagagaatgtcaagagagtccattgggctgacagtacttgaacgaggctgctcttggaaatgctaacgaggatgctattcagggg

SEQ ID NO: 116248 - DNA, 249 bp, Glycine max
gcaccaccctgtcgtttcacaggagtacgggaagggcctaccggttgagagtgcgtgggtggggatgcgtgactatagcccccagcttgttgtgccatcgattttggagttcgtgaatcggtttgagggtgggattgaggggattatgaagaggaaccatgacggggttgtgaaaatgggaaccatgttggcggagtcgtggggaacggttctgggtcgcctcctgatatgtgtgctagcatgattatg

SEQ ID NO: 116249 - DNA, 241 bp, Glycine max
ggatcacagtgccgatgctcaacgcacggacttgatgaccatcacccgcttcgtgctgaaccaacaatccaaccaccctgagtctcgtggcgatttctcaatcttgctcagtcacattgttctcggttgcaagttcctctgctctgctgttaacaaggcgggtcttgctaagcttattggacttgcaggagagacaaatgttcaggggaagagcaaaagaaactggatgtcctttccaatg

SEQ ID NO: 116250 - DNA, 244 bp, Glycine max
caacacactacttctcactctccctctctaatagtaatagtaatatacataagtaacataaccaatggaagcgcgtgcaggagccaatcagcgtattgcaagaatctctgctcatcttcagcctccaaatttccaggaagggagtgatgttcttcttaagagtgctgagtgcagagcaaagggtggggcacctggattcaaagttgcaatttgggggctgctgggggaattggtcaaccccttt

SEQ ID NO: 116251 - DNA, 245 bp, Glycine max
attagggctaccaataccaataccaataccaattctattctatggcttgctcaagcgcccaaatacacggtctcggaaccccttcctcccgaaccctatttttaggtcagaggctaaataccaaggccgcctttatcaagctcaagtccacacctagaagactccgccctctcagagtggttaatgagaaagtcgtcggtatcgatttggaaccaccaactccgccgtggctgccatggaaggcg

SEQ ID NO: 116252 - DNA, 244 bp, Glycine max
ccacggcgcagatccgaggagtttgggaaaccctaattcattcctctttgcttctatctctattaccctaacaccagtgatggcaggtttggctccagaaggatcgcagtttgatgctcggcaatatgactctaagatgaatgaattgctttccgctgatggacaagaatttttcacttcatatgatgaagtctatgatagttttgatgcatgggccttcaagaaaatcttctcagaggcatat

SEQ ID NO: 116253 - DNA, 250 bp, Glycine max
ctcccaacccccacccgtagtttctaccaccttcagtcacggcgtaatacactaaccaacccaccatgtcgctgcctgcttgtcccgccgaacaactggcccaagcttctcggcccaaacaccacagacgcctccgccgccgcctcccttatctgcggccagttcgccgccgtggacagcaagttcgtcgacacggccttcgccgtcgacaacactacctcctcttttccgcctacctcgttttttctat

SEQ ID NO: 116254 - DNA, 252 bp, Glycine max
atggctttgagggatgcatcaggtccatccctcaaacctgcccctttcactgttgagaagtcctcagtgagaggccttccctctctctcaaggaactcttcgtcattcagagttgtggccagtggcaagaagatcaagactgacaaaccttatggaattaatggtggcatggctttgagggatggaactgatgcatctggcaggaaaggcaagggaagggtgtttaccagtttgtagacaaatacggtgcta

SEQ ID NO: 116255 - DNA, 235 bp, Glycine max
caagaatccagctttgtatggtgaacttgccaaaggccagagccccaagtttatggtgtttgcttgctcagactcaagggtgtgcccatctcatgtgctagatttccaaccaggagaggcctttgtggtcagaaatgttgctaacattgtcccaccatatgaccagtcaaaatacgctggaactggggcagcagttgagtatgctgtttgcatcttaaggtgtctgagattgtgg

SEQ ID NO: 116256 - DNA, 142 bp, Glycine max
ctacactaacacaatccccttccctcttctctttctatccaaattgtccaccagccatggcagtttcttcagcaacagcttcctccaaactcatactattcgcccatgcatcatcatccgcttcccttaattccacacaaca

SEQ ID NO: 116257 - DNA, 245 bp, Glycine max
gtgcattcaatggccaccacagcagctctatccggaaccatggtgagcacctccttcatgaggaggcaacctatgaccaccacaagcctaaagacattccccaacgttggtgaagctctttttggtctgaaaagtggacgaggtggtcgtgtcacttgcatggcctcgtacaaggtgaagctcataaccccagaaggagaagtggagtttaatgcccagatgatgttttcattgttgacaaggca

SEQ ID NO: 116258 - DNA, 240 bp, Glycine max
atcgctctaagtagactcagtgtgatgataatgacggtccttgtttgcttcgttgctacaattttggtagcatggcaatgccatgcgtacgatatgttccctctccgaatgaacactggctatggtgcccgtactccggaggtgaaatgcgcaagttggaggcttgctgtggaagcacacaacatctttggctttgagaccattcctgaagagtgcgttgaagcaacaaaggaatacatc

SEQ ID NO: 116259 - DNA, 233 bp, Glycine max
cgattccccaatatggcttatttgacaatgtaaattcagtggacgagcttgcaaaaatgcctcaatggacagaagaaaagcctctacgagttgctactggtttcacctatctggggcctaaatttatgacagcgaatggacttaagcatgtcacattttcaactgctgatggagcactggaggcagctcctgcgatggggatagctgatgctatcttggaccttgtaagtagt

SEQ ID NO: 116260 - DNA, 238 bp, Glycine max
aaggcactgtgttctacacagataacaatggagcagttgttgatatcactgcaaagtcttcggcatatttgccactgcaagaggcgtgcatccacagggttaagcatgttgaagaagcaggcttagttcctgggttcaaagaggagtttttgatcattggtgagaactcaatagatgatagcttggtcttgagtttaaggtctcttcagtttgaccttgcatgggaacgttgtagaca

SEQ ID NO: 116261 - DNA, 239 bp, Glycine max
gccagttgagtgctttcttgagaagactaatactgggcgcagtagaagttccagccgagggagtagtgctggtaggtctcctgtgttatatgttgatgagcagatccagggatttaaagtaaatctaaaaccagaaaagaaatccaaattttcatctgttgtgttgaagatacgtggtattgatgaggacatttggagacagcaagtaactggtggaaagctcagggaaattactgagg

SEQ ID NO: 116262 - DNA, 240 bp, Glycine max
tgatcgctccctgagagagctcgtcgcggcggttgcagaagaagattgcaagatgaagttcaacatcgcgaatcccaccactggatgccagaagaagctcgagatcgacgacgatctgaaactgcgagcattttgggacaagaggatctcacaggaggtcatcggagatgcactcggtgaggaatttaagggctatgtcttcaaaattaccggcagttgtgacaaacaaggatttccaat

SEQ ID NO: 116263 - DNA, 232 bp, Glycine max
ctaagtgagatacacagtagttaggtagcaagcataagtgtctaaccttagaaacatatctgctacatatcgtgtgcattttggaattgtgccactaaaattctattcatctatggctgcctcatcttatgctatgcaatcaatccttgcaaaccctatgatccgcatttccagcgggtctagggagaaccattttggtgttcctgcttatcacatgagaaggaatgttggc

SEQ ID NO: 116264 - DNA, 237 bp, Glycine max
ggcgcggaggtgacaggggccgaggccggcgccgaagtccccgccgcgaggaagaggagaaatgggtcccagtgaccaaactgggccgcctggtgaaggagggaagaatccgaagccttgaacagatctacctccactcgctcccgatcaaggagcaccagatcatcgacacgctcgtgggtcccaccctcaaggacgaggcgatgaagatcacgccggtccagaagcagacccggg

SEQ ID NO: 116265 - DNA, 237 bp, Glycine max
aaaaacaagtagttgagaactaagaagaaggaaatggcttcctcaatgatctcctccccagctgttaccaccgtcaaccgtgccggtgccggcatggttgctccattcaccggcctcaaatccatggctggcttccccacgaggaagaccaacaatgacattacctccattgctagcaacggtggaagagtacaatgcatgcaggtgtggctaccaattggcaagacgacgttcgag

SEQ ID NO: 116266 - DNA, 230 bp, Glycine max
cagaaaaacaagtagttgagaactaagaagaaggaaatggcttcctcaatgatctcctccccagctgttaccaccgtcaaccgtgccggtgccggcatggttgctccattcaccggcctcaaatccatggctggcttccccacgaggaagaccaacaatgacattacctccattgctagcaacggtggaagagtacaatgcatgcaggtgtggccctcaattggcaagaa

SEQ ID NO: 116267 - DNA, 239 bp, Glycine max
ccaacaagtgtttctgtaaccatggcatccaccactctatcccctacaaccccttctcagctatgctcaggaaaaagtgggattttcagttcctcacaggcacttcttgtgaagccagtgaagaggcagatgatggggaagagcaagggattgagaattgcatgccaagccaccagcatttccgctgatagagtccctgacatgggcaaaagacagctcatgaatcttcttcttcttgg

SEQ ID NO: 116268 - DNA, 236 bp, Glycine max
atagacatggccaccgtcacttctgcagccgttgctattccctcattcactggcctcaaggcaagcgcaggcaaagtgagtgccgcagttaaagtctcagctccccaagccacaaggttgggcatcaaggcttcgctgaaagacgttggagtcgctgttgtggccactgccgcgagtgcagtgctggctagcaacgccatggccattgaagtgttgctgggtggtgatgacgggtc

SEQ ID NO: 116269 - DNA, 236 bp, Glycine max
gcaagagttagatcggtaagcctcataaaaatctcgctacccttcttcatctgtttttcctgattatcactgtcactgattgggtgcaggacgaggattgcgtgtacacggtgtacgttcggacgggttcgatcatcaagggaggcaccgattcagtaattggtctgaagctatacgacaagtccggctacggcatatacatcaccaacctcgaggcatggggcgggttaatggat

SEQ ID NO: 116270 - DNA, 238 bp, Glycine max
agaggaaatacagaagcagatactggagccggcgataaaaggaacagttaatgtgttgaaggcggcgaaggaagcgggggtggagcgcgtggtggcgacttcgtcgatctcatccattatgccaagccctaactggccagctgataagattaaggcagaagagtgttggacagaccgtgaatactgcaaacagaaggggttgtactatcccattgcaaagactctagcagagaaagcg

SEQ ID NO: 116271 - DNA, 246 bp, Glycine max
cacgcgatcctctgctttctctctctaccattgccatggatccctacaagcaccggccatccagcgccttcaattctcccttctggactacaaattctggtgctcctatttggaacaacaactcctctttaaccgttggagctagaggtccaattctgctggaggattatcatcttgtggagaagcttgcaaattttgatagggaacgtatcccagaacgtgttgtccatgccaggggcgctagtg

SEQ ID NO: 116272 - DNA, 237 bp, Glycine max
aaaaacaagtctttttctgaaaacttaatttctctctgattttctccctcacttttatttctctctttctggattattctctctgtgtagattgtggcgtgttctcgatgatgatgatgatgagccgcagcggcgccaaccgggtagcgaacaccgcaatgtttgtggcgaagggtctaagcggcgaagttggtggtttaagagcattatatggcggtggtgtgaggagtgagagca

SEQ ID NO: 116273 - DNA, 231 bp, Glycine max
tagagaaggactgcactataatccttattttcctggtggggctattgctatgcctaaaatgcttaatgatggcgctgttgaatatgaagatggtacccctgctacagaatctcagatgggtaaagatattgtatcattcctgacttgggctgcggaacctgagatggaagagagaaaactgatgggattcaaatggatatttgttctatcactggcattacttcaagctgc

SEQ ID NO: 116274 - DNA, 233 bp, Glycine max
gaaccttctgaggttaaagcaaaaaacaaagagagagagagagagaaaatgatgaagccatcgatgctcagatctctccactccgccgccacccgcggcgcctctcatctcttccgccgtgggtacgcctccgagccggtgccggagcgcaaggtagccgttctcggcgccgccggcgggatcgggcagcctctctcccttctcatgaagctcaatcccctcgtttcgagcct

SEQ ID NO: 116275 - DNA, 235 bp, Glycine max
gccaagtgaaagtgagataaaataaaaatcaaagagcataatgtcagggatcattcacaagattggggagacccttcatgtgggagggcacaagaaggaggaggagcataagggtgagcaccatgctggagaatacaaaggggagcaccatggtgaacacagtagtgagtacaaaggagagcatcatggtgaacacaaagctggagagtaccatggtgagcacaagccagagcac

SEQ ID NO: 116276 - DNA, 235 bp, Glycine max
gctattccctcattcactggcctcaaggcaagcgcaggcaaagtgagtgccgcagttaaagtctcagctccccaagccacaaggttgggcatcaaggcttcgctgaaagacgttggagtcgctgttgtggccactgccgcgagtgcagtgctggctagcaacgccatggccattgaagtgttgctgggtggtgatgacgggtctctggctttcgttcccaacaatttctccgtgg

SEQ ID NO: 116277 - DNA, 235 bp, Glycine max
aaaagaaatagaaatgcagaaagaagatcttttgtcaaaaccagagcagataagatcaaagattgttgaagggcggataagaaaaagacttgaggagctggcattgctcgagcagtcctacattaaggatgataaggtagcagtaaaggacttcatcaagcaaactattgcaactattggagaaaatattaaagttaagaggtttgtgcggttcaaccttggagagggtttagag

SEQ ID NO: 116278 - DNA, 265 bp, Glycine max
  unsure (1)..(265): unsure at all n locations
tcggtattctcctcattcggctctagcacggtaccaaaaccctaaacccttcttctctgatatttaaaacctctctcaacaccttcacctatctctatttcctttctgatcaatcaatctcctcttctcttccagccatggcctccttgctccgctctctccgccgccgcgatgtcgcctccgcctccctctctgcttatcgctcgtcanagggcagcaccaagccagcatatgtagctcacaactggtctagtttgtctcgacc

SEQ ID NO: 116279 - DNA, 236 bp, Glycine max
tggataccttacgtgggaagcacgtatcaagattctccttggcacagccaaagcgctagcgtatttgcatgaagcaattgaaccaaaggtggtgcaccgtgatgtaaagtcaagcaacatattaattgatgatgatttcaatgccaaggtttctgattttggcctggccaaattattgggtgctgggaagagttatgtcacaacaagagttatgggaacttttggatatgtggctc

SEQ ID NO: 116280 - DNA, 232 bp, Glycine max
caacaagtgtttctgtaaccatggcatccaccactctatcccctacaaccccttctcagctatgctcaggaaagagtgggattttcagtccctcacaggcacttcttgtgaagccagtgaagaggcagatgatggggaagagcaagggaatgagaattgcatgccaagccaccagcattcctgctgatagagtccctgacatgggcaaaagacagctcatgaatctgcttct

SEQ ID NO: 116281 - DNA, 232 bp, Glycine max
ggaggaaatgcaacttacttgttgatataaacttcagacagagcgagttgttgtaaagctagccttgttgcagccatggccacccacgcggctctagcttctacaaggatccccactaacaccaagttcccatccaaggcttcacactctttcccaacccaatgcgcctcaaagagacttgaggtgacagaattctctgggctaagatccacttcatgtgtgacatatgcta

SEQ ID NO: 116282 - DNA, 234 bp, Glycine max
catccatagacatggccaccgtcacttctgcagccgttgctattccctcattcactggcctcaaggcaagcgcaggcaaagtgagtgccgcagttaaagtctcagctccccaagccacaaggttgggcatcaaggcttcgctgaaagacgttggagtcgctgttgtggccactgccgcgagtgcagtgctggctagcaacgccatggccattgaagtgttgctgggtggtgatg

SEQ ID NO: 116283 - DNA, 231 bp, Glycine max
aatagacaaggtgactatgttaatgcaatacgagctgcaagggacttttcggcaataatttcttcgtctttaaagatggatatttttccgtactcagtgttttatatcttctttgaacaatacctggatatatggaagttagccctgatcaacattaccgtagcactaggtgctatttttgttgtctgtctgatcatcacatccagcgtgtggagttcagcaatcttatta

SEQ ID NO: 116284 - DNA, 233 bp, Glycine max
attcaaaagtatctcctaatgaagggcggcttcctgatgctaaaaaaggtgttccacatctccgtgatatcttttatcgaatgggcttgactgaccgagatattgttgcactatctggaggacatacactggggagagcacatccagagagatcagggtttgatggcccttggacggaggaccctctgaagtttgataactcatactttgtggaacttttgaaagaagattct

SEQ ID NO: 116285 - DNA, 231 bp, Glycine max
ggtgaacatccagaccatgtggttgtcattaagtacgtgccttatgtaggggacagcaagagacccatggatgagtacacttctgagatattcatgggtggaaagaacacaattgtgttgcacaacacatgtgaggattcactgttagctgctcctattatcttggacttggtccttcttgctgagctcagcactcgaatcgagtttaaagctgaaaatgagggacaattc

SEQ ID NO: 116286 - DNA, 228 bp, Glycine max
ctctgacggtgctatagatgggcaccgtcgggaggtgggactcacgttccacctcttgaaggatgtgcccgggatcatctcgaagaacattgagaagagtcttgttgaagcttttgagcccatcgggatcagcgactggaacctctatcttctggatcgcacatcccggtggtcccgcgatcctcgatcaagtcgaggagaagctccggctcaagccggagaaactcc

SEQ ID NO: 116287 - DNA, 230 bp, Glycine max
aaggtcggcggcgtggtgttatacggcggagtccacgacgcagcgtcgtgcctcttcttctcagccgccgcagagtttctctttgcgcctcttcttcttcttactcctccatttctgaccacgtttctttcgtgaaggatgtagctgcgactcagcctcctcagcatctttcacaactcctcagtattgtgaagaccagaggtgaatctattatctccccgggtgccagg

SEQ ID NO: 116288 - DNA, 231 bp, Glycine max
tttacttacactcggttccttgggccctgttttatttgcttcatcaccagtgcaacatgagtgcatacctcaagcaattctcgggatggatgtaatttgtcaagcaaaatctgggatgggaaagactgctgtttttgttctgtcgactctgcagcagattgatcctgttcctggccaagtttctgcacttgttctttgtcatacaagagaattagcataccagatatgcca

SEQ ID NO: 116289 - DNA, 234 bp, Glycine max
tgaacaaccagatggtgaatgccactctcatgaacattgctgataaccccaccaatgtgcagcttccaggtatgtacaacaaggaagagaacccccgtgttcccatcattgtcaccggtaacgatttctcaacactctatgcacctctcatccgtgatgggcgtatggagaagttctactgggcaccaacaagggaagaccgcattggtgtttgcaccggaattttccgcactg

SEQ ID NO: 116290 - DNA, 231 bp, Glycine max
acgaaacacagagggagagagagtgagagaagcagtaattcatcacaatgggtaaggttcacggatctctcgcacgtgcggggaaagtgagaggacaaactcccaaagtggcgaacaagacaagaagaagaagccacgcggacgtgctcacaagagaatgcaatacaaccgccgattcgtcaccgccgtggtgggattcggaaagaagcgtggaccaaactcgtcggagaa

SEQ ID NO: 116291 - DNA, 230 bp, Glycine max
cggctcgagctatactctctctagagtaattgcggaatcagctagaattttctaataatggccaaagacgttgagcaggttacagagcaaggtgaatactccgcgaaggattaccatgacccacctccggcgccgttgatcgacccagatgagctcactaagtggtccttgtacagagccgccatagctgagttcatagcaacactccttttcctttacatcaccgtgtt

SEQ ID NO: 116292 - DNA, 229 bp, Glycine max
ctagatagaaatggtcacatgaaattatcagactttggattatgtaaaccactagactgcagtaatcttcaggaaaaggacttctctattggaagcaacagaagtggagcccttcagagcgatgggcgtcctgtggctcctaaaagaagccaacaggagcaactgcagcattggcagaaaaataggcgaatgctagcctattctacagtcggaacacctgactatattg

SEQ ID NO: 116293 - DNA, 225 bp, Glycine max
caggaacagctattcccgagccttctgatttcaagacatgggatgggcaaaaacctatttctgtcttaggatctacgggttcaattgggactcagacactgagtatagtggctgagttcccagaaagatttaaagttgtgagccttgctgctggctctaatattactcttcttgctgaccagattaaaacatttaagcctgaagttgttggtcttagaaatgagt

SEQ ID NO: 116294 - DNA, 232 bp, Glycine max
gagaaagttgttgtaaagccttgttgctgccatggccacccacgcggctcttgcttctacaaggatcccttcaaacacaaggttcccatccaaggcctctcactctttcccaacccaatgcgccttaaagagacttgaggtgacagaattctctgggcttagatccacttcatgtgtcacatatgctaacagtgctagagaatcttccttttttgatcttgtagcttcccaa

SEQ ID NO: 116295 - DNA, 231 bp, Glycine max
gagagaacttcaactgagggtgagagtgacacaaatctagggagcactactctaaaagttctattagattcttcaaaacatgaccatgcatcgcgagtcttgggcttttgtcttcggcttatgggcaacatcatctcctttggagtgttccttgctccattgccaaccttttaccaaatctacaagaagaaatccactgaagggttccagtcacttccttatgttgttgca

SEQ ID NO: 116296 - DNA, 240 bp, Glycine max
gtcttgcaattgatgttgaagtcttgcccttctctcttcaactccagacacaagacatcatcatccatggctgcctccgtctccactgtcggagctgtcaacagagctcttttgaacctgactgggtctggacctggggtttcagctcccagttcatccttctttgggagcagcttgaagaaggttattggctcaagggtccccaacacaaagatttcctctggaagcttcaagattgtt

SEQ ID NO: 116297 - DNA, 255 bp, Glycine max
gggaaagcttgagacagagagtttgctacaagcaaggggtgttaattggacatctataaggccagtctacatctatggacccttgaactacaaccctgttgaagagtggttcttccatagattgaaagcgggacgcccaattcctatccccggctcaggaatacagataacccaacttggtcatgttaaggatttggcaaaagcttttatccaggttcttggtactgagaaggccagcaaggaagtattcaacat

SEQ ID NO: 116298 - DNA, 256 bp, Glycine max
agaagcagaaggaggagaagcagaaagaggagacgaagcaatggcgccgaagaagccccgaaccacgtcgaggaaccctgatttggtcaggggaattggcaaatattcgaggtcgcagacgtaccacaagaggggcatctgggccatcaaggccaaaaacggcggtgttttgcccctccacgatcccaagcccaaacccgaggccccggcccagaagccgcacaagttctacccggccgatgacgtgaagaagccc

SEQ ID NO: 116299 - DNA, 253 bp, Glycine max
gcttatggtggatacctaggcacccagagacgaggaagggcgtactaagcgacgaaatgcttcggggagttgacaataagcgtagatctccatacccatcattaagatacacgtctttgatcctcctcaagcctaagtctcagacaatcaggtgcagcatctagccgccggtgtacaacatcaataagaacgacttccgtgatgtggttcagaaactgacgggctcacctgcgcacgaccgcatctcaacgcc

SEQ ID NO: 116300 - DNA, 257 bp, Glycine max
gtgcctacacccaatgtttcagttgttgaccttgttgtgaatgttgagaagaagggtcttactgctgaagatgtgaatgcagcattcagaaaggcagctgagggtccactgaaaggtgtgttggacgtgtgtgatgttccacttgtgtctatcgacttccgctgctctgatgtttcctctactattgactcctccttgactatggtcatgggagatgacatggtaaaggtggtcccttggtatgacaatgaatgggg

SEQ ID NO: 116301 - DNA, 252 bp, Glycine max
agggaccaactctccttgaggctcttgaccaaatcaatgagcccaagaggccctccgacaagcctctaaggcttccattgcaggatgtctacaagattggtggtattggtactgtgccagtgggacgtgtagagactggggttgtgaagcctggtatggtggtgacttttggtcccactatctgaaaactgaggttaagtctgttgagatgcaccatgaggctctcacagaggctcttccaggtgacaatgt

SEQ ID NO: 116302 - DNA, 255 bp, Glycine max
tgggaatcaaccccatcatgatgagtgctggagagttggaaagtggaaatgcaggagagccagcaaagttgataaggcaaaggtaccgtgaagctgctgatataatcagcaaggggaagatgtgctgtctcttcataaacgatcttgatgcaggagctggtcgtcttggtggaaccactcaatacactgtgaacaaccagatggtgaatgccaccctcatgaacattgctgataaccccacaaatgttcagcttc

SEQ ID NO: 116303 - DNA, 253 bp, Glycine max
gagctgctgaaattttcagtaacccaaaggtccaagctgaagttccatggtatggaatagaacaagagtacaccttacttcaaacaaatgtgaaatggccattaggatggccggttggtggctatcccggtcctcagggtccttattattgcagtgctggggcagataagtcatttggacgtgacatatctgatgctcattacaaggcttgcttatatgctggaattaacatcagtggcaccaatggggaggt

SEQ ID NO: 116304 - DNA, 256 bp, Glycine max
caaaggttgctgtaggagatcagattgcagtagtgctaagtgctaacacctgcagtgcacaatggcctctgcatcagcatctctgctcaagtcttcacttgttcttgacaagtctgagtgggtgaagggacaaacccttcgccaaccttctgcatcagttgtgagatgcaaccccaccaccccatcaggcctcaccatcagagctggttcctatgctgatgagctcgttaagaccgcgaaaacagtggcttcacca

SEQ ID NO: 116305 - DNA, 255 bp, Glycine max
attcagatattggtggtgtgcgggtgggttacggcgaccatggcgccgttgttctatgggcttcataagatgaaactgttgagaatttcgagggatgatgagactgcggggatggatttgacgaggcatggtgggtttgcttatgcataccatgatgatgaagatggttcaagcaggggagtagggttcatgctgcgtagaattgagcctgcagctattaccactccctctccccccgctgcaccacaagtttaa

SEQ ID NO: 116306 - DNA, 256 bp, Glycine max
caaaatttctcattctccctttcctctccgaaccctcgatctctctcacgcgctcctatattcgctcctccaccgtcgctctctcgaacaaccacaacaccatcttcatcacatggcaaacgcagcatctggtatggcagtccatgatgactgcaagttgaggtttttggagctgaaggcaaaaaggacacaccgtttcatagtttttaagattgaggagcagcagaagcaggtcattgtggagaagcttggtgag

SEQ ID NO: 116307 - DNA, 255 bp, Glycine max
ggcctccaatagctccagtcccctctggtatgcagttaggcgtgcgtctgctcatataattgtgctatccagctattcaccatttgtgaaatacactcctcaatacatgtggcttaaagaagagctgaagcgagttgagagggagaagactccttggctcattgtgctcatgcacgtgccgctctacaatagtaatggagctcactatatggagggtgaaagcatgcgatctgtttttgagagctggttcatcga

SEQ ID NO: 116308 - DNA, 255 bp, Glycine max
gtttcttacaagcctctactatactgcttcaccttctgctctagaaaattcagtgctgaaacatggcttcggctactctctctgtagccaaaccagcccttcaggcaaatgggaaaggcttctctgaattctctggcctccgaagctcatcaggcttccttcccttttctagaaaatcttcagaggatttccattctgtcattgccttccagacctatgcagttggaagcagtggaggatacaagaagggtgtga

SEQ ID NO: 116309 - DNA, 255 bp, Glycine max
cagcgacttcttaaacgccgtcaagaagggtaaggtcgagcgagtcaggttcagcaaagacggttctgccctccaactatccgcggttgacggccgtcgcgcctccgttattgtccccaatgacccggacctcatcgacatcctcgccatgaacggcgtcgacatttccgtcgcggaacgcgaatcccccaacagcttgttcaacatcgttggcaacttgctcttccccttgctcgcgttcgcgggtttgttctt

SEQ ID NO: 116310 - DNA, 114 bp, Glycine max
ctccaggagaaacttggcacatggtcttcagcaccgagggagagattccttacagagaaggacaatcaattggggtaattcctgatggtgttgacaagaatggcaaacctcata

SEQ ID NO: 116311 - DNA, 256 bp, Glycine max
tgagatacacagtagttaggtagcaagcataagtgtctaaccttagaaacatatctgctacatatcgtgtgcattttggaattgtgccactaaaattctattcatctatggctgcctcatcttatgctatgcaatcaatccttacaaaccctatgatccgcatttccagcgggtctagggagaaccattttggtgttcctgcttatcacatgagaaggaatgttggcctgagagttaggtccatggctgaggaaga

SEQ ID NO: 116312 - DNA, 259 bp, Glycine max
atcatacaaagcattgaattcaaaaactaagttcatttcttgtgctttgctttattcctcaaaaccaaacatgtcgaacacatgcggcaactgtgactgcgctgacaagactaactgcaccaacggaaacagctatggtgttatagtagagactgagaagagctacatcgagactgttgacatggatgttccagcagctgagcatgatgggaagtgcaagtgtggcactaactgcacttgcacggactgcacttgtggc

SEQ ID NO: 116313 - DNA, 252 bp, Glycine max
ctggcaagtgggcatgcaatagtggacaagcatgcatttctgttaattatatcatcacaagagaagagtttgccccaaagctggtagatgccttaaaagcagaattggaacaattttttggtaaagatcctatggagtcaaaagacatgtcaagaattgtgtctccataccagtttgcgcggcttgagaatctcttggatgaggataaggtatctgacaaaattgtcttgggaggtcagagggatcagaaga

SEQ ID NO: 116314 - DNA, 249 bp, Glycine max
gagtaatttagataatttggcaaaagcaactgaacttgccaatgcttactgctatgatgagatcaacttcaactgtggatgcccgagtcctagagtagctggacgtggatgctttggcgtacgtcttatgcttgatcctaagtttgttgcagaggctatttcattaattgctgccaatacaaatgtacctgtcactgtcaaatgtcgaattggtgtggatgatcatgattcttacaatgaattgtgtga

SEQ ID NO: 116315 - DNA, 253 bp, Glycine max
cactgcactgtgtggaaagtaagcatggcaagagtggtggcactccaacagaaccaactatctttctctcccttagcttcctctctttttgacttcagtggaaccagacttcaaactcaacttcagttcaagagaaaactatgccatccaaaagggtctttctacgtctcggcatcgagcaccaagaaaatcctaataatgggaggcaccaggtttattggtgtgtttttatctaggctccttgttaaagagg

SEQ ID NO: 116316 - DNA, 252 bp, Glycine max
gtggatttctggtgttggtgttgacggcattgggaagaagcttgtgaactcaaaagatggacctccaacctttgagcagcccaagatgactctggagaagctcttgacgtatggtaacatgcttgtccaagaacaagagaatgtcaagagagtccaattggctgacaagtacttgaacgaggctgcacttggaaatgctaacgaggatgctattaacaggggaactttcttccaatcttgaattggaggcaa

SEQ ID NO: 116317 - DNA, 259 bp, Glycine max
gcagagaagaacagagagagatccatccatcaattccaatggccgatcagctcaccgatcgaacagatctccgagttcaaggaagccttcagcctcttcgacaaggacggggatggttgtattaccaccaaggaacttgggaccgtgacgcggtcacttggccagaacccaactgaggcagagctgcaggacatgataaatgaggttgatgctgatgggaatggtaccattgatttcccagaattcctgaatctcatgg

SEQ ID NO: 116318 - DNA, 256 bp, Glycine max
gtcctatgcaccaagacccacccaaatagtgggaaatagtggtgaaaagggcttacatctgttctatttcagtggttaaatttaatgtattgattcatccaaacttgtctgcatttcaagattttcattttccccctaaaagtggtttttcacttttttgtaaaaaaaaaaaaaaaaaaaaaaaaaaaaaaaaaaaaaaaaaaaaaaaaaaaaaaaaaaaaaaaaaaaaaaaaaaaaaaggggggggccccctttt

SEQ ID NO: 116319 - DNA, 252 bp, Glycine max
tgcgactcttgtatctctctctttgtttcggtgaattgaagcagcggacgagatcgcgagtcgcatgcaggcagacgagaagtacgagcgcgtgattcggggtcttctcaagcttcagcataatcgcagatgcattaactgcaacagtctcggaccacaatatgtgtgcacaaacttctggacgtttgtttgcactaactgcagtggaatacatcgggaagtcatgcaccgagcaaaatcagtttcaatggc

SEQ ID NO: 116320 - DNA, 251 bp, Glycine max
tcatcatccatggctgcctccgtctccactgtcggagctgtcaacagagctcttttgaacctgaatggttctggagctggagcttcagctcccagttcagccttctttgggaccagcttgaagaaggttattgcctcaagggtccccaacagcaaggtttccggtggaagcttcaagattgttgctgtagaagagaagaaagagattgaagagacccagcagaccgacaaggacagatggaagggtcttgc

SEQ ID NO: 116321 - DNA, 253 bp, Glycine max
cctttctctcgttttttctcagaaccttctgaggttaaagcaaaaaacaaagagagagagagagagaaaatgatgaagccatcgatgctcagatctctccactccgccgccacccgcggcgcctctgcatctcttccgccgtgggtacgcctccgagccggtgccggagcgcaaggtagccgttctcggcgccgccggcgaggatcgggcagcctctctcccttctcatgaagctcaatcccctcgtttcgag

SEQ ID NO: 116322 - DNA, 252 bp, Glycine max
ctctccaaacaggacttattgctattgattcgatgatccccataggacgtggccaacgagaattaattattggagacagacaaacgggtaaaacagcagtagccacagatactattctcaatcaacagggacaaaatgtaatatgtgtttatgtagctattggtcaaaaagcatcttctgtggctcaagtggtgaataccttacaagaaagaggagcaatggaatacactattgtagtagctgaaacagcgg

SEQ ID NO: 116323 - DNA, 247 bp, Glycine max
cgaagcgcgagcaagcatcccaaaaccctagctcgcgttctgctttcgtcttttacatcaggatggagtctcaggtgaagcacgcacttgttgtcaaagttacgggtcgtactggatccagaggacaagtaacccaggttagagtgaaatttttggatgatcagaaccgtcacatcatgaggaatgtgaaaggacctgtgcgagaaggagacattctcaccctactcgagtctgaaagggaagcaag

SEQ ID NO: 116324 - DNA, 255 bp, Glycine max
gcgagggttgcccaaaggcaatatataaggcatacccagtaaaacttacaagtaaaccagatatagagatggcaattagggttgctgtttccattattagaattctaaagtttcaagatcacaatagatctataggataagatccttatatttacagcgaaatggtatacaaagtcaacagatctaaatgaataaaaaatagtatttatggctacgcaaaccgttgaggataattctagatctggtccaagacga

SEQ ID NO: 116325 - DNA, 255 bp, Glycine max
cgggatcagcacaagattgcaaaatgaagttcaacattgcaaatcccaccactgggtgccagaagaagctggaaatcgatgacgacctgaagcttcgagcattttgggacaagaggatctcccaggaggttcttggtgatgctctgggtgaggagtttaaaggatatgttttcaaaatcaccggtgggtgtgacaaacaaggattccctatgaagcagggagtgctgacccctggtcgtgttcgacttttgctcc

SEQ ID NO: 116326 - DNA, 251 bp, Glycine max
gattgtttgttgttgtaactcgttcttcttcttttgttgttctgtgtttgtgtttgttttttctctcacctgaaaatgtcttgctgcggtggtaactgtggttgcggaagctcctgcaagtgcggcaacggctgcggaggctgcaagatgtacccagacttgagctacactgagtcaaaccacaccgagaccttggtcatgggagtggcacctgttaaggctcaatttgagggtgctgaaatgggtgtgcc

SEQ ID NO: 116327 - DNA, 252 bp, Glycine max
ctcgagccgaatcggctcgagcggatttggaagaattggccgtttcgtagccagagtggctatgcagagagacgatgttgaactcgttgccgttaacgaccctttcatcaccaccgattacatgacatacatgtttaaatacgacagtgttcatggacactggaagcatcacgatgtcaccgttaaggacgagaagacccttctcttcggtgacaagccagtcactatttttggacacagagaccctgaaga

SEQ ID NO: 116328 - DNA, 250 bp, Glycine max
gagaccggcgtgagcttcgctgacgtggcaggcgcggaccaagcgaacttgaattacaagaggttgttgatttcttgaagaatcccgataagtacaccgcgctgggcgcgaagattccgaaagggtgtcttttggtgggcccaccgggaaccggaaagacccttctggcgagggctgtggcgggggaagctggggtgccgtttttctcgtgcgcggcttcggagttcgttgaactttttgtgggagttgg

SEQ ID NO: 116329 - DNA, 249 bp, Glycine max
atcctatcctatcgtagcaaagaaagacagaaagaaaaccctagcttaacttttcaacattcaagtcgcacatctttgttaagacactcactggtaagacaatcacccttgaggtcggagagttcagataccatagataatgtaaagtccaagattcacagacaaggaacgggatcccaccagaccagcaacgtctcattaatgctgggaagcagcttgaggatggacgtacactcgctgattacaaca

SEQ ID NO: 116330 - DNA, 246 bp, Glycine max
ctcttgatctgatttttgaggaaggactcgaaaatgtgatcgcaaggcacagtcgtttaggcaaagcaaccagacttgctgtagaggcatggggtttgaagaattgcacccaaaaggaagagtggtacagtgacactgtgactgctgttcttgttcctgcttacattgatagtactgaaatagttaggagggcatggaagagatacaatttgagcttaggtcttggactgaacaaattgctgggaa

SEQ ID NO: 116331 - DNA, 253 bp, Glycine max
atctattgtgggcatgaggatactgttgaagacgtggctttctgcccatctagtgcacaggagttctgtagtgttggagatgattcttgtctcatcttatgggatgcacgtgttggctctagccctgtggttaaggttgagaaagctcataatgctgatcttcactgtgtggactggaatccccatgatgataatctgattcttactgggtcagcagataattctgttcgcatgtttgatcgccgcaatctca

SEQ ID NO: 116332 - DNA, 256 bp, Glycine max
caaaatactcccatgcacatgcctgttatcatgatggtcaaaccaaaaatacagttcatccagggaactgatgaacaaacaatacccgatgtgaggctgaccaaatcaagggatggaacaaatggcatggctatcttcacatttgatcaaccctcagttttcgattcttcgggtgaaataggcgatatcactggattttatatgattgatgaggaaggggtccttcagtcagttgatgtaagtgctaaatttgtca

SEQ ID NO: 116333 - DNA, 258 bp, Glycine max
tcgagcaagtagttgagaactaagaaggagaagcaaatggcttcctcaatgatctcttccccagctgttaccactgtcaaccgtgccggtgccggcatggttgctccattcactggcctcaagtccatggctggcttccccaccagaaagaccaacaatgacattacctccattgctagcaacggtggaagagtgcaatgcatgcaggtgtggccaccagttggcacgaagaagtttgagactctttcctacctgcca

SEQ ID NO: 116334 - DNA, 254 bp, Glycine max
ggagaaccagagagaaatgatatggttgagtacttcggtgagcaattgtcaggctttgccttcactgttaatgggtgggtgcaatcctatggttcccgttgtgtgaagccaccaatcatctatggtgatgtgagccgcccaaagccaatgactgtcttctggtcatctctggctcagagctttaccaagcgcccaatgaagggaatgcttaccggtcctgttaccattctcaactggtcctttgttagaaatga

SEQ ID NO: 116335 - DNA, 253 bp, Glycine max
caagaagactcctcaatcatccatagacatggccaccgtcacttctgcagcagtttctattccctcattcactggcctcaaggcaagcgcaggcaaagtgagtgccgccgcagttaaagtctcagctccccaagccacaaggttctgcggcatcaaggcttccctcaaagacgttggagtcgctgttgtggccactgctgcgagcgcagttctagctagcaacgccatggccattgaagtgttactgggcact

SEQ ID NO: 116336 - DNA, 254 bp, Glycine max
tgaaagtagtcatatctgtgcaaatggtcaaagagtattacctagtggaggaattagtgccgatggacctccaaccactctcagtggtactggcattgatcacatggcatttttacaggcaaatatcacacgtgataacacacgttttgtgaatggaactgttgttggagacagaaatatgttccaggtagaccaaggccttggcattggcagccagttccccttctttaaccgtcaccaactaactctgacac

SEQ ID NO: 116337 - DNA, 260 bp, Glycine max
tcggctcgactgcaaattgtgatagggaacgtatcccagaacgtgatgtccatgccaggggcgctagtgcaaagggtttctttgaggtcacccatgacatgtctcacgtgacgtgagcagatttccttcgagcacctggagttcagatgcgtctcagtggcaccggtctcactgtcattcatgagcgtggtagccctgaaaccttgagggaccctcgaggttttgccgtgaagttttacaccagagagggtaactttgac

SEQ ID NO: 116338 - DNA, 243 bp, Glycine max
gtagcattggaagctgctagaattgcatgcaacaaatatatggcgaaatttgctggaaaggatgctttccacttgagagtcagagtacatccattccatgttcttaggatcaacaaaatgctttcatgtgctggagctgataggcttcagactggaatgagaggtgcatttggaaagccacagggaacatgtgctagagtcgccattggtcaggttcttctttctgtccgctgtaaggacagc

SEQ ID NO: 116339 - DNA, 250 bp, Glycine max
gcaggaaaggaaagggaaagggtgtttaccagtttgtagacaaatacggtgctaatgtcgatggttacagtcctatctacgacaccaaggactggtctccaaccggtgatgtctacgctggcggtacgactggcttggctatctgggctgtgactctacttggtcttttagctggtggtgcacttcttgtctacaacacaagtgctttggttcaatagactttgcaaatcgatgtttaagttataacata

SEQ ID NO: 116340 - DNA, 95 bp, Glycine max
caccagttggcaagaagaagtttgagactctttcctacctgccagaccttgatgatgcacaattggcaaaggaagtagaataccttcttaggaag

SEQ ID NO: 116341 - DNA, 243 bp, Glycine max
caacgtaataataaccaaaacagcagagagaagagaaggtgtagacaaacacaatctctaatggcactcaggatgtgggcttcttccactgccaatgcactcaaagtctcttctacctccagacctcatctcttgcatcctttttctttctccagatgcttgtcttccgtcttggatggacttaagtatgcagattcacacgaatgggtcaagcacgaaggctcagtcgccaccattggtatc

SEQ ID NO: 116342 - DNA, 242 bp, Glycine max
ataaatcaaataataattaataaaaagaaaaaagtgtaaatcaaatagaaatttataaaatctatgatcctagagtagttccctagacaaaatagaagtaagttcacaaacaagattcaagaataagattctctgatgaaaggagagaaatatgtctgaggatccgctgggtataaggagtgaaagaggggatcatttgtttcttgaacagttcttttaaaaaaatttctatcggatttttg

SEQ ID NO: 116343 - DNA, 243 bp, Glycine max
agtgcctggcgtcgcggacacagaacagagcttgcagaagcgatttctcatttctcattcttaacaacacacttcaacaatggccaaaaccttcaaatacatcatcctcggaggaggagtttccgctggttatgcggcgagggagtttgccaaacagggcgttaagccaggggagttggctatcatttccaaagaagcggtagcaccttatgaacgtcctgctctgagcaaggcttacctttt

SEQ ID NO: 116344 - DNA, 249 bp, Glycine max
agatcttgtagcaatggcgagcgctcccactccacgcgaagagttcgtgtacatggcgaagctggcggagcatgccgagcgctacgaggagatggtggagttcatggagaaggtctccgcctccgccgagagcgaggagctgaccgtggaggagcgtaacctcctctccgtcgcctacaagaacgtgatcggcgctcgccgcgcctcctggcgcatcatctcctcaatcgagcagaaggaggagagccg

SEQ ID NO: 116345 - DNA, 244 bp, Glycine max
gcgttctgcagatgttgagttccgttgctttgttggtgggcttgcttgggtcaccggcaacgatgccctcgagaaagccttttcaatctacggcgacatcgttgaatcgaaggttatcaacgaccgtgagactggaaggtccagaggattcggatttgtgaccttcgcctcagagcagtcaatgaaagatgcgatcgcaggaatgaacggccaggaccttgacggtcgtaacatcactgtcaac

SEQ ID NO: 116346 - DNA, 236 bp, Glycine max
gatcaaagagaatggctcaagcaatggcatcaatgactagcttacgtggttcctctcaggctgtgttggaaggtagccttggctccacacgcttgaatgtggggagtggaagcagggtggcctcagtcacacgtgcagggttcacagttagagcacagcaacaacaagtgaatggtggtgaggtacaaagtagcccgtaggcagtgctttcacttgttgctgctggtttgaccact

SEQ ID NO: 116347 - DNA, 242 bp, Glycine max
gcatcagctatcagagtggggtctttccaaggggaagaaatatatgctccattcaagagcctgcttccaatggtgaaccctgatgatgttgtgtttgggggatgggatatcagtaacttgaacctggctgatgccatggccagggccaaggtgtttgatatcgacctgcagaaacagttgaggccgtacatggaatccatggttccactccccggaatctatgacccggatttcattgctgc

SEQ ID NO: 116348 - DNA, 240 bp, Glycine max
cgcaacaaaaagaaagaatcccaggcgaggagaaagatggaggggaaggagcaggatgtgtcgttgggagcgaacaagttccccgagagacagccgattgggacggcggcgcagagccaagacgacggcaaggactaccaggagccggcgccggcgccgctggttgacccgacggagtttacgtcatggtcgttttacagagcagggatagcagagtttgtggccacttttctgtttctc

SEQ ID NO: 116349 - DNA, 240 bp, Glycine max
attggaaggaacttcttgaggtgctggcacggtcgcaaagactcccctcttgatgtcattgccatcaacgacaccggtggcgtgaaacaagcctctcaccttctcaagtacgattcgatcctcggaaccttcgatgctgatgtcaagcctgttggcagcgacatcatctctgtcgatggaaaggaaatcaaagttgtctctgaccgcaaccctgccaaccttccttggaaggatttgggg

SEQ ID NO: 116350 - DNA, 242 bp, Glycine max
gttcttcaacttccaaagggagaacgtggcaaagcaagtgcctgagcagaacggcctcacacactttgaggctggtgatacacgtgccaaggagtatgtcagcctcctcaaatccaatgaccctgttggattcaacattgttgatgtcttggcttggggctccattggccatgttgttgcttactacatcttggccaccactagcaatggctatgaccctgcattctttggctgatttaatt

SEQ ID NO: 116351 - DNA, 162 bp, Glycine max
ctaacccattgaattatacctatatttactattctgatattcaaattggataaagatgaaattcgaacaatgattttttcattttctttttaatacttttttggtttagactccctaagaatctgtcgatatttccaattaaatcttcttgttcctgtgaag

SEQ ID NO: 116352 - DNA, 132 bp, Glycine max
tgagattgttattcatcctcaatctatcatacattccttggttgaaacgcaggattcatctgttattgcacagttggggatacctgacatgcgcttaccgctcctttatacattatcttggccagaaagaat

SEQ ID NO: 116353 - DNA, 239 bp, Glycine max
ttgcatacgagatccaaatcctgtagtattttttgaaccgaagtggctttatcgtttggctgttgaagaagtaccagaggatgactacatgctgcctttatctgaggccgaggtaattcggcaaggaagtgatgtaacacttgttggatggggagctcaattagctataatggaacaagcttgtcttgatgctgaaaaagagggaatttcttgtgaattgattgatctgaagacactaa

SEQ ID NO: 116354 - DNA, 237 bp, Glycine max
acaaaggttgctgtaggagataagattgcagtagtgctaagtgctaacacctgcagtgaacaatggcctctgcatcagcatctctgctcaagtcttcacttgttcttgacaagtctgagtgggtgaagggacaaacccttcgccaaccttctgcatcagttgtgagatgcaaccccaccaccccatcaggcctcaccatcagagctggttcctatgctgatgagctcgttaagaccg

SEQ ID NO: 116355 - DNA, 235 bp, Glycine max
tatctcttcacaaaagataaaatttcctatgatgaattgtctaattattggagctatactaatgaagaaaaaagaaacaaattgagcaatgaatttgtaaatagggcaaaagtaatggataaggaattaatttctctggatatattagaaaaccgaattcgattgtctaatgatgaaactaaaacaaaatatttaactaaaatatatgatcctttcctgaacggacgctttcgtg

SEQ ID NO: 116356 - DNA, 236 bp, Glycine max
ctcaatgggaggaatatttttgggcagcctattaaggttaactgggcttatgctagcagccagagagaggatacctcaggtcactttaatatttttgtcggtgaccttagtcctgaggttacagatgccacattgtatgcttgcttctctgtatatcctagttgttctgatgcaagggtaatgtgggatcagaagacaggccgttccaggggatttgggtttgtttcttttcggaa

SEQ ID NO: 116357 - DNA, 236 bp, Glycine max
cggcgcgcgctgaagtttgctaggttcatgagcaggttcgggaagagttaccgaagcgaggaagagatgagggagaggtacgagatattctcgcaaaacctcaggttcatccgctcccacaacaagaaccgcttgccctacactctctctgttaatcattttgctgattggacttgggaggagttcaaaagacacagactaggcgctgcccaaaattgctctgccactcttaacgg

SEQ ID NO: 116358 - DNA, 240 bp, Glycine max
  unsure (1)..(240): unsure at all n locations
gtcctatctacgacaccaaggactggtctccaaccggtgatgtctacgatctggtaaacgccctttcccttccctccctctcaaggaactcctcttcattcagagttgtggccagtggtggcaagaagatcaagactgacaagcctcatggaattaatggtggcatggctttgagggaaggagttgatgcatctggcaggaaaggaaagggaaagggcgtttaccagtntgtagacaaat

SEQ ID NO: 116359 - DNA, 129 bp, Glycine max
agaaaaacaagtagttgagaactaagaagaaggaaatggcttcctcaatgatctcctccccagctgttaccaccgtcaaccgtgccggtgccggcatggttgctccattcaccggcctcaaatccatgg

SEQ ID NO: 116360 - DNA, 238 bp, Glycine max
ctcaatcatccatagacatggccaccgtcacttctgcagcagtttctattccctcattcactggcctcaaggcaagcgcaggcaaagtgagtgccgccgcagttaaagtctcagctccccaagccacaaggttctgcggcatcaaggcttccctcaaagacgttggagtcgctgttgtggccactgctgcgagcgcagttctagctagcaacgccatggccattgaagtgttactggg

SEQ ID NO: 116361 - DNA, 231 bp, Glycine max
ctcataacacaaagcacaaagcaaagctcatccttgagttaaaaaatggcagcagcttcttccatggctctctcatccccatccttggctggcaaggccgtgaagctgggcccatcagccccagaagtgggaagggtgagcatgaggaagaccgtcaccaagcaggtctcctcaggaagcccatggtacggcccagaccgagtcaagtacttgggcccattctctggcgag

SEQ ID NO: 116362 - DNA, 228 bp, Glycine max
gtagcaatggcgagcgctcccactccacgcgaagagttcgtgtacatggcgaactgtgcggagcaggccgagcgctacgaggagatggtggagttcatggagaaggtctccgcctccgccgagagcgaggagctgaccgtggaggagcgtaacctcctctccgtcgcctacaagaacgtgatcggcgctcgccgcgcctcctggcgcatcatctcctcaatcgagcag

SEQ ID NO: 116363 - DNA, 240 bp, Glycine max
gtagttgagaactaagaagaaggaaatggcttcctcaatgatctcctccccagctgttaccaccgtcaaccgtgccggtgccggcatggttgctccattcaccggcctcaaatccatggctggcttccccacgaggaagaccaacaatgacattacctccattgctagcaacggtggaagagtacaatgcatgcaggtgtggccaccaattggcaagaagaagttcgagactctttccta

SEQ ID NO: 116364 - DNA, 241 bp, Glycine max
ctctgaagtaacttggcctcgtcttgatcttagcaagtatggttctctaacattttatgcaccggatgacaagaagtttccatcggtgaatctttgctatgctgcgggacgtgctggaggcaccatgacaggagttcttagtgcagcaaatgagaaagctgtagaaatgtttgttgaagaaaagattagttatctggatatattcaaggttgtggaactaacttgtcaggaacatcaaaag

SEQ ID NO: 116365 - DNA, 235 bp, Glycine max
agcttgcagaagcgatttctcatttctcattcttaacaacacacttcaacaatggccaaaaccttcaaatacatcatcctcggaggaggagtttccgctggttatgcggcgagggagtttgccaaacagggcgttaagccaggggagttggctatcatttccaaagaagcggtagcaccttatgaacgtcctgctctgagcaaggcttacctttttccagagtcccctgctagac

SEQ ID NO: 116366 - DNA, 233 bp, Glycine max
atcactattctgcgacgatggtggcacattcgagttcttggggaatggcactcgtcgcgatctcgccctacaccttctccgccatcggcatcgccgtcgctatcggcgtctccgtcctcggcgccgcctgggggatctacatcaccgggagcagcttgatcggcgctctaatcagggctcctcgagtcacctccaaaaatctcattagtgtaatcttctgtgaagctcctgct

SEQ ID NO: 116367 - DNA, 237 bp, Glycine max
cacaaagcgggtcactgtctgttcaagctaccatctctctctctctttcttagtgcctccttgccagaagttaaaatggcccaagaaactttcctattcacatctgaatcagtgaacgaggggcaccctgacaagctctgtgaccagatctccgatgctgtgctcgatgcatgcttggagcaggaccctgacagcaaggttgcctgtgaaacctgcaccaagaccaacatggtgatg

SEQ ID NO: 116368 - DNA, 237 bp, Glycine max
gattatctctttgacaaaagattcaacctttctcttcgcttctacaagccccaacaacaacacatagcactcagcaataagaaggtccctattgtgattttccttcacggtggaggcttttgcttcggttcgcgcacctggccccatattcacaactgttgcatgcgcctcgcgtcggggctccaagcggcggtggtttcgccggactaccgtctcgcgccggagcaccgtcttcct

SEQ ID NO: 116369 - DNA, 234 bp, Glycine max
ataagatggacctccaacctttgagcagcccaagatgactctggagaagctcttgctgtatggtaacatgcttgtccaagaacaagagaatgtcaagagagtccaattggctgacaagtacttgaacgaggctgctcttggaaatgctaacgaggatgctattcagaggggaactttcttccagtcttgaattggaggcaaagcaaacttggcaagtaaatatttctgttcgtg

SEQ ID NO: 116370 - DNA, 233 bp, Glycine max
tcgcaacacaacaaaaaaagacaacccagagagcgcgtcttaataaacgctcttctctgaaaacccccatttcttttcttctttcttcttctctttcgcttcttcgatcttcgatcttcgtcgctgaaaatgagagagtgcatttcaatccacatcggccaggccgggattcaggttggaaacgcctgctgggagctttactgcctcgaacacggcattcagcctgatgggca

SEQ ID NO: 116371 - DNA, 230 bp, Glycine max
  unsure (1)..(230): unsure at all n locations
ggtttggcggatttggaagctgcactttgcctatgcaccgcaattaagagcaatgtgcttggaatcaacttgaacgtacctgtgacgctcagcgtgatccttagtgcttgtcaaaagactgtccctcctggtttccaatgtccctcctgagataatcanattaggttcatgagatatctctcgtcatcagaganatgtntagatatgcacttaacatgaaattgattgac

SEQ ID NO: 116372 - DNA, 226 bp, Glycine max
gttagatctcatcttacactcaccgtcaagttcgtctcgcgccaccgtcgacgcagttccggccactgcctttggttccctcactttctgtctcttcttcttcttctcagaaatatgccttctcagaaggttgaaacgggtcatcaagacacagtccatgatgttgcgatggattattatggtaagaggctggccacggcttcatcagatcacacgattaagataa

SEQ ID NO: 116373 - DNA, 228 bp, Glycine max
gaacaagtagttgagaactaagaaggagaagcaaatggcttcctcaatgatctcttccccagctgttaccactgtcaaccgtgccggtgccggcatggttgctccattcactggcctcaagtccatggctggcttccccaccaggaagaccaacaatgacattacctccattgctagcaacggtggaagagtgcaatgcatgcaggtgtggccaccagttggcaagaa

SEQ ID NO: 116374 - DNA, 230 bp, Glycine max
gaacaagtagttgagaactaagaaggagaagcaaatggcttcctcaatgatctcttccccagctgttaccactgtcaaccgtgccggtgccggcatggttgctccattcactggcctcaagtccatggctggcttccccaccaggaagaccaacaatgacattacctccattgctagcaacggtggaagagtgcaatgcatgcaggtgtggccaccagttggcaagaaga

SEQ ID NO: 116375 - DNA, 224 bp, Glycine max
ggggacagcaagagggccatggatgagtacacttctgagatattcatgggtggaaagaacacaattgtgttgcacaacacatgtgaggattcactgttagctgctcctattatcttggacttggtccttcttgctgagctcagcactcgaatcgagtttaaagctgaaaatgagggaaaattccactcattccacccagttgcgaccatccttagttacctgac

SEQ ID NO: 116376 - DNA, 282 bp, Glycine max
gtgcactgagggccagagtatatgatgacgaagtgaggaagtggatttctggtgttggtgttgacggcattgggaagaagcttgtgaactcaaaagatggacctccaacctttgagcagcccaagatgactctggagaagctcttgacgtatgtaacatgcttgtccaagaacaagagaatgtcaagagagtccaattggctgacaagtacttgaacgaggctgcacttggaaatgctaacgaggatgctattaacaggggaactttcttccaatcttgaat

SEQ ID NO: 116377 - DNA, 280 bp, Glycine max
caagagcacagaaactaagctcgttgttttcttcatatcttccttgtcactgcccgtgtgtcgccgccatggccaccgtcaccacccaagcctccgccgcaattttccggccatgtacctcgaaatcgaggtttttgaccggctcttccggtaacttaaccgggaagtgactatgcggccaatggggtgccctccttctgcctctttcaaggttgaagccaagaagggagagtggttacctggcttggcctccccaacttacctcaatggcactcttcct

SEQ ID NO: 116378 - DNA, 253 bp, Glycine max
gaagttctactgggcaccaacaagggaagaccgcattggtgtttgcaccggaattttccgcactgatggtattcctgaacaggacattgtcaagcttgttgacaccttccctggccaatccattgattctttggtgcactgagggccagagtatatgatgatgaagtgaggaagtggatttctggtgttggtgttgacagtgttgggaagaagcttgtgaactcaaaagatggacctccaacctttgagcagc

SEQ ID NO: 116379 - DNA, 272 bp, Glycine max
actcaattgtgctcaagcctccaactcagggagctgtttctgctttgcacatggttcactgctttcacttggctggttttcccaaaggcctaatcaactgtgtcactggaaaaggctcagaaattggtgatttccttacaatgcatcaggagtgaactgtataagctttactggtggtgatactggcatttcaatttcaaagaaggcaggcatgattcctctgcaaatggagttaggaggaaaagatgcctgcattgtacttgaggatgctg

SEQ ID NO: 116380 - DNA, 128 bp, Glycine max
gaaggaagtctcttcctacttgaagaaggttggttacaacccagacaagattccatttgtgcccatctctggtttcgagggtgacaacatgattgagaggtccaccaaccttgactggtacaagggac

SEQ ID NO: 116381 - DNA, 271 bp, Glycine max
ggggaccttcaccactcgcgcgttggcgcacgcttcagaacgccgacgaactcatcgactccgtcgagacatttatcttcgattgtgacggagttatatggaaaggtgataaattaatagacggagtgcctgaaacgcttgacagcttcggtcaaagggcaaaagattagtttttgtcaccaataactcaacaaagtctaggaagcaatatggaaagaagtttgaaacacttggcctgaatgtcagcgaggaggagattttcgcatcatcc

SEQ ID NO: 116382 - DNA, 154 bp, Glycine max
acaaagcaaagctcatccttgagttaaaaaatggcagcagcttcttccatggctctctcatccccatccttggctggcaaggccgtgaagctgggcccatcagccccagaagtgggaagggtgagcagaggaagaccgtcaccaagcaggtctc

SEQ ID NO: 116383 - DNA, 90 bp, Glycine max
gcagaaagcaagctcatcctagagttttaaaaatggcagcagcctcctccatggctctctcttccccatccttggctggcaaggccgtga

SEQ ID NO: 116384 - DNA, 254 bp, Glycine max
ctcgagccgtttcttttttcccgcagtcatgggcaaggtcaagatcggaatcaacggatttggaagaattggccgtttggtggccagggtggctctgcagagagacgatgttgaactcgttgccgttaagatcctttcattaccaccgattacatgacatacatgtttaaatacgacagtgttcacgggcactggaagcatcacgatgtcaccgttaaggatgagaagacccttctcttcggtgacaagccagt

SEQ ID NO: 116385 - DNA, 265 bp, Glycine max
gatcaatccaaggtgctcttattgttgcttcaactcttcaaatagtactgggcttcagtggtctctggcgtaatgttgcaaggttcttaagtccactttcgtcagttcctttggtatctcttgttggttttgggctgtatggttagggttccctggggttgctaaatgtgtagagatcggcctgcctcagcttatattgctagtatttgtttcacagtatgtgccccatgtgctacattcggggaaacatatcttcgaccgtttt

SEQ ID NO: 116386 - DNA, 266 bp, Glycine max
gcaaattccaattcccaattcccaattcgaaaccctatattcctttcaaagaaccaaattgagtgatcgtgatggcaccaaaggcagagaagaagccagcggagaagaagcccgcggaggagaagaagtcgacggtgggagacaaggctccggcggagaagaagccaaaggccggaaagaagcttccgaaggagggaggcgccggcggagaagggaagaagaagaagagaaacaagaagagcgtggagacatacaagatctacatc

SEQ ID NO: 116387 - DNA, 262 bp, Glycine max
agaacaagtagttgagaactaagaaggagaagcaaatggcttcctcaatgatctcttccccagctgttaccactgtcaaccgtgccggtgccggcatggttgctccattcactggcctcaagtccatggctggcttccccacaggaagaccaacaatgacattacctccattgctagcaacggtggaagagtgcaatgcatgcaggtgtggccaccagttggctagaagaagtttgagactctttcctacctgccagacctt

SEQ ID NO: 116388 - DNA, 267 bp, Glycine max
ccgaagcagttgaatgcttcacttgaggtcgttgatcctgagattgctgatattattgagcttgagaaagctaggcaatggaaggggctggaactgatacactcagagaatttcacttctgtgtctgtgatgcaagtagttgatctgtgatgaccaacaaatacagtgaggggtaccctggtgcaagatattatggtggaaatgagtatattgacatggctgaaacactatgccaaaagcgtgccctggaagcgtttagattggatc

SEQ ID NO: 116389 - DNA, 253 bp, Glycine max
agagacaaggtttcccccactgacatagaggaagggatgcgtgttggggttgatagaaataaatatcagattcagattcctttgcctccaaaaattgatccaagtgtgaccatgatgactgttgaagaaagccagatgtaacatataatgatgttggcggttgtaaggagcagattgaaaagatgcgagaagttgttgaacttcccatgcttcatccagagaaatttgtcaagcttgggattgatcctccaaa

SEQ ID NO: 116390 - DNA, 251 bp, Glycine max
tagtgagcacaaaggcatccacacaatgcttcttgcaccaccatgccctcagcactccaaccagagcttcatcacagcgcttagttgtgagcaccaaaccaaaccacattgtttgcaaggcacaaaacaggttgtccaagagggtgaggacactactaacattgtctctcgcaggttggccctcactgttctcattggtgctgctgctgttggctctaaggttgcacctgctgatgctgcctatggagaag

SEQ ID NO: 116391 - DNA, 280 bp, Glycine max
ctcgcgtcgttagctcctctcttgcatctccccagccaaaacctctctcaagatggccacattaggcccttctgtcttcgcaaccgttagcactccttcttctccttcttcttcttcttcttcttccttcccttctctcattcaagacaggccttctttgctgcccctgcccccatcatcaccccaactgtgagagaggatatggcaaaggaatacgagcaagctattgaagaactccagaaattgttgagggagaagagtgaactcaaagccacagctg

SEQ ID NO: 116392 - DNA, 261 bp, Glycine max
tgcaacaagtggaagagctaaaatgcttgctgagagtgatccccatttggttcgcaggaattttcttctacattgcaatagtccaacagaacacaatgctggtcttccaagcccttcaatccgacagacgcattctagcaccaacttcaagatcctagcagcctcctacaccatcttccagatgctgagcctaaccatatggctacccatctacgaccgaatcctcgtgccgtcgctccaaagggtcaccaaaaaagaggg

SEQ ID NO: 116393 - DNA, 262 bp, Glycine max
acaagaagaagaagaagaaacaatgtcttgctccaatctgacaatgttggtgtcctcaaaaccttccctttccgacccctcgaacctctccttccgctctgtcctgaacccttttcagctccctacacaaaacccagttcatgcaccccttcacgctcctcaagcacccaaattcagtgtggtctgagagaactgagaacccgcattgagtctgtgaagaacacgcagaaaatcacggaggcaatgaagcttgttgctgcag

SEQ ID NO: 116394 - DNA, 260 bp, Glycine max
acaaattctctgtgttgtgttgtgtacttgtgttaattgtgttgttgttgtaggaaatttaagtgaagagagaatgatgatgaagtctgctatgtgtgcattggtgcttgtggcactggttgtggttgaagtgggcccatggctgaggctgcggtgacttgcaacccaacacagttgactccttgtcttccggcaattaattcaggttctgcaccttcgagtgcttgttgccagaagctgaaggagcaaaagccatgctt

SEQ ID NO: 116395 - DNA, 260 bp, Glycine max
caagtagttgagaactaagaaggagaagcaaatggcttcctcaatgatctcttccccagctgttaccactgtcaaccgtgccggtgccggcacagttgctccattcactggcctcaagtccatggctggcttcccatcagaaagaccaacaatgacattacctccattgctagcaacggtggaagagtgcaatgcatgcaggtgtggccaccagttggcaagaagaagtttgagactctttcctacctgccagaccttga

SEQ ID NO: 116396 - DNA, 258 bp, Glycine max
tctcaagcaaccatggcaatggctagccaagcgtctcgatgaagcctaatcattgatgtactacacatcatggattggacgtagcatctactggagattactatgagtatttcggttctacaactgatgtcgtgctgtggtttacctgatgctgactaatgatgtcattcatgggctcttccctgaggctgttacaattggtgaagatgtgagtggaatgcctacattctgccttcctacacaagatggtgggattgg

SEQ ID NO: 116397 - DNA, 257 bp, Glycine max
tggtcttactgtgtggtgactgtgctctgctctcatctcattcatattcatttcaatggcaactcaaggtcaagtcattacctgcaaagctgcggtggcctgggaacccaacaagcccttaaccgtccaagagttcaggttgctccgcctcaggccggcgaggtccgtgtccaaatcctcttcaccgctctctgccacaccgatgcttacacttggggcggcaaggatcccgaaggtctcttcccctgtattctcgg

SEQ ID NO: 116398 - DNA, 253 bp, Glycine max
aaagaacttaagaatggacgtcttgctttgttggcttttgtgggattctgtgttcaacaatcagcttatcccggcactggacctttggagaacttggctgctcacttggctgacccatggcacaacaacatggaaacatcattattccacaatcgattttgccttgaaaaaaaaaaatcaaatatttgtttcaatagctacctgtataattccatgtaacattttgtaacgaatcgggttgctacgttggtat

SEQ ID NO: 116399 - DNA, 261 bp, Glycine max
tagtgcttgcttcggttccaaatcctctatttgaccttgctggcattatgtgtggacaatttggcattccattttggaaattttttcttgcaaccttgattggaaaggcaatcattaaaactcacatacagacgatatcatcatctcagtttgcaacaatcaacttcttcattggattgagaatgaatttatttgggttctcagccacatacctggttttgcatctgtcttgcctagagtgacttctagtctccgtgcaat

SEQ ID NO: 116400 - DNA, 258 bp, Glycine max
gcagaaagcaagctcatcctagagttttaaaaatggcagcagcctcctccatggctctctcttccccatccttggctggcaaggccgtgaagctgggcccatcagcccccgaagtcgggagggtcagcatgagaagaccgtcaccaagcaggcctcctccggaagcccatggtacggcccagaccgcgtcaagtacttgggcccattctctggcgagcccccgtcctacctcactggcgagttcgcaggtgactacgg

SEQ ID NO: 116401 - DNA, 253 bp, Glycine max
tcaccacccaagcctccgccgcaattttccggccatgtacctcgaaatcgaggtttttgaccggctcttccggtaaacttaaccgggaagtgactatgcggccaatggggtgccctccttctgcctctttcaggttgaagccaagaagggagagtggttacctggcttggcctccccaacttacctcaatggcactcttcctggtgacaatggatttgaccctctggggctagctgaggacccagagaacttg

SEQ ID NO: 116402 - DNA, 261 bp, Glycine max
gcaagaagaactagtctaagcagaaatggcctcttcagtgatggcatctgtggccctcaaacctgcccctttcactgttgagaagtcctcagttagaggccttccctccctctcaaggaactcctcttcattcagagtgtggccagtggtggcaagaagatcaagactgacaagccttatggaattaatggtggcatggctttgagggaaggagttgatgcatctggcaggaaaggaaagggaaagggcgtttaccagttt

SEQ ID NO: 116403 - DNA, 251 bp, Glycine max
tgaatatccagaaaatgcaggagatgacaagaatgaaaagaacaccattgtcttcaagctacatgttcgttgtcaagtgggtcaacctcgtattactgtaaaatcagataaactgaagtggttacctatgggagtgagcttccctgtgaagatgtcaaaccaaatgcaggttcaaaaccaaaaacatttacatctttcacttgcagccaagattcacttcctgaattttccaacaattcaattggtcttac

SEQ ID NO: 116404 - DNA, 252 bp, Glycine max
atctggtataaatgctgtgttttatttctcttcaactgtttttaaaagtgctggagtgccatcagacattgcaaatgtctgcataggaattgccaatttggcaggatctatcgtttcaatgggtttgaggataagcttggaaggaaggttctacttttctggagtttctttggcatggcaatagcaatgatccttcaagccacaggagcaacttcacttgtatcaaacatgggagctcagtacttttctgtt

SEQ ID NO: 116405 - DNA, 253 bp, Glycine max
tctcaatcgttttctacataatacaaacctctctaatttttgaagcttattatacccaatctcgatatgcagatcttcgtgaaaaccctaactggcaagacgatcaccttggaggtggagtcctctgaaccatcgacaacgtgaaggccaaaatccaagacaaggagggcattcctccggatcaacagcgtttaatcttcgccggaaaacagctcgaagacggcagaaccctcgccgactacaacatccaaaa

SEQ ID NO: 116406 - DNA, 259 bp, Glycine max
gacgttaaaaagctcacaaagcgacctgctcctcctcgatttggaagaaaactgaccgagactcaaaaggcgagagctactcacatttgccttgattgtggatacatatacaccttacagaaaccttttgatgacagccggacacatacgggtgtcctcaatgtcaagcaccaaagaagaggtttgctcgttatgatgttaacactggaaaagctattggtgggggcttgcctccaattggagttattattggactcct

SEQ ID NO: 116407 - DNA, 260 bp, Glycine max
tgcacatcacgcaaggtgactatgatggaaaagcagtaatagtctcatgggtgaccccagatgaaccagggactcgccatgtgcaatatggcacatcaaaggataagtttaaaactagtgcagaaggcacagttgaaactacactttctataactacaagtctggctacattcatcattgtcttattgaaggccttgagtataagacaaaatactactatagaattggaagtggtgattctgctcgagacttttggttcg

SEQ ID NO: 116408 - DNA, 129 bp, Glycine max
aatgcttcgcacctgctgaaatatgattctatgtctgggaacctttaaggcagatgtgaaaatactagacaatgaaaccatcactgttgatggtaagtccatcaaggttgtttcaagcagggaccctct

SEQ ID NO: 116409 - DNA, 252 bp, Glycine max
agctcttctccattggttcttcatctgcatgcacacacttgcatagttttggaaaccaagaatttttgaagggtagcatcaacaagaagttctggaaatggagatcaccaatgtcagcgagtatgaactattgcaaagcagaagttgccaaagatggtgtttgactactacgcatctggtgcagaggaccagtggactctgcaggagaacagaaatgccttttccagaattttgtttcggccacgtattctt

SEQ ID NO: 116410 - DNA, 159 bp, Glycine max
gttttcttcagaaaatttgccatcgttgagggaagcgcgagagccttcgttgttcaagatgagagctaagtggaagaagaagcgcatgaggaggttgaagaggaagcgccgaaagatgagacaaagatctagtaggtgcttgaacaaggagtggagatg

SEQ ID NO: 116411 - DNA, 203 bp, Glycine max
acgctatggcttggtttcctctgaccctgacttgtccaagcgcatgtttttccacaccaacgacatatcggaagtgtcgaacgctttgaaggagtacgaggttgttaacttggcagcacttgtgggcatggacaaggaggggaagaatcgaatcattgatcacttgggcaagcacatgaaccctggggcacttcttatgctca

SEQ ID NO: 116412 - DNA, 202 bp, Glycine max
agaaaaattgtctgaaggggtgaatgaacgtggacttactttgactggattcctatttcttcatgccctcttcatagaaaaagggcgtcttgagacaacatggactgtgctcaggaagtttggatataatgatgatatcaagcttgctgatgatctaattccacctataaaatgtgctcctgatcagagtgtggagctgaca

SEQ ID NO: 116413 - DNA, 201 bp, Glycine max
caaaccctaacaccaaaaccagaagcgaaatcgcaatcgcaatccagcgaatatgaaggtcgtcgctgcatacttgctcgcagtgttgggagggaatccttccccttctgccgatgacatcaaacacatcctcggcgcagttggagctgaggcgccgaatgagttgattgagttgctcttgactgaagtcaagggaaaaga

SEQ ID NO: 116414 - DNA, 202 bp, Glycine max
ctcgagccgcttccagaaggtggtgttttgcttctagagaatgtgaggttctacaaggaggaagagaagaatgatcctgaatttgcaaagaagttgttttctctagctgatctctatgtgaatgatgcatttggcactgcccacagagctcatgcttctacagaaggagttgccaaatacttgaagccctctgttgcaggat

SEQ ID NO: 116415 - DNA, 204 bp, Glycine max
attttaagaacactagggagactgcctttgccatcaggaagttgccccttgttaaagctaaacgatacttagaggatgttttggcccacaaacaggctattcctttccgacgcttttgtggtggtgttgggaggacggcccaggctaagaacagacactccaatgggcaaggacgctggcccgtcaaatcagctaagttcattc

SEQ ID NO: 116416 - DNA, 217 bp, Glycine max
attcggctcgagtggggcaaggtgtgttatatctacctgcagaaacagttgaggccttacatggaatctatggttccactcctcggaatctaagaccccgatttcattggtgtctaaccaaggagaccgtggcaataacgtgatcaagggtacaaagagagaacaagttcaacaaatcatcaaagacattaaggagtttaatgagagcactacggtt

SEQ ID NO: 116417 - DNA, 213 bp, Glycine max
ggaagctcaagattgattcttggtttggttctcgtaaaacctccgccgccatccgcaccgccctcagccacgttgagaatttgatcaccggcgtcaccaagggataccgatacaaaatgagattcgtgtacgctcattttccgatcaacgctagcattggcaacaacagcaagtccatcgagatcagaaatttcctcggcgagaagaaggtga

SEQ ID NO: 116418 - DNA, 207 bp, Glycine max
gcacaatggcatccacacaatgcttcttgcaccaccatgccctcaccactccaaccagagcttcatcacagcgcttagttgtgagcaccaaaccaaaccacattgtttgcaaggcacaaaagcaggttgtccaagagggtgaggacactactaacattgtctctcgcaggttggccctcactgttctcattggtgctgctgctgttg

SEQ ID NO: 116419 - DNA, 200 bp, Glycine max
cagggaccaccaaccactcagaggtcgtaaggattcaatatgatccaaaaaattgcagctatgagactctgcttgacatgttctggtctagacatgatcctaccactctgcatagacaggggaatgatctgggaacacagtccagatctacaatatactactacacgccggaacaagagaaggcggccaaggagtcgttg

SEQ ID NO: 116420 - DNA, 202 bp, Glycine max
ctggtgaaagatttgctgtcagaaactcacttgctgaagcagtggtggaaggcgcaggagatcattgttgtgagtacatgactggtggctgtgtggttgtcttgggaaaagtgggtagaaatgtagctgctggtatgactggagggttggcttacattcttgatgaggacgatactttcatacccaaggtaaacagagaaat

SEQ ID NO: 116421 - DNA, 195 bp, Glycine max
gaaacgtggagcattattgtcagtgcttgcgttcgccttcgcggcggcgatctgggcgccgaacggcaacgacaacctcgtcccgcctaggcgtgaagtgtacggcaatggccgaatattcgacatcagtcaccggtaccaacccgagatgccggaatgggaatcgaataacggcattgggcagttcctgtggct

SEQ ID NO: 116422 - DNA, 207 bp, Glycine max
ggcgatgatgcaaggtgtgcagaagaacacgctatacgtgggaggcttagcggaagaagtgaacgagttgatcctccacgcggcgttcattcccttcggcgacatcaaggacgtgaagacgccgctggaccaggcctcgcagaagcaccgctccttcggcttcgtcaccttcctcgaacgggaagatgcctccgccgccatggacaa

SEQ ID NO: 116423 - DNA, 211 bp, Glycine max
tccgcattgttttccacagtttggtcctggtccaattcagcagcacgggtttgcacggaatatggattggactgttgtcgattctgaaaacacagaaggaaatcctgttgtaactctggagctgaaggatgctccttatagtcgtgctatgtgggatttcagcttccatgctttattcaaggtcacactaaatgctaaaagtcttgcgact

SEQ ID NO: 116424 - DNA, 207 bp, Glycine max
aaacaaagaaaaacaaaaacccttagccaacacaaccatcatggccacctctgcaattcagcaatcagcattcactggtcaaactgcactgaagaagctcactgagttcgtccgcaagaccggtggcgccggcaaaggtcgcactaccatgcgccgcaccgtcaagagtgctcatcagagcatttggtatggccctgaccgtcccaa

SEQ ID NO: 116425 - DNA, 202 bp, Glycine max
agactcctcaatcatccatagacatggccaccgtcacttctgcagcagtttctattccctcattcactggcctcaaggcaagcgcaggcaaagtgagtgccgccgcagttaaagtctcagctccccaagccacaaggttctgcggcatcaaggcttccctcaaagacgttggagtcgctgttgtggccactgctgcgagcgc

SEQ ID NO: 116426 - DNA, 202 bp, Glycine max
caaaaagcaatctagctttgcatactctacctctacttcacctcgttaccaaaactagcaatcatgtctgtcgagcccaagggagatgtcggactcattggtctggccgttatgggtcaaaacctgatcctcaacatgaacgacaagggtttcaccgtcgtcgcctacaaccgaaccacctccaaggtcgaccacttcctgg

SEQ ID NO: 116427 - DNA, 204 bp, Glycine max
gtgattgtttgttgttgtaactcgttcttcttcttttgttgttctgtgtttgtgtttgttttttctctcacctgaaaatgtcttgctgcggtggtaactgtggttgcggaagctcctgcaagtgcggcaacggctgcggaggctgcaagatgtacccagacttgagctacactgagtcaaccaccaccgagaccttggtcatgg

SEQ ID NO: 116428 - DNA, 200 bp, Glycine max
ccttgggcagtttttgtggcttacaagaagcatggccaatggttctctggctaacttctcccaattcaagctccccgctcacagcggcacccatgtcgatgctcccggacatgatttcggtcactatttccattctggctttgatgtcgactctctcgatttactactccttaatggccctgcactattagttgatgttc

SEQ ID NO: 116429 - DNA, 199 bp, Glycine max
ctgaccagcccgtgatcctccacatgcttgacattcctccggcagcagagtcattgaatggggttaaaatggaattggtggatgctgcattccctcttcttaaaggtgttgttgccacaactgatgtggttgaggcatgcactggggtcaatattgccgtgatggttggtggattcccaagaaaagaaggtatggagag

SEQ ID NO: 116430 - DNA, 198 bp, Glycine max
atctaagtgagatacacagtagttaggtagcaagcataagtgtctaaccttagaaacatatctgctacatatcgtgtgcattttggaattgtgccactaaaattctattcatctatggctgcctcatcttatgctatgcaatcaatccttgcaaaccctatgatccgcatttccagcgggtctagggagaaccatttt

SEQ ID NO: 116431 - DNA, 201 bp, Glycine max
agggagggagccgtagcagcggaagctctagcttgggtagcgaatcacaatggcgagaggattaaagaagcatctgaagaggcttaatgccccaaagcattggatgcttgacaaactgggtggtgcatttgctcctaagccctcatctggaccacacaaatcgagggaatgcctgccactcatactcattttgcgaaaccg

SEQ ID NO: 116432 - DNA, 200 bp, Glycine max
cagggaccaccaaccactcagaggttgtaaggattcaatatgatccaaaaaattgcagctatgagactctgcttgacatgttctggtctagacatgatcctaccactctgaatagacaggggaatgatgtgggaacacagtacagatctggaatatactactacacgccggaacaagagaaggcggccaaggagtcgttg

SEQ ID NO: 116433 - DNA, 199 bp, Glycine max
cacaacactagctatagtaagctacacttatttgaggttggagaaatatggctaaagatgtagcggttcaagagcaaggaggagagtactctgcaaaagactaccatgaccctcctccagcacccttgttcgacccagaggagctcacacagtggtccttttatagagccctaatcgctgagttcatagcaacccttct

SEQ ID NO: 116434 - DNA, 197 bp, Glycine max
ggaagaagaagaagatgtcgtacctgttgcctcacttgcactctgggtgggcggttgatcaagcaatcctggcagaagaggagcgtctggtcgtgatccgtttcgggcacgactgggacgaaacctgcatgcagatggacgaggtgttggcgtcggtggcggagacgataaagaactttgcggtgatatacctggtt

SEQ ID NO: 116435 - DNA, 197 bp, Glycine max
tggaggagaaggccaatgctgtcatggcggctgctcgagcggagattgcagcggcgctgaacaccatgaagaaggagacgcaggctgaggtggagcagaagattgctgaggggaggaagaaagtcgaggctgagctgcaggaggctctgtctagcttggagaatcaaaaggaagaaaccatcaagtcccttgattcc

SEQ ID NO: 116436 - DNA, 206 bp, Glycine max
ctagaaacagtgtgatgaaaatgaaggtccttgttttcttcgttgctacaattttggtagcatggcaatgccatgcgctacgatatgttccctctccgaatgaacactggctatggtgcccgtactccggaggtgaaatgcgcaagttggaggcttgctgtggaagcacacaacatctttggctttgagaccattcctgaagagtg

SEQ ID NO: 116437 - DNA, 198 bp, Glycine max
gagctggaagatttggcaccaaaggccttgcaatcacatttgtttcttgttctactgatgtcgatgttctcaacaatgttcagtctaggtttgaggtggataaagcagcttcctgagcagattgatacctctacctatatgccatcgtagatttttttgggagcaatgttagatgcttggtggcatgagtaatagtga

SEQ ID NO: 116438 - DNA, 196 bp, Glycine max
ggacaagcgcctcagggtgaagggacctgttaggatgccaactaaagtacttaacatcaccaccaggaaatccccgtgtggtgaaggcaccaacacatgggacagatttgagctgcgtgtgcacaagagaattaacgatctctacagttcccctgatgtggttaagcagattacttcaatcacaattgaaccgggt

SEQ ID NO: 116439 - DNA, 195 bp, Glycine max
gtttgaactggagggtggaaaatgagattgacaatgttttaaggaagcctatccccatggatttgtacagagccatacgggattctcaactcataggaatgtctggttactcaaaggagggtctacctgtcattgctgttggtgttggtctcagtacatatgataaagcatctgacaaatactatatacaatcac

SEQ ID NO: 116440 - DNA, 194 bp, Glycine max
cagcaacgatggtgcagaggctcacttatcgcaagcgccatagctatgctaccaaatccaaccagcaccgggttgttaagacccctggtgggaagttggtgtaccagaccactaagcagagagcaagtggacctaagtgccctgtcactggcaagaggatccaaggggtatttagtgtgtaatttttttttctg

SEQ ID NO: 116441 - DNA, 194 bp, Glycine max
cagtggtgccttatcgctgtggttatcatcttcttcttcctctttcttagatctcttctttctctacgccgcacgccgaaaccatggcacgaaaaggagagggtcctgctatcggaatcgatctcggaaccacctactcttgcgtcggtgtgtggcaacatgaccgcgttgaaatcatcgccaacgaccaaggg

SEQ ID NO: 116442 - DNA, 190 bp, Glycine max
agctgttatcccttaggtaactagtttgtataattcaaaagacctacttgacaaaatatattacgacctcgatgttggattaagaataattaatgaagaagaattcaattaaattaggtctgttcgacctttaaattcttacatgatctgagttcagaccggcgtaagccaggtcagtttatatcttttt

SEQ ID NO: 116443 - DNA, 95 bp, Glycine max
gctcatcaagtccaagaaccaacctaccttttgcaatctcaattcaatggcgtcctctctcattgcgaaggcttcctctcctcttcactcctctc

SEQ ID NO: 116444 - DNA, 202 bp, Glycine max
aattcctgcccctgacaaacctcaaccacttggtaccatcgctgccgcaccatggggctcagcactcatattgccaatctcttacacttacatagccatgatgggttctaaaggactcaccgatgcatcaaagatagccattttgaatgcaaactacatggcaaaacgattggagaattattatcccgttcttttccgtgga

SEQ ID NO: 116445 - DNA, 194 bp, Glycine max
ggtggatgaaaaactgttggaaccgtatgagattgcaactgtggaggtaccagaagagcacatgggagctgttgttgaacttcttggcaagagacgaggacaaatgttcgatatgcaaggagttggattggaaggaactacactactcaaatataagatcccaacccgtggccttcttggattgcggaattcaa

SEQ ID NO: 116446 - DNA, 200 bp, Glycine max
attagatggtcttcctgaacaagccttttatttggtaggtaatatcgatgaagctactgcgaaagctacgaacttagaaatggagagcaatttgaagaaatgactttaaatctttgtgtactgacccccaatctaattgtttgtgattcggaagtgaaggaaatcattttatctactaatagcggacaaattggagtatt

SEQ ID NO: 116447 - DNA, 147 bp, Glycine max
attagctatgaacaatgatgagctacatgtggttatgttcccattccttgcatttggccacattagtccatttgttcagctctccaacaagttgttctctcatggtgttcatgtcactttcttgtcagctgcatccaacattcccag

SEQ ID NO: 116448 - DNA, 200 bp, Glycine max
cgacgacagcagccttgtgcggcactatgaagagcagctccttcctgaggagaaaagcagtggtcacaagcctgaaggcattccccaatgctaacgcagtgtttggtgtaaagggtggacgtggaggtggtttgactgccatggctagcttcaaggtgaagctgataaccccagagggagagaaagaatttgaatgccca

SEQ ID NO: 116449 - DNA, 200 bp, Glycine max
caaagggaaaggacttgaaattctggcattcccatgcaatcagtttggggctcaggagccaggaactaatgaagagattgtggagtttgcttgtactcgcttcaaagctgagtttcccattttcgacaaggtggatgtgaatggtgacaatgctgctccactgtacaagtttctgaaatcaagcaaaggtggactctttg

SEQ ID NO: 116450 - DNA, 197 bp, Glycine max
ggagattggtgctggtgaccaaggtcatatgttcggctatgctctgacgattgtcccgagctcatgcccttgagccatgtccttgccacgaagctcggtgtcaagctcaccgaggttcggaacaacgggacatgcccttggctgagacctgttggcaagacccaggtcattgttgagtactacaatggcaagggtgc

SEQ ID NO: 116451 - DNA, 200 bp, Glycine max
aagatctaagtgagatacacagtagttaggtagcaaggataagtgtctaaccttagaaacatatctgctacatatcgtgtgcattttggaattgtgccactaaaattctattcatctatggctgcctcatcttatgctatgcaatcaatccttggaaaccctatgatccgcatttccagcgggtctagggagaaccattt

SEQ ID NO: 116452 - DNA, 198 bp, Glycine max
caggcgaacgcgcggtaggttcgtggtggtgcttcaggattccaatgtactgcgtccaagatcagaacgagcttgccggcggaccactgccgtcccattcttgagtgagctggagcgcagcatcttatccactgaactagtcagaagctatcgcttcgggtcgaagcactaaaagaaaaggaccgggaaacgcggcgg

SEQ ID NO: 116453 - DNA, 161 bp, Glycine max
ggaaagtgagtgagagaaagagatcacatagcagaatggcttctactcaatgtttcttgcaccaccatgctcttaccacccctgccagatccccatcacaacgcatcatggttagcaccaagcctaaccagcttgtttgcaaggcacagaagcaaaaggat

SEQ ID NO: 116454 - DNA, 196 bp, Glycine max
gggcacgaagaccggtggacccttcggaaccatcaagcaccctgccgaactggctcacagcgctaacaacggtcttgacatcgctgttaggcttttggagccactcaaggcggagttccctattttgagctacgccgatttctaccagttggctggcgttgttgccgttgaggtcacgggtggacctgaagttcca

SEQ ID NO: 116455 - DNA, 179 bp, Glycine max
cagagaaacaaagttagaagtaaagaagatcatggcttctctagcaaccttggctgctgttcaaccagctacgatcaatggccttgctggaagttccctctctggaactaagctctctttcaagccctctcgccacagtgtcaaatccaagatcttcaggagtggtgccgtggtaccaa

SEQ ID NO: 116456 - DNA, 201 bp, Glycine max
cgaggcacctcatgcccacgcgctacacgctcgatgtcgatttgaaggacgcggttacccccgacgtgctccaagccaaggataagaaggttactgctctcaaggagaccaagaagcgcctcgaggagaggttcaagcatgggaaaattcggtggttcttcaccaagctcaggttctgagcataatattatgcattttttt

SEQ ID NO: 116457 - DNA, 185 bp, Glycine max
cgaggcacctcatgcccacgcgctacacgctcgatgtcgatttgaaggacgcggttacccccgacgtgctccaagccaaggataagaaggttactgctctcaaggagaccaagaagcgcctcgaggagaggttcaagactgggaaaaatcggtggttcttcaccaagctcaggttctgagcataa

SEQ ID NO: 116458 - DNA, 198 bp, Glycine max
gtctggtctgctcaatgatccaagtatcaaggaattggctgaacagatagcaaaagatccatcgttcaatcagatggctgagcagcttaagaaaacttttcaaggagctccacaagatgctatccctagcttcgataatcaacaatatttttcaaccatgcagcaggttatgcagaatcctaattttatgaccatggc

SEQ ID NO: 116459 - DNA, 196 bp, Glycine max
gccttcaagcatgtagggatggccattggtacgatgtgtagtatgtctccaatgccctcgttattcacattggcgaccaaatggagatactgagcaatggaaaatataaggcagtttttcacagaacaacagtgaacaaagatgagacaagaatgtcgtggcccgtgttcatagaacccaaaaaggaacaagaagt

SEQ ID NO: 116460 - DNA, 197 bp, Glycine max
aagcaatgcttatattttagggtggccaagacaaagcacagaactggcatgtctactctgcttctgcagattctgtaactcaatgtgacaatgtttacactcttgagatgtgcatgactggcctggatagagagaaagcacaggttttctacaaagaacaatgtgcttcagctgcgatgatgactgataattccggc

SEQ ID NO: 116461 - DNA, 187 bp, Glycine max
cactattgcgcacgggcgtcgaaaccgtggagatatacggggaaggaagagaacatgcagagggaggacataaagatgctggtgaaaaaatggtgggatatctacaatgatgcttcgcttgactacaagccattgatgagtgcaagtcaccctccagcaccggatggtgtcgacaatattgaaccat

SEQ ID NO: 116462 - DNA, 198 bp, Glycine max
caaagggaagcgacttgaaattctggcattcccatgcaatcagtttggggctcaggagccaggaactaattaagagattgtggagtttgcttgtactcgcttcaaagctgagtttcccattttcgacaaggtggatgtgaatggtgacaatgctgctccactgtacaagtttctgaaatcaagcaaaggtggactctt

SEQ ID NO: 116463 - DNA, 194 bp, Glycine max
ctttgccgctgttgttgttgctgcaccaccgaacaacttcccctgtaaatcgcgtttcgtttgtgcaaggttttaaaagatggctgatgctgaggacattcaacctcttgttgtagataatggaactggactggtcaaggctggttttgcaggtgatgatgctcctagggccgtgttccccagcattattggga

SEQ ID NO: 116464 - DNA, 196 bp, Glycine max
tgcaattgaagttaaaagccttagccttccctacaactccaaacacaaagacatcatcatccatggctgcctccgtctccactgtcggagctgtcaacagagctcttttgaacctgaatggttctggagctggagcttcagctcccagttcagccttctttgggaccagcttgaagaaggttattgcctcaagggc

SEQ ID NO: 116465 - DNA, 175 bp, Glycine max
gctcatcaagtccaaggaccaacctaccttttgaatctcaattcaatggcgtcatctctcattgcgaaggcttcctctcctcttcactcctctcctggtccctccttcgccccgccgcttccggttccaaccgctctttcaacaccccgcgatgcgccagtatgacaaccgtgcc

SEQ ID NO: 116466 - DNA, 195 bp, Glycine max
gttggaggattctaaggcgaataaagaagcaaatccaacaaaaaaaaagcaactaattaatcctcggacagtgtaaaatcaaatttccacatttccgagagagaggatatggcaaaggcatacgagcaagctattgaagatctccagaaattgttgagggagaagagtgaactcaaagccacagctgctgagaaa

SEQ ID NO: 116467 - DNA, 155 bp, Glycine max
cgctccgcgtacggctcgacgcctttcgtacctcaaccacttggtaccatcgctgccgcaccatggggctcagcactcatattgccaatctcttacacttacatagccatgatgggttctaaaggactcaccgatgcatcaaagatagccatttt

SEQ ID NO: 116468 - DNA, 198 bp, Glycine max
aaacactcataacacaaagcacaaagcaaagctcatccttgcagttacccacatggcagcagcttcttccatggctctctcatccccatccttggctggcaaggccgtgaagctgggcccatcagccccagaagtgggaagggtgagcatgaggaagaccgtcaccaagcaggtctcctcaggaagcccatggtacgg

SEQ ID NO: 116469 - DNA, 150 bp, Glycine max
cactattgcgcagaggggtcgaaaccgtggagatatacggggcaggaagagatcatgcagagggaggacataaagatgctggtgaaaaaatggtgggatatctacaatgatgcttcgcttgactacaagccattgatgagtgcaagtgaa

SEQ ID NO: 116470 - DNA, 194 bp, Glycine max
gtacgacgagatcgacgccgccccggaggaacgcgcccgcggcatcaccatcaacaccgccaccgtcgagtacgagaccgagaaccgccactacgcccacgtggactgccccggccacgccgactacgtcaagaacatgatcaccggcgccgcccagctggacggcgcaattcttgtcgtctccggcgccgacc

SEQ ID NO: 116471 - DNA, 194 bp, Glycine max
cgcaccgatacgtctcgcacgacgaggcgaaggcggaggagagggtggaggcggccatgaaggaggagaatgtggaggtgaagtacttctggggaagcacgttgtatcacgtggacgatttgccttttcaattggaggacatgccttccaattacggagggtttagggatagggttcagaaattggaggtaagg

SEQ ID NO: 116472 - DNA, 192 bp, Glycine max
tgttaacagtcaatattgttgctctgattattaactttgtttctgcatgcatcacaggatctgctcccctcacagctgttcagttgctttgggtcaacctgattatggacactctgggtgctttggccttggccactgaacctcccaatgatggacttatgctaagacccccagttggaaggacaacaaatt

SEQ ID NO: 116473 - DNA, 186 bp, Glycine max
aaagcattgaattcaaaaacttaagttcattccttgtgttttgctttcttcctcaaaaccaaacatgtcgaacacatgcggcaactgcgactgcgctgacaagactagctgcaccaagggaaacagctatggtgttattgtagagactgagaagagttacatcgagactgttgtcatggatgttcc

SEQ ID NO: 116474 - DNA, 163 bp, Glycine max
gaggttttcttctaccttgctgagaacaatgtcctttttgagggtattctccttaagcctagcatggttacacctggagccgagtccaaggacaaggccagtcctcagacagttgctgattacaccctcaagctccttcacaggagaattccccctgctgtcc

SEQ ID NO: 116475 - DNA, 197 bp, Glycine max
cgaatccatggtgaaacaagcagtgactaacaagtttacagagaccatcacaactggacatgcaactctgcgcctactaatccatgcttgcattgttgagggctgtgatgcctccgtgataatctcctcgccaaatggggacacagagacggatgccgaggtacatatttcactgccaggagatgggtttgacactg

SEQ ID NO: 116476 - DNA, 190 bp, Glycine max
tgatcctgttcgtcatgcagaaaggttccccatacctcctgctacatgcagtggaaggcgtgaaaagtgtggaattgagaaggagaacaacttcaagcagcccggagagagatagcggtcttgggcacctgacaggcaagatagatttgctcgccgatgggttgatgctttatctgacccacgggtcacc

SEQ ID NO: 116477 - DNA, 190 bp, Glycine max
caacagatgaacctccacatgttgatcgggatgttgttaaagcagatgctggtcatgttgaagtggagatatacattgaagaaacttatggaagttgggcagtgttccggccacagtacatgattgggtctggcaacaacaaagactgtgaggagtggttttttgacaggattgttcgggacagacctgt

SEQ ID NO: 116478 - DNA, 191 bp, Glycine max
gattgtttttctgttccatttctacgaactcagacccttcaatcccaaccgagaaaaaaatcatgaagctgaagacatatgcgggtcttagtatcattgcaactctggctattatatatcatgcatttaacagtaggggccagttttatccggcaatggtgtatctgtcaacttccaagatcagtttggtg

SEQ ID NO: 116479 - DNA, 190 bp, Glycine max
cttcatcacttcattcaacatttctccccttagcttgtttcaccaatggctgctgcggttagtgctgcagtctcttttccatccaccaagtctacctctcttccaagcaggacctccctcattgccccagagagagttgtgttcaagaaggcttcattgcaaaacagagatgtttctagcagtggacggg

SEQ ID NO: 116480 - DNA, 187 bp, Glycine max
aaattagttcattctctttgcgcagttccctacctctcctttcaagatgcagatcttcgtcaagaccctcaccggaaagaccatcacccttgaggtggaaagctctgacaccatcgacaacgtcaaggccaagatccaggacaaggaaggaattcccccggatcagcaacgtctcatcttcgccgga

SEQ ID NO: 116481 - DNA, 185 bp, Glycine max
gtcaaaatacccctccgccggggaactctccatcctcgacacgtgttatgatctcagcggttacaaggtgttttccattcccacgatagaattttcgttcgccggcggcgtcacggtgaagctgcctccacagggtatactcttcgtggcgagtaccaagcaggtttgtttggcttttgccgcaa

SEQ ID NO: 116482 - DNA, 191 bp, Glycine max
ctttctttctcttcgagggtttgggtttctcttcctccctggtagaaaaagaagagtcaccgctacgacgccgttcgtgcttttttgaggtgccacagtcatgtttgggcttggtggaccaaggaggagtgacaactccaaatattatgatattctcggggtttccaaaaatgccagtgaagatgaaatca

SEQ ID NO: 116483 - DNA, 189 bp, Glycine max
ctcattcttcatccatagacatggccaccgtcacttctgcagccgttgctattccctcattcactggcctcaaggcaagcgcaggcaaagtgagtgccgcagttaaagtctcagctccccaagccacaaggttgggcatcaaggcttcgctgaaagacgttggagtcgctgttgtggccactgccgcga

SEQ ID NO: 116484 - DNA, 190 bp, Glycine max
tgcaattgaagttgaagtcttgcccttctctcttcaactccaaacacaagacatcatcatccatggctgcctccgtctccactgtcggagctgtcaacagagctcttttgaacctgaatgggtctggacctggggtttcagctcccagttcatccttctttgggagcagcttgaagaaggttattggctc

SEQ ID NO: 116485 - DNA, 189 bp, Glycine max
atccagatcaagctgcactgctaaaggtgaaggaaattaaaaatggaagacttgctatgtttgccatgcgtggtttgtacttccaagcttatgtcactggagaaggtcctgttgagatccttgcaaaacatctcagtgacgcttttggcaacaacttgctcactgtcatttctggatatgctgagagag

SEQ ID NO: 116486 - DNA, 192 bp, Glycine max
gaaactgcagaagcggctcgcagccagcgtcctcaagtgtggcagaggaaaggtttggcttgaccccaatgaagtcaacgaaatctccatggctaattcttgccaaaacataaggaagctggttaaggatgggtttattatcaggaagcccaccaagattcactctcgctcacgtgcccgccgaatgaagga

SEQ ID NO: 116487 - DNA, 191 bp, Glycine max
caaagcactcagcaaagctcttccttgagttaaaaaatggcagcagcttcttccatggctctctcatcctcatccttggctggccaggccgtgaagctgggcccatcagccccagaagtgggaagggtcagcatgaggaagaccgtcaccaaccaggtctcctcaggaagcccatggtacggcccagaccg

SEQ ID NO: 116488 - DNA, 186 bp, Glycine max
gtcgcaccacgaggcgctgtcggcgagtcgggttgtttgggaatgcagccccaatcgggcggagtattccgtccaaggctaaatactggcgagagaccgatagcgaacaagtaccgcgagggaaagatgaaaaggactttgaaaagagagtcaaagagtgcttgaaattgtcaaggaggataagga

SEQ ID NO: 116489 - DNA, 195 bp, Glycine max
gagaagtgagatacactaagttatcctcataaatacactctaattaggtggcaagataagtgtctaaccttagtaacattgccacatattgtgttcattttggaattgtgccactaaaattctattcaattcatctatggctgcctcttcttatgctatgcaatcaatcctggcaaaccctttgatccgcatttc

SEQ ID NO: 116490 - DNA, 190 bp, Glycine max
cactccgccgccacccgcggcgcctctcatctcttccgccgtgggtacgcctccgagccggtgccggagcgcaaggtagccgttctcggcgccgccggcgggcatcgggcagcctctctcccttctcatgaagctcaatcccctcgtttcgagcctctccctttacgatatcgccggaactcccggcgtc

SEQ ID NO: 116491 - DNA, 185 bp, Glycine max
gtttggtattttgcttttggagttggtgactgggcgaaaacctcttgatgtaagcaatggggaggtagagttcaagggtagcttggtggattgggtgaatatgcattctagttctggccgaatcaaggattgcattgataaagccatatccggaaggggacacgatgaggagattctgcagtttc

SEQ ID NO: 116492 - DNA, 187 bp, Glycine max
ctgcgtctctctctgaattgactagcttaaatggctggtcataggattgcccatgctaccttgaaaggtccgagtgtggttaaggagatcataattggaataacacttggcttagctgctggtggtgtgtggaagatgcaccactggaatgaacagaggaaaaccaggaccttctacgatttactgg

SEQ ID NO: 116493 - DNA, 189 bp, Glycine max
cttccattaacgggtggtgcctctcttccatctccccagccaaaacctctctcaagaaggccacattaggcccttctgtcttcgcaaccgttagcactccttcttctccttcttcttcttcttcttcttccttcccttctctcattcaagacaggcctgtctttgctgcccctgcccccatcatcaccc

SEQ ID NO: 116494 - DNA, 189 bp, Glycine max
caacaccaacctcttccctaacttgttgctcgacaagctactgaagaagacttctgcgcgtcaaatatcaaaaaccgcttcacctgtcgaacattttcggcaggtattgcaaaagggttctgatgtgtcaattaaggagctagacacccttattgtcacttcttgccgagaagaaaagaaaaatggaac

SEQ ID NO: 116495 - DNA, 189 bp, Glycine max
gattattggaacctttgttttggtctacactgtcttctctgccactgaccccaagaggaatgccagagattcccatgtgccggttttggctccacttcccattggatttgctgtgttcatggttcacttggccaccatcccagtcactggtactggtatcaaccctgctaggagtcttggagctgctgt

SEQ ID NO: 116496 - DNA, 185 bp, Glycine max
gtaaattgggtactggagatacataaccatatacagacatctcaaggccaaccctgagtttcaatgttatcccatttttaagtactttgagaactggtgccaggatgagaacagacatggagatttcttctctgccctgatgaaggcacagccacaatttctaaatgactggaaggcaaagttgt

SEQ ID NO: 116497 - DNA, 167 bp, Glycine max
tgcacttccgatctacacaccagatagccctgctgatgctacaagaaatctgtctcagcaaaatctaaatgcccttgttaaggttcttcctggtctacttggtggtagtgcagatcttgcctcttccaacatgaccttattggaatcgtatggggatttccaaaaga

SEQ ID NO: 116498 - DNA, 197 bp, Glycine max
caaggacacatttgtgttcagtatagatggcaccgtactctctaatattccatactacaaaaaacatggatatggggtggagaaatttaactcgaccttgtatgatgaatgggttaacaagggcaatgcaccggcagtgcccgagactcttaagaattacaacaagctggtgtctcttggcttcaagattatattct

SEQ ID NO: 116499 - DNA, 192 bp, Glycine max
ttcagcacctggtgagtttggattcgaccctcttcgtcttggtgaagtaccagagaatcttgagaggttcaaagagtcagaactcattcactgcagatgggccatgcttgctgttccagggattttggttccagaggcattgggcttaggcaactgggtaaaggctcaggaatgggcagcagttcctggggg

SEQ ID NO: 116500 - DNA, 194 bp, Glycine max
cttcgtcgccgtctccgtcggcgccaacatctccggcggccacgtcaaccccgccgtcaccttcggcgccttcgtcggcggcaacatcaccttcctccgcggcatcgtctacgtcatcgcccagctcctcggctccatcgtcgcctccctcctcctggccttcgtcaccgcctccactgttccagcattcggac

SEQ ID NO: 116501 - DNA, 190 bp, Glycine max
ggtgctgcgctgctgtagccatggactctctcattctcattcgggcgagcactgcaacaaagcacactcaagacatggggtggaaagaaggagaatgtcgccaaagctagtgaggcatttctggcaagatgcaaggccaattctgatgctactctgggaaagtatgttggtggaagcggaagtggcttga

SEQ ID NO: 116502 - DNA, 192 bp, Glycine max
ggtgccttatcgctgtggttatcatcttcttcttcctctttcttagatctcttctttctctacgccgcacgccgaaaccatggccggaaaaggagagggtcctgctatcggaatcgatctcggaaccacctactcttgcgtcggtgtgtggcaacatgaccgcgttgaaatcatcgccaacgaccaagggaa

SEQ ID NO: 116503 - DNA, 189 bp, Glycine max
tgcaattgaagttgaagtcttgcccttctctcttcaactccaaacacaagacatcatcatccatggctgcctccgtctccactgtcggagctgtcaacagagctcttttgaacctgaatgggtctggacctggggtttcagctcccagttcatccttctttgggagcagcttgaagaaggttattggct

SEQ ID NO: 116504 - DNA, 199 bp, Glycine max
gtaatcaatcatcttttgtttgttcttcagtactttagtgtgtgatttaattccaagattttgagaatgtctagctgtgggtgtggaagtagctgcaactgtggcagcaactgcggttgcaacaagtactcttttgacttgagctatgttgagaagacaaccacagagactcttgttttgggtgttgggtctgtgaagg

SEQ ID NO: 116505 - DNA, 192 bp, Glycine max
ctaggatgttcctggactcatctcgaagaacatccaaaaggccttggttgaagccttccaacccttgggaattgatgattacaactctatcttttggattgcacaccctggtggaccagcaatattggaccaagttgaggctaagttaggcttgaaacctgaaaaaatggaagctactagacatgtgctcag

SEQ ID NO: 116506 - DNA, 188 bp, Glycine max
gcaagctcatcctagagttttaaaaatggcagcagcctcctccatggctctctcttccccatccttggctggcaaggccgtgaagctgggcccatcagcccccgaagtcgggagggtcagcatgaggaagaccgtcaccaagcaggcctcctccggaagcccatggtacggcccagaccgcgtcaagt

SEQ ID NO: 116507 - DNA, 188 bp, Glycine max
ctcaatgattgccaacgtacagctttctatgaaggcattggacttaacacaaaagaatttgacatgcatgtcatcatcgagacaaaccgcacaactgctaggattttcccagctgttcttgatgttgaaaacccagagttcaagcggaagttggaccggatggtggagataaacgagaagattattgc

SEQ ID NO: 116508 - DNA, 190 bp, Glycine max
gtgaagaaagattcgaaacgaagaaagaaagcgttgtgaagaatggcggaagagggacaagtgatcggtgtccacagcgtagaggagtggaaggaacatctcaagaagggagaagagtccaagaaattgattgtggtggattttactgcttcttggtgcggtccatgccgtttcattgccccaattcttg

SEQ ID NO: 116509 - DNA, 199 bp, Glycine max
gcagctgcttccccaatggcaagccaactcaagtccaccttcactaggactcttgtagctcccaagggcctctctgcctcttcaccacttcacctcgtgccttctagaaggcaatttagcttcactgttaaggccatccaatcagagaagccaacctatcaagtgattcagccaatcaacggtgacccattcattggaa

SEQ ID NO: 116510 - DNA, 193 bp, Glycine max
gatcatcggtcatgtcgaagatcctgagaagcagatactggagccggcgataaaaggaacagttaatgtgttgaaggcggcgaaggaagcgggggtggagcgcgtggtggcgacttcgtcgatctcatccattatgccaagccctaactggccagctgataagattaaggcagaagagtgttggacagacctt

SEQ ID NO: 116511 - DNA, 187 bp, Glycine max
gtcacatattcttcccgcgtcgcgcccaccaccaaattatcctcatccaaacaaggcacaatttccatgtccctaaccccacccccctacgacctccagtccttcaagctccagcccatcaaagaatccatcgtgtcacgggaaatgacgcgccgctacatgaccgacatgataacctacgccgaca

SEQ ID NO: 116512 - DNA, 187 bp, Glycine max
gtgatagcattttttttctggatatgggttacatatggatttgactcctgtataatgggacaagttcgatacattgttccaaggcttgttattggggtatttattcaggtactatgtagctacagcaccctgccactgtatgcaattgttacgcagatgggaactcactataagcgggcaatattta

SEQ ID NO: 116513 - DNA, 198 bp, Glycine max
tttcttttttcccgcagtcatgggcaaggtcaagatcggaatcaacggatttggaagaattggccgtttggtggccagggtggctctgcagagagacgatgttgaactcgttgccgttaacgatcctttcattaccaccgattacatgacatacatgtttaaatacgacagtgttcacgggcactggaagcatcacga

SEQ ID NO: 116514 - DNA, 193 bp, Glycine max
gttggaggtgttgaagccatggactctctcattctcattcgggcgagcactgcaacaaagcacactcaagacatggggtggaaagaaggagaatgtcgccaaagctcaagaggcatttctggcaagatgcaaggccaattctgatgctactctgggaaagtatgttggtggaagcggaagtggcttgacttct

SEQ ID NO: 116515 - DNA, 190 bp, Glycine max
gcaagctcatccgagagttttaaaaatggcagcagcctcctccatggctctctcttccccatccttggctggcaaggccgtgaagctgggcccatcagcccccgaagtcgggagggtcagcatgaggaagaccgtcaccaagcaggcctcctccggaagcccatggtacggcccagaccgcgtcaagtac

SEQ ID NO: 116516 - DNA, 188 bp, Glycine max
gtgcgggccgcgagagcgtaccaaatcgaggcaaactctgaatactagatatgacctcaaaataacaagggtcaaggtcggccagtgagacgatgggggataagcttcatcgtcgagagggaaacagccctgatcaccagctaaggcccctaaatgaccgctcagtgataaaggaggtaggggtgcag

SEQ ID NO: 116517 - DNA, 195 bp, Glycine max
acacaagtgatagagaactcagtcctcaagaagaaaaaacaattacagcagtagtggatgcaagcgcatatccgcttgcgatagttctggttggagccatacctggtgttgctagcttttacatacctttcaagaatgctaaaggcgaggaagggttggttataccggtttgtttgccgtctgaggccatggaga

SEQ ID NO: 116518 - DNA, 193 bp, Glycine max
tgcttctcgctcacaacgccggtggcaaagagaggaccgaagagaactggaagtggctgttcaaggaaaccggtttcgcgcgttacaacatcatcaagatcagcgctctcccttccatcattgaggcgtttccaatctgaagaagatgccactaccacaactgcatgtggtttttatgttgcatgtgttgttg

SEQ ID NO: 116519 - DNA, 188 bp, Glycine max
tgacaagtctgagtgggtgaagggacaaacacttcgccaaccttctgctgcatcagttgtgagatgcaaccccaccaccccatcaggcctcgccatcagagctggttcctatgctgatgagctcgttaagaccgcgaaaacagtggcttcaccagggaggggtattttggccatggatgagtccaatg

SEQ ID NO: 116520 - DNA, 188 bp, Glycine max
gccttacaacagtgtcctctccactcattctcttcttgagcacactgatgtggctgtcctgctcgacaatgaagccatttatgacatctgcaggcgttcactggacattgagaggccaacctacaccaaccttaatcgtttagtttctcaggtgatatcatcactgactgcttccctgaggtttgatg

SEQ ID NO: 116521 - DNA, 200 bp, Glycine max
tattgtttgttgttgtaactcgttcttcttcttttgttgttctgtgtttgtgtttgttttttctctcacctgaaaatgtcttgctgcggtggtaactgtggttgcggaagctcctgcaagtgcggcaacggctgcggaggctgcaagatgtacccagacttgagctacactgagtcaaccaccaccgagaccttggtcat

SEQ ID NO: 116522 - DNA, 195 bp, Glycine max
gcaggatgtgtcgttgggagcgaacaagttccccgagagacagccgattgggacggcggcgcagagccaagacgacggcaaggactaccaggagccggcgccggcgccgctggttgacccgacggagtttacgtcatggtcgttttacagagcagggatagcagagtttgtggccacttttctgtttctctacat

SEQ ID NO: 116523 - DNA, 191 bp, Glycine max
cctgatttccggagtggatttatcggaggaggaagccgaagcgtgtctcaacttgctgctgcacgaaccaaacgaggccttaatcagcgctcttctcgtgcttctcagagccaaaggagagacctatgaagaagttgtggggttggcgagggcaatgtttaaacacgcgacgaaggtggagggtttggacg

SEQ ID NO: 116524 - DNA, 198 bp, Glycine max
catcacattacattagattggtggtaatggcagcgtcactacaagcagcagctactttcatgcaacccaccaagttgagcaggagcaacactttgcagcaaaagtctactcagtccatttccaaggcttttggtttggaacctgttggagctaaaaaggtcacatgctcccttcaggctgatcttaaggacttggctc

SEQ ID NO: 116525 - DNA, 193 bp, Glycine max
tgaagggtttcgaggggaaaacaaaatacggtacgttgaatggtggtgccaactttgttgcccctggttacaccaagggtgatggtcttggtgctgagattgttggcactttcgtccttgtttacaccgttttctccgccaccgatgccaaacgtaacgccagagactctcacgtccccattttggcaccttt

SEQ ID NO: 116526 - DNA, 193 bp, Glycine max
agcaagcctacgctctgtatacattagcatgggataacaccacaggattctgatcctattgtgttggccttcgggatcggagtaatgattaacagggacagtcgggggcattcgtatttcatagtcagaggtgaaattcttggatttatgaaagacgaacaactgcgaaagcatttgccaaggatgttttcat

SEQ ID NO: 116527 - DNA, 190 bp, Glycine max
ctatttcttcccgcgagtatttggagtttctactcttgagaaaactgctcatcatgatttccgaaaacttgcctctgcaatctatcttcaagtgagcactattagtcaggccctaatatttgtgactcggtcacggggttggtcttatgttgaacgtcctggtattttgcttgtgacagctttcgtgatt

SEQ ID NO: 116528 - DNA, 191 bp, Glycine max
acagcttgttcaacatcataggcaacttgctcttccccttactcgcattcgcgggcctgttcttcctctgccgcagagcccaaggcgcgcccggcgggcattgcgggctgggagggtccatggagttcgggcggaacaagtccaagttccaggaagtccgcgagaccggcgtgaggttcgctgacgtggca

SEQ ID NO: 116529 - DNA, 195 bp, Glycine max
gtgcattattcaatggccaccacagcagctctatccggaaccatggtgagcacctccttcatgaggaagcaacctatgacgaccaagagcctaaagacattccccaacgctctttttggtctgaaaggtggacgaggtggtcgtgtaacttgcatggcctcgtacaaggtgaagctcataaccccagaaggagaa

SEQ ID NO: 116530 - DNA, 186 bp, Glycine max
caacgccgtcgtttcgccagcgtcgaaatcgtcgacgaggtcatcaatctcgacaaagaatggcgaaaacgtcaattcgagttggaaaatctccgcaaggaattcaacaagatcaacaaggaagtctccaaactcaagcgtgctggggaggatgcttctaagttcattactgaatcagaggagacc

SEQ ID NO: 116531 - DNA, 192 bp, Glycine max
gaagcattagcactaggagcagcaacaactagtctcagctgaaatggcctcttcagtgatggcatctgtggccctcaaacctgcccctttcactgttgagaagtcctcagtgagaggccttccctctctctcaaggaactcttcttcattcagagttgtggccagtggcaagaagatcaagactgacaaacc

SEQ ID NO: 116532 - DNA, 134 bp, Glycine max
gaagaacaagtagttgagaactaagaaggagaagctaatggcttcctcaatgatctcttccccagctgttaccactgtcaaccgtgccggtgccggcatggttgctccattcactggcctcaagtccatggctg

SEQ ID NO: 116533 - DNA, 189 bp, Glycine max
cttcatcacttcattcaacatttctccccttagcttgtttcaccaatggctgctgcggttagtgctgcagtctcttttccatccaccaagtctacctctcttccaagcaggacctccctcattgccccagagagagttgtgttcaagaaggcttcattgcaaaacagagatgtttctagcagtggacgg

SEQ ID NO: 116534 - DNA, 193 bp, Glycine max
atcacattacattagattggtggtaatggcagcgtcactacaagcagcagctactttcatgcaacccaccaagttgagcaggagcaacactttgcagcaaaagtctactcagtccatttccaaggcttttggtttggaacctgttggagctaaaaaggtcacatgctcccttcaggctgatcttaaggacttg

SEQ ID NO: 116535 - DNA, 193 bp, Glycine max
gttgagaactaagaaggagaagcaaatggcttcctcaatgattgcctccccatctgttaccactgtcaaccgtgccggtgccggcatggttgctccattcactggcctcaagtccatggctggcttccccaccagaaagaccaacaatgacattacctccattgctagcaacggtggaagagtgcaatgcatg

SEQ ID NO: 116536 - DNA, 191 bp, Glycine max
atcaagggttgtgaaagcagagaagtgagatacactaagttatcctcataaatacactctaattaggtggcaagataagtgtctaaccttagtaacattgccacatattgtgttcattttggaattgtgccactaaaattctattcaattcatctatggctgcctcttcttatgctatgcaatcaatcctg

SEQ ID NO: 116537 - DNA, 195 bp, Glycine max
aacacaaagcacaaagcaaagctcatccttgagttaaaaaatggcagcagcttcttccatggctctctcatccccatccttggctggcaaggccgtgaagctgggcccatcagccccagaagtgggaagggtgagcatgaggaagaccgtcaccaagcaggtctcctcaggaagcccatggtacggcccagaccg

SEQ ID NO: 116538 - DNA, 169 bp, Glycine max
gctggtgttccatttttctctatatcaggttccgagtttgttgagatgtttgttggtgttggtgcttctcgtgttcgtgatttgttcaagaaggcgaaagagaatgccccttgcattgtccttgttgatgaaattgatgctgttggaagacaaagagggactggcattg

SEQ ID NO: 116539 - DNA, 190 bp, Glycine max
tgaaaagtgtggaattgagaaggagaacaactttaagcagcccggagagagataccgatcttgggcacctgacaggcaagatagatttaatcgccgatgggttgatgctttatctgacccacgggtcacccatgaaatccgcagtgtctggatatcttactggtctcaggctgaccgttctctaggccaa

SEQ ID NO: 116540 - DNA, 185 bp, Glycine max
ctctactctactgcttcaccttctgctctagaaaattcagtggtgatacatggcttcggctactctctctgtagccaaaccagcccttcaggcaaatgggaaaggcttctctgaattctctggcctccgcagctcatcaggctttcttcccttttctagaaaatcttcagaggatttccattctg

SEQ ID NO: 116541 - DNA, 187 bp, Glycine max
ggaacctacaagggccgcgagggcaaagtggtctaggtctatcgccgcaagtgggtcatccacatcgagcgcatcacccgcgagaaggttaacggctccaccgttaacgttggcattcacccttccaaggttgtcgtcaccaagctccgaatggacaaggaccgcaaatccttgctcgatcggaagg

SEQ ID NO: 116542 - DNA, 189 bp, Glycine max; identical to SEQ ID NO: 116503

SEQ ID NO: 116543 - DNA, 191 bp, Glycine max
gaacaagtagttgagaactaagaaggagaagcaaatggcttcctcaatgatctcttccccagctgttaccactgtcaaccgtgccggtgccggcatggttgctccattcactggcctcaagtccatggctggcttccccaccaggaagaccaacaatgacattacctccattgctagcaacggtggaagag

SEQ ID NO: 116544 - DNA, 190 bp, Glycine max
cattctcatcctcctctgtctctctctctccaccattgccatggatccttacaagctccggccatccagcgccttcaattctcccttctggacttcaaattctggtgctcctgtttggaacaacaactacctctttaaccgttggagctagaggtccaattctgcttgaggattatcatctttaggagaa

SEQ ID NO: 116545 - DNA, 190 bp, Glycine max
tgcaattgaagttaaaagccttagccttccctacaactccaaacacaaagacatcatcatccatggctgcctccgtctccactgtcggagctgtcaacagagctcttttgaacctgaatggttctggagctggagcttcagctcccagttcagccttctttgggaccagcttgaagaaggttattgcctc

SEQ ID NO: 116546 - DNA, 188 bp, Glycine max
gacaaactggaaaaacagctattgctatcgataccatattaaaccaaaagcaaatgaactcaagggccacctcagagagtgagacattctattgtgtctatgtagcgataggacagaaacgctcaactgtggcacaattagttcaaattctttcagaagcgaatgctttagaatattccattcttgta

SEQ ID NO: 116547 - DNA, 185 bp, Glycine max
aagagaggggagaaggccggccacgacttgggctgggcctgcgtccttgtcctggagtcgttaattccggtcgtcgtcgaccccgtcatcggaaaatcgaggttgttggttacccctaccgtgaaggagcatgccacggagatcgcggagacttggaagagcagcctggaggatcgtggcggcgt

SEQ ID NO: 116548 - DNA, 187 bp, Glycine max
gtttcaccgcacgaatatcttgttgtttggagcgatccgagaaaaactctgtaaacatgttggtttaccaggacctccttacaggtgatgagcttctctctgactccttccgttacaaggaaattgagaatggaatgctgtgggaagttgaggggaagtgggttgttaaaggagcagttgatgtaga

SEQ ID NO: 116549 - DNA, 186 bp, Glycine max
agcggacgtacggggaagaagaagggagcgagctttgtgatcgattgcgcgaagcggtggaggataaaattatggacattgcttctctggagaagttccttcaggagaggattaaggttggcggcaaggccggtgcactcggcgattccattactgtcactagggacaagagcaagatcaccgtca

SEQ ID NO: 116550 - DNA, 183 bp, Glycine max
ctgggaaaaaatggcagcaccaacgccgattcacaaaactgaagaggaatggaaggtcattctctcccccgagcagtttcggatccttcgccagaaaggaactgaattgaagggtacaggagaatataacaagttttttgaagaaggaatttacaactgtgctggctgtgggactcctcttta

SEQ ID NO: 116551 - DNA, 183 bp, Glycine max
ggaagcccatttgatcctgttgaatatgaaggaaaactttttgttcctggacaggctaacaatgcttacatatttcctggttttggcttgggtttgatcatctctggtgcaattcgtgtgcgtgatgagatgctcttggcagcctctgaagctttggctgcacaagtatcacaggaaaactat

SEQ ID NO: 116552 - DNA, 185 bp, Glycine max
caacaatcaaattgttgttgggactcttatgaatctgtcagacaatcctacaagagtaagtgttggtcaagattggcgagaatcagatgtcacaaacagaattccaatcattgtaacagggaacgatttttcaactctttacgctccactgatacgcgatggaaggatggataagttttactggc

SEQ ID NO: 116553 - DNA, 183 bp, Glycine max
ttagcgagctgatgctgacaagaatgacaaatctgtgaaggatctcgttctactactctttgagactgctcttctaacttctgggctcagccttgatgatcccaacactttcggtaacaggattcacaggatgctgaagcttggactgagcattgatgaagatgctggtgaagcagatgctga

SEQ ID NO: 116554 - DNA, 184 bp, Glycine max
aagagaactttgataagggactcatatacccaccattcaccaacatcagaaagatttcagcacacatagctgccaatgttgctgctaaggcttatgaacttggcttggccactcgccttcctcaacctaaagatttagtgaagtttgcagagagctgtatgtataccccagcctacagaagcta

SEQ ID NO: 116555 - DNA, 182 bp, Glycine max
attttattaataacccaatccattcttagaaaatatattctattaccttcattgataataactaaaaatattgctcgtatactattttttcaatttcccgaatggtcggaagattttagggattggaagagagaaatgtatattaaatgcacatataatggtgttcaattatccgaaagaga

SEQ ID NO: 116556 - DNA, 181 bp, Glycine max
gaagaaagaagaaaatccagcgaaagtaaaaccagcatccgaaaaagatgagcagcatcggaacaggttacgatctctccgtcaccactttctcccccgatggccgtgttttccagatcgagtatgctgccaaagccgtcgataacagcgggactgttattgggatcaagtgcaaagatgg

SEQ ID NO: 116557 - DNA, 183 bp, Glycine max
gggtaattgaacaggggcacccctcaaattgaagtgaccttcgaagttgatgccaacggcattctaaatgtgaaggcagaagacaagggaactggtaaatcagaaaagatcaccattacaaacgaaaagggacgtcttagccaggaagaaatagatagaatggttcgtgaagcagaagagttt

SEQ ID NO: 116558 - DNA, 183 bp, Glycine max
gacaaaaccatactccagggaatatgcagccttcccagctccttggctccgtactgcaaagttctggcctaccacaggacgtgttgataatgtgtacggtgaccgcaacctcatttgcacccttctcccagcatcacaggctgttgaagaacaagcagctgccacagcataatgtgttcaaat

SEQ ID NO: 116559 - DNA, 182 bp, Glycine max
aaggaagctgcctggggtctggctcgctatgcagcaattgctcaggacaatggattggtcccaattgtggaaccagagatcttgcttgatggggagcatggtattgacagaacttttgaagtagcaaaaaaggtctgggcagaggttttcttctaccttgctgagaacaatgtcctttttga

SEQ ID NO: 116560 - DNA, 181 bp, Glycine max
tcctaattgtttaaacctaattctcatttcttcatcgttcgattcttctcctcctaaagatgcagatcttcgtgaaaactttgaccggtaagaccatcacccttgaggtggagtcctccgacaccatcgataacgtgaaagctaagattcaagacaaggaagggatcccacctgaccagca

SEQ ID NO: 116561 - DNA, 181 bp, Glycine max
ccgccattgaattcttcttccatttctcttttttctgcatacccatttcgtttttcttcccaaatggccctttcttgctccaaagttttaagcttttatctctcgcccgttgtgggtggtggtgatgttccgaaaaagctcactttttcttcttttttgggtctttctaagggtgttggtg

SEQ ID NO: 116562 - DNA, 176 bp, Glycine max
tgtttgttgttgtaactcgttcttcttcttttgttgttctgtgtttgtgtttgttttttctctcacctgaaaatgtcttgctgcggtggtaactgtggttgcggaagctcctgcaagtgcggcaacggctgcggaggctgcaagatgtacccagacttgagctacactgagtcaac

SEQ ID NO: 116563 - DNA, 179 bp, Glycine max
cccactctttacgtttacaaagcaaaacccaattatagcaacaacataattaagaggttgagaaactctcttagcaagcttttggtgtactactatcctgttgctggcagattgagcatgacaaaaagtggtcgaatggaagtggattgtaacgctaagggagtgacattgattgaagc

SEQ ID NO: 116564 - DNA, 179 bp, Glycine max
gggagacaacatgattgagaggtccacaaaccttgactggtacaagggtccaactctgcttgatgcacttgaccagattagtgagcccaagaggccctctgacaagcccctcaggcttccccttcaggatgtgtacaagattggaggtattggaactgtgccagtgggacgtgttgaga

SEQ ID NO: 116565 - DNA, 181 bp, Glycine max
agccaccgtaccgtgttgcctctctgcaatctacagccaaaatgcctttcaagaggtacgttgagatcgggagggttgcccaaatcaactacggcaaggaatatggcaggctcgtcgtcattgtcgacgtcattgatcagaacagagctcttgtcgatgcccctgatatggtgaggtccca

SEQ ID NO: 116566 - DNA, 180 bp, Glycine max
ctctctcttccccatccttggctggcaaggccgtgaagctgggcccatcagcccccgaagtcgggagggtcagcatgaggaagaccgtcaccaagcaggcctcctccggaagcccatggtacggcccagaccgcgtcaagtacttgggcccattctctggcgagcccccgtcctacctca

SEQ ID NO: 116567 - DNA, 177 bp, Glycine max
ggaagttggaagtcatggcagcaacattgatggcagcaacaacaagttctggtactcttaaagcaactcctttccttggccaaggcaagggtgccaatgccaatgctcttagggatgttgtctccatgggaactgggaagtacaccatgggcaatgatttgtggtatggaccagaca

SEQ ID NO: 116568 - DNA, 178 bp, Glycine max
agcgagagaacaagaacataagggaaccacagcggcggtaacagaagaacaagcagagaatgggtcgagtgagaacgaagacggtgaagaaatcctctcggcaggtgatagagcgtcactactcgcgcatgaccctggacttccacacgaacaagaagcatctggaggaagtggcgat

SEQ ID NO: 116569 - DNA, 178 bp, Glycine max
tctctctcgacgacgggtcactatacgtcgacgtttcgggaggggcattatgggaagatgttctcaaacgctgcgtttcggagttccgcctcgcgccgcggtcttggaccgattacctcggcctgaccgtcggcgggacgctctccaatgccggcgtcagggccaggccttccgctac

SEQ ID NO: 116570 - DNA, 178 bp, Glycine max
gcaagaagaaagctgcaaccaacatacgttccaacaaggaacaaacagtgattcttgatacgccattggactatagtctggatgactgcattgaatacatccaagaagatgaactagtagaggtcacccccgcaagtatccgaatgtccaagaatccaaaaattacaaacaagaaaac

SEQ ID NO: 116571 - DNA, 179 bp, Glycine max
caatggcctcgacacaatgctttttgcaccaccacgccctcaccactccagctagagcttcaacacagcgcctagttctgagcaccaaaccaaaccacattgtttgcaaggcagcacagaagcaggttactgtccaagagggtgaggacactactactggccttgtctctcgcaggttg

SEQ ID NO: 116572 - DNA, 177 bp, Glycine max
agagcacaaagaggggttcctagacaaagtcaaggacaagatccatggtgagggcggcgccgccgagggcgagaagaagaagaaggagaagaagaagaaggagcatggccatgagcatggccatgacagcagctgcagcagtgacagtgattaaactgctgcatcacctatatattt

SEQ ID NO: 116573 - DNA, 175 bp, Glycine max
gaaagatctagcagtggactctcctcttccttggtatttgcctttagacaaaagtcatttctcactgagtagcttccgtctaactgctgtcgggcgacttttcaccaaaaacatggtcaaggttctggagtatgttggactggctccaaagggtagtctaagggttcaagatttc

SEQ ID NO: 116574 - DNA, 177 bp, Glycine max
catatctccatttccatttcctctctctcagtttccaagaatcttaagctatgggaaagtcttacccaaccgtgagcgctgattaccagaaggccgttgagaaggcgaagaagaagctcagaggcttcatcgctgagaagagatgcgctcctctaatgctccgtttggcatggcact

SEQ ID NO: 116575 - DNA, 108 bp, Glycine max
cccaaaccatcatatggaatggaccaatgggagtgtttgagtttgacaagtttgctgttggtacagaggctattgcaaagcagctggctgacctcagtggaaaggggg

SEQ ID NO: 116576 - DNA, 108 bp, Glycine max
ggaggaggctcgggactctgaccgcgtgcctgttgaagaatgagccggcgactcataggcagtggcttggttaagggaaaccaccggagccgtagcgaaagcgagtct

SEQ ID NO: 116577 - DNA, 104 bp, Glycine max
ggagtttcacagagaaacatgccgcaagatcaaagcactccaccaatatgattgcttgcgagccaataaatcaacatttgcttggggtctagaagcccgtgtac

SEQ ID NO: 116578 - DNA, 127 bp, Glycine max
aaagcacaaagcaaagctcatccttgagttaaaaaatggcagcagcttcttccatggctctctcatccccatccttggctggcaaggccgtgaagctgggcccatcagccccagaagtgggaagggt

SEQ ID NO: 116579 - DNA, 106 bp, Glycine max
tttgttgtacttaaactacattcccatttgtttttgctttatgagatttcatcatcctgtatttttggtttctgttttcggacttcaatggaaattaatggatgag

SEQ ID NO: 116580 - DNA, 112 bp, Glycine max
tagaagaacaagtagttgagaactaagaaggagaagcaaatggcttcctcaatgatctcttccccagctgttaccactgtcaaccgtgccggtgccggcatggttgctccat

SEQ ID NO: 116581 - DNA, 117 bp, Glycine max
tttcatgccataaacacacacacacacaaattctcagacccaaatcccaagtctcctaaaaccctaattcgcagtgaaaatgcgagagatcttgcacatccagggagggcaatgcgg

SEQ ID NO: 116582 - DNA, 127 bp, Glycine max
ccaaagcaaaaggttgaagatggtatctttggcacttctggaggatttggttttactaagcagaacgagctctttgtgggtcgtgttgctatgcttggttttgcagcatcattgttgggtgaaggaa

SEQ ID NO: 116583 - DNA, 124 bp, Glycine max
aacggctcagcggaggtagggtccagcggctggaagagcaccgcacgtcgcgtggtgtccggtgcgcccccggcggcccttgaaaatccggaggaccgagtgcctcccacgcccggtcgtactc

SEQ ID NO: 116584 - DNA, 126 bp, Glycine max
ctcataacacaaagcacaaagcaaagctcatccttgagttaaaaaatggcagcagcttcttccatggctctctcatccccatccttggctggcaaggccgtgaagctgggcccatcagccccagaa

SEQ ID NO: 116585 - DNA, 126 bp, Glycine max
aaggaaacgcagcgtttgctcagtgagccagcacctggtattagtgcctccccctctgaagagaatatgcgatatttcaatgtgatgatccttgggcctacccagtcgccttatgaaggaggcgtt

SEQ ID NO: 116586 - DNA, 134 bp, Glycine max
ggaccatcagccaaggactggagaggtggaagagctgcttcatttaacatcattcctagcagcactggagctgccaaggctgttgggaaagtcctccctgctttgaatggaaaattgactggtatggcattccg

SEQ ID NO: 116587 - DNA, 123 bp, Glycine max
gaaaaacaagtagttgagaactaagaagaaggaaatggcttcctcaatgatctcctccccagctgttaccaccgtcaaccgtgccggtgccggcatggttgctccattcaccggcctcaaatc

SEQ ID NO: 116588 - DNA, 126 bp, Glycine max
caaagacccagttcgcgttctcgtcactggagccgcagggcaaattggatatgctcttgtccctatgattgctaggggagtgatgctgggtcctgaccagcccgtgatcctccacatgcttgacat

SEQ ID NO: 116589 - DNA, 114 bp, Glycine max
aagtagttgagaactaagaaggagaagcaaatggcttcctcaatgatctcttccccagctgttaccactgtcaaccgtgccggtgccggcatggttgctccattcactggcctc

SEQ ID NO: 116590 - DNA, 111 bp, Glycine max
gccagcaagactgatcaggcagagataccgtgaagccgcagacttgatcaagaagggaaagatgtgtgctctcttcatcaacgatcttgatgcaggagctggtcgtcttgg

SEQ ID NO: 116591 - DNA, 100 bp, Glycine max
gtgacttgaactatcctttgatttctgatgtcaccaaatccatatcgaaatcttatggtgttctcattcctgatcagggaattgcattgagaggattgtt

SEQ ID NO: 116592 - DNA, 100 bp, Glycine max
ggatcttaaggcacagatctcaacacttgtagagaaaggcaaggagatgagcacggcagagactgaggcaggggatgaaggtcctattgtgactgacgct

SEQ ID NO: 116593 - DNA, 133 bp, Glycine max
gtcctaaaagagttattgtggcagttgctgctgcaccaaagaagtcatggatccccgctgtaaaaggtggtgggagtttcatagacccagaatggcttgatggctcgctaccaggtgactatggttttgaccc

SEQ ID NO: 116594 - DNA, 137 bp, Glycine max
ctgagcatgaggccaaatatttaatgttgttgccaaccccagaatgattgttagagttgcagacgtgcaaagagtacgataaggatgtgattttcgatcaatttgaaagaacttatccatttcttgcaattttagtt

SEQ ID NO: 116595 - DNA, 200 bp, Glycine max
gggaacttatgattttctgtatttaccgattgatttcaagaataaatgtaatgttggctatgcattcataaacatgattgatcctggtcaaattattcctttccaccaggcttttgatgtgaaaaaatgggagaagtttaatagtgaaaaagtagcctcacttgcctatgcccgaattcaaggaaaagcttctcttattg

SEQ ID NO: 116596 - DNA, 200 bp, Glycine max
gtgctaataacttaatcccaatggaaattgctctaaagattgctgaaaagataaaagcaaacgagagatttgcagtgtatgttgttattccaatgtggccagaaggtgttccaacaggggctgccacacaaaggattctattttggcagaataaaacaatgcaaatgatgtatgagacaatttacaaggctttggttgag

SEQ ID NO: 116597 - DNA, 198 bp, Glycine max
gttccgggcagaagaatggatcaggaggttgttttcttagtggaaggaaattgagggtgaaaaaggagagagcagcaattggtggacgatcgatgcgcacactgtagtgcccatcgatcgtcctccaattgctgagcctgacagacctctatggttcccaggcagcacccctcctccatggcttgatggcactctacc

SEQ ID NO: 116598 - DNA, 199 bp, Glycine max
tataattaacattcaccatggtctgttgccatcattcaagggtggtaatccatctaaacaggcctttgaagcaggtgttaaattaatcggtgcaacaagtcactatgtgactgaagaacttgacgcaggacctataattgaacaaatggttgagagagtttctcacagggataacttgcagagctttgtacagaaatca

SEQ ID NO: 116599 - DNA, 200 bp, Glycine max
aagtaaattaagaagatcattaatggcttctcttgcaaccttagctgctgttcaaccagctgcgctcaatggccttgctggaagttccctctctggaactaagctctctttcaagccctctcgccacactgtcaaatccaagaacttcaggagtggtgccgtggtagcaaagtatggtgacaagagtgtgtactttgatt

SEQ ID NO: 116600 - DNA, 196 bp, Glycine max
ctgaccagcccgtgatcctccacatgcttgacattcctccggcagcagagtcattgaatggggttaaaatggaattggtggatgctgcattccctcttcttaaaggtgttgttgccacaactgatgtggttgaggcatgcactggggtcaatattgccgtgatggttggtggattcccaagaaaagaaggtatgga

SEQ ID NO: 116601 - DNA, 195 bp, Glycine max
caaaaagactgccgcccagatcagccttcgctggggaattcaaaggaacactgtggtcattcctaaatcgtcaaaactggagaggttgaaagagaactttcaggttttcgattttgagttgtctaaagaggacatggagctcattggaagtatagatagaaaatatcgaaccaatcaaccagctgtgttttgggg

SEQ ID NO: 116602 - DNA, 194 bp, Glycine max
aaggaactggaaaaactcaacttggggtgcgttgtgatcagcgttggcaaaaagggtaactcgtttttcactcacagtataaataagaaacacccttttgtgaaagttgatagctttatcgaaattggtgggtttcctaccgcaaaggaggctcaggttatcgccgatgatgttttttcactgtttgttagtga

SEQ ID NO: 116603 - DNA, 193 bp, Glycine max
aaatggtgaagaataagacactgatattctcatttgattcaaccaagaaagctcgttttggtgtgctacctcggtatgctaaggatgaaaagcttattagatggtttgagttacccaactgcttcatattccacaatgccaatgcttgggaggaggaagatgaagttgttctgatcacatgccgccttcagaa

SEQ ID NO: 116604 - DNA, 195 bp, Glycine max
cttccattaacgggtggtgcctctcttccatctccccagccaaaacctctctcaagaaggccacattaggcccttctgtcttcgcaaccgttagcactccttcttctccttcttcttcttcttcttcttccttcccttctctcattcaagacaggcctgtctttgctgcccctgcccccatcatcaccccaactg

SEQ ID NO: 116605 - DNA, 199 bp, Glycine max
gcagcgtcactacaagcagcagctactttcatgcaacccaccaagttgagcaggagcaacactttgcagcaaaagtctactcagtccatttccaaggcttttggtttggaacctgttggagctaaaaaggtcacatgctcccttcaggctgatcttaaggacttggctcacaagtgtgttgatgctaccaaaattgcag

SEQ ID NO: 116606 - DNA, 194 bp, Glycine max
tgcggcgaatccgctgtgcgcgactcttactctgaattccattaatcaaactattgggtggttggattgggctaaagccgcaattgttcctggcttggcgtcgttggtgttggtgccgttgattttgtatgttatatatccgccgacattgaagagtagtcctgatgctcctaagcttgcgaaggagaagttgg

SEQ ID NO: 116607 - DNA, 197 bp, Glycine max
cggctcgaggaaacacttggcaccatttttaccttcacaccctgtgatagaaactggtggaattcctgcccctgacaaacctcaaccacttggtaccatcgctgctgcaccatggggctcagcactcatattgccaatctcttacacttacatagccatgatgggttctaaaggactcaccgatgcatcaaagatag

SEQ ID NO: 116608 - DNA, 194 bp, Glycine max
cctgcagtgaacaatggcctctgcatcagcatctcttctcaagtcttcacttgttcttgacaagtctgagtgggtgaagggacaaacacttcgccaaccttctgctgcatcagttgtgagatgcaaccccaccaccccatcaggcctcaccatcagagctggttcctatgctgatgagctcgttaagaccgcga

SEQ ID NO: 116609 - DNA, 199 bp, Glycine max
accccggcgtcgtgcttctcgacatcgcttttgtccccgacgaccccaaccacggttttcttctcgggacgaggcaaaccattctggagacgaaagatggaggaaacacttgggctccgcgttcgattccttctgctgaagacgaagatttcaactatcgattcaattctatcagcttcaaagggaaggaagggtggat

SEQ ID NO: 116610 - DNA, 197 bp, Glycine max
ctcatcaagggttgtgaaagcagagaagtgagatacactaagttatcctcataaatacactctaattaggtggcaagataagtgtctaaccttagtaacattgccacatattgtgttcattttggaattgtgccactaaaattctattcaattcatctatggctgcctcttcttatgctatgcaatcaatcctggca

SEQ ID NO: 116611 - DNA, 197 bp, Glycine max
atttcacttgagacagttatctttatctacgcaatagaagaatagtgtatggatatcaggttgatggatttggactctccattgttcaacactctgcaccgaatcatggatctgacagaggacgcagagaagaacttgaacgctccgacgcggacatacgtgcgcaacgcgaaggcaatggctgcgactcctgcgga

SEQ ID NO: 116612 - DNA, 191 bp, Glycine max
gcaattgaagttgaagtcttgcccttctctcttcaactccaaacacaagacatcatcatccatggctgcctccgtctccactgtcggagctgtcaacagagctcttttgaacctgaatgggtctggacctggggtttcagctcccagttcatccttctttgggagcagcttgaagaaggttattggctcaa

SEQ ID NO: 116613 - DNA, 191 bp, Glycine max
ggtgtatactactcagatgataagatgcttcagaccaggatattctcttatgctgattcacaaaggcacagacttggaccaaactatctgcaacttcctgctaatgctcccaagtgtgctcaccacaataatcatcatgaaggtttcatgaatttcattcacagggatgaggaggtcaattacttcccttc

SEQ ID NO: 116614 - DNA, 190 bp, Glycine max
gaccctgtgttttggccggttttcataatcgccacccttgctgcaattgcggggagccaagctgttataactgcaactgtctccatcatcaatcagtgtcatgcgcttggttgcgttccgcgagtcaaagttgtacacacctcaaaacatgtatacggacagatctatatcccagatatcaattggatac

SEQ ID NO: 116615 - DNA, 197 bp, Glycine max
caacagcacaaagcgggttactgtctgttcaagctaccatctctctctctctttcttagtgcctccttgccagaagttaaaatggcccaagaaactttcctattcacatctgaatcagtgaacgaggggcaccctgacaagctctgtgaccagatctccgatgctgtgctcgatgcatgcttggagcaggaccctga

SEQ ID NO: 116616 - DNA, 190 bp, Glycine max
cgatgagtcaatcgcgcgtttgacttcatcaggctcgctcaaacacatcgatttgatgttcttggaccactacaagcccgcttacacaaccgacctcaagctttgcgaagagctagggctcatcaccaaaggctcagtattggccgccgacaatgtcatcaagccaggcaatccgccatacctggagtat

SEQ ID NO: 116617 - DNA, 195 bp, Glycine max
cgcgtcgctgctccgtaccagtttcactgcataaatttgagagaaaactctgcaaacatgttggtttatcaggacctccttacaggtgatgagcttctctcggactccttccgttacaatgaaattgagaatggaatgctgtgggaagttgaggggaagtgggttgttaagggagcagttgatgttgacattggt

SEQ ID NO: 116618 - DNA, 194 bp, Glycine max
tggaagatttatcaaatgttgtttcagatgcctgtatatgtcttcagaacaacaacatacctttcaatgttcttatctctgactgtggaaagcaagtctatctgttaccacagtgttatgcagagaaacaagctcttggagaagtggatgctgagcttcttgacacccaagtgaatcctgctgtgtgggaaatt

SEQ ID NO: 116619 - DNA, 195 bp, Glycine max
cgttgccattctcatcctcctctgtctctctctctccaccattgccatggatccttacaagctccggccatccagcgccttcaattctcccttctggactacaaattctggtgctcctgtttggaacaacaactcctctttaaccgttggagctagaggtccaattctgcttgaggattatcatcttgtggagaa

SEQ ID NO: 116620 - DNA, 191 bp, Glycine max
gccgagggtgtggccaagaatgctccccttgagttccaaaacacaaagctcatgacacgtttgacctacactctggatgagattgagggaccctttgaggtgtcttctgatggcactgtcaagtttgaggagaaggatggcattgactacgccgccgtgacagttcagctaccgggaggcgaacgtgtgcc

SEQ ID NO: 116621 - DNA, 190 bp, Glycine max
ggcggggcgggtgcaggcccggttcgggtttggcaagaagaaagccgccgccccgaagaaagtttccagggggtcgggctctagctccgataggcccctgtggtatccgggcgccaaggcgcccgtgtacctggatgggagccttgtcggagactacggattcgacccatttgggctagggaagcccgcc

SEQ ID NO: 116622 - DNA, 188 bp, Glycine max
aagaaatttaagtgaggagctagagaatgatgatgaagtctgctatgtgtgcagtggtggttgtagcacttcttcttctggcggaggtggggcccatggctgaggctgtgacatgcaccccaacagagttgagtccgtgtcttccagcaatcacttccggtgctaaaccttccaatgcttgttgcacg

SEQ ID NO: 116623 - DNA, 189 bp, Glycine max
aaccaatggtactcacatgaacaaattaagccttggaccacaggctaacaaagatttgcatataagtgaggcactgcagatgcagattgaggtgcagagaaggctcaatgaacaacttgaggtacaaagacacttgcagcttaggatagaggcccaaggaaaataccttcagtctgtgttggagaaagc

SEQ ID NO: 116624 - DNA, 193 bp, Glycine max
gcactggaatttttcgcaccgattcaattcctgaacaggacgttgtcaagattgttgacaccttccctggccaatccattgatttctttggtgcactgagggccagagtatatgatgacgaagtgaggaagtggatttctggtgttggtgttgacggcattgggaagaagcttgtgaactcaaaagatggacc

SEQ ID NO: 116625 - DNA, 193 bp, Glycine max
caactttctcgttcgtcgatcacaaaaatggcggcgaaacttcaaatatttacgggattgccccccgcgccatttcaatcttcctcctccactctctgcgtactcaagaagcctctcactacctccttcttcggcactgcacgagtggaagttctgaaacttcgagtgatgaggattgcgaagctgcgcgcgg

SEQ ID NO: 116626 - DNA, 189 bp, Glycine max
gttgagaactaacaaggagccgcctctggcttcctcaatgatctcttccccagctgttaccactgtcaaccgtgccgttgccggcatggttgctccattcactggcctcaagtccatggctggcttccccaccaggaagaccaacaatgacattacctccattgctagcaacggtggaagagtgcaatg

SEQ ID NO: 116627 - DNA, 187 bp, Glycine max
gagaaaatggtttcggggtcagggatctgtgccaagagggtaattgtggacgcacgacaccacatgctggggaggctggcatcgatcgtggcgaaagaacttctgaatgggcagaaggtggtggtggtacgctgcgaggagatttgcatctccggtgggctcgtcaggcagaagatgaagtacttgc

SEQ ID NO: 116628 - DNA, 192 bp, Glycine max
ggttgatatcaagattgaggatgctcttggtaggaagtggcaatgctcaaccatacaggttgatttcaatctaccacagcgttttgacatcacatatgttgactcaaatactgagaaaaggaggcctataatgatccatagagcagtgcttggatcattggaaagattctttggcattctcattgagcatta

SEQ ID NO: 116629 - DNA, 192 bp, Glycine max
aaacaattacgactaccgttctccagcaattccagctatgaccacaacactgcttgaggatgtcaagaagatctccaagaccataactggaatcccatttctcatccctacaactggtactggtgcttgggagagtgctctcacaaacacactgtctcctggggatcgaattgtatctttcctgattggcca

SEQ ID NO: 116630 - DNA, 191 bp, Glycine max
gcattagcaaaagcaagaagaactagtctaagcagaaatggcctcttcagtgatggcatctgtggccctcaaacctgcccctttcactgttgagaagtcctcagttagaggccttccctccctctcaaggaactcctcttcattcagagttgtggccagtggtggcaagaagatcaagactgacaagcctt

SEQ ID NO: 116631 - DNA, 192 bp, Glycine max
atagactccaacctactgaagttgctcattccggtggctgtgtgccatgcattaggccacgtgaccagcaatgtctcatttgctgcagttgctgtttctttcactcataccattaaagctcttgagccattcttcaatgctgctgcttcacagttcatacttggccaatcaatccccatcactttgtggctg

SEQ ID NO: 116632 - DNA, 192 bp, Glycine max
aaaggactcaccgatgcatcaaagatagccattttgaatgcaaactacatggcaaaacgattggagaattattatcccgttcttttccgtggagtcaatggaacagttgctcatgaattcatcattgacctgagaggctttaagaatactgctggaattgagcctgaagatgttgcaaagcgcctcatggac

SEQ ID NO: 116633 - DNA, 192 bp, Glycine max
gaacaagtagttgagaactaagaaggagaagcaaatggcttcctcaatgatctcttccccagctgttaccactgtcaaccgtgccggtgccggcatggttgctccattcactggcctcaagtccatggctggcttccccaccaggaagaccaacaatgacattacctccattgctagcaacggtggaagagt

SEQ ID NO: 116634 - DNA, 187 bp, Glycine max
gagctggaagatttggcaccaaaggccttgcaatcacatttgtttcttgttctactgatgtcgatgttctcaacaatgttcagtctaggtttgaggtggataaagcagcttcctgagcagattgatacctctacctatatgccatcgtagatttttttgggagcaatgttagatgcttggtggcatg

SEQ ID NO: 116635 - DNA, 199 bp, Glycine max
atgcttttcacgcatctcctcaaatagtttgctcgaaagattctgttgaggaacttcgcctatgcttttataaggacttccagccacgagattgtgctcttggatctgacattaaaatcaacatggttacttctaaaaaatcttgtccaaatatgttagcttgccggagccggtatcagtgagtaagacaggcacaatg

SEQ ID NO: 116636 - DNA, 196 bp, Glycine max
attttatccaattgaaattttaaaaatgactgggataaacttaagaattcaattattgaaattgaataagtaaacaatttaattggattggtcgaatggtatcaaaaaaatggagtactaactcccatttcttatttattattgaattaaccgatcaacttgctttgttatcgaacatttcttttcgatttcaaaa

SEQ ID NO: 116637 - DNA, 200 bp, Glycine max
ggagtgtgaaacaatgctggaccaccttttccctgtgaatgatcctgctccagtttccactgagacaactccccaagctgaaggttttgatccttcaacttcaaccactaccaagagtgatggtttggtgattccgaaggaattagctgagatcgagtacatggagagcctttatatgaagagtactgtatcagcattgc

SEQ ID NO: 116638 - DNA, 201 bp, Glycine max
caattacaaattacactctttgcctcgcaccttcaacttaaccttttctactcataatcttaacaacttgctagaagaagataaagaaagagaaaaagtgtgtgtgtgtgagagagagcaatggctggctcgtgggcacgccgttctctgattgttctggctatcatttccttcggatgtttatttgaaatttccattgca

SEQ ID NO: 116639 - DNA, 201 bp, Glycine max
caaggatcagctgcgcaggtcacttccaccatgcttaagaatgagggtgttgctgccttctataagggtctatctgctggattactcaggcaggctacatacaccactgcccgtcttggatcatttaaaatcttgacggccaaagctattgaggctaatgatgggaagcccctgccactgtatcagaatgctctgtgtggg

SEQ ID NO: 116640 - DNA, 203 bp, Glycine max
tgcaattgaagttgaagtcttgcccttctctcttcaactccaaacacaagacatcatcatccatggctgcctccgtctccactgtcggagctgtcaacagagctcttttgaacctgaatgggtctggacctggggtttcagctcccagttcatccttctttgggagcagcttgaagaaggttattggctcaagggtccccaac

SEQ ID NO: 116641 - DNA, 205 bp, Glycine max
cgcttgttctttccgacgggaagaagggtggcaagaagaaggcagctgatccctttgccaagaaggattggtatgacattaaggctccttctgtttttcaagtgaaaaatgttggcaaaaccctcgtctctcgtactcagggtaccaagattgcttctgaaggactcaagcatagagtgtttgaggtctccttggctgatcttca

SEQ ID NO: 116642 - DNA, 205 bp, Glycine max
gaaaaacttagctactaaggaaggatcaaagagaatggctcaagcaatggcatcaatggctggcttgcgtggttcctctcaggctgtgttggaaggtagccttcaggtgagtggctccacacgcttgaatgtggggagtggaagcagggtggcctcagtcacacgtgcagggttcacagttagagcacaacaacaacaagtgagt

SEQ ID NO: 116643 - DNA, 205 bp, Glycine max
ctccaatccaacttcacagtctgagtgtacagctgaagaggcttacgaatggagtgagggtcgtgcgattttcgctagtggaagtccatttgatcctgtagaatacaagggcaaagtgtactattctggccaggccaacaatgcatacatcttccccggctttggtcttgggttggtaatctcaggagcaatcagagtgcatgac

SEQ ID NO: 116644 - DNA, 198 bp, Glycine max
ctgacttgaacagtgcaacattggagtctgatgttgatgttgttgttgcacctccctttgtgtacatcgatcaggtgaaaaactcaattacagataggattgaaatttctgcccagaattcttgggtgggaaaaggtggggctttcacgggagaaatcagtgtggagcaactaaaagaccttggctgcaagtgggtta

SEQ ID NO: 116645 - DNA, 199 bp, Glycine max
attccattctctctgtgtatttccctacctctcccttcaagatgcagatcttcgtcaagaccctcaccggcaagaccatcacccttgaggtggaaagctctgacaccatcgacaacgtcaaggccaagatccaggacaaggaaggaatccccccggaccagcaacgtctcattttcgccggaaagcaacttgaggacgg

SEQ ID NO: 116646 - DNA, 199 bp, Glycine max
ttttgccacattacacaagaactctccaaggatcctccttcccacgaaattcatttggtgggaaaatccaagaagagggtggaatttcaagccagggaagatggattatttcaatgcaccaggaagaaaccatctctttgttccggggccggttaacatcccggaccagatcattcgggccatgaacagaaacaatgag

SEQ ID NO: 116647 - DNA, 202 bp, Glycine max
ccaaaaccatccaactctcatgttcgaagaaaacatacacaatctcttcaaactctaattttcttttcctttcatttaatttcctcaatggcggcttccgtcgaccagcgtccgtaccccggcctccacaatggcgtcgttcggcccctcaaaccaggcccggatatcccgcgtcccaagaagctaccccagccgccgccgc

SEQ ID NO: 116648 - DNA, 197 bp, Glycine max
aaaacagcatcgaacccgtcgtagcagaaaaacttgtcaccatggtttcttccgacaaggatccacgagaggatgtccttcaagcctggtacatggatgatagtgatgaagatcaaagactcccccaccacaaagaacccaaggagtttgtctcgttggaccaacttgctgaacttggagtccttagctggaaacta

SEQ ID NO: 116649 - DNA, 198 bp, Glycine max
gtacccaggaagcagtgaacaagagagttgcacagattaggaacctaattgaggctgctgagcaagagtatgagaaagaaaagctgaatgagagaattgctaaattatctggtggtgtggctgtcatacaggttggtgcacaaactgagactgagctcaaggaaaagaaattgagagttgaagatgctcttaatgcta

SEQ ID NO: 116650 - DNA, 198 bp, Glycine max
gaaaagtgtaacgataagtaggtaatatatttgtatttaccgaaaatgagatgtattttttctaactgcattcctactttactctattacaaatctcattcacctcttcatttcaaaacatacagcctgtaacatcggacaagtcactcaatacacaataatctgtgctacatgttggctgaccataaagatacgttg

SEQ ID NO: 116651 - DNA, 196 bp, Glycine max
atctattctgaactatcatcttctcccattgcagctgcatctcttggacaggtatacaagggtcgcctaatggaaaatggggatttggtagctgttaaagtgcaaagacctttcgttcttgagacagttacaattgatttatttattattaggaacctgggtttggctcttcgaaagtttcctcaggtctccattg

SEQ ID NO: 116652 - DNA, 196 bp, Glycine max
ggggataagattaaagattcaacaatggcctctgcttctgctactcttctcaagtcatctcctgttcttgacaagtgcgagtgggtcaaaggccagacccttcgccaacctctcgtgagatgtaacccttcctcagcatcagctctcaccatcaaagctgcttcctatgctgacgagctcgtcaaaaccgccaaaa

SEQ ID NO: 116653 - DNA, 196 bp, Glycine max
acttcattcaacatttctccccttagcttgtttcaccaatggctgctgcggttagtgctgcagtctcttttccatccaccaagtctacctctcttccaagcaggacctccctcattgccccagagagagttgtgttcaagaaggcttcattgcaaaacagagatgtttctagcagtggacgggtagtttccatcag

SEQ ID NO: 116654 - DNA, 199 bp, Glycine max
cgcttgagctctgcgagatcttgagtcgccgatttgaaaagatgagtaagcttcagagtgatgctttgcgtgaagccatctcaggaatcatggccgattccaaggagaagaatcgcaaatttgtggagaccatcgaactccaaatcggtttgaagaactacgatccacagaaggacaagcgttttcatggctccgtcaa

SEQ ID NO: 116655 - DNA, 200 bp, Glycine max
agaagatcatggcttctctagcaaccttggctgctgttcaaccagctacgatcaatggccttgctggaagttccctctctggaactaagctctctttcaagccctctcgccacagtgtcaaatccaagaacttcaggagtggtgccgggtagcaaagtatggtgacaagagtgtgtactttgatttggaggatctgggca

SEQ ID NO: 116656 - DNA, 198 bp, Glycine max
gaaaaacaagtagttgagaactaagaagaaggaaatggcttcctcaatgatctcctccccagctgttaccaccgtcaaccgtgccggtgccggcatggttgctccattcaccggcctcaaatccatggctggcttccccacgaggaagaccaacaatgacattacctccattgctagcaacggtggaagagtacaatg

SEQ ID NO: 116657 - DNA, 192 bp, Glycine max
gaaagttgttgtaaagccttgttgctgccatggccacccacgcggctcttgcttctacaaggatcccttcaaacacaaggttcccatccaaggcctctcactctttcccaacccaatgcgccttaaagagacttgaggtgacagaattctctgggcttagatccacttcatgtgtcacatatgctaacagtg

SEQ ID NO: 116658 - DNA, 194 bp, Glycine max
ggaagctgaagcggctgctaagcagttcaatggctatgaacttgatggaagatcattgagagtgaattctggaccacctcctgctcggaatgagagtgctcctcggtttagaggtggttcttctttcggttccagaggtggtggtccttcagatagtgaaaaccgtgttcatgtaggtaatcttgcttggggtg

SEQ ID NO: 116659 - DNA, 197 bp, Glycine max
gctggattatgttcagtctgtggtgaagaaagttttgggactggttctgaccatattcgtgagaaagatggaatctgggcagttttggcctggctatctatacttgcatataaaaataaagataaacttgaagacaagcttgtcactgttgaagacatagttcgccagcattgggctacttatgggcgccattatta

SEQ ID NO: 116660 - DNA, 200 bp, Glycine max
ctgtcattgccttccagacctatgcagttggaagcagtggaggatacaagaagggtgtgacagaagcaaaactgaaggttgccataaacgggtttggaaggattggaaggaacttcttgaggtgctggcacggtcgcaaagactcacctcttgatgtcattgccatcaacgacaccggcggcgtgaaacaagcctctcac

SEQ ID NO: 116661 - DNA, 199 bp, Glycine max
gagctggaagagtggtggagaaatgagcagttctggctgattggagggaccagtgcccatctagctgctgtgcttcaaggtttgctcaaagttgtagcagggattgaaatctcattcaccttgacttcaaaatcaggtggtgatgatgtagatgatgagtttgctgatctctatattgtgaaatggacatcccttatga

SEQ ID NO: 116662 - DNA, 202 bp, Glycine max
caacttgctccctcagaagcgaagaagaagccacagagaaccagtctcctactctctctcacccacaagaaaaatggcatctcacatcgttggatacccccgcatgggtcccaagagagagctcaagttcgctctcgagtctttctgggatggcaagagcagcgccgaggatttgcagaaggtggctgctgatctcaggtca

SEQ ID NO: 116663 - DNA, 204 bp, Glycine max
cctcactacaagctgcagctaccttcatgcaacccaccaaggttggcatagcctctcgcaacctcaaatctacacaatgcatttctaaggcttttggcttggaacctgctgcagctaaactcacttgctcccttcagcctgatctcaaataatttgctcaaaaatgtgtcgacgctaccaaaattgcaggattcgcccttgcca

SEQ ID NO: 116664 - DNA, 194 bp, Glycine max
ctgtttctgtctctgtgtttgcggctgaggattccgaacgagcgaccttcttcgtttctcgcaaagtttaagtcatcatgggtaaggaaaagactcacatcaacattgtcgtcattggacatgtcgactctgggaagtcaataccactggtcatttgatctacaagcttggaggtattgacaagcgtgtgattg

SEQ ID NO: 116665 - DNA, 192 bp, Glycine max
atttggcatatgaatgtggcaagcatgttcttgtgatactaactgatatgagttcttatgctgatgctcttcgtgaggtatctgctgcccgagaagaagtacctggtagacgtgggtatcccggctacatgtatacagatcttgcaacaatatacgaacgtgctggaagaattgaggggcgaaaaggctcta

SEQ ID NO: 116666 - DNA, 191 bp, Glycine max
cccgagcacagagaagaggaggaggcacccgccgttggcgacgacgaggacaccggagctcacgtcgctccaatcgtcaagctcgaggaggttgctgtcaccaccggcgaggaggacgaagatgcaatcctggatctcaaatcgaagctttaccggttcgacaaggacgggaaccagtggaaggagcgtgg

SEQ ID NO: 116667 - DNA, 199 bp, Glycine max
aacacaaagcccaaagcaaagctcatccttgagttaaaaaatggcagcagcttcttccatggctctctcatccccatccttggctggcaaggccgtgaagctgggcccatcagccccagaagtgggaagggtgagcatgaggaagaccgtcaccaagcaggtctcctcaggaagcccatggtacggcccagaccgagtc

SEQ ID NO: 116668 - DNA, 194 bp, Glycine max
aacaataatgagatcactgttttagtaaatgatgcggaaaagggtagtgacattgatccacaagaagcacagcaaactcttgaaatagcagaagctaatttgaataaggcggaaggcaagagacaaacaattgaggcaaatctagctcttagacgagctaggacacgagtagaggctatcaatgtgatttcata

SEQ ID NO: 116669 - DNA, 194 bp, Glycine max
tgacgaagtgaggaagtggatttctggtgttggtgttgacggcattgggaggaagcttgtgaactcaaaagatggacctccaacctttgagcagcccaagatgactctggagaagctcttgacgtatggtaacatgcttgtccaagaacaagagaatgtcaagagagtccaattggctgacaagtacttgaacg

SEQ ID NO: 116670 - DNA, 190 bp, Glycine max
gttggattggaaggaactacactactcaaatataagatcccaacccgtggccttcttggattgcggaattcaattttaactgcctcccgagggactgctattctcaacactgtttttgatagctatgggccttgggctggtgaaattagtactcgggatcaaggctcattggttgcttttgaggatggaa

SEQ ID NO: 116671 - DNA, 193 bp, Glycine max
gaggcacccaagcccaagcccaagaatcctcttgatcttcttcctccaagcaagatgatcttggatgagtggaaaagactctactcaaacaccaagaccaacttccgggaggttgcaatcaaaggattttgggacatgtacgatccagagggatattctctgtggttctgtgattacaaatacaatgatgaga

SEQ ID NO: 116672 - DNA, 196 bp, Glycine max
catattaaatattaaatagaaaaaatggcccgatcatttatcaaaggccaatcttcggtagaagagaaggttcctttggaacacttatttctatttcagtataccgggtctctttctttcatttcaaaaaatttatagaatatcgattttgaaatgaaagaaaagtgtggggataaatataaatgacaaaaagata

SEQ ID NO: 116673 - DNA, 197 bp, Glycine max
caaggttgccaactaccctccatgccccaacccagagctggtgaagggtcttcgtccccacactgatgccggtggaattatccttctcttccaggatgacaaggtcagtggactgcagcttctcaaagatggccagtgggtttatgtgcctcctatgcgccactccattgttgttaacattggtgatcagcttgagg

SEQ ID NO: 116674 - DNA, 169 bp, Glycine max
agcaggtagttttctggaggaacagcaacaggggcaacagcagcagcagaagaagctatgtgataacatgtgcagcaggtgactcacagacagtggtgattggtcttgctgcagactcagggtgtgggaagagcacttcatgaggaggctgacaagtgtgtttggagga

SEQ ID NO: 116675 - DNA, 264 bp, Glycine max
cttcctctctgcagagtgcagagctttctctccccgttgcttcattcattctcaacaacaaaccaatctttcttagaaaatgagggggggcttgtggcaacttgggcaatcgatcactcgccgtcttgccctggagataagaaggctgttgctcgtcgatgttttgcctcagaagctgagctgaaaaagacagtgtttcatgacttccatgttgctcatggtgggaagatggttccatttgctgggtggagcatgccaatccaa

SEQ ID NO: 116676 - DNA, 165 bp, Glycine max
gctttcccaggctgagcatggtcctgatagtcaggttgtgcttgtgatttctggtgaaggtgtggatctgaatgttatagaagaggaactcaacaagcagtgccagagtctcccaagaggagagtttgctgtaaggccctaagccacagttttattgtttatgca

SEQ ID NO: 116677 - DNA, 261 bp, Glycine max
  unsure (1)..(261): unsure at all n locations
cacatctccaagaacttcatgacctggnccaacatcaaggttcctctcattcttggtatctggggaggcaagggacaaggaaaatctttccagtgtgagcttgtctttgccaagatgggaatcaaccccatatgatgagtgctggagagttggaaagtggaaatgcaggagagccagcaaactgatcaggcagagataccgtgaagctgcagacatgatcaagaagggaaagatgtgcgctctcttcatcaacgatcttga

SEQ ID NO: 116678 - DNA, 164 bp, Glycine max
ccaaatttccatggcttctgcggatgttgaataccgatgctttgttggtgggctcgcttgggccactgacaactacgatctggagaaagccttctctcagtacggtgacgtcgttgaatcgaagattataacgatcgtgagactggaagatccaggggatttgg

SEQ ID NO: 116679 - DNA, 252 bp, Glycine max
gcggcgtggtgttatacggcggagctccacgtggcagcgtcgtgcctcttcttctcagccgccgcagagtttctctttgcgcctcttcttcttcttactcctccatttctgaccacgtttctttcgtgaggatgtagctgcgactcagcctcctcagcatctttcacaactcctcagtattctgaagaccagaggtgaatctattatctccccgggtgccaggcaaggattaattcctcttgctatacaact

SEQ ID NO: 116680 - DNA, 162 bp, Glycine max
agactgcataccccaacggcttcatccgtatcatcggattcgacaacgttcgccaagtgcagtgcatcagcttcatcgcctacaagcccccaggcttctaagtgtgaaaaatttgcaaagcgtttgtagccgcaccccactttgtttgtttgtacttaaact

SEQ ID NO: 116681 - DNA, 259 bp, Glycine max
ccaacctctcgtgagatgtaacccttcctcagcatcagctctcaccatcaaagctgcttcctatgctgacgagctcgtcaaaaccgccaaaacagtggcctcaccggggcgtggtattttggcgatggagagtcaaatgcaacctgcgggaagcgtttggcatctattgggttagagacacagaagctaatcggcaggcataccgtaccctacttgtgacagtacctggtcttggtgaatacatctctggtgccattct

SEQ ID NO: 116682 - DNA, 261 bp, Glycine max
agactgcataccccaacggcttcatccgtatcatcggattcgacaacgttcgccaagtgcagtgcatcagcttcatcgcctacaagcccccaggcttctaagtgtgaaaaatttgcaaagcatttgtagcgccaccccactttgtttgtttgtacttaaactacattcccatttgttttgctttttgagatttcatcatcctgtatttttggtttctgttttcggacttcaatggaaattaatggatgagaactaatgaat

SEQ ID NO: 116683 - DNA, 163 bp, Glycine max
agcaaaaggccatataatttttttttatttgaaataatgtccgggatcatccacaagattgaggagaccctccatgtgggagggcacaagaaagaggagcacaaaggagaacaccatggtgagcacaaagtgaacacaaaggggaccaccatggtgagcacaa

SEQ ID NO: 116684 - DNA, 260 bp, Glycine max
gctttgaatggaaaattgactggtatggcattccgtgttcccaccgtggatgtctctgttgttgacctcacggtgaggctggagaaggaagcctcatatgatgaaattaaaaatgctatcaaggaggatcagagggcaagttgaagggaattcttggttacactgaagatgatgtggtctccaccgactttgttggtgataacagatcaagtatttttgatgcaaaggctggaattgcattgaataagaattttgtgaag

SEQ ID NO: 116685 - DNA, 251 bp, Glycine max
gggacaaacccttcgccaaccttctgcatcagttgtgagatgcaaccccaccaccccatcaggcctcaccatcagagctggttcctatgctgatgagctcgttaagaccgcgaaaacagtggcttcaccgggaggggtattttggccatggatgagtccaatgctacctgtgggaagcgttggcttcaattgggctagagaacactgaagctaaccgccaggcataccgtaccctcctcgtgacatttcca

SEQ ID NO: 116686 - DNA, 260 bp, Glycine max
caacgacaccggcggcgtgaaacaagcctctcaccttctcaaatacgattccatcctcggaaccttcgatgctgatgtcaagcctgttggcagcaatgtcatctccgtggatggaaaggaaatcaaattgtttctgaccgcaaccctgccaaccttccttggaaggacttggggatagacttggtgattgaaggaaccggggtgtttgtagacagagaaggtgcagggaaacacattcaagcaggagctaagaaggtgct

SEQ ID NO: 116687 - DNA, 259 bp, Glycine max
ctgctacatatcgtgtgcattttggaattgtgccactaaaattctattcatctatggctgcctcatcttatgctatgcaatcaatccttgcaaaccctatgatccgcatttccagcgggtctagggaaaccattttggtgttcctgcttatcacatgagaaggaatgttggcctgagagttaggtccatggctgaggaagagcaaccaagtcagcctgcgaccccagttacaccaccaccagcagaacccaaaccacag

SEQ ID NO: 116688 - DNA, 257 bp, Glycine max
cttgtccaagaacaagagaatgtcaagagagtccaattggctggcaagtacttgaacgaggctgctcttggaaatgctaacgaggatgctattcagaggggaactttcttccagtcttgaattggagcaaagcaaacttggcaagtaaatatttctgttcgtgaaggttgttgtactaatccaagtgctagaagttgtgatggaacttgcgtgtaacattcttagcattctcaatgtcttaggtgcaaagagaagat

SEQ ID NO: 116689 - DNA, 241 bp, Glycine max
aacgaaacatggcaagagtggtggcactccaacagaaccaactatctttctctaccttagcttcctctctttctgacttcagtggaaccagacttcaaactcaacttcagttcaagagaaagcaagccatccaaaagggtctttctacgtctccgcatcgagcaccaagaaaatctaataatgggaggcaccaggtttattggtgtgtttttgtctaggctccttgtcaaagagggtcacc

SEQ ID NO: 116690 - DNA, 254 bp, Glycine max
ttgtcgttctgaacggaaaagcactggcgcagtaccctgaggcttctcttctcttctcttctctgtcgtgagtcaccatggtgagggttagtgtgctgaacgatgctctgaagagcatgtacatgctgagaaaaggggaaagcgccaagtcatgattaggccatcctccaaagtcattatcaaattccttttggtgatgcaaaagcacggatacatcggagagtttgagtatgttgatgaccacagggctggta

SEQ ID NO: 116691 - DNA, 289 bp, Glycine max
cacgcgtacgcggacttcggattcggctcgacgtagttgagatctaagaaggagaagcaaatggcttcctcaatgatctcttccccagctgttaccactgtcaaccgtgccggtgccggcatggttgctccattcactggcctcaagtccatggctggctccccaccaggaagaccaacaatgacattacctccattgctagcaacggggaagagtgcaatgcatgcaggtgtggccaccagttggcaagaagaagtttgagactctttcctacctgccagaccttgat

SEQ ID NO: 116692 - DNA, 261 bp, Glycine max
ggagaccaggttgaagctcttcaaggattacttcgttgacgagaggaagaagcttggaagcataaagagcagcaataacaatgaactaaaatgcgctattgaccacattttggatgcccagagaaaagcgagatcaacgaagacaacgtcctttacattgttgaaaacattaatgtcgtgcaattgagacaactctatggtcgattgaatggggcattgctgagcttgtgaaccacccagagatccagcagaaggtgaggg

SEQ ID NO: 116693 - DNA, 183 bp, Glycine max
gtcaagtgctccggttgcatggctatttaaagacaactatgcacattatggtcttagtaaagcacgagttgtcttcacaattcataaccttgaatttggagcccattccattggaaaagctatggctatgctgacaaagctacaactgtctctcccacatattcaagagagattgtggtaatc

SEQ ID NO: 116694 - DNA, 242 bp, Glycine max
ctcataacacaaagcacaaagcaaagctcatccttgagttaaaaaatggcagcagcttcttccatggctctctcatccccatccttggctggcaaggccgtgaagctgggcccatcagccccagaatgggaagggtgagcatgaggaagaccgtcaccaagcaggtctcctcaggaagcccatggtacggcccagaccgagtcaagtacttgggcccattctctggcgagctcccgtcctac

SEQ ID NO: 116695 - DNA, 256 bp, Glycine max
attttacttgcaagatggcagcgtcatcagcatgccttgtagggaatggtttatctacacggggtaatagaataactctcaagaaggacttcaatggaagatatctctactcaccttggagacttcatcattgaacaataaggcatcagaagcattttccataaagtcttccttggagcaaaggcaacaacaagaagggagaagggggtttctaaaactgttgcttggaaatgtgggagttggtttgcctgcacta

SEQ ID NO: 116696 - DNA, 251 bp, Glycine max
gggaatcgggttaaaattcctgaaccgggacgtggcggctgacggcaacgttagggagtccggagacgtcggcgggggccccggaaagagttatcttttctgtttaacagcctgcccaccctgaaacggctcagccggaggtagggtccagcggctggaagagcaccgcacgtcgcgtggtgtccggtgcgcccccggcggcccttgaaaatccggaggaccgagtgcctcccacgcccggtcgtactcat

SEQ ID NO: 116697 - DNA, 256 bp, Glycine max
caactacaaaggttgctgtaggagataagatattgaagtagtgctaagtgcctaacacctgcagtgaacaatggcctctgcatcagcatctcttctcaagtcttcacttgttcttgacaagtctagtgggtgaagggacaaacacttcgccaaccttctgctgcatcagttgtgagatgcaaccccaccaccccatcaggcctcaccatcagagctggttcctatgctgatgagctcgttaagaccgcgaaaacag

SEQ ID NO: 116698 - DNA, 250 bp, Glycine max
tttcttcgttccttccccaacccaatcttcgccttcgcccacaacaactcctccttcaggatcgctgccaacgttactttccatttttacccttcatcctcgagaaaaaaatggcgaacgcacatctggtatggccgtccatgatgagtgcaagctaaagtttctggagctcaaggcgaagaggacgtaccggtatatcgtttttaagattgaggagaaatcgaagcaagttattgtggagaagctgggt

SEQ ID NO: 116699 - DNA, 252 bp, Glycine max
ctttgaggagggccctcattctaattttgctggaccaacttcaggaagcactgcatgtgttgcaattattagaaacaacaaactttttgtagcaaatgccggtgattcacgttgtgtagtatgaggaagggtcaggcgtatgatttgtcgatagatcataaacctgatcttgagattgagaaggaaagaatcgtaaaagctggtggttttattcatgcgggacgagttaatgggagtttaagccttgcaaga

SEQ ID NO: 116700 - DNA, 258 bp, Glycine max
cggagtccactgagcttgaacagctctggagctggagcttcagttcccagttcagccttctttggcaccagcttgaagaaggttattgcctcaagggtccctaacgtcaagatttcttctggaagttcaaaatcgttgccgcggaaaaagagattgatgagaaacaacagacagacaaggacagatggaaaggtcttgcctatgatgtttcagacgaccagcaagacatcacaagagggaagggtttggttgattccc

SEQ ID NO: 116701 - DNA, 241 bp, Glycine max
gctctgccactcttaacggcaaccacaagctcactgatgctgttcttgctcccacgaaagactggaggaaagaaggaatagtgagtgatgttaaagatcaaggcagctgcgatcatgctggacattcagcacaactggggctttagaagcagcctatgcaaagcatttgggaagagtatctctctttctgagcagcagctagtggattgtgctggccgtttcaacaactttggctgtaatg

SEQ ID NO: 116702 - DNA, 253 bp, Glycine max
gttttgaagtttttaggatttatgtggaatcctctttcatgggtcatggacgctgcagcaatcatggccattgctttggccaatggaggaggcaaacctcctgattggcaagactttgttgggttatcacactccttattatcaattcaacaataagtttcattgaggagaaaatgctggtaatgctgccgcagctctgatggctcgtctagcacctaaagctaagttccttcgagatgggaaatgggttgag

SEQ ID NO: 116703 - DNA, 256 bp, Glycine max
gttgagaactaagaagaaggaaatggcttcctcaatgatctcctccccagctgttaccaccgtcaaccgtgccggtgccggcatggttgctccattcaccggcctcaaatccatggctggcttcccacgaggaagaccaacaatgacattacctccattgctagcaacggtggaagagtacaatgcatgcaggtgtggccaccaaatggcaagaagaagttcgagactctttcctacttgccagacctcgatgatg

SEQ ID NO: 116704 - DNA, 255 bp, Glycine max
gttgtaactcgttcttcttcttttgttgttctgtgtttgtgtttgttttttctctcacctgaaaatgtcttgctgcggtggtaactgtggttgcggaagctcctgcaagtgcggcaacggctgggaggctgcaagatgtacccagacttgagctacactgagtcaaccaccacgagaccttggtcatgggagtggcacctgttaaggctcaatttgagggtgctgaaatgggtgtgcccgctgagaacgatggct

SEQ ID NO: 116705 - DNA, 177 bp, Glycine max
ctcgagccgattcggctcgaggacgcagaaggttcatccaatctccgaatcctttaatcggattgcaaccatgtcgaggagaaaggtcagagagccaaaggaggaaaacgtgactcttggccagctgttagagatggcgaacatgtctttggcgtcgctcgcatatttgctccttta

SEQ ID NO: 116706 - DNA, 179 bp, Glycine max
gaaaaacaaaagagtagtggcctttaggtggtgaagaacaagagctcaaatcaaatcgaatcgaaaaaagaaagaaagatcatattcatggcgatggcaagcctggctcgacggaagggttacgccgtcgttttgtcgtcgaggtcgtcgttttgtctgacaagctggaggggattcgc

SEQ ID NO: 116707 - DNA, 258 bp, Glycine max
gtgaaattgagaatagatcatcattcctcttagctgtgaaagctgatgtagaaacacaaggtgattttgtcatgtccttggcagctgaagttcgagcagcctccttctcagatattaatgactggtggcctttgtgaactggctagatgaggaactttccttcttggttgacgaacgagccgtcctcaagcactttgactggcctgaaggaaaagcagatgcactaagggaggcagcttttgaatatcaggatttgat

SEQ ID NO: 116708 - DNA, 180 bp, Glycine max
cttcctctgcacaatctccttcaaaaagcttctcatccatggcgaaaacgctcatttcgtctcaatcgttcatcggcacaccgctcccctcactccctcgccaccacctcccccaccgcaccagctcgtcgccaccaaagtcctcgtcagcctccacgaaattcccccaatccattccat

SEQ ID NO: 116709 - DNA, 253 bp, Glycine max
tgcaacaatagacctgatgagaccgaatgccaaattaaatgtggggacctgtttgaaaacagtgtggttgatgaattcaatgaatgtgcagtatcacggaagaaatgtgtacctaagaaatctgatgtgggagaatttcctgctccaaatcctgatgtccttgttaatagcttaacattgctgagttcagtggcaagtggttcatcactagtggcttaaatcctaccttcgatacctttgactgccaattaca

SEQ ID NO: 116710 - DNA, 180 bp, Glycine max
caactttgcccccttgtaaaacttcttattgtgatgtctaaaagcgaagacttgaagcttttgggaggctggttcagcccatttgccctgagggtgcagattgcccttaacctcaagggtctagaatatgaggttgttgaagagaccttgaatcccaaaagtgacctgcttcttaagtcc

SEQ ID NO: 116711 - DNA, 255 bp, Glycine max
  unsure (1)..(255): unsure at all n locations
caacaagataaatggaatggatatttccctgtcaaatggcacattataaaggatgttccaaatcctcaactacggcatataatactcgagaataatgatcacaagcctgttacaagcagtagagacacacaagaggtgagttttccccaaggtgttgaaatgctcaacatttntaagaattatgtggctagaacttccatattggatgactttgaattttacgaaagccgccagaaggtcatgcaggagaagaaa

SEQ ID NO: 116712 - DNA, 179 bp, Glycine max
tgaaaagtttaaggagttaggtcaagcatatgaagttttaagtgatcctgagaagaaagaactgtatgaccagtatggtgaagatgcccttaaagaagggatggggggaggaggctcgtttctaatccatttgatatatttgaatcattttttggaggagcaagctttggtggtggtgg

SEQ ID NO: 116713 - DNA, 253 bp, Glycine max
ggaaaagagagggtttggtgagttacccaagagaaaggatgaagagagagcgccagcagcttggttccaacgcaggaacctcaagctgcggttattcaagcggaaaatcgaatctttgggaggaagaaggaggcatggacgagcttcttgcagtggtgggttacaaggtgaggtcatcggacatggcggaagtggcgcagaagctggagcgtcttgaggaagccatgggaaatgtccaagatgacctcacgga

SEQ ID NO: 116714 - DNA, 246 bp, Glycine max
gtttgtttatctcaaacacagaacagaggtgtagagaagaaagctctcaaaagtatggcggcggagtcatcactgagggtggcgactcccactatttgcaacctcaatggttctcagagagaccaaccactctctctccgcttcgcttcatgggttttagccctcgacctctcactctctcacttcctcttccctttcacacttcttcgggagcacaagaattaactccaattcttcctccatttc

SEQ ID NO: 116715 - DNA, 176 bp, Glycine max
ataacacaaagcacaaagcaaagctcatccttgagttaaaaaatggcagcagcttcttccatggctctctcatccccatccttggctggcaaggccgtgaagctgggcccatcagccccagaatgggaagggtgagcatgaggaagaccgtcaccaagcaggtctcctcaggaagc

SEQ ID NO: 116716 - DNA, 171 bp, Glycine max
gctaaatccctagtaagccgccatggtgaagtactcaagggagcctgacaatccaaccaagtcttgcaaggctagaggcgccgaccttagggttcattttaagaacactacgggaaactgcctttgcaatcaggaagttgcccttggttaaagctaaaaggtacttggaag

SEQ ID NO: 116717 - DNA, 169 bp, Glycine max
gattcataggcccaagagcaaagaaactaagaagattttgagcacaatggcatccacacaatgcttcttgcaccaccatgccctcaccactccaaccagagcttcatcacagcgcttagttgtgagcaccaaaccaaaccacattgtttgcaaggcacaaaagcaggtt

SEQ ID NO: 116718 - DNA, 157 bp, Glycine max
gttgcgaccatcctcagttagctgaccaaggcccctctggttccaccgagtacgccagtggttaatgcactgtcaaagcagcgagctatgctggaaaacatcctaagggcttgtgttggattagctcctgagaacaacatgatcctggagtacaagt

SEQ ID NO: 116719 - DNA, 159 bp, Glycine max
tgctgcggaggttttcaagaaagccggtacatatgatccaaagcgactactgggtgttacaacccttgatgttgtgagggcaaatacttttgtggcagagatacttggagttgatccaagagaggttgatgttccagtggttggaggtcatgctggagt

SEQ ID NO: 116720 - DNA, 161 bp, Glycine max
ccaagagcaaagaaactaagaagattttgagcacaatggcatccacacaatgcttcttgcaccaccatgccctcaccactccaaccagagcttcatcacagcgcttagttgtgagcaccaaaccaaaccacattgtttgcaaggcacaaaagcaggttgtc

SEQ ID NO: 116721 - DNA, 167 bp, Glycine max
catgaccttattgaaatcgtattgggatttccaaaagactactcccgaagagcgcaatgttaggtttggtgttagagaacatggaatgggagcaatctgtaacggtattgctcttcatagacccggattcattccatactgtgcaactttctttgtcttcactgact

SEQ ID NO: 116722 - DNA, 156 bp, Glycine max
ccgtgacacaatgaatatcaatgcacttgcacgacaatcgctcatcaacgcagatggcgttatcgagcgatcatttttgcccggcaaatactctctggagatgtcttcggcagtttacaagagttgggttttcactgatcaagcccttcctgcaga

SEQ ID NO: 116723 - DNA, 181 bp, Glycine max
ctcgagaagcctatctctctgcagagtgcagagctttctctccccgttgcttcattcattctcaacaacaaaccaatctttcttagaaaatgagggggggcttgtggcaacttgggcaatcgatcactcgccgtcttgcccatggagataagaaggctgttgctcgtcgatgttttgcctc

SEQ ID NO: 116724 - DNA, 169 bp, Glycine max
ttggccatgttctctatgtttggactctttgttcaggccattgtcaccggaaagggtccattggagaacctcgccgatcaccttgctgaccctgtcaacaacaacgcctgggcctatgccaccaacttcgtccccggaaagtgagcgtcaaagaacgaaatgacttttg

SEQ ID NO: 116725 - DNA, 163 bp, Glycine max
gcttaaaggagttagtgagcgaggtgttaaaagagtccgtgtccatattcttacagatggccgtgatgttttggatggctcaagtgtggggtttgtggaaacccttgaaaatgatcttgcaaacttgcgcgcaaaaggtgtcgatgctaggatagcatcaggt

SEQ ID NO: 116726 - DNA, 182 bp, Glycine max
gaatattcttcttgacgataacggccttaacgtcgcggtgaatgtgtccgtgtcgatggagatactccaacgccttgagagtctccttgaggatagatccgatggcggcctcttcgaatccctcgggatacgcagccttcatgaggtgcaggcaggagccctgcgccatgaatcccatcaca

SEQ ID NO: 116727 - DNA, 170 bp, Glycine max
aacgaaatttctcagttgtggtgcagccaaagaacaaggatcagaatcgtttaatcaagttgaggaagatggcactagtctccggaggaagatcaacactgaaccctaacgcccctctttacattcccgccgcgttccgccaagtggaggatttttctccagaatggtgg

SEQ ID NO: 116728 - DNA, 167 bp, Glycine max
gctcctccaattagggtttttgtgatctgcagctacgatgggtaagggaacggggagtttcggtaagaggaggaacaagacccacaccctctgtgtgaggtgtggccgccgcagcttccacctccagaagagtcgttgctctgcgtgcgcttaccccgctgcgcgca

SEQ ID NO: 116729 - DNA, 164 bp, Glycine max
tgcaattgaagttgaagtcttgcccttctctcttcaactccaaacacaagacatcatcatccatggctgcctccgtctccactgtcggagctgtcaacagagctcttttgaacctgaatgggtctggacctggggtttcagctcccagttcatccttctttggg

SEQ ID NO: 116730 - DNA, 183 bp, Glycine max
caggctaataaatgtgagtggttcaccgccgcaacttccaatgtgcgagcacttactcgtctcactgtcttgctatatgtgggtgagaacacagaggatagtggagttcaacgagatggagcaaataaagcacagaacagttgaagtgaatggcataaaaatgcatgttgcagagaaaggaga

SEQ ID NO: 116731 - DNA, 178 bp, Glycine max
atcgtaatgggttccgaaggatccagcgtcgtggttcctaggaatttcagattattggaagagcttgagagaggtgagaagggaattggggatggaactgttagctatggaatggatgatgctgatgacatatacatgcaatcttggactgggactatcatcggtccccctagtactg

SEQ ID NO: 116732 - DNA, 173 bp, Glycine max
ggcagagctttctctcttaaaagagaaacaggctgagctgactgaacagtgggagcatgaaaagtctgtaatgactcgtattcaatcaatcaaagaagagatagacagagtgaatcttgagatccaacaggctgaacgggagtatgatcttaatcgtgctgctgaattaaagt

SEQ ID NO: 116733 - DNA, 169 bp, Glycine max
cttacaaggctctactctactgcttcaccttctgctctagaaaattcagtggtgatacatggcttcggctactctctctgtagccaaaccagcccttcaggcaaatgggaaaggcttctctgaattctctggcctccgcagctcatcaggcttccttccctttttctag

SEQ ID NO: 116734 - DNA, 191 bp, Glycine max
gctgcgagtccatacataggccacctttacactcactgcttgtgtcgttgccttcactggtcaagccagtgtccattgaggtatggaacccaagtggcaagtacagagtgtgttgagcagcacaaccaatgcctggaactcgttggatcaatcttctcgttcaaaatgatgttcgccttgaaatatgtacc

SEQ ID NO: 116735 - DNA, 167 bp, Glycine max
tggccaagtgccagtaatgtcattccaggccaggttacatataccgtggatatacgagcaattgatgaccttggacgcgaggctgttatctatgatttatctaaacaaatttaccaaatatgtgacaagcgttcggtttcctgtattattgaacacaagcatgatgc

SEQ ID NO: 116736 - DNA, 176 bp, Glycine max
attgaagttgaagtcttgcccttctctcttcaactccaaacacaagacatcatcatccatggctgcctccgtctccactgtcggagctgtcaacagagctcttttgaacctgaatgggtctggacctggggtttcagctcccagttcatccttctttgggagcagcttgaagaagg

SEQ ID NO: 116737 - DNA, 174 bp, Glycine max
tagtggtgctggttgttgctgcagatgatggtgtgatgcctcaaacacttgaagccatgtcccatgcgcaagcagctaatgtaccaattgtagttgcaattaacaaatgtgataaaccaggtgcaaattctgaaaaagttaaaatgcagcttgcttcagagggcttgcttctgg

SEQ ID NO: 116738 - DNA, 175 bp, Glycine max
gaagaatcagagaatggcaactatgactggtgtgagcctttcatgccccagggttttcttcaacgcatcagcctcaccgcaaaacgcgcatgctgtaaagttctcacttccacccagccaagcagtgcgaccgggtagtatcaagttgggtcgcgtgatgaggatccgacccgtt

SEQ ID NO: 116739 - DNA, 248 bp, Glycine max
tcgaggcagaagaacaagtagttgagaactaagaaggagaagcaaatggcttcctcaatgatctcttccccagctgttaccactgtcaaccgtgccggtgccggcatggttgctccattcactggcctcaagtccatggctggcttccccaccaggaagaccaacaatgacattacctccattgctagcaacggtggaagagtgcaatgcatgcaggtgtggccaccagttggcatgaagaagtttga

SEQ ID NO: 116740 - DNA, 238 bp, Glycine max
ataacacaaagcacaaagcaaagctcatccttgagttaaaaaatggcagcagcttcttccatggctctctcatccccatccttggctggcaaggccgtgaagctgggcccatcagccccagaagtgggaagggtgagcatgaggaagacgtcaccaagcaggtctcctcaggaagcccatggtacggcccagaccgagtcaagtacttgggcccattctctggcgagcccccgtccta

SEQ ID NO: 116741 - DNA, 240 bp, Glycine max
ctctaatatttttctcactgtctctccagagaacttgatagagagatggcagctgcaacatctggtgctgtgttaaatgggttgggatcttccttcttgagtggaggaaacaggagccaaacccttctggcctctgctattggaggcaagttggtgctgctgttactgttaatcccagaagactcattgtggtagctgctgctgcaccaaagaagtcatggctccctggtgttagaggtg

SEQ ID NO: 116742 - DNA, 247 bp, Glycine max
ctcgaggttgggcaagaagaggtcctcttccaatttgaagctagcgaggatggacaagtccagttctttccaaatgctccagttgatgttgacaattctcccagctttgttgccatcaatgtcagtcctattgagtatgggcatgttttgctgatccgcgcattttcgagtgtttgcctcaaaggattgaccgtgagagcttcctccttgcacttcacatggcagtggaagctgataatccatattt

SEQ ID NO: 116743 - DNA, 241 bp, Glycine max
tgaagagtttcagagaaaacatgtcagattttttagaatctggacttattatagacattgaagttgggcttggccagcaggagagctcagatacccctcttatccacaaagccaaggatgggaatttcctggtattggcgaatttcagtgctatgacaaatatttgaaggcagatttcaaagcagctgtagcaagggctggccatcctgaatgggaactgccagatgacgcaggcaagtac

SEQ ID NO: 116744 - DNA, 238 bp, Glycine max
atctgcttcccctagcaaccttcttcttacttctctccgcttcttatctccagattgctggggcggaagcacaaccgttgactagtctcaagcttaactctcatattcttcaggagtctactgctaaagagattaatgaaaatcccgggcaggatgggaggctgctataaatcctcgtttctccaattatacagttgaacaatttaagcgccttcttggagtcaaaccaatgcctaag

SEQ ID NO: 116745 - DNA, 236 bp, Glycine max
cagaagaacaagtagttgagaactaagaaggagaagcaaatggcttcctcaatgatctcttccccagctgttaccactgtcaaccgtgccggtgccggcatggttgctccattcactggcctcaagtccatggctggcttccccacaggaagaccaacaatgacattacctccattgctagcaacggtggaagagtgcaatgcatgcaggtgtggccaccagttggcaagatgaag

SEQ ID NO: 116746 - DNA, 235 bp, Glycine max
tggaagccctcagaacacctttgtcccagggctgattgatctggccatcaagaggaacagtttgattggaggagatgactttaagagtggtcagaccaaaatgaaatctgtgttggtggatttccttgtgggggccggcatcaaccaacatctatagtgagttacaaccatctgggcaacaatgatggcatgaatctctcagcccctcaaaccttccgctctaaggaaatctcca

SEQ ID NO: 116747 - DNA, 231 bp, Glycine max
ggaaaggatggattccttgcttggaattcgagttggagcacggtttcgtgtaccgtgagcacaacaggtcacctggatactatgatggacgctactggaccatgtggaagctgcctatgtttggctgcactgatgcttctcggtgttgaaggagcttcaagaggctaagactgcataccccaatggcttcatccgtatcattggatttgacaacgttcgccaagtgcagtg

SEQ ID NO: 116748 - DNA, 232 bp, Glycine max
cattacacaagaactctccaaggatcctccttcccacgaaattcatttggtgggaaaatccaagaagagggtggaatttcaagccagggaagatggattatttcaatgcaccaggaagaaaccatctctttgttccggggctgttaacatcccggaccagatcattcgggccatgaacagaaacaatgaggactaccgttctccagcaattccagctatgaccagaacactg

SEQ ID NO: 116749 - DNA, 233 bp, Glycine max
ggcttatggtggatacctaggcacccagagacgaggaagggcgtagtaagcgacgaaatgcttcggggagttgaaaataagcgtagatccggggattcccgatataggtcaacctttcgaactgctgctgaatccacgggcagcaagagacaacctggtgaactgaaacatcttagtagccagaggaaaagaaagcaaaagcgattcccgtagtagcggcgagcgaaatggga

SEQ ID NO: 116750 - DNA, 109 bp, Glycine max
gccaaacgacagcgttctgagtcttttcttcttcgttaccctcttcacatgccttctctctgctaattcccacgatgaccatattttcctaccgagtcaactccatgac

SEQ ID NO: 116751 - DNA, 229 bp, Glycine max
ggccgcacagcccgatgttgatggatttttggttggtggtgccaattctttgcagtttcctccatttacagaacctccatagataattcttacagatgcagcaactgcaaagaattggccgcacagcccgatgttgatgatttttggttggtggtgcctccctgaagccggagttcgtggacatcataaatgctgccactgtgaagaagaattgaaattcgtagttagg

SEQ ID NO: 116752 - DNA, 231 bp, Glycine max
aagatattgaagtagtgctaagtgcctaacacctgcagtgaacaatggcctctgcatcagcatctcttctcaagtcttcacttgttcttgacaagtctgagtgggtgaagggacaaacacttcgccaaccttctgctgcacagttgtgagatgcaaccccaccaccccatcaggcctcaccatcagagctggttcctatgctgatgagctcgttaagaccgcgaaaacagt

SEQ ID NO: 116753 - DNA, 228 bp, Glycine max
atttcatcgtgcattcaatggccaccacagcagctctatccggaaccatggtgagcacctccttcatgaggaggcaacctatgaccaccacaagcctaaagacattccccaacgttggtgaagctctttttggtctgaaaagtggacgaggtggtcgtgtcacttgcatggcctcgtacaaggtgaagctcataaccccagaaggagaagtggagtttgaatgcccag

SEQ ID NO: 116754 - DNA, 227 bp, Glycine max
tgaagttaaaagccttagccttccctacaactccaaacacaaagacatcatcatccatggctgcctccgtctccactgtcggagctgtcaacagagctcttttgaacctgaatggttctggagctggagcttcagccccagttcagccttctttgggaccagcttgaagaaggttattgcctcaagggtccccaacagcaaggtttccggtggaagcttcaagattg

SEQ ID NO: 116755 - DNA, 225 bp, Glycine max
gctctgttaatgtctcagaaattcactctagcttatgctgcactcgtcggagtgggtggtgtaatgggttatctcaagagtggcagcaacaagtcacttttggctgggggtttgtctgcatcactgctgtattatgtttatactgagctacctggaagccctgttttcgcatcatctgttggccttggcatatctgctgcacttcttggggtgatgggttctcgt

SEQ ID NO: 116756 - DNA, 226 bp, Glycine max
gccattgcttgtgttatggaaaatgttcctttcatcaatggaagccctcagaacacctttgtcccagggctgattgatctggccatcaagaggaacagtttgattggaggagatgactttaagagtggtcagaccaaatgaaatctgtgttggtggatttccttgtgggggccggcatcaagcgaacatctatagtgagttacaaccatctgggcaacaatgatgg

SEQ ID NO: 116757 - DNA, 225 bp, Glycine max
agagaaacaaagttacaagtaaagtaaattaagaagatcattaatggcttctcttgcaaccttagctgctgttcaaccagctgcgctcaatggccttgctggaagttccctctctggaactaagctctctttcagccctctcgccacactgtcaaatccaagaacttcaggagtggtgccgtggtagcaaagtatggtgacaagagtgtgtactttgatttggag

SEQ ID NO: 116758 - DNA, 225 bp, Glycine max
gcaagccaatcctaattcctattctcctatccttttacataactctaaagtaagaaaaaatagagcaatttcacaacacaactcttagaattgtgagttaagtatgggaaggtccccttgctgtgagaaagctacacaaacaaaggtgcatggactaaagaagaagatgacagactcatatcttatattcgagctcacggagaaggctgcctggcgttcactccc

SEQ ID NO: 116759 - DNA, 221 bp, Glycine max
ctcagaaccttctgaggttaaagcaaaaaacaaagagagagagagagagaaaatgatgaagccatcgatgctcagatctctacactccgccgccacccgcggcgcctctcatctcttccgccgtgggtacgctccgagccggtgccggagcgcaaggtagccgttctcggcgccgccgggggatcgggcagcctctctcccttctcatgaagctcaatccc

SEQ ID NO: 116760 - DNA, 220 bp, Glycine max
caagaaggagaaatatgacaagaatccagctttgtatggtgaacttgccaaaggccagagccccaagtttatggtgtttgcttgctcagactcaagggtgtgcccatctcatgtgctagatttccaaccagagaggcctttgtggtcagaaatgttgctaacattgtcccaccatatgaccagtcaaaatacgctggaactggggcagcagttgagtatg

SEQ ID NO: 116761 - DNA, 222 bp, Glycine max
ctcataacacaaagcacaaagcaaagctcatccttgagttaaaaaatggcagcagcttcttccatggctctctcatccccatccttggctggcaaggccgtgaagctgggcccatcagccccagaagtgggaagggtgagcatgaggaagaccgtcaccaagcaggtctcctcaggaagcccatggtacggcccagaccgagtcaagtacttgggcccattc

SEQ ID NO: 116762 - DNA, 215 bp, Glycine max
ttcgagcgaatcggctgactcttatcttaaagccaaagagatgattggctatgctcacatggtgacctctcgagaacggatggctttgaccatatcttactggcaagagaggaaacggacaactctggatggaccgacaatctatgcgtggttgttttgtgtcattggaatgatctcactgttttgtggtgctttcttacctgatatagggatca

SEQ ID NO: 116763 - DNA, 218 bp, Glycine max
gttgccattctcatcctcttctttctctctctaccattgccatggatccctacaagcaccggccatccagcgccttcaattctcccttctggactacaaattctggtgctcctatttggaacaacaaccctctttaaccgttggagctagaggtccaattctgctggaggattatcatcttgtggagaagcttgcaaattttgatagggaacgtatcc

SEQ ID NO: 116764 - DNA, 216 bp, Glycine max
gcgattttcgattctcttctctgcaactatgcctaaccctaaggtcttcttcgacatgaccatcggcggtcaacctgccggccgcatcgtgatggagctctacgccgacgtgactccgagcaccgcgagaacttccgcgcgctctgcaccggcgagaagggcgccgggcggagcggcaagcccctccactacaaaggctcgtccttccaccgcgtg

SEQ ID NO: 116765 - DNA, 213 bp, Glycine max
tgcaaaggatgttgattttgaaaaaattgctaggagaacccctggattcactggggctgatctgcagaatttgatgaatgaggcggctattcttgcagccaggcgtgacctcaaggaaataataaagatgagatatctgatgcgcttgaaaggatcatagctggacccgagaagaaaaatgctgtagtctcagatgagaagaagaaattagta

SEQ ID NO: 116766 - DNA, 212 bp, Glycine max
tgacgcaggactgaatgacctaatggagtctaaaggtgggaaaaagaagtctagtagtagtagtagtaaatcaatttattacgaagctcccctcggatacagcattgaagacgttagaccaacggtggaatcaagaaattcagatctgctgcttactctaactgttctcgcaaaccatcctgatacacatccggattgatagttcgttgcat

SEQ ID NO: 116767 - DNA, 213 bp, Glycine max
gaggccaagaaccctaaccctgttcccaccgacgccttgactcttctcaacggaaaatggattctcgcgtatacatcctttgcaggtttattcccattgttgtcaagtggaacactaccattgtcaaggtagaggaaatatcccagattattgactcgctgaattttaccgtccaaaactctgttcagttcgctggtcctttggccaccacct

SEQ ID NO: 116768 - DNA, 212 bp, Glycine max
gaagcatctaagtgagatacacagtagttaggtagcaagcataagtgtctaaccttagaaacatatctgctacatatcgtgtgcattttggaattgtgccactaaaattctattcatctatggtgcctcatcttatgctatgcaatcaatccttgcaaaccctatgatccgcatttccagcgggtctagggagaaccattttggtgttcctg

SEQ ID NO: 116769 - DNA, 220 bp, Glycine max
gcttgaaggaaatgacattcgggaaattcgatgcagggcttacagagagccagatgatagagcacatgaaggacttggcctcaaagaacaaggtttctaagtcctacattggcatggggtactataaactcatgttccaccagtgatcctgaggaacataatggagaaccctgcttggtacactcagtacacaccttaccaggctgagatatctcagggg

SEQ ID NO: 116770 - DNA, 260 bp, Glycine max
ggcaatttagcttcactgttaaggccatccaatcagagaagccaacctatcaagtgattcagccaatcaacggtgacccattcattggaagcctggaaaccccagttacatccagccctttgatcgcatggtacttgtccaacctgcccgcatacagaaccgtagtgagcccactactaagatggatcgaggtgggcctggcccacggataccttctggtgggcccattcgtgaaggccgggcctcttaggaacaccgag

SEQ ID NO: 116771 - DNA, 117 bp, Glycine max
cgtagttgagaactaagaaggagaagcaaatggcttcctcaatgatctcttccccagctgttaccactgtcaaccgtgccggtgccggcatggttgctccattcactggcctcaagt

SEQ ID NO: 116772 - DNA, 115 bp, Glycine max
ctcagaaatgatcatgtcgactcctatgttctgtctgagtccagtctctttgtttatgcctacaagatcatcatcaaaacctgtggtactacaaagctactgcttgcaatcccac

SEQ ID NO: 116773 - DNA, 245 bp, Glycine max
ctcgagcgcttccagaaggtggtgttttgcttctagagaatgtgaggttctacaaggaggacgagaagaatgatcctgaatttgcaaagaagttggcttctctagctgatctctatgtgaatgatgcatttggcactgcccacagagctcatgcttctacagaaggagttgccaaatacttgaagccctctgttgcaggattcctaatgcagaaggagcttgattatctagttggggctgtgtca

SEQ ID NO: 116774 - DNA, 242 bp, Glycine max
ccaagtttttgaagaatggtgatgctggttttgttaagatgattccgaccaaacccatggtggttgacactttctctgagtaccccccacttggtcgctttgctgtcagggatatgcgtcaaactgttgctgtgggagtcatcaagaacgtggagaagaaggatcctactggagccaaggtcaccaaggctgcccagaagaagaagtgaatcgtgcggtttggttcatcaggggatgtcgtt

SEQ ID NO: 116775 - DNA, 245 bp, Glycine max
aattccttggactaaattccaatagggttcctgccaataatgccgttgatcagtctgcagaggccttggctaaagcttggagtgagtataacaatcccagggctgcaattctggtcgtggttcaggttgaagaaagaaacatgtacgagcagcattatatttctgcacttctaagagaaaagcatcatattagaagcatacgcaaaacgttgaccgaaattgatcaggaaggaaaaattctgcca

SEQ ID NO: 116776 - DNA, 243 bp, Glycine max
ctcttccattaacgggtggtgcctctcttccatctccccagccaaaacctctctcaagaaggccacattaggcccttctgtcttcgcaaccgttagcactccttcttctccttcttcttctacttcttcttccttcccttctctcattcaagacaggcctgtctttgctgcccctgcccccatcatcaccccaactgtgagagaggatatggcaaaggaatacgagcaagctattgaagaact

SEQ ID NO: 116777 - DNA, 246 bp, Glycine max
cttcttcgagttgtaacctctctcttcaaccctaacttagggtttatgttctaaaacccttttcaggttgattggaggagataaaaatgctcgtgttgtttgaaacccctgcgggttttgccctgtttaaagtgctggatgaaggcaagctttctaaagttgaggacttgtggaagaacttttccagtgcagatactgctagacaggtggtcaagttgaaagcattttctaaatttgagaacactt

SEQ ID NO: 116778 - DNA, 243 bp, Glycine max
cggctcgaggctatactctgatagccattgtgggaatcaaggatcctgtgcgccctggagttagggaagctgttaaaacttgtttagctgctggaataactgtccgcatggtaactggtgataacataaatacggctagggctatagctagagaatgtggcattcttacagaggatggtgtggccatagaaggaccccactttcgggacttgtctacagagcaaatgaagagtattataccaa

SEQ ID NO: 116779 - DNA, 244 bp, Glycine max
cgaatattttccaaataccctgatttattccctgatgaggtgttcaacatagagtccttcaaatggtcatttggtattcttttctcccgcttggttcggttaccctcaatgggtggaaatgttgccttggttccttgggctgatatgctgaatcatagttgtgatgtggagacatttttggattatgataagacatcaaagggaattgtcttcacgacagatcggccctatcaaccaggtgagc

SEQ ID NO: 116780 - DNA, 161 bp, Glycine max
gaagatggatagtgaaattgaaaagaagaagaacctgttttcggaactaaccgacgacatcgttctgaacatcttctacaaactcgaagacgatcctcgccactgggctcgcttagcctgtgtctgcaccaaattctcttccctcgttagggatttctgtt

SEQ ID NO: 116781 - DNA, 244 bp, Glycine max
ctctctcttccccatccttggctggcaaggccgtgaagctgggcccatcagcccccgaagtcgggagggtcagcatgaggaagaccgtcaccaagcaggcctcctccggaagcccatggtacggcccagaccgcgtcaagtacttgggcccattctctggcgagcccccgtcctacctcactggcgagttcccaggtgactacggctgggacactgctgggctttcggccgacccagaaacctt

SEQ ID NO: 116782 - DNA, 245 bp, Glycine max
gccaaagactatggagaagttgagttgtttggtgtaggtggaagcccttttgccagaagggtgcagattgccctagaactgaagggagttcaatacacttactttgaagaagatcttaggaacaagagtgctcttcttctcaaatacaaccctgttcacaagaaggtgcctgtgcttgtccacaatggaagacccttggctgagtcccttgtgatccttgaatacattgatgagacatgggagac

SEQ ID NO: 116783 - DNA, 241 bp, Glycine max
gttattaagagcttttgcttttctttctgcgcgcttttcccaattcagtagttcttccttttctcaaagcaaaaaaaatgttcatcgagagtttcaaggttgagagtcctaacgtgaagtacacagagactgagattcagtccgtgtacaactatgaaaccactgaacttgttcacgagaacaataatggcacttatcagtgggttgtcaagcccaaaactgtcaaatatgaatttaaaac

SEQ ID NO: 116784 - DNA, 240 bp, Glycine max
caacgatcttgatgcaggatcgttgatgaagagagcgcacatctttcccttcttgatgcaggagctggtcgtcttggtggacccacacaatacactgtgaacaaccagatggtgaatgccactctcatgaacattgctgataaccccaccaatgtgcagcttccaggtatgtacaacaaggaagagaacccccgtgttcccatcattgtcaccggtaacgatttctcaacactctatgca

SEQ ID NO: 116785 - DNA, 242 bp, Glycine max
cgttgccattctcatcctcctctgtctctctctctccaccattgccatggatccttacaagctccggccatccagcgccttcaattctcccttctggactacaaattctggtgctcctgtttggaacaacaactcctctttaaccgttggagctagaggtccaattctgcttgaggattatcatcttgtggagaagcttgcaaactttgacagggaacgtatcccagaacgtgttgtccatg

SEQ ID NO: 116786 - DNA, 244 bp, Glycine max
cgaagttgttgaagaatggtgatgctggttttgttaagatgattccgaccaaacccatggtggttgaaactttctctgagtaccccccacttggtcgctttgctgtcagggatatgcgtcaaactgttgctgtgggagtcatcaagaacgtggagaagaaggatcctactggagccaaggtcaccaaggctgcccagaagaagaagtgaatcgtgcggtttggttcatcaggggatgtcgtttc

SEQ ID NO: 116787 - DNA, 243 bp, Glycine max
cgtcaaactcgactgccccgccattggcaaacagttcgctgccgaggacatttctgcccaggttctgaggaagcttgttgatgatgcttccaagtttttgaacgataaggttaccaaggccgttgttacggtgcctgcttacttcaatgactcccaaaggactgccaccaaggatgctggtcggattgctggtctagaggttcttcgtattatcaatgaaccaaccgctgcatccttagccta

SEQ ID NO: 116788 - DNA, 244 bp, Glycine max
caaagaaaaaaaaaaacccttagccaacacaaccatcatggccacctctgctattcagcaatcagcattcactggtcaaactgctctgaagcagctcaatgagttcgtccgcaagaccggtggcgccggcaaaggtcgcactaacatgcgccgcaccgtcaagagtgctcctcagagcatttggtatggccctgaccgtcccaagtacttgggtccattctcggagcagattccatcatacctg

SEQ ID NO: 116789 - DNA, 155 bp, Glycine max
agaactacaagtagttgagaactaagaagaaggaaatggcttcctcaatgatctcctccccagctgttaccaccgtcaaccgtgccggtgccggcatggttgctccattcaccggcctcaaatccatggctggcttccccacgaggaagaccaac

SEQ ID NO: 116790 - DNA, 240 bp, Glycine max
ggctcatcctgagggagaatatgcaacagcaagagctgcatctgctgctggaacaatcatgactttgtcttcatgggctacttcaagtgttgaagaggtagcttcaacaggacctggcattcgctttttccagctatatgtgtacaaggacaggaatgtggttgctcagcttgtgagaagagctgaaagggctggattcaaagccattgcccttactgttgataccccaagactaggacg

SEQ ID NO: 116791 - DNA, 241 bp, Glycine max
caccaaagtacttgtgagtgtatacccaacacaaactaagatcaacatggactactacacccgcgtttcagaagttgagagggaaccatatcagccagttttgtgccagtgatgtgtggctcagctttcaaaaacaagggagtccaaccattgctcgatgcggtagtggattatctaccatcaccacttgacttgccagcaatgaagggcagtgaccctgaaaacccagaagaaacaatag

SEQ ID NO: 116792 - DNA, 241 bp, Glycine max
accaaattgacctcagtactgtagaacactgcgactcttcacacttttcttcttcccttcgtcttcagcttctgcttcttctcttgttgctgcttcaaaacagtgagaaaaatatggggttctcctcctttctgggtcgcgtcctctttgcttccctcttcatcctctcagcatggcagatgtttaatgaatttgatgacactggtggacccattgcaaaggagttgattcccaagttcac

SEQ ID NO: 116793 - DNA, 240 bp, Glycine max
gcagcacagaagcaggttactgtccaagagggtgaggacactactactggccttgtctctcgcaggttggccctcactgtgctcattggtgctgctgctgttggctctaaggtggcacctgctgatgcagcctatggagaagctgccaatgtgtttggaaaaccaaagacaaacacagacttcctttcatacaatgggaatggattcaaactctcaattccctcaaagtggaacccaagc

SEQ ID NO: 116794 - DNA, 239 bp, Glycine max
gtttgaactggagggtggaaaatgagattgacaatgttttaaggaagcctatccccatggatttgtacagagccatacgggattctcaactcataggaatgtctggttactcaaaggagggtctacctgtcattgctgttggtgttggtctcagtacatatgataaagcatctgacaaatactatatacaatcacacatccaactaaatgaatatagggatcaagtgatcttgccaaca

SEQ ID NO: 116795 - DNA, 176 bp, Glycine max
gcttcttctttgcactgcaaatcacttttctactttgagtcttcttgatccttctttttctccttgaactcaaacatggcagatgaggtggttctgctagatttctggccaagtccatttgcggatgagggctcaggattcgcacttagctgaaaagcgggtatcaagatatcgag

SEQ ID NO: 116796 - DNA, 239 bp, Glycine max
tcatgctgttcggcgtaagagtcatgacggaagctaactcctccttcaggaagagcgccacatgaacaacctctcacagtacgacgcggagttcaacgccgccgacgccggctacgcctccgacgacgtcgttcacgcctccggccgcacgcgcgagccaagcagtgtgttccttggacggaggaagagcatagattgttcctgttagggttacacaaagtcggaacaggagattggag

SEQ ID NO: 116797 - DNA, 191 bp, Glycine max
gagaagagaaggtgtagacaaacacaatctctaatggcactcaggatgtgggcttcttccactgccaatgcactcaaagtctcttctacctccagacctcatctcttgcatcctttgttctttactccaggatgcttgtgcttccgtacttgagatgcgacttgagagtatgtcagcattgcgacacgtaa

SEQ ID NO: 116798 - DNA, 202 bp, Glycine max
agaacttcagatattgatcaatgcagggatatatgtggatataagtgcagttatgccacatcatatagtttgtgcacttaaaaagtacgactggggtgcactatcttttgatataaaggtatgcagaacaaatcatcctaatagatctgcaatgaggggccctggggaggttcagggatcatttattgctgaagctattata

SEQ ID NO: 116799 - DNA, 195 bp, Glycine max
ttcgaggaatcggctcagaattcatctatggctgactcttcttatgctactgaatcaatcctggcaaaccctttgatccgcatttccagcgggtctagggtgaaccaatttggcgttcctgctttgcacatgagaaggaatgttggcctgagagttaggtccatggctaaggaagaacaaccaagtgagcctgca

SEQ ID NO: 116800 - DNA, 195 bp, Glycine max
gtaaagaagagatatgcaagagggtaagcgattcggttgctgtgcatgaagtggatggtcacaacgttgtgcccctttgggttgcctctgataaattggagtacagtgctaggaccatcagggcgaagataaccaaaaggctttctgactatctcgttgatttccctgacattgaagttgagccaccagctggga

SEQ ID NO: 116801 - DNA, 197 bp, Glycine max
aattgaagttgaagtcttgcccttctctcttcaactccaaacacaagacatcatcatccatggctgcctccgtctccactgtcggagctgtcaacagagctcttttgaacctgaatgggtctggacctggggtttcagctcccagttcatccttctttgggagcagcttgaagaaggttattggctcaagggtcccc

SEQ ID NO: 116802 - DNA, 200 bp, Glycine max
caaagagcgggtagctgagatcggagaaccctctctttcttctccttcttcagcagttgaaaataaaaaatggcagatggtgaggatattcaaccactcgtctgcgataatgggacaggaatggtgaaagctggatttgctggggatgatgctccgagggctgtgtttcccagcattgttggtcgtccccgtcacacggg

SEQ ID NO: 116803 - DNA, 193 bp, Glycine max
cggctcgagtagtattatgggccaagagtcaacattccaccatacttcaactcaggtgtggcttcaggtcatgctccacacccatacatgtggggaccaccacagcctatgatgccaccttatgggccaccttatgcagcattttattcgcatggaggggtttatactcaccctgcagttgctattgggccac

SEQ ID NO: 116804 - DNA, 198 bp, Glycine max
tgcaattgaagttgaagtcttgcccttctctcttcaactccaaacacaagacatcatcatccatggctgcctccgtctccactgtcggagctgtcaacagagctcttttgaacctgaatgggtctggacctggggtttcagctcccagttcatccttctttgggagcagcttgaagaaggttattggctcaagggtcc

SEQ ID NO: 116805 - DNA, 195 bp, Glycine max
gcgtacgtgagagtacaactaactttcaaaaccaggcttttaacacttttgttgctgaatttgatactactaatctcaactctggacttagtaacaaacccgaaagggaacaagcattagaggctgaggtggagaaactcaaagagcagctgaaggaagctaacttggaaaaagctgaaataacatcaaagtatg

SEQ ID NO: 116806 - DNA, 197 bp, Glycine max
gttggagtttaaggctatactctttgttcccaagagggcaccttttgacctctttgacacaaggaagaagcctaacaacattaagctctatgtccgccgtgtctttattatggacaactgtgaggagttgattcctgagtatttgggctttgtcaagggtattgttgattctgaagatctcccactcaacatttcaa

SEQ ID NO: 116807 - DNA, 191 bp, Glycine max
gcgcggcataacctaaacctatctttcttctctctctgtgtgtgcgcttcaacggcaaccagaagcagccatggccactgcaaggactgtgaaggatgtttcacctcatgagttcgttaaggcgtactcctctcacctcaagcgatccggcaagatggagctgccagagtggactgatattgtgaaaactg

SEQ ID NO: 116808 - DNA, 191 bp, Glycine max
caatacccttttgatttgtgaaaggaaagcaaacatgcttgatcaggtccaagggcgctacaatcatggacaaggttgctggccagctccatctccgttctggtgtttctggtattaggagttatgaaggagcctactgccaccccacaatgtaccaaagaccctcttttgggaattactcgtatgctgca

SEQ ID NO: 116809 - DNA, 196 bp, Glycine max
gtcttgtcgtcgtctcttcctcttcgcaacaatggttgccgccaagaaaaccaagaagacccatgagagcatcaacaacaggcttgctcttgtcatgaagagcggcaaatacacccttggttataagaccgttctcaaatctcttaggagctccaaagggaaattgattatcattgctaacaactgcccccctttg

SEQ ID NO: 116810 - DNA, 197 bp, Glycine max
aagaaaatgaaagtccttgttttctttgttgctatagttctagcagcatggcattgccatggctcagaccatgaccatgaccatggccacacctaccaaattttccctctgagaatgaaaactggccatggtggccactacattccggaggtatcatgccaaagttggaggcttggtgtggaggcacacaacgtcat

SEQ ID NO: 116811 - DNA, 198 bp, Glycine max
tttcagtatcacataggaagaggtcatattggagcaactatgaaagcaaaactttatcacttgctggagcatagagcttcagaatggtattcatttttatcaatattgatactatgaatttgtgctattctagatttccagttctcagcattctttctttatccttgcagccgatattttgtcattcctttatggagg

SEQ ID NO: 116812 - DNA, 190 bp, Glycine max
aagagatccgcagcgggttggcgaacatcagtttcttctgtctaaggcgtcgcgctaaacgcggcgacgcggcggcgtttgtgaagcttgcctccggcaacgcgctctccacgcggctgccggaattctgcgccgccgcgaagctcctctgcttcccggaggtggggtccagcctcgagaagcacgacaa

SEQ ID NO: 116813 - DNA, 188 bp, Glycine max
agcacattttatacaggcagaaagagcaattcagtgatggagttggctataggtggattgatggccttaaggcccatgctgcaaaacatgtattgaatccatgcttttttgtacaattcagtgatggagtttgctattgtcatgaaatttgttttgcttatcattggtttttgtctttttttattagg

SEQ ID NO: 116814 - DNA, 189 bp, Glycine max
  unsure (1)..(189): unsure at all n locations
atcaagtgttcgccgatacatgggtaccataactggtattagtgatttagntncagtccgctggccaaattcacactggcgttctgtgaaggttggctgggatgagtccactgcaggggagaggcagccaagagtttccttgtgggagattgaacctttgacaacattcccaatgtatccatctccatt

SEQ ID NO: 116815 - DNA, 190 bp, Glycine max
cgcttggtcccaagggaagaaatgttgttctcgagagcaagtatggctcgccggaaatcgttaacgacggtgtcactgtcgctaaagaggttgagttggaggatcccgttgagaatattggtgccaagttggtgagacaagcggctgccaagacaaacgacttggctggtgatggaaccacgacctcggt

SEQ ID NO: 116816 - DNA, 198 bp, Glycine max
ttcaccttctgctctagaaaattcagtgctgaaacatggcttcggctactctctctgtagccaaaccagcccttcaggcaaatgggaaaggcttctctgaattctctggcctccgaagctcatcaggcttccttcccttttctagaaaatcttcagaggatttccattctgtcattgccttccagacctatgcagttg

SEQ ID NO: 116817 - DNA, 194 bp, Glycine max
ggtgatcgcagagtacatatggatcggtggatcaggaatggacctgaggagcaaagcaaggactctcccaggaccagttagcgacccttcagagcttcccaagtggaactatgatggttccagcacaggtcaagctcctggtgaagacagtgaagtgattttatacccacaagccattttcagggatccattca

SEQ ID NO: 116818 - DNA, 191 bp, Glycine max
gtagctagctcctcgaaaatgctggcacgcctcgccgcgagtcgcttcaacgagatccgtcagattttccgtcagccttctagggctttctcaaccgctctgaactaccaccttgacacaccggacaacaaccctaaacttccatgggaattcaccgaggccaatcaagcaaaggttaaggagattttgtc

SEQ ID NO: 116819 - DNA, 192 bp, Glycine max
aaacactcataacacaaagcacaaagcaaagctcatccttgagttaaaaaagggcagcagcttcttccatggctctctcatccccatccttggctggcaaggccgtgaagctgggcccatcagccccagaagtgggaagggtcagcatgaggaagaccgtcaccaagcaggtctcctcaggaagcccatggt

SEQ ID NO: 116820 - DNA, 193 bp, Glycine max
ggcgtcgcggacacagaacagagcttgcagaagcgatttctcatttctcattcttaacaacacacttcaacaatggccaaaaccttcaaatacatcatcctcggaggaggagtttccgctggttatgcggcgagggagtttgccaaacagggcgttaagccaggggagttggctatcatttccaaagaagcgg

SEQ ID NO: 116821 - DNA, 195 bp, Glycine max
ggccaggcaagccccactcaaccaccacacctctcctcgttcacgctacccctttctgctcttcttctacctttcaagttttaaaagtataaagatggcagagacattcctatttacctcagagtcggtgaacgagggacaccctgacaagctctgcgaccaaatctccgatgctgtcctcgacgcttgcctcga

SEQ ID NO: 116822 - DNA, 198 bp, Glycine max
gtttttcatttcatcgtgcattcaatggccaccacagcagctctatccggaaccatggtgagcacctccttcatgaggaggcaacctatgaccaccacaagcctaaagacattccccaacgttggtgaagctctttttggtctgaaaagtggacgaggtggtcgtgtcacttgcatggcctcgtacaaggtgaagctc

SEQ ID NO: 116823 - DNA, 198 bp, Glycine max
gggctccctaaatctaccattgctagtgcatcgcaggacggtaaagtgattatatggaccgtggcaaaagatggggatcagtgggaaggcaaggttttgaatgatttcaagacacctgtttggaaggtctcatggtctttgacaggaaacatactggctgtggctgatgggaacaacaatgtgacattgtggaaggaa

SEQ ID NO: 116824 - DNA, 89 bp, Glycine max
ccagtattgaccctgagtggtagatgataaaaagtgatgaaggacgaattgagaagtggattctgaggagagcctttgatgatgaagag

SEQ ID NO: 116825 - DNA, 255 bp, Glycine max
ataacatttacccccacaacaccccaaaaaccaaggaagcatattactacagaatgatctttgagaggttcttccctcagaactcagctaggctcactgttcctggaggagcaagtgttgcatgtagcacagccaaagctgttgagtgggatgctgcttggtctaacaacctggatccctctggtagagcagcacttggagtgcacatttcagcctatgaaaaccagaacaacaagggggtagaaattgagaaga

SEQ ID NO: 116826 - DNA, 256 bp, Glycine max
acagcacaaagcgggttactgtctgttcaagctaccatctctctctctctttcttagtgcctccttgccagaagttaaaatggcccaagatactttcctattcacatctgaatcagtgaacgaggggcaccctgacaagctctgtgaccagatctccgatgctgtgctcgatgcatgcttggagcaggaccctgacagcaaggttgcctgtgaaacctgcaccaagaccaacatggtgatggttttcggagagatc

SEQ ID NO: 116827 - DNA, 257 bp, Glycine max
atcaagggttgtgaaagcagagaagtgagatacactaagttatcctcataaatacactctaattaggtggcaagataagtgtctaaccttagtaacattgccacatattgtgttcattttggaattgtgccactaaaattctattcaattcatctatggctgcctcttcttatgctatgcaatcaatcctggcaaaccctttgatccgcatttccagcgggtctagggtgaaccaatttggcgttcctgctttgcac

SEQ ID NO: 116828 - DNA, 259 bp, Glycine max
cctgatcccctccttcatctactcctcttcctccaaaacgctccctctccaccacatgctcaacaccgcctccgctgccgccgccgccgctccctccccgccgccggccaatctcgacgccggatcgcgtggcctcatgattccctctcccagcgagtcacgcaagatcgagttgtactcccccgccttctacgccgcctgcaccgccggtggaatcctcagctgtggcctcactcacatgaccgtcactcctcttgac

SEQ ID NO: 116829 - DNA, 252 bp, Glycine max
tcgtgccgagcgattcggctcactagctagggtttctgagtttagccggttgcgcctctgaccgtaagagtgaaaaaacactctcttttccttctctcaagtctcaagagatttcatcatggctccaaagaaggacaaggctccaccaccttcctccaagcccgccaaatctggcggtggcaagcagaagaagaagaagtggagcaagggaaagcaaaaggagaaggtgaataacatggtgctgtttgatca

SEQ ID NO: 116830 - DNA, 258 bp, Glycine max
ctgtaaccatggcatccaccactctatcccctacaaccccttctcagctatgctcaggaaagagtgggattttcagtccctcacaggcacttcttgtgaagccagtgaagaggcagatgatggggaagagcaagggaatgagaattgcatgccaagccaccagcattcctgctgatagagtccctgacatgggcaaaagacagctcatgaatctgcttcttcttggtgccatttcactcccctctgctggaatgctta

SEQ ID NO: 116831 - DNA, 245 bp, Glycine max
aaaaactttgaccggcaagaccatcacccttgaggtggaatcctccgacaccattgacaacgtaaaagctaagattcaagacaaggaagggatcccacctgaccagcagagacttatctttgcgggtaaacaacttgaggatggtcgcacccttgccgattacgacatccaaaaggaatcaaccctccatctcgtgcttcgcctcaggggtagcatgcaaatctttgtcaagactttgaccggga

SEQ ID NO: 116832 - DNA, 245 bp, Glycine max
atctaagtgagatacacagtagttaggtagcaagcataagtgtctaaccttagaaacatatctgctacatatcgtgtgcattttggaattgtgccactaaaattctattcatctatggctgcctcatcttatgctatgcaatcaatccttgcaaaccctatgatccgcatttccagcgggtctagggagaaccattttggtgttcctgcttatcacatgagaaggaatgttgggctgagagttaa

SEQ ID NO: 116833 - DNA, 256 bp, Glycine max
tccagaacatgggttccttcagacaaaggtgttggagataaatctggtgactttccccaatgttgctgatgcaatattggctaatggcatgttcagccattatgaccgtcctcgtattgcccaactttgtggaaaagctggcctttatgtgcgagctttgcaacattacacaggattaccagacatcaaacgcgtgattgttaatacacatgcaattgaagctcagtcactcgtagagtttttttggtacactgtc

SEQ ID NO: 116834 - DNA, 256 bp, Glycine max
aggaagtattgaatactggccggatccacagcgtggcatcaaggaagcttacagggttttgaaacttggagccaaggcatgtctaattggtccggtctaccctacattttggttgtcacgtttctttgctgatgtttggatgcttttccccaaggaggaagagtatattgagtggtttcagaaggcagggtttaaggacgtccaactaaaaaggattggcccaaaatggtaccgtggtgttcgccgacatggcttg

SEQ ID NO: 116835 - DNA, 258 bp, Glycine max
gctaaattgggatggcaatcaaccacaaacctccctgaagacctaaaagaacggtttgaggagtacgtaaagattgggagagataagaaatccatccagttcgagctagatgataagatattggaggcattgaaggttccggtgtcagtgtgatccatttatatccaaaacaattatcagacaagactttaagattttttggtcgctcaattcaaatgatgtgcattgaagaaagttacttctctccttgttaaaata

SEQ ID NO: 116836 - DNA, 255 bp, Glycine max
agcggcgaatccgctgtgcgcgactcttactctgaattccattaatcaaactattgggtggttggattgggctaaagccgcaattgttcctggcttggcgtcgttggtgttggtgccgttgattttgtatgttatatatccgccgacattgaagagtagtcctgatgctcctaagcttgcgaaggagaagttggagaagatggggcccatgacgaccaatgagaagatcatgactgctactttgtttctcacggt

SEQ ID NO: 116837 - DNA, 257 bp, Glycine max
ctcagtgaaagagaatccgaggcgaagagaagagagagattaagatggaggggaaggagcaggatgtgtcgctgggagcgaacaagttcccggagagacagccgattgggacggcggcgcagagccaagacgacggcaaggactaccaggagccggcgccggcaccactggttgacccgacggagtttacgtcatggtccttttacagagcagggataacagagtttgttgccacttttactgttctatacatcact

SEQ ID NO: 116838 - DNA, 255 bp, Glycine max
agcagatcttgcctcttccaacatgaccttattgaaatcgtatggggatttccaaaagaatactcccgaagagcgcaatgttaggtttggtgttagagaacatggaatgggagcaatctgtaacggtattgctcttcatagccccggattcattccatactgtgcaactttctttgtcttcactgactatatgagagctgccataaggatttctgcactgtgtgaagctggagttatttatgtgatgactcatga

SEQ ID NO: 116839 - DNA, 252 bp, Glycine max
cttccataaacgggtggtgcctctcttccatctccccagccaaaacctctctcaggaaggccacattacgcccttccgtcttcgcaacccttaacactccttcttctccttcctcttcatcttccttcccctctctcattcaagacaggcctgtttttgctgcccctgcccccatcatcaccccaactgtgagagaggatatggcaaaggaatacgagagagctattgaagaacttcagaaattgttgaggg

SEQ ID NO: 116840 - DNA, 254 bp, Glycine max
aatattccaacttatgttgtcggagtaaatgaaggggactacactcatgagatctctaacattataagcaacgcttcctgcaccacaaactgtcttgctccctttgtgaagatcctggatgcagagtttggaattgtgaagggaaccatgacaaccacgcattcctacactggagaccagaggcttttggatgcttcacaccgtgacttgagaagagccagggctgcagcacttaacattgtcccaaccagcac

SEQ ID NO: 116841 - DNA, 254 bp, Glycine max
aggtaacttgacactcgtactactgccaagttctgatcttcgtctctcattcattggggatgatggtagaacagagagattattcacccttaccaacaaatcccaatgctctgctgttgtggttgatgaaatcccaactgatagttctggccgatcgttccttgtaaggactccagatagcagagctttttatttctggtgctctgaaaagtctaagcttttgggaattgaattgcttggaaagatgaaggatt

SEQ ID NO: 116842 - DNA, 256 bp, Glycine max
cctggagagagcatctgaggaagaactggttaagaaaaaatgggaaagaagagactacttaggtgttcatccacagaaacaagatggcctaagctatgtagggattcacattccagttggtagagttcaagcagatgatatggatgagttggcgcgattggtggacaaatatggaactggagagctcaggctcacagtggagcaaaacataataatcccaaatgtggatagcaacaaaattgatgccttgctcaat

SEQ ID NO: 116843 - DNA, 257 bp, Glycine max
aagaccatgaccatggccatggccacgatcctgctcctgttcacggtcttcgcggtttcatcggccctagacatgtcgataatctcgtacgacaacgcccacgccgccacgtcgcgcaggacgagggagctgatgtccatgtacgagcagtggctagtaaagcacggcaaggtgtacaacgcgctcggagagaaggagaagaggttccagatcttcaaggacaacctgcgattcatcgacgaccacaactcccaaga

SEQ ID NO: 116844 - DNA, 253 bp, Glycine max
agcccccgcaccagaacactcactgctgtacatgaggcaatgctggaagatattgtattgcctgctgagattgttggaaagcgtgttaggtataaaattgatggttccaagattatgaaggtctttttggaccccaaggagcgaaacaataacgagtacaagttggagacttttgctgcagtatacaggaaactttcaggcaaaggtgtcgtgtttgagtatcctactaccgaggcttaggttctatttgtta

SEQ ID NO: 116845 - DNA, 144 bp, Glycine max
attcatgcaagattcagcaagtgcgtatttgaagcagagaccgaaatacttcgagatggcccgtacaaagcaaactgctcgtaagtcaactggaggaaaagctcccagggagcagcttgcaaccaaggctgcacgtaagtctgc

SEQ ID NO: 116846 - DNA, 250 bp, Glycine max
caaacacagaagttgtgcttgttcgcaaaaccatcaatggcatcagcattatcttctctctcctccacctcttcttcactgttacagcacagtttcaccggaaactcgaaggctcctcccactactcaattccccaacaaaaatgtacgcttttcggtcttcgctcaaaagaaggcaaagaaacttcgaaagattattttgaaggaagatgtggcttatgtaggaaagcaagggcaacttcttgatgtga

SEQ ID NO: 116847 - DNA, 235 bp, Glycine max
actcatcaagggttgtgaaagcagagaagtgagatacactaagttatcctcataaatacactctaattaggtggcaagataagtgtctaaccttagtaacattgccacatattgtgttcattttggaattgtgccactaaaattctattcaattcatctatggctgcctcttcttatgctatgcaatcaatcctggcaaaccctttgatccgcatttccagcgggtctagggtga

SEQ ID NO: 116848 - DNA, 250 bp, Glycine max
aactttgcccccttgtaaaacttcttattgtgatgtctaaaagcgaagacttgaagcttttgggaggctggttcagcccatttgccctgagggtgcagattgcccgtaacctcaagggtctagaatatgaggttgttgaagagaccttgaatcccaaaagtgacctgcttcttaagtccaaccctgtgcacactaaaatcccagttttcttccatggagataaagtcatttgtgaatctgcaatcatagt

SEQ ID NO: 116849 - DNA, 252 bp, Glycine max
cagcggcggcaacagggagagaagatgaagttcaatccacgtgtgtcgagcagccgccgcaagagccgaaaggctcatttcacggcgccatcgagcgtgcggcgggtgcttatgagcgcccctctgtcggcggagctgcggtctaagtacaacgtgaggtcgatcccagtacggaaggaggacgaggtgcaggtgatgcgaggaacatacaagggtcgcgaggggaaggtgactcaggtctaccgtcgaaag

SEQ ID NO: 116850 - DNA, 253 bp, Glycine max
ccgccattgaattcttcttccatttctcttttttctgcatacccatttcgtttttcttcccaaatggccctttcttgctccaaagttttaagcttttatctctcgcccgttgtgggtggtggtgatgttccgaaaaagctcactttttcttcttttttgggtctttctaagggtgttggtggaagcaggagctcgagggtgtgtgctgcttcaaatgcacccgcaccactcgctggggtcatatttgaaccat

SEQ ID NO: 116851 - DNA, 254 bp, Glycine max
ggcatccacacaatgcttcttgcaccaccatgccctcaccactccaaccagagcttcatcacagcgcttagttgtgagcaccaaaccaaaccacattgtttgcaaggcacaaaagcaggttgtccaagagggtgaggacactactaacattgtctctcgcaggttggccctcactgttctcattggtgctgctgctgttggctctaaggttgcacctgctgatgctgcctatggagaagctgccaatgtgtttg

SEQ ID NO: 116852 - DNA, 252 bp, Glycine max
gtaacttgaacctggctgatgccatggccagggccaaggtgtttgatatcgacctgcagaaacagttgaggccgtacatggaatccatggttccactccccggaatctatgacccggatttcattgctgccaaccaaggagaccgtgccactaacgtaatcaggggcacaaagaaagaacaagttcaacaaatcatcaaagacattaaggagttcaaagaaagcactaaggttgacaaggtggttgtcctgt

SEQ ID NO: 116853 - DNA, 252 bp, Glycine max
ctgagagtaatgctgaagtgaaaggtttggatgtcgatgctctgtacatgtctcatatccaggttaatcaagcacagaagcagagacgccgcacctacagagctcatggaagaatcaacccttacatgtcatctccatgccacattgagctgatattatctgagaaggaagagccggtgaagaaggaggctgagactcaattggcaacaagcaagaagaagggcgctcttcgaagtggtgcttcatcttaaa

SEQ ID NO: 116854 - DNA, 239 bp, Glycine max
ctcgagccggctcgagcggctcgagtgataagcatgtctttgaggctgacatagtgtttgtctctgtcaacaccccaaccataactcagggtcttggagctggcaaagcagcagatttgacatattgggagagtgcagctcgcatgattgctgatgtctcgaagtctgacaagatcgtggtggagaaatccacagtccctgtcaaaactgctgaaagcatagagaagattctgacccac

SEQ ID NO: 116855 - DNA, 135 bp, Glycine max
cgagaaactgttgttgaggtgcctaaggtcagcggggaggatattggaggccttgagaatgtcaagcgtgagctgcaagagactgttcaatatcctgtggagcacctagaaaaatttgagaagtctggtatgtca

SEQ ID NO: 116856 - DNA, 179 bp, Glycine max
cttgtggttggaaaggtgtatgccaagatcatggagattgagtctcgcctgcttccttgtgggctccatgtcattggtgagccaccctcagccttggaagcagttgcaacactagtgaacatagctgcacttgatcgtcgcgaagatggtatttcctctctcccatcaatactagctga

SEQ ID NO: 116857 - DNA, 247 bp, Glycine max
ccacaacctctcccaagttctaaccaatacttctgtgatggctattcgtttgcctagtgttttgagtgctaaatacattcttcgccgatcaaatctgtttgcaaatcatgcagctacaacgtcactggatgtgcctaaagggcactttgctgtgtatgtaggagagggtgaaaagaggagatatgtgataccagtgtcatatttgaatcagccttcatttcaagaactgctaagtatagcggaggaa

SEQ ID NO: 116858 - DNA, 251 bp, Glycine max
attagcgttgccattctcatcctcctctgtctctctctctccaccattgccatggatccttacaagctccggccatccagcgccttcaattctcccttctggactacaaattctggtgctcctgtttggaacaacaactcctctttaaccgttggagctagaggtccaattctgcttgaggattatcatcttgtggagaagcttgcaaactttgacagggaacgtatcccagaacgtgttgtccatgccag

SEQ ID NO: 116859 - DNA, 252 bp, Glycine max
actgttttgaacttggtaattgtgaagaagggtgagaatgatttaccaggattgactgatgctgagaagccaaggatgagaggcccaaagagagcatccaaaatccgtaaactgttcaacctgtccaaggaggatgatgttaggaagtatgtcaacacctaccgtcgtacatttacgacaaaagctgggaaaaaggtgagcaaagctcctaagatacaaagactggtcacccctcttacgctccaacgaaag

SEQ ID NO: 116860 - DNA, 249 bp, Glycine max
attcaccacaagcatttcaaggacaatccggataacacaaatcctacttataacacgaaaaatggaatctacaaagaaggaattggactagacaatgttgtgatgtcatggggacatgatgagtatatgtatttggttgcaaaggtaaacggcaccactttgcctccagtagcattgttcattatcaaataccattctttttacgctttacatagggcaggagcatatacacatttgatgaatgaagaa

SEQ ID NO: 116861 - DNA, 242 bp, Glycine max
cggatatcacatgatctgagattcctcttatcacgacttttggacacgaatcccaagacaaggataaccgtcgatgagatctataaggacacgtggttcaatgcggatggcgagtatcggttcaaccgggttttggtcaaggagagtgagtgtgaaaagcaattgggtcgaaccggattcaagtccttgaatgccttcgacttaatttccttcctcaaccgggttgataagtccgggccttt

SEQ ID NO: 116862 - DNA, 243 bp, Glycine max
accgtagcagcagcggaagctctagcttgggcagcgaatcacaatggcgagaggattgaagaagcatttgaagaggcttaatgccccagagcattggatgcttgacaaactgggtggtgcatttgctcctaagccctcatctggaccacacaaatccagggaatgcctgccactcatactcattttgctgaaccggctgaagtatgctctgacataccgtgaagtcattgctagtctgatgca

SEQ ID NO: 116863 - DNA, 243 bp, Glycine max
ctccatacgccggatctgctaaaatacgcttgatccatatgggcctcctcgaccacttgtgggacgacaccgtcgccggcccaaggccggaaaacggtctcggcaagctccggaaacaccacaccttcactttccgacctagctccggcaaggaagcggagggcgggagcgtgagatcgtacggtgacgaatcgtcggaggaagcgactagagtgacgcgtagtatcatgatcgtgaaaccgc

SEQ ID NO: 116864 - DNA, 216 bp, Glycine max
atcgagccgaatcggctcgaggaagaaccctgcatttaagccacctaccggattataggcccaccaagcttcagaagaagcttatatataccgatgagagaataccctggttacaatttcattgggcttattattggtcctcgaggtaacacccagaagcggatggagaaagaaactggtgctaaaattgtgattcgtggtaagggatcggtgaaa

SEQ ID NO: 116865 - DNA, 245 bp, Glycine max
gttaaaagccttagccttccctacaactccaaacacaaagacatcatcatccatggctgcctccgtctccactgtcggagctgtcaacagagctcttttgaacctgaatggttctggagctggagcttcagctcccagttcagccttctttgggaccagcttgaagaaggttattgcctcaagggtccccaacagcaaggtttccggtggaagcttcaagattgttgctgtagaagagaagaaag

SEQ ID NO: 116866 - DNA, 248 bp, Glycine max
ctgcacaatctccttcaaaaagcttctcatccatggcgaaaacgctcatttcgtctccatcgttcatcggcacgccgctcccctcgctccctcgccaccacctcccccaccgcaccacgtttgtcactaccaaagtgcacgtgagcctccatgatatttcccctattcaatccttaatccactccattgacttccccggaatcgctaccagacgcgaagcctttcgctacacgctcgccgatgccgca

SEQ ID NO: 116867 - DNA, 247 bp, Glycine max
cgcagctgcttctcctatggcaagccaactcaagtccaccttcactaaaactcttgtagctcccaagggcctctctgcctcttcaccactccacctcctgccttctaagaggcaatttagcttcactgttagggccatccaatcagaaaagccaacctatcaagtgattcaaccaatcaacggtgatcccttcattggaagccttgaaaccccagttacatccagccccttgattgcatggtactta

SEQ ID NO: 116868 - DNA, 200 bp, Glycine max
ctagtaatgcaagcgccgataccctcaatcgtgtgagaggagaagttggcgagatacgcactatcatggtggacaatattgagaaaatattggagagaggtgaccggattgagcttcttgttgataagacagcaacaatgcaagacagtgcatttcactttagaaaacagtcaaagcgccttcgaagagctctttggatg

SEQ ID NO: 116869 - DNA, 207 bp, Glycine max
ctttggtggccacagcaacaataacaatggcagcctcactacaagctgcagctaccttcatgcaacccaccaaggtgggcatggccactcgcaacctcaaatctacacaatgcatttctaaggcttttggcttggaacccgctgcagctaaactcatttgctcccttaagcccgatctcaatcattatgctcaaaaatgtgtcgacg

SEQ ID NO: 116870 - DNA, 196 bp, Glycine max
ttcactatcaccatctagcgctccttattgttgatggagtgtctccatttgtgctcttgatatccgcatggatgactggggagttgatgtggcaataactggctcccagaaggcgctttccctttccctaaagctattgaggcctcaaaacatgctagatcacttagagttttctttgactggaaagactacctca

SEQ ID NO: 116871 - DNA, 206 bp, Glycine max
actggaagttcatgaaaaaactaagcaccactgagctcttgggaaacaaaaccctcggacacttcctacgtattcggacgagggaagttcatgacatcattcaatttttgttccataaatcaaaggctcaagagagcgtgaacctcaccgaagcgcttttgagtctgtccaacaacgtaatatcgcagatgatgttgagcattaag

SEQ ID NO: 116872 - DNA, 211 bp, Glycine max
ggattgcctcctctggatttttgcattttgccaatgtttcggttgggacaccacctttatggtgcttggtagcattggatacagggagtgacttgttttggttaccttgtgattgtatcagttgtgtgcaaagtggtttaaagacaagaaccggaaagatacttaaatttaatacctatgatcctgacaagtcatccacaagcaataaagt

SEQ ID NO: 116873 - DNA, 211 bp, Glycine max
aatggctcggacgttgctgtgaaaattttgatggaacaggattttcttgctgagcgcttcaaggaattcctaagggaggttgcaataatgaaacgtttacggcatccatacattgatttgtttatgggggcagtcactcagcctcctaacttatcaattgtcacagaatatttatcaaggttgtactcctctacatgctgctcatcttttt

SEQ ID NO: 116874 - DNA, 198 bp, Glycine max
gagcgagggatgatgactgatggattcaacagttgcagatgtgtggtttgtacattttactgagaggtgccatgtattcattccctcaaatacgcttgccgccaagagctttagaggctgctaaacaggctggagaggttccagatgtttactactgcctcgcgcttctggaggtcactggcgtatccgctgttcctg

SEQ ID NO: 116875 - DNA, 231 bp, Glycine max
tacgctcggtctgcggctcgatcacaaggcagaaagccagctcatcctagagttttagaaatggcagcagcctcctccatggctctctcttccccatccttggctggcaaggccgtgaagctgggcccatcagcgcccgaagtcgggagggtcagcatgaggaagaccgtcaccaagcaggcctcctccggaagcccatggtacggtgcagaccgcgtcaagtacttgggc

SEQ ID NO: 116876 - DNA, 185 bp, Glycine max
tgtttctcagccgcctcggctagggttcggaaacgaagaagggttctgttttcttttcgcgatgagggccaagtggaagaagaagcgtatgaggaggctgaagaggaagcgccgaaagatgagacagagatccaagtagtgcgttaaacctagtttgtttccgtcgctttcacaattgcatatgt

SEQ ID NO: 116877 - DNA, 204 bp, Glycine max
gcatcaccaggcgatgttccttgagaccatccacctcgatggcttccctgagggttctattcatcttcagtgtggctcttccgttcactcccagttcgatactcgcaccagtagggtattcttctccaataagtgttatttaccgtaagatataccgggtcgtttcagtggagtcagtccgagagctttgactactctgcgagc

SEQ ID NO: 116878 - DNA, 177 bp, Glycine max
caaggctctactctactgcttcaccttctgctctagaaaattcagtggtgatacatggctacgtctactctctctgtagccaaaccagcccttcaggcaaatgggacaggcttctctgaattctctgggctccgcagctcatcaggcttcttcgcttttctcaaaaatcttcagagg

SEQ ID NO: 116879 - DNA, 207 bp, Glycine max
tcggaaggataatgactgatggattcgacagttgcataaatgtggtttgtaattttactgaaggtgccatgtattcattccctcaaatacgcttgccgccaagagctttagaggctgctaaacaggctggaaaggttccagatgtttactactgcctcaagcttttggaagccactggcatatccactgttcctggttcaggatttg

SEQ ID NO: 116880 - DNA, 192 bp, Glycine max
ggggctacgagagttgtattatgaccaaatgcctgaggatcttaggagtttgggggctgcagcatacattagcattgtgggggttgggagcattcttggcaacattgttatagttgttgtggagggtgtgacatcaagggctggtgagaagtggctaggaaacaacctcaataggactagacttgattactt

SEQ ID NO: 116881 - DNA, 206 bp, Glycine max
aaacaacacattaacctttctcattccccatctcctcaccttattcagccactgctaatttctagggttccgaaatggacgctggcggaaatatcaagaagggcgccggaggaagaaagggcggcagcctagagaaaacccggtcacaggtccgacaaaggcggtcacatttccgcgtgggaggaattggccgttatttgaagaaa

SEQ ID NO: 116882 - DNA, 204 bp, Glycine max
atggtccgtgggttccttttattggaactttgtttctatttatatctgtatctaattggtcgggggctcttttaccttggaaaatcatacaattacctcacggggagttagctgcacccacaaatgatataaatactaccgttgctttagctttacttacatcaattgcatatttctatgcgggtctttcaaaaagagtattat

SEQ ID NO: 116883 - DNA, 204 bp, Glycine max
gaaaatcctactgtttttaccaacgaagatgtgctgccctttgatatagaagggacatggaaagctatggaagagtgttacaagttgggaatagcaaagtccattggcatatgcaattatggtatcaaaaaactcactaaactcttggaaatagccaccattcctcctgcagtcaatcaggtggaaatgaacccatcttggcag

SEQ ID NO: 116884 - DNA, 204 bp, Glycine max
ctgccactgaggaaatcagaacaagctcactacttggactgggctgtccatgccttcagaatcatctattttggtgtgcaagataccactcagatccacacccacatgtgctactccaacttcaacgacatcatccactccatcatcgacatggacgctgatgttatcaccattgagaactctcgctctcatgagaagctcctg

SEQ ID NO: 116885 - DNA, 203 bp, Glycine max
ctttgagcaaagccggatgcaaagctttcagtaacatggctgttggatatcacaacgtggatgttgatgctgcaaacaagtatggtgttgctgttggaaatactcctggagtgctccctgagacaacagctgagttggcagcttcattgtctttggcagctgctagaaggatagttgaggcagatgagttcatgagggcagga

SEQ ID NO: 116886 - DNA, 170 bp, Glycine max
gacgaaccgacagtgacgatgtctttctccataaacacttcaccttttgttggccgtgcgggaaagtatgttactagtaggaatttaagggacaggctttatcgtgaacttgagcggaatctggctatgaaagtcgaagatggtgtaacagctgatacatttgttgtcag

SEQ ID NO: 116887 - DNA, 187 bp, Glycine max
tggagacctcactacatgctgcagctaccttcatgcaacccatcaaggttggcatagcctctcgcaacctcaaatctacacaatgcatttctaaggcttttggcttggtacctgctgcagctaaactcacttgctcccttcagcctgatctcaaagaatttgctcaaaaatgtgtcgacgctaccaa

SEQ ID NO: 116888 - DNA, 164 bp, Glycine max
gcttctttctgtctgaaactattatccacagtagctaagcctgcaagcttcgccgtttgaaacagtgcctcaaccatggcagaacaaacagagaaggcttttctgaagcaaccaaaagtgtttctatgctctaagaaaggtgggaagggaaagaggcctgggaa

SEQ ID NO: 116889 - DNA, 189 bp, Glycine max
tgaaaagatctttggttctgtatagtctttttatactatatttaaagagttacttgtaacgtaatacaaataaactcgagtatggatattgtcagttagactatttgactttgttttttcaaccccccaataaattcgaatattatggttatgacactgtttttttcagatttcatttttctataatag

SEQ ID NO: 116890 - DNA, 192 bp, Glycine max
agaagaacaagtagttgagaactaagaaggagaagcaaatggcttcctcagtgatctcttccccagctgttaccactgtcaaccgtgccggtgccggcatggttgctccattcactggcctcaagtccatggctggcttccccaccagaaagaccaacaatgacattacctccattgctagcaacggtggaa

SEQ ID NO: 116891 - DNA, 195 bp, Glycine max
ttttaaagcagatgtgaaaatactggacaatgaaaccatcactgttgatggtaagcccatcaaggttgtttcaagcagggaccctcttaagcttccttgggctgaacttggaattgacattgttattgagggaaccggagtgtttgtggatggccctggggctggtaaacacatccaagcaggtgccaagaaagt

SEQ ID NO: 116892 - DNA, 163 bp, Glycine max
aaactacacctattcagatgttgtcagatccgtgttaggaggtaggaaatttcagctgtgtggattagctcagtacataaatcttgtcggtgtaactatcggttacacgataacggcttcaattagtatggtggcggtgaagaggtccaactgttttcacaaa

SEQ ID NO: 116893 - DNA, 184 bp, Glycine max
cagagatgacgacccgattcaagaagaaccgcaagaagcgcggccacgtgagcgccggtcatggccgtatcggaaagcaccgtaagcaccccggcggccggggaaacgccggtggcatgcatcaccacaggatcctgttcgacaagtaccatccgggcttcttcggtaaggtgggaatgaggta

SEQ ID NO: 116894 - DNA, 165 bp, Glycine max
ctggagctgccaaggctgttggaaaagtcctccctgctttgaatggaaaattgactggtatggcattccgtgttcccactgtggatgtctctgttgttgacctcacagtgaggctggagaaggaagcctcctacgatgaaattaaaaatgctatcaaggaggaat

SEQ ID NO: 116895 - DNA, 193 bp, Glycine max
ggcaaagattttgagcacaatggcctcgacacaatgctttttgcaccaccacgccctcaccactccagctagagcttcaacacagcgcctagttgtgagcaccaaaccaaaccacattgtttgcaaggcagcacagaagcaggttactgtccaagagggtgaggacactactactggccttgtctctcgcagg

SEQ ID NO: 116896 - DNA, 187 bp, Glycine max
gcagtcactgctttgtttagatcagaaccagatcgtgttctcttcttccattggcaaacatggcaactcaaatgagcaagaagagaaagtttgtggcggatggagtgttcttcgccgaactgaacgaggttctgacacgtgagttggcggaggacggttactccggcgtggaggttagggttacgcc

SEQ ID NO: 116897 - DNA, 183 bp, Glycine max
gcttgtgctgccttcgtttgcgtttatatcacagaggaattaacatatatatagcaagcatggcagtcacactctacgaccttagctcttcctctgggttgaagaaacttgatgagtatccttctcccacgcagttacatcaccgggtaccaagctacaaaggatgatcttactgtttatgca

SEQ ID NO: 116898 - DNA, 185 bp, Glycine max
gttttgcttttgccacttcgaaaccaaattttcttcgttcgtccttctgtgatctcttcttccaccatgagcaggtcacggcaaccaccggatttgaagaagtacatggataagaagcttcagatcaagctgaacgcaaatcgcatggttgttggtactctccgtggctttgaccagtttatgaa

SEQ ID NO: 116899 - DNA, 185 bp, Glycine max
ctcgtggaaggatccagaaggccgcatcatcaagagcacaaccagagaaaacgcggtttctcagctcaaggccctccgcgacgacatcgtttcgggcaaggccacttttgaggacatcgccttcgcttctccgaattgcagctccgccaagcgcggcggtgatctcggtccttttagtcgtggcc

SEQ ID NO: 116900 - DNA, 194 bp, Glycine max
cacaagaagactcctcaatcatccatagacatggccaccgtcacttctgcagcagtttctattccctcattcactggcctcaaggcaagcgcaggcaaagtgagtgccgccgcagttaaagtctcagctccccaagccacaaggttctgcggcatcaaggcttccctcaaagacgttggagtcgctgttgtggc

SEQ ID NO: 116901 - DNA, 159 bp, Glycine max
ttcgactccttctctttgcaaccaaatgctggtgctgctggagaatatgctggacttatggttattcgtgcatatcatttggcaaggggagaccaccaccgcaatgtttgcattatacctgtctcagcacacggtaacaaatcctggctagtggcagct

SEQ ID NO: 116902 - DNA, 183 bp, Glycine max
attgaacttcttgaccgtcgtcgtggtcaggatggggcatatgttggatgcatgaagtcaggagaagtgatatcagaagagggaaagccatggtatgaacctgattggtggaaatttggggatgaaaaatcgtatttccgacatgcggctggttcacttgttataatttcaaagaatttggca

SEQ ID NO: 116903 - DNA, 185 bp, Glycine max
acaagatggcatttttcgacccaacccgtgctaaagatttcctctttatatctggaaccaagatgcgggcttttgcaaaaagtggggagaatccgccagaaggtttcatgtgcccaagtgggtggaaggttcttgtcaaatattatgaaagtttgcaggcagaagagccatcacaacagcctgtg

SEQ ID NO: 116904 - DNA, 189 bp, Glycine max
actctaacagccaaagcatggcttctctctcttgctccgccaacgaccttgccccactcatcaacgacaccgccgccgccaactacctctgcgcacaattcgattccatttctagaaagctcgtcgcctacaacctacgccgtcgacaacacctaccttctgttttcagcgtatcttgtcttcgccatg

SEQ ID NO: 116905 - DNA, 184 bp, Glycine max
gcaaaggttgttgcagcagcagcagcaacaacaacaaatgaagcatcaagctgaaatgttgttccgaaggacaatagtggcataaacctgaattttgacagcactagctgcacaccaacaatgtcatccactaagtcttttatttcttccttgagcatagatggcagtgtggctaacttggatg

SEQ ID NO: 116906 - DNA, 161 bp, Glycine max
cagtgctctccggattatgcttatggtgctggtggctttcctgcttggggaatacggcccaactctgtcttggaatttgaaatcgaagtcttaagtgcgcaatgaaaaccttggtagtctgtctctgtcctaaagaataaaattcttccattttcatggac

SEQ ID NO: 116907 - DNA, 186 bp, Glycine max
gagaaagcgaaacgcatagaatcgaaagaggggaaaagaaaaagaaaagttagggttagggattttgagagatggcatcgactaagaagatcacactgaagagttcggacggtgaggccttcgaggtggaggaggcggtggcgctggagtcgcagacgatcaagcacatgatcgaggacgactgcg

SEQ ID NO: 116908 - DNA, 186 bp, Glycine max
gagatttataagcatcctaaagaagaaagaatagcccgaacttggggaaccattgcccctggcctaccttatgttgaacaaactataaccaatgctggaaattggttgattgggggtgacctagaggtcattgaaccaattcagtacaatgatggacttgatcattttcgtctatctccgacacaa

SEQ ID NO: 116909 - DNA, 184 bp, Glycine max
gcagaagaacaagtagttgagaactaagaaggagaagcaaatggcttcctcaatgatctcttccccagctgttaccactgtcaaccgtgccggtgccggcatggttgctccattcactggcctcaagtccatggctggcttccccaccaggaagaccaacaatgacattacctccattgctagc

SEQ ID NO: 116910 - DNA, 182 bp, Glycine max
gttggttgaatggcgagtagccggagaagaacgtttggcaacatgaggtcattcgtaagcaattcgatgggaggtctcaggggcggaagcaaccttgcttcttgggtcgtcgccggaaccctagcctacttcctctggatcaaaccctcccaagacttcaagcgtcaacaacaggagaaggc

SEQ ID NO: 116911 - DNA, 187 bp, Glycine max
gcgagaaatggcgatggcaatggcgcttcgcaggctttcatcttcaattgataagcctcttcgccctctcttcaatgcgggttccctctactacaagtcgtctttgcctgatgaagctgtttacgacaaggagcgacccggagttacatggccgaagcagttgaatgcttcacttgaggtcgttgat

SEQ ID NO: 116912 - DNA, 193 bp, Glycine max
ttgcaattgaagttgaagtcttgcccttctctcttcaactccaaacacaagacatcatcatccatggctgcctccgtctccactgtcggagctgtcaacagagctcttttgaacctgaatgggtctggacctggggtttcagctcccagttcatccttctttgggagcagcttgaagaaggttattggctcaa

SEQ ID NO: 116913 - DNA, 190 bp, Glycine max
actagaaacagtgtgatgaaaatgaaggtccttgttttcttcgttgctacaattttggtagcatggcaatgccatgcgtacgatatgttccctctccgaatgaacactggctatggtgctcgtactccggaggtgaaatgcgcaagttggaggcttgctgtggaagcacacaacatctttggctttgaga

SEQ ID NO: 116914 - DNA, 200 bp, Glycine max
tgcgactgcgcttcacgatgggtgcttacaagtatgtttcggagctatggcgcaagaagcagtctggggggatgagattcttgcagcgggtgaggtgctgggagtaccgccagcaaccttctattcgtccgttctgacaaggtctagctcgcccagatcaagggctcgccgctatgggctttcaagggcttaagcagggt

SEQ ID NO: 116915 - DNA, 193 bp, Glycine max
caagtagttgagaactaagaagaaggaaatggcttcctcaatgatctcctccccagctgttaccaccgtcaaccgtgccggtgccggcatggttgctccattcaccggcctcaaatccatggctggcttccccacgaggaagaccaacaatgacattacctccattgctagcaacggtggaagagtacaatgc

SEQ ID NO: 116916 - DNA, 122 bp, Glycine max
aacactcataacacaaagcacaaagcaaagctcatccttgagttaaaaaatggcagcagcttcttccatggctctctcatccccatccttggctggcaaggccgtgaagctgggcccatcag

SEQ ID NO: 116917 - DNA, 191 bp, Glycine max
ggtttcttccgcattttagagtggtgagaggatggtgggtgttatttcgttggtaacagggatggctggtcctagtgggttttgatcagcttccactgcagaacaggtcactgatggaattgatgccagcaacctcactgcaattatcacaggaggcgcaagtggggtaggcttggagacagcaagagtgt

SEQ ID NO: 116918 - DNA, 190 bp, Glycine max
ccagtgtccattgaggtatggaacccaagtggcaaatacagagttgttagcaccaaaccaatgcctggaactcgttggatcaatcttctcgttcaaaatgatgttcgccttgaaatatgtaccgagaagaaaacgattctgtcagttgaagacatcattgctttgattggtgataagtgtgatggagtta

SEQ ID NO: 116919 - DNA, 190 bp, Glycine max
gaacccccgtgttcccatcattgtcaccggtaacgatttctcaacactctatgcacctctcatccgtgatgggcgtatggagaagttctactgggcaccaacaagggaagaccgcattagtgtttgcaccggaattttccgcactgatggtattcctgaacaggacattgtcaagcttgtttacaccttc

SEQ ID NO: 116920 - DNA, 189 bp, Glycine max
ttaacatatacaaattctctgtgttgtgttgtgtacttgtgttaattgtgttgttgttgtaggaaatttaagtgaagagagaatgatgatgaagtctgctatgtgtgcattggtgcttgtggcactggttgtggttgaagtggggcccatggctgaggctgcggtgacttgcaacccaacacagttgac

SEQ ID NO: 116921 - DNA, 196 bp, Glycine max
gaacaatggcatccacagcgtcgccgatgacggttcaggcgggtcgggttcggaccctgaaagaaggttctcgcggagaatcgggtttgggtccggtcgtgtactggatgttcagagaccaacgtgtgacagacaattgggctctgatccacgctgttgctgaggccaacaaagccaacgttcccgttgccgttgt

SEQ ID NO: 116922 - DNA, 200 bp, Glycine max
ggaaaagtgggatgctcttgaaaacaagtccacagtacttctttatggtggaggggctatagttgctatttggctatcgtcaattcttgtgagcgccatcaactcagttcccttgcttccaaagattatggagttggtagggcttggatacactggatggtttgtctaccgataccttctgtttaagtctagcaggaagg

SEQ ID NO: 116923 - DNA, 199 bp, Glycine max
gccaatcttgatgatgatgtcattaaggctcttacaaagaggacacaagatggaggaacagaagttgtagaagctaaggctggaaagggttctgcaaccttgtcaatggcctatgctggtgccctatttgctgatgcttgccttaagggcctcaatggagtcccagatgttgtggagtgctcattcgtgcaatccactg

SEQ ID NO: 116924 - DNA, 194 bp, Glycine max
gttaagaccgcgaaaacagtggcttcaccagggaggggtattttggccatggatgagtccaatgctacctgtgggaagcgtttggcttcaattgggctagagaacactgaagctaaccgccaggcataccgtaccctcctcgtgacagttccaggccttggtcagtacatctctggtgccattctctttgagga

SEQ ID NO: 116925 - DNA, 193 bp, Glycine max
tacaaagacccaaattcaagcctatgtttttgatgtaattagggcaagtgttccaaaactaaacttggatgatgcttttgagcagaaaagtgaaattgccagagctgtggaagaagaacttgagaaggctatgtcagcttatgggtatgaaattgttcaaacactgattgttgatatagatccagatgtgcat

SEQ ID NO: 116926 - DNA, 189 bp, Glycine max
gaacaagtagttgagaactaagaaggagaagcaaatggcttcctcaatgatctcttccccagctgttaccactgtcaaccgtgccggtgccggcatggttgctccattcactggcctcaagtccatggctggcttccccaccaggaagaccaacaatgacattacctccattgctagcaacggtggaag

SEQ ID NO: 116927 - DNA, 192 bp, Glycine max
ccaatcatctttagttcttcagtaatttattgtgggattctattctaagattttgagaatgtctagctcgtgggtgtggaagcagctgcaactgtgcgcagcaactgcggttgcaacaagtactcttttgacttgagttacgttgagaagacaaccacagagactctagttttgggtgttgggcctgtgaag

SEQ ID NO: 116928 - DNA, 192 bp, Glycine max
cttaaacccaatcccaagaaccacatccaggagaattggaggatccttgacttcttctctcactttccagaaagccttcacatgttcacctttttatttgatgatttgggtgttccacaagattacaggcatatggatggttttggagttaacacatacacactgatcaacaaggctgggaaagcagtgtat

SEQ ID NO: 116929 - DNA, 197 bp, Glycine max
ttcgagcgaatcggctcgaggcaattgaagttgaagtcttgcacttctctcttcaactacaaacacaagacatcatcagccatggctgcctccgtctccactgtcggagctgtcaacagagctcttttgaacctgaatgggtctggacctggggtttcagctcccagttcatccttctttgggagcagcttgaagaa

SEQ ID NO: 116930 - DNA, 195 bp, Glycine max
gtatttttcaagtaacttaaggtttcaaacctaggaagttggaagtcatggcagcaacattgatggcagcaacaagttctggcactcttaaagcaactcctttcctaggccaaggcaagggtgccaatgccaatgctcttagggatgttgtttccatgggaactgggaagtacaccatgggcaatgatttgtggt

SEQ ID NO: 116931 - DNA, 192 bp, Glycine max
gcagatccaccaaccgttatggctgccttcagcggtgatgaaacggcaccgtttttcggcttccttggcgccgcagctgccctcgtcttctcctgtatgggagctgcctatggcacagcgaagagtggcgtgggcgtggcttccatgggtgtaatgagacctgagctggtgatgaagtcgattgttcctgtt

SEQ ID NO: 116932 - DNA, 187 bp, Glycine max
aagtcgacaagggtttggtaccccttgctggttccaacgacgagtcatggtgccaaggtcttgatggtcttgcctctcgctcggctgcatacgaccagcaaggtgcccgtttcgccaaatggcgtactgttgtgagcatccccaacggtccctctgctctggcagttaaggaagctgcctggggtct

SEQ ID NO: 116933 - DNA, 180 bp, Glycine max
attctaccttctccaaaaccatccaactctcatgttcgaagaagacatacacaatctcttcaaacgggggttttcttatcctttcattcaatttcctcaatggcggcttccgtcgatcatcgtctgtactccggtctccacaatggcgtcgttcggcccctcaaaccatgcccggatatc

SEQ ID NO: 116934 - DNA, 189 bp, Glycine max
tgactgactatgagcagaaggctttggaagcacttaagcctgaactcaaggccagcatagagaaggggattgcttttgctcagaagcaaactgttgctgcttaaatttccttgtcagcaggtggtttcttgggttatggatttatttgagcataaatactacttagaggacttaggttgcagatttgtt

SEQ ID NO: 116935 - DNA, 192 bp, Glycine max
tgctgagcctgataggcctctgtggttcccaggcagcacccctcctccatggctagatggcagtttgccaggagattttggctttgatcccctaggtcttggatctgatcctgagagcctgagatggaatgtccaagcagagcttgtgcactgcagatgggccatgttgggagctgctggcattttcatccc

SEQ ID NO: 116936 - DNA, 194 bp, Glycine max
gctggtctcaaatcttttccaaatggctcgcgaaagtgcaccttctataatattcgttgatgaaatagattctctatgtggtcaacgtggagaagggaatgagagtgaagcttcaaggcgtattaaaactgagcttctggtgcagatgcagggtgtgggacacaatgatcagaaagttcttgttcttgcagcta

SEQ ID NO: 116937 - DNA, 195 bp, Glycine max
agaagaacaagtagttgagaactaagaaggagaagcaaatggcttcctcaatgatctcttccccagctgttaccactgtcaaccgtgccggtgccggcatggttgctccattcactggcctcaagtccatggctggcttccccaccaggaagaccaacaatgacattacctccattgctagcaacggtggaagag

SEQ ID NO: 116938 - DNA, 199 bp, Glycine max
atttttattccttctttgtttcttcactttcttccatacacataaccatgtcttctcagactgttgtcctcaaagttggtatgtcatgtcaagggtgtgctggagcagtgaacagggttttgggaaaaatggaaggtgttgagtcatttgacattgatctgaaggagcagaaggtgacagtgaaaggaaatgtggagcc

SEQ ID NO: 116939 - DNA, 182 bp, Glycine max
gataaacataaaaattctgggttgatgcctgatattgaggctaaattagcttctgcagcagttgccgttgcagctgctgcagccattgcgaaggcagcagcagcagctgccaatgttgcctcaaatgctgctcttcaagcaaaactaatggctgatgaagcattgctttcatctggttataa

SEQ ID NO: 116940 - DNA, 185 bp, Glycine max
attgaagttgaagtcttgcccttctctcttcaactccaaacacaagacatcatcatccatggctgcctccgtctccactgtcggagctgtcaacagagctcttttgaacctgaatgggtctggacctggggtttcagctcccagttcatccttctttgggagcagcttgaagaaggttattggct

SEQ ID NO: 116941 - DNA, 188 bp, Glycine max
caagccaagtgaaagtgagaaaaaataaaaatcaaagagcataatgtcagggatcattcacaagattgtgggagacccttcatgtgggagggcacaagaaggaggaggagcataagggtgagcaccatgctggagaatacaaaggggagcaccatggtgaacacagtagtgagtacaaaggagagcat

SEQ ID NO: 116942 - DNA, 187 bp, Glycine max
tgccatggccacccacgcggctcttgcttctacaaggatcccttcaaacacaaggttcccatgcaaggcctctcactctttcccaacccaatgcgccttaaagagacttgaggtgacagaattctctgggcttagatccacttcatgtgtcacatatgctaacagtgctagagaatcttcctttttt

SEQ ID NO: 116943 - DNA, 185 bp, Glycine max
gtagcttaggtgtgcgctcccactccacgcgaagagtacgtgtacatggcgaactggcggacaggccgagcgctacgaggagatggtggagttcatggagaaggtctccgcctccgccgagagcgatgagctgaccgtggaggagcgtaacctcctctccgtcgcctacaagaacgtgatcggcg

SEQ ID NO: 116944 - DNA, 191 bp, Glycine max
cggctcgagaatttgccttatagtgttgatagtgccaagcttgcagggttaattcaggattatggtagcgcagaactaattgaggttctttacgacagggattctggaaaaagtagaggctttgcatttgtgacaatgagttgtattgaagattgtaatgcggttatagagaatcttgatggaaaagagtt

SEQ ID NO: 116945 - DNA, 187 bp, Glycine max
agcttgcagaagcgatttctcatttctcattcttaacaacacacttcaacaatggccaaaaccttcaaatacatcatcctcggaggaggagtttccgctggttatgcggcgagggagtttgccaaacagggcgttaagccaggggagttggctatcatttccaaagaagcggtagcaccttatgaac

SEQ ID NO: 116946 - DNA, 187 bp, Glycine max
gaactatccatacatagccacttcacactcactcactcttgttgccttcatggccaagccagtgtccattgaggtatggaacccaagtggcaaatacagagttgtcagcaccaaaccaatgcctggaactcgttggatcaatcttctcattcaaaatgatgttcgccttgaaatatgtaccgagaag

SEQ ID NO: 116947 - DNA, 185 bp, Glycine max
cttcaaaaacacacaaacgcagacacactactctttgtctctgtattgtgtgtgtgcgagaactggcgatggcaatggcgcttcgcaggctttcatcttcaattgataagcctcttcgccctctcttcaatgcgggttccctctactacaagtcgtctttgcctgatgaagctgtttacgacaag

SEQ ID NO: 116948 - DNA, 185 bp, Glycine max
ccccttatgatcctcttgttttaagacacgcctttgagcaggcagtcataaaaaggttgatgactgatgtgccttttggtgttctactctctggaggtttggactcttctttggttgcatccatcacttctcgttacttggccaacacaaaggctgctgagcagtggggatcaaatttacattca

SEQ ID NO: 116949 - DNA, 187 bp, Glycine max
ttgaagttgaagtcttgcccttctctcttcaactccaaacacaagacatcatcatccatggctgcctccgtctccactgtcggagctgtcaacagagctcttttgaacctgaatgggtctggacctggggtttcagctcccagttcatccttctttgggagcagcttgaagaaggttattggctcaa

SEQ ID NO: 116950 - DNA, 187 bp, Glycine max
gttcttaaagaagacgagtctccttgcatttttggttctattgaaaaacagaggtggtcttatgcctgtgcgaaacagttgattgagaggctgatttatgctgagggtgctgaaaatggcttggagttcacaattgtgaggccttttaactggattggacctcgaatggatttcattcctggcattg

SEQ ID NO: 116951 - DNA, 190 bp, Glycine max
tgcctctctacgatctcgccagccaaaagctctctcaagaatgccacattaggcccttctgtcttcgcaaccgttagcactccttcttctccttcttcttcttcttcttcttccttcccttctctcattcaagacaggcctgtctttgctgcccctgcccccatcatcaccccaactgtgagagaggata

SEQ ID NO: 116952 - DNA, 192 bp, Glycine max
gtaaactttttgcaacaaccatggttgcaatggcagcagcaacagcatccacccagttgattttctcaaagccttgttccccttcacgtctatgccccatccaactatgtgtctttgacactaaacaagtgctatcaagtggcaggagaaggcatgtggggggttctggagttaggtgcatggctgtggggg

SEQ ID NO: 116953 - DNA, 202 bp, Glycine max
ctcgagccgcaaaaagcggagaagcttctcttctcttctctctttctttcaaaccgccatctccttctccttctccttctccttcttcagctgttgaaaataaaaaatggcagacggtgaggatattcaaccactcgtctgtgataatgggacaggaatggttaaagctggatttgctggggatgatgctccaagggctgtg

SEQ ID NO: 116954 - DNA, 199 bp, Glycine max
gtcgggctatccgtcgagctcgggttggactaaaaaatcctaatcgtcccagtgccagcttcatcttttctggtccgactggtgtggggaagtctgaattggccaaagcattggctgcatactactttggctccgaagaagctatgattcggcttgacatgagtgaattcatggaaaggcacactgtctccaaacttat

SEQ ID NO: 116955 - DNA, 192 bp, Glycine max
gcagaagaacaagtagttgagaactaagaaggagaagcaaatggcttcctcaatgatctcttccccagctgttaccactgttaaccgtgccggtgccggcatggttgctccattcactggcctcaagtccatggctggcttccccaccaggaagaccaacaatgacattacctccattgctagcaacggtgg

SEQ ID NO: 116956 - DNA, 196 bp, Glycine max
cacgttccgagttttctgatcgctcatagagagttcgacgcggcggttgcagatgaagattgcaagatgaagttcaacatcgcgagtcccaccactggatgccagaagaagctcgagatcgacgacgatcagaaactacgagcattttgggacaagaggatctcacaggaggtcagcggagatgcacttggtgagg

SEQ ID NO: 116957 - DNA, 197 bp, Glycine max
taaacctggttatgaggttgatgaaattaaaggaggtgtagctggtggaagcattctgaggggtgttttgaaggtcaatcaattcattgaagttcgtcctggcattgttgttaaagacgagagtggaaatatcagatgcacacccatatactcaagaatagtttcattgtacgctgaacaaaatgagcttcaatttg

SEQ ID NO: 116958 - DNA, 200 bp, Glycine max
gttaagaagtagcaaagatgtttccattcgggcagaagggtcaaaagataaaggggactatggtggttatgcagaagaatgtgttggatatcaacagcatcacgagtgttgacgggatcgtcggcaccggcttagacttcttaggcagtgcactcgatacagttacttttttagcctcctccatctccatccaacttatt

SEQ ID NO: 116959 - DNA, 204 bp, Glycine max
aaaaataaaactctttcaacaaaagatcaacacccatttcaattctcaaatccaagctcgggaacagagaaggagaaagagaatggacgccattgattctgtgttcgatccgttgagagaattcgcaaaggacagcgtgaggctcgtgaagcgctgccacaaacccgatcgcaaagaattctccaaggttgccgtgcgtaccgc

SEQ ID NO: 116960 - DNA, 200 bp, Glycine max
atcctgttcgtcatgcagaaacgttccccatacctcctgctatctgcagtggaaggcgtgaaaagtgtggaattgagaaggagaacaactttaagcagcccggagagagataccgatcttgggcacctgacaggcaagatagatttaatcgccgatgggttgatgctttatctgacccacgggtcacccatgaaatccgc

SEQ ID NO: 116961 - DNA, 198 bp, Glycine max
gtgctgaaacatggcttcggctactctctctgtagccaaaccagcccttcaggcaaatgggaaaggcttctctgaattctctggcctccgaagctcatcaggcttccttcccttttctagaaaatcttcagaggatttccattctgtcattgccttccagacctatgcagttggaagcagtggaggatacaagaaggg

SEQ ID NO: 116962 - DNA, 196 bp, Glycine max
agatagataagccttccacagcctcacaaaaatgaagaacactacctcgttcgctctctttctactttgtgccttcttcacctcatacctaccttcagccaccggtgcttttgtgcttgacagtgatggaaaccctcttgaaaatggtggcacatactatgtgccagcaccaaataactgcggtggaatagaatac

SEQ ID NO: 116963 - DNA, 196 bp, Glycine max
tggaacctactctactgattttattgaggagtgggtcaaaattggcttgcctgcaaaggcaaaggtgaagacacagcatggggatgccccttttgctgagttgtgctcacactgtgagaaggaatctgtgaatgtttcccttggaaacctgctaacttacccatttgttagagatggcttggtgaacaaaacattg

SEQ ID NO: 116964 - DNA, 194 bp, Glycine max
ttccaatttacctcattggagaattgttaagaagcatgaagaaagaccattttgtcagtgacagtggcgatattgtatactatcaaacagaccctacacttagtagctcttccacatcacagtaaatcatccattttttcctcttgaagacaacagagaggcctcagaattatgctgcatatgacacaatttct

SEQ ID NO: 116965 - DNA, 193 bp, Glycine max
ccttccctggccaatccattgatttctttggtgcactgagggccagagtatatgatgatgaagtgaggaagtggatttctggtgttggtgttgacagtgttgggaagaagcttgtgaactcaaaagatggacctccaacctttgagcagcccaagatgactctggagaagctcttgctgtatggtaacatgct

SEQ ID NO: 116966 - DNA, 197 bp, Glycine max
gaaatttcagaatttttttttcatacatgtcaaagtgatggaaaagaaagaatatcttttatgtatccaccaaatttatcaacttttcataaaatgatggaaaccaaattttatctcttcacaaaagataaaatttcctatgatgaattgtctaattattggagctatactaatgaagaaaaaagaaacaaattgag

SEQ ID NO: 116967 - DNA, 200 bp, Glycine max
gcagatgatctgttgctgtaacaagatggatgccactacccccaagtactctaaggctaggtatgatgaaatcgtgaaggaagtctcttcttacttgaagaaggttggttacaacccagacaagattccctttgttcccatctctggttttgagggtgacaacatgattgagaggtccaccaaccttgactggtacaagg

SEQ ID NO: 116968 - DNA, 195 bp, Glycine max
atcaaaagaaaaaagagaaacaaatggcagcactgggtggctttaccgacatcaccggagcacagaacagcatcgatatcgaaaatctcgctcgctttgctgttgatgaacacaacaaaaaagagaatgcagttctggagtttgtgagggtgattagtgcaaagaaacaagtggtttctggcaccttgtactata

SEQ ID NO: 116969 - DNA, 194 bp, Glycine max
atccactttcactggaatcacaatcctgaaacaaaaacatcttagcatttaacatactactagacaacatgaccaccacattggaaagaggtttctcggaagagcaagaagctctggtggtgaagtcatggaatgtcatgaagaagaattctggagagttgggtctcaagtttttcttgaaaatatttgagatt

SEQ ID NO: 116970 - DNA, 191 bp, Glycine max
ccctcactaggagctcttctccattggttcttcatctgcatgcacacacttgcatagttttggaaaccaagaatttttgaagggtagcatcaacaagaagttctggaaatggagatcaccaatgtcagcgagtatgaagctattgcaaagcagaagttgccaaagatggtgtttgactactacgcatctgg

SEQ ID NO: 116971 - DNA, 194 bp, Glycine max
attctccatacctcaacgaagaggttaaagagacggcaacactttgctgtccgccttgaccgagcagagcttcgtcttggccctcgattttgccctaaagtactctcagtcacaacagacaccgtcgtcgtcgtcgtcgtcatcaatggcaccgaagcagaccaaggctgagaagaagatcgcttacgatgcga

SEQ ID NO: 116972 - DNA, 197 bp, Glycine max
ggcagaaagcaagctcatcctagagttttaaaaatggcagcagcctcctccatggctctctcttccccatccttggctggcaaggccgtgaagctgggcccatcagcccccgaagtcgggagggtcagcatgaggaagaccgtcaccaagcaggcctcctccggaagcccatggtacggcccagaccgcgtcaagta

SEQ ID NO: 116973 - DNA, 197 bp, Glycine max
agataagccttcgtctctgcagagtgcagagctttctcgccccgttgcttcaggcattctcaacaacaaaccaatctgtcttagaaaatgagggggggcttgtggcaacttgggcaatcgatcactcgccgtcttgcccatggagataagaaggctgttgctcgtcgatgtgttgcctcagaagctgagctgaaaaa

SEQ ID NO: 116974 - DNA, 197 bp, Glycine max
agctagcgaaggaatatgctggaaaaattgcatgctttaagcttaacacagatgattctccaaacatagcaacacagtacggcatcagaagcataccaacagttctgttcttcaagaatggagagaaaaaagaaagcataattggtgcagttcccaaatccactctgtccgcaacagtggaaaaatacgttgattca

SEQ ID NO: 116975 - DNA, 193 bp, Glycine max
tgggtgcagaaatgggtgaccttgttcagggtggcttgattggattactgcgtggtattgaaaagttcgattcttcaaaagggtttaagatttcaacttatgtttattggtggatacgtcagggtgtttcaagagctttagttgagaattcaagaacattaagattgcctgctcatttgcatgagagattatc

SEQ ID NO: 116976 - DNA, 194 bp, Glycine max
cgtctacgccgccacggaaactcaattacacgatgaccccaacgtggcactcttcttcttggaaaaggacttgcattctggaacaaagttggacttgcacttcaccaggagtacatctaatcaagccacgttcttgtcacgccaagttgcggattcgatacccttttcatccaacaaggtggactttatattca

SEQ ID NO: 116977 - DNA, 195 bp, Glycine max
aaccacccaatacactgtcaacaaccagatggtgaatgccaccctcatgaacattgctgataaccccaccaatgtgcagcttcctggtatgtataacaaggaagagaatccccgtgtgcccatcatcgtcaccggtaacgatttctccacactctatgcgcctctcatccgtgatgggcgtatggagaagttcta

SEQ ID NO: 116978 - DNA, 197 bp, Glycine max
gtaagtgttcgtttcattaatggtagccctcagaacactgttgtaccagggctgattgatcttgccatcgcgagggacactttgattggtggagatgacttcaagagtggtcagaccagaatggaatctgtgttggttgatttccttgttgggggctggtatcaagccaacatctatagtcagttacaaccatctgg

SEQ ID NO: 116979 - DNA, 196 bp, Glycine max
cttgagtggaagtggggctattgctggtgcttattcaagggcatacaaggaaacctttacactgacatatgtaactggcagaactgttggaattggtgcttatcttgctaggcttgggatgagatgcatacaaaggcttgatcagcccataattcttactggtttttcagcattaaacaaacttcttggtcgggag

SEQ ID NO: 116980 - DNA, 195 bp, Glycine max
tggccaccgtcacttctgcagccgttgctattccctcattcactggcctcaaggcaagcgcaggcaaagtgagtgccgcagttaaagtctcagctccccaagccacaaggttgggcatcaaggcttcgctgaaagacgttggagtcgctgtaataaccactgccgcgagtaatgtgctggctagcaacgccatgg

SEQ ID NO: 116981 - DNA, 190 bp, Glycine max
aatccctctgcctcgtgtctcatcctgagccaaaacaatgcatcttcgagcacatatacttcgcgcttcctaactctgttgttttcgggaggtccgtgtacgagtctagaaaaaaattcggagaaatactagcctctgagagtcccgttgagtgtgacgttgtgatcgcggttcctgattctggcgttgt

SEQ ID NO: 116982 - DNA, 192 bp, Glycine max
gtggaacactaccattggtcaaggtagaggaaatatcccagattattgactcgctgaattttaccgtccaaaactctgttcagttcgctggtcctttggccaccacctcaattagtactaatgccaaatttgatgttcgaagtccaaaacgtgtgcagataaagtttgaggaaggcataattggcactccac

SEQ ID NO: 116983 - DNA, 192 bp, Glycine max
ctccaacaagtgtttctgtaaccatggcatccaccactctatcccctacaaccccttctcagctatgctcaggaaagagtgggattttcagtccctcacaggcacttcttgtgaagccagtgaagaggcagatgatggggaagagcaagggaatgagaattgcatgccaagccaccagcattcctgctgata

SEQ ID NO: 116984 - DNA, 189 bp, Glycine max
ttgcaattgaagttgaagtcttgcccttctctcttcaactccaaacacaagacatcatcatccatggctgcctccgtctccactgtcggagctgtcaacagagctcttttgaacctgaatgggtctggacctggggtttcagctcccagttcatccttctttgggagcagcttgaagaaggttattggc

SEQ ID NO: 116985 - DNA, 192 bp, Glycine max
atagcccaagccctatacaaccaaaccctaacacacacccatttgattcagtttccatggctagcctcaaggttgcatttttggctgcagtgctctgcatggttgtggtgagtgcacccatggcacatgcagctatcacgtgcgggcaggtgacgaatagcctgatcaattgcatcggttacctccagaacg

SEQ ID NO: 116986 - DNA, 192 bp, Glycine max
gaaatttaagtgaggagctagagaatgatgatgaagtctgctatgtgtgcagtggtggttgtagcacttcttcttctggcggaggtggggcccatggctgaggctgtgacatgcaccccaacagagttgagtccgtgtcttccagcaatcacttccggtgctaaaccttccaatgcttgttgcacgaagctg

SEQ ID NO: 116987 - DNA, 262 bp, Glycine max
atcaagtatgatccttcaactggtatttatggaatggatttctttgttgttctggagcgacctggctatcgtgttggacgtcgccgaagatgcaagtcccgtgttggaattcagcaccgagtcacaaaggaggatgctatgaagtggttccaggtgaagtacgagggagtgatccttaacaagtcccaggctattctttagttagattgagttcactttaggagtgtgttatcagttttgtcaactatagctcgatctttct

SEQ ID NO: 116988 - DNA, 244 bp, Glycine max
ctcaggctcaggctctaaatatccgagaccaagggatgtagggtccaattcaccctttgatttgccattgaaggatgatgacagcctcacaagctgcccaccattttcagtgccaaactacatggctccaaccctttcagcccgggccaaagcacgtgctagacataatcctagagaaaggcttggtggaactccaactagtactgattcaaagaggaggctctcattccctttatcacaagga

SEQ ID NO: 116989 - DNA, 260 bp, Glycine max
gaaaaaagcgatcatagtttcacttcggccttatccagtttagggtttcggttctctaccctatctttcacgtatcgaaaccttaaatttacgatcaggtctgagcaatctggttggtagaacctttggtcttagtgagtcaagttttatgtctgaattagacgatcaaattcctactgccttcgatccttttgctgatgcaaatgctgatgactcgggtgctgggtcaaaggagtatgtgcatattcgtgtacagcagc

SEQ ID NO: 116990 - DNA, 257 bp, Glycine max
gctgcggaaaacgttgttgagttcacagacttacccgtcaagaggccaagagaagaagaagaaggaaccaatggcgtctccaacgacgccgtttcagcgctccccaatgaccctcaataccctggcatctctgcggttattcccggttggttctccgaaatcagcccaatgtggcccggggatacacattccttgaagatggaaaagattttgtttcaagggaagtctgactatcagaatgtcatggtcttccagtc

SEQ ID NO: 116991 - DNA, 250 bp, Glycine max
gagtgatcggtgttcacttgatctcatcataatcgtcagcgtcaattgaagaagatgccgatcagaaacatcgccgtcggaaggcctgaagaggcgactcaccccgacacgttgaaggcggctttggctgagttcatctcaaccttcatcttcgtgttcgccggctcaggctccggcatcgcctacaacaagctcaccgacaacggtgttgccacccctgccggcctcatctccgcctccatcgcccatg

SEQ ID NO: 116992 - DNA, 259 bp, Glycine max
tgaggagctcacctacgactacaagttccccatcgaggatgccagcaacaagctgccctgcaactgtggcgccaagcgctgccgtcggttccttaactgaggccgtggctgcccaccacgacccctcacacctcctgctgccgtcgctgccatcttgcccctagcctgggggctccctagcccctcccagagcatctcacccccaccctcatgttcagggtggatgtgggcatgcaggtgacaagggccctgcctccac

SEQ ID NO: 116993 - DNA, 260 bp, Glycine max
  unsure (1)..(260): unsure at all n locations
cccgccgcnactcacactgtcttccttctctagggtttttagctcctccaaattcttcgcccaacatggttcttgcaaaatgatattgatttgctaaatcccccggctgagcttgagaagaggaaacacaagctcaagcgtcttgttcagtcaccaaactctttcttcatggatgttaagtgccagggttgcttcaacataaccactgtctntagccactctcagactgttgttgtatgcggaaattgccagaccgtctt

SEQ ID NO: 116994 - DNA, 260 bp, Glycine max
caataacaatggcagcctcactacaagctgcagctaccttcatgcaacccaccaaggtgggcatggccactcgcaacctcaaatctacacaatgcatttctaaggcttttggctctgaacccgctgtcgctaaactcatttgctcccttaagcccgatctcaaagattttgctcaaaaatgtgtcgacgccaccaaaattgcaggattcgcccttgccacctcagctctcgttgtttctggagcgagtgcagaaggtgtt

SEQ ID NO: 116995 - DNA, 255 bp, Glycine max
ggaggttcgtaggcagttcaacaccattccaggactgatggagggtcatgccaagcctgattatgccacctgcgtcaaaatttctactgatgcatccatcaaggagatgattcctccgggtgcccttgtcatgctcacaccgctcattgttggaatcttcttcggggtggaaacactttcaggtgttcttgccggggctctagtttctggtgtacagattgcaatatcagcatccaacactggcggtgcttgggg

SEQ ID NO: 116996 - DNA, 256 bp, Glycine max
cgcaacaaaaagaaagaatcccaggcgaggagaaagatggaggggaaggagcaggatgtgtcgttgggagcgaacaagttccccgagagacagccgattgggacggcggcgcagagccaagacgacggcaaggactaccaggagccggcgccggcgccgctggttgacccgacggagtttacgtcatggtcgttttacagagcagggatagcagagtttgtggccacttttctgtttctctacatcaccgtcttaa

SEQ ID NO: 116997 - DNA, 255 bp, Glycine max
ctcgagccgatcgagccggtcatcccaaccccggagggcaaactcagtggcattgcactccgtgtgcgaacaccaggcgtgtcagtggtggacctcgtccgtcaggtctcaaagaagacgtttgcagaagaagtgaatgcagcattcagagacggtgcagacaatgagctccagggaatcctttctgtgtgagatgagccacttgagtctgttgacttcatgtgcactgatgtgtcctcaaccgttgactcatcg

SEQ ID NO: 116998 - DNA, 255 bp, Glycine max
gttggtttcaagcatgttcgggtgtggagtggtgatggcggcgtcgcaagcaatgggaattggaaggagaagcgatggtcggttgacgatagtgtgttcgtctaggccgcagaagaaagcgacggcgcatcacatgaagactcggcctcggaagacgcatgcatgggatagaaaccgcaagcccaccgtctacgatccactccctcctcttcctcctgattggacctcgttattcccgctgcacgcttcttctgc

SEQ ID NO: 116999 - DNA, 251 bp, Glycine max
ccgcctttcgcattgcaagctctctctttctttgcttttgcttccccctttttgtttgctcaacgctgcaactatccatggcaaaccgctggctcagacccgaggtgtatccactgttcgctgcggttggtgccgctgttgggatctgtggattccctttggttcgtaatatctgcatcaaccctgaagtcagggtgaacaaggagggaagaaatgcaggagtgttggagaactttgctgaggtatagaag

SEQ ID NO: 117000 - DNA, 253 bp, Glycine max
aagaactagaactagggtttcatctttgccatcagtaaacgacaatgatttacgacgttaactctcctcttttccgatccttcctcagccagaagggaggctcctctgataagaggaaatcggacgaacagaagccaaaagagcagaaacccaaagccagcgagaacaaacctataatgactgagtgataacagctgagctgcattcagttgtagaatgaaaataggtggtaggtattgtatttggtgctaaa

SEQ ID NO: 117001 - DNA, 254 bp, Glycine max
cgatctggtacgagttaagacaggacaattgtacagattgcgaaatcatagcgcaaccaatgtggcttcattatcaacttatgattcttccaatccaacagaacattgggattttccccagttatcacctaatagaaaaatcaaacgtcactctaagtccagtgaaagctctgcttcagctttggatgaaacccctattgagaaggcattgtctgcattgccaagtcagctctctgcctctaagaaaataaaac

SEQ ID NO: 117002 - DNA, 249 bp, Glycine max
caaatcctctaattcaagtttgcaccaagttttcctgagaaaatgtctggtcgtggatagggtggaaagggtttgggaaagggaggtgccaagaggcacaggaaggttcttcgcgacaacattcagggcattacgaaacctgcgattcgtaggttagcgagaagaggtggcgtgaagaggatcagtggtttgatctacgaggaaaccagaggggttctgaagatattcttggagaacgtgattcgcgat

SEQ ID NO: 117003 - DNA, 253 bp, Glycine max
agcacaggcaggtgcagggtctgctaccttgtcaatggcgtatgcagcagctagatttgttgaatcgtctcttcgtgcccttgatggagatggggatgtgtatgagtgctcatatgtggaatcagatttgactgaccttccattctttgcttcaagggtgaagcttggtaggaaaggagttgaggcattaattccatctgacctccaagggttgactgactatgagcagaaggctttggaatcacttaagcca

SEQ ID NO: 117004 - DNA, 251 bp, Glycine max
ctcagaattctctacaagagatctttttctgctctttgaagaaagaagggtctttgcttgattttggagatgtctctgctctcagatctcatcaaccttaacctctccgataccaccgagaaggtgatcgcagagtacatatggatcggtggatcaggaatggaccttaggagcaaagcaaggactctcccaggatcagttagcgacccttcagagcttcccatgtggaactatgatggtaccagcacagg

SEQ ID NO: 117005 - DNA, 250 bp, Glycine max
tttctggctaaccaaccctgacactccttcttctccgcttcctcttcgatcatcgcttcagaatgccgccgaagttcgacccctcccagatcgtcgacgtcttcgtacgcgtcaccggcggtgatgtcggcgcggcgagttccctcgccccgaagatcggtcccctcggtctcttccccaagaagatcggagaagatatcgccaaggaaaccgccaaggactggaagggcctccgcgtcaccgtcaagct

SEQ ID NO: 117006 - DNA, 251 bp, Glycine max
gcaaaaagaaagaatcccaggcgaggagaaagatggaggggaaggagcaggatgtgtcgttgggagcgaacaagttccccgagagacagccgattgggacggcggcgcagagccaagacgacggcaaggactaccaggagccggcgccggcgccgctggttgacccgacggagtttacgtcatggtcgttttacagagcagggatagcagagtttgtggccacttttctgtttctctacatcaccgtctta

SEQ ID NO: 117007 - DNA, 250 bp, Glycine max
caagtagttgagaactaagaagaaggaaatggcttcctcaatgatctccttcccagctgttaccaccgtcaaccgtgccggtgccggcatggttgctccattcaccggcctcaaatccatggctggcttccccacgaggaagaccaacaatgacattacctccattgctagcaacggtggaagagtacaatgcatgcaggtgaggccaccaattggcaagaagaagttcgagactctttcctacttgcca

SEQ ID NO: 117008 - DNA, 250 bp, Glycine max
aaaccctagcccaaccggatcttcacgactaggagatggcaaagtcgaagaaccacaccgctcacaaccagtcctacaaggcccataagaatggcatcaaaaagccaaagaggcatcgccacacttccaccaaagggatggatccaaagtttctgaggaaccagaggtacgcgaggaagcataacaagaagagcggtgaaacagccaccgaagaagagtaaagtgccactctcaaatgggcctattagga

SEQ ID NO: 117009 - DNA, 250 bp, Glycine max
  unsure (1)..(250): unsure at all n locations
ggtggatacctaggcacccagagacgaggaagggcgtagtaagcgacgaaatgcttcggggnattgaaaataagcgtagatccggtgattcccgatataggtcaacctttcgaactgctgctgaatccacgggcaggcaagagacaacctggtgaactgaaacatcttagtagccagaggaaaagaaagcaaaagcgattcccgtagtagcggcgagcgaaatgggagcagcctaaaccgtgaaaacggg

SEQ ID NO: 117010 - DNA, 245 bp, Glycine max
gcaatcaataatcaagttacccacagaccaaccaagggtagtgaaactgacccacttgcattttttctaccacgacatcttagagggcaagaacatcacggtggtgaaaatcatcgagccatcagcgtgcgaggttcgtgaagcaactgggtttggaaccactttcatgatggataatgttttgaccgagggttttattctgagctcgaagcacgttgggagggctcatgggctgtttggcttgg

SEQ ID NO: 117011 - DNA, 245 bp, Glycine max
gcgtgattccttggcggagtgcgagcgtgcaccgagccgcggcgagacaaaacgctgcgttgggtcggtcgaggacatgatcgactttgccacctctgttttgggccgaaacgtcgccgttcggactacccagaacgtgaacgggtctaagaagagtgtggtggtggggcctgttaggggaatcaacggtggtaaagtcacccaatccgtgtcgtgccaccagagcctgttcctatatctgcttt

SEQ ID NO: 117012 - DNA, 249 bp, Glycine max
aattcacaaccgaaacagtttccatctctctcacaaaatgacaacaatatcaaattgctcccttctcttcctcttcctcttcctctccaccctccacatagcttccaccctctcaacccccaccaacttcatcaagtcctcctgcagcaccacccagtacccagccctctgcatccagtccctctccgtctacgcctccaccatccagcaagacccccacgagctcgtccagacagccctctccctctc

SEQ ID NO: 117013 - DNA, 243 bp, Glycine max
caaaaccctaagacacagaggagaacacaaacagcagcgtcttggtttgtgagagagacagaggcacagagagaaaatggtttcggggtcaggaatctgcgcgaagagggtagttgtggacgcgcggcaccacatgctggggaggctggcatcgatcgtggcgaaggaacttctgaatgggcagaaggtggtggtggtgcgctgcgaggagatttgcatctccggtgggctcgtcaggcagaa

SEQ ID NO: 117014 - DNA, 240 bp, Glycine max
gtgggagcaagaggaatggtagtcgccctcctcatttttgcaagagcagtggtgccattgctcgtcacattcttcaacagttgcagaacatgcgcatcattgaactggacaccaagggtggcaggaaaatcacttccagtggccgacggtatcttgaccaagtggctggacgcattctggttgcacaatgattcatgatttgaaaatgccataagcattatgaggtttttgggttcttgt

SEQ ID NO: 117015 - DNA, 281 bp, Glycine max
  unsure (1)..(281): unsure at all n locations
tactcggctcgagctgcaatgtatggcattgctgtggctgcccttgggatgctgagcaccattgcgactccgatggctattgatgcctatgggccaatcagtgacaatgcaggaggtattgacgtgatggcaggcatgagccatcgtattcgtgagagaactgatgcccatgatgcttctggcaacacttcngtggncataggcaagggatttgctatnggggctgccgctctggtgtctttggccctatttggtgcatttgtgagcagagctggaattca

SEQ ID NO: 117016 - DNA, 274 bp, Glycine max
ctcaacctctgcagcgccttcgatccagaaaacatgactaagagaacaaagaaggctggcattgttggaaaatacggtacccgttattgcgctagtctgcgtaagcagattaagaagatggaagttagtcaacacagcaagtttttctgtgaattttgtggaaagtatgctgtgaagaggatagctgtgggaatatggggatgcaaggactgtggtaaagtgaaagctggcggtgcttacactttgaataccgcaagtgccgtgactgtacgga

SEQ ID NO: 117017 - DNA, 264 bp, Glycine max
caaggacgagacgttgagaaaccgcagtgggccggctaaaatgccttacactttgctctatccttctagtgaggagggattgcctttcagaggaattcccaacagtatctccatctaggggctctatggttgttgcagtactttccctggtttgcaatacaagtgaatagaaggaatatgatacctccatctacctatgtatgggtaagttatgtattacgggtgattgaatgttcccgtgttcgctgttaagtgttcatgaag

SEQ ID NO: 117018 - DNA, 265 bp, Glycine max
  unsure (1)..(265): unsure at all n locations
gcttcagatgattcttaatggagtggggcgagtgatagtgatgatagtagaagttataaattttcagaaagtgtacgataggtacgtgattctatacgagataggacaacaatgcttacattntcccgggctttggtcnngggntggtaatctcaggagcaatcagagtgcatgatgatatgctattagcgttnntgtggagccttggctaaactagtgtctaacgagaattacgaaaagggcttgatttatccaccattctcta

SEQ ID NO: 117019 - DNA, 260 bp, Glycine max
aacgcggcagagcgaagagaaggggcaaaagagaaagaagcgcttatcgaactcggacggaagcactgagttgactcggagggagtggaaagtgttgttgcgtaatgtctggtggtatcgctcgtggacgcctcaccgaggagcgcaagtcgtggcggaagaaccatccccatggttttgttgcgaaccggagacgctgcccgatggaaccgtgaatttgatggtgtggcattgcactattcccgggaagactgggactg

SEQ ID NO: 117020 - DNA, 259 bp, Glycine max
ctcaattttcaatggctcaatcccattctggaaaaacctcttccatgacttcaatactcctcctgtttatgcttcttatcagtaatacaggcacaacaggtgcacacactggtgtatgctatggaagagttggcaacaatctgccatcgccacaagaagtagtttccctttttaaacagtacgtcttccaaaggatgagaatctatgatcgaaaccatgaagtcctccaagctctgagagattccaacattgagttgct

SEQ ID NO: 117021 - DNA, 274 bp, Glycine max
ggtttggcttcctgtcattgaagacatagaagtgaagttctaattggtgttattgagcagatagcatggagccacagtgtagaatcaagaaggatgccactgaattgatagggaataccccaatggtatatctgaacaacattgtggatgggtgtgtagcccgtattgctgctaaattggagtacatgcaagcgtgctgtagtgtcaaagataggattgctttgagcatggattgaagatgctgagaaaaaaggccttattacacctggaaaga

SEQ ID NO: 117022 - DNA, 260 bp, Glycine max
aagaaaatggcgggtggtggaaaggtttcgttcaaagtcacactcacctccgatccaaagttacccttcaaagtgtttagcgttccagaggcggcaccttttactgccgttctcaaattcgccgccgaagaattcaaagtcccgccccagaccagcgctatcatcaccaacgatggtgttggcataaatccccagcagagcgcaggcaatgtcttccttaagcatggttcagaactgcgcctgattccgcgtgatagggt

SEQ ID NO: 117023 - DNA, 258 bp, Glycine max
cagtctctctataaacctcagcttcatcagtgggtactttcatctacgtaaccataacttatcagatgttgctcatttgttccaagacctattgcacgtactgtagaagggtaaaagctgttttcaaagagttgaaccaagttccacatgttgttgagctcgacgagagagaggatggttcaaagattcaggatatcatgattaatattgttgggaggcgtactgtgccacaagttttcattaatggaaaacaccttg

SEQ ID NO: 117024 - DNA, 261 bp, Glycine max
gggagtgagagagagtgttcttcgtttgctaccttctcccagaaatggttacgttcaggtttcaccagtaccaggtggtcgggagggctctcccaacggaagcagatcagcatccgaagatctaccgaatgaagctctgggccaccaacgaggttcgcgccaagtctaagttctggtattttttgaggaagctgaagaaggtgaagaagagcaatggtcaagttcttgctatcaacgagatttttgagaagaacccaacca

SEQ ID NO: 117025 - DNA, 259 bp, Glycine max
gacacaatacagagtgagttgttgctccttcgccacaactctctgccaacatgggtatctccagagattctatgcacaagaggcgtgccactggtggcaagaagaaggcctggaggaaaaagagaaagtatgagcttggtcgccagcctgctaacactaagctgtcaagcaacaagacagtcaggaggatccgtgttagaggtggaaatgtgaaatggagggcattgagattggatactggaaattactcctggggaac

SEQ ID NO: 117026 - DNA, 259 bp, Glycine max
accctagccactctcccggcgtcacgatgcagatcttcgtgaaaaccctaacgggtaaaacgatcacgttggaggtggagtcttcggacaccatcgacaacgtgaaggccaagatccaggacaaggaaggcatccctccggaccagcagcgcctcatcttcgccgggaagcagctggaggacgggcgcaccctcgccgactacaacatccagaaggagtccacgcttcacctcgtcctccgcctccgaggcggcgccaa

SEQ ID NO: 117027 - DNA, 257 bp, Glycine max
cttggctttagcaaattccaattcccaattcccaattcgaaacccttattcctttcaaagaaccaaattgagtgatcgtgatggcaccaaaggcagagaagaagccagcggagaagaagcccgcggacgagaagaagtcgacggtgggagacaaggctccggcggagaagaagccaaaggccggaaagaagcttccgaaggagggaggcgccggcggagaagggaagaagaagaagagaaacaagaagagcgtggag

SEQ ID NO: 117028 - DNA, 251 bp, Glycine max
gattgttgtgactcgttcttcttcgtcgttatcttcttcttttgttgtctgtgtgtctgttttttctctcacctgaaaatgtcttgctgcggtggtaactgtggttgcggatgcgcctgcaagtgcggcaacggctgcggaggctgcaagatgtacccagacttgagctacaccgagtcaaccaccaccgagaccttggtcatgggagtggcaccagttaaggctcaattcgagagtgctgaaatgggtgt

SEQ ID NO: 117029 - DNA, 255 bp, Glycine max
gctggagctggttctgcaacactatcaatggcatatgctgctggtaaatttgcagatgcatgccttcatgccctgagatctgatgctggcatcattctatgtgcatatgttgcttcacatgtgactgaactcccattctttgcatcaaaagtacgacttggccgagttggggtggaggaaattcttcctcttggtcccctgaatgattatgagagggagagtttggaaaaggccaagaaagagttagcagcaagc

SEQ ID NO: 117030 - DNA, 268 bp, Glycine max
gttgtttctcagccgcctcggctagggttcggaaacgaagaagggttctgttttcttttcgcgatgagggccaagtggaagaagaagcgtatgaggaggctgaagaggaagcgccgaaagatgagacagagatccaagtagtgcgttaaacctagtttgtttccgttgcttttacaattgcttatgttgtcaaataggacacctagttgttagtggcactggtctctcctttttgatgttttgatacattttgttggattttatttcg

SEQ ID NO: 117031 - DNA, 266 bp, Glycine max
gggagcttgagaaaaagtttagtggcaaggatgtaatcttggttgccacccgaaggattttgaggccaccaaagaagggttctgctgctcagcgtcctcgtagtcgcactcttactgctgttcatgaagcaatgctggaggatgttgtattgcctgctgagattgttgggaagcgtgtgatcttccgaattgatggatccaagattatgaaggtttacttggacccaaaggagcgaaacaacactgagtacaagttggagtacttt

SEQ ID NO: 117032 - DNA, 257 bp, Glycine max
aacaattgagggaaggtgtacacaatttctttgtaacattcattgaggtgctacgtgatagacctcctggtcatgattgcgaacttgaacctggtgtcacatgcggtgactacttgtttggtatgctacagggaacaagatcagctctgtatgccaataaccgagagtccatcacagttactgtacaagaagtgacacctagaactgttggtgctcttattgcactctatgaacgagcagtaggaatttatgcctcc

SEQ ID NO: 117033 - DNA, 253 bp, Glycine max
cggctcgaggaaacagtgtgatgaaaatgaaggtccttgttttcttcgttgctacaattttggtagcatggcaatgccatgcgtacgatatgttccctctccgaatgaacactggctatggtgcccgtactccggaggtgaaatgcgcaagttggaggcttgctgtggaagcacacaacatctttggctttgagaccattcctgaagagtgcgttgaagcaacaaaggaatacatccatggcgaacaatatag

SEQ ID NO: 117034 - DNA, 270 bp, Glycine max
gaacttataaatcaatgcttattccacttctgcaagaagataatagagctggcgaaacaactcgcaaagggttttatttgtatgatgataaacgcaaggctagtcctgatcctgaattgaagaactatattgagaaggctaggagcatttctggtgtctccgttgatccaaagcttgccaaattacaagaaaaggatatcatagagatgatattctttcctgtggtgaatgaggcttgtcgggtccttgatgaaggtatcgcagtcaaag

SEQ ID NO: 117035 - DNA, 263 bp, Glycine max
gcagatgctacctagggggcgtgtctatcgttatcctcctggtaggggtatgccagatgtttctatgcccggggttgctggaggtatgttttctgttccatatgatgtgggtgggatgccactgcgtgatgcatcaatctcccagcatattcctgttggggctttagcaacagctctggctaatgcttctccagagcagcagaggacgatgctgggtgagaatctctacccccttgtggaacagttagagcctgacaatgctg

SEQ ID NO: 117036 - DNA, 262 bp, Glycine max
gggtcttccccaatggggaggttcagtatttgcaccccaaggatggtgtgtaccctgagaaggtcaacgccggacgcgaaggggttggtcagaacttcaggtctattggtaagaatgttagtcctattgaggtcaagttcactggcaagcaaccctatgatttgtgagcaactctatcatcattcccccatgcttcttccattcgtttatatgctatattgtcatctcatgtcatgccaggaatgctataactctttacctt

SEQ ID NO: 117037 - DNA, 256 bp, Glycine max
gcgtaccgaaggcagtggcagcgacgatccggctcacggtgccggccggaggagctcggccggcgccaccggttggaccggcgctgggtcagtaccggctgaacctgatggcgttctctcaggacttcaacgcccgcacccataagtacaaggcggagacacccatggccgttacgataacggcgtacaaggacaacagcttcccgttcaccgttaagtcgccgccggtgtcgtggtacctgaagaaagccgccgg

SEQ ID NO: 117038 - DNA, 253 bp, Glycine max
gaagctgcaaaatggcttcataaagtggttgatcgccccaatgtgtatattaagattcctgctacagaggcatgtgtgccttcaattaaggaagttattgctaatgggataagtgtgaatgtgacgctgatattctctcttgcaagatatgaagctgtaattgatgcatacttggatggtcttgaggcatctgagttaaatgacctctctagagttacaagtgttgcctctttcttcgtcagtagagtggaca

SEQ ID NO: 117039 - DNA, 249 bp, Glycine max
gcagttggtggcatctgggaaaccagacagcttcagtggggagttcctagtgccggcttaccgtggttcctctttcttggacgccaagggaaggggtgcctcaactggtcatgacaatgctgttgctttgcctgctggtggaaaaagagatgaagaggaacttgccaaggagaacaataaaactgcttcatcttccaaagggaaaatcaccttgagtgtcaccaagtccaagcctgagactggtgaggt

SEQ ID NO: 117040 - DNA, 236 bp, Glycine max
cgggatcactcttcgtagtgaattacatcgcattgggctctagcagcgtatcctcactcatcatgcaggctagtgataggtttaacatgaattctcagctcgagcatctccaagccagatatgttggaactggccatgctgagttgaacagatttgagtgggcagtgaacattcaacgtgatagctatgcatcatatatcgggcactacctctactgggattcggtgctattgctg

SEQ ID NO: 117041 - DNA, 264 bp, Glycine max
gttgaaaagaaaccctagcaagtggagcaatggcagacgttgaagtcgatgtggcggcacagcagcagcagggctgccgaagaagagaacgttcaagaagttcagttttcgaggcgtggatctcgatgcacttctcgacatgtccaccgatgaactcgtcaagatgttcagtgcccgtgctcgtagaaggttccagagaggcctcaccagaaagcccatggccttgatcaagaagctccgtaaagcgaaaagggaagctccacc

SEQ ID NO: 117042 - DNA, 250 bp, Glycine max
  unsure (1)..(250): unsure at all n locations
cgggatccctcttcgtagtgaattacatcacattgggttctagcagcgtatttcactcaccatgcaggctagtgataggtttaacatcaattctcagctcgagcatctccaagccaaatatgttggaactggccatgctgatttgaacagatttgagtgggcagtgaacattcaacgtgatagctatgcatcatatattgggcnataccctttactgggattctttgctattgctgaaaatgaatctatt

SEQ ID NO: 117043 - DNA, 231 bp, Glycine max
cttcaatttaaacacagagacaaaatcatcgccttcagagtcttgtctctcgagaatcatcgaataaaactagggtttccgatcgtcgtcgaggagaatgccgtagaacaagggaaagggaggaaagaaccggaagcgcgggaagaacgaggcggacgacgagaagcgggagcttgtgttcaaggaggacggccaggagtacgcgcaggtgctccggatgctggggaacgg

SEQ ID NO: 117044 - DNA, 163 bp, Glycine max
agaatacctatttgggaggattgatatgcagctcaagctcgttgctggcaactctgctggcactgtcactgcttactacttgtcatcccaagggccaacacatgatgagattgatttcgagtttttgggaaacctaagtggggacccttatattctccacaca

SEQ ID NO: 117045 - DNA, 267 bp, Glycine max
acaatttcaattgttcttctttttacataatcatggccatgaaacgtgctgttcaatccctgcttgcctcatcttccaccctcaccaggaaccttcatgcctcaggagaaaaaaagaagattgtaggggtgttctacaaagggaatgagtatgcttcgaatcccaattttgtgggatgtgttgaaagagcattgggtatacgtgagtggttggaatcacagggtcaccagtacatagtcactgatgacaaagaaggacccgattcag

SEQ ID NO: 117046 - DNA, 269 bp, Glycine max
  unsure (1)..(269): unsure at all n locations
agaagaagggatgagacaggaagaagctgaggatgatgattttgcgattgatggaactgaattgacacccgagcagcaagcagctttagctgagatcaggaaaaagaaaagcttgctcatccagcagcataggatcaaaaagagcaatgcagagaatcggccaactgttccaaggaagtttgataaggacaagcagttcacatcagaaagaatgggaaggcaactgtcatctttgggcgctgatcccgtttgngcattaagagaatgca

SEQ ID NO: 117047 - DNA, 263 bp, Glycine max
ggaagctggagggaacaaaggtgtgtctgataaacagattcgtttgaagattttctcgccgaatgttctcgacattacgctcgtggatctccctggcatcaccaaggttcccgttggcgaccagccttcggatatcgaggctcgaatcagaaccatgatcatgtcttacatcaaaactccaacctgtgtcattctcgctgtgacgccggcgcaattcggatttggcgaactcggatgctcttcagatggctggaattgccgat

SEQ ID NO: 117048 - DNA, 266 bp, Glycine max
gtcgactctgggaagtcaactaccactggtcatttgatctacaagcttggaggtattgacaagcgtgtgattgagaggttcgagaaggaggctgctgagatgaacaagaggtcattcaagtatgcctgggtgcttgacaagctcaaggctgagcgcgaaagaggaattaccattgatattgctttgtggaagtttgaacaccaccaagtactactgcacagtcatcgatgcccccggacatcgtgactttatcaagaacatgatta

SEQ ID NO: 117049 - DNA, 251 bp, Glycine max
atagagcaagcaatcacaaacctcactaagcttctcactgatgaaaataggggagaggatctgtgcagccttctcactcagttgaggccattcttctccttgatacctaaggcaaaaactgcaaagattgttaggggaataattgactcagttgctaaaataccagggacatctgatctacaaattgcactctgcaaagaaatggtgctatggactcgtgctgaaaagcggacctttctgagacagcgagt

SEQ ID NO: 117050 - DNA, 264 bp, Glycine max
ttcggctcgagaatcaatctccaggctatctatcaagtaagccagctgttaagaggaggagaatggctgatgatggaagcacgagggaattgatattcaggtcgaagcttccggatatctacatccccaaacatatgcccctccactcttactgcttcgagaatttgagagagtgtggttcacgcccctgcctgatcaatgctcccacgggagcacgtctacagctaccacgaggtggaaagcaccgccagaacaggtggcgag

SEQ ID NO: 117051 - DNA, 265 bp, Glycine max
cgtaaaaatgggttcttcttcttccatatggaccgtgtgttctgattttggcatcactggcctctgcagcactctgtgccaaccctcgtagaccagtggatgtacaatttggccgaaactacgtgcccacatgggcctttgatcacatcaaatacttcaatggaggttctgacattcagcttcatcttgacaagtacactggtactggcttccagtccaaagggtcatacttgtttggtcacttcagcatgtacataaagatggt

SEQ ID NO: 117052 - DNA, 245 bp, Glycine max
ctccatctcttcattccttaattcaaaacctccactcattccataaatctctgtatactctcctcgattttaccgcaacatgacacaagaaggacatggcaacaccaacttctgtatgagtgttaacaacaacggctacattagcgctaatgacccgttgaactggggcgcggcggcggaggcgatggccgggagccacctcgacgaggtcaagcgcatggtggaggagtaccggacgccggtcg

SEQ ID NO: 117053 - DNA, 264 bp, Glycine max
gtgttatgttctcaaggagcccatcggagttgttgcattaattactccatggaactatcctctattgatggctacatggaaagttgctcctgctctagctgctggttgtacagcaatattgaagccatctgaattggcatctgtgacctgtttggagctggctgaaatatgcagagaagttggccttcctccaggggtattaaacattgttactggattaggcaatgaagctggtgctcctttgtcatctcatcctgacgtaga

SEQ ID NO: 117054 - DNA, 270 bp, Glycine max
agcgatcgaagtttcacatcagccttatccagtttagggtttcggttccttaccctacctttgacgtatcgaaaccttaaatttgggattaggtctgagcaatctggttggtagaacctttggtcttagagagtcaagttttatgtctggattagacgatcaaattcctactgccttcgatccttttgctgatgcaaatgctgatgactcgggtgctgggtcaaaggagtatgtgcatattcgcgttcagcagcgaaatggtaggaaaag

SEQ ID NO: 117055 - DNA, 210 bp, Glycine max
agagggagtcagagaaaccctaggtaagaagaaaagatgccggctggtcatggtttgagatcccgcaccagagattccttctctcgtcctttcaggaagaagggaaccatcgccctcaccacatacctgagaacctaccacgtcggcgactatgttgacgtcaaggttaacggtgccgttcacaagggaatgccccacaaattctaccat

SEQ ID NO: 117056 - DNA, 257 bp, Glycine max
atcaaccttctttctttttctgtgagcctttctttcaggttcttaacttgatcagtgtgcagtgtccaaatcataagggtagttgcaaattgcaatggctaagcatgatgttgagggtggttccttctctgcaaaggactaccatgatcctcctccagcaccgttgattgatgctgaggaactcacacagtggtccttctacagggctttgattgctgagttcattgccacaatgctcttcctttacatcacagtgc

SEQ ID NO: 117057 - DNA, 258 bp, Glycine max
gtgaactggagaagaaactgaagtacgcaggagatgtttcttccggaattatctttggacagggagcttgtaaattctcctgctaatgtgctcacaccaggggtgttggcacaagaggcagctaagattgcttctacctacagtgatgttttcactgctaaaatattaaatgccgagcaatgtgctgaattaaaaatgggatcctatctgggtgttgctgcagcctcggaaaatcctcctcattttatccatctatgt

SEQ ID NO: 117058 - DNA, 260 bp, Glycine max
cggaagcaagaagtacctcatgatggtgccatgtgtgaccttctatggtcagatcctgaagatattgtggataactggggtcttagtccccgcggtgctggttacttatttggtggcagtgttgttacttcctttaaccactcaaataacattgactatatatgtcgtgcacatcagttggtaatggaaggatataaatggatgttcaataaccagatagttactgtctggtcagctccaaattattgctacagatgtgg

SEQ ID NO: 117059 - DNA, 252 bp, Glycine max
tatcgctgtggttatcatcttcttcttcctctttcttagatctcttctttctctacgccgcacgccgaaaccatggccggaaaaggagagggtcctgctatcggaatcgatctcggaaccacctactcttgcgtcggtgtgtggcaacatgaccgcgttgaaatcatcgccaacgaccaagggaacagaaccacgccgtcttacgtcggattcactgacaccgagcgtctcatcggtgatgcggccaagaat

SEQ ID NO: 117060 - DNA, 253 bp, Glycine max
gtgaaaataaaaagcaatgggtagccttgaagcggaaagaacaacagtaggattggcagcaagagacccttcagggattctctccccatacacctacaatctaagaaacacaggccctgatgatgtttacataaaagttcactactgtggaatttgccattctgatctccaccagattaaaaatgatcttggcatgtccaactatcccatggtcccaggacatgaagtggttggtgaggtactggaggtgggg

SEQ ID NO: 117061 - DNA, 241 bp, Glycine max
tgacgatgatgatgatgtggatttgttcggtgaagagacagaagaagagaagacggcagcagaggaacgggcagctgcagtgaaggcatctacaaaaaaaaaagagtctgggaaatcatctgttctgttggatgtgaaaccatgggacgatgaaactgacatgaagaagctcgaagaagcagtgagatctgttcagatggaagggttgctttggggtgcatccaaacttgtacctgttggg

SEQ ID NO: 117062 - DNA, 250 bp, Glycine max
atcttagttatctaattacctcaattaatcccttaattgcaagcatcatggctgaggagaaacaccaccaccacttccaccaccacaagggcgatgatgtgcctggcgaggttgattatacagaaggaggagaagcaccacaagcatcttgagcaccttggggaacttggtgctgcggctgccggtgcttatgccttgcatgagaagcatgaggccaagaaagacccagagcatgctcacaggcacaagg

SEQ ID NO: 117063 - DNA, 211 bp, Glycine max
cttcgctgttttcgacggccacggttgctcacatgttgcgacgacgtgcaaggagaggttacacgagatagtgaaggaagaggttcaccaagcgaaggagaatttggaatgggaatcaacgatgaaaaagtgtttcgcgcgcatggacgaagaggttttaaggtggagtccgaacaacgagacctccaagttgcggtgcgagcttcagacc

SEQ ID NO: 117064 - DNA, 246 bp, Glycine max
agggacctttgatttgtttgacaccaggaagaagatgaacaacatcaagctttatgtcaggagggtgtttataatggacaattgtgaggagctcattcctgagtaccttggatttgtgaaaggtgttgttgactccgatgacttgccgctcaacatctctcgtgagatgctgcaacaaaacaagatcctgaaggtgatcaggaagaatctcgtgaagaagtgcattgagatgttcaatgaaattgc

SEQ ID NO: 117065 - DNA, 244 bp, Glycine max
gccagtagtcatatgcttgtctcacagattaagccatgcatgtgtaagtatgaactaattcagactgtgaaactgcgaatggctcattaaatcagttatagtttgtttgatggtatctactactcggataaccgtagtaattctagagctatgcactgcaacaaaccccgacttctggaagggatgcatttattagataacaggtcaacacaggctctgcctgttgctttgatgattcatgata

SEQ ID NO: 117066 - DNA, 242 bp, Glycine max
cccacacacacagttcgtcggaatgggaagggtgattcgcgctcagcgtaagggtgctgggtcggtgttcaagtctcacactcaccaccgcaagggtccggcgaggttccgcagcctcgacttcggcgagcgcaacggctacctcaagggcgtcgtcaccgacatcatccacgaccccggtcgcggcgcccctctcgccaaggtggcattccgccaccccttccgctacaagaagcaaacgg

SEQ ID NO: 117067 - DNA, 238 bp, Glycine max
gcacgtttagcctcgttctatgaacgtgctgggaaggtaaaatgtcttggaggccctgaacgtacaggtagcgtaactattgttggtgctgtttcgccacctggaggagatttctcagatcctgtgacatctgcaaccctgagcatagttcaggttttctggggtttggacaaaaagcttgctcagaggaagcactttccttctgtaaactggcttatttcttattcaaaatactcaa

SEQ ID NO: 117068 - DNA, 231 bp, Glycine max
aagttaatagcattccgcaaaatggctgccaccaccttagtctctgaagtcactctcccctcctcctccggccagcggaagatgccgctgatgggcctcggcaccgcgccggaagcaaccagcgcggttaccacaaaagatgctgttcttgaggccatcaagcagggctacaggcactttgatgctgcttctgcttatggtgtggaacagtctgcaggagaagccatagct

SEQ ID NO: 117069 - DNA, 245 bp, Glycine max
atcttcccaaaagaatacaaatctctttgaagttttcgtagttctctgaatcatggagatggaacgcgtcttcgaatttcctcacacttacatggatcgtcgcccgagaaagagagcgagattgggctgggacatccctgaagttcccaaggctcaggtaggattgttttgtggacaagatgttgggactatttcaagctttgctccttcaaggggtccctcagaacataccactagttctctat

SEQ ID NO: 117070 - DNA, 246 bp, Glycine max
gtttaaacctaattctcatttcttcatcgttcgattcttctcctcctaaagatgcagatcttcgtgaaaactttgaccggtaagaccatcacccttgaggtggagtcctccgacaccatcgataacgtgaaagctaagattcaagacaaggaagggatcccacctgaccagcagagacttatctttgcgggtaaacagcttgaggatggtcgaacccttgccgactacaacatccaaaaggaatcc

SEQ ID NO: 117071 - DNA, 248 bp, Glycine max
aataaccaacaagaaattgagctctttgagggccaatctcttctgtacatgcagctatatgggcacctaagacctatgtgtcttaagtgggctgttcaactaggtattccagacataatacagaaccatgccaaacccatttctctttctgacttggtctctactcttcaaattccaccagctaacgctgcttttgtgcagcggttcctgtgcttcttggcacacaatggaatctttgagatccatga

SEQ ID NO: 117072 - DNA, 238 bp, Glycine max
tgttgatcgagataactagaaacagtgtgatgaaaatgaaggtccttgttttcttcgttgctacaactttggtagcatggcaatgccatgcgtacgatatgttccctctccgaatgaacactggctatggtgcccgtactccggaggtgaaatgcgcaagttggaggcttgctgtggaagcacacaacatctgtggctttgagaccattcctgaagagtgcgttgaagcaacaaagga

SEQ ID NO: 117073 - DNA, 234 bp, Glycine max
tgtgtgtctgctggctagaatgatggctgctaatttgcacttctctcagattgaggatctcatgtttgagctgtctatgtggcgctgcaatgatgagctacgtgttcgttctgatgaactccttagctcctcaaagagagatgcaaaacattatattgagttttggaaacagattcctcccaatgagccgtatcgtgttattctcggtgatgtaagggcacaattatataatac

SEQ ID NO: 117074 - DNA, 219 bp, Glycine max
gtacctctctctgacacaagaattaagttgtgagatggagagaagtagtgaagaggagatgttaataacgaaaggtccattgacagagcaagaggattctcttctcttcaattacatcactgtccacggcgaaggtcactggaactctgtcgctcgctacacaggtctaaaacgaacgggcaaaagctgcagattaagatgtgtgaactacttgcgtcc

SEQ ID NO: 117075 - DNA, 223 bp, Glycine max
gctcgggatgaaatgggtcagattctacaggaccaaaccttgtgggagttaaggaatgatggaagaaaagagatagtaaaaagtaaataaaaatgcagtagaagagtcctgattccaaacgaaaaaattcaaacttgattgaaaaggatcttgctgagtatttaagaatgggacaaaaggattgatctcgaaaaagatttcttgttcttattagaagatcgtg

SEQ ID NO: 117076 - DNA, 218 bp, Glycine max
agctttcctcttaagtggcacattggtaaggatgttcctaacaatttgttgaggcacattaccttggacaacaatgaggacaaacctgtcactaacattagggatacacaagaggttatgttggagcctgggctgaaattaattaaaattttcaaggaatataccagcaagacatgcattttggatgagttagccttctatgaggctcgtcagaaaac

SEQ ID NO: 117077 - DNA, 216 bp, Glycine max
agcctttctgcaatcatggcagcagtgtcgaatgccgccttgacatgaaaaacttgataggggaagctatctgtgggatatgccaagagagctttagcactacaatcacagctttatcagagccaatagacatatacagtgagtggattgatgaatgtgaactggtgaaccacccggatgatgatggtgctgagcactgatgctcagattcctgtt

SEQ ID NO: 117078 - DNA, 216 bp, Glycine max
gttttgactgagttgaacaatgatttgttccggaagaccatgtgtgccagtgaagaacgctatcgaagatgcaggatctacagaacagtcagattgatgagattgttcttgttggtggaatcacaacgattccaaaggtacaacagcttttgaaggactactttgatggaaaggagccagacaatggtgtcaaccctgatgaagcagttgcctatg

SEQ ID NO: 117079 - DNA, 213 bp, Glycine max
caaggacacattaaagctaggtgcttgtgctgatctcttaggacttgttaacattattgttggaactcctccttcgagccagtgttgtgcattgatcaagggtttggcggattttgaagctgcactttgcctatgcaccgcaattaagagcaatgtgcttggaatcaacttgagacggtacctgtgacgctcagcgtgatccttagtgcttgt

SEQ ID NO: 117080 - DNA, 211 bp, Glycine max
tgaaacgtgacaagggcttcaaagaagggaagcaaaggattcttagtggcaacagatttagtaggaagggggattgacatagaacgtgttaatatagttattaactatgacatgcctgattctgctgatacttacttgcacatggtgggaagagcttgtagatttggcacgaagggtcttgcaattacttttgtgtcttctactgctgact

SEQ ID NO: 117081 - DNA, 212 bp, Glycine max
tagaaatgctggttgatcctgatctccatagcaattacatagatgctgaggtagaacagttaatccaggttgcactgctttgctcacaaggttcccctatggaccggcctaagatgtcagaagtggtgcgagtgcttgaaggtgatggcttggcagaaagatgggatgagtggcaaaaggtggaagttctgcgccatgaagtggagttggcc

SEQ ID NO: 117082 - DNA, 212 bp, Glycine max
gcgaggtcgcggaggatcggcagggaacaagttccgcatgtcactgggtctgccggtggcggcgacggtgaactgcgccgacaacaccggcgcgaagaatctctacatcatatcagtgaatgggatcaagggaaggctgaaccggttgccgtcagcttgcgtgggtgacatggttatggccaccgtcaagaagggaaagcctgatctccgta

SEQ ID NO: 117083 - DNA, 212 bp, Glycine max
gcgtataaaaggaaaataaagaaattagcgacaaaatgttgggtgtgttcaacagctccatagtgtcgccgccggacgagctcgtggccgccggcagccgtactccgtcgccgaagatgacggcggcggcgctgcggaagcggttcgaggagaagaacccctccgccgtgtcggtggaggaaggagagcatgtccagctcgcttatacccac

SEQ ID NO: 117084 - DNA, 208 bp, Glycine max
cagaaatgctggttgatcctgatctccatagcagttacatagatgctgaggtataacagttaatccaggttgcactgctttgctcacaaggttcccctatggaccggactaagatgtcagatgtggtgcgaatgcctgaaagttatggcttagcagaaagatgggatgcgtggcacaaggcggaatttcttcgccatgaagtagagtt

SEQ ID NO: 117085 - DNA, 209 bp, Glycine max
agtggcccaggaagcatcaagaagatcactttccttgaggatggagaaaccaagtttgtgctgcacaaaatagagagcattgatgaggcgatcttgggatacagctacagcgtggttgggggtgctgcattgccagacacggcggagaagatcacatgcgactccaaattggttgctggtcccaatggagggtctgctgggaagctcac

SEQ ID NO: 117086 - DNA, 228 bp, Glycine max
cgggatcggctcgaggggtttatcatctgcttcaatggggaatggaacagggatcttcggtaagaggaggagagaagacccagactctctgtgtgaggtgtggccgccgcagcttccacctccagaagagtccctgcgccgcttttgcgttccccgctggacgcacgcggaaatataactggagcgtcaaggcaattcgcagatagaccaccggaactggcaggatgg

SEQ ID NO: 117087 - DNA, 209 bp, Glycine max
gactcttcaaaggcagagtctatagttaaaaaactccatatggatggacgttatcttagagatgtctggtaaattttctgattattcatctttctgggttgtgccttccttgctatttggtctgttaagttcaatattggttgaaggatatttgatactcttctatcacggagttttgggacaccaatgatggaggctgaaatttcctt

SEQ ID NO: 117088 - DNA, 210 bp, Glycine max
ctctccaggccttacagtatgtgcaggagaacccagatgaagtttgccctgctgggtggaagcctggggagaagtccatgaaaccagaccctaaacttagcaaagactactttgcagcggtgtagctaggatactagatagttaagagtggctatctgcatctgtatcagtcagtgtgaattgcaaaagggtcttgtttcttaatgtttt

SEQ ID NO: 117089 - DNA, 211 bp, Glycine max
ctttgctttcctggctctttcagaagatgttgaacaagtagtggacataagtggcaaccccattttcccaggtggcacatattacattatgccatcaacttggggcgctgccggtggtggattgaaactaggccggacaggaaactcaaactgcccagttactgttttgcaagattactcagaaatcgtccgtggcacaccagtcaaattc

SEQ ID NO: 117090 - DNA, 172 bp, Glycine max
aaaatgctcagttctaactaatgaaatggattgcctagtaggggtttctgcatatcacctgtatagtagttatatgcatatgtttctgtgtatgttctctacacaattgtaaggtgtcactgtattgaactgttgcacttgtcaactttcaataaagcatataaatgttgat

SEQ ID NO: 117091 - DNA, 264 bp, Glycine max
ctggattattgccattcacaaggaatcatgcatcgtgatgtcaaccacctcaaccctgattgatcatgagcagcgtagcttcgccttatagattgggggcttgcagagttctatcatcctgggaaagaatataatgttcgcgtggcatcaagatatttcaaatgtcctgagcttcttgccgccactcccctatatgattactctctagatttatggagtcttggttgtatgtttgctgggatgatattccgtaaggagccattc

SEQ ID NO: 117092 - DNA, 265 bp, Glycine max
ccacactgagaggacgagggagtgagcgagagtgcccctcgtctgctaccttctcccagaaatggttacgttcaggtttcacgagtaccaggtggtcgagagggctctcccaacggaagcagatcagcatccgaagatctaccgaatgaagctctgggccaccaacgaggttcgcgccaagtctaagttctggtattttttgaggaagctgaagaaggtgaagaagagcaatggtcaagttcttgctatcaacgagatttttgag

SEQ ID NO: 117093 - DNA, 254 bp, Glycine max
gtgcttttgcttttgatgaggaaaactcctccaccgtggctccggcaacactctacaaagctctgacaaaagatgctgacactatcatcccaaagattattagggccatccaaactattgaaatcgttgaaggaatggaggacccggaaccgtcaagaagataacagctagtgaaggtgaccaacccagtttcgtgctgcaaaaagtggatgcaattgacgaggctaacttggtatacgactacagcatagtgg

SEQ ID NO: 117094 - DNA, 248 bp, Glycine max
gagaaacatggcttccttaagctccttagtgctgctccttgcagctctaattctatcccctcttgttcttgcaaactatctgaatcccccagtgtacaagcctcccactgagaaaccaccagtttataagatccagttgagaagcctcctgtttacaaacctccagttgaggagcccccactccctcagccaccagtagagaagccaccagtgtacaagcccccagttgagaatgccccagtgtacta

SEQ ID NO: 117095 - DNA, 245 bp, Glycine max
gcaatacattgtggaaggagtgcagaatcttggacacccaacaccgatgtgtcatgggctacatccccccacccccgtattttactgccataaagtccgtgaaacaacagccatcatggttccattagtggctggtgatggaaccaaaactacggcacttgctgtttgccactcagatacttctggaatgcatcatcacatgattcatgaactcatgggagttgatcctggaactaacgctgttt

SEQ ID NO: 117096 - DNA, 258 bp, Glycine max
cgctggccgccaaggtctccccaactattatatttgttgatgactttgatagtatgctgggacagcggaccagagttggagagcatgaagccatgcgcaagataaagaatgagtttatgactcattgctatcgattatgacactctccggggagcgcatccttgttcttgctgcaaccaataggccatttgacctcgatgaagcaataattaggagatttgaaaggagaattatggtagggatgccatctgtcgagaa

SEQ ID NO: 117097 - DNA, 215 bp, Glycine max
gagcttgttccttgcgatatcaataccacaatattttgtcatgaacactgcacctgctggtcatggttcagttagaacaggtggtggatggtttactgacattttgaacaccatattctcttctgccccaatgtggctcttattgctgctgactcttgttgacaaccacttgcagggcaccctcccgctgtggacagaggacttccatggtgggg

SEQ ID NO: 117098 - DNA, 251 bp, Glycine max
gtaacatagcagcaagtgtagctggcaaggcatatgagctacgcctggctactcgtctccctcgtcctcagaatcttgtcacatatgctgagagctgcatgtattctcctgccaacagaaactataggtgaattatggggcaagtcacttgactttggctgtaataaacacatgtcttggtggcatgtgtgagttgttttatgtaacttatgcataagtgagtggttttatgctatttattatgaaatcac

SEQ ID NO: 117099 - DNA, 238 bp, Glycine max
ctcgttcttcttcgtcgttatcttcttcttttgttgtttgtgtgtttgttttttctctcacctgaaaatgtcttgctgcggtggtaactgtggttacggaagcgcctgcaagtgcggcaacggtgcggaggctgcaagatgtacccagacttgagctacaccgagtcaaccaccaccgagaccttggtcatgggcgtggcaccagttaaggctcaattcgagagtgctgaaatgggtg

SEQ ID NO: 117100 - DNA, 192 bp, Glycine max
gcttcatcgcctacaagcccccaggcttctaagtcattgaaaaatttgcaaagcatctgtagccaccccactttgtttgttgtacttaaactacattcccatttgtttttgctttatgagatttcatcatcctgtatttttggtttctgttttcggacttcaatggaaattaatggatgagaactaatgaat

SEQ ID NO: 117101 - DNA, 255 bp, Glycine max
caaaactgaacatcagtggttgttcagcctttagtgacaatgctctggtcttacctggccagtttttgtagaaacttgaaagttttgaatctctgtggatgtgttaaagctgcatctgacactgcgttacaggaattgggcattactgcaatcagttacagtttttgaaccttgggtggcgtgaaaatgtcagtgatgttggagtgatgagtttagcatatggctgccctgatcttagaacacttgacttatgtg

SEQ ID NO: 117102 - DNA, 252 bp, Glycine max
caccgattgctagaatggaatttcgatgctcagtcatctcttttaccattctcttctctcttgctcttgcaggagagagccatgtccatgcatcgccaactgaggaagattattgggaagctgtttggccaacactcccattcccactgcactgcgagagcttctaaagcctctccctgcaggtgttgaaatcgatgaactccctaagcaaattgatgatacacagtacccaaaaacattcttctataaaga

SEQ ID NO: 117103 - DNA, 246 bp, Glycine max
attgaaggaaaaatcaatgcaaggaacagtgatccaagtctgagaaaccggactgggccagttcagctgccatacactttgatccatcgttcaagtgaggaagggttgactttcaaaggaattcccaacagatctctatctaattaaaaagagtttgtggtttccttatctatgttgtacttctgaataacatagactttatgcatgtctatgcgtaattattgcctgaacttctgcactattgta

SEQ ID NO: 117104 - DNA, 248 bp, Glycine max
gggtcatatacttggactctgatgttatagttgttgatgatgttcaagagctttggaaggtttcattgacagggtcaagagtcattggtgctcctgaatactgtcatgcaaacttcaccagatatttctctatgagttttggtcaagtgctgagttttctgaggtcttccaagggaaaaggccttgttatttcaacactggggtgatggtgatggatttggtgagatggagagcgggcgactacacaa

SEQ ID NO: 117105 - DNA, 252 bp, Glycine max
cctagctagccacaatgcagatattcgtgaaaaccctaacggggaagacgataatcctagaggtagagtcatcggacacaatcgacaatgtgaaggcgaagatccaggacaaggagggcatcccgccggaccgcagcgcaagatcttcgccggtaagcagctggaggacggccgcaccctcgccgactacaacatccagaaggagtccacgcttcacctcgtcctccgcctccgcggcggcgccaagaagcg

SEQ ID NO: 117106 - DNA, 253 bp, Glycine max
aattgaggtgctgcaatggcttcaagtcaggaagaggtgactcttttgggagtaattggaagcccatttgcttgcagggtgaagattgcccttaagttgaagggagttgaatacaaatatgtggaagaaaatttggccaacaagagtgatttgcttctcaaatccaacccaggtcacaagtaagttccagtttttattcacaatgagaagcacatagcagagtctcttgtgattgttgagtacattgatgaga

SEQ ID NO: 117107 - DNA, 257 bp, Glycine max
gcttttgctagtggtactgtctcttagctttgattctctgttctctgttttgttctgtttcgcgtacaggaacttaaacaatgaagactgcaaagggcatgggagcagcgaggccctcaaaagaatcactgagcctgttgatgaccgaaaggttggaaagcggaaggcttctggtaagcctgctaaaagcagtgcaccaaagaaggagaagaaggccaagaaagaccccaacaagcctaaaagaccaccgagtgctt

SEQ ID NO: 117108 - DNA, 251 bp, Glycine max
tgtttacaactacacggtgactccgccggcaccacctgtaagccttggtgccatttgtggtctgccacgctgccgccggcggcctcgccgtgtagttgtaaacatgctaagggttgcccgaccacaaatggaccacggcttacaggctggccttcaactccacagttcaggttgtctcgcaggatctcggggtcattgctcctgagcgccacccggttcatcttcacgggttcaattctatgttgtaggct

SEQ ID NO: 117109 - DNA, 127 bp, Glycine max
  unsure (1)..(127): unsure at all n locations
attgcatttggctatggataaaaatatataagaggtaaaatgcgcaagttttaggcttgctgtggaagcacacaancgccgngcgtttaatagcattcctgaagagtgcgttgaaccaacaaaggac

SEQ ID NO: 117110 - DNA, 244 bp, Glycine max
atcatctgtagttcttcagtaatttattgtgggattctatccgaagattttgagaatgtctagctgtgggctccggaagcagctgcaactgtggcagcaactgcggttgcaacaagtactcttttgacttagttacgttgagaagacaaccacagtaactctagttttgggtgttgggcctgtgaaggccaattggagggtgctgaaatgggtgttgcatctgagaacggtggctgcaactgtg

SEQ ID NO: 117111 - DNA, 241 bp, Glycine max
gttcattctctctgagcagttcgctacctctcctttccagatgcacacgatcgtcccgcccctcaccggtaagaccatcacccttgaggtcgacacgcccgacaccatcgacaacgtcaaggccatatccaggacaaggaaggaattcccccggatcagcagagtctcatcttcgcaggcaagcagctcgaggatcgcccgcgctcgctgactacaacatccagaaggagtcaactcttca

SEQ ID NO: 117112 - DNA, 249 bp, Glycine max
cgatcactcccacgcgctcctatatcttctacttcaccgtcgctctctccaacgatcacaacaacatcgtcatcccatggcaaacgtcgcatctggtatggcagtccatgatgactgcaagttaaggttttggagctgaagacaaagaggacacaccgtttcatagtttttaacattgagctgcagcagaagcaggtcattgtggagaagcttggtgagccagcccaaggctatgaagatttcactgcc

SEQ ID NO: 117113 - DNA, 246 bp, Glycine max
gaatctctacccccttgtggaacagttagagcctgacaatgctgccaaagtgacaggcatgcttcttgagatggaccagactgaagttctgcatttgctcgagtcgccagaagccctgaaagcaaagtggcggaggcaatggacgtcctaagaaatgttgctcagcaacaggctggcggtactgcggatcagctggcttcattatctcttaatgacaaccttgtttcttaaggtttatattttgga

SEQ ID NO: 117114 - DNA, 229 bp, Glycine max
agggcacctatgacaagctcctttctgaagctccaacatacaagctcatcactccttccattctctctgatcgtttgaggattaatggatcacttgcaaggaaggctataagagaattgatggcagaggttctatcaggatggtgtctgcccatgcaagtcagcaaatttctggcagggcaacaaacacctaggtggtgaactgatcttagtttacggagtattggtag

SEQ ID NO: 117115 - DNA, 258 bp, Glycine max
cagaagagagcgtcctagtcgcaaccctaataagaagaaccacagcttcaagcgagtgacatccaccagccatgggtcgtatgcacagccgcggtaagggtatatcctcttctgctttgccctacaaaaggacacccctagctggctcaagatctcttcgcaagatgtggaagaaaatatctgcaagtttgcgaagaagggtttgaccccgtctcagattggtgtcattcttcgagattctcacggtattgctcaggt

SEQ ID NO: 117116 - DNA, 228 bp, Glycine max
  unsure (1)..(228): unsure at all n locations
ctggggttaaagaacatgtcaaaatggagtaactgaagcaacccctaaaagattcncatctcgttttcctttttaaggaacatttgtgggttacagcaaaatatgtagataaacgtgtctgacatattacatttttcgaatttgattcgtgtattctaatgtttccatcctttgaaccgagttgttcctaagattcataatcgtaccatgtttctttttaatgagatg

SEQ ID NO: 117117 - DNA, 246 bp, Glycine max
ctgaaacctgttactggtgttagtagggtcacaatcaagagaacaaaaaatattcttttcttcatctcaaaacccgatgtcttcaagagtccaaattctgagacctatgtcatatttggggagcgaaaatagaggacttgagctctcagttgcagacacaggctgctcaacagttcaggatgccagatatgggatctgtaacggcaaaacaagaagatgctgctgctgcagcagcgcaacctgaag

SEQ ID NO: 117118 - DNA, 237 bp, Glycine max
gatgtagaagcctatatccatcgttctggacgcacaggaagagcaggtaatactggggttgctgttatgctttatgacccaaaaagatcgaacatatctagaatagagagagagtctgggtaaaatttgaacacgtatctgctcctcagcctgatgatattgccaaagccgttagtggggaagctgctgaaatgattatccaagtgtctgatagtgtggttcctgcattcaagtctg

SEQ ID NO: 117119 - DNA, 235 bp, Glycine max
ctggggttaaagaacatgtcaaaatggagtaactgaagcaacccctaaaagattcacttctcgttttcctttttaaggaacatttgtgggttacagcaaaatatgtagataaacgtgctgacatcattacatttttcgaatttgattcgtgtattctaatgtttccatcctttgaaccgagttgttcctaagattcataatcgtaccatgtttctttttaatgagagaaaaaaaa

SEQ ID NO: 117120 - DNA, 238 bp, Glycine max
gcctatgtttggttgcactgatgcttctcaggtgttgaaggagcttcaagaggctaagactgcataccccaacggcttcatccgtatcatcggattcgacaacgttcgccaagtgcagtgatcagcttcatcgcctacaagcccccaggcttctaagtgtgaaaaatttgcaaagcatttgtagccgccaccccactttgtttgtttgtacttaaactacattcccatttgtttttgc

SEQ ID NO: 117121 - DNA, 259 bp, Glycine max
gaaaccggtgtcttgaaacctggaatggtggttaccttgcaccaactggactaacaactgaagttaagtctgtggagatgcaccatgaaactctcactgaggcccatcctggtgacaatgtgggattcaatgttaagaatgttgctgtcaaggatctcaagcgtggttttgttgcgtctaactctaaggatgaccctgccaaggaggctgctaacttcacatcccaagttatcatcatgaaccaccctggacagattgg

SEQ ID NO: 117122 - DNA, 235 bp, Glycine max
tcgaggaagaagaagaagatgtcgtacctgttgcctcacttgcactctgggtgggcggttgatcaagcaatcctggtagaagaggagcgtctggtcgtgatccgtttcgggcacgactgggacgaaacctgcatgcagatggacgaggtgttggcgtcggtggcggagacgataaagaactttgcggtgatatacctggttgacataacggaggtgccggatttcaacaccatgt

SEQ ID NO: 117123 - DNA, 259 bp, Glycine max
ctcttgtatatacaagtggaactactggaaatccgaaggtgtaatgctaacccatcagaatctgttgcatcggctaaaacacttaggggatattgtacctgctgaatagggggatagatttctaagcatgctgccttcctggcatgcatatgaaagagcttgtgagtatttcattttctcgtgcggtgttgaacaagtatacacaactgtgagaaacttgaaggaggatttgggccatttataaccacattacttgatt

SEQ ID NO: 117124 - DNA, 263 bp, Glycine max
cactcttcttcatcgtcgtcgcaatgggacgtgtgaccgtgcgcagcgtaagggagcaggctcggtcttcaagtcccacacgcaccaccgcatcggccctgcccgcttccggagcctggatttcggagagcgcaacggctacctgaagggtgtcgtcactgacgtcatccacgatcctggccgtggcgcgcctctcgctaaggtcgccttccgccacccgttccgctacaagaagcagtaagagctcttcatcgccgccgagg

SEQ ID NO: 117125 - DNA, 207 bp, Glycine max
caccggatctcccttcgaagtgaattatattgcaggaatcacatacactctgcacaacgttcaccatgcaggccagtgataggtttaacatcaattcccagcttgagcatctctaagccagatatgttggaactggccatgccgatttgaacagatttgagtgtgcagtgaacattcaacgagataagtctgcaatctatattggac

SEQ ID NO: 117126 - DNA, 257 bp, Glycine max
acactttcaagtactccggtttggcgaaccagacaactgtcactgttcaacctgctggtagagaccagtccgtgttgctcgcaacaaccaagacaaagaagcaaaacaagcctgctgctttgcttcacaaatctgtcatgataaaggagttccgtaggatggcaaaggctgtgcaaaatcaggtagcagataactactacaggcctgatctcaaaagggcagctctggcaagattgagcgctgtcaataggagcctc

SEQ ID NO: 117127 - DNA, 258 bp, Glycine max
gttgatggtggtttcaatcagaatctgaattcaagactttgtctgctcccaatctcagtgcagtggactaccctgcacttacttcaccagatggccagactgcttcagtagaatatgtggttgataatctgcaacaaagtggcaatccttaccgatcatatgacagtgatgtgctgcttttcaactctgtctcttctgtttcatctaggggtggtgctattgactttgcttcagctgttaggaagttggcttctcggg

SEQ ID NO: 117128 - DNA, 264 bp, Glycine max
cagagaccgaaatacttcgagatggcccgtacaatacaactgctcgtaagtcaactggaggaaaagctcccaggaagcagcttgcaaccaaggctgcacgtaagtctgcaccaacaactggtggtgtgaagaagcctcatcgttatcgccctggaactgttgctcttcgtgagattaggaaataccagaagtgcactgagctcctaatcaggaagcttcctttccagaggttggttcgtgaaattgcccaggatttcaagacta

SEQ ID NO: 117129 - DNA, 258 bp, Glycine max
aaacattgtttgttgtaggagaggaatcttgagaatggcaggggacagcaagagcaagattctgttcatcggagggactggttacatcggaaaattcatcgtggaagccagcgccaaagctggccacccaactttccttttggtgagggagtccactctctccaaccccgcaaaatcacccctttgcgacaatttcaaaggcctcggttttcaatccttgttttaggagatctatacgatccaccaaagtttggtgag

SEQ ID NO: 117130 - DNA, 252 bp, Glycine max
ctcacttttcatccttcgatcatacacttagttgcttccaattaagatggttctgctagagaagctctgggatgatgttgtggctggccctcaacctgagcgtggccttggcaagctcagaaaactcaccaccctcaaaactattgatgaaggagaaagtagcaagctgcagaagacgttgtcgatgccgtcgacaccaacaaccccgatgactccgacgactccaacgacaccgggatcggcccgtaaagc

SEQ ID NO: 117131 - DNA, 258 bp, Glycine max
ctgagttccaaaccaacttggttccttacccaggatccatttcatgctttcctcatacgcccctgttatctctgctgagaaagcataccatgaacagctttccgttgctgagatcatcaacagtgcctttgagccatcctccatgatggccaagtgtgaccctcgccacggcaagtacatggcgtgttgtttgatgtatcgcggcgatgtcgtgccgaaggatgtgaattcttgttctggccaccatcaagaccaagg

SEQ ID NO: 117132 - DNA, 255 bp, Glycine max
accggatcacccttcgaagtgaattatattgcacgaatcacaaacactctgaacaacgttcaccatgcaggccagtgataggtttaacatcaattcccatcttgagcatctctaagccaaatatgttggaactggccatgccgatttgaacagatgcgagtgggcagtgaacattcaacgagatagctatgcatcatatattggacactaccctttactgggatactttgctattgctgaaaatgaatctattgg

SEQ ID NO: 117133 - DNA, 256 bp, Glycine max
gttaaagcaaggaaatctaatggtgacagtgatcattgccacgttgcgttgttcttgacattgaaggaactactactcccatatcatttgtttccgaggttctcttcccatatgcccgtgataatgttgggaggcatctatctctaacatatgataccatcgagaccaaagctgatatcaagttgcttcgttcccaagttcaaagtgaccttgaacaagggattgcaggtgctgtgcctatccctccagatgatgt

SEQ ID NO: 117134 - DNA, 244 bp, Glycine max
gtaacatggcttccttaagctccttagtgctgctccttgcagctctaattctatccgctctagttcttgcaaactatgagagttccccagtgtacaagcctcccactgagaaaccaccagtttataagcccccagttgagaagcctgcctgtttacaatgctccagttgagaagcctccagtttataagccaccagtagagaagccaccagtgtgcaagcacccagtagataatccccagtgta

SEQ ID NO: 117135 - DNA, 244 bp, Glycine max
tgttcagcacgagcaagacgaaggaagtggtattaaacttggtgactacaaaggaaaggtccttatcattgtcaatgttgcctcacaatgtggcttgactaattcacaatacatcgagctcagtcagttctctgagaaatacaaacagaaagaactggaaattctggcgttcccatgcaatcagtttggggcacaggagcctggatctgatcgagcagatacaagagtatgtatgtactcgctt

SEQ ID NO: 117136 - DNA, 267 bp, Glycine max
ctccttacaagatgggcaaattcaatctgtcccatagagttgttttggcaccgctgaccagacagaggtcttacgacaacgtcccacaaccccatgccatcctctactactcccagagaacttccaacggaggccttctcattactgaagccactggcgtctctgacacggctcaaggctatccgcaaacccctggcatatggactaaacaccatgttcaagcttggaaacccattgtcgatgccgtccacgtcaaaggcggtgttt

SEQ ID NO: 117137 - DNA, 259 bp, Glycine max
gtgcaaaaggcactgatagctcctgcagcattgattgctcaaaatgctggaatagaaggtgaagttgttgtggagaaaataaagagtggtgaatgggaggtcggttacaatgccatggcagacaggtatgagaatttagtggaggctggagttatcgaccctgccaaggtaactaggtgtgctttgcagaatgctgcttcagttgctggaatggtgttgaccacgcaggccattgtggtggagaaactaagcccaagca

SEQ ID NO: 117138 - DNA, 258 bp, Glycine max
gccgagcgcgacgccgacatcaacctctccctccccggcgacgccttcgacctcgtcgtccgtgccaagaccgccctcgagctctcctgccccaacaccgtctcctgctccgacatcctctccgccgccacccgcgacctcctcaccatgctcggcggccccttcttccccgtcttcctcggccgccgcgacgccgaacctccctcgcctccgccgtatcctcccacctccccactccctccatgcccatctctcaaa

SEQ ID NO: 117139 - DNA, 265 bp, Glycine max
aacaacagctttcatggttccattggtggctggtgatggaaccaaaactcaggcacttgctcattgccactcaaatacttctgacatgaatcatcaaatgcttcatcaacttatgggagttgatcctggaactaaccctgtttgccatttccttggaagcaaggccattttatgcgtacccaatttatctgtggaactgcctatcagaccaacattgttgcttaattagtccatgcatcttgagcaccatgagaatgagttgtgt

SEQ ID NO: 117140 - DNA, 259 bp, Glycine max
aaagtcacccgtcggatcgtgggcctccaggagatactggactctgtctccgaggcccaaatcgatgagtccagttggtggcccatgaagaattgggacgaagtcttggccgacatggaagaaagtatttgtctggagaacggtggcgatgaaatggaacggttttgcgctcagaatctcggatttcgtgcctacaaaggtttcttcgtgaaccctgattcatcccccttttaattatgtatgtacgattgtacgtaca

SEQ ID NO: 117141 - DNA, 231 bp, Glycine max
aaacacaacacacacactgtgtttgtgaaactccctctcacacacaagtcacattaacaacttgtgttgttccaatggcatcagcaacaccccttttgaaagatgagctcgacatcgtgatccccacgatcaggaatctggatttcttggagatgtggaggccattctttgagccttaccatctcataatgtgcaagatggtgacccttcaaagaccatcagggtccctga

SEQ ID NO: 117142 - DNA, 268 bp, Glycine max
tcttggcattataccacaatctcctgttctcttttcaggaactgtgagatttaatcttgatccatttaatgaacacaatgatgctgacctctgggaggctctggagagggcacatttgaaggatgtgatacggaggaattctctggggctggatactgaggtatctgaggcaggcgagaacttcagtgttggacaagacaactgttgagtctttctcgggctttattgcgtagatcaaagatattagtacttgacgaagcaaccgcag

SEQ ID NO: 117143 - DNA, 267 bp, Glycine max
tgcagtagttccgtatcctgatgaagaggcaggacagattccaattgcctttgtagtaagaaagtctggaagcaacatcactgcagatcaggtcatggagtttgtggcaaagcaggtttcaccatacaagaagatacggcgagtttctttcatcaaatctatcccaaaatctccggctggcaaaattttgagaagagaattagttgattatgctctatcctgtggttcatccaaattgtgatcaagaaaagagcatggagaaaatgt

SEQ ID NO: 117144 - DNA, 261 bp, Glycine max
gccaagtgaaagcaatgtgctgaatggtggtaaacctggtcctcatcatataactggcaatggagttggattcaaaccagacatattggacatggatgttatggaaaaagttcttgaagttagcagtgaagatgcagttaacatggctagggtgttggcattgaaggaaggactcatggtagggatatcatctggagctaacacagttgcagctctcagattggctcagctgcctgagaacaaaggcaaacttattgtgac

SEQ ID NO: 117145 - DNA, 258 bp, Glycine max
cttttacttctcagcagcttcggctagggttcagaaacgaaaaacggttcggtattctgttcgcgatgagagccaagtggaagaagaagcgtatgaggaggttgaagaggaagcgccgaaagatgagacagagatccaagtagtgcgttaaacctagtttgtttctgttgcttttacaattgcttatgttgtcgaatgggacacccagttgttagtggcactggtttctcctttttgatgtttgatacatttgttgga

SEQ ID NO: 117146 - DNA, 192 bp, Glycine max
gagcagcagtgcagggaagttggtgtgtgtcaccggttttgccggttatattgcttcatggattgtcaagttcctacttgtacgtggttacactgtcagggccactgttcgaaacccaaatgatcacacgaaggtagaacatttgctaaaacttgaaggtgcaaaggagagactgcacctttttaaggcaga

SEQ ID NO: 117147 - DNA, 256 bp, Glycine max
ccgctactcagatactctcatcagagctaatgacaccattaagttggatttggaagagaacaagattgtcgatttcatcaagtttgatgttgggaatgtagtcatggtgacaggtggaaggaataggggtcgtgttggagtgatcaagaacagagagaagcataagggaagctttgagactatcatgttcatgatgccactggccacgagtttgcaactcgtatgggctatgtgttctccattggcaagggatcaa

SEQ ID NO: 117148 - DNA, 255 bp, Glycine max
  unsure (1)..(255): unsure at all n locations
ggttaagcggtgaccccagagaatctgtgacatggcggattcttgctcgggaggagatcgtttacatggcgcccacgnggagaggncgtgcgttacgaggacatcgtggagtttctggagaaggttgcaaagatcgccgaggttgacgagttgacggtggaggagaggaatctcctctctgtcgctttcaagaacgtgattggtgcgagtcgggcttcgtggaggatcatatcctccattgagcagaaggaggag

SEQ ID NO: 117149 - DNA, 259 bp, Glycine max
tcttggcattataccacaatctcctgttctcttttcaggaactgtgagatttaatcttgatccatttaatgaacacaatgatgctgacctctgggaggctctggagagggcacatttgaaggatgtgatacggaggaattctttggggctggacgctgaggtatctgaggcaggcgagaacttcatgttggacaaagacaactgttgagtctttctcgggctttattgcgtagatcacagatattagtacttgacgaag

SEQ ID NO: 117150 - DNA, 237 bp, Glycine max
  unsure (1)..(237): unsure at all n locations
gcgtttgcttctcctccacccatcctcagacacacanaaaccttgattgagaatggggcgtgttcgcacaaagacagtctagaagtcctcgcggcaagtgatcgagaggtactactctcgcatgacgctggacttccacacgaacaagaaggctctggaagaggtggccatcattccctccaagtgctccgcaacaagatcgcgggattctccgaccacctcatgaagtcgatccag

SEQ ID NO: 117151 - DNA, 170 bp, Glycine max
agagatttgaagggaaagtggcaattgtgacagcttcgactcatggaattggctttgcgatagcacataggcttggcttggagggtgcatctgtatgaatctcttctcgcaaacagcaaaatgttgatgtggcggctgaaattctccgggctgaaggaattgaagtgttg

SEQ ID NO: 117152 - DNA, 156 bp, Glycine max
gatgccatcaacaatggttatgattcatggggacctctctttggtagattgttctttgcattgtgggtgatcctccatctctaccccttcttgaaggggttgcttggaaaacaagatagaatgccaaccattatattggtttggtcaatccttctg

SEQ ID NO: 117153 - DNA, 269 bp, Glycine max
aaaacacaagccaagtgaaagtgagagaaaataaaaatcaaagagcataatgtcagggatcattcacaagattggggagacccttcatgtgggagggcacaagaaggaggaggagcataagggtgagcaccatgctggagaatacaaaggggagcaccatggtgaacacagtagtgagtacaaaggagagcatcatggtgaacacaaagctggagagtaccatggtgagcacaagccagagcacacagaggggttcctagacaaagtca

SEQ ID NO: 117154 - DNA, 286 bp, Glycine max
gtcgcatcgaggattcggctcgagggctcactctgtcttgccactggactaggggacgagatgattgttagcagcatgaaagagtatgaagatagagcagtctcattgggtctgaatcggccgaagcttaaagctcttactaataagcttaaagctgtacgcttgacttgccctctatttgacactgcccgctgggtgaggaatcttgagagatcatattttaaaatgtggaatctgcattgctctggtcaacgtcctcagcattttaaggtcactgaaaatgatc

SEQ ID NO: 117155 - DNA, 259 bp, Glycine max
gcaagattgttgctgttaagaagcttaaccaagatgggctccagggtcacagagagtggttggctgaaataaactatcttggccaactacagcatcctaaccttgtcaagttaataggatactgctttgaggatgaacatcggcttctggtttatgaatttatgcctaagggtagcatggaaaatcatctattcagaagaggttcttactttcagccattctcttggagtttgcgaatgaaaatagcactaggggctgc

SEQ ID NO: 117156 - DNA, 253 bp, Glycine max
gagcaatctggttggtagaacctttggtcttagagagtcaagttttatgtctggattagacgatcaaattcctactgccttcgatccttttgctgatgcaaatgctgatgactcgggtgctgggtcaaaggagtatgtgcattctcgcgttcagcagcgaaatggtaggaaaagcctgacaaccgttcagggattgaaaaaagaattcagctataacaagatacttaaagacgttaagaaagagtcctgttgc

SEQ ID NO: 117157 - DNA, 243 bp, Glycine max
cctgtttccaaatatgcccgtggcgacggactagaagttgttgggaaaaggttggccttgatgtctgagaaatttggcatcccagttgagtttcatggagttcctgtttttgctccaaatgtgacaagggaaatgcttgatatcaggccaggagaggccttggctgtgaattttcccttgcaactccatcacacagctgatgagagtgttcatgtgagcaaccaagggatggactctgagatt

SEQ ID NO: 117158 - DNA, 260 bp, Glycine max
gccgagtggagattctaataagagaagaattgtgagttttgtggggggtattgatctctgtgatggaagatatgacactcaattccattcacttttcagaaccctggacacagcacatcatgatgactttcatcagcctaactttggtggttcttcaataaaaaaaggtggtccaagggaaccttggcacgacatccattctcgacttgaaggccctattgcttgggatgttttgttcaactttgagcagagatggagga

SEQ ID NO: 117159 - DNA, 259 bp, Glycine max
  unsure (1)..(259): unsure at all n locations
gggagttcttgaccgctctcctcctttttagttcttccccttaatcttctttcttccacaatttttatttccttccttattagacgtattagatcagattgaacaaaagggnnnnnnnnnnnnnnnnnnnnggggaataatagaaataagaaaagattagtgaggttgaaatgtcgcaacgatcggtgcnggcgccgttcttgacgaagacgtatcagttggtggaggatcaggggacggaccaggtgatatcgtgggg

SEQ ID NO: 117160 - DNA, 250 bp, Glycine max
ccataggttatcatcaatcaccaggctcttccttgccttctgaatctgttgaccaataattataaaaaaagcatcaagaaggaagcttgttggaccatatcaaacatcacagctggtaataaacagcagattcaggctgtgattgaggctaatctaattgctcctttggtcaatctgcttcaaaatgctgagtttgatatcaagaaagaagctgcttgggctatctcaaatgctacatccggtggttctc

SEQ ID NO: 117161 - DNA, 252 bp, Glycine max
cactgcggcagctacttcggctccatcttcttcgatctctcaaactctatcggcgcagaaccaatcctatatcactatggggaagacacatggaatgggagctgcccgcaagctgaagtctcaccgtaggagacaaaggtgggctgacaagtcatacaaaaagtctcatcttggaaatgaatggaagaagccttttgctggttcatcccatgcaaagggtattgttcttgaaaagataggtattgaggctaa

SEQ ID NO: 117162 - DNA, 251 bp, Glycine max
agatgtcgttggtttcaagcatgttcgggtgtggagtggtgatggcggcgtcgcaagcaatgggaattggaaggagaagcgatggtggattgacgatagtgtgttcgtctaggccgcagaagaaagcgacggcgcatcagatgaagactcggcctcggaagacgcaggcatgggatagaaaccgcaagcccaccgtctacgatcgactccctcctcttcctcctgattggaccctcgatattcccgctgac

SEQ ID NO: 117163 - DNA, 256 bp, Glycine max
ctggcacttcatcttctgttccaacgtttcgtggtacaaattccgcagaagggatgcccgagttatctgaggcagacatggttgtgtttcttggtgattttaattatcgccttgatgacatttcttatgacgaagcaagagatttagtttctcaaagatgctttgattggcttagagaaagggaccaacttcgaccagaaatggaagctgggaatgtcttccaaggaatgcgtgaagcagttataacatttcctcc

SEQ ID NO: 117164 - DNA, 254 bp, Glycine max
gttttcgtgtggaaacaaaaaaacaattcaaaaacaaacatatgatggtgaagccgagtagcgaaaagccagaggagcatagggattccaagtactacaaaggggtccgaaagagaaaatggggcaaatgggtatccgaaataagactacccaacagccgtcagaggatttggttgggatccttcgacacccccgagaaggccgcgcgtgccttcgacgccgcaatgttctgcttacgtggccgcaacgccaat

SEQ ID NO: 117165 - DNA, 248 bp, Glycine max
ggcgtatgcaagggaaatggtgtatagacaggctgcgtggcatagaatcgtggggttggcggtttcggctgggattagtactagcggaatgtgtgccagtcttgcttggtttgatacctatcggagggcaagacttccggcaaaccttgtccaggctcagagggacttgtttggggcgcatacttacgagagggttgatcgccctggggcttttcataccgagtggacgaaactcgctcgcaatagtg

SEQ ID NO: 117166 - DNA, 252 bp, Glycine max
gtgcaaacaagaccgtgaaggagcagaggagtattattcccgtgccatacttgcagacccaaatgatggagaggttctatcacagtatgggaagttagtttgggaactacatcacaaccaagaacgtgcctccagctattttgaaagagcagtccaagcctctcctgaagacaggtatgctgcatgtcatgtgcttcataacattcagtttatgatatattactatcaagcagtctagttcagcttgctaag

SEQ ID NO: 117167 - DNA, 253 bp, Glycine max
gcagagcgaccttgaagagctatggctgtcggaaagaataagaggatttccaagggaaagaagggtggcaagaagaaagccgctgatccctttgccaagaaagactggtacgatatcaaggccccttccctcttccaggtcaagaatattggcaaaaccctcgtctctcgtacccagggaaccaagattgcatccgaaggactcaaacatcgggtttttgaggtctcattggctgatctccaaggggatgaag

SEQ ID NO: 117168 - DNA, 253 bp, Glycine max
atttcagccgagaaggctcaccatgagcagctatcagttggtgaaatcaccaacagtgcattcgagccatcatctatgatggccaagtgtgatccccgccatggcaaatacatggcgtgctgtctcatgtacagaggtgacgtagtgcctaaagatgttaatgcagctgttggaattatcaagaccaagcgcactattcaatttgttgactggtgccccaccgggttcaagtgtggaatcaattaccagcctc

SEQ ID NO: 117169 - DNA, 254 bp, Glycine max
gcattttcagaggaacaatggcgggtagggtttcgacgtgcttcttcttcgtgtttgctctttctctccttcttccttttcagatctccgctgaggaatcatcggagaaagagttcgtactcacattggatcactctaactttcacgacactgtcagcaagcacgatttcatcgtcgtcgagttcgacgctccatggtgtggccactgtaagaagcttgctcccgagtatgagaaagctgcttctatcttgagt

SEQ ID NO: 117170 - DNA, 252 bp, Glycine max
  unsure (1)..(252): unsure at all n locations
gatccagaaaggagagataagttaattgagctgcttgatattgatctacagtggcgaatgcataaggtatctgatgggcagcggcgtcgagtgcaaatctgtcttggtcttcttcatccgtacaaggttctcttgctggatgaggttactgtggatctggatgttgttactcggatggatttattggacttctttaaggaagaatgtgaacagagagaagctataatcgtatatgcaactcatatntttgat

SEQ ID NO: 117171 - DNA, 253 bp, Glycine max
gattgactttttttcttcttctattctcacacatacccatctactccttccctcatggctgaacaatcttccaactccatttacgatttcactgtcaaggacatcagtggaaatgatgtgagtctgaatgattacagcgggaaggttctactgattgtgaatgtcgcctctcaatgtggtttgacacagacaaattaccaagaattgaatgtattgtacgagaagtaccagaatccagggtttgaaatcctgg

SEQ ID NO: 117172 - DNA, 248 bp, Glycine max
gcattttcagaggaacaatggcgggtagggtttcgacgtgcttcttcttcgtgtttgctctttctctccttcttccttttcagatctccgctgaggaatcatcggagaaagagttcgtactcacattggatcactctaactttcacgacactgtcagcaagcacgatttcatcgtcgtcgagttctacgctccatggtgtggcaatgcgagaagcttgctcacgagtatgagagagctgcttctatct

SEQ ID NO: 117173 - DNA, 247 bp, Glycine max
gcattttcagaggaacaatggcgggtagggtttcgatgtgcttcttcttcgtgtttgctctttctctccttcttccttttcagatctccgctgaggaatcatcggagaaagagttcgtactcacattggatcactctaactttcacgacactgtcagcaagcacgatttcatcgtcgtcgagttctacgctccatggttgttcgttggtaagaagcttgctcccgagtatgagaaagctgcatctat

SEQ ID NO: 117174 - DNA, 246 bp, Glycine max
gcggaagatgaaccagagaaataccagtcacacttcagtgaatacatcaagcgtgggatagaagctgatggtaatgaggcactggataaaaatgttcatgctgccatccgggctgatcctactctcaagaaatctgataagcagaccccgaaggagcacaagaggtacaacttaaagaagctgacatatgaggagaggacagctaagttgatttcacgtgtggcagctctcaactctgctgctgat

SEQ ID NO: 117175 - DNA, 237 bp, Glycine max
gcaaaacctaattttcatttcttccctcaaatttcaaaatgtctgagatccttcacatccagggtggcaaatgcggcaaccagatcggcgccaagttctgggaggtggtttgcgcggagcacgggatcgaccctaccggaaggtacggtgggactcggagttgcagctcgagaggatcaatgtctactacaacgaggccagttgcggttcgttcgtgccgcgcgcggttctcatgga

SEQ ID NO: 117176 - DNA, 251 bp, Glycine max
  unsure (1)..(251): unsure at all n locations
cgcaccagtttcaccgcacgaatatcttgttgtttggagcgatccgagaaaaactctgtaaacatgttggtttaccaggacctccttactggtgatgagcttctctctgactccttccgttacaaggaaattgagaatggaatgctgtgggaagttgaggggaagtgggttgttaaaggagantttgatgtagacattggtgcaaacccttctgctgagggtggaggagaagatgagggagttgatgatgc

SEQ ID NO: 117177 - DNA, 250 bp, Glycine max
tcatactgctctttcctgcactgtgttattgccaggaatatagtaaatccagggcaaccttttatagtacctctgatggctatgggactccaaccggagcttgtggctttggtgaatatggaaggaaaatgaattggtatggtggaagagtggctggggtgtctgggctgtggaggaatggagctggctgtggcacatgttatcaggtgagatgcctagtaccagaattatgtgataccaatggagcata

SEQ ID NO: 117178 - DNA, 246 bp, Glycine max
agcgtaggttctggagccatttacgcagcaactaaagctgctattgatcagcttaccaaatatttggattgtgaatgggcaaaagacaatataaggagcaacggtgttgcaccctggtataccataacttcatgtgtggaacctttgcttgcgaacaaacagcttgttagtgagataatatctcgaacgccgataaagcggatggcagaaacacatgaagtttcatccttggtgactttcctttgc

SEQ ID NO: 117179 - DNA, 247 bp, Glycine max
ggttgacttttgtacttctactaatctcagacatacgcagctaatcctacgctcatggctgaggaatcgtctagctccagctacggttacaccgtcaaggacatccgtggaaatgatgtgagtctgaatgattacagcgggaaggttctactgattgtgaatgtcgcctctcaatgtggtttgacacagacaaattacaaagaattgaatgtattgtacgagaagtacaagaatcaaggatttgaaa

SEQ ID NO: 117180 - DNA, 241 bp, Glycine max
gaagaaaccaagttaagcggaggtaaccaattgctcatagttgacgatgacttaacggaaatgggaaagaaagccgcttggagcgtgagttcctgcaaacccggtaacggcgtttcctctctccgtgacgacaatctcgaaacttattggtaatccgacggagggcaaccccatttagttaacattcagtttcagaagaaagttagacttcaagtacgtacacggcacaccccacttgtaa

SEQ ID NO: 117181 - DNA, 247 bp, Glycine max
gattgactttttttcttcttctattctcacacatacccatctactccttccctcatggctgaacaatcttccaactccatttacgatttcactgtcaaggacatcagtggaaatcatgtgagtctgaatgattacagcgggaaggttctactgattgtgaatgtcgcctctcaatgtggtttgacacagacaaattacaaagaattgaatgtattgtacgagaagtacaagaatcaaggatttgaaa

SEQ ID NO: 117182 - DNA, 251 bp, Glycine max
aacgcgtgcatagcagagtcagagacagagacgcagccatggggcggagacctgcgaggtgttataggcaaattaagaacaagccataccccaagtcacgtttctgccgtggtgttcctgatcccaagatcaggatttatgatgttggtatgaagaagaagggtgttgatgagtttcctttctgtgtccatctggttagttgggagaaggaaaatgtttcaagtgaggccctggaagctgctcgcattgct

SEQ ID NO: 117183 - DNA, 246 bp, Glycine max
cccaaaccctcgtcactctcagtctcaacgcgtcgattcctcttccctctctcccatgccatcgtccctccctccacccgcgtcgccggaatccggtgccgtgtcaaccgcgccggcgactcagcgtactcgccgctgaactcagcttcgtcatcgtcgtcgtcgttcagcgaccggcctccaacggagatggcgccgctctttcccggctgcgactacaaccactggctcatcgtcatggaccat

SEQ ID NO: 117184 - DNA, 247 bp, Glycine max
gggaagaatagaatgggatctggaagtggaaaacacactggagagttcttcaggagaagggatgcatggaggaagcatccgatgctcaccaatcagctccgccacgccacccctggccttggcatcgccgtcgtcgccttcggtatctacctcgtcggcgaacaagtctacaataggctccatgctcccgatcctcattcgatttctcacgtgaaagccggggatcaccactaaacgtttggacgga

SEQ ID NO: 117185 - DNA, 246 bp, Glycine max
ctttcacatcatttctcaatcttccttgcttgcactctcatcagagaaggaaagcttttgataaagaaagaaacagaaagaaccttgtaacttttggcttgaaaagccatggccagggagcaaattcaggtgctaaatgcgcttgatgtggcgaaaacacaatggtaccatttcactgcaatcatcattgctggaatgggcttcttcaccgatgcatatgatctattctgcatatcccttgttaca

SEQ ID NO: 117186 - DNA, 241 bp, Glycine max
tcttgttaggttacctctgtgacatttgtgctgctagttcatatatttgcggctgacaccgagaaggaaagcaggaaaaaaacaaaaaggagcagatgggtagctcaggtttctcatggaaattggcggatcatccaaagcttccaaagggtaagactgtggctgttgtggtattggatggttggggagaggccacacccaatgagtacaactgcatccacaaggctgaaacaccctgcat

SEQ ID NO: 117187 - DNA, 205 bp, Glycine max
gttcaacaacgcggtgccgcaactatcacagctagcaagctttcaattgcaatatcatctggtagtgccgcatgtgaccatattagagattaggctcttagagatcctcagggcacctgtgtgatcaatgggagtatattctgatgggtcgtaaaatgtactagctggactgatgtattcattccctgtcacttgtgccaatggg

SEQ ID NO: 117188 - DNA, 245 bp, Glycine max
aacaacttgcattttgccctgccattgtggttcctggtgtatactactcagatgataagatgcttcaaaccaggatattctcttatgctgattcacaaaggcacagacttggaccatactatctgcaattcctgctaatgctcccatatgtgctcaccacaacaatcatcatgaaggtttcatgaatttcattcacagggatctccaggttaattacttcccttcaaggtatgatcctgttcgtc

SEQ ID NO: 117189 - DNA, 266 bp, Glycine max
acgaagcaaacgctgccgaattcgttatcgctttgcactagcagctttgaaacccggttcatccgaagcccttcaccgaaccatgtcgaggagaaaggttagagagccaaaggaggaaaatgtgactctgggtccagctgttagagatggtgaacacgtttttggcgttgctcgcatctttgcctccttcaacgacaccttcatccatgtcactgatttgtctggcagggaaacccttgtccgaatcactggtggtatgaaagtta

SEQ ID NO: 117190 - DNA, 261 bp, Glycine max
ggaggagagagacagttcaatggccttgttgatgtctacaggaagacattggcatctgatggtgttgctgggctctaccgtggtttcaacatctcatgtgttggaatcattgtgtatcgtggtctgtactttggattgtatgattccgtgaaaccagttgtcctcaccggatcattgcaggatagcttttttgccagctttgccctcggatggctcatcaccaatggtgcaggtcttgcatcatacccaattgacactgtt

SEQ ID NO: 117191 - DNA, 261 bp, Glycine max
acttaacaacagcacaaagcgggttactgtctgttcaagctaccatctctctctctctttcttagtgcctccttgccagaagttaaaatggcccaagaaactttcctattcacatctgaatcagtgaacgaggggcaccctgacaagctctgtgaccagatctccgatgctgtgctcgatgcatgcttggagcaggaccctgacagcaaggttgcctgtgaaacctgcaccaagaccaacatggtgatggttttcggagag

SEQ ID NO: 117192 - DNA, 259 bp, Glycine max
cgagttcgaaaagggttctaaggtgacacagatgccctgcaagcacgcgtatcacggcgactgcttgattccgtggcttcggctgcataattcatgccctgtgtgccgctatgaattgcccacggacgacgccgattacgagaacgaggttcacggtggtgatgctgggtcgaggacaggtgggagcgacggtggaggtgggagtaatagaccttttcgcaggactgttaggatatatttgcgccatcctgatgctggt

SEQ ID NO: 117193 - DNA, 255 bp, Glycine max
ccattgagaagtttaaggtgacgcatttgtgggttgtgcctccgattattcttgctctcgcgaaacacggtttggttgataagtatgatctttcgtctctcaagcatattggttctggcgctgctcctcttgggaaagagttgatgaaggagtgtgctaaacgttttcctcatgccattgtttctcagggatatggtatgactgaaacttgtggaattgtttctgtggagaatgcaaggatgggaattcggaata

SEQ ID NO: 117194 - DNA, 247 bp, Glycine max
ggaggagagagacagttcaatggccttgttgatgtctacaggaagacattggaatgtgatggtgttgctgggctctaccgtggtttcaagatatgatgtgttggaatcattgtgtatcgtggtctgtactttggattgtatgattccgtgaaagcagttgtcctcaccggatcattgcaggatagtttgttttgccagctttgccttcggatggttcatcaccaatggtgcaggtcttggatcatac

SEQ ID NO: 117195 - DNA, 259 bp, Glycine max
cttcctcagtagtgtcatttacgcttctcttctctgcagcaactatgcctaaccctaaggtcttcttcgacatgaccatcggcggtcaatctgctggccgcatcgtgatggagctctacgccgacgtcactccccgcaccgccgagaacttccgcgcgctttgcaccggcgagaagggcgtagggcggagcggcaagcccctccactacaagggctcgtccttccaacgcgtgatcccgagtttcatgtgtcagggtgg

SEQ ID NO: 117196 - DNA, 256 bp, Glycine max
accgatcccaccaggtaccgcaagatgaaggagcgtctcgttggggtttctgaggaaaccaccactggtgttaagaggctatatcagatgcaggcgaatgggactctactcttccctgctattaatgtcaatgactctgttaccaagagcaagtttgacaacttgtacgggtgccgtcactctctccctgatggtctgatgagggctactgatgtgatgattgctggaaaggtggctgttgtggctggatatggtg

SEQ ID NO: 117197 - DNA, 258 bp, Glycine max
gcaggtgcaggcagatacatagatagatggcatattcatattctctttagactccccgctttcaaagctctgaaatttccgattcgggatggagaaatacgagctcgtgaaggatataggatctgggaatttcggtgtggccaggctcatgcgacacaaagacaccaaggagcttgttgccatgaaatacattgaacggggtcacaagattgatgagaatgttgcgagggaaatcataaaccatagaagtcttcggca

SEQ ID NO: 117198 - DNA, 259 bp, Glycine max
actttccccatcccatgtgtctccctgtcagagtatgatatgaggaactaactctataaataaaactttctgaatcaaacacatcacacacacgtaacttcatctgggttgcagggaaaaagaaaaataaaatgggttccgataataccaacttggagttcttgaaggagatcggtttgggctcctccaacattggttcttacattaatggccaatggaaagccactggttcttctgtcacttctgttaatccttctaa

SEQ ID NO: 117199 - DNA, 268 bp, Glycine max
agaaaaagaatgccaacactaagaaggagaaaaagaggaaggtgaagcacagtgaagcatcaaagcagatacatgcacttgaaaatattgaggcagggaatgaaggaaccaacaatgagaagacatccaatctgactcaaacaaagttggagaagaggtttggacagtctccagtatttgtggcacacacactcttggataatggtggagttccacagggcgtgagtcctgcatcacttttaaaagaagccatccaagtcatcagttg

SEQ ID NO: 117200 - DNA, 263 bp, Glycine max
caatagagtaatggcctttaggtggtgacgaacaagagctcaaatcaaatcgaatcgaaaaaagaaagagagatcatattcatggcgatggcaagcctggctcgacggaagggttacgccgtcgttttgtcgtcgaggtcgtcgttgtgtctgacaagctggaggggattcgcgtccggatctgacgaatacgacgtcgtcgtcatcggctgtgtggtctcggcggctacgtggccgccatcaaagccgcgcactcggtctga

SEQ ID NO: 117201 - DNA, 259 bp, Glycine max
gcttatttcagcaggacttagaatttgggtttatagtggagatacagatggtagagtaccagtgctttccacaaggtacagcttaagctctcttgcgttgcctatcactaaatcatggaggccatggtatcatgacaatgaggttagtgggtggtttgaagaatataaagggcttacatttgcaacgtttcgaggagctgggcatgcagttccctgttttaaaccaagcaactcacttgcgttcttctcctcctttctc

SEQ ID NO: 117202 - DNA, 256 bp, Glycine max
ccgcactccgtcttcatcaatcagcatcaccaccgctccaacacaggggaaaatgagggagatccttcacgttcagggagggcaatgcgggaaccagatcggttcgaagttctgggaagtggtgtgcgacgagcacggcatagatccgacggggaagtacgtcggaaactcagatctacaactcgagcgcgtgaacgtgtactacaacgaagcttcctgcgggcggtttgtcccacgcgcagtgctgatggacctg

SEQ ID NO: 117203 - DNA, 254 bp, Glycine max
cacctaccagattgctttgtctatcaaggacgatatggaagaccttgaaaaggctggcatcactgttatccaaattgatgaagctgctttgagagagggtcttccactgaggaaatcagagcaagctcactacttggactgggctgtccatgccttcagaatcaccaatgttggtgtccaggataccacccagatccacactcacatgtgctactcgaacttcaacgacatcatccactccatcatcgacatgg

SEQ ID NO: 117204 - DNA, 256 bp, Glycine max
caattgttgggttctatagtcgcatgcctcctcctcaatttgatcaccgctaagagcattccaagccactcgccggctaatggtgtgaacgatttgcaagctgtagtgtttgagattgttatcacatttgggttggtttacactgtgtatgcaactgcagtagacccaaagaaggggtcattgggtatcattgcacccattgctattgggttcgttgtgggtgccaacatcttagcagcaggcccattcagcggcg

SEQ ID NO: 117205 - DNA, 250 bp, Glycine max
agagaattgatggctaggggttcaatcaggatggtgtctgcccatgcaagccagcaaatttacaccagggcaacaaacacctaggtgtggaactgatcttagcttacggagtattggtaggaatagtcactgaagtattgttcttttgcactttgggaagcatctcatatggttctatcagttctagattgtcgctgaatccgatgctcagattgtatttttggtttcctctagtgttttatcttcttca

SEQ ID NO: 117206 - DNA, 251 bp, Glycine max
cgcacgcagatcctttattcctataatccttccgtcgctctctccaaatttcgactctttcgatcagatccgcgacacccaccccaccaaaaccttgcgcaacccatccatgacgcttggctcaggaggatccagtgtcgttgttcctaggaacttcagattgctggaggagcttgaacgtggtgaaaaaggaattggagatggcacagttagctatggaatggatgatggtgatgacatttacatgcgct

SEQ ID NO: 117207 - DNA, 257 bp, Glycine max
aaattctgcattgaagagagcatttgaggccttgaacactcatcttgcttccaatacatacctggttggccattctgttacccttgctgatatcataacgacgtgcaacttgtatttaggattcagccagctcttagttaagagcttcacctccgagttccctcacgtcgagaggtacttttggacattggtcaaccagcctaacttccgaaagatattaggtcaggttaagcaaactgagtctgttccacccattc

SEQ ID NO: 117208 - DNA, 254 bp, Glycine max
agaaaaatgaagtctttccatctcacagtgacagctttgtgctgtgtagtggttgtgcttggagtgcttccactctccctagatgcacaactagatccctccttttacagagacacttgtcccagggttcactccattgttcgtgaagtcgtcaggaacgtttcaaagaaagatccccgtatgcttgctagtctcattagacttcactttcatgactgctttgttcaaggatgtgatgcatcagttttgttgaa

SEQ ID NO: 117209 - DNA, 242 bp, Glycine max
cttgaaacttccctctttcctttaaggattccctcctaatttggtgggattatccctctacagcattgccattccctgtttcactcaccacattgaagacatggaaaagcttattcgcatgttccctttgctccttgttcttcttctgtgccccaattttgcctttgctggccatgactacggccaagctcttagcaagagccttctgttctttgaagctcagagatctggttaccttccac

SEQ ID NO: 117210 - DNA, 246 bp, Glycine max
gttgacacagctgtagacagattgtctcgtcctgtacaatcttcgttatgccatatccccacgcaagcttcaatataataccaagttatctgacttttttgagattctggcaacatctgaggatagtgatggaaagactttcgtttccacagcacgtggtaggttatatcccgtgactgtcaacctatggatatcagagaaaaatgcttttgaatgggctacatctttgaaagcccctcacacaga

SEQ ID NO: 117211 - DNA, 250 bp, Glycine max
tgctgcttctgcttcgtctacctctccgaactgcaccgttttgaagaggaagcgacccgctaggttggacatacccgtttcctccctcacctttgcggttccgcccacgccctccgtggcggcgcgtgacgtggttgaggctgaggaagatgggtttggggtgtcctgcaagagagggaggagggagtatatggaggatcgttacacagctggggataatcttcgcggagaacacaaactggcttttttt

SEQ ID NO: 117212 - DNA, 252 bp, Glycine max
  unsure (1)..(252): unsure at all n locations
cttgcaaggaaacttcacgaggagctggagatgtatcgacaggcatccagttcncggtctgatggatctgcaagagggatgaaggaagttgcatgtctcgtnttgcactgtccatctgcaggttcaggtgcctagctcgggttcagaggcaagtgagtgtggagtttccaggcacccatttcttgtgagcgctcattgagttcagataaacatgaatacggaagcggtgtctacgtgttcgatnagtttaaa

SEQ ID NO: 117213 - DNA, 260 bp, Glycine max
tgaaactaaaggtgtatacattgccaagctagaagaactcaagaagcaaggtgatccaattgaagagcgttacaaagaatacatggagaggggtacagtaatagatcaacttgtctattgtataaatagttatagagaagctgcaatgtcaaatgatcccaaattcgatcacattgacatcaatgagaaacaaaaggtcttaaatgaatgtgtggaagctgagaactggctcagggagaaaaaacagcaacaggactctc

SEQ ID NO: 117214 - DNA, 254 bp, Glycine max
aggtagcactggaacttgtaaggaaggacaagcttagagaagtgaaggcagggcacgatggaacttgggctgcgcaccctggtctcattccagcctgcatggagattttcaacaacaacatgggcaatgcttccaaccagatagacacagtgaaacgcgaagatggggcaaacatcaccgagcaagacctcttgcagataccaagaggagcccgcaccatggaaggtctcagattgaacacaagggcgggaatt

SEQ ID NO: 117215 - DNA, 252 bp, Glycine max
gtcttgttggtaaagaaagaaagagaatagaagaatcgaagacgaagatggatgacgcatcagcatcaaagttcattccacaccaaatcggaggagtccaaaacgacgcgcttcgattcggtctccatggagtcaagagcgacatcgttggttctcaccctcttcaatcttcactccaatctacaaggagaatggatgaagcgatgaagaggcaatgcaaagttaacctgtacggaactgcttttcccatga

SEQ ID NO: 117216 - DNA, 248 bp, Glycine max
agaaggccgagatgaagaagatgtatggcctcatcgagacctacaagttgaacggccaattcagatggatatcctctcagatgaaccgtgtgagaaacggagagctctaccgtgtcatctgtgacacaaggggtgcctttgtgcagcctgcagtttatgaggcctttgggttgactgtgagataggccatgacttgtgggttgccaacgtttgccacatgcaatggtggtcctgctgagatcattgtg

SEQ ID NO: 117217 - DNA, 246 bp, Glycine max
gaaaattaaggtccttgttttcttcgttgctacaattttagtagcatggcaatgccatgcgtacgatatgttccctctccgaatgaacactggctatggtgcccgtactccggaggtgaaatgcgcaagttggaggcttgctgtggaagcacacaacatctttggctttgagaccattcctgaagagtgcgttgaagcaacaaaggaatacatccatggcgaacaatatagatcagactccaaaac

SEQ ID NO: 117218 - DNA, 246 bp, Glycine max
acctcctgaggggattaaagttgtggtaaatgatgatgattttgcaataatatatgctgacattgaaggcccagctggaactccttatgataatggagttttccgcatgaagttgttattgtctcgtgatttccctcactctcctcctaaagggtttttccttacaaagattttccatccaaatattgcaaccaatggagagatttgtgtcaacacacttaaaaaggattggaaccctaaccttgg

SEQ ID NO: 117219 - DNA, 128 bp, Glycine max
ctccgccaagctccattactccaggtcggtgaggaagattgtgaatctggacgaccacattgcgctggcatgcgcggggctcaaggccgacgcacgtgagctcataaacagggtacgtgcggagtgcc

SEQ ID NO: 117220 - DNA, 86 bp, Glycine max
atcttgacaaaatggccgtaacagaagcaaacctaaagaaggctggcttccacacatgggagcagcacattctcaaggatccacat

SEQ ID NO: 117221 - DNA, 175 bp, Glycine max
atcgtgatgcaatgctagggtgctatttgtgaacgctggcgtggtgaagggttacgaggggaaaacaaaatacggagcgttgaatggatgttccaactgtgttgtcgctggttacaccaagggtgatggtcttggcgctgagattgatggcactttcatcagtgtctataccgtt

SEQ ID NO: 117222 - DNA, 151 bp, Glycine max
caaaaaagtggtgtcatcatgtgagaagaagaagaaaagcgtggtgggtgcagaaaagaagaagagtgatagtgggcgagctcgtaaaaacgtgtacagaggaatcaggcaaaggccatggggcaagtgggccgcggagataagggaccca

SEQ ID NO: 117223 - DNA, 131 bp, Glycine max
gcagaactttgtggtggctgagcaagggggagaacaaggattggaatacgtagtgttcaagacacaccacaacgccgtgagcagctacattaaggatgtgtttagggcaatcccttcggaggttctttcca

SEQ ID NO: 117224 - DNA, 253 bp, Glycine max
agaatgtcgaaggaagtgagccaagaaggcctgcagaggaaggactacgtagaccctcctccagcccctctttgcgaccttgccgagatcaagctctggtccttctacagagccctcatcgccgagttcattgcctcactcctcttcctctacgtcaccgtcgccaccatcatcggccacaagaaacagaccggaccatgcgacggcgtggccttctcggcatcgcatggtccttcggtggcatgatcttcgt

SEQ ID NO: 117225 - DNA, 216 bp, Glycine max
ttctgctacttcctactccaaccgcacttctgctccgcaattatcatgggcaaggtcaagatcggaatcaacggatttggaagaattggccgtttggtagccagagtggctctgcagagagacgatgttgaactcgttgccgttaacgaccctttcatcaccaccgattacatgacatgacatgtttaaatacggacagtgttcatgggacactgg

SEQ ID NO: 117226 - DNA, 252 bp, Glycine max
ctccacaactgcaggtaccctaatctacaagcaacccttgaaaaattccagtgtaaaaaatctcacccttctcaaaccaactttgccaccaataaatgccacaagctttgtggcaaacttcacagcaaaattcagaagcttggctagtgccaaattccctgccaaggtacctcaaaaagtggacagaaaatttttcttcactgtggggctagggactagtccttgccccaaaaacacaacatgccaagggcc

SEQ ID NO: 117227 - DNA, 132 bp, Glycine max
gttatctgacttttctgagattctggcaacatctgaggatagagatggaaagaccttcgtttccacagcacgttgtaggaaatatcccgtgactgtcaacctatggcaaccagagaaaaatgcttttgaatg

SEQ ID NO: 117228 - DNA, 258 bp, Glycine max
  unsure (1)..(258): unsure at all n locations
gaaaaatccaagaagtctgtgagcatcaccgagtttctgaagcctgctgagggggaagcatactataacccaggacgtggtaggngccgtggccgtggttcacgaggcggaggcggttaccatggaagtgccaccaacaatgcacctgctccatccattgaagatcccgggcatttcccaaccttgagtgccaagtgagggcntttcccagaaccctttgacatatctcggtcctattttcaatttgggtctcttatt

SEQ ID NO: 117229 - DNA, 194 bp, Glycine max
gtcagttgcaggaaaaatggtttcgctgaaactgcagaagcggctcgccgcgagcgtgctcaagtgtggcagaggaaaggtttggcttgaccccaatgaagtcaacgaaatctccattgccaattctcgccaaaacataatgaagctggttaaggatgggtttatcatcaggaagcccaccaagattcactctc

SEQ ID NO: 117230 - DNA, 253 bp, Glycine max
cactcttcatcaagctccgctccaacacaggggaaaatgagggagatccttcacgtgcagggagggcaatgcgggaaccagatcggttccaagttctgggaagtggtgtgcgacgagcacggcatagatccgacggggaagtacgtcggaaactcagatctgcaactcgagcgcgtgaacgtctactacaatgaagcctcgtgcgggcgcttcgtgccacgcgcggtgctgatggacctggagcccggaacca

SEQ ID NO: 117231 - DNA, 246 bp, Glycine max
gcagttgatgtggtgagcactgcagggttcacggcaggggaattgcttgagaaggatctaggatgggcagcatggaaggtgcacgtggctgttgcgaaccaaaacgacaaagcggtgagacaaaagctcaaagagtggttgaagcttcctgtggtgtaccaacttggtgtgcactttgatccttgtactgtgaccatgtcgagttccccgaggttcaacatgtatgggaatgaatttgggatgggg

SEQ ID NO: 117232 - DNA, 202 bp, Glycine max
ctctcccagacaaacacatggctttgcccaatcagcaaaccgtcgattaccccagcttcaagcttatcatcgtcggtgacggtggcacaggaaagacaaccttcgtgaaaaggcatctcactggtgaattcgagaagaaatatgaaccgaccattggtgtgaaggttcatcggttggattttttcactaactggggaaagat

SEQ ID NO: 117233 - DNA, 250 bp, Glycine max
cagcgaggaggcgaagttgaacaatgaatcggacgatttgcagaactctatcagactcactaaggataacatcaaggctatcattatggacgtgatgttcggaggcacggaaacggtagcgtcagcgatcgagtgggccatggcggagctcatgagaagcccagaagatcaaaagcgggtccaacaagagctggcggatgtagtgggcctggaccgtcgggccgaagagtccgatttcgagaaactcact

SEQ ID NO: 117234 - DNA, 246 bp, Glycine max
cacagccacaccaagccttatgtgcgagcaaatggaaggaagtttgagagggctagaggaaggaggaacagcagaggatttagggtttgatgtgataaatagtgttctattctctgaaattcaaaatttccttatatcttagacggttgaagcagttttcttgttatttgtgttctgataatatgattttcagtgtgaagttgtcattcttggctccttgattctccaagtgaagtaagtgttctg

SEQ ID NO: 117235 - DNA, 246 bp, Glycine max
ctaaattctcaaaggcaccaatttcattgctcagagttcccaaattctccccaagagataaaatgtctctaatcccaaacttcttcggtggccggagaaacaatgtgttcgatcctttctcactggacgtgtgggatcccttcaaggattttcctttcccaaatacgctttcttcagcttccttccctgaattttctcgggaaaattcagcatttgtgagcacccgtgtggactggaaggagaccc

SEQ ID NO: 117236 - DNA, 247 bp, Glycine max
  unsure (1)..(247): unsure at all n locations
gaggaaacacaagctcaagcgtcttgttcagtcaccaaactctaancttcatggatgttaagtgccagggttgcttcaacataaccactgnntttagccactctcagactgttgttgtatgcggaaactgccagactgttcttgtgtcaaccaaccggtggccgggcaaggctaaccgagggatgctcctttatgaagaagggagactgantgngattgccatcttttttggtttgtgatggggatt

SEQ ID NO: 117237 - DNA, 194 bp, Glycine max
ccacagtttcggaggagaagaaaatagtcgttcgagatggcccgtacgaagcaaactgctcgtaagtccacaggaggaaaggctcctaggaagcagcttgcaaccaaggctgcacgtaagtctgcaccaactatctggtggtgtgaagaagccacatcgttaccgtcctggtaccgttgctcttcgtgaggtta

SEQ ID NO: 117238 - DNA, 247 bp, Glycine max
gatcttgaaagtggcggtggaggaaccaagaataacagaactgcagaggaaaactactctgcacctgaatcttcccatgtttatgattctgagacccattggacatcatggctcgtgcctatgtttgtggttgctaatattgctgtctttgttattaccatgtacatcaacaattgtcccaggaacaaccttcgtttccaaggtcgctgcgtggccaggttccttggaaggttctcttttcagccta

SEQ ID NO: 117239 - DNA, 249 bp, Glycine max
aaaaggacgtcttgcacaactgtgcttactctagcttaccaaagtcttggggtagtatatggtgacctcagtagtgtccctatttatgtttacaagacctcattctcagggaaattgagcctcaaagaagacaatgaggaaatttttggggtgtttccatttatctcctggacatttaccattattggtctcttcaaatatgttttcattgtgatgtctactgttgacaatgggggaagtttgagcaat

SEQ ID NO: 117240 - DNA, 257 bp, Glycine max
acagtgtgggacgtgttggtccacctcttccttggttgctacgattaagcttgtttcttgggaagaaggagggtatctgacatcagataaaccaatgccaaggggagagattgtagttggaggatttagtgtgacagctggttactttaagaatcaagaaaaaactaacgaagtgttcaaggttgatgagaaaggtatgcgctggttttatactggtgatattgggcaattccaccctgatggatgtcttgacatca

SEQ ID NO: 117241 - DNA, 246 bp, Glycine max
ccattgtacaacccaattcccttcgtcgttttcgattaagagagcaatggcacgtaccaagcaaaccgctcgcaagtccaccggatgaaaggctccgaggaagcaattggcaaccaaagccgctcgcaagtcagccccggcgaccggcggagtgaagaagccccaccgcttcaggccaggaacggtggctctgagggagattcgagagtaccagagaagcacgaacttctgatccgaaaactccca

SEQ ID NO: 117242 - DNA, 242 bp, Glycine max
gcccggcgtcaacaccgtcgaggaggccgtgaagaccgtcgtggatccggtctacggcatgttccacctcgtccccggcgaggtcctcaaatacgccgatcgcaaggtcgccgaattggaccgccacgttccctccaaactgaagaaggtctcctcccaggcccgctccgtcgtctccgaagtccgccgtgatggtgtctccggctacgccaaaatcgtttactcgaagtatgagcccacgc

SEQ ID NO: 117243 - DNA, 246 bp, Glycine max
ttcaatgggaagcctgttctttttggcatccattttgcccccttttaaatggctgcatatctgagaacatagctaccgggttctggagtgtaggaatctatgttactggtgttggcacctgatgtttttagctcagctttgcattggttttgccaccatgtgtgtcttagttttctaagtttttacagctagctgtaccactgtatcagtctttgtttaccaaatgtttcatgtgtttgaactatg

SEQ ID NO: 117244 - DNA, 247 bp, Glycine max
acgaccgtcttccccaatcgcctgcgtctctctctgaattgacaagcttaaagacaaagtcttaaatggctggtccaaggattgcccatgctaccttgaaaggtccgagtgtggttaaggagataataattggaataacacttggcttagctgctggtagcgtgtggaagatgcaccactggaataaacagaggaaaaccaggaccttctacgatttactggaaaagggtgagatcagtgttgttgc

SEQ ID NO: 117245 - DNA, 119 bp, Glycine max
cgatcatcttaattatgtttactagtaataatgtggaagctgtacgtttgttaattctaggctaaataatagagcaattgtttttcaactacaaaaaaaaaaaaaggggcgccccccgc

SEQ ID NO: 117246 - DNA, 235 bp, Glycine max
attcttgattggataggatatgatcacagcagggatgtacacaactgcactttcagttgattgggccatggctgagttgataagaaacccaagggtgcaacaaaaggtccaagaggagctagacagggtaattgggcttgaaagggtgatgactgaagcagacttctcaaatctcacttacctacaatgtgtgaccaaagaagcaatggaggcttcacccaccaaccccactaat

SEQ ID NO: 117247 - DNA, 248 bp, Glycine max
  unsure (1)..(248): unsure at all n locations
ccaatttgcncccagtagcagngctaaccgagcttcacnaanatgagtcgggaanagttgatgnagatggccggttcggttanaactgngggaaagggtaccatnagaannaagaagaaggctgtccncaagacaacaaccacagatgacaaaaggcttcagagcaccctgaagagaataggggtgaatgccatcccggctattgangaggtcnatatctntaaggatgacgtattatccagtttcta

SEQ ID NO: 117248 - DNA, 241 bp, Glycine max
tagcattcggactctccgctggagttggagttggcaacgccttggtgttggagatcgtgatgaccttcggtctggtatacacggtctacgcaattgccattgaccccaagaagggtaatttgggaattattgctcccatcgccattggtttcattgtcggcgctaacattttgttgggtggggccttctctggagcggccatgaaccccgctgtgacatttgggcctgctgtcgtgagctg

SEQ ID NO: 117249 - DNA, 238 bp, Glycine max
gtgcaaacaagaccgtgaaggagcagaggagtattattcccgtgccatacttgcagacccaaatgatggagaggttctatcacagtatgggaagttagtttgggaactacatcacaaccaagaacgtgcctccagctattttgaaagagcagtccaagcctctcctgaagacaggtatgctgcatgtcatgtgcttcataacattcaggtgatgatatactacgatcaagcagtctag

SEQ ID NO: 117250 - DNA, 241 bp, Glycine max
gtgcaaacaagaccgtgaaggagcagaggagtattattcccgtgccatacttgcagaccctcatgatggagaggttctatcacattatgggaagttagtttgggaactacatcacaaccaagatagtgcctccagctattttgaaagagcagtccaagcatctccttaagacaggtatgctgaatgtcatgtgcttcataacattcagtttatgatattattactatcaagcagtctagtt

SEQ ID NO: 117251 - DNA, 241 bp, Glycine max
gcttgtgctgccttcgcttgcggttttatcacagaggaattaacatatatatagcaagcatggcagtcacactctacgaccttagctcttcctctgggttgaagaaacttgatgagtaccttctcccacgcagttacatcaccgggtaccaggctacaaaggatgagcttactgtttatgaagcttttccaactggtccagcagattaatatggaaatgtgtccaggcggtacaagcacat

SEQ ID NO: 117252 - DNA, 178 bp, Glycine max
acgtagcgtaggaagtcgggctcgagagaggggatcaacactgtagtgtgaaaacacggctgatcttgttgcttgtggcacattggttcttggctaatccagatttgccaaaaagatttactctcaatgcccctctgcaacaagtatcacatggaggcattctacacttctgatccgg

SEQ ID NO: 117253 - DNA, 245 bp, Glycine max
taggtccaatggacaagggggtgagagtgtcgtgacctataatgccgggacgagcctctgggttgctgctctgatccaccctccgtatatgacaagggacatcgtctctgagacagtgaacttggagagtaatcttcccgaatggctgagcggtgggttctctgccactaccgggttgcatgaaggctccgtggaaacccatgatgtgatggcttggtctttggcgtccaaggtggcagatggta

SEQ ID NO: 117254 - DNA, 265 bp, Glycine max
gcagtatgcctttggggagaagctaggactttatatagtggtgcctcaacaacttgtggtggaaattggggtgaacattgtctatatggttactgggggaaaatccttgcaaaagttccatgacactgtgtgtgacagctgcaaaaagatcaagttgaccttcttcattatgatctttgcctctgttcactttgtactgtctcacctgcccaacttcaactccatttctggtgtatctctggcagcagcagttatgtccttgagt

SEQ ID NO: 117255 - DNA, 261 bp, Glycine max
tagactctagttatatcacaaatgggtatttggagactaccatcgattggataccaggaattaaggaaattcggttgaaggatcttcccagcttcattagaaccacaaatccagatgagttcatgcttgatttcatacagtgggagtgtgggaggactcgaaccgcttctgcaataattttgaacacctttgatgccttagagcacgacgttttggaagcgttctcgtccattttgcctccggtttattccattggtcctt

SEQ ID NO: 117256 - DNA, 255 bp, Glycine max
gggttgtgatgttcacctcattgcggatgctgctgctgatgatgattggaacggtgattgcgcgctctactctcactactccgggcagctgattgttcttccgcacaatgtggcacttccggtgtcccttaaggtgctggagcacgaggtgtatgctgttgcgcctgttaagaaggttttgggtggtggtgctggctgcagctttgcggctcttggacttgtgaacatgttcaatgctggtggtgccgttgaagg

SEQ ID NO: 117257 - DNA, 249 bp, Glycine max
ctccgccccttttttgttgttccttcttctcgttcgtcgctttgtgatctctctctgcaaccatgtccgtcgagaaagagagagagacccaggtttacttggccaagcttgccgagcaggccgagagatacgaagaaatggttgagtgtatgaagaaagtagcaaaacttgatcttgatctgactgtggaagaaaggaaccttctctcagtgggatacaaaaatgtgattggtgcacgaagggcctctt

SEQ ID NO: 117258 - DNA, 246 bp, Glycine max
atccattcagacaaacgtgtatcttacttggaagttccctgagagacgtttgaggcctgggattccaaacttgatttattaaacgtatagtcaccatcaaaaagaaaaaatagggggggccacagactagggatttggtcacccgggatatgatttcggtatcggaccagaagcgactccatatccccctacggggactgattttaactatgggcaagctatgggcaaaatgtgtcccgtgggaaa

SEQ ID NO: 117259 - DNA, 255 bp, Glycine max
tgaagatcctcattatgcacagtccatgaattctccattttcatatcctggtgtttacttctcaggttatcagggtgttccatacacatatgtgctcccgtctgttgcaccaccggcatacaatgcagtgaattacagaccaaatggtgctgctggaggaaagctccagaacagcaaggaggagcggagtaactcattgaccatgggtgttgcagatgagcatataggattggttgttggtcgtggtggaaggaa

SEQ ID NO: 117260 - DNA, 258 bp, Glycine max
  unsure (1)..(258): unsure at all n locations
gtcatcaatcatctatggctacctgtccctcgcctccttcaccatcgtctggttcttcaattccgtgcccaagatctaccatgttttactgtactggaagtgaggactactatgcagagcctcacttcctccaagcttgttgtctttgcagagaaccactaggccaagatcgtgacatcttcatgtctagatggaacacacgatcgagnagcaattagtgcagacaggagcaaagagagattgatgaggcaaaggtga

SEQ ID NO: 117261 - DNA, 255 bp, Glycine max
gtgaaccttgacaagttcttcgaggacgtggaaggcgtgaaggaggaactaaaggagttggaaggtttggctcagagtctaaggagcagccacgagcagagcaagacgctgcacaacgcgaaggcggtgagggacctgcgcgcgcgcatggacggcgacgtctcggcggcgctgaagacggcgaagctgatcaagctcaagctcgaggcgctggagcggtccaacgccgcgaaccggaacatgcctgggtgtgga

SEQ ID NO: 117262 - DNA, 155 bp, Glycine max
gacagggtcagtcagttattgttctctgcattttgttcccaaatgaaatgtctatgactttcgtcgtcaagttctagggtaacaaattttattgttgccttgcttgttattattatacttagaataaaaatgttctcgcatggacaagttctttt

SEQ ID NO: 117263 - DNA, 254 bp, Glycine max
caaacacgctgttcctacaatcattccaaatgtgcccttccggtcgcaccctcctcccttcctccgtctccgatttccgaccggcattcgacgtcctcgatgccgaccgcgacggcaaaatcagccgcgacgacctccgcgccttctacgccggagtcggcggcggaggagatgacggatcgggcctatgatgacagtggctgacaccaataaggacgggttcgtggagtacgaggagttcgagcgcgtggtct

SEQ ID NO: 117264 - DNA, 257 bp, Glycine max
attgatggcatttatcccatggtttaacatgttaattatactgtaataaacatggctttaatattaaactttttccttattatccaaagtcaccacagtccatttcagtaaatataaaaatatatgcttaatactttgtacaatactggtttttggtccaaacaaaactggatcagaaagccaattaattcaactttaagaatccccaatttttttttaaagatttccaaatggatttaggcaactttgaataatgg

SEQ ID NO: 117265 - DNA, 257 bp, Glycine max
ctgtggaaaggaaacctcattgccaccatgaacttctccggcaagtaccaagtgcagagccaagagaactcttgagcccgtcatgaaggcgatgggtctgcctgaggacctcatccagaaagggcaggacatcaagggggtgtcagaaatcgtgcatgaagggaagaaagtcaaactcaccatcacctatgggtccaagctgatccacaatgagttcaccttgggtgaggagtgcgaactggagaccatgactgggg

SEQ ID NO: 117266 - DNA, 254 bp, Glycine max
ggaaaatgttaattccctggttggaagatcagcagcaccagaatatcttcagaaacttacatacctatgctggaaccaccacaaggctgtgaggcacattgatacagttcgggcatacacatttggatctcactactttgttgaggttgatattgtcctgccatcggatatgccctgcaagaggctcatgatattggggaatcgttgcaagaaaagcttgagcttttgcccgagattgagcgtgcttttgttca

SEQ ID NO: 117267 - DNA, 254 bp, Glycine max
  unsure (1)..(254): unsure at all n locations
ctcaagtccaacctacccctttttcttctcccactaactccaccgttttcnncctcgatcatgtctcacttcaagggcaagtaccatgatgagcttattgccaatgctgcttacattggcactcctggaaagggtattcttgctgctgatgagtcaacagggacaattggcaagcgtttggccagcatcagtgtagagaattttgaatccaacaggcgtgctcttagggagctgcttttcaccgctcccggtgc

SEQ ID NO: 117268 - DNA, 254 bp, Glycine max
atgctaggcaagacatggtggtggtagaggtaccaaagctagggaaagaggctgcagtaacggccataaaggagtggggccagccaaagtcaaagattacccacttgatcttctgcaccaccagccgtgttgacatgcctggtgctgattaccaactgaccaaacaattgggccttgcccctatgtgaagaggtatatgatgtaccaacatcgttgctttgcaggtggcacggttcttcgtttggccaaggatt

SEQ ID NO: 117269 - DNA, 254 bp, Glycine max
ggaagagggtcgtgttattacacaatgaagcttcttctctcaactctaattcggcggtgaatccattgaagagaatgtgcagcggaaaattcacttttgactctgaaaggtctcgccttgaggcccttcctcttgatgttctgattagggtgttgtgtggtgtcgatcatgaagtctggatacaattgttcgtgtctcaaaaactgttagagaagcggctgagattgctaggagaatgcattttgagtatagca

SEQ ID NO: 117270 - DNA, 243 bp, Glycine max
cccattcatacgtggtgttattactgctgctcttatcacttttcttatctctttagttctctcttcaccttgctatttctttatcttcttcttctgagacttgtttaagcttttcttccagtaacataacatcataatgtgtggtatacgagctgttctggggtggcctgatgactctcgagagataaaggtccacgtgcatgagctgtctcggagataggagcagcgaggccctgtctgtag

SEQ ID NO: 117271 - DNA, 252 bp, Glycine max
ctcgaccacgctgtcttctgccttcctgcggctagaattccccacctcaaccaaacaacgctctccaatctccatcagagcctcggtctccgacaaacccccgctaccggctgtgtcggtgacctccccggagcccagcaagcttccgatccgcaaaatccccggcgactgcggttcccggtgatcggtcccttcaaggaccgccaagactatttctacaagcaagggcgcgacgagttcttcaagtcccgc

SEQ ID NO: 117272 - DNA, 252 bp, Glycine max
  unsure (1)..(252): unsure at all n locations
gattgatccgcgtcaccgctacgggcacaacttgcattattactatgaagaatggtgcaaaacggattctggccagccattcttttattggttggatttgggaaatggaaaaaatattgatcttgaacaatgccccagatcgaagctccgaaagcaatgcataaagtatctangacctcaagagagagagcactatgaatacattgtctgtgaggggaatattatccacaagcaatctggagattttcttca

SEQ ID NO: 117273 - DNA, 252 bp, Glycine max
gggaatgtactttgtgtcctctgtactgctgatccgaatgagtatgcccccagaataccgcaccataatcacagaggtcctcggagagcttcagttcaacttctatcaccgctggtttgacgtcatcttcctggtcagtgccctctccagcatattgttcctctatctggctacaagcaggcgccagagaagcatatggccccttgaactcaggccgcctgccaacttcaggaaagaagacacagtggggat

SEQ ID NO: 117274 - DNA, 249 bp, Glycine max
gcactatagtaaaaaaaggacattcattcatctatggctacccttattgctcccagcaaccactctccccaagaagatgctgaagctctcagaaaggcttttgaaggatggggaactgatgagaacactgtcatagtaattttgggtcatagaactgtgtatcagaggcagcaaatcagaagagtttatgaggaaatttaccaggaggatcttgtgaagcgcctagagtctgagatcaaaggagacttt

SEQ ID NO: 117275 - DNA, 253 bp, Glycine max
atttaactatagcctttacattatctctactaggtacttttatatttcgctcccacttaatatctactctcctctgcctagaatcaataatactatcactatttgtcataacttcaacatccacattaaattccaactccataatctccataaccatcccaattaccattctagtttttgcagcctgcgaacactagtaggtttagccttactagtaaaaatttcaaatacttacggaacagactacgtacaa

SEQ ID NO: 117276 - DNA, 252 bp, Glycine max
  unsure (1)..(252): unsure at all n locations
ttcaggttcttctgaaaagatgtctcgcgtgtatgttggtaanttggattcacgagtcactgagagagatctcgaagacgaattccgcgttttcggagttattcggagtgtttgggttgcacgtagaccacctggtnatgcttttattgactttgatgaccgcagagacgcacaggatgctatccgtgaattggatggcaagaatggttggagggttgagctttctcacaactctagaggtggaggtggtgg

SEQ ID NO: 117277 - DNA, 230 bp, Glycine max
cgtgcacgtaacattcagcgattcttaagccagtctttccatgttactgaagtcttcactgctgccccaggaccatatgttgagttgaacgagaacgttgccagcttccacggtgtgttgtatggatcatacgatgaccttccagagcagtcgttctaacctgttggcggtattgaggaggtcattgcaaaggccgtgaaaattgctaaggaatctgcagcgtcttaatc

SEQ ID NO: 117278 - DNA, 250 bp, Glycine max
agaaaaaagaaccggaaccaaacttccagctgttggataatccagcacgggtcatgcctgcccagctgaaggtcttaagtatgacagagacctgcagataccaacccttcaagccactctccatcgggggcatcataattctgaaagacaccagcgaagacattgaggaacttgtggaacccgtggcatcacatggcccaaagattgaagaggaggagcaggagccagagcccccagagccatttgagta

SEQ ID NO: 117279 - DNA, 244 bp, Glycine max
gggaaatacgcacagaggaagaaaggagacttggtgaggatccactttctaggaaggactctcgttggggagatagagattcagaaggcacctggagaaaaggaccagaagctgactctgagtggagaagaggcccaccagaaaaggagtggagacgagtacatcgggatgatgagaggcctcacaggagagatgaggatcggctgaggcgctggggggggacgatgaagagagagagtcgtct

SEQ ID NO: 117280 - DNA, 241 bp, Glycine max
caaaagtgagcacactgtctgatgttgaagggttatgcgtatcatttgctggtatttataactcatctgatcctgtacttgctgtaaaggaatatttgaaggaagaaccatatacagctgaagaaattgaagcagttacaggggaaaagctgacttcatttttgaacaataatgcagcttatttagaagtgttaaaagttgcaaagcaatacaagttgcatcagagagctgctcatgtgta

SEQ ID NO: 117281 - DNA, 243 bp, Glycine max
tgtagagacaactttctggaaaggaaaatcataaagttcatttcatacactcactgtctgaattaaaacagacactcaaaagccagtttctaagttacattctaacttttctctctcaaacaaccctatcaactgtctaaatgtaggtcagagggatgtcttccaaagtctctaaagatcaagtccaaccagtaagttctataaatgcgaggcatctcttcatgctgctgttcagaatgggaa

SEQ ID NO: 117282 - DNA, 242 bp, Glycine max
attgatggtatggtcaaagatggcctttgggatgtctataataacttcggcatgggagtatgtgccgaactatgtgcagatcagcatgtcataacaagagatgagcaggactcttatgccattcgaagctttgagagtggaatatctgcccaaaatgctggtcattttgcttgggagatagttccggttgaagtttcctctggaagagggagggcttccaaaattgttgataaagatgaagg

SEQ ID NO: 117283 - DNA, 238 bp, Glycine max
cttccttgttggaacatcatggcttgcgcgcaacagtggcggatgcacgtttctgcaagccattggaccgttcccttattcgcagccttgcccaatcgcacgaggttttgatcactgtggaagaagggtcaataggaggattcggatctcatgttgttcagttcatggcccttgatggccttcttgatgggaaattaaagtggaggccaattgttcttcctgattgttacattgacca

SEQ ID NO: 117284 - DNA, 242 bp, Glycine max
cggctcgagctcttctacctctcaagtttttgaagtataaagatggcagagacattcctattcacctcggagttagtgaacgagggacaccctgataagctctgcgaccaaatctccgatgctgtcctcgacgcttgcctcgaacaggacccagacagcaaggttgcctgcgaaacatgcaccaagaccatcttggtcatggccttcggagagatcaccaccaaggccaacgttgactacga

SEQ ID NO: 117285 - DNA, 237 bp, Glycine max
gtctcccttcttcttgttcctttggctgtgccagagaccacaccaggctccatctcatcttcttcctccctgatctcggtaggtggatcatctaggcaacggatctcattgtccacaccatccccattaaccaactccagtgggctgcctttgctagagatggctacacctccatgcaaaagcttgactttctccagtacctcctggcaggccttctgggccacctcagggtcaatc

SEQ ID NO: 117286 - DNA, 239 bp, Glycine max
ttcaaggaagtggacgggaagtctcgagattctttacgtgctttcacgagaacgttcattgctgttcctgccaccaattcatgggtatgtattgtaaatgacgaattatttgtgcggaacgccagccctgaagaaatccaaagagccttcgccatgcctgcacccacaccttcttccagcccagtacccacactctcccaagaacagcaggatatgttacaagcattttctatccagtc

SEQ ID NO: 117287 - DNA, 248 bp, Glycine max
ctctccagcccctgctcccagccaggggctaaggaaggggagaaagacaggggagaaagactctgtaaatactatggcatttggctccacccatatcctctccgtcggaaggtttttgttgaagagccaaggcccttggaccacccctgctgggctccagagctgcaggggcttcctgcactaggaacagggtggggctgtcgccttagatcccaccgaaaccctccatcctcctccagcagctgtgt

SEQ ID NO: 117288 - DNA, 245 bp, Glycine max
ctctctcatcactacctctgcatttttctctcgctctctgccttccatcaccctcgccatttcccttcccaagatagtagaagatggcagacgctgaggatattcaacctcttgtttgtgacaatggaacaggaatggttaaggctggttttgctggagatgatgccccacgtgctgtgtttcccagcattgtaggtagtcctcgtcacactggtgtgatggttggcatgggccaaaaagatgca

SEQ ID NO: 117289 - DNA, 232 bp, Glycine max
gttgcgacacaatgctggatacgtacttcaaatgtgggtctgtgaggagtgcgaggttggtgtttaaagggatgagtagcaggaatgttgtttcttggaatacaatgattgatggttatgcacaaaatggtgaatctgaggaagcgtttgcgacgcttttgaagatgttggatgaaggggtggaaccacagactgttagtatgatgggggctttacatgcttgtgccaattt

SEQ ID NO: 117290 - DNA, 241 bp, Glycine max
attttgatgagaataagccaatgtgtaaaaggttgaatgttaaagtacttccttacttccacttttatcgtggggctgaggggcagcttgaatcattttcatgttcacttgccaagtttcaaaaaataaaagatgccatggagatacataacacagctcgatgcagcattggtccacctgtgagcattggcgatctgcttgctgaaccttcctctgttgccaaggatagaccagcagaatc

SEQ ID NO: 117291 - DNA, 238 bp, Glycine max
agaaactgcatttcttctacaatgccaaacacctcgcaggttgtttcatgcaaagctgtcatatgctggggggctggaaagcctgtaacggtggaagagatacaagtagacccaccaaaagcaacagaagttcgagttaagatgctatgtgccagtttatgccacacagacatctcaaacattctgaggttcccatatatcaatttcctctagcacttgggacaccaagagttggtgt

SEQ ID NO: 117292 - DNA, 242 bp, Glycine max
ctctctcatcactacctctgcatttttctctcgctctctgccttccatcaccctcgccatttcccttcccaagatagtagaagatggcagacgctgaggatattcaacctcttgtttgtgacaatggaacaggaatggttaaggctggttttgctggagatgatgccccacgtgctgtgtttcccagcattgtaggtcgtcctcgtcacactggtgtgatggttggcatgggccaaaaagat

SEQ ID NO: 117293 - DNA, 244 bp, Glycine max
gctcacatgccgggggactctaatccggctgggaatgaacatgcctgccacagctgagagagtgtgcaaggactggattggatctcaaacaactagtggaagtagtaatagccagatctctgatgtaatcctctactttggaatcattgacattctccaagactatgatattagcaaaaagatagaacatgcatacaagtcactacaagtggactccacttctatctcagctgttgatcccaag

SEQ ID NO: 117294 - DNA, 164 bp, Glycine max
gggatacagaattgttggaatcattggagaccaatggagcgatctgcttggagaccacagaggcgaaagcaggacctttaagcttcctaatcccatgtactacattgagtagtaccttcacctctctcaacaatctagctagagtttgctcctatctatatgta

SEQ ID NO: 117295 - DNA, 232 bp, Glycine max
gagagagagagaggcgcgaaaatgagcggaggaaggggaagaagaagggagcgagctttgtgatcgattgcgcgaaccggtggaggataaaattatggacattgcttctctggagaagttccttcaggagaggattaaggttggcggcaaggccggtgcactcggcgattccattactgtcataagggacaagagcaagatcaccgtcacctccgacagcaacttctctaaa

SEQ ID NO: 117296 - DNA, 231 bp, Glycine max
tataggtcctgaagaatgaagatttaaattcaaggtcatggctaaacatctgaagttcattgccaggactgtgatggttcaggatgggaacgtggaaggtgcctacaggaccctgaacagaatcctcaccaccgacgggcttattgacgtcataaagcgacgacgctactatgagaagccttgccgccgccgccagagggagagctatgaaacatgccggaggatctacaa

SEQ ID NO: 117297 - DNA, 238 bp, Glycine max
gaaaaccttagcccaaccggatcttcacgattaggagatggctaagtcgaagaaccacaccgctcacaaccagtcctacaaggcccacaagaatggcatcacaaaagccaaagagccaccgccacacttccaccaaagggatggatccaaagtttctgaggaaccaaaggtacgcgaggaagcataacaagaagagccgtgaaacagccacggaagaagagtaaagtgtcactctcaa

SEQ ID NO: 117298 - DNA, 96 bp, Glycine max
ccctcgcggctagggcagatgtcaatatcaggcattcatgccgagatgacacttcccgatatgatgagaggccgggcccctccccgcttccacaca

SEQ ID NO: 117299 - DNA, 237 bp, Glycine max
cgatctctcgttgatctccaactgccgcctccattcgccatggaccccaactgctcctgtgccacagatggatcctgctcctgcgctggctcctgcaaatgcaaacaatgcaaatgcacctcctgcaagaaaagctgctgttcctgctgccccgtgggctgtgcgaagtgctcccagggctgcatctgcaaagaggcttcggacaagtgcagctgctgcgcctgaagtgggggcgtc

SEQ ID NO: 117300 - DNA, 238 bp, Glycine max
aaactgataaggcagggatacaacattgttgggatcattggagaccaatggagcgatctcctcggaggccacagaggcgtaagcaggacctttaagcttcctaatcccctgtactacattcagtagttccttcacctctcaacaatctagcttgctcctatctatctatatctaataagatgcgttcaaataggggcactagcttcactttatgttgtttcagctgggtgtcaacaag

SEQ ID NO: 117301 - DNA, 232 bp, Glycine max
taacgagggtattcccccatatcagcagatgcttatctatgccgggaagcagcttgaacatggaagaacccttgctgattataacatccagaaggaatctactttgcacttggtgttgcgacttcgtggtggcatgcaaatcttcgtgaagactttgacgggaaagaccataactttggacgttgaaagctctgacaccattcataatgtgaaggcacagatacaggacaag

SEQ ID NO: 117302 - DNA, 232 bp, Glycine max
aaggtatattagaaaagataaaagagaagcttcctggttatcactccaagacagaggaggaaaatcgaaaaggaaaaggagagtggtgctcattgatatttaagattgagacaaggcttttttgttggttggagatgcatgattgtggtgtgctttgttttcatttcatcatatgacagccttgtgggtttctttggtgtttcttgatgcatacttaatttactttattatt

SEQ ID NO: 117303 - DNA, 231 bp, Glycine max
gggagtagcggcattaaaaatgcagatcttcgtgaaaactctgacagggaagactataaccctcgaggtcgagagcagcgacaccatcgacaatgtcaaggccaagattcaagacaaggaaggcattcctccggatcagcagcgtttgattttcgccggaaagcagcttgaagatggaaggaccctggccgattacaacatccagaaggaatcaacccttcatctcgtcct

SEQ ID NO: 117304 - DNA, 270 bp, Glycine max
cactatacttgtcaaccctttgagagttagaatggctgctgctattgaaatccccacaatagtgtttccaaactcctctgcccaacagaggatgccagtggttggaatgggatctgcccctgacttcacatgcaagaaagacacaaaggaggctatcattgaggccgtgaaacagggttacagacagctcgacactgctgctgcttatggctctgaacaggctctcggtgaagctctcaaggaagctatccatcttggcctcgtctcccg

SEQ ID NO: 117305 - DNA, 261 bp, Glycine max
ctctcacctgaaaatgtcttgctgcggtggtaactgtggttgcggaagctcctgcaagtgcggcaacggctgcggaggctgcaagatgtacccagacttgagctacactcagtcaactaccaccgagaccttggtcatgggagtggcacctgttaaggctcaatttgagggtgctgactcggtcgtgcccgctgagaacgatggctgcaaatgtggaccaaactgctcctgcaacccctgcacttgcaagtgaggtgttgg

SEQ ID NO: 117306 - DNA, 241 bp, Glycine max
gtgtgtatgtgtgtgtgtgtggcagtttttatcttaggtcattcagtaagacgctttgtcagttcgtgtgaggaaagtgtttgacaacgaggtcccacttaaatgactcatgcagaacttacctctactccagctgcagccaggagccaccggatgggctccattctccccctgccatcgaagtagtgaaggactggcttccccggcatggcagcaattgcttgagttctcttgttaaaaa

SEQ ID NO: 117307 - DNA, 269 bp, Glycine max
gtttacatcttggatcaagttcgtgccttggagaatgagatgctcaaccgcatcaagaaacaaggccttgatatcacccctcgtattctcattatcactcgtcttctccagcatgcagtaggaactacctgtggccaacgtctagagagggtatatgatactgaatattgtgacattctcagagttcctttcataacagaaaagggaattgttcgcaaatggatctcaagattcgaagtctggccatacctagagacttacactgagga

SEQ ID NO: 117308 - DNA, 264 bp, Glycine max
gtgcagtgctggctagcaacgccatggccattgaagtgttgctgggtggtgatgacgggtctctggctttcgttcccaacaatttctccgtggcctctggggagaagatcgtgttcaagaacaacgcaggtttcccccacaacgttgaattcgacgaggacgagattcctagcggcgtggatgcagggaaaatctccatgagcgatgaagaccttctcaatgcgcctggtgagacttacagcgttactttggatgctaagggaa

SEQ ID NO: 117309 - DNA, 281 bp, Glycine max
ttcggctcgaggataatctgtactgtagccaatcaattctattctctattcttgcttaattgtattagccataaaggagttcaggttcataggactcagtttctctattaaaccgtcattgattatggaaatactgtcttaagcactatgcagattaacaccatacttttcttccattacatctttcaagacagtcactcacaactcagaagactgatacagcattagatgataaaaacaagattcacagatatatgtagtgacactcaaactaggagtct

SEQ ID NO: 117310 - DNA, 267 bp, Glycine max
cgaccttgcgattcagcgcacattgaaggcgattttttactagcatggcagcaataatgttgacgactatgaatattcctctgcacacttcggtttgggttaattcccggcggaagagttggtgctgctacgcctcactttcgcagccagacaggaaggagctccgtctcggtttgcccagcaaaggtcgcatgttcgctgacaccctcgaacttctcaagaactgtcaattgtcagtgaagcaggtcaatcctcgtcagtatgttg

SEQ ID NO: 117311 - DNA, 263 bp, Glycine max
tgaacaacgacttcatcttcactcttccttcaaatttccatcaagggttcaaggttattatgcttgctggtcccattctcttgctgaaatgctctcttttcagaaagtttgttcaactgtccctttattggcgttactatgctacctactggagctaaagcgacccaattacgtgagaacaacagcctcaatgtccatcctcaacctctggaagaggccatgaatcagaatccagaagcaatggaaaccctaatatctaaagt

SEQ ID NO: 117312 - DNA, 265 bp, Glycine max
aattgatcaactcagatttcagggacctaagtctagctgctaatagactcgcccatcatgccatcaaacttggtggcattggctttggagcctcttttttcggattgtttgctgccattgctgctatttatctgttgattttggatcgtacaaactggaaaacaaatattctcacagcactactcattccatacatgctcttcagcttgccttcattaattttcgacgtcttcaggggagagcttggaaaatggattgctgcagt

SEQ ID NO: 117313 - DNA, 266 bp, Glycine max
caggacctcacaaaattcagggtattggggctggttttgtgcccaggaatttggatcaagatgtgcttgatgaagttatagcgatatcaagtgatgaagcagttgaaactgcaaagcaattagcactccaggaaggcttgctggtgggaatttcttcaggagctgcagctgcagctgctttgatggtcggaaagaggcctgagaatgcaggaaagcttattggggttgtcttcccaagctttggtgaaagatatttgtcaactatt

SEQ ID NO: 117314 - DNA, 267 bp, Glycine max
ggaaacctcattgccaccatgaacttctccggcaagtaccaagtgcagagccaagagaactttgagcccttcatgaaggcgatgggtctgcctgaggacctcatccagaaagtccaggacatcaagggggtgtcagaaatcgtgcatgaagggacgaaagtcaaactcaccatcacctatggctccaaggtgatccacaatgagtccaccttgggggaggagtgcgaactggagaccatgactggggaaaaggtcaaggcagtggtt

SEQ ID NO: 117315 - DNA, 210 bp, Glycine max
caaatgttatctcctttcctggtttcccctccagaaacccactatctccccctgcttctatgagggtgctcacctacccatccactccctcccatctccccaccttgacattcccctacactggggcatcaagccttgacaggaccaagggcttctactcccattgacgccagacaatgccagccgcatatgtagcaggttctagatcgc

SEQ ID NO: 117316 - DNA, 264 bp, Glycine max
gagagacagagatagacagagatagacagagagacatatacagacatagagacagacagagacagagagagaggagtcagagagctgttagtaccatgtctacccgttaccatggaccgcaatgtcaagtaaggaaatgaaaggtaaacagttatctacagtcctaggaaccatgcctgtgtcttaaccacctactgccttaggctatggcctggtctgtgcccctaaacactacattagacagtgacacctagaggttctctt

SEQ ID NO: 117317 - DNA, 262 bp, Glycine max
  unsure (1)..(262): unsure at all n locations
agtgggtttgctgaagatggcggtatataggctgaattagcgagaaggggtaaggtagaacggggtttatcgattatagaacaggctcctctagatggatataaagtaccgccaagtcctttgagttttaagctgtagctagtagttctctggcaaataattttgtaggtttaattattaaggtttagggctaagcatagtggggagatctantcccagtttgggtcttaggttctagatcgcgagcaggcagcgactagtg

SEQ ID NO: 117318 - DNA, 279 bp, Glycine max
ttcggctcgagtgggaagacttcacttgtgtttcctggctctaagaaagagaggtggcttctgagaacatttctagaatagtttgataagctatcccatcattctcctgtggtctcactgttctagagggtacaactaatccgtgtggtggaggacattttcagatttgtatagaagatgcccagaaagttccatctcaagaagcctcagaaggcttcagctagtgtctgttagacaaaggcaggatgagccctgagcgacaaattctgcagctctgct

SEQ ID NO: 117319 - DNA, 263 bp, Glycine max
  unsure (1)..(263): unsure at all n locations
cagtccttgaatggttgttgaccccggacacctaactgtccctgatgatcctggtgctgcccgaattcccttgggcgccaagctccatngccatgcagacagtccctccgtcaccagcctttgcatctggctagggaaatcggggttggagacatacagtctgctttgtgttgaaacccagatttgtaccctgtgtttacactgtgctgcctgctctcggggacagtgggaaggaagtgcagccgaggtggcagacccctctg

SEQ ID NO: 117320 - DNA, 278 bp, Glycine max
ggctccggctcgaggtggaatctagtgtggccttgatcccgctgaagatgcttcaaagctttattaagaaggtctgggtccccatgaaaccctactatacccaggtttaccaggaaatttgggtaggagtggggttgatgtccctcatcgtttataaaatcaggagtgctgataaaagaagtaaagctctgaaaggctgcagtcctgcgcatgcccatggccatcactaactgctcccccagtccactcaggatgaatacgtcagctgaacttaagca

SEQ ID NO: 117321 - DNA, 262 bp, Glycine max
gcaactgcgggtcctgaagcgcgggctgcagcaggtcaccggccacggcggcctgcggggcctctcacgggttttcttcagggcaaatgatataaggctcggtaccttggtgggggaagacaaatacggaaacaaatactacgaagacaacaagcagttttttggccgtcaccactgggtcatatacaccaccgaaatgaatggcaaaaacacattctgggatgtggatggaagcatggtgcctcctgaatggcaccgctgg

SEQ ID NO: 117322 - DNA, 257 bp, Glycine max
gctgtggaaaggaaacctcattgccaccatgaacttctccggcaagtaccaagtgcagagccaagagaactttgagcccttcatgaaggcgatgggtctgcctgaggacctcatccagaaagggaaggacatcaagggggtgtcagaaatcgtgcatgaagggaagaaagtcaaactcaccatcacctatgggtccaaggtgatccacaatgagttcaccttgggggaggagtgcgaactggagaccatgactgggg

SEQ ID NO: 117323 - DNA, 263 bp, Glycine max
cttccttaccaggctgctcatccacatgggtctgctcaagagtgaagacaagatcaaggccattcctagcctgcatggccccctgatggtgttgaaccacgtggtacagcaggactatttccccaagacccttgcaccgctgctgctggcgtttgtgacaaagcccaatggtgcatctggaatcctgctcctttgcccgccacagtctgctgcagacgctgtacagcatctagatctaaaaccagctgcttcttgtccctcac

SEQ ID NO: 117324 - DNA, 256 bp, Glycine max
ttctggcatccccgtggcttcaagacgccactctcaatggaggcccaggagctgaagcgcgtgttccagatgcacgaccgcaacggcgacgggagaataacgaagaaggagctgaacgactcgctggagaacctgggcatcttcatctctgacaaggacctgagccaaatgatccagaggatcgacgtcaacggcgacggttgcgtggacatggacgagtttggggagctgtatcagaccataatcgctcagcgcg

SEQ ID NO: 117325 - DNA, 259 bp, Glycine max
aagagatcagagagtgaaagaaagatggcgggggattcaagcctgctggctgcagtctcccttctctctgcctgtcagcaaagttattttgctttgcaagtcggacgagtaagattaaaatacaagatcgcacctccagcagtcacgggcactctggagtttgagagactatttcgcgcacagcaaaactctttggagttttattccgtattcatcatatcgctgtggatggctggatgcatagcgatcaagtttttgc

SEQ ID NO: 117326 - DNA, 99 bp, Glycine max
cccgtcccgagtgccaaagctggggttctacttgagatttccctcgtggtgccagggtccggcgagcatcacgccgaggcccatcttccacacaacata

SEQ ID NO: 117327 - DNA, 258 bp, Glycine max
taattgtttaaacctaattctcatttcttcatcgttcgattcttctcctcctaaagatgcagatcttcgtgaaaactttgaccggtaagaccatcacccttgaggtggagtcctccgacaccatcgataacgtgaaagctaagattcaagacaaggaagggatcccacctgaccagcagagacttatctttgcgggtaaacagcttgaggatggtcgaacccttgccgactacaacatccaaaaggaatccactctcc

SEQ ID NO: 117328 - DNA, 258 bp, Glycine max
tcttcctcaccgattgctagaatggaatttcgatgctcagtcatctcttttaccattctcttctctcttgctcttgcaggagagagccatgtccatgcatcgctacctgaggaagattattgggaagctgtttggccaaacactcccattcccactgcactgcgagagcttctaaagcctctccctgcaggtgttgaaatcgatgaactccctaagcaaattgatgatacacagtacccaaaaacattcttctataaa

SEQ ID NO: 117329 - DNA, 177 bp, Glycine max
cttgttgctagaagcaaagaagccttagcctaaacacatcacaaccatctcaggctaccctgagaaaaaaagacatgaagactcaggactcatctcttctgttggtgtaaaaccaacaccctaaggaacacaaatttctttgaacatttgacttcttttctctgtgccgcaattaat

SEQ ID NO: 117330 - DNA, 254 bp, Glycine max
  unsure (1)..(254): unsure at all n locations
gagcgtgaaaaggttagggtttggatttaggggggtgtctcttcttttcgttctctaatgcctagtgagtgactattctggacgtagagagtccacggtagctcgtgctgtccttctgcagggccaggaagggttcttcaggtgcttttcagagcttgagacccagcgacccccgcccaggaggctttctccttcaccatggccgaactgatccaaaagaagctgcaggnagaggtagagaaatatcaacagct

SEQ ID NO: 117331 - DNA, 255 bp, Glycine max
gaagctgcccacagaggctaccttgcacaggcttcagaccactagtcaggtgtcatggctgcatcaagtcaaccactgcactgactggtttcgtgtgtcagcttgacacaagatggagttatcacagagaaaggaacctcccttgaggaaatgtcttcacgagacccagctgtaagggattttctcagttagtgaccaaggagggaggacccagcccactgtgggtggtttggtccctgggctggtggtcttgag

SEQ ID NO: 117332 - DNA, 260 bp, Glycine max
cggaaccagagaaaaccaaccagaccgattactcttgaggaaacaaaaatctaagatgagccgccatccttctgtcaaatgggctcagacgtctgatgtactctacttaacagttgagctgcctgatgctcaggatgttaagctcaaactggagccagaaggaaaattttacttctctgcaactactggtgcagagaaaattccttatgaggttgacattgatctgtttgacaagattgatgtaaataatagcaaagcta

SEQ ID NO: 117333 - DNA, 255 bp, Glycine max
cggctcgagcgcaagcaaaaagaaagaatcccaggcgaggagaaagatggaggggaaggagcaggatgtgtcgttgggagcgaacaagttccccgagagacagccgattgggacggcggcgcagagccaagacgacggcaaggactaccaggagccggcgccggcgccgctggttgacccgatggagtttacgtcatggtcgttttacagagcagggatagcagagtttgtggccacttttcttttctctacatc

SEQ ID NO: 117334 - DNA, 273 bp, Glycine max
aagcgcactattcaatttgttgactggtgccccactggtttcaagtgtggaatcaattaccagcctccaactgttgttcctcacggtgatcttgccaaggttcagagggctgtgtgcatgatctccaattccaccagtgttgttgaggtcttctctcgcatcgaccacaaatttgacctcatgccgtcgcaagagggcttttgttcattggtatgttggtgagggtatggaagagggagagttctctgaggctcgtgaagtcttgctgccctg

SEQ ID NO: 117335 - DNA, 161 bp, Glycine max
aatttaaacccatttgagtcactttttttttcccaaaaatactgccagatgctgatgttcagtgtgatcctttgcctgttgagttacagaaagtggtcttcagttgtagaatgtattgtacctttaacacctgatgtgtgcattcatgtaacggaaagggc

SEQ ID NO: 117336 - DNA, 257 bp, Glycine max
gcaaaaacgaacatgaacgtggtagaggtcttcttttcaatagcacgagatattgagcacaggctcctgacacagattcaagagctgagcctcagactatcaagattaaccaacctgaccaggcaaccagtggtggtcaacctgcgcaaaagtcggcttgctgtggttcatgaaaagaatcagtatctgtagaaataggtgcacaggtttctgcaatagcactcatctgggtgctaatgttatactatgacattata

SEQ ID NO: 117337 - DNA, 249 bp, Glycine max
caacatcttatccgactagatgtttctcatgacaacattcgtggaagcattccccagtggtttcatgagaagctcttgcactcctggaataacatgactcatattgctctcagtttcaacaaattgcaaggtgatctcccaattccacccaatggcactactctacattttagtctcaaataatgagctgaccgggaacattccttcagcaatatgcaatgcaagctccctctatatactcacttggct

SEQ ID NO: 117338 - DNA, 152 bp, Glycine max
cccagatccaaatcaagcctggcctgaaccccaaagtctttcacagaagtaaaagagtagaggccatgtcctcgggcaggggtggaggtgagagaatatatttttaaaattatatgggaaacacatgtgaatacttaatgataacaatttta

SEQ ID NO: 117339 - DNA, 115 bp, Glycine max
gtgctatccgtcagcgcctgtggccactggtgcagcagggtcgtcagcgcacagccaacctaggcgctggcgccgcccagcccctgcgcgatcgcgcccaggctttgagtgaccg

SEQ ID NO: 117340 - DNA, 257 bp, Glycine max
gccgatgaggacaaacttccaagagaacttctgctgggccaaagtgaaaggcaagttgagtatgatcgtgcaggtagaattattaagggccaggaagcagctctcaccaggagcaagtatgaagaagatgtttacattaacaaccacacgactgtttggggctcatggtggaaggatcatcaatggggctataagtgctgcaagcagacaatacgcaatagctattgcactggtgctgctggtattaggctgctgag

SEQ ID NO: 117341 - DNA, 256 bp, Glycine max
gcagctgctgtgatgtcactgagctattcaactatatcctgggtggcttgtttggctagaggtcgtgttgagaatgttagctatgcatacaagaaaaccacttctactgacttaatgttcagaattttcaatgcacttggtcaaatttcatttgcatttgctggccatgcagtggcccttgaaattcaggccacaattccatcaacccctgagaagccctcaaagataccaatgtggaaaggtgtattggtgccta

SEQ ID NO: 117342 - DNA, 250 bp, Glycine max
ggctcgcctaccgagaactggccaaaaactggatccccacagccggcatgtggggcactgtggtcgccgtgggactggtgtgggtctcggactggacctgagatcctggactgggtgccgtacatcaatggcaagtttaagaaggacgattaggcagccccctcccccaccacaggcctcgatggtagcatgcgctgaggcctcagaaacattttagtcctgtggaggacacggaggaagaatctgcatc

SEQ ID NO: 117343 - DNA, 253 bp, Glycine max
atcacaattaacatctccttatcttgtatcctgcatttcaagtgcattctgattgcctcaaataaacttatactccgaattagcaaagccatatgtttgtggcttcgacccatcaagttctgcacgccttccttggtcaataagatgtgtcttagtagccattacatttctactattcgctctagaaatcgtcttactagttcctctcgcatgagcgattcatacaaccaataccactactaaatagctactg

SEQ ID NO: 117344 - DNA, 256 bp, Glycine max
gcaatactgggagatgatgcaagtgactctggcagaacaccagttgttaccaccacaaaacatcctcggcatagacctgggtgctcttgcattgtctgtatccagccaccaagtgggaagggcaaacacaaacctacctacacctgcaatgtgtgcatgacagttaaacgtcggtttaaaaccctgatgatgcgaaagaagaagcggtaatccgaacgtgaagcagagattgctcagagaaatagttatcatggcg

SEQ ID NO: 117345 - DNA, 253 bp, Glycine max
gacccgtcaacatgggccgcgttcgcaccaagactgtgaagaaggcggcccgggtcatcatcgagaagtactacacgcgcctgggtaatgactttcacatcaacaagcgcgtgtgcgaggagatcgccatcatccccagcaaaaaccttcggaacaagatagccggctatgtcacgcatctgatgaagcggattcagagaggtcctgtgagaggcatctccatcaagttgcaggaagaagagaggagaggaga

SEQ ID NO: 117346 - DNA, 252 bp, Glycine max
tcaggagcaatcatggtgctctctgcagatgacaaaaccaacatcaagaactgctgggggctgattggtgtccatggtggtgaatatggcgaggaggccctacagaggatgttcgctgccttccccaccaccaagacctacttctctcacattgatgtaagccccggctctgcccaggtcaaggctcacggcaagaaggttgctgatgccttggccaaagctgcagaccacgtcgaagaccgcctggtgccc

SEQ ID NO: 117347 - DNA, 263 bp, Glycine max
actttagccatcactaacactcagtctctgaattggggctgagggtttcgagtaacgtttatttttcacgagtttaagatatcatgggtaaagagaaggttcacattaacattgtggtcattggccatgttgactctgggaagtcaaccaccactggccacttgatttacaagcttggaggtattgacaagcgtgttattgagaggtttgagaaagaagctgctgagatgaacaagaggtcattcaaatacgcctgggtgctt

SEQ ID NO: 117348 - DNA, 270 bp, Glycine max
agaaggaatcgcctcggatcagcaacgtctcattgtcgccgtaaagcaacttgcggacggccgtacccttgctgactacatcattcagaaggagagtactcttcacctcgtcctccgtctccgtggtggcatgcagatcttcgttaagacactcaccggcaagaccataaccctagaggttgaaagctccgacaccatcgataacgtcaaggccaagatccaggacaaggagggtatccccccggaccagcaacgtctcatcttcggcgg

SEQ ID NO: 117349 - DNA, 270 bp, Glycine max
gctcgcttttcctaacctcaccggcgggtgctcgtactgctactgtcatgcctagaagggcggcggacatcgtgtcggcggcgacggcggagacgccgaagaagaagggcgaatcgaaagggttcgtggaagagatgaggttcgtggcgatgaggctgcacacgagggaccaggccagggagggcgaggaggaggtcaagcagcccgaggagaaagccgttaccaagtgggacccatccgtcgaagggtacctgaaatttcttgtggaca

SEQ ID NO: 117350 - DNA, 253 bp, Glycine max
ggagttcagaagcttgaacctaggccatccccaaaatcccattccatagtgaatgagtatgtgagtagattactataagattgtgcaggttgacaagcatgccaccgatgaagagttgaagaaagcttacagaaagcttgcaatgaaatggcaccccgataagaatccaaccaataagaaagaggctgagactaagttcaaggggatatccgaagcttatgaggttctgagtgatccccagaagagagcaatc

SEQ ID NO: 117351 - DNA, 273 bp, Glycine max
ttcaaacacaacacacacactgtgtttgtgaaactccctctcacacacaagtcacaaaaacaacttgtgttgttccaatggcatcagcaacaccccatttgaaagatgagctcgacatcgtgatccccacgatcaggaatctggatttcttggagatgtggaggccattctttgagccttaccatctcataattgtgcaagatggtgacccttcaaagaccatcaaggtccctgaaggctttgactatgagctctacaaccgcaatgacatca

SEQ ID NO: 117352 - DNA, 249 bp, Glycine max
gctggtgatttgcagcaaatcaccggtggggcgtgacagatgggaaccacgtgaggaatgtctgatattggtccatggtcacatatggaagcatcagcacaaagtggggatgtcatcatgagaatgattgcaaggaactcaatgtcagagagacttgcagaagacatcgatgctgccatcaagaggatctcagatgaagcatgtgaaattgcactagaccatataaggaacaaccgtgaggcgattgac

SEQ ID NO: 117353 - DNA, 270 bp, Glycine max
agagatgttcctgaggggaaggaaatactatctctatgttcacagtttcttgcactatggtttactagctgctcgtgcagagattttaaagatttctgatgatgctgaaaacccttgtgtcatatctggctatgatggatcctacaactatggaggaaagtcgtttaaggcttcatccggctcttctggtgcaagcataaatgaatgcaaaagtgttgctcttagggctctcaaagttaatgagtcgacatgtactcatatgaagtgtac

SEQ ID NO: 117354 - DNA, 266 bp, Glycine max
caggaagcaatgcttatattttgggtggccaagacaaatcacagaactggcatgtctactctgcttctgcagattctgtaactccatgcgacaatgtttacactctagagatgtgcatgactggcctggatagagagaaagcacaggttttctacaaagaacaatctgcttcagctgccattatgactgttaattctggcattagaaaaattcttccagattctgagatttgtgactttgactttgagccatgtggttattcaatg

SEQ ID NO: 117355 - DNA, 214 bp, Glycine max
tcgtagttgtttgggatatgccaaaaagtatgtttcgtagaaagtcaccaacatgcccatgccattggcgagtgtctgctacgtgtactgcaatcgcgtgatccgcgacagcgtcgtgtacttggctaaggtctccgttcagaaccctgtattccacttcgcaatcccatgtgtgagagcaagtactccctcattaggtgctgcaggtttctat

SEQ ID NO: 117356 - DNA, 267 bp, Glycine max
attgcaagaatggcacttcgttgcttggtgatgtccctttctgttctcttcactcttggtcttgcgagagaatgccatgccagagacgaagatttttggcatgctgtttggccaaacactcccattccaagttcattgcgagatcttctaaagcctggccctgcaagtgttgaaatcgatgatcaccgtatgcaaattgaagaaacacagtacttgaaaaccttcttctataaagaagaccttcatccaggcaaaacaatgaaagta

SEQ ID NO: 117357 - DNA, 215 bp, Glycine max
ttggagatgtctctgctctcagatctcatcaaccttaacctctccgataccaccgagaaggtgatcgcagagtacatatggatcggtggatcaggaatggacctgaggagcaaagcaaggactctcccgggaccagttagcgacccttcagagcttcccaagtggaactatgatggtccatcacaggtcaagctcctggtgaagacagtgaagtg

SEQ ID NO: 117358 - DNA, 265 bp, Glycine max
  unsure (1)..(265): unsure at all n locations
gtggaagttaacccgtgtaattggtttggagttgagtgctccgatggaagagtagtggtcttgaatttgaaagacctttgtctcgaaggaatcctggtacctgagcttgcaaaccttgttcacataaagtccataattttgcggaacaattcttttcatggaatcatcccccaaggaagtgcacacttgaatgaaatcgatngttttgatttgggctacaacaactttagtggaccgctacctacagatcttgggaataatattc

SEQ ID NO: 117359 - DNA, 264 bp, Glycine max
gtgaaacactagctagggtattgggagctctcgttgtttcggagttagggaccttacgcagccatggccactgctacgaatgccgccgccgccccgccacgccagctctcccagaaggaagctgacatccagatgatgttggccgccgacgtccacctcggcaccaagaactgcgacttccaaatggaacgttacatcttcaagcgccgcaacgacgggatttacattattaaccttgggaagacgtgggagaagcttcagcta

SEQ ID NO: 117360 - DNA, 264 bp, Glycine max
gaattaaagtagcaacaaatactcttccctacacttggcagaaaaaaaatggttcaacaagaaatccgaaggggtccctggacagaacaggaggactacaaattagtgtattttgttaacatgtttggagatcgtagatgggactttatagcaaaggtatcaggtttgaaggtggagggagactgtaaatagatggtcaagaattgctcgcaggctaccagggcgaactgacaatgagattaagaattattggaggactcacat

SEQ ID NO: 117361 - DNA, 254 bp, Glycine max
gcattttcagaggaacaatggcgggtagggtttcgacgtgcttcttcttcgtgtttgctctttctctccttcttccttttcagatctccgctgaggaatcatcggagaaagagttcgtactcacattggatcactctaactttcacgacactgtcagcaagcacgatttcatcgtcgtcgagttctacgctccatggtgtggccactgtaagaagcttgctcccgagtatgagaaagctgcttctatcttgagt

SEQ ID NO: 117362 - DNA, 258 bp, Glycine max
atctccatttccatttcctctctctcagtttccaagaatcttaagctatgggaaagtcttacccaaccgtgagcgctgattaccagaaggccgttgagaaggcgaagaagaagctcagaggcttcatcgctgagaagagatgcgctcctctaatgctccgtttggcatggcactctgctggaacttacgacgtgagctcgaagaccggtggtcccttcggaaccataaagcacccctccgaactcgctcacggcgcta

SEQ ID NO: 117363 - DNA, 261 bp, Glycine max
ggccaggcaagccccactcaaccaccacacctctcctcgttcacgctacccctttctgctcttcttctacctttcaagttttaaaagtataaagatggcagagacattcctatttacctcagagtcggtgaacgagggacaccctgacaagctctgcgaccaaatctccgatgctgtcctcgacgcttgcctcgagcaggacccagacagcaaagttgcctgcgaaacatgcaccataaccaacttggtcatggtcttcgg

SEQ ID NO: 117364 - DNA, 258 bp, Glycine max
cgctctctaataacatttctaatctcatactccttctgttcaaacactctctctcatggcatcagataagaagattaggatcggcatcaacgggtttggaatgattggccgtttggtggccagggttgcccttcaaaggaatgatgttgaacttgttgctgtcaacgatcctttcatcacatatgattacatgacatacatgttcaagtacgacaccgttcatggccagtggaagcattttgatgtgaaggtgaagga

SEQ ID NO: 117365 - DNA, 272 bp, Glycine max
atcttgctcagcatctatcaacattcacatcaaagccttcatttcttgggcaacttgatatggaacatacaattgtagaggcccagagttatgatatatgctttgagtatattgaagaactgatccataagcaggagcctttgacaacagtcttacgccttctaatcctattttcgattactaattctggattgccaaagaagcattttgactacttcaggagagaactactccacagctatggatttgagcacatagcaatgctaaacaat

SEQ ID NO: 117366 - DNA, 272 bp, Glycine max
ctctttctccgagaacaaaaaaaaaaacgtgattcgctcttctctccgaataaaccacaaaaccaacaaacgagaagaggagtgagagaagatggggttgtcgttcacgaagctgttcagcaggttgtttgcgaagaaggaaatgaggattctgatggtacgtctcgatgctgctggtaagacaaccatcttgtacaagctcaagcttggagaaatcgtcaccaccatccccaccatcggatttaatgttgagactgtggagtacaagaaca

SEQ ID NO: 117367 - DNA, 276 bp, Glycine max
atataaccaaactcttcactctgcttctgcttctttggaaagcactaaccaaactctctgtttcagcttcctcttgtttttgggtacgaacagagtttctctgtttttgacgatggccataaaggcgattgaactgttgaaagggtgcggatcacaagaagaaataatggaagtgcttgctgcggtggcttcggatttgggggatgtgatcgatgatgtgaacaccttgcaggtgattccactgaatggtgcaatgaccaatgaggtttttcagat

SEQ ID NO: 117368 - DNA, 277 bp, Glycine max
ctcactttctcacaaatggccaatcccttcccaacattcctcccctcttccctcatcttcttttccttcttctttttcttattctcccctctcaccgccgccaaaacacaccgtttcgcgcgcaccatctccccctcctccctgggcctggacggggagcctgagaaactaagccacctccacttcttcttccatgacgttgtcagtggccaaaaccagaccgcggtgcgagtcgcggcggccccggccaccgacaagtccccgacgctcttcggtg

SEQ ID NO: 117369 - DNA, 278 bp, Glycine max
tgcgtttgtatcacagaggaattaacatatatatatcaagcatggcagtcacactcttcgaccttagctcttcctctgggttgaagaaatttgatgagatacttctcccacgcagttacttcaataagtaccaagctacaaaggatgatcttactgtttatgcagctttgccaactgctccatcagatgaatatggaaatgtttccaggtggtacaagcacattgatgctttgttgagaatctctggtgttactggcgatggatctggtgttaattgt

SEQ ID NO: 117370 - DNA, 267 bp, Glycine max
tgatagatgttgggtaacaagagtactggaagcttttgagtctttccagcagctgggataaacatcctattggataaagctcatataacaatttcagatagcaatctgatattaatgcatgacttgatacaagaaatgggtcgagaaattgttcatcaagaatctaaagaccctggaagacgaacccgattatggagacatgaggaagtgcacgatgtattgatatataacaagggaactgatgttgttgaaggcataagtttagat

SEQ ID NO: 117371 - DNA, 272 bp, Glycine max
aagagggcaccctttgatttgtttgacaccaggaagaagatgacaacatcaaactttatgtcaggagggtgttcatcatggacaactgtgaggagctcattcccgagtacctcggatttgtgaagggtgttgtcgactccgatgacttgcccctcaacatttctcgtgagctgctgcagcagaacaagatcctgaaggtgatcaggaagaatcttgtgaagaagtgcattgagatgttcaatgaaattgcggagaacaaggaagactacaac

SEQ ID NO: 117372 - DNA, 274 bp, Glycine max
attttgcttcatcgtattccacccacctcggatgcctaagccaagcagatcctgcggacattgtaagtaaatcttatgaagatggagatgataactaatgttaccgagtatgaggcaattgcaaaggaaaaattgccaaagatggtttatgactactatgcatcaggggcagaggatcagtggactttgaaggagaaccgaaatgcattctcaaggattctgttccggccgcgtattcttgttgatgtgagcaagatagacttgactgcaactg

SEQ ID NO: 117373 - DNA, 277 bp, Glycine max
gtgtttttctgatcccttatcttaattaatttaatcaccaatggctcgttctatcgctaacgccaagactttctccgttctcgtgctagacggattctccaacactctcaccagacgtggctactctcaaagcgcaacaaggggaggagttgcctccatagcacccaaatcaggggaagacaaaggtgtctcatcatacaaggtttcctgggtgccagatcccgtcaccggttactacaaaccggaaaacatcaaggaggttgatgttgccgatttg

SEQ ID NO: 117374 - DNA, 267 bp, Glycine max
gagcaagcatgggaatgttgttggtggtggtctcatacgtgtccttttcagagttctattcctcggcgtgaagtttgttttccaaagcagaaaattgagaaacataccaccaggtcctcctcctcttcccataataggaaaccttaacctcctcgaacagccaatccaccgtttcttccaacgcatgtcgaaacagtacggcaacgtggtttccctctggttcggttcacgtctggccgttgtcatctcctctccaacagcatacca

SEQ ID NO: 117375 - DNA, 272 bp, Glycine max
atttctttctttctttctatcaaacacagtgcggtgtgtttctagctcctaattggataaaatgggggacaagcaccagcagcaccaccaagacgacagcagcgatttcacctccgatgacgaaggcaccgaagattaccgccgcggcggctaccacgccgtccgaatcggcgacgccttcagcgccggtcgctacgtcgttcagagtaaactcggctggggccatttctccactgtctggctcgcttgggacaccaaacattctagatacg

SEQ ID NO: 117376 - DNA, 259 bp, Glycine max
  unsure (1)..(259): unsure at all n locations
ctcacgcaaacctaattactgctattacgagaccacgcagatttagctcncattgttcgattgccctggctaggcagacgcttatcgatggtgacgctgacttcgctcaaggtggtggagaagaagtgtcgaatcttgacttcgacttgtttattattggggctggaagtggttgcgttcgtgctgctagattttcatccaattttggagctaaggtggggatttgtgagcttccatttcatccaattagttcagaaac

SEQ ID NO: 117377 - DNA, 264 bp, Glycine max
gtactacgaagctggtgcacgttttgccaaatggcggcagtgctgaacattggtcccaacgagccatctgagctgtctatccatgagaacgcctatggcttggctagatacgctgtcatatgccaggagaatggcctggttcccattgttgagcctgagatccttgttgatggacctcatgacattcacaagtgtgccgccgtcaccgagcgtgtccttgcagcatgctacaaggctttgaatgatcaccatgtccttcttgag

SEQ ID NO: 117378 - DNA, 268 bp, Glycine max
aaagcttaaggaccgtgagaagaaagcaaagaagaaatcaggcactgcagccgtggccaaccctgaggacgaaccgaagatgaagttgtcgaggttacagagccagaaaagattaacgatgatgtccaagccccggctccagtgaaggaaaaggtccaaaaggagagtggcatcaggtccaggggccgagcaagaggcccggactcgattccaaaagctattattaagcggaagaagtctaacaattacctgatatgggctgcagctg

SEQ ID NO: 117379 - DNA, 273 bp, Glycine max
aagcgagcgagcgagcagtttcaaagagaggatttgggatgggaaggcgagggattgcgctgcgtctcttcctcttctctttcgattcatccctcattcataatcttccaatccaacaacctcagcctcacactcacacatacacacatctgaacgcgtatcgtccctcccatggcttcaaagcgcatcctcaaggagctcaaggacttgcagaaagacccaccaacttcttgcagcgctggtccagtagctgaggacatgttccattggcaa

SEQ ID NO: 117380 - DNA, 263 bp, Glycine max
aggaatcaacagcttcttcaattggtacttctttacctacacatttactcaaatggtgtctttgtcactaattgtctacatacagtcaaacgttagctgggcaatagggttgggaattcctgcggctttgatgctaatctcttgcacactctactacacgagaagcaattattacgtgaaagttaaagcaactggtccagctccactaacaagtttagctcaagctgtagttgtggctataaagaaaagaagactgaatctat

SEQ ID NO: 117381 - DNA, 256 bp, Glycine max
gtgaaccttgacaagttcttcgaggacgtgtaaggcgtgaaggaggaactaaaggagttggcatctttggctcagagtctaaggagcagccacgagcagagcaagacgctgcacaacgcgaaggcggtgagggacctgcgcgcgcgcatggacggcgacgtctcggcggcgctgaagaaggcgaactgatcaagctcaagctcgaggcgctggagcggtccaacgccgcgaaccggaacatgcctgggtgtggacc

SEQ ID NO: 117382 - DNA, 256 bp, Glycine max
cattttctctcttctctgcttcttcttgttcaatcttaggagctgaggagaatcaatcgagagaaatatgtctggtatcgctcgtggacgccttgctgaggcacgaaagtcatggcgcaaaaaccatccacacggtttcgttgccaagcccgagactctacctgatggcaccgtaaatttgatggtctggcattgcactattcctggcaagaccgggactgattgggagggtggatatttcccactgacaatgcac

SEQ ID NO: 117383 - DNA, 259 bp, Glycine max
caagtttgctgtactcatgaccaagattgacaggcgatccggcaaagagcttgagaaggagccgaagtttttgaagaacggtgatgctggttttgttaagatgattccaaccaaacccatggttgttgaaactttctccgagtatcctccacttggtaggtttgctgttagggacatgcttcagactgttgctgtgggagtcatcaagaacgttgagaagaaggatcctaccggagccaaggtcaccaaggctgcccag

SEQ ID NO: 117384 - DNA, 280 bp, Glycine max
atttctcattcttaacaacacacttcaacaatggccaaaaccttcaaatacatcatcctcggaggaggagtttccgctggttatgcggcgagggagtttgccaaacagggcgttaagccaggggagttggctatcatttccaaagaagcggtagcaccttatgaacgtcctgctctgagcaaggcttacctttttccagagtcccctgctagacttcctgggttccatgtctgtgttggaagtggaggggaaaggttgcttcctgagtggtacacagaga

SEQ ID NO: 117385 - DNA, 274 bp, Glycine max
gcagaactttgtggtggctgagcaagggggagaacaaggattggaatacgtagtgttcaagacacaccacaacgccgtgagcagctacattaaggatgtgtttagggcaatcccttcggaggttctttccaattcttacaaccttggccagagtcaagtgcgtcactcaagtatcaaggaaactccggccctttggtcaacccataaataacaacaagcatatatgaaggtgtggtgaggccatcttatatgagataatatcagaatatatttt

SEQ ID NO: 117386 - DNA, 277 bp, Glycine max
aaaaccttcgcttcttttcacgctctcaaacaccatcatctacaacgcctcgaatccacacagtactactcatagctctaaaacctctctctctctctctctcgatctatcatggcttcgagcaatcagcacaacgtggattaccctagtatcagactcgtcatcgtaggagaaggcggtacacgaaagacaacgttcgtgaaaaggcatcttaccggtgaattcgagaaaaaatacgaaccgaacattggagtagaggatcacccattagatttct

SEQ ID NO: 117387 - DNA, 273 bp, Glycine max
aggaagagcatttggctgtcaagcacttctctgttgagggtcagttggagtttaaggctatactctttgttcccaagagggcaccttttgacctctttgacactaggaagaagcctaacaacattaagctctatgtccgccgtgtctttattatggacaactgtgaggagttgattcctgagtatttgggctttgtcaagggtattgttgattctgaagatctcccactcaacatttcaagagaaatgttgcaacagaacaagatcttgaagg

SEQ ID NO: 117388 - DNA, 278 bp, Glycine max
tgcgcgcactccgtcgccgttgccgacacctcctccgcgtatccttccaagaccggcacggaaaccggtgagtgctccctccgcggcgtgggcgtgggcgacggtgttctggttcctccacggcgagaagtatacgaggaggggcgaatcttcgacatcactcacagatatgtccccgagatgccggtgtgggactcgacggaggggctcgggcaacacttcctgtggctcgataagagcatgaagaatggctcgctcgctaacagctctaacatgaa

SEQ ID NO: 117389 - DNA, 276 bp, Glycine max
ctccacaactgcaggtaccctaatctacaagcaacccttgaaaaattccagtgtaaaaaatctcacgcttctcaaaccaactttgccaccaataaatgccacaagctttgtggcaaacttcacagcaaaattcagaagcttggctagtgccaaattccctgccaaggtacctcaaaaagtggacagaaaatttttcttcactgtggggctagggactagtccttgccccaaaaacacaacatgccaagggccaagtaataacaccaagttcgcagc

SEQ ID NO: 117390 - DNA, 271 bp, Glycine max
caaacctcttcgttccttcgattcattccatttcttccacaatggccaaacaggcagttcgcgttctcgtcactggagccgcagggcaaatcggatatgctcttgtccctatgattgctaggggagtgatgctgggtcctgaccagcccgtgatcctccacatgcttgacattcctccagcagcagagtcgttgaatgcggttaaaatggaattggtggatgctgcattccctcttcttaaaggtgttgttgctacaaccgatgtggttga

SEQ ID NO: 117391 - DNA, 271 bp, Glycine max
gttttcctgaatcggtgtgaacaatggcgacgtacgctgcgatgaaacccaccaagccagggttggaggagtcccaggaacagatccataagataaggatcaccctttcttccaagcacgtcaaaaacctcgagaaggtttgtgcggacttggttcgtggtgcaaaggacaagcgcctcagggttaagggacctgttaggatgcccactaaggttcttcacatcactaccaggaagtccccctgtggtgaatgtccaacacatgggataga

SEQ ID NO: 117392 - DNA, 269 bp, Glycine max
gaagtaatggcgaacatagacatcgaagggatcttgaagcagcagcagccttatgatgggcgcgttccgaagacgaagatagtgtgtactttgggccctgcttctcgatccgtagaaatgaccgagaagcttctgagggcagggatgaacgttgctcgtttcaatttctctcatggcacccacgactatcaccaggaaactctcaacaatctcaagactgccatgcacaacactggcatactctgtgccgtcatgcttgacactaaggg

SEQ ID NO: 117393 - DNA, 272 bp, Glycine max
ctaaatagtgctaagaactctaatggtggacaagatgaatatgctgatattcaagtcccttcagatttctttgctgctagttttctctatcagaaacaccacagcagaaaagaaaacccatcacacaaaacacacatacataattcatatggacaagttcaacatgccagagagttttaacgaccatctcctatggtttgattcatcactaaaatcagtatcagactctacagagatgctctacacatataaaaaagtagctcatggcttct

SEQ ID NO: 117394 - DNA, 271 bp, Glycine max
attggctacaagagacagagtgacaccaaaatccccggtaacaccgaatgtgacggcgttggcattttgggcatcgtttgggccttcggtggcatgatcttcatccttgtttactgcactgccggaatctctgggggacacatcaaccctgcggtgacattcgggttgttccttggacgcaaggtgtctttggtgagggcgttgttgtacatgatagcacagtgtgccggtgcaatctgcggtgctgggttggccaaagggttccagaaat

SEQ ID NO: 117395 - DNA, 266 bp, Glycine max
agcgaatccctctctctatctctcacacacactttctccctctctctctctcacccagatcttgtagcaatggcgtcggctcccactccacgcgaagagttcgtgtatctggcgaagctggcggagcaggccgagcgctacgaggagatggtggacttcatggagaaggtctccgcctccgccgagatcgaggagctgaccgttgaggagcgtaacctcctctccgtcgcctacaagaacgtgatcggcgctcgccgcgcctcctg

SEQ ID NO: 117396 - DNA, 266 bp, Glycine max
cgagttttctctgctacaatgcctcctgaggcacttgagatcacaaggaagttcatcgaataacctgtgaggacccttgtgaagcgtgatgagctcaccttggagggtatctagcaatttcatgtcaatgtccagaaagaggaatggatgcttgacacactatgtgatctttatgagacattggcaattactcagagtgtcatatttgtgaacaccagaagaaaggttgattggctgactgacaagatgcgaagcgagaccacaca

SEQ ID NO: 117397 - DNA, 269 bp, Glycine max
ctccaacacatgtatcattcgaattcttaccgtcattgccatctgcatacctcgagccatgtccttccacttggattttccagcagtttttaactttggtgattcaaattctgatactggtgctcttattgccgctgcttttgagagcctttacccaccaaatggacaaacttacttccaaaaaccatcagggagatactctgatggccgtctcaccatcgatttccttatggatgctatggacttgccattcctaaatgcctatcttg

SEQ ID NO: 117398 - DNA, 266 bp, Glycine max
gttgctgctcatcctccgtaacctccgagctctgcaccgaagaacgaagccatggggaagacacatggaatgggatctgctcgcaagctcaagtcccaccgcaggaggcaaaggtgggctgacaagtcatacaagaaatcacatcttggaaatgaatggaagaaaccttttgctggttcatcccatgccaagggaattgtccttgaaaagataggtattgaggctaagcagcccaactctgccattcgtaagtgtgccagggttca

SEQ ID NO: 117399 - DNA, 265 bp, Glycine max
ggaatatctcgatcaaccggacattcccagcacatggaaagcaatggaggcagtctatgactcaggcaaggcaagagccataggagttagcaatttctcttcaaaaaagcttcaagatctcatgaatatagcaagagtgcctccacctgttaaccaagtggaattgcacccaggatggcagcagccaaagctgcatgcattctgtgaatctaaaggagttcatctgtctggatattctccactgggctcaccaggagttctcaaa

SEQ ID NO: 117400 - DNA, 288 bp, Glycine max
ctctactgctcgaacagtgacgatgtttgagttactcagatttatcagacgtcgctgtagatccaccaaccgttatggctgccttcagcggtgatgaaacggcaccgtttttcggcttccttggcgccgcagctgccctcgtcttctcctgtatgggagctgcctatggcacagcgaagagtggcgtgggcgtggcttccattggtgtaatgagacctgagctggtgatgaagtcgattgttcctgttgtcatggctggagttttgggcatttatggccttattattg

SEQ ID NO: 117401 - DNA, 263 bp, Glycine max
tgccaatttactgctgatctttttgcaatgaaccacacagactttatcatcaccagcaccttccaagatattgctggaagcaaggacactgttggacagtatgagagtcacactgccttcacccttccaggactctaccgtgttgttcacggtattgatccctttgatccaaagttcaacatcgtttctcgcggtgccgacatgagcatatacttcccatacactgaaactgttcgtaggttaacagagttccacacaacata

SEQ ID NO: 117402 - DNA, 263 bp, Glycine max
taatatatcctaatttgtatgtcattcagtcaacttttcagatacgggttatgcataccctgatacgtgatgccaagacgagaaagcatgattttgtattttactctgatcgattgattcgattgtgtgtggaacatggtttggggcatctgccatgtacagaaaagtaagtaatcactcctactggttctgtatacactggtgttgatttttgtaaaaggttgtgtggtgtctctgttatcagaagtggggagagtatggag

SEQ ID NO: 117403 - DNA, 273 bp, Glycine max
cagattcacagtgaaccggtaggctggggaaaaatttctatggttgaggcagaaaggagacttttggcacatgcacttttagaccctgataaccaacattttgtgttattgtctgaaagttgtatacctgtgcgccgctttgaatttgtgtacaactacttattattaacaaatgtcagctttattgacagctatgtggatcctggtcctcatggaaatggcagatatatagaacatatgttgcctgaagtagaaaagaaggatttccgaaag

SEQ ID NO: 117404 - DNA, 260 bp, Glycine max
cggctcgaggtccttattgggtacatactttggcagtattgtattggtgattggtcagactagtgttattctccggtggctccttccttccttcgccatggcgttctacgtgctctcgcgtcgtttatcagctggatccaactcaacgacgctcctcgccctgcgttttgcttcctcttccagatccttctcctcttccttcagggaagaaagagatacctttggacccattcaagttccctccgacaaattatggggag

SEQ ID NO: 117405 - DNA, 256 bp, Glycine max
caacccctcgtttgcgataatggaaccggaatggtcaaggctggttttgccggagatgatgcgccgagggcggtgttccccagcattgtggggcgtccacgtcacacgggagtgatggttgggatggggcagaaggatgcgtatgttggggacgaggctcaatccaagaggggtattttgactctcaaatacccaattgagcatggaattgtgagtaattgggacgacatggagaagatctggcatcacacgttct

SEQ ID NO: 117406 - DNA, 260 bp, Glycine max
gttttgactgtgatgggtgttgcaaaatctcccagcaagtgctccactgttggtgtccaaggcattgcttggtcatttggtggaatgatctttgcccttgtctattgtactgctggtatctcagggggtcacattaacccagctgtgacatttgggctgtttttggcacgcaagttatctctcactaggacagtgttctacatgatcatgcagtgcttgggagctatatgtggtgctgctgtggtcaagggattccaatc

SEQ ID NO: 117407 - DNA, 258 bp, Glycine max
aacaaaagccatagtttgttacttctcttcgccttttgctttgcaattgtcaccaaacaattcttgcttagctctcacaagcaagcattatcaacaatgaagaaaattgtgttaaaggtggacttacatgatgacaggatcaagcgaaaagctatgaagacagcatctggcctttcgggggttcaatcagtttctgttgacattaatgacaagaaaatgaccttattgggggatgttgatccagtgagtgcagtgtca

SEQ ID NO: 117408 - DNA, 250 bp, Glycine max
aagaaacatggcttccttaagctccttagtgctgctccttgcagctctaattctatcccctcaagttctagcaaactatgagaatcccccagtgtacaagcctatcactgagaaaccaccagttagtaagcccacagttgagaagcctcctgtttactagcatccagttgacaagcctccagtttataagcctccagtagagaagccaccagtgtacaagcccccagttgagaaacctccagtgtacaag

SEQ ID NO: 117409 - DNA, 258 bp, Glycine max
gcaaactcatttctctccaaaaccctcaaactcaacacctcttccccacactctcacctttcactacccctcaacaagtctttcacttgtagaagccaggctgaaccatcttctgactcagccaaagtccaagaactcagtgtgtatgagatcaatgagagagatcgtggaagccctgcttatcttagattgagccagaaaactgtcaattcccttggtgacctagtccccttcagcaacaagttgtactctggatgt

SEQ ID NO: 117410 - DNA, 284 bp, Glycine max
aattaggctcgagctcgttagtcgtttgtaacgcctttgtttgcgttttttgcacagaataattaacacgtatatagcaagcatggcagtcacacttgacgaccttagctctgcctctgggttgaagaagcttgatgagtaccttctcccacgcagctacatcacggggtaccaagctacaaaggatgatcttactgtttatgcagctttgccaactgctccatcagatgaatatggaaatgtttccaggtggtacaagcacattgatgctttgttgagaatct

SEQ ID NO: 117411 - DNA, 262 bp, Glycine max
gttctttcgtcgtcgtcacaagtcacaactctcaaaccacaatgcctaagcagatccacgagattggggattttcgtctgacggcgcggaggaaggatgcgaggtcggtgaaaatcaataggagcatgggtgtcgttaagtttaaggttcgatgctccaagtacttgtacacgctttgtgtccttgaccctgagagagccgataagttgaagcgatctcttcctcccggtttgagtgttcaagacctgtagagctgttgagt

SEQ ID NO: 117412 - DNA, 262 bp, Glycine max
tgttgctgcaccaccgaacaacttcccctgtaaatcgcgtttcgtttgtgcaaggttttaaaagatggctgatgctgaggacattcaagctcttgttgttgataatggaactggaatggtcaaggctggttttgcaggtgatgatgctcctagggccgtgttccccagcattattgggagaccacgccatactggtgtaatggttgggatgggtcataaggatgcttacgtgggtgatgaagcccaatcaaaaaggggtata

SEQ ID NO: 117413 - DNA, 268 bp, Glycine max
gcggcacacacagacacacacatttcgtcggaatgggaagggtgattcgcgcacagcgtaagggtgcggggtcggtgttcaagtcccacacccaccaccgcaagggtccggcgaggttccgcagcctcgacttcggcgagcgcaacggctacctcaaaggggtcgtcaccgatatcatccacgaccctggtcgcggtgctcctctagccaaggtggcgttccgccaccccttccgctacaagaagcagatggagctcttcgtcgccgg

SEQ ID NO: 117414 - DNA, 262 bp, Glycine max
cttcgccttcgcccacaacaactcctgcttcaggatcgctgcaggcgttactttccatttttacccttcatcctcgagaaaaaaatggcgaacgcagcatctggtatggccgtccatgatgagtgcatacgaaagtttctggagctcaaggcgaagaggacgtaccggtatatcgtttttaagattgaggagaaatcgaagcaagttattgtggagaagctgggtgaccctgcaaatggctatgatgaattcgctgccagtc

SEQ ID NO: 117415 - DNA, 263 bp, Glycine max
agtgtgtcagtcattcctgttcctcaagtcaagctttgtagtgagcgcatataatggctgtagaaaggtccggaattgccaaagatgttacggaattgattggtaaaaccccattagtatatctaaataaacttgcggatggttgtgttgcccggagtgctgctaaactggagttgatggagccatgctctagtgtgaaggacaggattgggtatagtatgattgctgatgcagaatagaagggacttatcacacctggaaag

SEQ ID NO: 117416 - DNA, 261 bp, Glycine max
aaatggcatgctgatcaatgataagcaggtctatgtaggccatttcctgcgaaacaagatagagagaatgctctcagcaagacaaaatttaataatgtctatgtgaaaaacttatcagagtcaaccacggatgaagagttgatgataaattttggagaatatggtaccattactagtgctttaataatgagagatgctgatggtaaatcaaggtgttttggctttgtcaattttgagaacccagacgatgctgccaaagct

SEQ ID NO: 117417 - DNA, 261 bp, Glycine max
gttttccctttttcttaggcacaccacacacccactcaaatggtagaaactgagatgaatcctgatcagtttcagaagaacagcatgttcgtagaaacccctgaagatggtggcaaaagcttcgacgatgatggacgagtcaaaagaactggtacatggataactgcgagtgcccatgtcgtaacggcagtgataggttctggagtgttgtcgattgcgtgggcaattgcacaaatgggttgggtggcaggccctgcggtt

SEQ ID NO: 117418 - DNA, 262 bp, Glycine max
cttctcatcaagaacctgctgctgtctctgcccctcctaaacatcaagagtcctttcgccatgaacgctgccctgacttgaaccttgagctaaccattagtcctccccatcatcctcaacctgatcgtccgcacttgaagacccttgtgacagactcaaacctttgctttccctgcagtctgggttggcgtaatagcaaagattgtagctgtgccctccacactagtactgccagcgctactgctactggctatgatttctt

SEQ ID NO: 117419 - DNA, 267 bp, Glycine max
actcattccttcatttttaaacctagctccatctccctccactcaccataacatagaatcagtaccagattctgccgacaccaacttctgtgtaactgtcagcaacaatggctacattactgctaatgaccccttgaactctggtgcggcggcggatgctatcgctgggagccacctcgacgaggtcgaccgcgtgctagagtactacctagagctcgtcgtcaagctcggaggcgataccctgaccatctcgcaggtcgcggcgat

SEQ ID NO: 117420 - DNA, 261 bp, Glycine max
tatctgattcgttcgttcactttcactttaccaactcctaacagtttctctctgtttccttcttcaccgcatcaatgtagttggacggcgttctcctcggcatgtgcaaccctctcctcgacatctctggcgtcgtcgacgacgctttcttgcaaaaatacggtatcaagttgaacgatgcgattctctctgaggataaccacaaacctatgtatgaagaattggctaacaatcctaatgtggagtacattgctggaggtg

SEQ ID NO: 117421 - DNA, 259 bp, Glycine max
gctgtcttggctgagatggatgctgccggacgagaggctcagctgagaggttttgaattcgtaaaagcggtcactttggtgctcgaaccatttacgttggaaaatggcgtgttgactccgacattcaaggttaagaggcctcaagcgaaggaatatttcgcaaaagcaatatctgatatgtacagtgagctctcaagaactgatacttctcagaaaacgttgtgaaaattgagagtctccccccatcaccaaccacaac

SEQ ID NO: 117422 - DNA, 261 bp, Glycine max
tagagaggaacgaagactgaaaaatggcgtcatggaattcatttccgcttcaagttacctacgaggctctgggttggttcgccttcgtttcctggtccatcagtttctatcctcaagtcatcttgaattttcgcaggaagagtgtggttggactcgacttcgatttcgtggtgctaaatctgaccaagcacagttcctatctcatatacaacgcttctctctacttcagctctgctattcagaagcagtactttgagaaat

SEQ ID NO: 117423 - DNA, 262 bp, Glycine max
ctaaattctcaaaggcaccaatttcattgctcagagttcccaaattgctccccaagagataaaatgtctctaatcccaaacttcttcggtggccggagaaacaatgtgttcgatcctttctcactggacgtgtgggatcccttcaaggattttcctttcccaaatacgctttcttcagcttccttccctgaattttctcgggaaaattcggcatttgtgagcacccgtgtggactggaaggagaccccagaggcgcacgtgt

SEQ ID NO: 117424 - DNA, 261 bp, Glycine max
taacacattataactcctgtttctttattaattctctctttcaaatatatggcagaagatgcttcaattattccaacacacacaaaagcgtggtgatactctgaacatgtgagtccgggtgatgttctcaaattagatcctaattggcccttaccccaacaactcaaagatgaccaagtgctcatcaaggtcatcgctgcatccattaatcccgttgattacaagaggatgcacggcgagttcaaggacactgaccctcat

SEQ ID NO: 117425 - DNA, 256 bp, Glycine max
ctccatttataacacatcgagtgcgcactctctcttctcctaggtttcgctcccatcaacatcaacgatggtgcacaggctcacttatcgcaaccgccatagctatgctaccaaatccaaccaccaccgggtcgttaatacccctggtgggaagttggtgtaccagaccactaatcagatcgacctcgacctaagtgccctgtcactggcaagatgatccaacggattccacgcttaagacctgctgaatacaaga

SEQ ID NO: 117426 - DNA, 257 bp, Glycine max
agaggctggtgtgagagatgtgctgcggatgctacgtgaggagtttgagctaaccatggctttgagtggttgcacctcactcaaggatgtcactcgtgatcacgttgtcactgattgggaccaaccacgcactatcccccgcgccttgccaagattatgagaaactttttccaatgggggagacacttctatatatgtttcgtgaacctgttcttctcatcctttgttttcctttttggacaactcatttaggcttg

SEQ ID NO: 117427 - DNA, 252 bp, Glycine max
tgaagaacttgctcactggtcattaccagaggatgatcttgttttattggctattattggcctaaaggatccttgtcgacctggtgtcaaagatgcagtgcagctttgccaaaaggctggggttgaggtaaaagtggtcactggtgacaacgttaaaactgcgatagcaattgctgtggaatgtggaatgcttggttcgatttctgatgctacagaaccgatcgtcgttgaacgaaaaagatttcgtgcctt

SEQ ID NO: 117428 - DNA, 246 bp, Glycine max
cggctcgagctttctctctgtgtctctctcgccgaggtcttgtggcggtggcgagcgctgccactccgcgcgaagagtgcgagtgcgtggcgaagtggcggacaggccgagcgctgcgaggagatggtggagttcgtggagaaggtctccgcctccgccgagagcgaggagctgaccgtggaggagcgtgacctcctctccgtcgcctgcgagggttgtgtttcggcgctcgccgcgcctcctggc

SEQ ID NO: 117429 - DNA, 253 bp, Glycine max
gttcttttcgtcatagtggttcttgcggttttgtttttggtctctggcctcctccacctgcttgttagatttctcataaaacacccttcttctgcgtctgctcagtccgacagacaccaagagctttccgcgtctgatgcgctcgagaggcagcttcagcagctcttccacctccgtgactctggcttggatcaggcttgcgttgatgctcttcctgttttccagtacaaggagattgtggggttgaaggagc

SEQ ID NO: 117430 - DNA, 251 bp, Glycine max
ccattatcaatccttattgttggcgtaggaggagctgatttcgaagaaatggagattttggatgctgacaaaggatataggcttgaaagttcatctggtcgcgttgcttcacgtgatatagtccagttttgaccattccgtgacgttcgaagtggagaaatttcagtagttcgagcacttttagctgaattacctactcagtttttaagttacgtgcggacagaaatatcctaccgaattcctagtcatgt

SEQ ID NO: 117431 - DNA, 223 bp, Glycine max
gtttcattggtaactcgacttcaatccaggagatgttcaggagagttagtgagcagttcacggctatgttcaggcgcaaggcgttcttgcactggtacaccggggaaggaatggatgaaatggaattcaccgaggccgagagtaacatgaacgatcttgttgctgagtatcggcagtaccaggatgctactgctgacgaggacgagtatgaggaggaggaaga

SEQ ID NO: 117432 - DNA, 255 bp, Glycine max
gacggcagcacgcgcaaaagtggtgaagtttctgaaaccaaacaaagccgtcatcgtccttcagggacgctacgccggcaaaaaagccgtgatagtgcgaaccttcgatgaaggcacgcgcgagcgcccctacgggcactgcttggtggcagggataaagaagtaccctgcgaaggtgatcaagatggattcggccaagaagacggccaagaagtcgcgtgtgaaggcgttcgtgaagctcgtgaactaccagca

SEQ ID NO: 117433 - DNA, 269 bp, Glycine max
tttgaacatgtgtaaccgacagtctgcctgggccacagccctctcaccctggtactgcatgcacgcaatgctagctgcccctttcccgtcctgggcaccccgagtctcccccgaccccgggtcccaggtatgctcccacctccacctgccccactcaccacctctgctagttccagacacctccacgcccacctggtcctctcccatcgcccacaaaagggggggcacgagggacgagcttagctgagctgggaggagcagggtgaggg

SEQ ID NO: 117434 - DNA, 266 bp, Glycine max
gatccgtcaactctgcgtcaacgccagacaaatcttcctctctcagccaattcttctcgaccttcgtgctcccatccgcgtctgcggtgatatacatggtcagtaccaggacttgctgaggctttttgaatatggtggctaccctcctgcggcaaactacttgtttctgggggattatgtggatagagggaagcaaagtttggagactatatgtttgcttttggcctacaaaataagatatccagacaaaatttatctcttgaggg

SEQ ID NO: 117435 - DNA, 269 bp, Glycine max
cgagttgcaacaaaattcaattttgagcactaaccagcaccacttccaatggcttcaaatcatgaagaagtgatacttttgggcaagtgggccagcccatttagcaacagagtagaccttgctctcaagctcaagggagttccctacaaatactcggaggaagatcttgctaacaagagtgctgatcttctcaggtacaaccccgtgcacaagaaggttccggttttggtccacaatgggaacccattacccgagtcacttatcattgt

SEQ ID NO: 117436 - DNA, 263 bp, Glycine max
caatgacaggtttggcattgttgagggtttgatgaccactgttcattccatcaccgctacccagaagactgttgatggacacatcagccaaggactggagaggtggaagagctgcttcatttaacatcattcctagcagcactggagctgccaaggctgttgggaaagtcctccctgctttgaatggaaaattgactggtatggcattccgtgttcccaccgtggatgtctctgttgttgacctcacagtgaggctggagaaa

SEQ ID NO: 117437 - DNA, 263 bp, Glycine max
aaggagcgttctggattcgagggtccctggacctctaatcctcttattttcgacgactcatacttcaaggagttgttgagtggtgagaaagaaggcctccttcagctagcttctgacaaggcacttgtgtctgaccctgtgttccgccctcttgttgagaaatatgcatcggacgaagatgccttcttcgctgattacgctgaggctcagcaaaagctttctgagcttgggtttgctgaagcctaagcaacgttttggggatt

SEQ ID NO: 117438 - DNA, 263 bp, Glycine max
  unsure (1)..(263): unsure at all n locations
ctagaccttaatttttctctcattcgcttcaaatttcaggaaatcaattatggctcaaccctcaacaagaataggccttgctggactggctgttatgggtccaaatctagcactcaatattgctgagaaaggctttcccatttctgtttataaccgaaccacttccaaggttgatgagactgtagaactagcannacaagaaggaaatcttccagtttatggctaccatgaccccgaagcttttgttcattccattcaaaagc

SEQ ID NO: 117439 - DNA, 260 bp, Glycine max
ttgttatatggtgagtcattccctgtttcggccgaagttcttgattccagtttttgccttcccataggaaaagcaaagattgagagggaaggaaaagatgtgactattacagcctattcaaaaatggttggctatgctctcaaggctgctgagacactggcaaaggaaggaatcagtgctgaggtcattaatttgcgttcaatccggccgcttgatcgatccacaatcaatgcttctgtcaggaaaaccaacaggctggt

SEQ ID NO: 117440 - DNA, 259 bp, Glycine max
attggagagcatattcatgagcaggtgattgatactggaattattcctattctagtaaaaattgtgaagaaaaagtctgatttgcctgtgagggagcggatatttctcctactagatgccacacaaacatcccttggtggtgcatctggaaagtttccacagtattataatgcatattatgatttggtgagtgctggagtgcagtttgctcaaagggatcaagtggtccaatcaaataatcctagttcacaacctagta

SEQ ID NO: 117441 - DNA, 263 bp, Glycine max
cgccgctcacggcatcggcatcaactacggcacgctcggcgacaaccttccaccgcccgcggcgtggcgaacttcctgaagacgaagacgaccatcgaccgcgtgaagatctacgacgtgaacccggacatcctgcgggccttcgccggcagcggcatctccgtgacggtgaccgcccccaacggcgacatcgccgccttaaccaaaatcgactcggcgaggcagtgggtggcgacgcacatcaaaccctttcaccctcagac

SEQ ID NO: 117442 - DNA, 262 bp, Glycine max
tgtttaggtactttgaccattatggtatcataagagacattatgcagaatcatttacttcaaatactagcactctttgcgatggaaacccctgttagtttggatgcagaggatattagaaatgaaaaggtctcacatgattatataccttgaactcaactgttctaaatagtcatgtttttcttttttaccagaatttcaattacctgatggatgtcaggtcaaggttcttcgttcgatgagacccctacgacttgaggatg

SEQ ID NO: 117443 - DNA, 261 bp, Glycine max
cgctgttaggcttttggagccactcaaagcggagtttcctattttgagctacgccgatttctaccagttggctggcgttgttgccgttgaggtcaccggtggacctgaagttcccttccatcctggaagagaggacaaacctgagccaccaccagagggtcgcttgcccgatgccactaagggttctgaccatttgagagatgtgtttggcaaagctatggggcttagtgaccgagatatcgttgctctgtctgggggtca

SEQ ID NO: 117444 - DNA, 260 bp, Glycine max
gtattttctcacttctcagcactcagcagcgatatcagttgaagaaacagaaacaaacaaaagaggcagaagatgttgtgggtggacaaatatcgtcccaaaaccctcgaccaggttatggtccacaccgacatcgctcgcaatctcaagaaattggtaacggaacaggattgcccccatttactcttctatggcccatctggctccggcaagaaaaccctaatcatggctcttctccgccaaatgttcggacctggtgc

SEQ ID NO: 117445 - DNA, 262 bp, Glycine max
aagtggttctccaccaagggctagccctgtccccacacaagcaccacaagccagtagccccactcctccaccaaggtctgcaccagcacctgcttttggtccatcctctgaaccagctactttcattgttggagaaaccgctggctggattgttcctggcaacgcttccttttacacagcttgggcctctggcaaaaacttcagggttggagacgtccttgtgttcaactacgcatcaaatacacacaacgtagaggaggtt

SEQ ID NO: 117446 - DNA, 261 bp, Glycine max
  unsure (1)..(261): unsure at all n locations
ctgagattcagatgatggcgagtgagtcgcaaaactgggtgttcatggtcactgcacagacaccaaccaacattgccgttatcaagtattgggggaaaagagacgaaaccctcatcttaccggttaacgacagtatcagtgtcactctcgatcccagccacctctgcaccaccaccactgctgccgtcagtcccgcttgtcaccaagatcgcatcatcntcaaggaaaggagatttctctttctggggcaggttcagagct

SEQ ID NO: 117447 - DNA, 260 bp, Glycine max
gccgtgggaggagtttgtaacctggctgctctaccaacggcgaacttagtgacgcaaatgcaacacatgtagcaagttgtgatgtgagggtgttgcatccagtgttcaaggtttacggtggggccactgcgttctccggccccgttgtcaccgtgaaggtgtttgaagacaacgtgttggtgagggagcttcttgagacgaaaggcgaaggaagagtattggttgttgatggaggaggaagcttgaggtgtgcattggtg

SEQ ID NO: 117448 - DNA, 258 bp, Glycine max
tctttttcttatttttctctcatagtgtctctcttgttctttctcttatttgtctctcatagtgtctctcttgttcttcaatcaagagaagaaagattacacccataagccatggaaggtggtgtgccagaagctgatatgtctgccttcagagaatgtttgtctctatcatggaagaatccttatgttcttcgccttgctttctctgctggaattggaggccttctctttggttatgacactggagttatttctggg

SEQ ID NO: 117449 - DNA, 250 bp, Glycine max
gagaatggcagcacttggtgggaatcgtgatgtgacaggaagccagaacagcgttgagatcgatgctctagctcgctttgctgttgaagaacacaacaaaaaacagaatgcccttttggagtttgaaaaggtggtaactgcgaaacagcaagtggtttctggtaccttgtacaccatcacttcggaggcaaaagatggtgggcaaaagaaggtttaacaagccaaagtttgggagaagtcatggttgaac

SEQ ID NO: 117450 - DNA, 242 bp, Glycine max
aaatagatcattgatcaagtacaatgctatatcagtcaagtgttgaggcagtcagtttgattctttattattttttgtaagagtttttcttttcctctttaacgttctcataatagttgacataattggggtataaattgtgggaactggggagggtttatgttctatgttgttttgtactccaatcttttatgaatgtactggggaaacttgttttgtttgattaatcttctcttaatatc

SEQ ID NO: 117451 - DNA, 261 bp, Glycine max
tcgaaataacacttgctagctgaactatggaactggagaagacaccaacaagtttggtttttggtgttaatggtgagaggtttgagctctcccacgttgacccatcaaccactttgctccaattcttacgcactcgcactcgtttcaagagtgtcaagctcggttgtggtgaagggggttgtggcgcgtgtgtagttttaatctccaaatacgatcctgtgcttgaccaagttgaggattttacagcaagctcttgtctca

SEQ ID NO: 117452 - DNA, 261 bp, Glycine max
gacctaaacaggaatgtgcttgctcctgcagctccccttgcaagaaaagattacctctttgctcaacaaactgctgagaacattgctgcgctcctcgctcctcagtctggtttctactatgatatttgggtggatggggaaaagattttgacatcagaaccacctgaagtagttcaggcacgaaatgacaattctcatggtacaaacttcccggattcccccgagcccatctatggaactcagttcttgccaaggaaattc

SEQ ID NO: 117453 - DNA, 262 bp, Glycine max
ctcgagccgtgccaccgtcctctccttgttcttccacctccccaccctcgaccagcaggtccagtgcgagttccgagacctcccagaaccggtcagcatccccggttgcattcctcttcccggcaaggacctgttggacccggttcaggaccgcaaaaacgaggcctacaagtggatcctacaccactgcaagcgatacaaagaagccgaggggataatcgggaacagcttcgaggagctcgaaccgggagcctggaacgag

SEQ ID NO: 117454 - DNA, 261 bp, Glycine max
aacaaccttctttctttttctgtgagcctttctttcaggttcttaacttgatcagtgtgcagtgtccaaatcataagggtagttgcaaattgcaatggctaagcatgatgttgagggtggttccttctctgcaaaggactaccatgatcctcctccagcaccgttgattgatgctgaggaactcacacagtggtccttctacagggctttgattgctgagttcattgccacaatgctcttcctttacatcacagtgctcac

SEQ ID NO: 117455 - DNA, 259 bp, Glycine max
ggaattcctcctgctcccagaggtgttcctcagatcactgtttgcttcgacattgatgccaacggtatattgaacgtgtctgcggaggacaaaaccactggacagaagaacaagattacaattaccaacgacaagggcaggctttctaaggaggagattgagaagatggtgcaggaagctgagaaatacaagtctgaggacgaggagcataagaagaaagtggaggccaaaaatgcattggaaaattatgcctataaca

SEQ ID NO: 117456 - DNA, 245 bp, Glycine max
cttctttgtctctcatctgtctgaggatttttccatcttagttcctggaggcaccaggaacctgacccaataaacaaacccttttttttctttctaatttttctaaagtttcattttttaatccaatggcaacttgggtattatcagaatgtagcttgaagcctcttgctccagtaatccctagacctagaactggggcagtttgcccagcacctcaaaggttggatttttgagacaaacaagta

SEQ ID NO: 117457 - DNA, 258 bp, Glycine max
gcaattcactctgtacaattcttcgttcgttctctgcagttatatcctttttgagcttcaatggcggacgctgaaaccttcgctttccaggctgagatcaaccagcttctaagtctcatcatcaacacattctacagcaacaaggagattttcttgcgtgaactcatcagcaatgcttctgatgctttggataagattcgattcgagagcttaaccgacaagagcaagctcgatgctcagccagagctcttcattcgt

SEQ ID NO: 117458 - DNA, 259 bp, Glycine max
gtttcagttccaaacaaaacccatcaaagtctttctccctcagtgatcatatattcattcagttctatacaaaatcctcaaaaactcttcctctctgccatgaccatggaatacagaaccttagaactcaacatcatatccgcaaaggacatcaagaatgttaatctcttctccaagatggacgtatacgccgccgtttcgctctccggtgaccctctccaccctcagggcgccaccacccacgtccacaaagacgccg

SEQ ID NO: 117459 - DNA, 260 bp, Glycine max
caggcaagccccactcaaccaccacacctctcctcgttcacgctacccctttctgctcttcttctacctttcaagttttaaaagtataaagatggcagagacattcctatttacctcagagtcggtgaacgagggacaccctgacaagctctgcgaccaaatctccgatgctgtcctcgacgcttgcctcgagcaggacccagacagcaaagttgcctgcgaaacatgcagcaaaaccaacttggtcatggtcttcggag

SEQ ID NO: 117460 - DNA, 258 bp, Glycine max
tggagctacctcaggggtggtctaactactcttgatcgtgattatggatggatcaataacattcaccatgacattggcactcatgtcattcatcacctatttcctcaaattccacactatcacttagttgaggctactgaggctgctaagccagtgtttggaaaatattatagagaaccaaagaaatcagcagcacctcttccttttcaccttattggggaaataataaggagcttcaagactgaccattttgttagt

SEQ ID NO: 117461 - DNA, 258 bp, Glycine max
tgaggatcctgatgagtccactgacaaagaaaagaaagaagatacgtcatctgacaataatgagaagaaaggtcaatattccaagttctggaatgagtttggtaaatccattaaacttggtatcatcgaggatgccaccaacagaaatcgtttggcaaaactgctcagatttgagagcaccaagtctgagggtaaattgacatctctggatcagtacatatctagaatgaaagctgggcagaacgatatcttttacat

SEQ ID NO: 117462 - DNA, 260 bp, Glycine max
gtcgacatgcagagaagtatgtccgaatgggtagattggactggcgagatggtgcagcctcatgagagagtattaaagctgtaatgaagcttccccgactacagaacattataatgcagcatgttgatcattcagctggagatcttatacatcttttgcaggggctacttagatatgacccctttgaaagacttacagctagggatgctttgaggcattccttctttactagagatcaacttaggagatgattttcatgt

SEQ ID NO: 117463 - DNA, 257 bp, Glycine max
atttggcgtaagggcgcacagcacccaaccgtgaagagagactccatggccgagtgcaccgtccccaagtgggcccaaaaaaaccgtcagcttgccccctctccggcgcggctgtcatcttgtcacttccaagatagtgaaggaaattgagcaagacctctccggcttcaagtgtggcctagctcatctcttcttgcagcacaccagtgcttctcttaccatcaatgagaattatgactcagatgttcgcgaggata

SEQ ID NO: 117464 - DNA, 256 bp, Glycine max
agtcaattaaggaggaaattcgcaaagttgttgaacttcaagaagagcttgatattgatgttcttgttcatggagaaccagagagaaatgatatggttgagtacttcggtgagcaattgtcaggctttgccttcactgttaatgggtgggtgcaatcctatggttcccgttgtgtgaagccaccaatcatctatggtgatgtgagccgcccaaagccaatgactgtcttctggtcatctctggctcagagctttac

SEQ ID NO: 117465 - DNA, 250 bp, Glycine max
agcaaactcaccaaaccggttctccggcgaaccggtttcgtcacacaggacgatattctctaccctcacttgacggttcgcgagacgctcgtgttctgcgcgatgctgaggttcccgcgcgcgctcctgcgctcggagaaggtagcggcggcggaggcggcgatcgcggagctagggctggggaagtgcgagaaccgcataatcggaaacagcttcatccgcggcgtctccggcggggagaggaagcgcg

SEQ ID NO: 117466 - DNA, 261 bp, Glycine max
gttgaaactgcaaagcaattagcactccaggaaggcttgctggtgggaatttcttcaggagctgcagctgcagctgctttgaaggttggaaagaggcctgagaatgcaggaaagcttattggggttgtcttcccaagctttggtgaaagatatttgtcaactattcttttccagtcaatacgggaagaatgcgagaaaatgcaacctgagccatgaattgactttgcttgttaatgtttcatactcattttccaatagtat

SEQ ID NO: 117467 - DNA, 256 bp, Glycine max
atgtattgttaagctcatttgtcccacctaatggtctgatcaaatcggtaagggtctatccatctgagtttggccttcaacgtatgaaagaggaggaagttcgtggacctattggtctatttgatgatgaagatagcagcaatgatgaccttgacaatgagaaactgcgtgcatatgagaagagcaggttgcggtactattttgctgtggtggaatgtgactcaagtgccacagcaaattacatttacaaagaatg

SEQ ID NO: 117468 - DNA, 253 bp, Glycine max
gacaaactcagggtagggcagagagagagagagagagagagagagagagagagaatgggagggtgggctatcgcggtgcatggtggcgctggtgtcgaccctaatctcccactcgagcgccaagaagaagcgaaacaacttctcacgcgctgtctcaatcttggaatctctgctctaaattctaatcttcccgacatagatgtcgtcgaacttgtggtgagggaattggaaacggatccgctgttcaattcgg

SEQ ID NO: 117469 - DNA, 255 bp, Glycine max
tgagatatatgcatcggacgaagatgccttcttcgctgattacgctgaggctcaccaaaagctttctgagcttgggtttgctgaagcctaagcaacgttttggggattgttggagagagcacggtgcccataatatttctctcataaattctatggtcatggtttctaatgcgccactgtgggttcctcaaatttttagatagcttttgaatgtattttgctggacgtggtgatgatgattggagttgggttgtt

SEQ ID NO: 117470 - DNA, 257 bp, Glycine max
cacacttcctctctcttcctctctctcttcggagctcaatttggccgtcacaggcggcctccgaggctctcaacggcacaaccaccacctccatcaggcacgcgttcggcaacgtcctcgcgttcttcatacttctcatgatcggcgttctctccttctcgatccgtctcttctccgttataaagtatgagagtgttattcacgagtttgatccttatttcaactatagagtcactcagtttttggcaaagaatggg

SEQ ID NO: 117471 - DNA, 268 bp, Glycine max
acaagccaagtgaaagtgagaaaaaataaaaatcaaagagcataatgtcagggatcattcacaagattggggagacccttcatgtgggagggcacaagaaggaggaggagcataagggtgagcaccatgctggagaatacaaaggggagcaccatggtgaacacagtagtgagtacaaaggagagcatcatggtgaacacaaagctggagagtaccatggtgagcacaagccagagcacaaagaggggttcctagacaaagtcaagga

SEQ ID NO: 117472 - DNA, 265 bp, Glycine max
cttttcctctacgttcctgcattgctcgtctcaaacgctaaccttggccggcggaggtttcaccagcggcggcggcgcggagatttcgaggccaaaatgactcccatcgtcatcatttcatgtatcatggctgccaccggaggtctcatgttcggctacgacgtcggcgtttcaggtggtgtgacgtctatgcccccgttcttgaagaagttttttccgacggtatacagaaagacagtggaagagaaaggactggacagtaatt

SEQ ID NO: 117473 - DNA, 266 bp, Glycine max
ctttgatttcgcttccgaagcgacaagcagcacccactctctattctcggaccttccaaacatggaacgcatcttggcggcaagtacaagctcgggcgctagatcggaagtggatccttcggcgaaatctacctcgcgacgcatattgataccttcgagatcgtcgccgtcaagatcgagaatagtaaaacaaaacatccccaactgctttacgaggcaaagctctacaatattcttcaaggaggaagtggcattcctaacataaa

SEQ ID NO: 117474 - DNA, 264 bp, Glycine max
ctcagtgaaagagaatccgaggcgaagagaagagaaaaattaagatggaggggaaggagcaggatgtgtcgtgggagcgaacaagttcccggagagacagccgattgggacggcggcgcagagccaagacgacggcaaggactaccaggagccggcgccggcgccactggttgacccgacggagtttacgtcatggtccttttacagagcagggatagcagagtttgtggccacttgtctgtttctatacatcactgtcttaac

SEQ ID NO: 117475 - DNA, 263 bp, Glycine max
caaaggtgaagctcaggctcaggattggagaggcagaccctccaaccctgccaaacacggtggaatgattccgctgcttttgttcttgggttgcaagcttttgagataatggcaatagccgcagtggggaacaatctgataacctacgtgacgagtgagatgcacttccctttgtccaaggctgccaacctagtcactaactttgttgggaccatctttctcctcgccctcctcggcggctatctttccgactcttacctcgg

SEQ ID NO: 117476 - DNA, 267 bp, Glycine max
  unsure (1)..(267): unsure at all n locations
ctagttttcaactacccatcaaatgcacacaacgtagaggaggtgacaaaggccaactacgattcttgcagctcagcctctcctatcgccactttcaccactccaccggccagagtcccccttagcaaatccggtgaacattactacatctgtggaattccggggcactgtttgggaggacaaaagctttccatcaacgtcaccggcggcagnaccgccaccgcccccaccactccttctagcccttctccatcaggtgctgtcagt

SEQ ID NO: 117477 - DNA, 263 bp, Glycine max
agacgacggcaaggactaccaggtgccggcgccgtcgccactggttgacccgacggagtttacgtcatggtccttttacagagcagggatagcagagtttgtggccacttttctgtttctatacatcactgtcttaaccgtcatgggagtcgccggggctaagtctaagtgcagtaccgttgggattcaaggaatcgcttgggccttcggtggcatgatcttcgcgctcgtttactgcaccgctggcatctcagggggacaca

SEQ ID NO: 117478 - DNA, 280 bp, Glycine max
aaactggccatgctgatttgaacagatttgagtgggcagtgaacattcaacgtgatagctatgcatcatatattgggcactaccctttactgggattctttgctattgctgaaaatgaatctattggaagagaacgctacagctttatgcagaaaatgctcctgccttgtggtttgcctcccgaaagagaagaagattaagaattgccatctggattgcaaatggatcacacagtacagttaatatagcctatgacagtttgttgtaccatgttatctta

SEQ ID NO: 117479 - DNA, 265 bp, Glycine max
agaagatggagatgtatcagatctggagcaggagaatagcgttgggagcgttcgcgtttgttctgctttcctatcggcctcagcagacgacgtcgttgtgctctctgaagataacttcgagaaggaagttggtcaggacagaggagctctcgttgagttctatgctccttggtgtggacactgcaaaaagcttgctccagaatatgaaaagcttggtagcagcttcaagaaagccaaatctgttttaatcggcaaggttgactgt

SEQ ID NO: 117480 - DNA, 263 bp, Glycine max
ggctgataaagacaacactcataccgttggaaagatggatgctgctggccatgttgcttaatttagttcttgcttcctttgtcttcttgagttttatcagagacgggagtgcagggatcactagctctttcattcggtcagagtggccggcagttgacatcccccttgatcatgaagcatttgcagttccaaagggttataatgcacctcaacaagtgcacatcacgcaaggtgactatgatggtaaagcagtaatcatctca

SEQ ID NO: 117481 - DNA, 253 bp, Glycine max
gtcgccctgatcaatttacggtgctcgttagaaacattccaccagatcctgatgagtctgtcagtgagcttgtggagcacttttttctggtcaatcatccagataactatctttctcaccaggttgtttataatgcaaacaaacttgcaaagttggttaaaaagaagaagaagttgcagaattggcttgtatattatcaaaacaaagttgaaagaacttcagaaaggcctcaaataaagactggcttccttgg

SEQ ID NO: 117482 - DNA, 261 bp, Glycine max
cacgcgctgaagacgacgccgtacgatgagcgcgtagagaatcacgagaaccacgcgttgcacgcgacgcaccagatcgccgagtcgtggatctacgcgtcgcgaaggttctagagaggatcgcagacgcggtgctctccagaaccttcgagaaggcggctgaggactgctacgccgtggaaaggatctggaagcttctcgcggaggtggaggacctccacctgatgatggatccggacgatttcttgagactgaagaatc

SEQ ID NO: 117483 - DNA, 269 bp, Glycine max
acggttcacaccaaagcaagatggttcaatgatataatcaatgtcccgttccaatcaatagcctttgttgcgggctgtgtggcatatgtcttggacaacacactacataagaaggaagctgctattcggtaagatagaggaatgcattggtgggacaagtaccgttccttcaagactgacacaagatgtgaagagtttcattcactgcctttgaacctcaacaaatacttcgcatctgtgtaactgtgcagcttaactaataaaaatag

SEQ ID NO: 117484 - DNA, 256 bp, Glycine max
aaaacatggtccaagaaaagaaactagttgacgaggtgtccggttggctcaaaatgtatcacgacggttcagtggaccggacatggtccggaccggaccaattcaagttcatggccgaaccggcccctccccatgaacaattcatagacggcgttgccattcgcgacgtcgccgtttctcacggtggtggccagagtggccaccatgtccgactttatctgccagagataaagccggaagactgccaaaaactacc

SEQ ID NO: 117485 - DNA, 262 bp, Glycine max
ctccatcagcttgattgatgagccatgcaagtcagctcaccttcctgctatgagcattgccaaaaacctggttgcattctatcatatgatccaaatttgagattggctctatggccttctgcagactccgctcggaaaggcataatggatatatgggatcaagctgatgttataaagataagtgaggatgagattacatttttgactgggggtgatgatccttatgatgataatgttgttttgaagaaactttttcacccaa

SEQ ID NO: 117486 - DNA, 258 bp, Glycine max
ccggttcacaccaaagcaagatggttcaatgatataatcaatgtcccgttccaatcaaaagccttgttgcgggttgtgtggcatatttcttggacaacacactacataagaaggaagctgctattcggaaagatagaggaaagcattggtgggacaagtaccgttccttcaagactgacacaagaagtgaagagttttattcactgcctttcaacctcaacaaatacttcccatctgtgtaactgtgcagcttaacta

SEQ ID NO: 117487 - DNA, 261 bp, Glycine max
tcagaatcagaatcagaagaagcgagcaaagatgtcgggtcgtggaaagggaggcaagggtttggtaagggaggagccaagaggcacaggaaggtgctccgcgataacatccagggaatcacaaaacccgccattcgccgtttggctcgcagaggcggcgtcaagagaatcagtggcctcatctatgaagaaacccgcggcgtccttaagatcttcctcgagaacgttattcgcgacgctgttacctacaccgagcatgct

SEQ ID NO: 117488 - DNA, 264 bp, Glycine max
tttctttttaggtaaactaatgggggatgattcttttcctagtttggacaaattgagggctaactggactccatctcaagatcgatattttcttcagcttttgctgtcccatgttcacaaagggaataaaactgggaaagtgtttagcagacaagcctgggtaaatatgattgaacaatttaacaccaagtttggtttcaagtatgatgtagaagtgtcttagaaccgtcacaaaagattcaggaagcaatacaatgatatgaa

SEQ ID NO: 117489 - DNA, 268 bp, Glycine max
tgagaataccagttgctccagtagccggcactaaacaacatggcggacaaggcagtcaccatccgaaccaggaagtttatgacaaacaggcttctctccagaaagcagttcgtcgttgatgtccttcatccagggagggctaatgtttccaaggctgaactgaaggagaagctgggaagaatgtatgacgtgaaagacaccaactctgtatttgtcttcaagttccgaactcattttggtggtggcaagtccactgggtttggtttga

SEQ ID NO: 117490 - DNA, 267 bp, Glycine max
attttgtttatttggaattaacaagtagctaagatgtttggtatcatcggtggaaacaagggtcacttgataaaggggaacttggtgattatgcgagagaatgtgttggatatcaacagcattaccagtgttaagggtgtcatcggaaccggcatgaacatcattggtggagtcgtcgacaccgttactgctttggcgtcccacatctccatccagctcattagtgccaccatggctgatggacttgggaaaggtaaagttggaaag

SEQ ID NO: 117491 - DNA, 257 bp, Glycine max
ggcaagatgagtttgttaaaaagcaggattggaagaatcctttgagtgtgggaaaatgagtatgtacggtagggatccgtggggaggcccgctggagattcacgccaccgactccgccacggacgacgagcgcaccggaatctccaggagctggaccgaggcgctttagacgagacccaacagagctggctcttgggcgccggagaacagaataagaacaagaaaacctacgtagaccttggctgcatcatcgtcag

SEQ ID NO: 117492 - DNA, 255 bp, Glycine max
attacccatttcatgtctaattcctcgttggttttttttaacaaaatagaataagaagggcttttacggtttttgattttggggtctcctgtcctgctgttcaccttcaacgttgctctgctttcaattttcggaaaagaagagattctgtacagagatgctctgaaacggtgctactacactctggtgcaagggtataactcaatgccaattaacgttccgggaacactgttccacaaggcgatgaaggcaagg

SEQ ID NO: 117493 - DNA, 255 bp, Glycine max
  unsure (1)..(255): unsure at all n locations
ccctgtgagtgctttctttctgtaactaacttgttccctcgttaaccctaatcatcaactcangcagtgnatgantctgtggncggncgaganctcctcggtgatggnggccttcatgtcgtcctccgatctctcctcaatctggccctcgccggctccgccgcaatccacggcggtcttcaatcaggacaccctccagcntcgcctgcnggccttgatcganggcgcncgagagacctggacctacgccatctt

SEQ ID NO: 117494 - DNA, 250 bp, Glycine max
tcgagggtttgggtttctcttcctcccttggagaaaaagaagagccaccgctgcgacgccgttcgtgcatttttgaggtgccgctgtcatgtttgggcgtggtggaccaaggaggagtgataactccaaatattatgatattctcgggatttccaaaaatgccagtgaagatgaaatcaagaaggcctatagaaaggcggctatgaagaaccatccagataagggaggagatcctgaaaagtttaaggag

SEQ ID NO: 117495 - DNA, 266 bp, Glycine max
tttgttttcaattaggtttttgctgctctccttcaaactccgtctttccgaatcctctctttgtgattgtgttctgttctgcttcctaccgcgatagtttctcttctgaagcatggccatggcggtttctgcaattggttttgaaggtttcgagaagaggctggaaatatcctttttccagccgggactttttgctgaccctgagggaatgggtttaagagctcttgcaaagtcccagttggatgagatacttacaccggctgctt

SEQ ID NO: 117496 - DNA, 255 bp, Glycine max
ggtaaaacgaagcatccgcaattgctttatgaggccaagctctacaatattcttcaaggtgtagttgaatcctgagcagaaaatggtgtggtgtagacggggaggataatgtgcttgttatggacttgctgggacctagtcttgaggatctttttgtctactgtggaagaaagttctctctcaaatccgtgttgatgttggccgatcaaatgatgactagaagagaatatgtgcatgctagaggattcctacaca

SEQ ID NO: 117497 - DNA, 251 bp, Glycine max
actggtttttggtcgggaattgatggattttgccatttggaagtacagcttgatttctgcaattgggtgaagtgtaaggagatgaaccgtcctcgctgcttgttcggatctggcaatcttggttcaattgctattgttgctggtggaagtgataaatatggaaatgttcttgaatcggcagagttgtatgactcaaattcaggtacatgggaactattgccaaacatgcatacaccacgtagattgtgctc

SEQ ID NO: 117498 - DNA, 253 bp, Glycine max
ctcgagccgctttgttcactcttcttctcttgcggctatggttttagcgcacttcttctcgatttaaggaagatgggtaatcgaaaaggttcacatcagtattgtggtcattggccatgtcgactctgggaaatccactaccactggtcatctgatttacaagcttggaggcattgacaagcgtgttattgagaggtttgagaaggaagctgctgagatgaacaagaggtctttcaagtatgcctgggtgctg

SEQ ID NO: 117499 - DNA, 254 bp, Glycine max
ataatgggttcacaaaattgtatggataggaagcactatgttctggtgcatggggcatgccatggagcttggtgttggtataagctcaagccacgcttggaatctgcaggccataaggtcacagtacttgaccttgcagcttctggaaccaacatgaagaaaattgaagatgttgatactttctcagagtattctgcgcctttgttgcagctaatggccacaattccctcaaatgagaagttagttctagttgg

SEQ ID NO: 117500 - DNA, 259 bp, Glycine max
ttgaagtctcatgggaaactagtagctgttggggcaccggagaaacctctggaattgcttctcccacctttaattttggggagaaaaagtatagcgggtagttacattggaggaatcaaggagacacaagaaatgattaatttcgctgctgaacacaatgttagaccggaaattgaagtaattcctatggattatgtgaacacagcaatggagcgtctccagaaagccgacgttaaatatcgatttgtgattgacattg

SEQ ID NO: 117501 - DNA, 255 bp, Glycine max
ggccaggcaagccccactcaaccaccacacctctcctcgttcacgctacccctttctgctcttcttctacctttcaagttttaaaagtataaagatggcagagacattcctatttacctcagagtcggtgaacgagggacaccctgacaagctctgcgaccaaatctccgatgctgtcctcgacgcttgcctcgagcaggacccagacagcaaagttgcctgcgaaacatgcaccaataccaacttggtcatggt

SEQ ID NO: 117502 - DNA, 256 bp, Glycine max
ttcctagctactacacttgcattctttgcttcagaaaattaactagctaggatggtcagtgttgaagagatccgtaatgcacaacgtgcagagggccctgccactgtcatggctattggcaccgcaactcctccaaactgtgtcgatcagagtacctatcctgactattatttccgcatcaccaacagcgagcacatgaccgagctcaaagaaaaattcaagcgcatgtgtgataagtcaatgattaagaagcgat

SEQ ID NO: 117503 - DNA, 275 bp, Glycine max
aaaccccgtcgctcagtaattgtacccggataggcggctaagaataataatctgagacgaccaacctcagcctctgaccatgagtaagctacaaagtgatgcactgagagaggcaatttcccaggtggtgagtaattcaaaggagaaaaatcgtaaattcaccgagactattgagctgcaaattggattgaagaactatgatcctcagaaagataagcgtttcagtggttctgttaagcttccgcatattcctcgccctaagatgaaaatctgca

SEQ ID NO: 117504 - DNA, 271 bp, Glycine max
attcgaactttgggtgactggacatcacaactgaagggtgttttcgccaaggcatgtcaaccagcaagtgaaggcaaagtggtcttctacgagctgatatgctacaaggcaacaacaaaccaagaatgccaaggctattaatcgatggaccttatggagctccagcacaggactacaaaaattatgatgtaatccttctggtggggctaggaattggtgccacccctttgataagcatactcaaagacgtgctaaacaacatcaagcaaca

SEQ ID NO: 117505 - DNA, 270 bp, Glycine max
cggtgcagacatgggtatatacttcccatacactgaaactgagcgtaggttaacagaattccactctgacattgaagagcttctttacagctcagtggagaatgaggaacacatatgcgtattgaaggaccgcaacaaaccaataatcttcaccatggcaaggcttgaccgtgtgaagaacatcacggggattgtcgagtggtacgggaagaacgcacgcctccgcgagttggtgaacctggtggtggtggctggagacaggaggaagga

SEQ ID NO: 117506 - DNA, 256 bp, Glycine max
tgcgctctttcagctttgactttggtggaaactaaagactagtcaaaatggtgaagttcacagctgaagagctgcgtcgcattatggactataagcataatatccgtaatatgtctgtcagtgctcatgttgatcacggaaaatcaaccctgactgattctcttgtggctgctgctggtattattgctcaagaagttgcaggtgatgtccgtatgactgatacccgtgcagatgaagctgagcgtggtattacaat

SEQ ID NO: 117507 - DNA, 248 bp, Glycine max
aacacacacaaagaacaaaaggcaaagacagagagagaaacaatgtcttccccaagcaaacgtcgagacatggacttgatgaagctgatgatgagtgattacaaggtggagacgatcaacgatggcatgcaagagttctttgtggaattccacggacccaaagacagtccttatcaaggtggtgtgtggaaggtaagggtggagctacctgatgcttatccttataagtctccatctattggctttgt

SEQ ID NO: 117508 - DNA, 246 bp, Glycine max
gttttctcattaacgcttcttctctcttcactctgcgaaggtgcaacctgacagctccaaatccaatggcttcagagaagaaactttcgaacccaatgagggagataaaagtgcagaagctcgtcctcaatatctctgttggcgagagtggagatcgtctcaccagagccgccaaggtgttggaacaacttagtggccaaaccccagtgttttccaaagcacggtacactgttcgttcctttggga

SEQ ID NO: 117509 - DNA, 251 bp, Glycine max
attagttcattctctttgcgcagttccctacctctcctttcaagatgcagatctcgtcaagaccctcaccggaaagaccatcacccttgaggtggaaagctctgacaccatcgacaacgtcaaggccaagatccaggacaaggaaggaattcccccggatcagcaacgtctccacttcgccggaaagcagctcgaggacgatggtaccctcgccgactacaacatccagaaggagtcaacccttcaccttg

SEQ ID NO: 117510 - DNA, 292 bp, Glycine max
agcgtcttgggcagttggcgaagtggaaaacagcagaagaagttgctgctcttgtaaggtctttgcctgttgaagaacagccaaagcaaattattgtcactcgtaaaggaatgttggatccattggaggttcacctgctggatttccccaacattgtgattaaaggaagtgaactgcaacttcctttccaggcatgtttgaaaattgagaaatttggggatcttatattgaaggccacagaacccaatggtttgttcaatatctatgatgactggctgaagagtatttcttc

SEQ ID NO: 117511 - DNA, 289 bp, Glycine max
  unsure (1)..(289): unsure at all n locations
ggcttccgaagaatcccagaacaagccccccagcgagcagtccactaccgaactcatcacgagcgcgaagctggtggcggaggcggcgcagtcggctctgaagagcgacagcgncaaagtggacaaggccaaggtggctgacgctgccggcgatcttctcgacgcggcggggaagtatggaaaacttgatgacaaacaaggcatagggcaatatgttgacaaggctgctgattatctgcataattaccgggtgataataccactgctccttcacagcctgcagagtcta

SEQ ID NO: 117512 - DNA, 283 bp, Glycine max
ctgctgtgtgcgtgtggtcggtcactgcaaacgcaaaaaccagaacattctcttcagcttaacccttctttttcgatggctaatcggcacacgattattcttatgcagacctcgcagaacagagcaactaggacgttcatggattatgaatccataactcaggccatggatggcatatgtgcactgtatgaaaggaaactgaaggagttgaacccgaccataagaaatctctcgtatgacatactgatctctacaacttcatagatggtcttgcagacatgag

SEQ ID NO: 117513 - DNA, 282 bp, Glycine max
cttgatagggcaacatgtttaacccatgtctcagaagtggtacaaggtccgatcttgacccccacaaaagaccacaaattcaatttgttacagtcattcctaatgaaatacacctcacacattaagagagttatgaacacagccagttctatcaaacttaggatcaacagtcccaaagaagaagaagctttgcacgattgtgtggagttgatggacttatctatcagcagagttagggactcatggtgaccctaacaaaacaaaccattgagtcccaacaag

SEQ ID NO: 117514 - DNA, 280 bp, Glycine max
attcgaactttgggtgactggacatcacaactgaagggtgttttcgccaaggcatgtcaaccagcaagtgaaggccaaagtggtcttctacgagctgatatgctacaaggcaacaacaaaccaagaatgccaaggctattaatcgatggaccttatggagctccagcacaggactacaaaaattatgatgtaatccttctggtggggctagggattggtgccacccctttgataagcatactaaagacgtgctaaacaacatcaagcaacataaagatgt

SEQ ID NO: 117515 - DNA, 285 bp, Glycine max
ctatcatgcaagagaggaaatcaaggccatgaaagttcagagacaaaacagggaagatgatcctttagaaactgtgaagattccaaaagcaacatggatggctgatggaactcattggccaggaacttggttgagtcctacatctgagcattccaagggtgaccatgctggtataattcaggtgatgttgaaacctcccagcgatgaacctcttttaggaagtgctgatgatacaaggctcattgcctgactgatgttgatatccgtcttccccttcttgtttat

SEQ ID NO: 117516 - DNA, 296 bp, Glycine max
cggctcgagcacaactacaagagagaacttccttataaccaaaaccaacaacaactatggcaagttatcagaagcactacgatgatcagggtcgcaaggtcgacgagtatggcaatgttgagaggcaaactgacgaatatggcaacccggttcatgccactagtgtcacttatgtagccaccaaaagtgttggtggctacaatgatgacgctaataagcaacatgatattactggtgtctatcccgagaaagacccggtagacatcattttggtcgtggttacgacggtgacacta

SEQ ID NO: 117517 - DNA, 293 bp, Glycine max
gctgctaaaggtgaggaagttaagaaaaatggaggggttggcatgattttggcaaatggtgtatttgatggtgaaggattagtagctgattgccatgtattacctgccacggcagttggcgccaccggcggcgatgagatacggagttacattgggaattcgcggactccggccaccgcgacaatcgtgttcaaggggacaaggctaggggttaggccagcacctgtggtggcatcattttcagcaagaggccaaaccctgagtccccagagattttgaagcctgatgttata

SEQ ID NO: 117518 - DNA, 291 bp, Glycine max
aacacacacaaagaacaaaaggcaaagacagagagagaaacaatgtcttccccaagcaaacgtcgagacatggacttgatgaagctgatgatgagtgattacaaggtggagacgatcaacgatggcatgcaagagttctttgtggaattccacggacccaaagacagtccttatcaaggtggtgtgtggaaggtaagggtggagctacctgatgcttatccttataagtctccatctattggctttgtcacaaaattttccatcctaatgttgatgaggtgtctggttctg

SEQ ID NO: 117519 - DNA, 283 bp, Glycine max
aaacggatctcttcttcagtggtggaagctactagaacactagtttgttgagcactgcgatgaggaagtggacggttgcttccgctctccttcttctctctctcctctttctctttgcagatcaaggtcgaaagtttcaggcgaatgccgagggagattccgacgagcttgtagatcctccgaaggtggaggacaagatcggtgctgtgcctcatggcctttccaccgattcagatgtcgtcaaagggagtcggagtcgatctcgaagagatctctccggagc

SEQ ID NO: 117520 - DNA, 273 bp, Glycine max
caaaaaaagaccacaccgagagaagcgtcttaataaacgctcttctctgaaaaacctggtttcttctcctcttctcttctctttcggttcgatcttcgaactctgaaaatgagagagtgcatttccatccaaatcgggcaagccggtattcaagtccgaaacgcctgctgggagctctactgcctcgaacacggcattcagcctgatgggcagatgcaagtgataagactgtggtgaggtgatgatgcttcaacaccttctcagtgaactggg

SEQ ID NO: 117521 - DNA, 280 bp, Glycine max
acgtcgtcccggcctcctggcgcatcatctcctccattgagcagaaggaggagagccgcggcaacgaggaccacgtcgccgtcatccgtgactaccgctccaagatcgaggccgagctctccaacatctgcgacggaatcctcaagctcctcgacacgcgcctcgtcccctccgccgcctccggcgactccaacgtcttctacctcaagatgaagggagactaccacaggtacctcgctgattcaagaccggcgccgaccgcatagaagccgccgagagc

SEQ ID NO: 117522 - DNA, 280 bp, Glycine max
aaagacggcgtcttcataaacgcctttcttctccgtttccgtttcctcgttcgaattcgctttttgctctgcgaaaatgagagagtgcatctcgatccacattggtcaggctggtatccaggtcggaaatgcttgctgggagctctactgcctcgagcacggcatcgggcccgatgggcaaatgccaagtgacaagacagttggcggtggtgatgatgctttcaatactttcttcagcgagctggtgctggaaagcacgtgccacgtgcagtgtttgtag

SEQ ID NO: 117523 - DNA, 290 bp, Glycine max
attattgcaagaatggcacttcgttgcttggtgatgtccctttctgttctcttcactcttggtcttgcgagagaaagccatgccagagacgaagatttttggcatgctgtttggccaaacactcccattccaagttcattgcgagatcttctaaagcctggccctgcaagtgttgaaatcgatgatcaccctatgcaaattgaagaaacacagtacccgaaaaccttcttctataaagaagaccttctccaggcaaaacaatgaaagtacaattcagcaagcctcccttt

SEQ ID NO: 117524 - DNA, 283 bp, Glycine max
ccagaccttaatttttctctcattcgcttcaaatttcaggaaatcaattatggctcaaccctcaacaagaataggccttgctggactggctgttatgggccaaaatctagcactcaatattgctgagaaaggctttcccatttctgtttataaccgaaccacttccaaggttgatgagactgtagaacgagcaaaacaagaaggaaatcttccagtttatggctaccatgaccccgaagcttttgtcattccattcaaaagcctagggtgataataatgcttg

SEQ ID NO: 117525 - DNA, 272 bp, Glycine max
cctttgttcactcttcttctcttgcggctagggttttagcgcagttcttctagatttaaggaagatgggtaaggaaaaggttcacatcagtattgtggtcattggccatgtcgactctgggaaatccactaccactggtcacctgatttacaagcttggaggcattgacaagcgtgttattgagaggtttgagaaggaagctgctgagatgaacaagaggtctttcaagtatgctgggtgctggacaaacttaaggctgagcgtgaaagagg

SEQ ID NO: 117526 - DNA, 204 bp, Glycine max
ctgagtcgttgtcctgcggaggataatggacttgttatgaacttctacaaggaatcatgccctcaggctgaagacatcatcaaagaacaagtcaagcttctctacaagcgccacaagaacactgctttctcctggctcagaaacatcttccatgactgtgctgttcaagttgtgatgcttcactgttgctggactcacaagaag

SEQ ID NO: 117527 - DNA, 286 bp, Glycine max
attctttcccttggaaaaatgcaatccaaggaagagacaagaaacatgagttctttgggcacaatcctcaagcctcatgctgtgtgcgtaccgcacccaacacaaggccacataaacccaatgctaaaactagcaaagctccttcacttcaaaggctttcacataacctttgtcaacactgcgtatattcacaaacgccttctcaaatcaagaggtccagattccatcacgggtctcccttcattcgctttgagaccatccctgatggtctacgagagcctcttgt

SEQ ID NO: 117528 - DNA, 280 bp, Glycine max
attcaccccacttgatgactctcaagtccaagcagcagtgatttgtgcaaaaaaacttggaattcacatgagagtgcgcagtggaggacatgactatgaagggctctcttatgtttcccttattgagaagccattcatgatcctagacttggccaaacttcgtgcagtgaatgttgatattgcgcgaaacacggcttggatccaagccggtgccactattggtgaagtttactacagaatttcaggaaaagtgcagttcatgggttccctgcaaggcttt

SEQ ID NO: 117529 - DNA, 278 bp, Glycine max
cagcgagtgagcgagcgagcgaggtagggttttcgttgttcccccgtctttgaattcagttcgcgacgatggggtccatccccgatccaggcgagttgagcgagttgactcagccgagcttcgacgagttccagcgccaaacttccctcatgaccagctgcaccctcctctggaaggagctctccgaccacttctcctccctcgagcaagacctcaaccacaaatccgaagccctcaaagcaagattcgcaccctcgacaacactacttccgactccc

SEQ ID NO: 117530 - DNA, 277 bp, Glycine max
gctggttgccacactacaccgatatttccaccaaacccgtttgcgttgttgtttgcgaataaatggcaactaagaggagcgtgggaacgttgaaggagggtgatttgaaggggaagagggtattcgtgagggtcgatctgaacgtgcctttggatgacaaccttaacatcaccgatgacactagagtccgtgctgctgttcccaccatcaagtacttgactggttatggtgctaaaggatcctttctagccatttgggacgtccaaaaggtgtaaca

SEQ ID NO: 117531 - DNA, 273 bp, Glycine max
gagaaagagaaagagagaattcgtaaaccctaatttcggaaagatcggcgatgactgcctccaaggatcgcgagaacttcgtctacatcgccaaactcgccgagcaggccgagcgttacgaagagatggtggaatcaatgaagaacgttgcgaatctcgacgttgaactgacggtggaggagcggaatttgctttctgttgggtacaagaatgtgattggtgctcgcgggacgtcctgaggatcctgtcttccattgagcagaaggaagaaac

SEQ ID NO: 117532 - DNA, 269 bp, Glycine max
aagaactttatcgccatgccagattggtgacctcagctgtgattgcaaaggttcataccattgattggactgtagagctccttaaaactgatactttacttgcaggcatgcgtgccaattggtatggattattagggaagaaatttaaggatacatttgggcatgttggtggagtcatcttgggaggattagtgggtcttaagagaccagaaaatcatggtgtcacatacttctaacagaggaatttgtgactgtttatagaatgcact

SEQ ID NO: 117533 - DNA, 272 bp, Glycine max
ctcgttttttctcagaaccttctgaggttaaagcaaaaaacaaagagagagagagagagaaaatgatgaagccatcgatgctcagatctctccactccgccgccacccgcggcgcctctcatctcttccgccgtgggtacgcctccgagccggtgccggagcgcaaggtagccgttctcggcgccgcggcgggatcgggcagcctctctcccttctcatgaagctcaatcccccgtttcgagcctctccctttacgatatcgccggaactcc

SEQ ID NO: 117534 - DNA, 282 bp, Glycine max
atttatcaactcactcatcaatctcgtttgttctcactaactattacttcatcatgtcgtcgagcacagttggtcaagtcatcaaatgcaaagctgcggtttcatgggaggcagggaagccacttgtgattgaagaagtagaggtggcaccaccacaagctggtgaagtgcgtttgaagatcctctacacctctctttgccacactgatgtttacttctgggaagccaagggccaaactccttgtttcctcgtatatttggtcatgaagctggagggattgt

SEQ ID NO: 117535 - DNA, 285 bp, Glycine max
gggagaagctcgctcaggctgccatggggaacgcttttctccttcagggcggtgattgcgccgagagcttcaaggaattcactgccaacaacatccgtgacaccttccgtgtcatccttcaaatgggtgtggtcctcatgttcggtggccaaatgcccgttatcaaggtggggagaatggcaggtcaatttgcaaagccgagatccgattcatttgaggagaagaatggagtgacgctcccgattacaggggtgataatgtgaatggcgatgcatttgacgcggc

SEQ ID NO: 117536 - DNA, 276 bp, Glycine max
cttcaagggcaagtaccatgatgagcttatcgccaatgctgcgtacattggcactcctggaaagggtattcttgctgctgatgagtcaacagggacaattggcaagcgtttggccagcatcagtgtagagaacattgaatccaacaggcgagctcttagggagctgcttttcactgctcctggtgttcttcaatatctcagtggtgtcatcctctttgaggaaaccctctaccagagacagctgcaggcaagccctttgtgaatgtcttgaaggaa

SEQ ID NO: 117537 - DNA, 271 bp, Glycine max
ctctccaacatgttttgagaaaagcagaagagtatctgatttcagttgctcctgaaacaccctactcggaattcgagaacagattccgggagattggtctggagaggtggtggggtgacactgccgagcgtgtcctcgagatgatccagcttctcctggaccttcttgatgcacctgacccttgcaccctcgagacattccttggaagagtccctatggtctataatgttgttacctttctccccatggttactttgcccaagataatgtc

SEQ ID NO: 117538 - DNA, 270 bp, Glycine max
caataaaagacaacacagagagatgcgtcttaataaacgctcttctctgaaaaacctgatttcttctctacttctcttctctttcgtttcgatcttcgatctctgaaaatgagagagtgcatttcaatccacatcggtcatgccggtattcaggtcggaaacgcctgctgggagctctactgcctcgaacacggcattcagcctgatgggcagatgccaagtgataagactgttggtgatgtgatgatgctttcaacaactgcttcaatg

SEQ ID NO: 117539 - DNA, 277 bp, Glycine max
cttgaggcccctgacccttgcacccttgagactttccttggaagaattcctatggtcttcaatgttgtcattctttctccccatggttactttgcccaagataatgtcttgggccaccctgacactggtggccaggttgtttacatcttggatcaagttcgtgctttggagaacgagatgctccatcgcattaagcaacaaggattggacattgtacctcgtattctcattatcaccgtcttctccccgatgcaatcggaactacttgtggccaacg

SEQ ID NO: 117540 - DNA, 281 bp, Glycine max
ctttattactaacatttcttccattcttagcttttgtttgtcccatcaaatttttgaagatggccaagagaagtgttgctgctaattcttcttttgagagtactagcttggcttctctggatcaaaagttggccatggccaagcgctgctctcatgagggtgcgatggcaggagccaaggcagctgttgctgctactattgccactgccattccaactctggctagtgtaaggatgctacttgggcaagagcaaatctcaatcacactgctcaagctctca

SEQ ID NO: 117541 - DNA, 271 bp, Glycine max
cagccctatccccatcgcaacttttctgaggaagttgctattcttgatggctactttggcaagcttagtgcaggttgctatgcttatatttttggtggccaagacaaatcacagaactggcatgtctactctgcttctgcagattctgtaactccatgcgacaatgtttacactctagagatgtgcatgactggcctggatagagagaaagcacaggttttctacaaagaaaatctgcttcagctgccattatgactgttaattctggcat

SEQ ID NO: 117542 - DNA, 261 bp, Glycine max
ggctcccaagggtttaatctttttggctgtgttatgcttctcagcactgtcactgagtcgttgtcttgcggaggataatggacttgttatgaacttctacaaggaatcatgccctcaggctgaagacatcatcaaagaatcagtcaagcttctctacaagcgccacaagaacactgctttctcctggctcagaaacatcttccatgactgtgctgttcagagttgtatgcttcactgttgctggactccacaaggaggagc

SEQ ID NO: 117543 - DNA, 271 bp, Glycine max
gtttggttacttgaaaatctcgaatcgcttaattttgatttagttttccaccgcaacgcggaacctctttctcgaactggctaactctcaggcaagtggctcggacgctgattccagcaacacgcggctggtggttgcactgtatgacgccctaaactccggcgactccaacgccgtcgtcaagatcgtcgccgccgatctcgagtggtggttccatggtccgccctctcacagtttttgatgcgcatgctcaccggcgactccgccgccg

SEQ ID NO: 117544 - DNA, 274 bp, Glycine max
ggtaaaacgaagcatccgcaattgctttatgaggccaagctctacaatattcttcaaggaggaagtggaatcccgagcataaaatggtgtggtgtagacggggaggataatgtgcttgttatggacttgctgggacctagtcttgaggatctttttgtctactgtggaagagagttcgctctcaaatccgtgttgatgttggccgatcaaatgatgactagaatagaatatgtgattctaaaggattcctacacagggatataaaacctgacaa

SEQ ID NO: 117545 - DNA, 281 bp, Glycine max
ttggaatccaaaaatgagagaaatcatcagcattcacataggtcaggccgggatccaggttggcaactcctgctgggaactctactgcctggaacatggcatccagcccgatggcatgatgccaagtgactcctccttcggtgtagcccacgacgccttcaacaccttcttcagcgaaaccggatccggcaagcacgtccctcgcgccgtcttcgtcgatctcgagcccaccgtcatcgcgaagtccgttgtggcacttaccgtcaactcttccaccccga

SEQ ID NO: 117546 - DNA, 276 bp, Glycine max
gcggaatcagctagaattttctaataatggccaaagacgttgacaaggttacagagcaaggtgaatactccgcgaaggattaccatgacccacctccggcgccgttgatcgacccagatgagctcactaagtggtccttgtacgagccgccatagctgagttcatagcaacactccttttcctttacatcaccgtgttgaccattattggctacaagagacagagtgacaccaaaatccccggtaacaccgagtgcgacggcgttggcattttggg

SEQ ID NO: 117547 - DNA, 278 bp, Glycine max
ttcggctcgaggcggaatcagctagaattttctaataatggccaaagacgttgagcaggttacagagcaaggtgaatactccgcgaaggattaccatgacccacctccggcgccgttgatcgacccagatgagctcactaagtggtcctgtacagagccgccatagctgagttcatagcaacactccttttcctttacatcaccgtgttgaccattattggctacaagagacagagtgacaccaaaatccccggtaacaccgagtgcgacggcgttgg

SEQ ID NO: 117548 - DNA, 212 bp, Glycine max
gtactgtcggctcgagggttctagtaattcagtgctgctagaagatggaaactagtgaatggcatctcgtgcgaagatctagcttcggctctgaatccccctttgcaagagaggcaggaaatgcctctgacactgggtcactctctatttggtgcttggtgcatctggatatcttgctaagaagaagacattgtcctgcacttttccacaca

SEQ ID NO: 117549 - DNA, 262 bp, Glycine max
tggagtgagggtcgtgcgattttcgctagtggaagtccatttgatcctgtagaatacaagggcaaagtgtactattctggccaggccaacaatgcatacatcttccccggctttggtcttgggttggtaatctcaggagcaatcagagtgcatgacgatatgcttctagcagcttcggaagccttggctaaactggtgaccgaggagaactacgaaaagggcttgatttatccaccattctctaacatcagaaaaatttcag

SEQ ID NO: 117550 - DNA, 265 bp, Glycine max
gtggaatgatgtcagtcccttatgacatgggtggtctgccaatccgcgatgctgtgggacagccaatgcccattcaagctttggccacggctcttgcaaatgctccccctgaacagcagaggactatgctcggtgagctttatacccgcttgtggatcagctggaacacgatgctgcagcaaaggttactggcatgcttctggagatggaccagcctgaagttttacatctgattgagtcaccagatgctctgaaggcaaaagtt

SEQ ID NO: 117551 - DNA, 270 bp, Glycine max
ccattttcaagctctcaacgccatctccagctgcttccttatcagaagcgcttcgccccagagattctcgcttcctctccttcaatccttcttccaacgctattaattacaaaattaacctctccgcttccctccgatcattcactccctccctcttaaaacctccttgcggatcaaatgctcccaaacagatgggaatggaagtcctgcaaagaggacagtgcttcatgatctttatgagaaagaagggcagagtccatggtatgataa

SEQ ID NO: 117552 - DNA, 266 bp, Glycine max
cgggttaagcggtgagatttgcgaatctgagaaatggcggattcttctcgggaggagaacgtttacatggcgaaattggcggacagaccgagcgttacgaggagatggttgagttcatggagaaggttgcaaagactgtggaggttgaggagttgacggtggaggagaggaatctcctctctgtggcttacaagaacgtgattggtgcgaggagggcttcgtggaggatcatatcctccattgagcagaaggaggagagcaggggc

SEQ ID NO: 117553 - DNA, 186 bp, Glycine max
acgcgtgcgcgcgcacggaattcgggtcgaggatgaaatgggtcagattctacaggaccaaaccttgtgggagttaaggaatgatggaagaaaagaaatatccgaaagtaaataagaatgcagtagaagagtcctgattccagccgtaaaaattcaaacttgattgagaggagctatctgattata

SEQ ID NO: 117554 - DNA, 261 bp, Glycine max
ggaaaacccacaggcacgctgagcatggaacacagaaccctagaactcaacctggcttcagcaaaggatctcaaagacttgaatatattctcaaagatggatgtatatgctgtgctttcactctccggcgataaaagaccaagactcccgtccacagaaacggtcggcaccaacccaacatggaattttccggtcaagttcacttttgatgaatcggtggcgcggcagaaccgtttggccctcgaaatcaagatccgctcc

SEQ ID NO: 117555 - DNA, 253 bp, Glycine max
ttgaagtctcatgggaaactagtagctgttggggcaccggagaaacctctggaattgcttctcccacctttaattttggggagaaaaagtatagcgggtagttacattggaggaatcaaggagacacaagaatgattaatttcgctgctgaacacaatgttagaccggaaattgaagtaattcctatggattatgtgaacacagcaatggagcgtctccagaaagccgacgttaaatatcgatttgtgattga

SEQ ID NO: 117556 - DNA, 254 bp, Glycine max
  unsure (1)..(254): unsure at all n locations
ttttgatttgtgaaaggaaagcaaacatggttgatcaggtccaacaccctacaatcatggacaaggttgctggtcagctccatctccgatctggtctttcatctggtattagaagttatgatggagcctaccgccacccagctatgtacccttgaccctcttttgggaattactcgaatgctgcattgcagtttcctgtgatgcccacatgcaaagctaccatggatttgtctgctactgcaacanctgcctca

SEQ ID NO: 117557 - DNA, 253 bp, Glycine max
gctactgcttgcaatcccacccatattgaaatttgctgaaatgctttccctcaatgttagatctgtgaattacaccaggggaagtttcatctttcccggtgctcagccctatccccatcgcaacttttctgaggaagttgctattcttgatggctactttggcaagcttagtgcaggaagcaatgcttatattttgggtggccaagacaaatcacagaactggcatgtctactctgcttctgcagattctgta

SEQ ID NO: 117558 - DNA, 259 bp, Glycine max
ctcactccttaaattctcaacgccgctcccactttactccctctctattgcagcatggtgtcttcctcccaacacattctggtcaccggtggtgccggtttcattggcacccacaccgtcgttcagcttctcaagctggcttcagcgtttcaataatcgacaatttcgataactccgtcatggaagcagtggaccgcgtccgccaagtggttggccctctgctttctcagaacctccaattcacccagggcgatctccg

SEQ ID NO: 117559 - DNA, 241 bp, Glycine max
agtgaagctagttgagattcctttcaagcctgctcgagaactactgcaggattttactggagtccctgatgttgttgacctggcttgcatgcgtgatgctatgaataagcttggcagtgattctaataagattatcctctggttcctgttgatcttgtcattgatcattcagttcaagttgatgtagcaaggtcagagaatgcagtgcaggccaatatggagcttgagttccacacaacat

SEQ ID NO: 117560 - DNA, 263 bp, Glycine max
gtcgcaaagagaagagatctgcctcctttttatcaaatctatctcttcttcaagaatagttgaaaatggggctgtctttcaccaagttgttcagccgactgtttgccaagaaagagatgcgtatactgatggtggtctcgatgctgcgggtaagaccaccattctgtacaagctcaagcttggagagattgtcaccaccattcccaccattgggtttaatgtggaaactgtggaatataagaacatcagcttcactgtctggg

SEQ ID NO: 117561 - DNA, 253 bp, Glycine max
gagatctcctgcgaagcagcatatgaaccagggatgtgtgctaggcggctgacacattacatgtatcagcaacaacatagacctgaagataataatattgagttctggagaaagtttgttgctgagtatttgctcctaatgccaagaagaaatggtgtgtttcaatgtatggaagtgggagacaaacaactggagttttccctcaggatgtatggcactgtgaaatatgtaatcgcaagcctggccgtggatt

SEQ ID NO: 117562 - DNA, 252 bp, Glycine max
ttgcaatgctgttaaaaggggccctaagcctatctatctaaaagatattgttgatgctgcaatcaatgattcagcccaaaatggggtctctatagataaatgcctagtttatgaaaacccattggcaagaagagggtagataccaaatggaaggaagggcgtgatatatggtggcaggatgtcattcctcaatatccaactacttgtccgttggagtgggttgatgcagaggatccacttttttctactcta

SEQ ID NO: 117563 - DNA, 253 bp, Glycine max
cttccttttctcttctctgtctaaggggtgccctgagatcacattgaacaatggtgaaggctgtggccgttcttggcagcagtgagggtgtcactggaactattcacttcgttcaggagggaagtggtccaaccaccgtaactggatctcttgctggtcttaagcctggtctccatggtttccatgtccatgccttgggggacactaccaatggttgcctctcagctggatcacatttcaatcctaataacaa

SEQ ID NO: 117564 - DNA, 262 bp, Glycine max
tgagatacatggcttccttaagctccttagtgctgctccttgcagctttaattctatcccctcaagttcttgcaaactatgagaatcccccagtgtacaagcctcccactgagaaaccaccagtttataagccacagttgagaagcctcctgtttacaaacctccagttgagaagcctccagtttataagcctccagtagagaagccaccagtgtacaagccaccagttgcgaagcctccagtgtacaagccaccagttgat

SEQ ID NO: 117565 - DNA, 255 bp, Glycine max
ctcctttctctcttcgtttccgatcgatccaattttcttcccatggctacgatcggacacaacaatctcaatgccaaattggttcttctcggggacatgggtgctgggaaatccagcctcgttttgcgtttgtcaagggtcaatttctcgaatttcaggaatcaacaataggggcagcgttcttttcacagacgctggcagtaaatgacgcgacggtaaagtttgagatatgggacacagcaggacaagagaggt

SEQ ID NO: 117566 - DNA, 255 bp, Glycine max
gccaagggtggcaaaaaccaaaaaggttttgcaccaactattctggcagtcaaagggcagactttgcctgcaactttaggcacagatgaagagaaagacaagactagtaccattctggaatgtgatcatataacaaagctgattttccagaagaatatactgatgccaaattttttgtcatcaagtcttacagcgaggatgatatccataagagtattaagtataatgtgtgggctagtacacaaaatggcaaca

SEQ ID NO: 117567 - DNA, 252 bp, Glycine max
cttcaagccaacctcttcacaactcttcttcgttcctttcttcctctcactataaccatgatcacagtatccgtaagatggcaaaaggagattttcaaagatgcagaacttgacactacccagtctgcttatgtttttaaatgccaattgtatgatttgactggtgtgcctcctgaaagacaaaaaattatggtcaagggtggtcttttgaaggatgatgctgattggtcaacagtaggggtgaaagagggt

SEQ ID NO: 117568 - DNA, 250 bp, Glycine max
gtgagtcactcttcttgcataacccagatctgcagacaatatgcgaagaactggcttgttacatttgttatgccttgtcattgctttagtaagtgtgcaagcagaagatgcgtataagtattacaatggacggtgacttatggaactatttctccattgggtagtccccagcaggttattcttatcaatggtcagtttcctgggcctagacttgacttggtgactaatgagaatgtaattctcaacctta

SEQ ID NO: 117569 - DNA, 254 bp, Glycine max
cccaatatcttttccgggggtacaatacaaattccgaaccccccatattcctccctcgccgatcgctcacgtcagatttgtttttttttttctttctgttttggaatgcgcaattcttagtccaacgtccaaagtacgagaatttcaggtcaacgaaagccttcctttctcgatttctctttcatggaaaggttctggtccagatgcacaggacaatggatcagaaaatcagcagagttcccttgtttttccta

SEQ ID NO: 117570 - DNA, 260 bp, Glycine max
atatcatcaaagtactcaaattagcatggctgtcatggttgcattcttgaatttgatcatcatcttttcagtagtctctacaacaggcaagtcactgagcttaaactactatgcaaaaacatgccctaatgtggagttcattgttgccaaggcaataaaggatgccactgctagggacaaaactgttccagcagcaattctgcgaatgcacttccatgattgtttcgttagggggtgtgatgcctctgtgctgctaaatt

SEQ ID NO: 117571 - DNA, 254 bp, Glycine max
  unsure (1)..(254): unsure at all n locations
tttctctctttctctctgcagcaacaagatgtggtaccaaccattgggaataaccgatttggaaagcggttctcgcccgctgtatccgatgatgcttactagccccacaactgcgctggtctttcatcgaaaagtatactccataatcgccatacagttgctcgtaaccatcgtcgtcggcgccgtctatcactacgtccgnccaatcagcgtcttcttcgccaccaccggcgccggattggctctctacatcg

SEQ ID NO: 117572 - DNA, 252 bp, Glycine max
cgaccatgaacatggcgatcgtgcttctgttcatggttttcgcagtttcatcagctttagacatgtcaataatatcacatgacaacgctcatgcggatagggccacgaggcgcaccgacgacgagtgatgtcaatgttcgaggagtggctggtgaaacacgacaaggtgtacaacgcgctcggtgagaaggagaagaggtttcaaatcttcaagaacaatctgcgctttatcgatgaacgaaactctctgaa

SEQ ID NO: 117573 - DNA, 251 bp, Glycine max
tatgtctatggctgatgttggtgctggaggtgaagatgccattgttacatttgagggtattgctatccttacgccaagaggacgatacagtgttgagttacacatgtcattcttgcggcttcaaggacaggctaatgatttcaaaatccaatatagcagtgtggttcgcctatttttacttcctaagtctaatcaaccacatacctttgtcattattagtcttgatccccctattcgaaagggacaaactt

SEQ ID NO: 117574 - DNA, 254 bp, Glycine max
attcaccccacttgatgactctcaagtccaagcagcagtgatttgtgcaaaaaaacttggaattcacatgagagtgcgcagtggaggacatgactatgaagggctctcttatgtttcccttattgagaagccattcatgatcctagacttggccaaacttcgtgcagtgaatgttgatattgcgcgaaacacggcttggatccaagccggtgccactattggtgaagtttactacagaatttcagagaaaagtg

SEQ ID NO: 117575 - DNA, 262 bp, Glycine max
tactgccaagcttgaggaactcaaaaagcatggtgatccaattgatgagcgttacaaagaattcatggagaggggtactataatcgaacagtttgtctattgtataaatagttacagacaagttgcaatgtcgaattatcccagatttgagcacattgacattaacgagaaacagaaggtcataaatgaatgtgttgaagctgaaaagtggtttaatgagaagcagcagcagcagaactcacttccaaaatatgccaaccct

SEQ ID NO: 117576 - DNA, 254 bp, Glycine max
ctcctaaaacatctcaatgggttcttcttctattacaacatcgcccgcaaccatgaccatggctgcgatcgtgctcctgttcacggtctttgccgtttcctccgccctagacatgtcgataatctcgacgacagcgcccacgcggacaaggccgccacgttgcgcaccgaggaggagctgatgtccatgtacgagcagtggctcgtgaagcacgggaaggtgtacaacgcgctcggcgagaaggagaagcgctt

SEQ ID NO: 117577 - DNA, 252 bp, Glycine max
attgattgttgtaagactttgtaattgaggtgctgcaatggcttcaagtcaggaagaggtgactcttttgggagtaattggaagcccatttgcttgcagggtgaagattgcccttaagttgaaggagttgaatacaaatatgtggaagaaaatttggccaacaagagtgatttgcttctcaaatccaacccagttcacaagaaagttccagtttggattcacaatgagaagcccatagcagagtctcttgtg

SEQ ID NO: 117578 - DNA, 250 bp, Glycine max
gtgcagcaattgttgcaggatttcttcaatggcaaggagctttgcaagagcattaaccccgatgaggccgttgtgtatggagcagctgtacaggctgctattttgagtggtgagggcaacgagaggtgcaggatttgctgttgttggatgttacacccctttctcttggtttggaaactgccggcggcgtcatgactgttctcattcccaggaacacgactattcccaccaagaaggagcaagtgttctc

SEQ ID NO: 117579 - DNA, 250 bp, Glycine max
cgcaagcaaaaagaaagaatcccaggcgaggagaaagatggaggggaaggagcaggatgtgtcgttgggagcgaacaagttccccgagagacagccgattgggacggcggcgcagagccaagacgacggcaaggactaccaggagccggcgccggcgccgctggttgacccgacggagtttacgtcatggtcgttttacagagcagggatagcagagtttgtggccacttttctgtttctctacatcacc

SEQ ID NO: 117580 - DNA, 246 bp, Glycine max
  unsure (1)..(246): unsure at all n locations
gaaggtattggtcacttgctctaggcgcattaattacaggtaccgacatttgatgttgaatgtggtgtacttttgctcattgcaagaaggaaaacaaggttgaattacaggaaagtaaagggngaaaatgaangagcttgttgagctaaaaaattgttgctcttgtttattttttgagtgcaggaagcaaaaagatgtttatctntggatagcaaaatgccctaatggctcatctgtaaaattttt

SEQ ID NO: 117581 - DNA, 248 bp, Glycine max
ctttttctccttctaattctttgttacccttcacctattacaagccactcacactaacacaaaaacatggaactaagcaccatgttttgcttgtgtgcttcgtttctcttcattgttctcttagggcactcatcaaaccttattatgtctccaaacgccgtgacttgccactcccacctgtctccatgggttggccttacataggagaaacctttcaaatgtattctcaagatccaaatgtcttcttt

SEQ ID NO: 117582 - DNA, 275 bp, Glycine max
gagaaacaaagcagcacccatttggatcctctcttctcttctttgatctccgttaccctttttgttttctcaacagagagagagagagagaatctttcgaagttcgtttgcgtgtgttgtgtggtcagtcaccgatggcagcaccacctgcgagggcacgtgccgattacgattacctcatcaagcttcttcttattggcgatagcggtgtgggaagagttgtctgcttttgcgattttctgatggttccttcacaaccagttttatcaccacca

SEQ ID NO: 117583 - DNA, 284 bp, Glycine max
tcggctcgagctagtttatcgtgaggagaatatgaagttgtttgtattctttgatgctgcagtagttttcgtagcatggccatgccatggcgcaggctatcaaaggttccctctccgaatgaaaactggctatggtgagcgttcttcggaggtaaaatgcgcaagttttaggcttgctgtggaagcacacaacatctgagcctttaaaaccattcctgaagagtcgttgaaccaacaaaggactacattaatggcgaacaatttagatcagactctaaaacagt

SEQ ID NO: 117584 - DNA, 270 bp, Glycine max
  unsure (1)..(270): unsure at all n locations
gtttaccctttgttctctcctcttccacacaacatactacacacnatgaccatgatatacaccttactctttctttctttcacttacctatatgctattaagacctccaccatcatcaactacaccgacaatgagggtcatggccatgtacgaggagtggttggtgaagcaccaaaaggtgtacaatcagttgggaaagaaggacaagagattcaagttttcaaggacaacttagggttcatacaagagcacaacaacaatctagacaac

SEQ ID NO: 117585 - DNA, 273 bp, Glycine max
gatcttcctaacatcgacctccaatatgtagcttccagccaagataacgcaaatagatgggtgcaagacaatgtcatcgacttttggaatgtcagattcaggtacattactgtgggaaatgcagtgaagcctcgggactcatttgcacagtatgtagtgcctgcaatgcaaaacatcctcagagcaatttctaatgctggccttggccacctgtcaaagtttccactgccactgagtctggtgcattggcagtctcataccctccatcaagag

SEQ ID NO: 117586 - DNA, 274 bp, Glycine max
ctgggcttcgtgaagcttcatccattgcagttcatcctggaggtgataatttaattgtcggtagcaaagaggggaagatgtgttggtttgacatggacctttcatctaaaccgtataaaattcttaagtgtcacccaaaagatatcaacaatgtcatctttcatcgctcgtatcccctatttgcttcatgttcagatgactgcactgcatatgttttcatggaatggtttattctgatctcaatcaaaatcctcttattgttcctttagaaatt

SEQ ID NO: 117587 - DNA, 274 bp, Glycine max
ctccgaacattgaacactgtatgggctcagcacttgagtgaggacctgaaacgtaggttttataagaactggtgcaagtccaagaagaaggccttcaccaagtactcaaagcagtatgaaactgaggagggaaagaaaaacattgaggcacagctggagaaactgaagaagtatccctactgtggttcgtgttttggctcacacccagatcaggcaaatgacagggttgaagcagaagaaagcccatatcatggaaattcaggttaatggtggt

SEQ ID NO: 117588 - DNA, 274 bp, Glycine max
cgaatagattatcctaagtctttgggaatagtgctgcaatggcttcaagtcaggaggaggtgacccttttgggagctactggaagcccatttgtgtgcagggttcatattgccctcaagttgaagggagttcaatacaaatatgtcgaagaaaatttgaggaacaagagtgaactgcttctcaaatccaacccagttcacaagaaggttccagtgtttattcacaatgagaagcccatagcagagtctcttgtgattgttgaatacattgatga

SEQ ID NO: 117589 - DNA, 271 bp, Glycine max
gaagtgaccccagtatacttagccatatctttacttcccaaaacttgctctacaatgagtgtccatcgttcttttgcaagaaacaaggatatatcaaaagtaggacgcagaggtatccattgcatgcagaaactatgtgcagaaaaaatatctcctgattcactagagaaggcccaaaatcgtgtgatagatgctgcactcacacttgttcgagaaaatacaaggcttaagacagaactcgtgcatagtttgggaggtgctgtggcaactt

SEQ ID NO: 117590 - DNA, 277 bp, Glycine max
tgttttcttgaatacaacccagtatacaagaaaactccagtgcttgtccataatggaaaacccttatgtgagtccatgcttattgttgaatacactgatgagatttggtcacataattcattacttcctgctgatccctacgagagagctctggcaaggttttgggttaaatatgctgatgatgacatgttttctgcagttattgcattcttccttagcaataatgatgaagagcgagaaaagagcatagagaagatatgggagcatctcagggttg

SEQ ID NO: 117591 - DNA, 268 bp, Glycine max
  unsure (1)..(268): unsure at all n locations
cttgctgctgatgagtcaacagggacaattggcaagcgtttggccagcatcagtgtagagaacattgaatccaacaggcgagctcttagggagctgcttttcactgctcctggtgttcttcaatatctcagtggtgtcatcctctttgaggaaaccctctaccagagcacagctgcaggacagnnctttgtgaatgtcttgaaggaagctggtgtgcttcctggcatcaaggttgacaagggcacagtcgagcttgctggaactaatg

SEQ ID NO: 117592 - DNA, 274 bp, Glycine max
aaaaggacgtcttgcacaactgtgcttactctagcttaccaaagtcttggggtagtatatggtgacctcagtagtgtccctatttatgtttacaagacctcattctcagggaaattgagcctcaaagaagacaatgaagaaatttttggggtgctttcatttatcttctggacatttaccattattggtctcttcaaatatgttttcattgtgatgtctactgatgacaatggggaagtttgagcaattttgctgaaaatgttgaggttcactt

SEQ ID NO: 117593 - DNA, 272 bp, Glycine max
tacgtaataagttctatcattgaggaagtttcctgtgcatcgtctccgaaaatgaacgacgcagatgtctcaaagcaaatccagcagatggtgcagttcatccgccaggaagctgaggaaaaggccaacgagatctctgtctccgccgaagaggaattcaatatcgagaagctgcagttggtcgaagccgacaagaagaagatcaggcaagatacgaacgcaaagagcgccaagttgaaattcgcaagaagattgagtactcgatgcagcta

SEQ ID NO: 117594 - DNA, 269 bp, Glycine max
gaagccaacaatggtaccatctgctgcgacctctctttctttttctctcagattcttgcgcggtttatcatgggggatagtcagtattcgttttctctcaccacatttagcccttctggaaagcttgttcagattgagcatgctttgacggctgttgggtctggacaaacgtctttgggaattaaagctgcaaatggagttgtcattgcaccgagaagaaattaccatctatattggttgatgaagcatcagtccagaaaattcagtta

SEQ ID NO: 117595 - DNA, 268 bp, Glycine max
ccgcaaggagttccgcactgcgctaaggcctgcggatgcgagatcacgcgagtgaggaactccttgcggacgccggggagcgccaggaggcagtggtgcaccgggagctggacctcgccgacgatgtagaggcggtggcggaggaggagatcgtagttgcggtgaattgagccgccgagggagttttcaaccggcaaaaccgcgcgatccgcgatccagagctccaccgcttgaaacgcagcctcgaactggtcgcacggaatccagg

SEQ ID NO: 117596 - DNA, 264 bp, Glycine max
ggaaaatgaagaacaatgccattgtttgcaacattggtcactttgacaatgagatcgacatgcttgggctggagaactaccccggcgtgaagcgcatcaccatcaagccccaaactgacagatgggtcttccctgagaccaacaccggtatcattgtcttggctgagggtcgattgatgaacttgggatgcgccactggacaccccagtttgtgatgtcctgctccttcaccaaccaggtcattgctcagcttgagttgtggaa

SEQ ID NO: 117597 - DNA, 271 bp, Glycine max
caaagaacgaagacgagacattagcagcgttaaaaaaagagagaagaaaaatgcgaaagttcgatccatggcccgttttcttcaagcgcgagtggaaacgcaactggcccttcctcgttggattcgcagtcaccggagctctaatcaccaaactttcccttggccttaccgaggaagaggctaagaattccaaattcgttaaggcgcacaaaggtgacttctgaatcgtgacatctgcctggctttgcattttatgttaggtttgtcaaga

SEQ ID NO: 117598 - DNA, 268 bp, Glycine max
gtttttactttgacggtttctagagagagaaagtttgttatagagagagaaagcgcgctgctgcttcttctgctgctgcttcgacagtgagtagagagagagaagcgctcttctccgtaccgtttctagagagagaaactgatggccggagttaatccgaacggcgtcgccgattttccggcgactccaacgcacggcggacagttcattcagtacaacatattcgaaaacctcttcgaggttacggcgaagtaccgtcctccgatca

SEQ ID NO: 117599 - DNA, 266 bp, Glycine max
aattgatagaggcagtattgtggttgctaaggccagaatgtgaaagtgctacttttgcagaactatactgccgagagtggaacttggggaaaattcaccaatttctgtgttggattggaatttggaataaatgtcctcaataattgaagtattaaacgggccattgaatcattctgctatttttgccttcataatttcttatatttctacttgttcagactcttggccatgtgggcaaggagaacaaggaaaacttgtttttctgt

SEQ ID NO: 117600 - DNA, 267 bp, Glycine max
caaaacctgtggtactactaagctattgcttgcaatcccacccatattgaagttcgctgaaatgctttcccttaatgttaagtctgtgaattacaccaggggaagtttcattttccccagtgctcagccatatccccatcgcaacttttctgaggaagttgctattcttgatggctactttggcaaacttggtgcaggaagcaatgcttatattttgggtggccaagacaaagcacagaactggcatgtctactctgcttctgcaga

SEQ ID NO: 117601 - DNA, 265 bp, Glycine max
cactttccacttgtctccgaattagttatcttgagaaacattattcccattgctatatattatggctagcatgaaggttacatgggtggttgtgatcatgtgcatggccgtggtgggtgcaccgatgatggcgcaagccatgacatgcaatgatgtgacggtgaacatggcacagtgcctatcctacctgatgcagggaggaacacttcaacactttgctgcagcggagtcaagaacattcttggctctgctgtcaccaccgttg

SEQ ID NO: 117602 - DNA, 259 bp, Glycine max
cactttctttgcatagggcaacctcctttctctgtgactctgagtatcgtatcgttttattattatttctaattctctcttatcaggtccattgaatatgtctccgtcgttggatcttcctcccaagggtggcttcagttttgatctatgccgaagaaacgcaatgcttcaaaacaagggcctcaaagccccaacctttctcaaactggcaccactattgtcggtttagttttccaggatggtgtcattcttggtgctg

SEQ ID NO: 117603 - DNA, 265 bp, Glycine max
gtgttgtgtgtgactaggtttctgccagccctggggataatgggtaattgtctagattcttcagctaaagtagaagcagctcacagttccagaaccccttctggaatttcaaaaactagtccttcatctgttccttccaacttatctattctgtcatatagtgaagcaagtgatttctcaaatcttcccacaccgaggtccgagggtgaaatcttgtcttccccaaatcttaaggcctttacctttaacgagctaaagaatgcca

SEQ ID NO: 117604 - DNA, 266 bp, Glycine max
gcaaagggaccacaaatttttaagaattgctgttgaagaagcgtataaaggggtagactgtgaagatgggggtccctttggtgtcattatagtttgtaatgatgaaattgttgctagatgtcacaacatggttctgaggaacacagaccccactgctcatgcagaagtcactgtaataagaaaggcttgtgaagctaaaccagatagaactttcagactgtgaaatatatgcttcttgtgaaccttgcccaatgtgctttggagca

SEQ ID NO: 117605 - DNA, 264 bp, Glycine max
gcaagaatggcacttcgttgcttggtgatgtccctttctgttctcttcactcttggtcttgcgagagaaagccatgccagagacgaagatttttggcatgctgtttggccaaacactcccattccaagttcatcgcgagatcttctaaagcatggccctgcaagtgtagaaatcgatgatcaccctatgcaaattgaagaaacacgtacccgaaaaccttcttctataaagaagaccttcatccaggcaaaacaatgaaagtac

SEQ ID NO: 117606 - DNA, 263 bp, Glycine max
atgggtctggcgcgttggaccacaccaaggaggtggacaccatcaacctcaagtttgcagaggcgagggaagagatagagatggcgttggagtccaaagataccgtttatttcgacgaggaagccgagtgtgcacgcgccgccgtcaacgaggttttgggcatgttcgagggattgttggctaagttgccagagagggaaagaggggctctgcagaggtctatgggtctcaagattgaacaattgaaagctgaacttgcacaa

SEQ ID NO: 117607 - DNA, 258 bp, Glycine max
aggaatcgagagctccaagtgggccatttttggtaagcagaactggcgatgcgggatgaaccggaagctgggttacggtgtgcaactgcgcgctaacctagaccccacaaagggtgttggtcggttaagacagcatgactgtggtcatggaagtcgaaatccgctaaggtgtgtgtaacaactcacctgccgaatcaactagcccgacaatggatggcgctaaagcgtgcgacctatacccggacgtcggggcaagga

SEQ ID NO: 117608 - DNA, 261 bp, Glycine max
ctgtctctgtgtttgcggctgaggattccgaatgagcgacgttctaacgttctcgcaaagtttaagtcatcatgggtaaggagaagactcacatcaacattgtcgtcattggacatgtcgactctgggatgtcaactaccactggtcatttgatctacaagcttggaggtattgacaaccgtgtgattgagaggttcgagaatgaggctgactgagatgaacaagatgtcattcaagtatgcctgagtgcttgacaagctc

SEQ ID NO: 117609 - DNA, 258 bp, Glycine max
ctcggccgggttcgacccggttcatctcgggtccaacgcgttcaagcaagcgagtatgctacttgctctattcgcaggcggtgacggctatagggttgaggagaataacggctgcctcatgcttggctggcacactcggccactcatcgctacctccgcctggaagcttccctccccgaacgacttgcactgtaaactgtaattaattggctcctggatgggtggtaaataataaaaaatggtttggttgaacttgtt

SEQ ID NO: 117610 - DNA, 262 bp, Glycine max
cagaaatgtattgaatgtgtacctgaagatgcaatcaactttattgtctcaactttttttgatcaagttgtgacactatcaacccatccatatggttgccgggtgatacagagagtactggagcattgcaaagaccctaacacccagcaaaaagttatggatgagattttaggagcagttagcatgttagcccaggatcagtatggcaattatgttgtccagcatgtacttgagcatgggaaacctcatgagcgatccgcca

SEQ ID NO: 117611 - DNA, 262 bp, Glycine max
caaagaacgaagacgagacattagcagcgttaaaaaaagagagaagaaaaatgcgaaagttcgatccatggcccgttttcttcaagcgcgagtggaaacgcaactggcccttcctcgttggattcgcagtcaccggagctctaatcaccaaactttcccttggccttaccgaggaagaggctaagaattccaaattcgttaaggcgcacaaaaggtgacttctgaatcgtgacatctgcctggctttgcattttatgttagg

SEQ ID NO: 117612 - DNA, 263 bp, Glycine max
caaagaagacatgctatgttcaatttcctcagagatttgacggcattgacttgcacgatcgatatgccaatcgcaatattgtgttctttgatatcaacatgaaaggtcaggatggtgttcagggcccagtctatgtgggaactggttgttgtttcaataggctagctttgtatggttatgatcctgttttgactgaggaagattggaacctaacattattgtaaagagttgttgcggttctagacagacgggcaagggtggca

SEQ ID NO: 117613 - DNA, 261 bp, Glycine max
ctgcggttgctccatcacctaatcacttccccacttcccctgtaaatcacgtttagttcgcacaaggttttaaaaaatggctgatgctgaggacattcaacctcttgttgttgataatggaactggaatggtcaaggcgggttttgcaggtgatgacgctcctagggccgtgttccccagtattattgggcgaccacgccataccggtgtaatggttgggatgggtcagaaggatgcttacgtgggtgatgaagctcaatc

SEQ ID NO: 117614 - DNA, 257 bp, Glycine max
attcgagttggagcacggtttcgtgtaccgtgagcacaacaggtcacctggatactatgatgcacgctactggaccatgtggaagctgcctatgtttggctgcactgatgcttctcaggtgttgaaggagcttcaagaggctaagactgcataccccaatggcttcatccgtatcattggatttgacaacgttcgccaatgcagtgcatcagcttcatcgcctacaagcccccaggcttctaagtcattgaaaaatt

SEQ ID NO: 117615 - DNA, 260 bp, Glycine max
agcactgttcttcagactgagggttcttttccagcgttagtaaataggttattggtaatcaaatccgagtcccttgagttctctcctgtagaaaatgcaatcggaatgattgaaacacgaactgctgccttaagaaatgagcttgaagagcctcgaagttcagagggggatcaacttccaagactccagagtctgcaaagaatcctacaaggcagtgttgcagtacaagtgaatagtggagtcttgagtgtctgcacagc

SEQ ID NO: 117616 - DNA, 252 bp, Glycine max
  unsure (1)..(252): unsure at all n locations
gtatgcctgggggaggcttcccaggagctggtggcatgcctggaggggtgcctggaaacattgattttagcaaaatcttgagtgaccctgaactgatggcggcatttagtgatccggaggttatggctgctcttcaagatgttatgaagaaccctgctaattttgcatggcaccaatcaaatccaaaggtaggtcctgtattgcgaaaatgatgaccaaacttggaggtggtnccaagtgaatacttttaga

SEQ ID NO: 117617 - DNA, 263 bp, Glycine max
aaggaaaacaaggaaggcttggaattgctgaaaactgccatcgccaaagctggttacacaggcaaagttgtcattggaatggatgttgcagcttctgaattctacaaggaagacaaaacatacgatttgaacttcaaggaagataacaatgatggctcccagaggatctctggagatgctttgaaagatctgtacaagtcatttgtgtcagagtacccaattgtttcaattgaggatccatttgaccaggatgactgggagca

SEQ ID NO: 117618 - DNA, 251 bp, Glycine max
agctatggaagatgcatgattacagaagagtcagattgatgagattgtgcttgttggtggcagcataaggattccaaaggtacaacagcgtttgaaggactactttgatggaaaggagctaaacaagggtgtcaatcctgatgaagcagttgcctatggtgctgcagtgcaatgacgcattttgagtggtgagggtggtgaagataccagagacatccttctcctggatgtggctcccctcactctcggaa

SEQ ID NO: 117619 - DNA, 253 bp, Glycine max
accagatgaagccgtctcaaaatgtacagcatgtggtactgattttggggcttttgttcgcaggcatcactgtaggaactgtggtgatattttctgtgacaaatgtacatatggtagaattgctctgactgctgatgagatgctcagcctgtacgagtttgtgaccggtgcatggcggaagtgtctcagcggctgactagtgcaaaagagtcatcaagtaaacctgcattgccgcgtcctgaggatcttgcaa

SEQ ID NO: 117620 - DNA, 253 bp, Glycine max
gtacaagaatgctaatgcatttcacaggagttacttagaaatggagaaacagttcaaagtatttgtctacgaagaaggggaacctccagttttccacaatggaccttgcaaaagcatatactccatggagggaaatttcatccatgctattgagatgaatgaccaattccgaacaagggatcctgagcaagcacatgtgtttttcttaccttttagtgtagcaatgttggtgcaatttgtctatgtacgtgac

SEQ ID NO: 117621 - DNA, 248 bp, Glycine max
caaaaacttaagttcattccttgtgttttgctttcttcctcaaaaccaaacatgtcgaacacatgcggcaactgcgactgcgctgacaagactagctgcaccaagggaaacagctatggtgttattgtagagactgagaagagttacatcgagactgttgtcatggatgttccagcagctgagcatgatgggacgtgcaagtgtggcactaactgcacttgcacggactgcacctgtggccattaagg

SEQ ID NO: 117622 - DNA, 243 bp, Glycine max
accagaccctgatgtcaagctgatagcttaccaaggagaatctccagatgaacaagcattagcttatgctgccgccgcctatggttttatgctctgagagagaacctctggccatatagtcattgatattcatggacaggacaaaagttcaatgtcttggggttacctgaatttgacagtgaccggaagcgaatgtcagttatactgggggacctgacagttctgtgaaagttcctgtcagag

SEQ ID NO: 117623 - DNA, 247 bp, Glycine max
gcgaatccctctctctatctctcacacacactttctctctctctctctctcacccagatcttgtagcaatggcgagcgctcccactccacgcgaagagttcgtgtacatggcgaagctggcggagcagagccgagcgctacgaggagatggtggagttcatggagaaggtctccgcctccgccgagagcgaagagctgaccgtggaggagcgtaacctcctctccgtcgcctacaagaacgtgatcg

SEQ ID NO: 117624 - DNA, 241 bp, Glycine max
cgatcttggagggcaacctaggttccgcagcatgtgggaacgttactgtcgtgccgtttctgctattgtttatgttgttgatgctgccgatccagataacctgagcatatcaagaagtgagcttcatgatttgctgagcaaaccatcattgggtggcatccctctgttggtattagggaacaagattgacaaagcgggggctctgtctaaacaagcattgactgaccaaatggatttgcag

SEQ ID NO: 117625 - DNA, 248 bp, Glycine max
cctttgttcactcttcttctcttgcggctaaggttttagcgcagcttcttcgagatttaaggaagatgggtatggaaaaggttcacatcagtattgtggtcattggccatgtcgactctgggcaatccactatcactggtcacctgatttacaagcttggaggcattgacaagcgtgttattgagaggtttgagaaggaagctgctgagatgaacaagaggtctttcaagtatgcctgggtgctggac

SEQ ID NO: 117626 - DNA, 252 bp, Glycine max
ctgcaaccgcttgggtccaagctggtgcaacacttggtgcagttcattatagacttgctgagaagagtaaaacccatgctttcccagcaggggtttgtcacacagttggggtgggaggacacataagtggtggtggctatggcaacatgatgagaaaatatggtctcctcagtggataatgttattgatgcacaaatggttgatgttcaaggtagactgcttgatagaaaatccatgggtgaagatctcttt

SEQ ID NO: 117627 - DNA, 248 bp, Glycine max
gtagattacaacttaggaattaaggggcgatgtgttgtggctgcgattaacaattacacaacgcagctccttgaatatggcagtgacactaaatctatatataacctcacgcaatctctattcttcctttcacattttatgggggacatccatcagcctcgacattgtggctttctctcagacaatggaggcaatgcaattactgttcgctggtacaaaaggaagcaaaatctccaccatatttggga

SEQ ID NO: 117628 - DNA, 243 bp, Glycine max
cgggagtcagagaaaccctaggtaagaagaaaagatgccggctggccatggtttgagatcccgcaccagagattccttctctcgtcctttcaggaagaagggaaccatcgccctcaccacatacctgagaactaccacgtcggcgactatgttgacgtcaaggttaacggtgccgttcacaagggaatgccccacaaattctaccatggccgcaccggacgcgtctggaatgtcaccaaacgt

SEQ ID NO: 117629 - DNA, 244 bp, Glycine max
gcaccaacagcatcggcggcgacagtcactctccgacgacaacacttccgcggcgaaaaatgtctctggtggcgaacgaggatttccagcacattctgcgtgtgctgaacaccaacgtggatgggaagcagaagataatgttcgctatgacctccatcaagggtattggaaggagattcgccaacatcgcttgcaagaaggccgatgttgacatgaacaaaagggctggtgagttgagtgccgc

SEQ ID NO: 117630 - DNA, 247 bp, Glycine max
ctctgttaaagtttgcattttttttgggtgggttgatagtactgtgcaagctttggaacttcttcacaagctgctacttcaatggccactgaagaggttaacaaacctcaatcgcttcctccataccctgagatgatagtgaaagcacttgaagccttgaatgaggctgatggatcgcataaatcagcgatatcaaagtacatagaaaccacctacggtgagttgccagatgaaactgttttgggga

SEQ ID NO: 117631 - DNA, 247 bp, Glycine max
attaacctttctcattccccatctcctcaccttattcagccactgctaatttctagggttccgaaatggacgctggcggaaagatcaagaagggcgccggaggaagaaagggcggcggccctaagaagaagccggtttcaaggtccgtcaaggccggtctccaattccccgtcggaagaattggccgttatttgaagaaaggaaggtacgcccagcgtgtcggtaccggtgctcccgtttacttggc

SEQ ID NO: 117632 - DNA, 249 bp, Glycine max
attgaatctcagaattctctaaaagagatctttttctgctctttgaagaaagaagggtctttgcttgattttggagatgtctctgctctcagatctcatcaaccttaacctctccgataccaccgagaaggtgatcgcagagtacatatggatcggtggatcaggaatggacctgaggagcaaagcaaggactctcccaggaccagttagcgacccttcagagcttcccaagtggaactatgatggttc

SEQ ID NO: 117633 - DNA, 247 bp, Glycine max
ctcacaagggagtgtgttcaacatggctgaagaattctgtgccattggcgacaagctaggactgcagttgggctcctatttttgttaggacgtccaactttagactccctgctgataataaagtgcctataatcatgattggtccaggcactggattagctcctttcaggggtttcttgcaggaaagattagctctgataggagggggagctgaacttggcccttcagttttattctttggatgcag

SEQ ID NO: 117634 - DNA, 246 bp, Glycine max
  unsure (1)..(246): unsure at all n locations
cgcaaaatgaagacgatcttgtcgtctgagaccatgaatattcccgacggcgtgagcatcaaggttcacgctaaggttatcgaggttgagggccctcgtggaaaactcgtgcgagacttccagcatnctgaacttggacttccaacttattaccgacgatggcggtaaaaggaagctcaagattgattcttggtttggttctcgtaaaacctccgccgccatccgcaccgccctcagccacgttga

SEQ ID NO: 117635 - DNA, 242 bp, Glycine max
atcactacgaaactgctcgtggtgtacagaaagtgcttcagaactacaagaatcttcaagatatcattgctattttgggaatggatgagctcagtgaagatgataaattgactgttgcccgtgcccgtaagattcagcgattcttaagccagcctttccatgttgctgaagtcttcactggtgccccaggaaaatatgttgagttgaaggagaacgttgccagcttccagggtgtgttggat

SEQ ID NO: 117636 - DNA, 240 bp, Glycine max
acattgaattcaaaaacttaagttcattccttgtgttttgctttcttcctcaaaaccaaacatgtcgaacacatgcggcaactgcgactgcgctgacaagactagctgcaccaagggaaacagctatggtgttattgtagagactgagaagagttacatcgagactgttgtcatggatgttccagcagctgagtatgatgggaagtgcaagtgtggcactaactgcacttgcacggactg

SEQ ID NO: 117637 - DNA, 237 bp, Glycine max
aacaatcctactggtgctgcggcaacaagggaacaactgaccccactcgttcagtttgctacggacactggttctatagtaatccatgattcagcttatgcaatgtatatttctggtgacaaccctcgctctatttttgaaattcctggagccacagaggttgccatcgagacttcatcatttagcaagtatgctgggttcactggagtccgattgggttggactgtggttccaaag

SEQ ID NO: 117638 - DNA, 243 bp, Glycine max
gttgcaatgcaagagcagggttagcaacgaggttgtgtacacgaagaaggggtacaccgactcaaccggagcatacacaatgtacgtggatgaggatcacgcagatcagatctgcagtgccaagcttgtaagcagccctcaccctcaatgcaaggaagtcaccccaggccgcgacgaagccgtcgtgattctcacccgctacaacggcattgcctccgacgataggttcgccaatgccatggg

SEQ ID NO: 117639 - DNA, 244 bp, Glycine max
agattctattgtgagctataagctagtttctcgtgaggccaatatgcagttgtgtgttttctttgttgctgcaggagtcttggtagcatggccatgccatggcgcaggctaccaaaggttccctctccgaatgaaaactggctatggtgagcgttcttcggtggtaaaatgcgcaagttttaggcttgctgtggtagcacacaacatccgagcctttaaaaccattcctgaagagtgcgttgac

SEQ ID NO: 117640 - DNA, 238 bp, Glycine max
ctccagagagaagaagaaacttaatcgatcatcacgtcacttcactaatacatcatggcagacgagacccagatcaagtatgagagctctgaggttgaggtccaggatcgtggtgtttttgactttctcggtaagaaaaaggatgaagaagacaagcctcatcctcaggaggaggtcatcgccaccgagtttcaaaaagtcgatgtctcagaccaaggagagaacaagcacagcctct

SEQ ID NO: 117641 - DNA, 241 bp, Glycine max
ctgaatctgcgtgtgtttgtgaattgttgttgagatctgaatcaaaatcagaaacgataatggctacaccggaccacctcttcaacctccgcaacaacttctacctcggcgcttaccaagccgccatcaacagcagcgacgttgccaacctctcccaagaagataccctcgagcgcgacaccctcgtccaccgctgctacatcgccctcggccagctccagttcgtcatctccgagatcca

SEQ ID NO: 117642 - DNA, 241 bp, Glycine max
agagaataagccattcacaaggatgatggtttttgagtatgctccaaatggaaccctatttgagcatctacacattagagaagcagaacaactagactggggaatgagaatgaggatagctatgggaatagcctactgtctggagcacttgcatcagctgacaccacccattgcctacagaaacatactatcttcctctatatacctgactgaagattacgcagctaaattatcagacctt

SEQ ID NO: 117643 - DNA, 245 bp, Glycine max
ctctggtatatgcttgtaaccaaggtgttgaaaagattattgactaggcaaccttgactggggcttgtgttgttgctcttggaccctcaattgctggtgtgtttacaccctgtgatgacctagcaaaggaagtttttgaagcttctgatgtgagtggggagaaactatggcggctgccattagaggaaagttactgggaaacaatgaaatcaggagttgctgatatgttgaacactggtggtcga

SEQ ID NO: 117644 - DNA, 249 bp, Glycine max
gcagatattcgtaaaaactttgaccggcaagaccatcacccttgaggtggaatcctccgacaccattgacaacgtaaaagctaagatccaagacaaggaagggatcccacatgaccagcagagacttatctttgcgggtaaacaacttgaggatggtcgcacccttgccgattacaacatccataaggaattaaccctccatctcgtgcttcgcctcaggggtggcatgcaaatctttgtcaagacttt

SEQ ID NO: 117645 - DNA, 245 bp, Glycine max
agatatatgtttatcctagaggaattcgtgaccttttattatataccaaggaaaagtacaataatcctttgatttacatcactgaaaatggtataaatgagtatgatgaaccaacacaatcacttgaggaatctcttatggatatttatagaattgattatcattatcgtcatcttttttatcttctatctgctattaggaatggctcaaatgtaaagggatattatgtatggtctttgttcgac

SEQ ID NO: 117646 - DNA, 246 bp, Glycine max
  unsure (1)..(246): unsure at all n locations
attcgacgatactagaaacgcgcagcgcaagcatcagcatagcttgctcagatgaaagtcttggcaacgacgctcataggcaagaaaagtacacgagaagtaggaagcgcagagactattgcagatgtcaaggacaagctaaagagcagnggaggaatgaccccgggatagcaaagtctgatatgggcggggaagcagcttgaggactgacgcatgcgtgatgactagatgattcagctggagagt

SEQ ID NO: 117647 - DNA, 241 bp, Glycine max
gtctttgctgacttcttgttaaggttgtcggtgatgcaattgttgttggttttgtgctaagagaagaagctgttgggaaggtttctttcgtcttttgatgatgatgtcacacaacttaacggggcagcttgtgggtgcagagatacatggctttcacacgttggatgatttggatgttagtaatactatggaggaagcaaaaagcagatggcttcgtcccaatgagattcatgccatactc

SEQ ID NO: 117648 - DNA, 239 bp, Glycine max
gcaaatcagtggaacagagaatggggacatgatggttacttcaagatccgaagagggacaaacgaatgtgggattgaagacgatgtaactgctggtttgccttccaccataaacctcgtcagagaggtgactgatatggatgctgacgctgctgtttcattctgaatgcaaatatattattaccttaccagttatattctgtatgggtattgtaattgataaatcagaactagatgttg

SEQ ID NO: 117649 - DNA, 240 bp, Glycine max
ggtgagcccccatcctacctcactggtgaattcccaggtgactatggttgggacactgctgggctttctgctgacccagagacctttgccaagaaccgtgaacttgaagttatccactccagatgggccatgttgggagccctgggctgtgttttccctgaactcttggcccgcaacggtgtcaagttcggtgaagccgtgtggttcaaggccgggtctcaaatatttagtgagggtggg

SEQ ID NO: 117650 - DNA, 122 bp, Glycine max
cgacgatgatgatgatgtggatttgttcggtgaagagacagaagaagagaagaaggcagcagaggaacgggcagctgcagtgaaggcatctacaaaaaaaaaagagtctgggaaatcatctg

SEQ ID NO: 117651 - DNA, 239 bp, Glycine max
  unsure (1)..(239): unsure at all n locations
tnccaaagagagtgagcgagtcagtactgagtagggtttcaaatttccaatcggaatcggaaaaaatgggcggnggcggcgncgatcacggccatggacacggacacggcgatttcaggaacaaggtctggagtatgagcggtggcccttactgccgtcccaagcactggaagcgcaacaccgccattgccatggtcggcgtcgttctcatctgcatccccatcgctatgaaatccgtg

SEQ ID NO: 117652 - DNA, 252 bp, Glycine max
tcggctcgaggtacaggcgaaagactttaggtttggaattgggaattagggttgttcgcgtcacgaagatgatcgaggtggtgttgaacgatcgattggggaagaaggtgcgcgtgaagtgcaacgacgatgacaccatcggcgacctgaagaagctggtggcggctcagacgggcacaagagccgacaagatccgcatccagaagtggtacaccatatacaaggatcacatcactctcaaggattacgaga

SEQ ID NO: 117653 - DNA, 136 bp, Glycine max
gtctacggctcagacttgcatgcagcattcagacaaggcagctgacaggtccactgaaaggtgtgttggacgtgtgtgatgttccacttgtgtctatcgacttccgctgctctgatgtttcctctactattgactc

SEQ ID NO: 117654 - DNA, 246 bp, Glycine max
gctaatgtggttggatactttgcatggtcattgctggataactttgaatggaggttgggttacacatcaaggtttggcattgtctatgttgatttcaaaaccctcaagagataccctaagatgtcagcatactggatcaagcaactcattgccaagaagaagtactaatagctgggctgaacatctactttctaagcttctagttgcttcagataatcatgttttagtggttatcgttgagttaaa

SEQ ID NO: 117655 - DNA, 248 bp, Glycine max
ctcaacatcattcaccaatgcatgtggcacatgccacccaaaacctaccccttctcctcctcctccatcaggaaagtgccctaaggacacattgaagctaggggtgtgtgcagatattctaggtcttgttactgttgttgttggctcccctgtctccagcaagtgttgtgcattgcttgaaggtttggctgatttggaggctgcactttgcctttgcactgctattaaggccaatgttcttggaatca

SEQ ID NO: 117656 - DNA, 245 bp, Glycine max
ctcagttccaaacaaaacttatcaaaatctcatatactgattcagttctatacataaccatcgagatttactatcaaaccagaaattctcaaaatctcttcacctctgtgatgaccatggaatacagaaccttagaactcaacatcatatccgcaaaggacatcaagaacgttaacctcttctccaagatggacgtatacgccgtcgttacgctctccggcgaccctctccaccctcagggcgcc

SEQ ID NO: 117657 - DNA, 244 bp, Glycine max
attgtttgttgttgtaactcgttcttcttcttttgttgttctgtgtttgtgtttgttttttctctcacctgaaaatgtcttgctgcggtggtaactgtggttgcggaagctcctgcaagtgcggcaacggctgcggaggctgcaagatgtacccagacttgagctacactgagtcaaccaccaccgagaccttggtcatgggagtggcacctgttaaggctcaatttgagggtgctgaaatggg

SEQ ID NO: 117658 - DNA, 241 bp, Glycine max
ttcaaacctaacgcagcatcgctattctcttcattccatggctttgcccaaccagcaaaccgtggattaccctagtttcagactcgttatagtcggcgatggtggcacaggaaagacaacctttgtgaaaaggcatctcaccggagaattcgagaagaaatatgagccaaccatcggtgtggaggttcacccattggattttttcacaaactgtggaaagattcgattttactgctgggat

SEQ ID NO: 117659 - DNA, 204 bp, Glycine max
gccttgcggcttcacggcgcagcacatgttcgcttaaggtgtgcatccttgtctcgttctagcctgcatggccgttttcagctttctcatatcgaatgcttctcctgagattgacgcagttaggcgccacgatcggggcagacgtcaccgagcaagacctcttgcaatccacgggtggagcacgcaccatggtttcgtgctcac

SEQ ID NO: 117660 - DNA, 245 bp, Glycine max
accatttgggagttaggttctgaacgctctgcttccagcgagtgttctttcttcggttcagcaccttaatttgcacacgctgcggcttcagctttagaaatggcacaagaaacctttctattcacatctggatctgtaaactagggtcaccccgacaagctgtgcgaccagatctctgatgcagtgctcgatgcgtgccttgaacaggaccctgacagcaaggttgcctgtgagacatgcaccaa

SEQ ID NO: 117661 - DNA, 236 bp, Glycine max
gagatcccatgggggtcaactggagctgacatcattgttgagtccaccggagttttcaccgataaggacaaggccgccgcacatttcaagggtggtgcaaagaaggttattatttctgcccccagtaaggatgcccccatgtttgttgttggtgtcaacgagcacgagtacaagccagagcttgatattatttccaatgctagctgcacaaccaactgccttgccccacttgccaa

SEQ ID NO: 117662 - DNA, 242 bp, Glycine max
cacaaagcgggttactgtctgttcaagctaccatctctctctctctttcttagtgcctccttgccagaagttaaaatggcccaagaaactttcctattcacatctgaatcagtgaacgaggggcaccctgacaagctctgtgaccagatctccgatgctgtgctcgatgcatgcttggagcaggaccctgacagcaaggttgcctgtgaaacctgcaccaagaccaacatggtgatggtttt

SEQ ID NO: 117663 - DNA, 241 bp, Glycine max
gctagagtgttagggcctgatgagtctaagcgccatggttctgtgggtcgactagcagaaaatatggaggccaagatagtggaccctgttactggagaggcattacctcctggccaaaaaggggagctctggttgcgaggtccaacaatcatgaaaggttatgtaggagatgagaaggcgacagtagaaacattggattcagaagggtggctgaagacgggagatctttgttattttgact

SEQ ID NO: 117664 - DNA, 235 bp, Glycine max
ggtgacttctggacttctgatgctggtccactagaggccttcaagaggtttggaaagaagcttcaagagattgaacataagcttatacagaagaacaaggatgagacgttgagaaaccgcactgggccagctaaaatgccttacactctgctctatccttctagtgaggagggattgactttcagaggaattaccaacagtatctctatctaagggctctctcattgaggttgct

SEQ ID NO: 117665 - DNA, 234 bp, Glycine max
accaaatcaaactagcaagagggcagaactacttcatatgcaactaccctggtcactgcgaatctgggatgaaagtagccattaatgcagtgtgatggtgcttaatacttcttgagttgaagtgaaaattaagttaatggtcaattagctagcattagtaaatgttagtgtgtgctcatgtatgtactttttttatatgaagctgttatatatatttattaatcactatagttt

SEQ ID NO: 117666 - DNA, 242 bp, Glycine max
agttaagggtaaggatatagttgagcttattgctgccggtagggaaaagttggccacggttccttctggtggtggtggtgccgttgccgtcgccgcagctccttggggaggtgctgctgctgctgctcctgctgctgaggcaaagaaggaggaaaaggtggaggagaaagaggaatctgatgatgatatgggtttcagtctcttcgattaattggtgtagtctattcagcttctctgtacag

SEQ ID NO: 117667 - DNA, 242 bp, Glycine max
aagcgatctgcttggagaccacagaggcgaaagcaggacctttaagcttcctaatcccatgtactacattgagtagtaccttcacctctctcaacaatctagctagagtttgctcctatctatatgtaataaggtatgctgatatgcactattcaaataggagcattagctatgtttgttaatgtcactttatgttatgtgggtaagtcacctaagacactccacgtacctacttgttgtct

SEQ ID NO: 117668 - DNA, 235 bp, Glycine max
ctcactcatcaatctcgtttgttctcactaactattacttcatcatgtcgtcgagcacagttggtcaagtcatcaaatgcaaagctgcggtttcatgggaggcagggaagccacttgtgattgaagaagtagaggtggcaccaccacaagctggtgaagtgcgtttgaagatcctctacacctctctttgccacactgatgtttacttctgggaagccaagggccaaactccatt

SEQ ID NO: 117669 - DNA, 235 bp, Glycine max
atcaaggctcctaagcaggcctctggggagcacaagaagaaaaagaagatcaaagtgactttcccatcaggtcaagagcggaatgcaccatcacaggcaattaggaaatgcttgcactgtgagataaccaagacaccacagtggagggcagggccaatggggccgaaaacactctgcaatgcttgtggcgtgcgctacaagtcaggccggcttttccccgaatatcgccctgcag

SEQ ID NO: 117670 - DNA, 234 bp, Glycine max
gtagcagcaactgttacaccacagcatcttcttctgaatcgtaatgctttgttccaaggtggcttacagcctcacaattactgtcttccagtgctcaaaagagagatccatagacaggctattgtttcggctgtcactagtggaagtaaacgatttttccttggaactgatagtgctccacatgataggcgtaaaaaggaatgttcctgtggatgtgctggcatatacaactca

SEQ ID NO: 117671 - DNA, 242 bp, Glycine max
gcaaacatggaaaggatcatgaaagctcaagccctaagggacaacagcatggcaggatacatgtcaagcaagaagacaatggagatcaaccctgagaacccaattatggaggagctcaggaagcgtgcggatgctgacaagaacgacaaatccgtgaaggaccttgttctgttgctgttcgagactgctcttctcacttctggtttcagccttgacgaacccaacacttttggaaacaggat

SEQ ID NO: 117672 - DNA, 239 bp, Glycine max
atcacatcacacacactctcatagctgtagcggcgacactaagatcggagaaagaatggcgaaaacgacgtcgttgctgctctttacactgctcctcttcggaaccctagctctcatccaggcgaagaaatcgaaggaggatttgaaggaggtgacccacaaggtttactttgatgttgagattaatggaaaagaagcaggtcgtattgtaatgggtctttatgggaaggctgttccaa

SEQ ID NO: 117673 - DNA, 233 bp, Glycine max
cagcggttgaatttggaaaaagatgtctcaccggaagttcgagcacccgagacatggttcccttggctttctcccaaggaagcgagcttctcgtcatcgcggaaaggtgaaggctttcccaaaagacaatcctagtcaaccatgcgggttgactgcttttgtgggctacaaggctggaatgacccacattgttagagaggttgagaaacctggatcaaagcttcataagaaag

SEQ ID NO: 117674 - DNA, 231 bp, Glycine max
attttcttctatctcatcctttcttttagttttatttttatttttttatcttgggtaaaaaaaatcatgggtgttttcacttctgaaagcgaacacgtttcccccgtctctgctgcaaaattatacaaagctattgtcctagatgccagcaatgtcttcccaaaagcattgccaaatttcattaagagcgtagaaaccattgaaggagatggagggccaggaaccattaag

SEQ ID NO: 117675 - DNA, 231 bp, Glycine max
gaaagactttaggtttggaattgggaattagggttgttcgcgtcacgaagatgatcgaggtggtgttgaacgatcgattggggaagaaggtgcgcgtgaagtgcaacgacgatgacaccatcggcgacctgaagaagctggtggcggctcagacgggcacaagagccgacaagatccgcatccagaagtggtacaccatatacaaggatcacatcactctcaaggattacg

SEQ ID NO: 117676 - DNA, 153 bp, Glycine max
taggtgatggtggaggtggagagtggtaatagtatgggggtttaggaactggtgaaggtggtgggggagatttcataatagtaaggaggaggaggggatggtgaaggtgggggtggtgatttatgaatagtagtggggaatttgcgacgagcc

SEQ ID NO: 117677 - DNA, 243 bp, Glycine max
attttcttctatctcatcctttcttttagttttatttttatttttttatcttgggtaaaaaaaatcatgggtgttttcacttctgaaagcgaacacgtttcccccgtctctgctgcaaaattatacaaagctattgtcctagatgccagcaatgtcttcccaaaagcattgccaaatttcattaagagcgtagaaaccattgaaggagatggagggccaggaaccattaagaagcttactctt

SEQ ID NO: 117678 - DNA, 241 bp, Glycine max
agaacaagtagttgagaactaagaaggagaagcaaatggcttcctcaatgatctcttccccagctgttaccactgtcaaccgtgccggtgccggcatggttgctccattcactggcctcaagtccatggctggcttccccaccaggaagaccaacaatgacattacctccattgctagcaacggtggaagagtgcaatgcatgcaggtgtggccaccagttggcaagaagaagtttgagac

SEQ ID NO: 117679 - DNA, 237 bp, Glycine max
  unsure (1)..(237): unsure at all n locations
agagtctaaagaaggtggaggaggaagcggaggagattgtgaaggagggatttgaggctgcggacaaggggttggtggcggcggagaaggggctggagatgaanganaangggctggtggcggaggagagggagattgaggaggcggtgagttttggggggttggcgcaggcgggagcagtggcgggagcggaggtttttgggattttggttgcaacggcggtggtgaacggtattt

SEQ ID NO: 117680 - DNA, 218 bp, Glycine max
ctctttctcttcttcttcctcttcttagcctccgccgccgccagcgtccccgcccacaacatcacccgcatgcttgccaaacaccccggcttctccaccttcaaccactatctctccctcacccacctcgccgaagagatcaaccgccgccagaccatcaccgtcctggccctcgacaatgccgccatgtcctccctcctcgacaagcacctctccct

SEQ ID NO: 117681 - DNA, 220 bp, Glycine max
atcgttgctgttctaaagcactcatccacacattctccgttggtacgacaacaatggatccaaagacaggtgcgataggaggacttgtagcagcatcgaagaaggttcacgagaaggtaatgaactcgttgttcgagaagcgtccgaagcagatcgggatcagaagcacgatgccgtcgaagcgggacatgacgcgattcgtgaagtggacgttgaacgt

SEQ ID NO: 117682 - DNA, 232 bp, Glycine max
ctccgccacttctgaatctattgaatcaacaatcatgtcggacgaagagcaccatttcgagtccaaggccgacgccggagcctccaaaacctaccctcagcaagccggtaccatccgcaagaacggctacatcgtcatcaaaggccgcccctgcaaggttgtggaagtttcgacttccaaaactggaaagcacggtcacgctaagtgtcactttgttggaattgatattttc

SEQ ID NO: 117683 - DNA, 244 bp, Glycine max
  unsure (1)..(244): unsure at all n locations
ttacaaccaaatcatactgaatgcaagaccgcaaggtgtcaacaacaatggccctccaaaactaagcatgttcggagtaacataccttcgtctatcagatgatctactgcaaaaatcaaattttaatatattcaaaaaatttgatgctaaagatggcactgcacgatcaggacttactcgtgcaatccgcgcanaagtatgaatgcacgccatagagcaccattgatagcgcatctgcaccaaa

SEQ ID NO: 117684 - DNA, 231 bp, Glycine max
aactggggtaaggaaaggtggccaaatagccaatttgtaaatggagaacacgctttgaactttccactatgtggaaccttccctgtgaacttcttcagggtggtgtggagaacaacatatgtcatcatcactgctttgatagctatgatgtttccattcttcaatgacttcctaggcctgattggttcactgtccttttggccattaaccgtttacttccccatagaaatg

SEQ ID NO: 117685 - DNA, 285 bp, Glycine max
tgtgaaggtggtggaggtggctataaccgcaacggtggaggtggtggatatggtggtggtggaggttatggtggtggtggaggtcatggtaggcggtgtgaggttgatggtggtcggtgtggagagaccgtggaggatggtggtgacggcgggtcccgctactcgagaggaggcggtgcttcggatggaggaagctggaggaattaggattaggttttttagtgggtgaaaaaatggggggaggttctgttggagtaatatcatccccttgatattaattgtggt

SEQ ID NO: 117686 - DNA, 275 bp, Glycine max
atgtttgggattctcttcctccctggaagaacaataagagtcaccgctacgacgccgttcgtgctttttttgaggtgccacagtcatgtttgggcgtggtggactcaatgacgagtgacaactccaaatattatgatattctcggggtttccaaaaatgccagtgaagatgaaatcaagaatgcctatagataggctgctatgaagaaccatccagataaggtaggagatcctgaaaagttcacggagttaggtctagcatatgcaagtttaagt

SEQ ID NO: 117687 - DNA, 274 bp, Glycine max
ctagatgcttgcaaattatttgaaccaatctatgatcaaacagatggtggtgatggctatgtttctgttgaagtatctcccaggctcgctgatgacactgagggaaccatagaagctgcaaaatggcttcataaagtggttgatcgccccaatgtgtatattaagattcctgctacagaggcatgtgtgccttcaattaaggaagttattgctaatgggataagtgtgaatgtgacgctgatattctctcttgcaagatatgaagctgtaatag

SEQ ID NO: 117688 - DNA, 274 bp, Glycine max
ctttcccttcccaacaacaacaagaatatgccttctgcagaagcttcctccgaaaccatttgtgtcaccggcgctggtggcttcatcgcctcttggatggtcaaactcctcttggaaaaaggctacactgtccgaggaaccctcagaaatccagatgatcccaagaacgggcacttgaaggagtgtgaaggagcctccgagaggttaactctgcataaggatgacctccttcatcttgactccgttagatcagttattaacggatgccattgtg

SEQ ID NO: 117689 - DNA, 270 bp, Glycine max
gtcagagcagggccatcagaattacaatcattttcagaatctctgaaatctaaactgaatgctgtatcaacaagatacaaggagtcaatttccaagagcacaagagggtggaaggagagatggttctctcggaacaagactatgtctgaccttggatctgaagttaggcgagaagttaatgcagggattgcaactgtgtcacgcatgatggaacgcctggagaccagcgacaataatagaagcaatagcaattctgcccccagtaatata

SEQ ID NO: 117690 - DNA, 255 bp, Glycine max
  unsure (1)..(255): unsure at all n locations
gtaaactccaccaccggctacatcgactacgaccgcttggaggaaaaagccctagacttcaggcccaaattgataatctgcggtggcagcgcttaccctcgcgattgggactacaaacgcttcagggaaattgcggataagtgcggggcattgcttctctgcgacatggcgcacactagcggccttgtggccgcgcaggaagtgaacagccccttcgagtattgcgacattgtngacaccaccacgcataagagc

SEQ ID NO: 117691 - DNA, 276 bp, Glycine max
attcaatgtctagtccacactcctccacgttctgcatctttctcaggagattgcagtgctggcatcaaggtggacaatcctctaggaatgtgtggtgagttcgcgcttgcatttggtgccttgttgaggacattgtggctcttctcggcgaactgctattgcaccccgtgcattcaagagcaaattggcccgatttgctccacaattcagtggttataaccagcatgattctcaggaattgcttgcctttttattggatggattgcatgaagattg

SEQ ID NO: 117692 - DNA, 288 bp, Glycine max
gctcggaatcggtcgagttcgatcatggagggtggttatgctcgtcgactcttgcaggtcggtataagatcaatacacaaagaagggcgtgaacaagccaaaaagttcggggtagagcagtttgaaatgcgacatttttcgaaagatcgtccatttttggaaaacctgaatctaggagaaggtgctaaaggagtatacatttcaatcgatgtggattgtcttgatccagggtatgctgtcggagtgtcccactatgaatcaggaggtctttctttcagggatgttatg

SEQ ID NO: 117693 - DNA, 257 bp, Glycine max
gtatcggtcaccgctacgcgtacagtgccggcgaacagatgccggtgcacgtggattccagggtgaagggtgcagttgctcccatcaaagatcaaggaagtcgtgtaagttgttgggcgttctcaacggtggccacagtggaagcaataaacaagatagtgacatggaagtttgtgtccttatctgaacaagaacttgtggactgtgacagagcctacaatcaaggatgcaatggtggccttatggactatgcattc

SEQ ID NO: 117694 - DNA, 269 bp, Glycine max
ctgctggccatgttgcttaatttagttcttgcttcctttgtcttcttgagttctatcagatccgagagtgcagggatcactagctctttcattcggtcagagtggccggcaattgacatcccccttgatcatgaagcatttgcagttccaaagggttataatgcacctcaacaagtgcacatcacgcaaggtgactatgattcaatagcagtaatcatctcatgggtgaccacagaagagccagggcacagccatatacagtatggcac

SEQ ID NO: 117695 - DNA, 266 bp, Glycine max
ggtttttagggtttacaccgagcagcgacacctccctcccgcagtagccatggttctcaaaactgaactatgccgattcagtggtgccaagatctaccccggaaagggcatcacatttgtccgtggtgattcgcaggttgtcctgtttgctaactcacaatcgtaagctgtattttcactaccgcctggtgctcctcaaagctcacctggactgctatgtacagaaagcaacacaaaaaggcgattgctcaaaagctgtgaagaag

SEQ ID NO: 117696 - DNA, 262 bp, Glycine max
atactttcatatattgagcacggaaagagagaaggagccacccttttgacaggaggtaatacagtgggcaacaaaggttactacatagaacctacaattttctccaatgtaaaggaggacatgctaatagcacgggatgaaatatttggccctgtactagcgctgatgaagtttaagaccatggaggaagcaattaaaagtgctaacaataccaagtatggcctagcagcaggaattgtaaccaagatttggatactgcaaa

SEQ ID NO: 117697 - DNA, 253 bp, Glycine max
cctttgttcactcttcttctcttgcggctagggttttagcgcagtatcttctagatttaaggaagatgggtaaggaaaaggttcacatcagtagtgtggtcattggccatgacgactctgggacatcggctacgactggtcacctgatttacaagcttgggggacgtgacaagcgtgttattgagaggtttgagaaggaagctgctgagatgaacaagaggtctttcaagtatgcctgggtgctggacaatta

SEQ ID NO: 117698 - DNA, 254 bp, Glycine max
gttgcaatgcaagagcagggttagcaacgaggttgtgtacacgaagaaggggtacaccgactcaaccggagcatacacaatgtacgtggatgaggatcacgcagatcagatctgcagtgccaagcttgtaagcagccctcaccctcaatgcaaggaagtcaccccaggccgcgacgaagccgtcgtgattctcacccgctacaacggcattgcctccgacgataggttcgccaatgccatgggcttcatgtctc

SEQ ID NO: 117699 - DNA, 245 bp, Glycine max
tgccgatgcctgacatatcagataaaatgccggaaaggtcgtttttgccccggagcattttatcgaaattaccgttttcggtttcgaagattgatgagttgaagcaagtcttcaaggcttctgataacggctccatggagaagatgatgaaggactcgttggaggagtgcgagcgtgcaccgagtagcggcgagacaaaacgctgcgtatggtcgctcgaggacatgatcgattttgcaacctct

SEQ ID NO: 117700 - DNA, 262 bp, Glycine max
ggattagggttcgcggtgggaacgtgaagtggcgcgctttgaggcttgatactgggaactactcttgggggagtgaggctgcaacccgcaagacaaggattcttgatgtggtgtacaatgcatccaacaatgagcttgttcggactcagacattggtcaagagtgccattgttcaggtcgatgcagcacccttcaagcagtggtatctgcagcattatggcgttgaggttggccgcaagaagaagagtgcagcagcctctgc

SEQ ID NO: 117701 - DNA, 268 bp, Glycine max
ataagatttggcatcataccttctataatgagcttcgtgttgccccagaagagcatccagttctcttaactgaggcccctcttaaccctaaggctaatcgtgagaagatgacccaaatcatgtttgagatctttaacacccctgctatgtatgtagccatccaggctgttctttcactttatgcaagtggtcgtacaactggtattgtgttggattctggtgatggtgtcagccacactgtccctatctatgagggttatgcgctccc

SEQ ID NO: 117702 - DNA, 265 bp, Glycine max
gtcaagtttgctgaactcttgaccaagattgacaggcgatctggtaaggaacttgagaaggagcccaaattcctgaagaatggtgatgctggtttggtcaagatgattcccaccaagcccatggtggttgaaaccttctccgagtatcctccacttggtcgttttgctgtgagagacatgcgtcaaactgtggctgtgggagtcatcaagagcgtcgagaagaaggaccctactggagctaaggtcaccaaggctgcacagaaga

SEQ ID NO: 117703 - DNA, 259 bp, Glycine max
tttaactgcatataagctcactccatctggttacgaatgggggcgtgtaaataaggatacgggaagcaatccacatggttaccttcccacccattatgagaaggttcagatgctccttagtgatcgcttccttggtttctacatggttcctgataatggtccatggaattacaacttcatgggggtgagacacgcatcagggatgaaatatggagtgaagctcgggactcctagggaatattaccacgaggaccataga

SEQ ID NO: 117704 - DNA, 258 bp, Glycine max
gtgaagtagaacccttccactgtggtgactctgtgatgggtgcctacaagtacgtttcagagctatggcgcaagaagcagtctgatgtcatgcgcttcttgcagcgggtgaggtgctgggagtataggcagcaaccttccattgttcgtttgacaaggtctacccgccctgacaaggctcgttcgttgggcttcaaggctaagcagggctatgtgatttaccgtgttcgtgttacgaggggtggccgaaagagaccag

SEQ ID NO: 117705 - DNA, 262 bp, Glycine max
atcaaatttcaccaatatccctgctgatgagaaccaaattgccgcatatttagtaaaaaatggaccacttgctatgggcgtgaatgcaattttcatgcaaacatacattggtggtgtctcatgccctctcatatgtagcaagaaaaggctgaaccatggtgtgttacttgtgggatatggtgcaaaaggcttctcaattcttaggcttggcaacaaaccatactggatcatcaagaattcgtggggggagaaatggggagaa

SEQ ID NO: 117706 - DNA, 232 bp, Glycine max
tggagtggtgcctacattgtgacgcaagctgcaaagagcattgttgcaaatggacttgctaggagggcaattgtgcaagtttcctatgccattggtgtgcctgagcccttgtctgtgtttgttgacacttatggcactgggaagatccctgacaaggaaatcctcagcattgtgaaggagagttttgacttcaggcctggcatgatctccatcaacttggtctcagaggggt

SEQ ID NO: 117707 - DNA, 292 bp, Glycine max
cgtcagcacgcagttcggctcgaggtaagcaagcaaacccctatcggcgcctgctttctttgttcgtgttttgcatcaggatggagtctcaggtgaagcacgcacttgttgtcaaagttatgggtcgtactggatccagaggacaagtgacccaggttagagtgaagtttttggatgatcagaaccgtcacatcatgaggaatgtgaaaggacctgtgagagaaggagacattctcaccctactcgagtctgaaagggaagcaagaagattgcgctagatggtctcgttttt

SEQ ID NO: 117708 - DNA, 264 bp, Glycine max
ccatattgcacttcctcctgataacatgggaaagattacctacattgcaccacctggccaatattccttacaggatactgtattggaacttgagtttcaaggtgtcaaaaagatattcactatgcttcagacttggcctgtacgtacacccaggcctgttgcatcaaaacttgcagctgatactcctcttcttactggtcagcgtgttcttgatgctcttttcgcctcagttcttggcgggacttgtgccattcctggtgcttt

SEQ ID NO: 117709 - DNA, 265 bp, Glycine max
gtttcagttccaaacaaaacccatcaaagtctttctccctcagtgatcatatattcattcagttctatacaaaatcctcaaaaactcttcctctctgccatgaccatggaatacagaaccttagaactcaacatcatatccgcaaaggacatcaagaatgttaatctcttctccaagatggacgtatacgccgccgtttcgctctccggtgaccctctccaccctcagggcgccaccacccacgtccacaaagacgccggcagca

SEQ ID NO: 117710 - DNA, 265 bp, Glycine max
attgtatgtaaaaaataaaaatggagaagaaagagaagcgggcctgagaagcgaaaagaaggcctgggcttagttgataagcataactgggtgaggaagaaagaaagagagtgaagaagatggcgtcgagcggagcggtaccgttttggagggcggcggggatgacgtacataacatactcaaacatatgcgcgaatctgctcaggaattgcctcaaggaaccctacaaggccgaatccctctctcgtgagaagctcattttgtt

SEQ ID NO: 117711 - DNA, 262 bp, Glycine max
atcaaagtaacactagaactcacaaaggacagaagatacgcgaatgccaggagaactccaattaccacccgggttcagattccaccccactgacgatgagcttgtgaatcactacttgtgtagaaagtgtgctgcacaaaccattgctgttcccatcatcaaagaaatcgatttgtacaagtttgatccatggcagcttccagagatggctctttacggtgagacagagtggtactttttctctcctcgagaccgtaaatac

SEQ ID NO: 117712 - DNA, 255 bp, Glycine max
atttccctacctctcccttcaagatgcagatcttcgtcaagaccctcaccggcaagaccatcacccttgaggtggaaagctctgacaccatcgacaacgtcaaggccaagatccaggacaaggaaggaatccccccggaccagcaacgtctcattttcgccggaaagcaacttgaggacggccgtacccttgctgactacaacattcagaaggagagtactcttcacctcgtcctccgtctccgtggtggcatgc

SEQ ID NO: 117713 - DNA, 262 bp, Glycine max
ggaattcctcctgctcccagaggtgttcctcagatcactgtttgcttcgacattgatgccaacggtatattgaacgtgtctgcggaggacaaaaccactggacagaagaacaagattacaattaccaacgacaagggcaggctttctaaggaggagattgagaagatggtgcaggaagctgagaaatacaagtctgaggacgaggagcataagaagaaagtggatgccaaaaatgcattggaaaattatgcctataacatga

SEQ ID NO: 117714 - DNA, 196 bp, Glycine max
gtaggaaacaaggctggtgaagagagtgtgaacttgtttctcaagtctattggcctcagagagtattcgagatacattagtttcaaccacccttatagtcatgagaggccccttctagcctaccttaagtttttcccttgggtggtgaatgaaggatactttaaggcttggagacaaggcagaacagggtaccctt

SEQ ID NO: 117715 - DNA, 267 bp, Glycine max
tgggaagccttcccgtcaaatggacagccagaagtgacttcagcctggcaaaccccggcagcagagcctgggaaagctgattgggaattggcattggtagagactgctagcaatttgtcaaagcagaaggcagctttaggtggtgggttggatcctctattgttgactggtatgtatgatcaaggaatggtgaggcagcatgtcagcactacccaactgagtggtgggagtgcaagcagtgtggcattgccgggaccagggaagact

SEQ ID NO: 117716 - DNA, 275 bp, Glycine max
ctcgagatcaacctctgcagcgccttcgatccagaaaacatgactaagagaacaaagaaggctggcattgttggaaaatacggtacccgttatggcgccagtctgcgtaagagattaagaagatggaagttagtcaacacagcaagtttttctgtgaattttgtggaaagtatgctgtgaagaggaaagctgtgggaatatggggatgcaaggactgtggtaaagtgaaagctggcggtgcttacactttgaataccgcaagtgccgtgactgta

SEQ ID NO: 117717 - DNA, 272 bp, Glycine max
gaaacagctgtctgattgggtgggggacgatgatgtcagaagagtttctgttatagtggctatccagaagcacagcaatggaaaatttgatcgtatatcacggacaaaacatgttaaagatttcatgtcacagttcaaaactgaacctggttgcatgcttttcattcagaacttaatgaacctctttgtggatgaaggtaatgcccttgaggaaccttcagatcagagtcaaactacagatgaaaattctgaaatagggtctattgaggata

SEQ ID NO: 117718 - DNA, 270 bp, Glycine max
gccaggcaagccccactcaaccaccacacctctcctcgttcacgctacccctttctgctcttcttctacctttcaagttttaaaagtataaagatggcagagacattcctatttacctcagagtcggtgaacgagggacaccctgacaagctctgcgaccaaatctccgatgctgtcctcgacgattgactcgagcaggacccagacagtaaagttgcctgcgatacatgcaccattaccaacttggtcatggtcttccgagaaatcacg

SEQ ID NO: 117719 - DNA, 278 bp, Glycine max
ggctcgagatagaagcacagtggtgtattttaagcacaatgacatggatgctttaagagaaactctagagaacattacttccaaatataagaagaccaagaatctgaggcgttatattgttgttgaagctgtctaccagaattctgggcaaatagctcccttggacgagatcattaaattgaaggaaaaatatcgctttcgtgttttgctagatgagagcaactcattgggtgtgcttggaagttctggaagaggtctcactgaacactgtggagttc

SEQ ID NO: 117720 - DNA, 269 bp, Glycine max
gctgtctctgccaaagtgccaagtcacataacatttccattgttaccattctttctttccatcacaaccacttataaagcctctgatcctcactttctctcacacaaaaacacactcaccatggatcatcgcaaaccattgctacccacttcctctgatgctgctccaaatccacacactcgcaaggaccttcttctagttatttgcggcttgctattactctcttcccttgttgcctttggagggtacagggcctccaacgcgccgca

SEQ ID NO: 117721 - DNA, 211 bp, Glycine max
gcaagaatggcacttcgttgcttggtgatgtccctttctgttctcttcactcttggtcttgcgagaggaagccgtgccagagacgaagatttttggcatgctgtttggccaaacactcccattccaagttcattgcgagatcttccaaagccttgccctgcgatgtggtgaaatcgatgatcaccctatgcaaattgaagaaacaccagta

SEQ ID NO: 117722 - DNA, 265 bp, Glycine max
gtaatctcattctccttctgttcaaacactgtctctcatggcatcagataagaagattaggatcggcatcaacgggtttggaaggattggccgtttggtggccagggttgcccttcaaaggaatgatgttgaacttgttgctgtcaacgatcctttcatcaccactgattacatgacatacatgttcaagtacgacaccgttcatggccagtggaagcattttgatgtgaaggtgaaggactctaagacccttctctttggtgag

SEQ ID NO: 117723 - DNA, 268 bp, Glycine max
ctcctacgccggccacaacacccccctcgccgccgtccaggtgacggaactcgccgacgggtcttcgtcggctgcaccgtcaaccactccgtcaccgacggcacctcgttctggcacttcttcaacacgttcgccgccgtcaccacaggcgggtccgccaagaaactcctccgcacgccggacttcacgagggaaaccgtcttcaactccgccgccgtcctccccgtcccctccggcggccccaccgtcaccttcgacgccaacgagc

SEQ ID NO: 117724 - DNA, 268 bp, Glycine max
ggcttacaaagcattgcgtgacagagcaccctaccctgctaatcacgttgttggccatctcagtgggagctttgctttcatagtttttgacaaatctacttctaccctctttgtggcctctgatcaatatggtaaggtacctctatattggggaattactgctgatggctacgtagcatttgccgatgatgcagaattgcttaaaggtgcttgtggcaagtcacttgcttctttccctcaaggatgtttctactctacagctgttgga

SEQ ID NO: 117725 - DNA, 262 bp, Glycine max
ggcctcttcgtgctcgtcgccggcacgcgctgctttcacgcgaactacaaccacaggttcggcgacgaggtagggccgtggaagttaacggcgttccagcgtttgaatttcacggcagaggacgtgctggagtgtttgtcgttgtccgataagatactggggatgggatccacgggaacggtttacagagcagaaatgccaggtggcgagatcatagcggttaagaagctgtgggggaagcagaacgagaataatatcagac

SEQ ID NO: 117726 - DNA, 264 bp, Glycine max
gtagattctgactttccttctccagacttgttttctcataatagtattaagatttcatttgttaacttgatgcgtttccaacatcgtgctcgatggttccttacgaaatcaagggcgggtataagtgtttcttttcattcccatggcacgattctctgtagcctctgcaaacgtgactgttacatagcttatgttggctgcaactgtcacaagcatcatgtatgcctacgtcatgatgctgattctcttgacttcaactgtggg

SEQ ID NO: 117727 - DNA, 264 bp, Glycine max
agcccctcagaagcgaagaagaagccacagagaaccagtctcctactctctctcacccacaagaaaaatggcatctcacatcgttggatacccccgcatgggtcccaagagagagctcaagttcgctctcgagtctttctgaggatggcaagagcagcgccgaggatttgcagaaggtggctgctgatctcaggtcatccatctggaagcagatggctggtgctgggatcaagtacatccccagcaacacttctcgttctatga

SEQ ID NO: 117728 - DNA, 263 bp, Glycine max
ggatgaggctgatgaaatgctttcccgtggttttaaagatcagatctatgatatattccagttgcttccatctaagattcaagtgggagttttctctgctacaatgcctcccgaggcacttgagatcacaaggaagttcatgaacaaacctgtgaggatccttgtgaagcgtgatgagctcaccttggagggtatcaagcaatttcatgtcaatgttgagaaagaggaatggaagcttgacacactgtgtgatctttatgaga

SEQ ID NO: 117729 - DNA, 257 bp, Glycine max
ggctgctggcaccaatagcgtatatttaagttgttgcagttaaaaagctcgtagttggaccttgggttgggtcgatcggtccgcctccggtgtgcaccggtcggctcgtcccttctgccggcgatgcgctcctgtccttaactggccgggtcgtgcctccggtgctgttactttgaagaaattagagtgctcaaagcaagcctacgctctgtatacattagcatgggataacaccacaggattctgatcctattgtg

SEQ ID NO: 117730 - DNA, 256 bp, Glycine max
actctttctctctcttctagaagctatctgtgtttggtgttactaagtctccaacaagcaaagtacatggttgatttggaaatccaggtccccaccccattcgacccgtttgccgaggcgagagaatcggatgcccccggagcaaaggagtatgtgcatattcgaattcagcagaggaatgggaagaagagtctgaccacagtgcaagggctgaagaaggagttcagctacgagaagatcctccaaggacccaaga

SEQ ID NO: 117731 - DNA, 269 bp, Glycine max
ctccgaccttgaacgcttcccatcttggtgagtaacacgaatctgaggaaaaaaaatgtcgattatgcaactttacgggcgcagcaagagcgtggtgaagcggtcgaagaagtacttggaagatgcgctttacatgaagctcttcaaagatggaagctcccagctcatcgttcgccagagcctcaacaacttcgtcaagagccgaaagcgcgtttacaaatgggatgtaagcgacacgctcaagaagcttcgcgatcgcaagctctatc

SEQ ID NO: 117732 - DNA, 266 bp, Glycine max
gtttgccaagaggcagatgactggtttcggtggtgttgtcagttttgagattgatggagatctacataccacaataaaatttattgattcattgaaaatcccatatattgcggcctcgtttggtggctgtgagagcattgtggatcaacctgctattttgtcttactgggatcttcctcagtcagacagggccaagtacaagatttatgacaacctggttcgcttcagctttggagttgaagattttgaggatttgaaggctgatg

SEQ ID NO: 117733 - DNA, 262 bp, Glycine max
gtcaagtcgaacttggagtccttgatcgtgctccaaggctgtgtttgggttttcggggagatgattaactgtttgggcctttatcatcttatttctgctccttcaaccattgcctgcaccactcacattgtgagaggtaagcagtatcttgcgacacataagccagtaaatctggctctcggctatcggaatccacatggatatgggttcagtcttggatcgagaagatcaatacacgagagggtgagctctcatttcaagg

SEQ ID NO: 117734 - DNA, 264 bp, Glycine max
gtgcaacattactgttaatccaagatgtctgagatccatcttgtcttgtgggatctcagacctcttggattgactgggaataaggtggagaaactctgtgatctctgcaacattactgttaataagaacgcagtttttggtagtagcagtgccttggcccccggtggagtgcgaattggggcccctgccatgacttctaggggtttggttgaaaaggactttgagcagattggtgagttccttcaccgtgctgtgactctcaca

SEQ ID NO: 117735 - DNA, 267 bp, Glycine max
gagttatgttctcaaggagcccatcggagttgttgcattaattactccatggaactatcctctattgatggctacatggaaagttgctcctgctctagctgctggttgtacagcaatattgaagccatctgaattggcatctgtgacctgtttggagctggctgaaatatgcagagaagttggccttcctccaggggtattaaacattgttactggattaggcaatgaagctggtgctcctttgtcatctcatcctgacgtagacaa

SEQ ID NO: 117736 - DNA, 265 bp, Glycine max
gtcaatgaggacccatcaactcagaagaagcctcgagttgtttggtctgtggagctgcaccgcaagtttgtttctgctgtcaatctattaggcattgacaaggctgtacctaaaaagattcttgacttgatgaatgatgaaaagcttacaagggagaatgtggccagccacctccagaaatatagactttatctgagaagaattagctgtggggcaaaccgacaggctaatatggtggcagccttaggtactgcagattcatctt

SEQ ID NO: 117737 - DNA, 266 bp, Glycine max
gttagatagattgatgcctttatttttatctttgttttgaactactatgattactgttttctgtataggagtatgtgttgaatgattattgagttgcagcactgatcagttcttagaacatgaattcagcatccccgcagtttgtttccccgagaagtatgagtgtgtacgatccgatccaccagattagtatgtggggagaaggcttcaaaagtaatggaaatttaagtgcagccatgcctttaattgatgaggcagacatgaag

SEQ ID NO: 117738 - DNA, 266 bp, Glycine max
gtcggtcctcgtgtgccaatgtatcccccaggtggtccaggtattggtcaacaaatattttatgcccaaggccctcctgctatcattccttcccagcctggatttgggtatcaacaacaacttgttcctggtatgaggccaggtgcagctcccgtgccaaatttctttgtgccaatggttcagcagggacaacagggacagcgtcctggtggaaggcgtacaggtgcagtccagcagtcccagcagcccgttccaatgatgccaca

SEQ ID NO: 117739 - DNA, 263 bp, Glycine max
tgccttatcgctgtggttatcatcttcttcttcctctttcttagatctcttctttctctacgccgcacgccgaaaccatggccggaaaaggagagggtcctgctatcggaatcgatctcggaaccacctactcttgcgtcggtgtgtggcaacatgaccgcgttgaaatcatcgccaacgaccaagggaacagaaccacgccgtcttacgtcggattcactgacaccgagcgtctcatcggtgatgcggccaagaatcaagtc

SEQ ID NO: 117740 - DNA, 265 bp, Glycine max
cttgggaagaacgctcgctcgcactgtccagatcttaatcaagaggagtgagttttgtttttccagccatgacgccgctgatcctgcatgctgggaaaaccaacaaaaattcttacaagacactcattgcagccgagtatgctggcgtccaagttgattttgcccctaattttgagatgggtgtctccaataaaactcctgaatttctcaagatcaatcctattggcaaggttcctgtgctggatacccccgatggtccaatatt

SEQ ID NO: 117741 - DNA, 251 bp, Glycine max
ttcaaacctaacgcagcatcgctattctcttcattccatggctttgcccaaccagcaaaccgtggattaccctagtttcaaactcgttatcgtcggcgatggtggcacaggaaagacaacctttgtgaaaaggcatctcaccggagaattcgagaagaaatatgagccaaccatcggtgtggaggttcacccattggattttttcacaaactgtggaaagattcgattttactgctgggatactgctggac

SEQ ID NO: 117742 - DNA, 262 bp, Glycine max
ccaaaattcgctacttgttaagggctgcactataccagaatgtctcagggaagaggcagtgcatctttgcctattgtggtcactgtggtttcactactgtgccttttggaacgtgctaacgcagcaacttactccgttggaggacctgggggatggaccttcaacactaatgcttggcccaatggaaaaagattcagagctggtgatatcctaatcttcaactatgactcaacgacccacaatgtggttgctgtggacagaa

SEQ ID NO: 117743 - DNA, 260 bp, Glycine max
gggtaattacatcgggatagtactactgcatgtgaatgtcggctcagaatgtggcttgatacagacatattacaaagaattcgatgtagtgtacgcgcagtacaggaatgcaaggatttgagatcttggtatttccatgcaaccagtttgctggataggaaccatgacacaatgccgaaattcaggaagttgtttgcacaaggttcaaggctgaatttcctatcattgataacgatgaagtcaatgggaagaatgcagcg

SEQ ID NO: 117744 - DNA, 262 bp, Glycine max
gaataattacagcgggaaggttctactgattgtgaatgtcgcctcacaatgtggtttgacacagacaaattacacagaattgaatgtattgtacgagaagtacaagaatcaaggatttgaaatcttggcatttccatgcaaccagtttgctggacaggaaccaggaaacaatgaagaaattcaggaagttgtttgcacaaggttcaaggctgaatttcctatctttgatgaggttgaagtcaatgggaagaatgcagcgcca

SEQ ID NO: 117745 - DNA, 260 bp, Glycine max
caaacaccaacaacgctttagctctctctcttctctccataaccgccaccggcgatctggcactaacagatcgccgctgctacatctgaacccgatccagccaacagatctctccaattcaaatggagaatctaatctctttggtcaacaaaatccagagagcttgcaccgccttaggtgatcacggcgaaaacagtgcactccccacactatgggactctctccccgccatcgccgtcgtcggaggccagagctcagga

SEQ ID NO: 117746 - DNA, 262 bp, Glycine max
ccagtgagtgctttctttctgtaactaaccccaatcatcaactcagtcagcgaatgaatctgtggacggacgagaactcctcggtgatggaggccttcatgccatcctccgatctctcctccatctggccccctcccgctcctccgcagccgcaatccacggcggtcttcaatcaggacaccctccagcaccgcctccaggccttaatcgagggcgcccgagagacctggacctacgccatcttctggcagtcctcttacga

SEQ ID NO: 117747 - DNA, 249 bp, Glycine max
attaattgcaagaatggcacttcgttgcttggtgatgtccctttctgttctcttcactcttggtcttgcgagagaaagccatgccagagacgaagatttttggcatgctgtttggccaaacactcccattccaagttcattgcgagatcttctaaagcctggccctgcaagtgttgaaatcgatgatcaccctatgcaaattgaagaaacacagtacccgaaaaccttcttctataaagaagacttcat

SEQ ID NO: 117748 - DNA, 257 bp, Glycine max
  unsure (1)..(257): unsure at all n locations
gagcaagcatgggaatgttgttggtggtggtctcatacgctgtccttttcctggttctattcctcggcgtgaagtttgttttccaaagcagaaaattgagaaacataccaccaggtcctcctcctcttcccataataggaaaccttaacctcctcgaacagccaatccaccgtttcttccaacgcatgtcgaaacagtacggcaacgtggtttccctctggttcggttcacgtctggccgntgtcatctcctctcca

SEQ ID NO: 117749 - DNA, 258 bp, Glycine max
gttgagaggctctatggtctcgcccccgttgccaagtacttggttaagaacgaagatggtgtctccattgctgcgctcaacctcatgaaccaggacaaagtcctcatggaaagctggtactatttgaaagatgcagtccttgaaggaggcattccatttaacaaggcttatggaatgacagcctttgagtaccatggaacagatccaaggtttaacaaggttttcaacaagggaatggctgatcactctaccatcaca

SEQ ID NO: 117750 - DNA, 244 bp, Glycine max
agataaggaaaataaagaaattagcgtgaaaaatgttgggtgtgttcagcagctccatagtgtcgccgccggaggagctcgttgccgccggcagccgtacaccgtcgccgaagatgacggcggcggcgctgcggaagtggttcgaggagaagaacccctccgcagtgtcggtggaggtcggagagcatgtccagctcgcttatacccaccagaacgagtcgccgtttcagcccagatcctttgc

SEQ ID NO: 117751 - DNA, 259 bp, Glycine max
taacatcacaatttcaattgtctttctttttacataatcatggccatgaaacgtgctgttcaatccctgcttgcctcatcttccaccctcaccaggaaccttcatgcctcagcagaaaaaaagaagattgtaggggtgttctacaaagggaatgagtatgcttcgaatcccaattttgtgggatgtgttgaaagagcattgggtatacgtgagtggttggactcacagggtcaccagtacatagtcactgatgacaaag

SEQ ID NO: 117752 - DNA, 159 bp, Glycine max
ttcttcctttacagatctccgatgaggcatctcgcagaaggagttcgtactcacattggatcactctaactttcacgacactgtcagcaagcacgatttcatcgtcgtcgagttctacgcccatggtgtggtcatgtaagaagttgctccgagtatgag

SEQ ID NO: 117753 - DNA, 184 bp, Glycine max
agaagaagggatgagacaggaagaagctgaggatgatgattttgagattgatggaactgaattgacacccgagcagcaagcagctttagctgagatcaggaaaaagaaaagcttgctcatccagcagcataggatcaaaaagagcaatgcagagaatcggccaactgttcccaggaagtttgat

SEQ ID NO: 117754 - DNA, 250 bp, Glycine max
tgaagataccgttgatagtatggcaaagtgtgagaagtggattcgggatgatgaagatcatttggagggatctaaggtcagctggtggttgagtagactgatagggcacacgaagaaagtaaccattgactggccattcccgttttctgaggggaagctgtttgttccttctataagtgctgggttggaggggtatcatgtttctgtggatgggaggcatgtgacctctttccttatcgcgctggtttac

SEQ ID NO: 117755 - DNA, 235 bp, Glycine max
acgtgtgtgacattaccaaggatagaaaggttctcaagaagactttgaaggaacgggagggatatgaacgaccaaatgatggagctgtagttcaagtgaaactgattggcaagttgcaagatggaactgttttcgcttaagaagggctacgttgatgaacagccatttgagttcaaaattgatgaagagcaagtaattgatggacttgaccaagtgtgaagaactgaagaagggg

SEQ ID NO: 117756 - DNA, 248 bp, Glycine max
ggaagctggagggaacaaaggtgtgtctgataaacagattcgtttgaagattttctcgccgaatgttctcgacattacgctcgtggatctccctggcatcaccaaggttcccgttggcgaccagccttcggatatcgaggctcgaatcagaaccatgatcatgtcttacatcaaaactccaacctgtgtcattctcgctgtgacgccggcgaattcggatttggcgaactcggatgctcttcagatgg

SEQ ID NO: 117757 - DNA, 243 bp, Glycine max
gtcgactctgggaagtcaactaccactggtcatttgatctacaagcttggaggtattgacaagcgtgtgattgagaggttcgagaaggaggctgctgagatgaacaagaggtcattcaagtatgcctgggtgcttgacaagctcaaggctgagcgcgaaagaggaattaccattgatattgctttgtggaagtttgaaaccaccaagtactactgcacagtcatcgatgccccggacatcgtg

SEQ ID NO: 117758 - DNA, 253 bp, Glycine max
atagagcaagcaatcacaaacctcactaagcttctcactgatgaaaataggggagaggatctgtgcagccttctcactcagttgaggccattcttctccttgatacctaaggcaaaaactgcaaagattgttaggggaataattgactcagttgctaaaataccagggacatctgatctacaaattgcactctgcaaagaaatggtgctatggactcgtgctgaaaagcggacctttctgagacagcgagttg

SEQ ID NO: 117759 - DNA, 250 bp, Glycine max
aatcaatctccaggctatctatcaagtaagaaagctgttaagaggaggagaatggctgatgatggaagcaggagggaattgatattcaggtcgaagcttccggatatctacatccccaaacatatgcccctccactcttactgcttcgagaatttgagagagtgtggttcacgccccgcctgatcaatgcccccacgggagacgtctacagctaccacgaggtggacagcaccgccagaacggtggcgag

SEQ ID NO: 117760 - DNA, 252 bp, Glycine max
ataaaaatgggttcttcttcttccatatggaccgtgtgtttgattttggcatcactggcctctgcagcactctgtgccaaccctcgtagaccagtggatgtacaatttggccgaaactacgtgcccacatgggcctttgatcacatcacatacttcaatggaggttctgacattcagcttcatcttgacaagtacactggtactggcttccagtccaaagggtcatacttgtttggtcacttcagcatgtac

SEQ ID NO: 117761 - DNA, 232 bp, Glycine max
ttccatctcttcattccttaatttacaacctccactcattccataaatctctgtttactctcctcgattttaccgcaacatgacacaagaaggaaatggcaacaccaacttctgtatgagtgttaacaacaacggctacattagcgctaatgacccgttgaactggggcgcggcggcggacgcgatggccgggagccacctcgacgaggtcaagcgcatggtggaggagtac

SEQ ID NO: 117762 - DNA, 248 bp, Glycine max
gagttatgttctcaaggagcccatcggagttgttgcattaattactccatggaactatcctctattgatggctacatgaaaagttgctcctgctctagctgctggttgtacagcaatattgaagccatctgaattggcatctgtgacctgtttggagctggctgaaatatgcagagaagttggccttcctccaggggtattaaacattgttactggattaggcaatgaagctggtgctcctttgtcat

SEQ ID NO: 117763 - DNA, 254 bp, Glycine max
agagggagtcagagaaaccctaggtaagaagaaaagatgccggctggtcatggtttgagatcccgcaccagagattccttctctcgtcctttcaggaagaagggaaccatcgccctcaccacatacctgagaacctaccacgtcggcgactatgttgacgtcaaggttaacggtgccgttcacaagggaatgccccacaaattctaccatggccgcaccggacgcgtctggaatgtcaccaaactgctgttggc

SEQ ID NO: 117764 - DNA, 251 bp, Glycine max
atcaaccttctttctttttctgtgagcctttctttcaggttcttaacttgatcagtgtgcagtgtccaaatcataagggtagttgcaaattgcaatggctaagcatgatgttgagggtggttccttctctgcaaaggactaccatgatcctcctccagcaccgttgattgatgctgaggaactcacacagtggtccttctacagggctttgattgctgagttcattgccacaatgctcttcctttacatca

SEQ ID NO: 117765 - DNA, 253 bp, Glycine max
atgaactggagaagaaactgaagtacgcaggagatgtttcttccggaattatctttggaagggagcttgtaaattctcctgctaatgtgctcacaccaggggtgttggcagacagaggcagctaagattgcttctacctacagtgatgttttcactgctaaaatattaaatgccgagcaatgtgctgaattaaaaatgggatcctatctgggtgttgctgcagcctcggaaaatcctcctcattttatccatc

SEQ ID NO: 117766 - DNA, 253 bp, Glycine max
tgtgaaccagaagtacctcatgatggtgccatgtgtgaccttctatggtcagatcctgaagatattgtggataactggggtcttagtccccgcggtgctggttacttatttggtggcagtgttgttacttcctttaaccactcaaataacattgactatatatgtcgtgcacatcagttggtaatggaaggatataaatggatgttcaataaccagatagttactgtctggtcagctccaaattattgctaca

SEQ ID NO: 117767 - DNA, 232 bp, Glycine max
gtctccgctgtcttggaccacgagggttcagattgcaattcatgctcataggggccttgaatagatacatgagcacacaaaaactcattatgttcaccgtgatatcaagacaagtaacattttacttgatgcttcctttagagcacgaattccagattttgggttagcggaacttgttgggacaaccaatgagggagaaatttcaactatcaaagttgttggtacatatgga

SEQ ID NO: 117768 - DNA, 252 bp, Glycine max; identical to SEQ ID NO: 117059

SEQ ID NO: 117769 - DNA, 252 bp, Glycine max
gagaaaataaaaagcaatgggtagccttgaagcggaaagaacaacagtaggattggcagcaagagacccttcagggattctctccccatacacctacaatctaagaaacacaggccctgatgatgtttacataaaagttcactactgtggaatttgccattctgatctccaccagattaaaaatgatcttggcatgtccaactatcccatggtcccaggacatgaagtggttggtgaggtactggaggtggg

SEQ ID NO: 117770 - DNA, 241 bp, Glycine max
tgacgatgatgatgatgtggatttgttcggtgaagagacagaagaagagaagaaggcagcagaggaacgggcagctgcagtgaaggcatctacaaaaaaaaaagagtctgggaaatcatctgttctgttggatgtgaaaccatgggacgatgaaactgacatgaagaagctcgaagaagcagtgagatctgttccagatggaagggttgctttggggtgaatccaaattgtaccgttgggt

SEQ ID NO: 117771 - DNA, 250 bp, Glycine max
atcttagttatctaattacctcaattaatcccttaattgcaagcatcatggctgaggagaaacaccaccaccacttccaccaccacaagggcgatgatgtgcctggcgaggttgattataagaaggaggagaagcaccacaagcatcttgagcaccttggggaacttggtgctgcggctgccggtgcttatgccttgcatgagaagcatgaggccaagaaagacccagagcatgctcacaggcacaagta

SEQ ID NO: 117772 - DNA, 247 bp, Glycine max
attcgctgttttcgacggccacggttgctcacatgttgcgacgatgtgcaaggagaggttacacgagatagtgaaggaagaggttcaccaagcgaaggagaatttggaatgggaatcaacgatgaaaaagtgtttcgcgcgcatggacgaagaggttttaaggtggagtcagaacaacgagactgcaagttgcaggtgcgagcttcagaccccgcatgcgacgtgtgggctccaccgcattgtggcc

SEQ ID NO: 117773 - DNA, 250 bp, Glycine max
gggcaccctttgatttgtttgacaccaggaagaagatgaacaacatcaagctttatgtcaggagggtgtttataatggacaattgtgaggagctcattcctgagtaccttggatttgtgaaaggtgttgttgactccgatgacttgccgctcaacatctctcgtgagatgctgcaacaaaacaagatcctgaaggtgatcaggaagaatctcgtgaagaagtgcattgagatgttcaatgaaattgcgga

SEQ ID NO: 117774 - DNA, 245 bp, Glycine max
gtcagtagtcatatgcttgtctcaaagattaagccatgcatgtgtaagtatgaactaattcagactgtgaaactgcgaatggctcattaaatcagttatagtttgtttgatggtatctactactcggataaccgtagtaattctagagctattacgtgcaacaaaccccgacttctggaagggatgcatttattagataaaaggtcaacacaggctctgcctgttgctttgatgattcatgataa

SEQ ID NO: 117775 - DNA, 246 bp, Glycine max
cccacacacacagttcgtcggaatgggaagggtgattcgcgctcagcgtaagggtgctgggtcggtgttcaagtctcacactcaccaccgcaagggtccggcgaggttccgcagcctcgacttcggcgagcgcaacggctacctcaagggcgtcgtcaccgacatcatccacgaccccggtcgcggcgcccctctcgccaaggtggcattccgccaccccttccgctacaagaagcaaacggagct

SEQ ID NO: 117776 - DNA, 247 bp, Glycine max
gcacgtttagcctcgttctatgaacgtgctgggaaggtaaaatgtcttggaggccctgaacgtacaggtagcgtaactattgttggtgctgtttcgccacctggaggagatttctcagatcctgtgacatctgcaaccctgagcatagttcaggttttctggggtttggacaaaaagcttgctcagaggaagcactttccttctgtaaactggcttatttcttattcaaaatactcaacggcacttg

SEQ ID NO: 117777 - DNA, 222 bp, Glycine max
aagttaatagcattccgcaaaatggctgccaccaccttagtctctgaagtcactctcccctcctcctccggccagcggaagatgccgctgatgggcctcggcaccgcgccggaagcaaccagcgcggttaccacaaaagatgctgttcttgaggccatcaagcagggctacaggcactttgatgctgcttctgcttatggtgtggaacatctgtcagagaag

SEQ ID NO: 117778 - DNA, 239 bp, Glycine max
atcttcccaaaagaatacaaatctctttgaagttttcgtagttctctgaatcatggagatggaacgcgtcttcgaatttcctcacacttacatggatcgtcgcccgagaaagagagcgagattgggctgggacatccctgaagttcccaaggctcaggtaggattgttttgtggacaagatgttgggactatttcaagctttgctccttcaaggggtccctcagaacataccactagtt

SEQ ID NO: 117779 - DNA, 246 bp, Glycine max
gtttaaacctaattctcatttcttcatcgttcgattcttctcctcctaaagatgcagatcttcgtgaaaactttgaccggtaagaccatcacccttgaggtggagtcctccgacaccatcgataacgtgaaagctaagattcaagacaaggaagggatcccacctgaccagcagagacttatctttgcgggtaaacagcttgaggatggtcgaaccctgccgactacaacatccaaaaggaatcca

SEQ ID NO: 117780 - DNA, 252 bp, Glycine max
aataaccaaaaagaaattgagctctttgagggccaatctcttctgtacatgcagctatatgggcacctaagacctatgtgtcttaagtgggctgttcaactaggtattccagacataatacagaaccatgccaaacccatttctctttctgacttggtctctactcttcaaattccaccagctaacgctgcttttgtgcagcggttcacgagtcttcttggcacacaatggaatctttgagatccatgagag

SEQ ID NO: 117781 - DNA, 245 bp, Glycine max
tgttgatcgagataactagaaacagtgtgatgaaaatgaaggtccttgttttcttcgttgctacaattttggtagcatggcaatgccatgcgtacgatatgttccctctccgaatgaacactggctatggtgcccgtactccggaggtgaaatgcgcaagttggaggcttgctgtggaagcacacaacatctttggctttgagaccattcctgaagagtgcgttgaagcaacaaaggaatacatc

SEQ ID NO: 117782 - DNA, 239 bp, Glycine max
gtgtgtttgctggctagaatgatggctgctaatttgtacttgtctcagattgaggatctcatgtttgagttgtctatgtggcgctgcaatgatgagctagtgttcgttctgatgaactccttagctcctcaaagagagatgcaaaacattatattgagttttggaaacagattgctcccaatgagccgtatcgtgttattctcggtgatgtaagggacaaattatataatacacgtgaa

SEQ ID NO: 117783 - DNA, 242 bp, Glycine max
tgagaaatggcacaagaaacctttctattcacatctgaatctgtaaacgacggtcaccccgacaagctgtgcgaccagatctctgatgcagtgctcgatgcgtgccttgaacaggaccctgacagcaaggttgcctgtgagacatgcaccaagaccaacatggtcatggtctttggagagatcacaaccaaggccaacgtagactatgagaagattgtccgtgacacatgccgcgaaattgg

SEQ ID NO: 117784 - DNA, 275 bp, Glycine max
aacacaactacaagaaagaacttccttataaccaaaaccaacaacaactatggcaagttatcagaagcactacgatgatcagggtcgcaaggtcgacgagtatggcaatgttgagagaaagatgacgaatatggcaacccggttcatgccactagtgtcacttatgtagccaccaaaagtgttggtggctacaatgatgacgctaataagcacattgatattactggtgtctatcccgagaaagacaccggtagacatcattttggtcgtggtta

SEQ ID NO: 117785 - DNA, 221 bp, Glycine max
ctctctgcagcaacaagatgtggaaccacccattgagagaaaccgatgacgaaagcggatctcgtccgctgtagtggctgatcatctagttttgccaggttcctgactgaaagtgggacttttaaggatgcagatctgctagtcaacagggatggagttcgaacggccgcgcagaatgatgtcgaagctccacctccaatgacgcctacagacaaccagtt

SEQ ID NO: 117786 - DNA, 270 bp, Glycine max
gttctgatcttctttcttttttgtctggttccctttcttccttcaaccaatttcgagatccgaaaccggcatcagatccgatccgaaatgtacggattcgaagctctcaccttcaacatccacggcggcttcctagaggccatcgtccgcggccaccgcgccggcctcctcaccaccgccgattacaacaacctctgccaatgcgaaaccctcgacgacatcaagatgcacctctccgccaccgagtacggtccttacctccaaaacgag

SEQ ID NO: 117787 - DNA, 271 bp, Glycine max
acaaaattcattgcacagtgttattttcagtatcagcatcatggctccaattgcagtgggagatgtcattccagacggcattttggcttacttggatgaagaaaacataccccaaactgtctctattcactctctcgacgccggcaagaaagtcatcatctttggggttcccggtgccttcactcctacatgcagcttgaagcacgtgcctggcttcattgagagagcagaagagctgtaaggaaagggtgtggacgagataatctgtatc

SEQ ID NO: 117788 - DNA, 276 bp, Glycine max
tgattctcttcaatgtatggcaagtaggaagagaccccaaatactgggacagaccatcggagttccgtcctgagaggttcctagagacaggggctgaacgtgaagcagggcctcttgatcttaggggacaacattttcaacttctcccatttgggtctgggaggagaatgtgccctggagtcaatctggctacttcgggaatggcaacacttcttgcatctcttattcagtgcttcgacttgcaagtgctgggtccacaaggacagatattgaagg

SEQ ID NO: 117789 - DNA, 273 bp, Glycine max
  unsure (1)..(273): unsure at all n locations
tcaccaacaaccgcaaacacaaacacagaccctttcccttcctttnctccctccctcattcccttcttcaatttcatcaacacaaccatcaatttcatcaaccatcgcataataatagtattatcatgatagccgtggcccgaaaggacatggaccggatcaagggcccgtggngcccggaggaggacgaggcccttcagaagctgtggagcggcacgggcccagaaactggtcgctcatcagcaggtccattccgggccggtctgggaagtc

SEQ ID NO: 117790 - DNA, 277 bp, Glycine max
atggttaacggatattaaagacacctctaaagaaggatatagttttgaagagatatgcatcaagaaagaagcgtttgagggagaagagaagttttgtgcaaaatccttgggaacagtaattggttttgccatttcaaagctgggaaagaacattcaagtactttcaagttcctttgtcaataagcaagagcaatacactgtggaaggagtgcagaatcttggagacaaagcagtgatgtgtcatgggctaaatttcagaactgcagtattttactgc

SEQ ID NO: 117791 - DNA, 264 bp, Glycine max
  unsure (1)..(264): unsure at all n locations
tttcaaccccatccaatcctcacatgcatgctgtctctgccaaagtgccaagtcacataacatttccattgttaccattctttctttccatcacaactacttaacaagnctctgatcctcactttctctcacacaaaaacacactcaccatggatcatcgcaaaccattgctacccacttcctctgatgctgctccaaatccacacactcgcaaggaccttcttctagttatttgcggcttgctattactctcttcccttgttg

SEQ ID NO: 117792 - DNA, 256 bp, Glycine max
attcacatatgagccttgagaaaacatctggtttgtccactgtcttcattgaatctacactaatggacaatggatggcttcctgaatctgctgatccctcaatgctgatcatagaggccattcatgttattagctgtggatatgaagagacgactgcatggagaaaagagattagatggatctatggttcagttactgaggatatcttaacggggttcaagatgcaatgccggggatagtcgatcagtctactgca

SEQ ID NO: 117793 - DNA, 264 bp, Glycine max
attaattttctcatctttctcctcttcacaagtaacaataacaaaggcgatgacacaaattctactgcatgggaccctccaagtcacaatctatgagctggataacctcaaggctggaagtggtggtaatattttaaccaagttggtacataacatcgaagagactattggtattgggaaaggaattactaaactatatgcaaccattgatctagagaaggcacgggtgggaagaaccagaatcatagacaaggagcacacaaa

SEQ ID NO: 117794 - DNA, 274 bp, Glycine max
attaaattaaaagtatcgttgaccaactgaaatatgtccacaccgtcgcggagatcggttgccgttgccgtgagcggcgggtccaagggtagccggcgagcagtgcagtgggctgcggacaatttggtccctcaagccgataggttcatcttagttcacgtcatccctcgaatcacttcaattgcaacaccaactggagagtatattcctatttccgaagcagacgccgatgtgtttgcagcttctgtgctggatgcgaaactaaaatctgaac

SEQ ID NO: 117795 - DNA, 269 bp, Glycine max
ctcattcatacgtggtgttgttactgctgctcttttctcttttcttttctctttagttctctcttcccctttctttttctttttcttcttcttctgagcttgtttaagcttttcttccattaacatattatcacaatgtgtggtattcttgctgttcttggttgttctgatgactctcgagccaaaagggtccgcgtgcttgagctctctcgcagattgaagcaccgtggccctgactggagtgggctccatcaacatggtgactgctt

SEQ ID NO: 117796 - DNA, 269 bp, Glycine max
ggaatggaagtcctgcaaagaggacagtgcttcatgatctttatgagaaagaagggcagagtccatggtatgataatctctgcagacctgttacagacctgcttcctcttatagcaagtggtgtcagaggcgtcactagcaaccctgcgatctttcagaaagctatctcatcatcgaatgcttacaatgatcagttcagggaacttgtgcaaacagggaaagacattgaaagtgcatattgggaacttgtagtgaaggatatccaagat

SEQ ID NO: 117797 - DNA, 267 bp, Glycine max
tgctgttagggacatgcgtcaaactgttgctgtgggagtcatcaagaacgttgagaagaaggatcctaccggagccaaggtcaccaaggctgcccagaagaagaagtgaatcgtgcgggctggttcatcaggggatgttggttacaataaatgttggtttcttttctgtactcttgtgtcttcttttctaggtagcttgtttttcggacaaagtttgaagtctccaccatcatctcgcaaccgtcgatcaagaacccagttctggga

SEQ ID NO: 117798 - DNA, 273 bp, Glycine max
agcgactttgaaccagaagctatacttcacagctacaaaaaaagctttaatggtttcgtcatcaagttaacagaagaggaagcacaaagaatggcagaaatggacaatgttgtctctgttttcccaaataggaaaagtcgtctgcagacgactagatcgtgggacttcataggcgtttcacagcaaatccaaagaacaagtttagagagagacataattgttggagtaatagactcaggactttggcctgagtctaagagcttcagtgatgaa

SEQ ID NO: 117799 - DNA, 272 bp, Glycine max
gcaaattccaggttttcttcctttagcctagcttttactcattatctctctttctctctctctcagaggttctagaaagatccactccgaaatggacggtgcgccacaatccgccggtgccggaggtccggcgtcgttccttctgaagacctacgacatggtggacgatgcctccaccaacgacatcgtttcgtggagctctaccaacaacagcttcgtcgtgtggaacctcccgagttcgctcgcctccttctcacgacctatttcaagca

SEQ ID NO: 117800 - DNA, 274 bp, Glycine max
tgaatctcagaattctctaaaagagatctttttctgctctttgaagaaagaagggtctttgcttgattttggagatgtctctgctctcagatctcatcaaccttaacctctccgataccaccgagaaggtgatcgcagagtacatatggatcggtggatcaggaatggacctgaggagcaaagcaaggactctcccaggaccagttagcgacccttcagagcttcccaagtggaactatgatggttccagcacaggtcaagctcctggtgaaga

SEQ ID NO: 117801 - DNA, 264 bp, Glycine max
cttgcctatgttattacagtggttgagctgatctgccttgtcaggctgattgattacgcaactaactgagacgatgagtggagctgttcttgttgctgttgctgctgccatcggtaacttactacaacgatgggataatgcgactattgcaggatctatcttgtacataactagggagtttcaattacgaagtgaacccacagttgaaggtctaattgtggctatgtcacttattggagccacgtggttactacatgctctgtg

SEQ ID NO: 117802 - DNA, 261 bp, Glycine max
cttctctttacacccccctctctattttgcgttcattctgtcttcttgaagtctttccctagccaatggccactgatcgtttgacccgggttcacagtctccgtcagaggcttgatgaaaccctcactgccaacaggaacgaaattttggcccttctgtcaaggatcgaagctaagggcaacgggatcttgcaacaccaccaggtcattgctgagtttgaggaaatccctgaggagaacaggcagaagcttactgatggtg

SEQ ID NO: 117803 - DNA, 269 bp, Glycine max
gcctcacaaaagcaaagatcaaacaaaccaaggacgagaacacgatgttgcttgaacttgcacttggtttattggttttggctctgtttctgcacttgcgtcccacacccactgcaaaatcaaaagcacttcgccatctcccaaacccaccaagcccaaagcctcgtcttcccttcataggacaccttcacgacttaaaagacaaacttctccactacgcactcatcgacctctccaaaaaacatggtcccttattctctctctacttt

SEQ ID NO: 117804 - DNA, 266 bp, Glycine max
aatccacacccaacattctcacaagtcacagccaaacaccatttcattaattcttgcagaatattgcttagttttgttttatctgaatttggaaacagcttttgaatggctttttcaagagttgcactgctaatatgcacggtcgggtattttgtgattgcctctgccggcaatttccaccaagattttgatatcacatggggagatggtcgggctaagatactcaacaatggagagcttctcactctgtcacttgacaaagcctc

SEQ ID NO: 117805 - DNA, 265 bp, Glycine max
agactaaatagtgctaagaactctaatggtggacaagatgaatatgctgatattcaagtcccttcagatttctttgctgctagttttctctatcagaaacaccacagcagaaaagaaaacccatcacacaaaacacacatacataattcacatggacaagttcaacatgccagagagttttaacgaccatctcctctggtttgattcatcactaaaatcagtatcagactcagcagagatgctctacacatataaaaaagtagct

SEQ ID NO: 117806 - DNA, 243 bp, Glycine max
aatcaatcttctaagagtgtttggttgaaagtagcaaagatgtttcctttcgggctaaagggtcaatagataaaggggactatggtggttatgcagaagactgtgttggatatcaacagcatcaccagtgttggagggatcgttgaccaaggcttaggcttcataggcagtgcagtcgatgcacttacttttgcagccagcaaaatctccatccagttgattagtgctaccaaggctgatggt

SEQ ID NO: 117807 - DNA, 269 bp, Glycine max
ggtttacagggttggcttgtatgacagttatgttcataactacatttctgatgatactagtcgcaatctttgtctggcagaaaagtgtcttgattgctgtagtatttcttttattcttttgggtgatatagggcgtatatctatcagcagcattcatcaaagtgcctcagggaggatgggtacctctagtcttatcattcatcttcatgattgttatgtacgtgtggcattatggaactcgtaggaagtacagctatgatctgcacaac

SEQ ID NO: 117808 - DNA, 253 bp, Glycine max
ccgaactccgacggcaccactaacggcgcaatcactgaggcgcagagacagcagcaacagcaaggggggaaggcgttagcgtgtaagaagccgccgtcaaaggaccgtcacagcaaggtggacggtcgcgggcgccgcataaggatgccaatcatatgcgccgcacgtgtgtgccagctcacgcgcgaacttggccacaagtccgacggtcaaaccatcgagtggctcctccgtcaggccgagccctccgtca

SEQ ID NO: 117809 - DNA, 251 bp, Glycine max
gttgcagatggaggtggaaatttaccgcgtaacgcagactggctccttgacgctcgcggaaagaaagccggaaaatcaaaatcatgccatcatcttcactcgcggtgatgcagttcagactattgatatgaatcaggacaactactttgaggaggcacttaaaatgcgaaatctcttggaagaatacaggagttactatggtatccggaaacccactattttgggagttagggaacacatttttactggtt

SEQ ID NO: 117810 - DNA, 268 bp, Glycine max
ctcattcatacgtggtgttgttactgctgctcttttctcttttcttgtctctttagttctctcttcccctttctttttctatgtcttcttcttctgagcttgtttaagcttttcttccattaacatattatcacaatgtgtggtattcttgctgttcttggttgttctgatgactctcgagccaaaagggtccgcgtgcttgagctctctcgcagattgaagcaccgtggccctgactggagtgggctccatcaacatggtgactgct

SEQ ID NO: 117811 - DNA, 265 bp, Glycine max
acttggtcttcatcttctgttctgatccaggtatggcttctaaacgcatcttgaaggagctcaaggatttgcagaaggatcctcctacctcatgcagtgcaggccctgtggctgaggacatgtttcactggcaagccacaatcatgggacctgctgatagcccatatgcaggtggtgttttcctagtttcaattcattttcctcctgactatcccttcaagccaccaaaggttgcttttcggactaaggtgttccacccaaacat

SEQ ID NO: 117812 - DNA, 175 bp, Glycine max
cagaattcaaaacgcagatgcactccaacatgttctgaggaaagctgaggagtatcagggcacagtgcctcctgaaactccctactcagaatttgagcacaagttccaggagattggtttggagagagggtggggtgacaacgcggaggtgatccttgagtcaattcaaattctc

SEQ ID NO: 117813 - DNA, 263 bp, Glycine max
tcctatcgtagcaaagaaagaaagaaagaaaaccctagcttaccttttcaactttcaagatgcaaatctttgttaagacactcactggtaagacaatcacccttgaggtggagagttcagataccatagataatgtaaagtccaagattcaagacaaggaagggatcccaccagaccagcaacgtctcatttttgctggcaagcagcttgaggatggacgtacacttgctgattacaacattcaaaaggagtccactctacac

SEQ ID NO: 117814 - DNA, 264 bp, Glycine max
agatatttcataagatgaaggataaagttttgggctcatctgatcctgattctggtacaggaaagagcaagatgaagaagaacataactcatggctttcacttggtaaaggggatatcaggtcatgccatggaagactatcttgttgctcaattcaagcaagttgacgacaatgaattgggtttatttgcaatatttgatggccactcaggtcacagtgtacctgattacttgaagtctcatttgtttgataatatcttgaaag

SEQ ID NO: 117815 - DNA, 264 bp, Glycine max
catcgttggtgttcctcggcaattagttattaagagagacgcattagccatcccagagttggtcaacaaagctggcttgactttaccccttgttgcaaagccactagttgccgatggaagtgcaaagtcccatgaattatcccttgcttatgagcatttttcccttcaaaatcttgaacctcctcttgttcttcaggagtttgttaaccatggaggtgttcttttcaaggtttatatagttggtgatgctataaaggtcgttag

SEQ ID NO: 117816 - DNA, 266 bp, Glycine max
cctctgtgacatttgtgctgctagttcatatatttgcggctgacaccgagaaggaaagcaggaaaaaaaacaaaaaggagcagatgggtagctcaggtttctcatggaaattggcggatcatccaaagcttccaaagggtaagactgtggctgttgtggtattggatggttggggagaggccacacccaatgagtacaactgcatccacaaggctgaaacaccctgcatggattcacttaaaaagggtgctcctgaacggtggaga

SEQ ID NO: 117817 - DNA, 253 bp, Glycine max
catttctaatctcattctccttctgttcaaacactctctctcatggcatcagataagaagattaggatcggcatcaacgggtttggaaggattggccgtttggtggccagggttgcccttcaaaggaatgatgttgaacttgttgctgtcaacgatcctttcatcaccactgattacatgacatacatgttcaagtacgacaccgttcatggccagtggaagcattttgatgtgaaggtgaaggactctaaga

SEQ ID NO: 117818 - DNA, 251 bp, Glycine max
gtgaatcccataatcatgaagaaaggaaacttgggacttggtctcaaactctcagttcctgttgcagatcaatctaattttgccaggttcctgactgaaagtgggacttttaaggatggggatctgcttgtcaacagggatggagttcgaattgtctctcagaatgatgtcgaagctccacctccaatcaagcctacagacaaccagttaactttggcagacatagatgtaatcaaagttgttggaaaggg

SEQ ID NO: 117819 - DNA, 258 bp, Glycine max
gggtcaaaccggtccggttcagtgaacccttgaaacgacgactcgaacgccgacggaaacacgatagctccttttggtatcgtgtacgattccgtcaacggaaacctttccgccgcgacgtgcggcaccagcgtcgccggcggccggaacctcaccacctcacgtgccaccgcctgagtgtacttcatctccctaagcatatcggcagtaatcagttcatccgactccggcgaccagattccggcgacttcggccctc

SEQ ID NO: 117820 - DNA, 257 bp, Glycine max
ataataattggtgcaaagtacttcaatctggtaaatcactttaccaaagatgatatcatatctccaagagactcgcaaggtcacggatcacactgtgcatccacagttgctggaaactcagtaaactctgcaagtctatctggatttggctcagggactgctcgtggaggagttccatctgcccgaattgctatgtacaaagtatgttggctcacagggtgtggtgatgctgacaaccttgcagcatttgatgaagc

SEQ ID NO: 117821 - DNA, 257 bp, Glycine max
cttagatgaggtatgcagatcttcgtcaagaaccttacgggtaagactattaccctcgaggtggagagctccgacaccattgacaatgtgaaggcgaagatccaggacaaggaaggaatcccaccggaccagcagaggcttatttttgctggcaaacagctagaggatggcaggaccctcgctgactacaacatccagaaggagtcaactctgcacttggtgttgcgtcttcgtggggggtattacactggcgctga

SEQ ID NO: 117822 - DNA, 262 bp, Glycine max
attcacatatgagctttgagaaaacatttggtttgtccactgtcttcattgaatctacactaatggagaatggatggcttcctgaatctgctgatccctcaatgctgatcaaagaggccattcatgttattagctgtggatatgaagagacgactgcatggggaaaagagattggttggatctatggttcagttactgaggatatcttaacggggttcaagatgcaatgccggggatagagatcagtttactgcatgccctt

SEQ ID NO: 117823 - DNA, 263 bp, Glycine max
ggcagccttgaagctcattggcggtaatctggctgaccacacattcttgttccttggggctggagaggctggaactggaatagcagaactaatagctcttgagatgtcaaagcagacaaagacacctatagaggagactcgcaagaagatatggcttgtagactcaaagggtttgattgttggttcaagaaaggcttcacttcaacacttcaagcagccttgggctcatgagcatgagcctgttggcagtctcctagaagctg

SEQ ID NO: 117824 - DNA, 290 bp, Glycine max
agttttctcaaattgcaaggacattggtttcaaccttcaaccatatgggattcaatccatgctcaagggaggccataagcacctttctggcctcgacgaagcggttctcaagaacatcgacgcttgcaaacaactttccactattactcgaactatcctcggtcccaatggaatgaataagatggttatcaatcacttggacaagcttgtggtcaagaacgatgctgggacaattgggaattaacttgaagttcagcatcctgctgccaaggttttggttttgctgggaa

SEQ ID NO: 117825 - DNA, 296 bp, Glycine max
ccagaagatgcatcaagcatgaatctagtatgtgggaagaatgtgctgattgacatgagcatacatacagcatatgtaaaggccattcgtgctgcacaacattacatttatatagagaatcaatatttcattgggtcttcatataattggagtcaacataaagaccttggtgctaataatttaattcctatggaaattgcgctgaagattgctgcaaagataagggcaaatgagagatttgcagtgtacattgttattccaatgtggccagagggtgttccaactggtgctgccac

SEQ ID NO: 117826 - DNA, 294 bp, Glycine max
catcgttggtgttcctcggcaattagttattaagagagacgcattagccatcccagagttggtcaacaaagctggcttgactttaccccttgttgcaaagccactagttgccgatggaagtgcaaagtcccatgaattatcccttgcttatgagcatttttcccttcaaaatcttgaacctcctcttgttcttcaggagtttgttaaccatggaggtgttcttttcaaggtttatatagttggtgatgctataaaggtcgttaggcggttttcattacctgatgtaagcaagtg

SEQ ID NO: 117827 - DNA, 296 bp, Glycine max
gaagtgaccccaatatacttagccatatctttacttcccaaaacttgctctacaatgagtttccttcgttcttttgcaagaaacaaggatatatcaaaagtaggacgcagaggtatccattgcatgcagaaactatgtgcagaaaaaatatctcctgattcactagagaaggcccaaaatcgtgtgatagatgctgcactcacacttgttcgagaaaatacaaggcttaagaaagaactcgtgcatagtttgggaggtgctgtggcaacttcaactcttcttggagttcctttggg

SEQ ID NO: 117828 - DNA, 252 bp, Glycine max
cgatgagatgcatcgagcatgtatctagtatgtgggaagaatgtgctgattgacatgcgcgtacttatggcatatgttcaggccattcgtgctgcgcgacattaccttgatcttgagtatcggtatctcattgggtcttcatatagtcggagtcatcgtctcgaccttggtgcgaataatagcatgcctatcgaaatttcgctgaagactgctgcatagacaacggcctatgagccatttgcagtgtccatt

SEQ ID NO: 117829 - DNA, 291 bp, Glycine max
ctcatggcgctcgcaacttctgcatccattcgccctggtaacaagctcttgcttgggtcagttggtccgcagacagctcacattccatcacgggtcatgcttcacgtgtttgatgcagagaagagatacatggcttctgggcaagacaccattgtgctggctggagctgaatatggcagtggaagctctagagattgggctgccaagggtccaatgctactgggagtcaaagctgtgatagccaagagtttcgagagaattcatcgtagtaacttggtaggcatgggtatc

SEQ ID NO: 117830 - DNA, 291 bp, Glycine max
gctgtatccgcatctcgcttccttcccaaactgtaaatgaatggtttttgagcaacagcagttataagagaaaagggattcagcgaagatgacatcggttggtgtggcaccaacttcgggtttgagagacgccagtgggcatggagcagcagctgcggatagattgccagaggagatgaacgatatgaaaattagggatgatagagcaatggaagccacagttgttgatggcaacggtacggcgacaggacatatcattgtgactaccattgggggtagaaatggtcagcc

SEQ ID NO: 117831 - DNA, 287 bp, Glycine max
cggctcgagatcaaagtactcaaattagcatggctgtcatggttgcattcttgaatttgatcatcatcttttcagtagtctctacaacaggcaagtcactgagcttaaactactatgcaaaaacatgccctaatgtggagttcattgttgccaaggcagtaaaggatgccactgctagggacaaaactgttccagcagcaattctgcgaatgcacttccatgattgtttcgttcgggggtgtgatgcctctgtgctgctaaattcacaaggaaacaacaaagcagag

SEQ ID NO: 117832 - DNA, 292 bp, Glycine max
cttcattccttaatttaaaacctccactcattccataaatctctgtttactctcctcgattttaccgcaacatgacacaagaaggaaatggcaacaccaacttctgtatgagtgttaacaacaacggctacattagcgctaatgacccgttgaactggggcgcggcggcggaggcgatggccgggagccacctcgacgaggtcaagcgcatggtggaggagtaccggaggccggtcgtgaagctcggcggcgagaccctgacgatctcgcaggtggcggcgatcgcggcgca

SEQ ID NO: 117833 - DNA, 288 bp, Glycine max
ggtacgaaaaatgtcgaagctgatcttcgtgttcctttcgcttattcctcttctctgcacctccttctccccagagagaccctcagatcgacgcgtcctcgttttgctcgatgacttcgccatcaaatcctctcattctctcttcttcaactccctcaaatctcgcggcttcgatctccaattccacctcgcagacgacccccaaattgcgctccagagatacggccagtacctctacgacgccctaattctcttttcccccaccattgaacgttttggaggatccat

SEQ ID NO: 117834 - DNA, 293 bp, Glycine max
gttctagatcgcgagcggccgccctttttttttttttttttttaaagcgggcaaaaatctccaaatccactcgggttcaaaaacaagggggtagtaatttacccacatgccatgatggttttaaccaaatagatatcccataaaaattgggcaaatagccccatgattgaagataattcaaacccggatggatgaagtattgattacccccttgtcttaaatggaattgctcggatcactatctggggaaataaagctgcaagggcagccccaatgaaaggtccaccccaaaa

SEQ ID NO: 117835 - DNA, 293 bp, Glycine max
cggaggcctaagccaaagatcctgcggacattgtaagtaaatcttatgaagatggagatgataactaatgtgaccgagtatgacgcaattgccaaggaaaaattgccaaagatggtttatgactactatgcatcaggggcagaggatcagtggactttgaaggagaaccgaaatgcattctcaaggattctgttccggccgcgtattcgtgttgatgtgagcaagatagacttgactgcaactgtattgggcttcaaaatatcaatgcctatcatgattgctccaacagccat

SEQ ID NO: 117836 - DNA, 291 bp, Glycine max
atggttaacggatattaaagacacctctaaagaaggatatagttttgaagagatatgcatcaagaaagaagcgtttgagggagaagagaagttttgtgcaaaatccttgggaacagtaattggttttgccatttcaaagctgggaaagaacattcaagtactttcaagttcctttgtcaataagcaagagcaatacactgtggaaggagtgcagaatcttggagacaaagcagtgatgtgtcatgggctaaatttcagaactgcagtattttactgccataaagtccgtga

SEQ ID NO: 117837 - DNA, 289 bp, Glycine max
cttttgcttccttaacctattttgttatcctcaattttcaatggctcaatcccattctggaaaaacctcttccatgacttcaatactcctcctgtttatgcttcttatcagtaatacaggcacaacaggtgcacaatctggtgtatgctatggaagagttggcaacaatctgccatcgccacaagaagtagtttccctttttaaacagtacggcttccaaaggatgagaatctatgatcgaaaccatgaagtcctccaagctctgagagattccaacattgagttgctg

SEQ ID NO: 117838 - DNA, 295 bp, Glycine max
atttatcgaaaggtagggttttgcagagcctcctcctccgttaccagtttcttcttctttatcctctctcctttcttcttccattcctctaacctaatatgggcaagtcaagcaagaaatcagctatcaaggttgacgctgctccagctgtggttccgccatccaagtctgccaagaagggaggcaagcgacaagctcaagatgaaattgagaagcaagtgagtgccaaaaaacagaagatagaggaggttgctcagaagcaaaagaaggaggccaaggtgcaaaagaaggaggc

SEQ ID NO: 117839 - DNA, 265 bp, Glycine max
tgattctcttcaatgtatggcaagtaggaagagaccccaaatactgggacagaccatcggagttccgtcctgagaggttcctagagacaggggctgaacgggaagcagggcctcttgatcttaggggacaacattttcaacttctcccatttgggtctgggaggagaatgtgccctggagtcaatctggctacttcgggaatggcaacacttcttgcatctcttattcagtgcttcgacttgcaaatgctgggtccacaaggaca

SEQ ID NO: 117840 - DNA, 289 bp, Glycine max
gaagcctttagcctcattgacaaggattctgatggtgtgttttcttggcaccttgatgatttgttgttcactttttcattttgatgtgaaaaggggttttagcattgattttgacttttttttttggaaattgttggtgatgtctaggattcattactgtggatgaattgacaaccattatccgatcattagaagggaatccaacgaaagaagaactccaaaacatgattagtgaggtcgatattgatgggaatgggagtatagattttgaagagttcttgaatattat

SEQ ID NO: 117841 - DNA, 246 bp, Glycine max
  unsure (1)..(246): unsure at all n locations
gtcggtggagagaaaaacgttggagaaggcggcgagggagtgtcacgcggtggagcggatctggaagttgttaacggaggttgaggacgtgcacgtgatgatggatccggaggatttcttgaggttgaagaaggagttggggatgatgagaaattgcggggacatggtggcgttttgcttcaggtcgagggagctcgtggaggtggcgangatgtgtagggatctgaggcagaaggtgccggagat

SEQ ID NO: 117842 - DNA, 289 bp, Glycine max
caaaaaatgggttcttcttcttccatatggaccgtgtgtttgattttggcatcactggcctctgcagcactctgtgccaaccctcgtagaccagtggatgtacaatttggccgaaactacgtgcccacatgggcctttgatcacatcaaatacttcaatggaggttctgacattcagcttcatcttgacaagtacactggtactggcttccagtccaaagggtcatacttgtttggtcacttcagcatgtacataaagatggttcctggagattcagctggcacagtca

SEQ ID NO: 117843 - DNA, 291 bp, Glycine max
atcctttcctacctcatcaacttggccttcaccaaggcaccagggacatggaggtggatgttaggggtagcagcagtgccagctttgttacaaattgtactaatgttgacactcccagaatcgcctcgttggctttaccgcaagggtaaggaagaggaagcgaaatcgattctgaaaaagatctacccgccacacgaagttgaaggtgaaatccaggctttgaaggaatcagttgacatggaaattaaggaagcagaatcatcagagaagatcaacatagtcaaactcttg

SEQ ID NO: 117844 - DNA, 289 bp, Glycine max
ggccactgctggtgatactcacttgggaggtgaagattttgataacagaatggtgaaccattttgttcaggaattcaagaggaagaacaagaaggatattagtggaaatgccagagctctgaggaggttgagaacagcatgtgagcgggcaaagaggactctctcgtccactgctcaaaccaccatagagattgattccttgtacgagggtattgacttctacacaaccattacccgtgcccgttttgaagagctaaacatggatttattcaggaagtgcatggagccc

SEQ ID NO: 117845 - DNA, 291 bp, Glycine max
ctttgttcactcttcttctcttgcggctacggttttagcgcagttcttctagatttaaggcagatgggtaaggaaaaggttcacatcagtattgtggtcattggccatgtcgactctgggaaatccactaccactggtcacctgatttacaagcttggaggcattgacaagcgtgttattgagaggtttgagaagtaagctgctgagatggacaagatgtctttcaagtatgcctgggtgctggacaaacttaaggctgagcgtgaaagaggaatcaccattgatattgct

SEQ ID NO: 117846 - DNA, 287 bp, Glycine max
cttgagatcaggaattaatttcagaggttcagagaatggcaacggattcttctaatggtaatggacatcaccaaacaacaacaaagcaacctcctttgccgtctcccctgcgcttttccaaattttttcagtccaacatgagaatcttggttactggaggagctggattcattgggtctcacttagttgacagattgatggaaaatgaaaaaaatgaggtaattgttgctgacaactacttcactggatccaaggacaacctcaaaaaatggataggtcatccaaga

SEQ ID NO: 117847 - DNA, 289 bp, Glycine max
atcaaattagttcattctctttgcgcagttccctacctctcctttcaagatgcagatcttcgtcaagaccctcaccggaaagaccatcacccttgaggtggaaagctctgacaccatcgacaacgtcaaggccaagatccaggacaaggaaggaattcccccggatcagcaacgtctcatcttcgccggaaagcagctcgaggacggccgtaccctcgccgactacaacatccagaaggagtcaacccttcaccttgtccttcgtctccgtggtggcatgcagatcttc

SEQ ID NO: 117848 - DNA, 288 bp, Glycine max
cacaaacccgtccctcacactctccaaaccctagcggcactacacactagttctatcgctatctccccaagatgtcgagcgccgatcccgagcacagagaagaggaggaggcacccgccgttggcgacgacgaggacaccggagctcacgtcgctccaatcgtcaagctcgaggaggttgctgtcaccaccggcgaggaggacgaagatgcaatcctggatctcaaatcgaagctttaccggttcgacaaggacgggaaccagtggaaggagcgtggcgccggcactg

SEQ ID NO: 117849 - DNA, 285 bp, Glycine max
tggcgtcgcaggagagtatcgaaaagatgcaggcacggcagaattaccggaatttatggcacaccgatctcatgagatccattcaggccgatactccttattgttgcctcgcgttgtggtgtgcaccatgtgtgtcttaccttcttcgcaaacgagctctctatgatgatatgtcaaggtacacatgttgtgctggctacatgccttgcagtggtaggtgtggagaaagtaaatgtcctgaatttgcctttgcactgaggttttcctctgctttggaaatcagtc

SEQ ID NO: 117850 - DNA, 284 bp, Glycine max
cagaaacacaaccattcccaccaagaaggagcaggtgttctcaacctactctgacaaccagcccggtgtgttgattcaggtctatgaaggtgaacgaacgaggactcgtgacaacaatttgcttggcaaatttgagttatctggaattcctcctgctcccagaggtgttcctcagatcactgtttgcttcgacattgatgccaacggtatattgaacgtgtctgcggaggacaaaaccactggacagaagaacaagattacaattaccaacgacaagggcaggc

SEQ ID NO: 117851 - DNA, 288 bp, Glycine max
ctcactcatcaatctcgtttgttctcactaactattacttcatcatgtcgtcgagcacagttggtcaagtcatcaaatgcaaagctgcggtttcatgggaggcagggaagccacttgtgattgaagaagtagaggtggcaccaccacaagctggtgaagtgcgtttgaagatcctctacacctctctttgccacactgatgtttacttctgggaagccaagggccaaactccattgtttcctcgtatatttggtcatgaagctggagggattgtggagagcgtaagtg

SEQ ID NO: 117852 - DNA, 285 bp, Glycine max
attgttgtaactttttgattcctaaattctctaaaattcgaaattctaatttcgttacgggaaagagactgtttgtgtgtgagtgagtatggctggaaaaggcgaaggtcctgctatcggaatcgatttgggaacgacgtactcttgcgtcggcgtgtggcaacacgatcgtgttgaaatcatagccaacgatcagggtaacagaactagcccatcctacgtggctttcaccgacacagaacggttgatcggcgatgcggcgaagaaccaggtcgctatgaaccc

SEQ ID NO: 117853 - DNA, 282 bp, Glycine max
cggctcgagatcaaagtactcaaattagcatggctgtcatggttgcattcttgaatttgatcatcatcttttcagtagtctctacaacaggcaagtcactgagcttaaactactatgcaaaaacatgccctaatgtggagttcattgttgccaaggcagtaaaggatgccactgctagggacaaaactgttccagcagcaattctgcgaatgcacttccatgattgtttcgttcgggggtgtgatgcctctgtgctgctaaattcacaaggaaacaacaaag

SEQ ID NO: 117854 - DNA, 284 bp, Glycine max
ctcctttgacgacaagatgagcatcccaattccccatcggcagttattcatagacggagactggaaagtccccgtcctcaagaatcggattcccatcatcaacccttccacccaacacatcatcataggatatcccagcagctactaaggaagacgttgatctcgctgtcgctgccgccaaagctgccctctcccgcaacaagggcgccgattgggcctccgcttccggctccgttcgggctcgctacctccgcgccatcgctgccaagatcaccgagaaaaag

SEQ ID NO: 117855 - DNA, 285 bp, Glycine max
aattttcatagcattttcagcggaaaatggcgggtacggtttcgactcgtgtcgtcttcgtgactcttctgtctctcctacttccttttcagatctccgctgaggaatcctcggagaaggagttcgtagtcacattggatcactctaactgtcacgatcactgtcagcaagcacgatttcatcgtcgtcgagttctacgccccatggtgtggtcactgtaagaagcttgctccggagtatgagcaagctgcgtccatcttgagtagtcatgatcctcctattgtg

SEQ ID NO: 117856 - DNA, 280 bp, Glycine max
tggcaacactgcaggggctaatcaaacaaaaaggaaaagatgccgagagggaacactgaccactgatggagaagggaaaactgagctacaaaatggtccggcttccaaagagacttcatcttccaaaaagattgtgtcagctactccagctagtgttgccggaacattagttggacctgtagtttcttcagttatggccacaacactggaactgaggaacccttcgactgttgattctaaggcaaattccacaagtgccccacaaccttgtgcaattgtg

SEQ ID NO: 117857 - DNA, 280 bp, Glycine max
gtttcaccgcacgaatatcttgttgtttggagcgatccgagaaaaactctgtaaacatgttggtttaccaggacctccttacaggtgatgagcttctctctgactccttccgttacaaggaaattgagaatggaatgctgtgggaagttgaggggaagtgggttgttaaaggagcagttgatgtagacattggtgcaaacccttctgctgagggtggaggagaagatgagggagttgatgatgcagctgttaaggttgttgacattgttgacacattcag

SEQ ID NO: 117858 - DNA, 280 bp, Glycine max; identical to SEQ ID NO: 117857

SEQ ID NO: 117859 - DNA, 286 bp, Glycine max
atctgggggttccaaaatttccacgacgaggcaccgcaatggacgaaccgaacgaagcacaagacaacagagaactctacgcgctcttgaatttgtctccagaagcttccgatgaagaaattcgcagagcgtatcgtcaatgggcgcaagcctatcatcccgataaataccaagctcctcacatgaaggatattgctacggagaactttcagcgaatatgcgaacgtatgagattctttcagatccaaataaaaggcaaatatatgatatctacggcatggagggg

SEQ ID NO: 117860 - DNA, 286 bp, Glycine max
ctggccttttgttctcgtgtcaatttctaaatccaccaccacacactctcttctattctctattattattatctccacacccttcactctctctcactcttctctcgaatcttccaccgcaatggccaccgctgccgagaaactctccgctctcaaatccgccgtcgccggattgaacgaaatcagtgagaatgagaagaacggattcatcagcctcgtcggccgctatctcagtggcgaacgcagcatgtggaatggagcaagtccagacgcctacggacgaatg

SEQ ID NO: 117861 - DNA, 283 bp, Glycine max
agtcgctatacggctgaaagattcccaaaacacatttgctatgctgactaccttcaatgaagttgatatgactaatttgatgaagctccgttctgattataaggatgcttttgttgaaaagcatggagtcaaattggggcttatgtctggctttgtcaaagctgctgtcaatgcactccaacatcagccgattgtcaatgcagtcattgatggtgatgatattatatacagagattatatagatatcagcatagctgttggtactccaaagggccttgttgta

SEQ ID NO: 117862 - DNA, 281 bp, Glycine max
aaaaacaaacaaacactgcttgaggttcaacgaacgcacagagtcgatcatactgaaagtgattaagggccgagttgcatgagttgaatcggcggaaatgggagctagtcgaaagcttcagggcgagattgatcgtgttctcaagaaggttcaggaaggcgtcgaagtcttcgatagcatctggaacaaggtttacgacaccgataatgccaaccagaaggagaagttcgaggctgacctgaagaaggagattaagaagctgcagaggtacagggaccaga

SEQ ID NO: 117863 - DNA, 279 bp, Glycine max
attccacaaaaagatgcctccagaagcaattgatcttgcatcccggcttttgcaatactccccaagtctccgatgcactgcgcttgaagcatgtgcacatcctttctttgatgaacttcgagaacccaatgctcgcctgccaaatggtcgtccatttcctcctttatttaacttcaagcaggaagtaagtccttaaattatctgtcttcatcaaatttgtgctttggcagtaaactatttgtacagaatttcaaaattaggaataaaatgtgatactgt

SEQ ID NO: 117864 - DNA, 284 bp, Glycine max
ggacttggaagacaagcttcatccgggtggtccattcgacccattgggactagcaaaggatccagagcaagctgcacttctaaaggtgaaggactattaagaatggtagactagctatgtttgcagtgcttggtttctacttccaagcatatgtcactggagaaggtccagttgagcacttagcaaaacatctcagtgacccttttggtaacaacttgctcactgtgattgctggctccgctgagagggctccaactctgtagatcaatcatcgttatgctctt

SEQ ID NO: 117865 - DNA, 283 bp, Glycine max
ctgaactgaattgagtctcaacaacccagttgagtaactaagatggcgcaagtgaggaacaagcaagtgcttctaaaggactatgttaccggttttcccaaagaatccgacatgaatattgtcgaaagtaccataacattgaagcttccacaaggttccaatgatgtcttgctcaaaaatttgtacttgtcttgtgatccgtatatgaggaatctcatgaacaagcccgaaggccctcccaatagtcgtgcttacactcctggctctccattaataggatatg

SEQ ID NO: 117866 - DNA, 282 bp, Glycine max
gaaggatttgatgcagtcaagcagaggcagtcccaagaacaggcaagaagaacaaagatgtcaagggctcaagatggaatcttgaagtacatgctgaagatgatggaggtttgtaaggcccaaggttttgtctatgggataattcctgagaagggaaagcctgtgactggggcatctgataatcttcgtgaatggtggaaggataaagttcggtttgatcgtaatggcccagctgccatagccaagtatcaagctgataacgctattccggggaagaatgat

SEQ ID NO: 117867 - DNA, 284 bp, Glycine max
ccaaatcttaaaaatattcagtgaagatcaacctcaatggcatctcttggcgtgcgaccagttcttccccctccattaacttccatctccgacccacctcctcttttcgatggcaccaccaggttgtacatcagttattcttgcccctatgcacaacgtgtgtggatcgctaggaactacaaggggctacaagataagatcaatttggtccctattaaccttcaagacaggccagcttggtataaggagaaagtctaccctgaaaataaggtgccatccttgga

SEQ ID NO: 117868 - DNA, 283 bp, Glycine max
attaattgcaagaatggcacttcgttgcttggtgatgtccctttctgttctcttcactcttggtcttgcgagagaaagccatgccagagacgaagatttttggcatgctgtttggccaaacactcccattccaagttcattgcgagatcttctaaagcctggccctgcaagtgttgaaatcgatgatcaccctatgcaaattgaagaaacacagtacccgaaaaccttcttctataaagaagaccttcatccaggcaaaacaatgaaagtacaattcagcaag

SEQ ID NO: 117869 - DNA, 280 bp, Glycine max
attgttgtaactttttgattcctaaattctctagaattcgacattctaatttcgttaggggaaacagattgtttgtgtgtgagtgagtatggctggaaaaggcgagggtcctgctatcggaatcgatttcggaacgacgtactcttgcgtcggcgtgtggcaacacgatcgtgttgaaatcatagccaacgatcagggtaacagaactaccccatcctacgtggctttcaccgacacagaacggttgatcggcgatgcggcgaagaaccaggtcgctatg

SEQ ID NO: 117870 - DNA, 283 bp, Glycine max
gttaggttatgggaatcagaaagtgcaaactgcattggagttggtattggtcacatgggagctgttggagccattgccttttcaaaaagaaagcaagatttctttgttagtggcagtagtgatcatactcttaaggtgtggagtatggatggcctctcagacaatatgacaatgccaattaatttaaaagcaaaagctgttgttgcagctcatgataaagatataaattccgtagctgttgctccaaatgatagtttagtatgtagtggttctcaggatcgta

SEQ ID NO: 117871 - DNA, 276 bp, Glycine max
gttttaccctactgatgacagtgtcgcaatagtaattcaacctagtacgagaggaaccgttgattcgcacaattggtcatcgcgcttggttgaaaagccagtggcgcgaactaccgtgcgttggattatgactgaacgcctctaagtcagaatccgggctagaagcgacgcgtgcgcccgccgtccgtttgccgaccagcagtagggggcctcggcccgccaaaggcacgtgccgttggtgaccctcgtgaggcggattagccctacgagacgcct

SEQ ID NO: 117872 - DNA, 281 bp, Glycine max
aggccaatcctttccatgcattattctaccttgtgtttatgttgtcagcctgtgccttgttctctaaaacttggattgaagtctctggttcatctgctagagatgttgcaaagcagctgaaggaacaacaaatggtaatgcctggacatcgggaatcaaacttgcagaaagaactgaaccgatacattcccaccgcggcagcatttggaggcatatgtatcggtgcattgactgtgttggcagatttcatgggggcaattggttcagggacaggaatattg

SEQ ID NO: 117873 - DNA, 269 bp, Glycine max
cgcagtttcttcctttctctgctctgtgccttctctgacacatttggtgccttgtacagcgtgtgttggcaagtaggtggtatggcgaaggacgttgaggttgctgcgcgtggctccttctctgggaatgactaccacgaccctctaccagcaccactcattgatgctgcggagctcacatagtggtccttttacagggctcgcattgctgaattcattgccactttgctcttcctctacattcatgtgctcacagtcatagggtacaa

SEQ ID NO: 117874 - DNA, 274 bp, Glycine max
caatcttcaatttttctatatatccatcaatccgctgagtgcaaagttctaatctttcgcctattgggttctactcctttctctcttcgtttccgatcgatccaattttcttcccatggctacgatcggacacaacaatctcaatgccaaattggttcttctcggggacatgggtgctgggaaatccagcctcgttttgcgctttgtcaagggtcaatttctcgaatttcaggaatcaacaataggggcagcgttcttttcacagacgctggca

SEQ ID NO: 117875 - DNA, 267 bp, Glycine max
gtagtactgatcaagggtgtctgtttctatgtctctgtgtgtttcgtcactttctctcgtttcaatcgaaaaagatcatgggtagaagattagtcgtcggtggcaactggaaatgcaatgggaccactgaggaggtgaagaagattgttactactttaaatgaggctaaagtccctggagaagatgttgttgaagttgttgtgagccgccttttgtgttcctccttttgtagaggtttgctgcgcctggatttccatgtctcggccc

SEQ ID NO: 117876 - DNA, 273 bp, Glycine max
gcctagccagctagcgcttcttctctcgcattccgtggagatctagtgctgccaaacctcgctgaaaattagggtttcgtttcggaggtagacgaagatgttcggaagggcaccgaagaaaagcgacagcaccaggtactacgaaatcctcggcgtttcgaagaacgcttcgccggatgatttaaagaaggcttacaagaaagccgccattaagaaccaccctgacaaaggcggtgatcctgagaagttcaaagagcttgctcaagcctatga

SEQ ID NO: 117877 - DNA, 276 bp, Glycine max
agagaatgccgttcgtgaagctgcgtcggggctagagagcgtcgagaaactcatcaagttgctgtcgcagacccaacaacaattccagacaacatctaattcaacctcaaactcaaagtcttccatggcaaacatcgacaccgactacagagctgtcgctgacgtggccgtctctaagttcaagaaggtcatttcgcttctgggcagcagcagaaccggtcacgcgcgtttcagaagagcccctgttgctccccctcctccacctgcggaacccag

SEQ ID NO: 117878 - DNA, 272 bp, Glycine max
gatttcgaggctgggttcagagaattcaaggatgattcggaaatcgaggatgttgatgacgaggacgatgaagacgaggaggagttgaagaagaagccctttgggttctctcgctccagcaacaaggctgcttctaagcctctctctcgtggatcagcaactgtggaatcaaaggggcaagctgagaagtgtgccaagagaaagaggaagaaccagtatcgtggaatccgtcagcgtccatggggaaagtgggctgctgagatccgtgaccc

SEQ ID NO: 117879 - DNA, 263 bp, Glycine max
ctcattttccttgcctcggctgcaacacccatcttctcattaacagattccccaaatcaactctccacaaactttctagaaattgccaagaaacctgaagtatttgattggatggtgaaaatcagaaggaagattcatgagaatccagaattgggttatgaggaatttgagaccagtaaactcattagagagggattggataaactgggtgtcccctataaacacccagttgctgtcactggtattattggcttcattgggac

SEQ ID NO: 117880 - DNA, 270 bp, Glycine max
cgctccttctctgggaaggactatcaggaccctccaccagcaccactcattgatgctgatgagctcacaaagtggtccgtttacagggctctcattgctgaattcattgccactttgctcttcctctacattactgtgctcacagtcatagggtacaagcaccagactgacctcaaggaaaatggtgaaatctgtggtggggttggcattcttggcattgcatgggcctttggtggcatgatcttcatccttgtctactgcactgctggg

SEQ ID NO: 117881 - DNA, 269 bp, Glycine max
  unsure (1)..(269): unsure at all n locations
ttcacatctctcttttcactcgaaactacaaactttatttcctctccgtattctcacatttccacaccatggacgagaccctcgacacngcngcggcggagccatgggcgaggagctcgacttcgccggcagcgcccagaaccccgtcctgaaggtcggcgaggagaaggccattgggaaagagggtttgaagaagaagctcctgaaagaaggtgaaggatgggacacccctgaagctggtcacgaattcaagttcactatactgggac

SEQ ID NO: 117882 - DNA, 269 bp, Glycine max
atggataatatcgtgtggcagactccagcgaatcccccgcaccctaacgattacgtctttcgaaacgggattcgatacgttagaccatactacttcgaattcatcgctcatgttaaaaatcggtgggcagggaaaaccattgtggatttgttcgctgaggaattcaaaggtcgaccttatgagtattatgttagtgcagtgaaatgtggaaggattcaagtggatggtgagatggtaccggtttcatacatagttaaatcatctcaaaa

SEQ ID NO: 117883 - DNA, 269 bp, Glycine max
cttgactctacagatgcagatcttcgtcaagaccctcaccggaaagaccatcacccttgaggtggaaagctctgacaccatcgacaacgtcaaggccaagatccaggacaaggaaggaattcccccggatcagcaacgtctcatcttcgccggaaagcagctcgaggacggccgtaccctcgccgactacaacattcagaaggagtcaacccttcaccttgtccttcgtctccgtagtggcatgcagatcttcgtcaagacgctcactg

SEQ ID NO: 117884 - DNA, 266 bp, Glycine max
caaaacattctcatcattcacccaacaaaatggctctgcttctgatagtacccatttcactggtaaccctctggctcggttacaccctataccagcggctacgcttcaagctccctcctggcccacggccctggccggtagtcggtaacctctacgacataaaacccgtccggttccggtgcttcgctgagtgggcgcagtcttacggccctatcatatcggtctggttcggttcgaccctaaacgtcatcgtttcaaactcggag

SEQ ID NO: 117885 - DNA, 265 bp, Glycine max
ctaatctccatctaatagtgttaatttgtctttctctatctctatcggtcatgggtgcttttgcttttgatgaggaaaactcctccaccgtggctccggcaacactctacaaagctctgacaaaagatgctgacactatcatcccaaagattattggggccatccaaactattgaaatcgttgaaggaaatggaggacccggaaccgtcaagaagataacagctagtgaaggtgaccaaaccagtttcgtgctgcaaaaagtgga

SEQ ID NO: 117886 - DNA, 268 bp, Glycine max
  unsure (1)..(268): unsure at all n locations
gcacaatatttgattgtgttatgtacgttcaaagagcagcttcagcaacatgtgagggtgcatgccgtggagncantgatggcctgccgtgatattgaaagtaccttgcaagctctgacaggagtcagtttgggagaaggaacaggtgcaacaatgtcagatgntgaagatgatttgcagatggctggctcttnagatcagtctagcgctgacgggcatgacangatgggatttggtccattgcttcctacagantcnganaggtcct

SEQ ID NO: 117887 - DNA, 266 bp, Glycine max
gccgcatgtcatcgatgggatattgaatgcggttgaggttatgaagttgaacaattctcgcagtagtcttgatggagaggtttgtgctgatttagttatgaagagctggtcgacgaggaataatacaggtatgctgtttactttggtggctgctgtttgcattgtgttgagcttgtccatagtgattcgtaggaggttgattgggtcgagggaatctgtgtcttggtcaaggttgcctgtgaatttgtcggatgatagtgttaaga

SEQ ID NO: 117888 - DNA, 271 bp, Glycine max
ctggtttgacccaactgcagattttcacacctattccatcctatggaaccctcaacgtattgtcttctcagtggatggaagtccaattagggagttcaagaacatggagtcaaagggtgttccattccccaagaatcaggcaatgaggatatactcaagcctgtgagaatgcagatgattgggccacaaggggaggtcttgttaagacagattggacacaggctcctttcacagcttcttacagaaacttcaatgccaatgcctgcactat

SEQ ID NO: 117889 - DNA, 240 bp, Glycine max
atggagtttcaaaaacctctatggctattcttgcttctcctcactctcctctcaagctcccaagccaacaaattcaacgttggtggaagcaaagggtgggttccaaacccttccgagagttacaacaattgggctggaagaaaccgattccaaatcaatgacacaatagttttcaagtacaataagggttcggattcggtgttggaagtgaagaaggaagattacgacaagtgcaacaag

SEQ ID NO: 117890 - DNA, 269 bp, Glycine max
gggtttctcttcctcccttggagaaaaagaagagccaccgctgcgacgccgttagtgcatttttgaggtgccgctgtcatgtttaggcgtggtggaccaaagaggagtgataactccaaatagtatgatattctagggatttccaaaaatgcgagtgaagatgaaatcaagaaggcctatagaaaggcggctatgaagaaccatccagataagggaggagatcctgaattgtttgaggagttaggtcaagcgtatgaagttttaagtga

SEQ ID NO: 117891 - DNA, 263 bp, Glycine max
tggtgtatagagaatgtcgtgttgctgatcattccattgggccattggaaattcgtgttgtgaggagtgggagctttaaggagcttatagatgatgcagtctcaagaggtgcggccataaatcaagaagatgtgtggcctcatcgagacctacagattgaacggccaattcagatggatatcgtctcagatgaaccgtgtgaggaacgaagagctctaccgtgtcgtctgtgacacaaggggtgcctatgtgcaactgcagtt

SEQ ID NO: 117892 - DNA, 254 bp, Glycine max
tcgacgacgaggtcttcaccttcgccaagcgcatcgctgcgccctacgacctcgtcatgcagaccaaacagctcggccgcctccccgtcgtccacttcgccgccggcgcagtcgccacccccgccgacgccgcgctcatgatgcagctcggatgcgacggcgtcttcgtcggctccggcgtcttcaagagcggcgatcccgcgaagtgacgagggcaattgttcaggccgtgactcactaccgtgacccgcggt

SEQ ID NO: 117893 - DNA, 261 bp, Glycine max
ggcgaagatccaggacaaggcaggaatcgcaccagaccagcagaggcttatttttgctggcaaacagctagaggatggaaggagcctcgctgactacaacatacagaaggagtcaactctgcacttggtgttgcgtcttcgtggggggttttaagctggagctgatttctgtgtgatgttcgatgtcggattttcccaaacattgtaagaagagatgtgatgtgtaatgggtctgtaatgacctttgaaaatcagtttggt

SEQ ID NO: 117894 - DNA, 266 bp, Glycine max
agatccgtcagatctgcgtcaacgccagaccaatcttcctctctcagccaattcttctcgaccttcgtgctcccatccgcgtctgcggtgatatacatggtcagtaccaggacttgctgacgctttttgaatatggtggctaccctcctgcggcaaactacttgtttctgggggattatgtggatagagggaagcaaagtttggagactatgtgtttgcttttggcctacaaaataagatatccagacaaaatttatctcttgagg

SEQ ID NO: 117895 - DNA, 271 bp, Glycine max
caatagaaaagaaagaaagatgagtccaacatgggtttttgtgttaggtattattgcagcaatgttggtggttgtgaatggacaatcatcagtgaagccattggtgaagacagtgaaggggaagaaggtgtgtgacaaagggtgggagtgcaagggttggtctgcttattgctgcaatgagactatctccgattactttcagacataccagtttgagaacctcttcgcgaacgcaattcgccggtggcacatgcagtcggattctgggact

SEQ ID NO: 117896 - DNA, 271 bp, Glycine max
aggccagaaaaatacctaggagatattgcaacttgggacaaagctgaaagtgctcttaaagaagctttagatgattttggcaagccttggcagttgaatgaaggggatggtgcattctatggaccaaagatagacatcagtgtatctgatgcattgggtaggaaattccagtgtgcaactttgcagcttgacttccagcttcctgatcgttttaagttggaattctcagctgaggatgaagccaaaattgagagacctgtaatgatacaca

SEQ ID NO: 117897 - DNA, 268 bp, Glycine max
ggatttgtgaattttgagaatgctgatgatgctgctagggctgttgaggctctcaatggcaaaaattttgatgacaaagaatggtatgttggaaaagctcagaagaaatctgaaagggagaatgaattgaaactacgatttgagcagagcatgaaagaagctgctgataaatatcaaggcgcaaacttgtatgtaaaaaatttagatgatagcattggtgatgaaaaacttaaggagctgttctccccttttggtaccattacctctt

SEQ ID NO: 117898 - DNA, 266 bp, Glycine max
tcttgatccagagacaactgtggtatccatattcccatctcccatgcactatgctggacccacggaggtgcagtggcatgcaaaggctaggatcaatgcaggggctaacttctatatcgttggtcgtgaccccgcaggcatgagccatccagttgagaaaagagatctgtatgatgctgaccatggaaagaaagtattgagcatggcaccgggactagagcgtctaaacattcttcctttcagggttgctgcatatgacaagactc

SEQ ID NO: 117899 - DNA, 263 bp, Glycine max
gcacttctctgttgagggtcagttggagtttaaggctatactctttgttcccaagagggcaccttttgacctctttgacacaaggaagaagcctaacaacattaagctctatgtccgccgtgtctttattatggacaactgtgaggagttgattcctgagtatttgggctttgtcaagggtattgttgattctgaagatctcccactcaacatttcaagagaaatgttgcaacagaacaagatcttgaaggtcatccgtaaga

SEQ ID NO: 117900 - DNA, 266 bp, Glycine max
gttgatccatctcttgtttcttgctttctttcttcaccatgtcacttgctgggaaaatcaccactgaaatcggggttcatgcaaccgctacaaagtggttcaacctcttcgcaacacaactccatcatgttcaaaacctaactgatagagtgcatggaaccaagctgcatcaaggtgaagactggcatcacaacgagacagtcaagcactggacttataccatagatggtaaggttacaacatgtctggagagtattgaatccatt

SEQ ID NO: 117901 - DNA, 264 bp, Glycine max
attgatggtggtgtcaatcagaatctgaattcaaagactttgtctgctcacaatctcagtgcaatggactaccctgcacttagctcaccagatagccagactgcttcagtagaatatgtggttgataatgtgcaacaaagtggcaatccttaccgatcataagacagtgatgtgctgctgttcaaatctgtctcaccagtttcatctatgggtggtgctattgactttgcttcagctgttcagaagttggctgcgcgggattct

SEQ ID NO: 117902 - DNA, 266 bp, Glycine max
aaaacatggtccaagagaagaaactagttgacgaggtgtccggttggctcaaaatttatgacgacggttcagtggaccggacatggtccggaccggaccaattcaagttcatggccgaaccggcccctccccatgaacaattcatagacggcgttgccattcgcgacgtcgccgttactcacggtggtggccagagtggccaccatgtgcgactctatctgccagagataaagccggaagacagccaaaaactaccaattgtcctc

SEQ ID NO: 117903 - DNA, 264 bp, Glycine max
ggaggatatgacgttggtggtggaggggatttgtagtaatagggaggatgagaagtgggagatggtggaggaggactttgatagtagtaaggaggtggtggagatggagatggaggtcaaggggaaagaaaatgatggggaggatgatgaagagaagacggaacagaagaaaaaggagaagaaagacaaggatggcaaaactgatgcagagaagatcaagaagaaagaagatgatgggaaggatgatgaagagaagaaggaaaa

SEQ ID NO: 117904 - DNA, 222 bp, Glycine max
gtcatggccagtcacagaagtggagagactgaggataccttcattgctgacctttctgttggtttggctacgggtcacattaagactggagctccatgcaggtctgagcgtcttgctaaatataaccagctcttgagaattgaggaggagcttggtgctgaagcagtgtacgccggagctaacttccgtacccccgttgaaccctactaaagttgtcaagtg

SEQ ID NO: 117905 - DNA, 268 bp, Glycine max
tcttgatccagagacaactgtggtatccatattcccatctcccatgcactatgctggacccacggaggtgcagtggcatgcaaaggctaggatcaatgcaggggctaacttctatatcgttggtcgtgaccccgcaggcatgagccatccagttgagaaaagagatctgtatgatgctgaccatggcaagaaagtattgagcatggcaccgggactagagcgtctaaacattcttcctttcagggttgctgcatatgacaagactcag

SEQ ID NO: 117906 - DNA, 269 bp, Glycine max
atcgtgcattcaatggccaccacagcagctctatccggaaccatggtgagcacctccttcatgaggaggcaacctatgaccaccacaagcctaaagacattccccaacgttggtgaagctctttttggtctgaaaagtggacgaggtggtcgtgtcacttgcatggcctcgtacaaggtgaagctcataaccccagaaggagaagtggagtttgaatgcccagatgatgttttcattgttgacaaggcagaggacgaaggcattgaact

SEQ ID NO: 117907 - DNA, 264 bp, Glycine max
atttgatccaactgacctagacataaatgttacaccagaggctgttgaagaggctctccgggaaaatcaaccaagtaaagccttgatccttagccttcgcctgaatgaggattctttcgttaaaaaatgtatatttgcggttagtccagcagatattccagccgttgccacatcaatcccctacaaatatatccagcgattagttgaggcattgcagatcttttagaaaactgcccacatttggaatttatacttagatggtct

SEQ ID NO: 117908 - DNA, 265 bp, Glycine max
ccagaccttaatttttctctcattcgcttcagctttcaggaaatcaattatggctcaaccctcaacaagaataggccttgctggactggctgttatgggccaaaatctagcactcaatattactgagaaaggctgtcccatttctgtttataaccgaaccacttccaaggttgatgagactgcagaacgagcaaaacaagaaggacatcttccagtttatggctaccatgaccccgaagcttttgttcattccattcaaaagccc

SEQ ID NO: 117909 - DNA, 262 bp, Glycine max
cacggggcttgtcgagtggtacgggaagaacgcacgcctccgcgagttggtgaacctggtggtggtggctggagacaggaggaaggagtcgaaggacttggaagagaaggccgagatgaagaagatgtatggcctcatcgagacctacaagttgaacggccaattcagatggatatcctctcagatgaaccgtgtgaggaacggagagctctaccgtgtcatctgtgacacaaggggtgctcctgtgcagcctgcagtttat

SEQ ID NO: 117910 - DNA, 266 bp, Glycine max
ggtagccattgatattctgctaatgactatggtgttcaaaaacacaaaccagttagaggaaagtatggattccacttatgacaggaaggctgaagtgaaagcctttgatgattcaaaagctggtgttaaaggtcttgtagagtctggattgacaaagatccctcgcatgttccattctggcaggttggatatcattgaaacctcagtcagtgactctaagttcggtatccccatcatagacctccaaaatatccactcctatcctg

SEQ ID NO: 117911 - DNA, 264 bp, Glycine max
  unsure (1)..(264): unsure at all n locations
ctttctcgtcactagctctgtgcattcttctctcgctctctgccttccatcacactcggcatttcncttcccaagatagtagaagatggcagacaccgaggatattcaacctcttgtttgtgacaatggaacaggaatggttaacgctggatttttaggatatgatgctccatgttctgtgtttcccagcattgtaggtcgtcctcgtcacactggtgtgatggttggcatgggccaaaaagatgcatatgttggtgatgaggc

SEQ ID NO: 117912 - DNA, 264 bp, Glycine max
aaactaagatagttactcggagggaaaaagagaaagaaaaagcttgagagatggagaacttccctgtgatcaacttggagaatatcaatggtgaggagaggaaggctatcttggaccaaattgaagatgcttgccagaactggggattttttgaggtaccccacaaccacaaacttgcttacaaaagctgtcatactcatactcaaattaatacagtatatccatctatacatctgcaacttaaagttttcttaatcttgttca

SEQ ID NO: 117913 - DNA, 171 bp, Glycine max
cggaaaggaactttgcaagagtattaacccagatgaagctgttgcttatggtgctgcagtgcaggctgcgattctcagtggcgagggtaatgagaaagtgcaggatcttcttttgttggatgttactcctctatccactggtttggagactgcaggaggagtcatgactgt

SEQ ID NO: 117914 - DNA, 253 bp, Glycine max
caggatggtcaagtcatgttgcgttatgtgcttgtgtttgatcttacttcacattttcctgcgctttgtgccaatacagtcagcacctgaaagtgccattgtgacacagattcctggcttcagtggcactctaccttccaagcactatgctgggtatgtgacggtggataagagtcatgggaggaacttgtactactattttgttgaatcagagggtaaaccttccgaggaccctgtggttctgtggcttaat

SEQ ID NO: 117915 - DNA, 260 bp, Glycine max
tgtgcgagcattgtctcggctccgtcctacgcgttcccttttctctctggctccgcttccactactccaactgcgctctcgctcactaagcgcagttggaagccacctccgagcatggcaaaaggcccagtcagagccaccgtttctatagagaaagagaccccggaggccaatcgtcccgaaacgtttctcagaggagtggacgaggcccagtcttccacttcggttcgggcccgcttcgagaagatgataagggaggc

SEQ ID NO: 117916 - DNA, 266 bp, Glycine max
ggaattttaatttgactatacgcattactgatccagatgttgtgagaattaagggaagtgacggtgtaaatatactcagctccgactcagcacttgctgttgggagtagaggagtttctggagaggcaggaccggttgcagcaattcgaatgccaatgctacgggtttgtaatttcaaaggaggaacacctgagctaagacaggcttgttatgctatattggtcttaattcttccttctggagataatcaggagcctagatcgtgg

SEQ ID NO: 117917 - DNA, 263 bp, Glycine max
ctgacccacttgcattttttctaccacgacatcttagagggcaagaacatcacggtggtgaaaatcatcgagccatcagcgagcgaggttcgtgaagcaactgggtttggaaccactttcatgatggacaatgttttgaccgagggtccagagctgagctcgaagcacgttgggagggctcaggggctgtttggcttggcctctttggaggaccgtggaatggtgatgctcattaacttggctttcagtgagggtgagtatgc

SEQ ID NO: 117918 - DNA, 258 bp, Glycine max
gcgacacgagtgctggaacactgcaaagaccctacaacacaacagaaagttatggatgaaattttaggagcagttagcatgttagctcaggatcagtatggcaactacgttgttcagcatgtgctggaacatgggaagcctcatgagcgttcttctataataaaggaattagcagacaagatagtgcaaatgagtcaacagaagtttgcctccaatgttgtggagaaatgtttgacctttggaggtccttctgaacgc

SEQ ID NO: 117919 - DNA, 264 bp, Glycine max
aaggatattactctaagtggcgatcatgtgagagagggtctaacatgtgttgtctcagtcaaggtcccaaatcctgagtttgaaggacaaacaaagacaaggttaggaaatccagaggtgcgaatcgtggttgatcaatctattcaagaatatcttactgagtatgtagaattgcatccagatgttcttgattcagtacttgctaaagctcttaatgctttcaaggcagctctggcagcaaatagagcaagggaattggtgaga

SEQ ID NO: 117920 - DNA, 263 bp, Glycine max
gaaaagctaattagagggtcgaagattctgccattggctggcgctgaatactcaaagaaggtgatggaaaactgcgtggcacacatgaagtctgttgggacttacggtgatgctgaagccgcagccattgaaaagtttgctgaagccttcaagaatgtgaattttgcacctggtgcctctgttttctacagacaatcacctgatggaatcttggggcttagtttctctgaagatgcaacaataccagaaaaggaggctgcagt

SEQ ID NO: 117921 - DNA, 254 bp, Glycine max
cctcgagccgattcggctcgaggtaactttttgactcctaaatactctaaaattcgaaactctaatttcgttaggggaaagagattgtgttgtgtgtgagtgagtatggctggaaaaggcgagggtcctgctatcggaatcgatctgggaacgacgtactcgcgcgtcggcgtgtggcaacacgatcgtgttgaaatcatagccaacgatcagggtaacagaactaccccatcctacgtggcttgcaccgacac

SEQ ID NO: 117922 - DNA, 259 bp, Glycine max
accagatgaagccgtctcaaaatgtacagcatgtggtactgattttggggcttttgttcgcaggcatcactgtaggaactgtggtgatattttctgtgacaaatgtacatatggtagaattgctctgactgctgatgagaatgctcagcctgtacgagtttgtgaccggtgcatggcggaagtgtctcagcggctgactagtgcaaaagagtcatcaagtaaacctgcattgcagagtcatgaggatcttgcaaggaaa

SEQ ID NO: 117923 - DNA, 257 bp, Glycine max
tcatgattctgctggtgaaaaagtttatgctactggaggccaaattcatgtaccaatatatgtcactggcattatcaaagtcagcaatgcggaaattgctgttcttgacagtgatcttggaagtgttgaaacccaaaaaacgctagatttggctggaaatgatgttgtgtcactctcagctaaccacttgcaaaagttgcgcttttctttccaattgacaacacctcacgctcatgcttttaagcctcttcaggcat

SEQ ID NO: 117924 - DNA, 249 bp, Glycine max
ggatttgtgaattttgagaatgctgatgacgctgctagggctgttgaggctctcaatggcaaaaattttgatgacaaagaatggtatgttggaaaagctcagaagaaatctgaaagggagaatgaattgaaacaacgatttgagcagagcatgaaagaagctgctgataaatatcaaggcgcaaacttgtatgtaaaaaatttagatgatagcattggtgatgaaaaacttaaggagctgtgctcccct

SEQ ID NO: 117925 - DNA, 255 bp, Glycine max
gccaagtgaaagcaatgtgctgaatggtggtaaacctggtcctcatcatataactggcaatggagttggattcaaactggacatattggacatggatgttatggaaaaagttcttgaagttagcagtgaagatgcagttaacatggctagggtgttggcattgaaggaaggactcatggtagggatatcatctggagctaacacagttgcagctctcagattggctcagctgcctgagaacaaaggcaaacttat

SEQ ID NO: 117926 - DNA, 260 bp, Glycine max
cgagccatttgggagttaggttctgcacgctctgcttccagcgagtgttctttcttcgtttcaacaccttaatttgcacacgctgcttcttcagcttgagaactggcacaagaaacctttctattcacatctgaatctgtaaacgagggtcaccccgacaagctgtgcgaccagatctctgatgcagtgctcgatgcgtgccttgaacaggaccctgacagcaaggttgcctgtgagacatgcaccaagaccaacatggt

SEQ ID NO: 117927 - DNA, 245 bp, Glycine max
tatgaatccagcttggtaggggaaatccctgaagccattggacacatggtggcattggacgaattggatttgtcaaaaaatgatttaagtggacaaattcccaatgatttgttcatgctgaaaaatctgagcatactgtatctttaccggaacagcctttctggggagatacctggagtggttgacgcattccacttgacagagctttctctttcacagagtagacttagtgggccgataccaga

SEQ ID NO: 117928 - DNA, 256 bp, Glycine max
atcaagcgagattttgaagaactacgtttcgtcatctcctaatccaacggctaagattgctttcttagggactcatttgcaggttcaaccttctccagttgtagcggcttttagctccagaggacctaatgctcttaccccaaagattctcaaaccggatttaatagcgccaggtgtcaacattttagctggctggaccggcgcggttggaccaaccggtttaaccgttgacagccgccacatcagctttaacata

SEQ ID NO: 117929 - DNA, 246 bp, Glycine max
gcggaggttcgcgtttcgagtggaggatacggaacggtatcggcgccgaagtccgttgcgtctgatcctgatcagttgaagagcgctagagaagacatcaaggagcttctcaactccaagttctgccatcctattctcattcgattgggatggcatgatgctggtacatataataagaatattgaggagtggccactgagaggtggagctaatggtagcttaagatttgaagttgagctgaaacat

SEQ ID NO: 117930 - DNA, 255 bp, Glycine max
gcctagccagctagcgcttcttctctcgcattccgtggagatctagtgctgccaaacctcgctgaaaattagggtttcgtttcggaggtagacgaagatgttcggaagggcaccgaagaaaagcgacagcaccaggtactacgaaatcctcggcgtttcgaagaacgcttcgccggatgatttaaagaaggcttacaagaaagccgccattaagaaccaccctgacaaaggcggtgatcctgagaagttcaaaga

SEQ ID NO: 117931 - DNA, 250 bp, Glycine max
cttttgcttccttaacctattttgttatcctcaattttcaatggctcaatcccattctggaaaaacctcttccatgacttcaatactcctcctgtttatgcttcttatcagtaatacaggcacaacaggtgcacaatctggtgtatgctatggaagagttggcaacaatctgccatcgccacaagaagtagtttccctttgtaaacagtagggcttccaaaggttgggattctatgatcgaaaccatgaa

SEQ ID NO: 117932 - DNA, 252 bp, Glycine max
gcaaatacgcatataaccacccgtgtcatgggaacttttgggtatatggcccctgaatatgcgtcaagtggcaaattgactgagaagtccgatgtatattcttttggagttgtgcttttggaactaattactggacggaagccagtagatgcatctcaacctttgggagatgagagcttagttgaatgggctcgacctttactgagtcatgcactcgacactgaggaattcgatagtttggcagatccaagg

SEQ ID NO: 117933 - DNA, 245 bp, Glycine max
atcatcagctttcatgggtcgatcggtcgtcggtactggaacgtaaactcatgcacttgctatttgccactcaaatgcgtctggtatgaatcatctcatgcttcatcaacttatgggaccgtcgatccttggactaaccctgttttccatttcctcggaagcaaggccatgttatgggtacccaatttatctggttgacactgcctatcagaccaacattggtgcttaattagtccatgcatctt

SEQ ID NO: 117934 - DNA, 255 bp, Glycine max
ctcattttgcccttcttggagttggacatcaagtattatgacttaggccttccttaccgtgatgagaccgatgataaagttacaattgaaagtgcagaagcaactctcaagtacaatgtagcaatcaagtgtgcaactatcactccagatgaagctcgtgtgaaggagtttggcctgaagtcaatgtggaagagtccaaatgggactattaggaacattttgaatggaactgtcttcagagaaccaattctttgc

SEQ ID NO: 117935 - DNA, 256 bp, Glycine max
gccaggcaagccccactcaaccaccacacctctcctcgttcacgctacccctttctgctcttcttctacctttcaagttttaaaagtataaagatggcagagacattcctatttacctcagagtcggtgaacgagggacaccctgacaagctctgcgaccaaatctccgatgctgtcctcgacgcttgcctcgagcaggacccagacagcaaagttgcctgcgaaacatgcaccaaaaccaacttggtcatggtct

SEQ ID NO: 117936 - DNA, 241 bp, Glycine max
gtgcaaaaggcactgatagctcctgcagcattgattgctcaaaatgctggaatagaaggtgaagttgttgtggagaaaataaagagtggtgaatgggaggtcggttacaatgccatggcagacaggtatgacaatttagtggaggctggagttatcgaccctgccaaggtaactaggtgtgctttgcagaatgctgcttcagttgctggaatggtgttgaccacgcaggccattgtggtgg

SEQ ID NO: 117937 - DNA, 283 bp, Glycine max
gaaaatttctaattgcattctcatatgaactgtccaaaaaggagggcaaagttggcacacctgaaagacccctttcggaccttggactgctaagctacagaggatattggaccagggttctcttagacattctgaagaagcacaagggaaacatttctatcaaggaactgagtgatatgactgccattaaagctgaagacatattaaccactcttcagagcctagaattgattcaatacaggaaaggccagcatgttatttgtgcagatcccaaagtgttggg

SEQ ID NO: 117938 - DNA, 275 bp, Glycine max
ctcgctctatttctcagtctctgtgtttgcggctgaggattccgaacgagtgaccttcttcgtttctcgcaaagtttaagtaatcatgggtaaggaaaaggttcacatcaacattgtcgtcattggacatgtcgactctgggaagtcaactaccactggtcacttgatctacaagcttggaggtattgacaagcgtgtgattgagagtttcgagaaggaggctgccgagatgaacaagaggtcattcaagtatgcctgggtgctcgacaagctca

SEQ ID NO: 117939 - DNA, 276 bp, Glycine max
cacttttgcttccttaacctattttgttatcctcaattttcaatggctcaatcccattctggaaaaacctcttccatgacttcaatactcctcctgtttatgcttcttatcagtaatacaggcacaacaggtgcacaatctggtgtatgctatggaagagttggcaacaatctgccatcgccacaagaagtagtttccctttttaaacagtacggcttccaaaggatgagaatctatgatcgaaaccatgaagtcctccaagctctgagagattcc

SEQ ID NO: 117940 - DNA, 249 bp, Glycine max
acaagctttacgcgtttgatgcagcaacgagatgcttggctactgggcaagacaccaatgtgctggatggagctgactatggcattggaatctctatggattcggctaccaagggtccaatgctactgggagtcaaagctctgttagccaagactttcgagagacttcatcgtagtaacttggttaggaatgggaatcattcctctttgcttcggacccggtgaggatgccgtcactcctggattaact

SEQ ID NO: 117941 - DNA, 273 bp, Glycine max
cggtattgaacatgctgtatcaagtgtgactgtctatctaatggtactcgtgtacacttcaacgactcctttctctgttgtggcttcaattggtccagcgtttttcctcgtgatcgccatatttaattttgttcttcagattaggtctttggtcacggagaaagagcttaaacttcgccaggcaatgactatgatggggctttacgactttgcttactggttttcctggctcatctaggaggcagttgtcgcaatctatcgtcctcctcatag

SEQ ID NO: 117942 - DNA, 273 bp, Glycine max
gaacttgccaaggagttgcaagccaagccagatctgattgttggaaactacaatgatggaaacattgttgcctctttgttagcacataaattaggagtaactcagtgtaccattgctcatgctctagaaaagaccaagtaccctgagtctgacatttactggaaaaaatttgaagagaaatatcatttctcatgccaatttactgctgatctttttgcaatgaaccacacagactttatcatcaccaggaccttccaagagattgctggaagc

SEQ ID NO: 117943 - DNA, 280 bp, Glycine max
aaatgttgacagctgatcccaccaaaagaattacagttgaagaagcactagcgcatccataccttgaaaaactgcatgatgtagctgatgaaccaatctgcatggagccattttcatttgattttgagcaacaacaattggatgaagagcaaataaaagagatgatctacagggaagcattagcactcaatcctgagtatgcttaaagcagagaaactcgaggacttgaagcaggcttagcaggaaaaataataattcgttttcaattttcgtaatcact

SEQ ID NO: 117944 - DNA, 274 bp, Glycine max
  unsure (1)..(274): unsure at all n locations
agagaatcggtgtgaactcttactccaacagcgtgaagatccaagccgagatacacgtgccacccgtagaaatcaacaaggatacacagncaccagaacgcaccaccttgcagaaactcagacacagactctctgagatcttcttcccagatgatccactccacaggttcaagagccaacgtgcctcatcaagctcctccttgcacttcaatactttgtccccatgttccaatgggcccctctctacaaccgttcccttctccgctctgacatc

SEQ ID NO: 117945 - DNA, 267 bp, Glycine max
gccttttctttcctagctactacactttcattctttgcttcagaaaattaactagctaggatggtcagtgttgaagagatccgtaatgcacaacgtgcagagggccctgccactgtcatggctattggcaccgcaactcctccaaactgtgtcgatcagagtacctatcctgactattatttttgcatcaccaacagcgagcacatgaccgagctcaaagaaaaattcaagcgcatgtgtgataagtcaatgattaagaagcgatac

SEQ ID NO: 117946 - DNA, 273 bp, Glycine max
tttagagtggagaatggcaggaagcatcattaacagaggagaaagatggtctctcaatggaatgactgctcttgtcaccggcggcactcgtgggatcgggcactccatagtgagtgacttggctgcgtttggcgctgcagtgcacacctgttccaggacccaaacagagctcaacaaatgcttacaagagtggcagagtcaggggtttcaggtaactgggtctctctgtgacgtgtcctcaccaccccagagagaggaagctcattcaggaat

SEQ ID NO: 117947 - DNA, 273 bp, Glycine max
cttcttctcttgcggctagggttttagcgcacgtcttctagatataaggaagatgggtaaggaaaaggttcacatcagtattgtggtcattggccatgtcgactctgggaaatccactaccactggtcacctgatttacaagcttggaggcattgacaagcgtgttattgagaggtttgagaaggaagctgctgagatgaacaagaggtctttcaagtatgcctgggtgctggacaaacttaaggctgagcgtgaaagaggaatcaccattga

SEQ ID NO: 117948 - DNA, 267 bp, Glycine max
aaaaataagacattgtttggtttggttacttgctcgaatttcctcgaatcgcttaatttgtatttgattagttaaaccgcaacgcggaatctcttttctcgaactggctaactctcaggcaagtggttcggacgctgattccagcaacaagcggctggtgctcgcactgtatgacgccctaaactccggcgactccgaaaccgtcgtcaagatcgtcgccgccgacctcgagtggtggttccatggtccgccctcacaccagttttt

SEQ ID NO: 117949 - DNA, 215 bp, Glycine max
  unsure (1)..(215): unsure at all n locations
gcgcgggattcggctcgagctnctttgtgtgtgcgtgtccgatcgagccagttgggtgcccatggctacgatcgnacacagcagtctcagtgccaaagtggttctgctcggggacatgggtcctgggggatccaggctcgtgttgcgcttggtcagggcgcaatttctcgaatttcatngatcaacaataggcgcagcgttcttttcacagacgc

SEQ ID NO: 117950 - DNA, 270 bp, Glycine max
ggccaggcaagccccactcaaccaccacacctctcctcgttcacgctacccctttctgctcttcttctacctttcaagttttaaaagtataaagatggcagagacattcctatttacctcagagtcggtgaacgagggacaccctgacaagctctgcgaccaaatctccgatgctgtcctcgacgcttgcctcgagcaggacccagacagcaaagttgcctgcgaaacatgcaccaaaaccaacttggtcatggtcttcggagaaatcac

SEQ ID NO: 117951 - DNA, 271 bp, Glycine max
ttaacctcactcaaactcgggatcacagaaaccaacaacagttcttgcactgaggtttcacgatgttgctggaacttgcacttggtttgtttgtgttagctttgtttctgcacttgcgtcccacaccaagtgcaaaatcaaaagcacttcgccacctcccaaaccctccaagcccaaagcctcgtcttcccttcattggccaccttcacctcttaaaagataaacttctccactatgcactcatcgatctctccaaaaagcatggcccctt

SEQ ID NO: 117952 - DNA, 272 bp, Glycine max
cggctcgagatcaaagtactcaaattagcatggctgtcatggttgcattcttgaatttgatcatcatcttttcagtagtctctacaacaggcaagtcactgagcttaaactactatgcaagaacatgccctaatgtggagttcattgttgccaaggcagtaaaggatgccactgctagggacaaaactgttccagcagcgattctgcgaatgcacttccatgattgtctcgttcgggggtgtgatgcctctgtgctgctagattcaaaagga

SEQ ID NO: 117953 - DNA, 276 bp, Glycine max
ctttgttcaagagttcaagagaaagaacaagaaggacattagtggaaaccccagagcacttagaaggttgaggactgcttgtgagagggccaagagaacactttcatcgactgctcagaccaccattgaaattgattctctatacgagggaattgatttctactccactgttactcgtgccagatttgaggagctcaacatggatctcttcaggaaatgtatggagccggtggagaaatgtttgagggatgctaagatggacaaaagaagtgttga

SEQ ID NO: 117954 - DNA, 265 bp, Glycine max
gcagaatatgtagcatttggaggcctgtgtgtcctgttggatacatatatattggggatattgctcgtgttggtatccatcctccaaatgttgctgctgtctaccgcaagattgatggattttttgctctcccgatgggatatgacctggtgtggcgaaattgtccggaagattatgttactccattatcaatttggcacccacgggcaccagatggatttgtggctcccggatgtgttgccattgctggttatttggaacagag

SEQ ID NO: 117955 - DNA, 263 bp, Glycine max
ctcctttctctcttcgtttccgatcgatccaattttcttcccatggctacgatcggacacaacaatctcaatgccaaattggttcttctcggggacatgggtgctgggaaatccagcctcgttttgcgcttagtcaagggccaatatctcgaatttcatgaatcaacagtaggggcatcgctcttgtcacagacgctggcagtagatgacgctgacggtaaagtttgagatatgggacacagcctgacaagagatgtaccata

SEQ ID NO: 117956 - DNA, 278 bp, Glycine max
cacaagcactacaacattttctttggtctctcattttctctatagctagatgggttctggtgctttacaacttcttctgatcttgggtcttctggctagctcatgcttagcacaagccccaggtgctgcacccacacaaccacccactacaaccccatcaccaccaccaccaagatcagcacctgcaccagcacccaccccgccagcaacaccaccaccagcaacaccaccaccagcagcagcaactcctccaccagcaacatcaccaccagcaacaa

SEQ ID NO: 117957 - DNA, 280 bp, Glycine max
gagagacgcttcgcaaatctcaatcgaatctcagaaaaatgagagaaatcatcagcattcacataggtcaggccgggatccaggtcggaaactcctgctgggaactctactgcctcgaacatggcatccagcccgacggcatgatgccttctgactccaccttcggtgtagcccacgacgccttcaacaccttcttcagcgaaaccggatctggcaagcacgtcccccgtgctgtcttcgtcgacctcgaacccaccgtcatcgacgaggtccgctgcgg

SEQ ID NO: 117958 - DNA, 272 bp, Glycine max
atcacttttgcttccttaacctattttgttatcctcaattttcaatggctcaatcccattctggaaaaacctcttccatgacttcaatactcctcctgtttatgcttcttatcagtaatacaggcacaacaggtgcacaatctggtgtatgctatggaagagttggcaacaatctgccatcgccacaagaagtagtttccctttttaaacagtacggcttccaaaggatgagaatctatgatcgaaaccatgaagtcctccaagctctgagg

SEQ ID NO: 117959 - DNA, 280 bp, Glycine max
cttcaatttcacccattcatacgtggtgttgttactgctgctcttttctcttttcttttctctttagttctctcttcccctttctttttctttttcttcttcttctgagcttgtttaagcttttcttccattaacatattatcacaatgtgtggtattcttgctgttcttggttgttctgatgactctcgagccaaaagggtccgcgtgcttgagctctctcgcagattgaagcaccgtggccctgactggagtgggctccatcaacatggtgactgctt

SEQ ID NO: 117960 - DNA, 275 bp, Glycine max
aggaattgttgtaactttgtggttgctacattctctcagtttctagattctatcttcgctatggtccgcagattctatgtgcgtgagtgagtatggctagaaaaggtgaaggtcctgctatcggaatcgatgttggaacgacgtactcttgcgttggcgtgttgcaacacgatcgtgttgaaatcatagtcatcgatcatggtaacagaactactccatcctacgttgcttactctgacgcagaacggttgatcagcgatgcggcgaataacagg

SEQ ID NO: 117961 - DNA, 282 bp, Glycine max
ggccaaacagagcaaaaacccaacacaccacactcttgcaatcaatcaatggcggaaccttcctcctcgaagcccgccgtccctctcctgaaggacgagctggacatcgtgatcccgacgatccgcaacctcgacttcctcgagatgtggcggcccttcttcgagccctatcacctcatcatcgtgcaggacggagaccccaacaggaccatcaaagttcccgatgggttcgattacgaactctacaaccgcaacgacatcaacaggatcttgggtcccaag

SEQ ID NO: 117962 - DNA, 272 bp, Glycine max
cacaaagcaacgatgtcttctaattttctcttccctcaaactcaatccacagtcctcccaaacccttcaacctacttctcctcaaaccttcttacttctccactccccactaactctttctttcaaaactttgttattccaaacgggtctcaagctgagtacattcacccttacctcgtcaaaacctcaaactcttcactctcagcctcataccctcttctcctcttcaccacagcacttttgaagcaatcttttgtgccagatatcacaat

SEQ ID NO: 117963 - DNA, 256 bp, Glycine max
accagtttcaccgcacgaatatcttgttgtatggagcgatccgagaaaaactctgtaaacatgttggtttaccaggacctccttacaggtgatgagcttctctctgactccttccgttacaaggaaattgagaatggaatgctgtgggaagttgaggggaagtgggttgttaaaggagcagttgatgtagacattggtgcaaacccttctgctgatggtggaggagaagatgagggagttgatgatgcagctgtta

SEQ ID NO: 117964 - DNA, 256 bp, Glycine max
ctcaattgctagtaagactgctctcaagagagcaaatgttgatccatcactcgtgcaagaggtgtttttttggaatgttcttagtgccaatttagggcaggctcctgccagacaggctgcctaggtgcaggaattcctacatctgtaatctgcactactattaacaaggtctgtgcatcagggatgagagctaccatgcttgcagcactcaccatacaattcggtctcaatgatgttgttgtggctggtggtatgg

SEQ ID NO: 117965 - DNA, 245 bp, Glycine max
cccgcagtcatgggcaaggtcaagatcggaatcaacggatttggaagaattggccgtttggtggccagggtggctctgcagagagacgatgttgaactcgttgccgttaacgatcctttcattaccaccgattacatgacatacatgtttaaatacgacagtgttcacgggcactggaagcatcacgatgtcaccgttaaggatgagaagacccttctcttcggtgacaagccagtcactgtttt

SEQ ID NO: 117966 - DNA, 257 bp, Glycine max
cgaggtttaaatctgtcatggcagtggataagaaggtagcagatgggttgctaaggcttatccttctaaagggccctctaggcaattgcgttttcacaggggattatgacagaaaggctctagacgatacgcttcgtgcattctgtaaatcctgatctttgtgctccatgtttctattgcagctttatccaattccttttagtgagtttttgtatgttgtgataacctcacttgtatttttcttatgtactttggat

SEQ ID NO: 117967 - DNA, 252 bp, Glycine max
ctccgtctctgcaattacgatggcgcccagggacaagactagtgccgttaagcctagcggtaacgccggggtgaaggacctgcattttcgtggagtcaggaagagaccgtgggggaggtcgccgccgagatcagagatcccgccaagaagacccgcgtctggctcggaaccttcgacaccgcggaggaggcggcccgtgcctacgacgccgccgcgcgggagtttcgcggccctaaggcgaagacaaacttc

SEQ ID NO: 117968 - DNA, 256 bp, Glycine max
ctctggttgccgtgccaccatcttctccaaagttatcatattcgaagagagagaatgagtgactgtccaggttgggcaattagggacggaaaaggagaaacacgaaaatgtttttccacatagtactggagcgaaatatgcagcttcatccacgctactttggtcgtaaccttcgcgataatctcgtttccaagcttatgaaagacgtggaaggcacgtgcagtggccgacatggatttgtggtggcagttacagg

SEQ ID NO: 117969 - DNA, 254 bp, Glycine max
caatagtgcagttgggtactcctccagtggaatttaatgtgcagattgtcactggtagtgatgttctctgggttagttgcaactcctgcaatggttgtccgcaaacaagtgggctgtcaattcagctcaattttatcgaccctggaagttcatcaacatcttcaatgatcgcttgttctgaccaaaggtgcaataatggaaaacaatcatcagatgccacctgttccagtcagaacaaccagtgctcctacact

SEQ ID NO: 117970 - DNA, 251 bp, Glycine max
cactttctcgcagaaacgtattgtctatctctctttccgcggcctagatctgagcagtttggaaaccctaactgctctcaccaacgacatcaccactctctccgaccaactacctctttcgtcgccctaagtcatggcaggaattgcacccgagggatcacagtttgatgctcgtcaatatgctaccaagatgcctgagctgcttacgtccgatggtcaggatttcttcacatcctacgatgaggtttatg

SEQ ID NO: 117971 - DNA, 249 bp, Glycine max
ccagacggcgtcttcataaacgcctggcttctccgtttccgttgcctccggcgaattcgctttttgatctgcgaaaatgagagagtgcatctcgatccacattggtcaggctggtatcaggtcggaaatacttgctgggagctctactgcctcgagcacggcatcgggcccgatgggcaaatgccaagtgacaagacagttggcggtggtgatgatgctttcaatactttcttcagcgagactggtgct

SEQ ID NO: 117972 - DNA, 222 bp, Glycine max
gattatcgtaggtcttcgggaatagcgctagaatggcttcaagtcaggaggaggtgactcttttgggagctactggaagcccatttgtgtgcagggttcatattgccctcaagttgaagggagttcaatacaaatatgtcgaagaagatttgaggaacaagattgaactgcttctcatatccaacccagttcacaaaaacgctccagtgtttattcgcaatg

SEQ ID NO: 117973 - DNA, 250 bp, Glycine max
gtttggggcacaggagcctggatctaatgaacagatacaagagtttgtttgtactcgcttcaaggctgagtttcccgtttttgacaaggttgatgtgaatggtgacaaagctgctcactgtacaagtatctaaaatcaagcaaaggtggactctttggggatggtatcagatggaacttctccaagttccttgttgataaagagggaaatgtggttgatcgctatgcacccacaacttctcctctgagca

SEQ ID NO: 117974 - DNA, 118 bp, Glycine max
gacactgccattcttcaccaacaaggttgtccacaattacagcaacatgtgggagcaggagatggactcggtggtgcgtgacctcaacgtgaatgagagggtgaggagcgaagggata

SEQ ID NO: 117975 - DNA, 246 bp, Glycine max
aacacaggcgcagacgcaaacgcaaacgcaaacgcaaacgcaaacgcagagcgtgatccattgacgaagatggtgcagcgtctcacctaccgcaagcggcacagctatgccaccaagtccaaccaacacagggtcgtcaaaacccctggtgggaagctcgtttatcagactaccaagaagagggccagcggacccaagtgccccgtcactggcaagaggattcaggggattccacacttgaggcct

SEQ ID NO: 117976 - DNA, 184 bp, Glycine max
aagttctaaggtatctactctcgaattcaagatggtggctggatgaatacaagtttcatggatttcgatttgatggtgttacatcaatgatgtacactcatcatggattggaggtagcatttactggaaattacaatgagtattttggttttgcaactgatgttgatgctgtgatttacctgat

SEQ ID NO: 117977 - DNA, 244 bp, Glycine max
gctactgcttgcaatcccacccatattgaaatttgctgaaatgctttccctcaatgttagatctgtgaattacaccaggggaagtttcatctttcccggtgctcagccctatcccatcgcaacttttctgaggaagttgctattcttgatggctactttggcaagcttagtgcaggaagcaatgcttatattttgggtggccaagacaaatcacagaactggcatgtctactctgcttctgcag

SEQ ID NO: 117978 - DNA, 251 bp, Glycine max
gcttgatggccaagaaagtgaaagacaccgatgcagaggaggagctcaaagaggctttcaaggtttttgacaaagatcaaaatggctacatatcagctagtgagttgagacacgtaatgatcaatctaggagaaaaactaaccgatgaggaggtggagcagatgattaaagaagcagatttggatggtgatggccaagttaactatgatgaattcgtcaagatgatgatgaccgttcgatgaaacactctc

SEQ ID NO: 117979 - DNA, 154 bp, Glycine max
gaatcgctatcctcttgtggaacagttatgagctgacaatgctgccaatagttagatgcatgcttcttgagatggagcagactgacatttctgcatttgctcgagtcgccagtagcctgaaagcaattgtggcggaggcaatggacgtcctaag

SEQ ID NO: 117980 - DNA, 244 bp, Glycine max
ggcaggctacatacaccactgcccgtcttgggtcatttaaaatcttgacggccaaagctattgaggctaatgatgggaagcccctgccactgtatcagagagctctatgtgggctgactgctggtgctatcggagcaactgttggtagtccagcagatttggcactcattcggatgcaggctgatgcaacattacctgctgctcagcgccgaaattacactaatgccttccatgcactctatcg

SEQ ID NO: 117981 - DNA, 254 bp, Glycine max
tagatcaactcactcatcaatctcgtgtgttctcactaactattacttcatcatgtcgtcgagcagcattggtcaagtcatcaaatgcaaagctgcggtttcatgggaggcatggaagccacttgtgattgaagaagtagaggtggcaccaccacaagctggtgaagtgcgtttgaagatcctctacacctctctttgccacactgatgtttacttctgggaagccaatggccaaactccattgtttcctcgtt

SEQ ID NO: 117982 - DNA, 245 bp, Glycine max
ggcagagaacagaaattgggaaattcctcaatcttttgaactcgtcaagtgcgtgcaacactgtacaataatcttcatcgtccttgaaattcccaatcccctgtagtggtagtaagttgctagcaatcgagaatgggagggcacggaggtctcaacattctcccccaaaagcgatggaacgtttacaatttcgacaacagagagaaggtccgtcgcgacgaagagcaagccgccagggaggagca

SEQ ID NO: 117983 - DNA, 244 bp, Glycine max
gaacaattactttagtgttttctcttgtcacataaaagtcatctaagaagaattacaagatcatcatcacaataacaagatgagttcaggaattagagcatggagtgtggcagcaagtgttggaattgtggaggccttgaaagaccaaggcatatgcaggtggaatcatgccttaagatcagctcaacaccatctcaaaaaccatgttggctcattctctcaggctaacaagctttcttcttct

SEQ ID NO: 117984 - DNA, 159 bp, Glycine max
agttgttagatgttgtgctttttctccacatgctgatgttatatgtgtggagactgtaagcccaaatgtggttgagtgcacatagttttccgagggggttaggtcaaagcaccctcagatgatgcttggatacaacctctctccatctttcagctggga

SEQ ID NO: 117985 - DNA, 244 bp, Glycine max
gaaaaagagagaagctgctgatgaggcagtcttcccatgtgttatgagtatcttaccaaattgcattttcaacaagaaggacccaattgttttgggagttgatatccttgaaggcattttaaagattgggactccaatttgcattccttctagagagttcattgatattggtcgcattgcctccattgagaataaccacaaacctgttgattatgcaaagaaggggcagaaagtagccattaag

SEQ ID NO: 117986 - DNA, 239 bp, Glycine max
tgggaagccttcccgtcaaatggacagccagaagtgacttcagcctggcaaaccccggcagcagagcctgggaaagctgattgggaattggcattggtagagactgctagcaatttgtcaaagcagaaggcagctttaggtggtgggttggatcctctattgttgactggtatgtatgatcaaggaatggtgaggcagcatgtcagcactacccaactgagtggtgggagtgcaagcag

SEQ ID NO: 117987 - DNA, 243 bp, Glycine max
atcagaggctccccctaacttctggggccacaccccggaagaagaatactacacctcccaaggcgttcgcaacaccaagtcccacttcgaaacccccaacggcaaaatcttcacccagtccttcctccctctcaacctccaaccccaccaagtcaaagccaccgtctttatgacccacggctacggctccgacaccggctggctcttccagaaaatctgcatcaacttcgccacctggggcta

SEQ ID NO: 117988 - DNA, 287 bp, Glycine max
gacttctcaaccgctgacttgggaaatgaggcagaaaattatattaggaattgcagagggcatggcctaccttcatgaggaatctcatgtgagaatcattcatagagacataaaattaagcaacattctgcttgaggaggacttcacacccaagattgctgattttggacttgctagattatttccagaagacaagtctcacattagcacagccattgctggcacactggggtatatggctccggagtatattgttcgtgggaagttgactgagaaagcagatgttt

SEQ ID NO: 117989 - DNA, 254 bp, Glycine max
atttctattacatacattttgtagctaggatgagcaagttactactcattcgtgttgctgggttcgtggcaacctttgtcaccatggtgatgatgatggtgcccaaaaacgtgagtgcccaaaacataggtgatgacatcgtcacacaagacttcttcaacagcataatcatcaggctgatgatggttgtgcagggaagaacttctactcacgagatgctttccttaatgctcacaattcctacaatgagtttg

SEQ ID NO: 117990 - DNA, 190 bp, Glycine max
ggatttttcaaaagggaaggtacatggaacacagaatatggacaattcttccttgactggtactccaccaaacttgttgaacatggtgagaaaatccttgtatcagccaaaggcatattcaactcatgtggggtgaaactatctgccaaagtagctggaattcattggcactacaagactaggtcacacg

SEQ ID NO: 117991 - DNA, 278 bp, Glycine max
gcgttggtgaagattacccactcggtgttcaatgtgaatgatggtgtcaatgggaacaatttatggaggaaaaggctgtttagcaagattgcgtctttccagcagtttatccctcatgattttgatgccagtgatcatgggacatcgagcttccctgttgcttctgtgcatcgtatagggattttggacattaggattcttaacacggataggcatgctgggaacttgttggttaggaaacttgatggcatcgggagttttggtcaggtggagttgat

SEQ ID NO: 117992 - DNA, 262 bp, Glycine max
gtgagatctctcttggtctctccatctcgggacttcgtaatatcatctgatggaaagaaaacacttgtctctgagcttgagggcaagacagttggtctgtatttctgcgtgaagtcattcggatcatgcagtgactttaccccaaagcttgtggaggtttatgagaagctgaaggcccagggggagaactttgaggttgtgctgatacccctagatgatgatgaagagtcattcaaggaactattagaaagtgtgccttggt

SEQ ID NO: 117993 - DNA, 239 bp, Glycine max
gttgttacgaggactcaaatatgtacactcagcaaatgttctgcaccgtgatctaaagcctagcaacttgctactgaatgccaactgtgatcttaagattgcagactttggtctcgctagaactacatctgagactgatttcatgactgagtatgtggttactcggtggtaccgagctccagagttacttcttaattgctcagaatatactgccgccattgatatttggtctgttggtt

SEQ ID NO: 117994 - DNA, 267 bp, Glycine max
cttcaagggcaagtaccatgatgagcttatcgccaatgctgcgtacattggcactcctggaaagggtattcttgctgctgatgagtcaacagggacaattggcaagcgtttggccagcatcagtgtagagaacattgaatccaacaggcgagctcttagggagctgcttttcactgctcctggtgttcttcaatatctcagtggtgtcatcctctttgaggaaaccctctaccagagcacagctgcaggcaagccctttgtgaatgt

SEQ ID NO: 117995 - DNA, 279 bp, Glycine max
gtttgttgttgtaactcgttcttcttcttttgttgttctgtgtttgtgtttgtttgttctctcacctgaaaatgtcttgctgcggtggtaactgtggttgcggaagctcctgcaagtgcggcaacggctgcggaggctgcaagatgtacccagacttgagctacactgagtcaaccaccaccgagaccttggtcatgggagtggcacctgttaaggctcaatttgagggtgctgaaatgggtgtgcccgctgagaacgatggctgcaaatgtggaccaa

SEQ ID NO: 117996 - DNA, 263 bp, Glycine max
tgagatatatgcatcggacgaagatgccttcttcgctgattacgctgaggctcaccaaaagctttctgagcttgggtttgctgaagcctaagcaacgttttggggattgttggagatgcacggtgcccataatatttctctcataaattctatggtcatggtttctaatgcgccactgtgggttcctcaaatttttagatagctttcgaatgtattttgctggacgtggtgatgatgattggagttgggttgtttttatttgt

SEQ ID NO: 117997 - DNA, 272 bp, Glycine max
ctaagtttcttcctttctctgctctttgccttctctgacacatttggtgccttgtagagcgtgttttggcaggaaggtggtatggcgaaggacgttgaggttgctgagcgtggctccttctctgggaaggactaccaggaccctccaccagcaccactcattgatgctgaggagctcacaaagtggtccttttacagggctctcattgctgaattcattgccactttgctcttcctctacattactgtgctcacagtcatagggtacaagca

SEQ ID NO: 117998 - DNA, 276 bp, Glycine max
ggatagtaattaacctcactcaaactcgggatcacagaaaccaacaacagttcttgcactgaggtttcacgatgttgctggaacttgcacttggtttgtttgtgttagctttgtttctgcacttgcgtcccacaccaagtgcaaaatcaaaagcacttcgccacctcccaaaccctccaagcccaaagcctcgtcttcccttcattggccaccttcacctcttaaaagataaacttctccactatgcactcatcgatctctccaaaaagcatggcc

SEQ ID NO: 117999 - DNA, 275 bp, Glycine max
attcgcagagccgctttctttgtttttggactgagagattaccaaaacaaacccacgaatttttggtgtggcagatcacgattcctcagaaaactgtaatgggttggtgtccaatgatgtgctggatttggttggccctgatgctaggcttctctatgtgggcaagactgctggctatcatagcagaacacaggaggagatacatgagcttcttttgagttttgcagaagctggggcaactgttgtgagacttaaagggggtgatccattggtgt

SEQ ID NO: 118000 - DNA, 279 bp, Glycine max
  unsure (1)..(279): unsure at all n locations
gtctccgtaatgtcatagaatgctactgtgtcagagactccagtgcaanaaaaatggangacaccgaaaccaaaggaagaatcgactagactgtgcgtaggattctgcaagaatcggacatggacgaggttactgagtctaagattcgaaaacaggcctnngaanaccttggcctcgacctgtctcagccttatttcaaagcctttgtcaaacaggtcgtgaaggcttttctccaagaagaagaacaacgatagaaacaacaacaacaagatgaagatg

SEQ ID NO: 118001 - DNA, 275 bp, Glycine max
gtcaagacaaaaaaatctgttttatccaattttgcttcatcaactaccaaaaatgccttctcctgtacacaccttgctctccaaatgcaccgtcttcccagaccaaaagtccactctcggaaacctcaaactctccgtttcggaccttcccatgttgtcctgccactacatccaaaagggatgcctcttcagccaccccaatctctcactccactctttgatccctctccttaaatcctcactctctcgcactctttcgctctttccacctctcg

SEQ ID NO: 118002 - DNA, 279 bp, Glycine max
gctgtctgctgttagatctgtacccgcctagccattgatttggaaaagtccaacttcaaggatgagtaagcttcagagtgatgctctaagagaagctatctcaggaatcatggctgattccaaggaaaagaacaggaaatttgtggagaccattgaactccaaattgggttgaaaaattatgatccccagaaggacaagcgtttcagtggctctgttaagttgcctcatattcctcgccccaagatgaagatttgtatgcttggagatgcccagcacgt

SEQ ID NO: 118003 - DNA, 232 bp, Glycine max
aagtttttgaagtatagagatggcagagacattcctatttacctcagagtcagtgaacgagggacaccctgacaagctctgtgaccaaatctctgatgctgtcctcgacgcttgcctcgaacaggacccagacagcaaggttgcctgcgaaacatgcaccaaaaccaacttggtcatggtcttcggagaaatcacgaccaaggccaatgttgactacgagaagatagtgcgt

SEQ ID NO: 118004 - DNA, 270 bp, Glycine max
ggatagtgcaagtccaacccttccctcctcgctgatccttcactctccttcttccgcgactatcttcaaagtctcgccgcgaaacttcctgagtctgcttattccgaatcgacgggcgtggagagggatgaggacatagacgatcttacggaggagcacgagaaggtagaagaagaagaagtcgaagaggacgatgtaattattgaatccgatgttgagcttgagggtgaaactgtgagcctgatgatgatcctccacagaagatgggag

SEQ ID NO: 118005 - DNA, 265 bp, Glycine max
atgtggttctccaccaagggctagccctgtccccacacaagcaccacaagccagtagccccactcctccaccaaggtctgcaccagcacctgcttttggtccatcctctgaaccagctactttcattgttggagaaaccgctggctggattgttcctggcaacgcttccttttacacagcttgggcctctggcaaaaacttcagggttggagacgtccttgtgttcaactacgcatcaaatacacacaacgtagaggaggttaca

SEQ ID NO: 118006 - DNA, 275 bp, Glycine max
ctcacccaacattctcacaagtcacagccaaacaccatttcattaattcttgcagaatattgcttagttttgttttatctgaatttggaaacagcttttgaacggctttttcaagagttgcactgctaatatgcacggtcgggtattttgtgattgcctctgccggcaatttccaccaagattttgatatcacatggggagatggtcgggctaagatactcaacaatggagagcttctcactctgtcacttgacaaagcctctggctcgggtttc

SEQ ID NO: 118007 - DNA, 277 bp, Glycine max
gtttaacctcactcaaactcgggatcacagaaaccaacaacagttcttgcactgaggtttcacgatgttgctggaacttgcacttggtttgtttgtgttagctttgtttctgcacttgcgtcccacaccaagtgcaaaatcaaaagcacttcgccacctcccaaaccctccaagcccaaagcctcgtcttcccttcattggccaccttcacctcttaaaagataaacttctccactatgcactcatcgatctctccaaaaagcatggccccttattc

SEQ ID NO: 118008 - DNA, 276 bp, Glycine max
gacaatgaggacccatcaactcagaagaagcctcgagttgtttggtctgtggagctgcaccgcaagtttgtttctgctgtcaatctattaggcattgacaaggctgtacctaaaaagattcttgacttgatgaatgatgaaaagcttacaagggagaatgtggccagccacctccagaaatatagactttatctgaaaagaattagctgtggggcaaaccgacaggctaatatggtggcagcttaggtactgcagattcacttatttgagatgggt

SEQ ID NO: 118009 - DNA, 278 bp, Glycine max
gtgatgagatcagcacaacaacatgctaaacataatatgaggtctttgtctcaaaccaagaagctttattctcaatcatctgttatggcttcagccaaattgaaagatgagaaagctaagcagtcagaagagtctctgagaaccgtcatgtacttgagttgctggggtcccaactaaacacagatgcatggattttatgcaattctggatttctttttttcttctcttcttggaatatgaattgcaggaagatgagaaatggaagactcaaaagatgc

SEQ ID NO: 118010 - DNA, 274 bp, Glycine max
cgcagagcgatggccctcacagctttgcggtcacgcgtgccgtgccggggccatcctgtggagatgttcttcgagtgatgcagcaccagcccgagctcatgttcgagacactcaagcaccgcgcgcaggagtatgtcagccacgacaacgcagcagcgcttctggctgctggccttgctcgcacctttgacagaatgccttatctgctgtctctgtcttcctttgtggctgacgatgttgccgctgctgttcctgctgctcaagatctggggga

SEQ ID NO: 118011 - DNA, 273 bp, Glycine max
gtttcaagttcctttgtcaataagcaagaccaatacactgtggaaggagtgcagaatcttggagacaaagcagtgatgtgtcataggctaaatttcagaactgcagtattttactgccatgaagtccgtgaaacaacagctttcatggttccattggtggctggtgatggaaccaaaactcaggcacttgctatttgccactcaaatacttctggaatgaatcatcaaatgcttcatcaacttatgggagttgatcctggaactaaccctgtt

SEQ ID NO: 118012 - DNA, 266 bp, Glycine max
  unsure (1)..(266): unsure at all n locations
gtgaaagtctactctaagctatgcacacaacttctaactcgttcccactcngcatacatcgttatgacatcaactcatatctaacttcagccaccgctgatgatgctcatgtgtacgatactgacggcgataaccttacataccctgtcaattatatcgtgttgccagtgataagacgaaatggcggtggaatacaagtagcaaaagcaggaaacgaaacttgccctctgactgtggtgcaatctggcaacgagctctctgagggg

SEQ ID NO: 118013 - DNA, 269 bp, Glycine max
gttgataaggacaactacttgaactaccacaagagggtgattgagcttgtgaaggttgggggactggtcggctacgacaacaccctatggaatgggtctgtggtggccccacccgatgcgcctctcatggattatgtgaagtattatcgcgattttgtgatggagctcaacaaagctcttgcacttgattcaagggtcgagatttgccagcttcccgttggtgatgggattaccctgtgccgccgcatcatctgatcactctgctcttt

SEQ ID NO: 118014 - DNA, 270 bp, Glycine max
tgagagtgaaacattcttgcagaaggcgatccagcagcaaggtagagccagtgtgatggacacgatccaagagattcaagagaggcacgacacagtcaaggaaatagagagaaacctaaacgagctccaccaagtgttcttggacatggccgtgctggtgcagtcccagggcgaacaactggacgacatcgagagccacgtggcgcgcgccaattcgtacgtgcggggtggggtccagcagttgcacgtggcaaggaagcaccagaagaa

SEQ ID NO: 118015 - DNA, 273 bp, Glycine max
gcgtccatggccactttcttcacccaaacctccttcccctcccactctctctccaaaaccttcgatacccatttcgccccatccccgaaagtcaacgtatttgcgaacttcccggcgaggaggcacgtgggggttcgagtttcgaacgcgactgatcgaaccagacggagggaagctggtggagcttgtggtgagggataattcagaaagagacttgaagaagggtgaggctctttcgttgccgaggatcaagctttcaaggattgacctgga

SEQ ID NO: 118016 - DNA, 269 bp, Glycine max
gatgagtggtttttgagcagaagcagttaaaagagaaagggattcagcgaagatgacatcggttggtgtggcaccaacttcgggtttgagagaagccagtgggcatggagcagcaggtgttgatagattgccagaggagatgaacgatatgaaaattagggatgatagagaaatggaagccacagttgttgatggcaatggaacggagacaggacatatcattgtgactaccattgggggtagaaatggtcagcccaagcagactataa

SEQ ID NO: 118017 - DNA, 272 bp, Glycine max
ttttcaaccgttcactcattcttctgcgccaccgtcaccatcaccatccctttccttcttcttcttctctctccccattttctcgctctcgtttcttctcctctacgccgttctccatggcttctgattccccttttcctgtcaccgctcaaaacatcaaccccaaggttctgaaatgtgagtatgctgttagaggagaggttgtcacacttgcccagaatttgcaaaaggatttacaggccaatccaggctctcacccatttgatgagata

SEQ ID NO: 118018 - DNA, 262 bp, Glycine max
accaagaccaacatggtgatggttttcggagagatcacaaccaaggccaacgtggactatgagaagattgtgcgtgacacatgcaggaacattggttttgtctctgatgatgttggtcttgatgctgacaactgcaaggtcctcgtcaacattgagcaacagagtcctgatattgctcaaggtgtgcacggccacctcacaaagaggcctgaggagattggtgctggtgaccaaggtcatatgttcggctatgccactgacg

SEQ ID NO: 118019 - DNA, 275 bp, Glycine max
cacaggctccacaaaacatctcatccctcacccaacaaaatggcgctgcttctgataattcccatctcactggtcaccctctggctcggttacaccctataccagcgattaagattcaagctccctccgggtccacggccctggccggtagtcggtaacctctacgacataaaacccgtccgcttccggtgcttcgcggagtgggcgctctcttacggccccataatatcggtttggttcggttcgaccctaaacgtcatcgtttcgaactcgga

SEQ ID NO: 118020 - DNA, 272 bp, Glycine max
attccctccaaactccaagctctctattttctctgagaaaatttgcaaatgtcgaatttcctgagcaatactaatccgaaccctaataagtccttcgaggtgaatcagcctcccactgattccgtgtccagtcttagcttcagtcccaaagccaacttcctcgtcgccacttcttgggacaatcaggttcgttgttgggaggtagcacggaatggagtaaatgttgccactgttcccaaggcttctataacgcacgatcatccggttttgtg

SEQ ID NO: 118021 - DNA, 270 bp, Glycine max
tcgatttgttgtggattggatgatggaaaaaccagcaagcccctttcattgaaagggcgcagtgaactgtaattgtgaaaaggttggaagatctggccaaagaaggtgatagccctgtagattcgttcccatggttcgatccttcccagtaaaacgcggcgtgttcgaattctgatcgcttttacgcgagaaagggggaccaccctctaagcctaagtattcctcaatgaccgatagcgtacaagtaccgtgagggaaaggtgaaaagaa

SEQ ID NO: 118022 - DNA, 267 bp, Glycine max
cgagataactagaaacagtgtgatgaaaatgaaggtccttgttttcttcgttgctacaattttggtagcatggcaatgccatgcgtacgatatgttccctctccgaatgaacactggctatggtgcccgtactccggaggtgaaatgcgcaagttggaggcttgctgtggaagcacacaacatctttggctttgagaccattcctgaagagtgcgttgaagcaacaaaggaatacatccatggcgaacaatatagatcagacgccaa

SEQ ID NO: 118023 - DNA, 264 bp, Glycine max
ggtctctgtctactcttcaattattcccaacctctcacctcttcatcttcttcttccttacctttgaccagagacagagcagcactcacattcacaacgaaggtttcctattcatcagacatggtgaaggcaatcagagttcacgaactcggtggccctcaagttctgaagtgggaggatgtggaaattggagatccaaaagaaggcgaggtccgtgtgaggaacaaagccattggggttaatttcattgatgtctactttcgc

SEQ ID NO: 118024 - DNA, 238 bp, Glycine max
  unsure (1)..(238): unsure at all n locations
tgttttgaggccangctagctccactcaaacaccagacttctcctcgttcacgctagtcctttctgctcttcgtctagctttcaagtattaaaagtatacagatggcagagaaattcctatttacctcagagtcggtgaacgatggacaccctgacaagctctgcgaccaaatctccgatgctgacctcgacgcttgcctcgagcaggacccagacagcaaagttgcctgcgaaacat

SEQ ID NO: 118025 - DNA, 258 bp, Glycine max
gttgataaggacaactacttgaactaccacaagagggtgattgagcttgtgaaggttgggggactggtcggctacgacaacaccctatggaatgggtctgtggtggccccacccgatgcgcctctcatggattatgttacgtattatcgcgattttgtgatggagctcaacaaagctcttgcacttgattcaagggtcgagatttgccagcgtcccgttggtgatgggattaccctgtgccgccgcatcatctgatca

SEQ ID NO: 118026 - DNA, 272 bp, Glycine max
caaacattgtttgttgtaggaagaggaatcttgagaaatggcaggggacagcaagagcaagattctgttcatcggagggactggttacatcggaaaattcatcgtggaagccagcgccaaagctggccacccaactttccttttggtgagggagtccactctctccaaccccgcaaaatcacccctcatcgacaatttcaaaggcctcggtgtcaatcttgttttaggagatctatacgatcaccaagtttggtgagtgctataaagcaggt

SEQ ID NO: 118027 - DNA, 269 bp, Glycine max
attcatcactagaagtgttggatgcatttctatttctaactaattattgtgcttattattattgttgagaaagaaaagaatggcaaagttaataaaattctttgagttgaacacaggggccaagattccttctgttgggttaggcacttggcaagctgagcctggtgttgtagccaaagctgtcaccacagccattctggttggatacaggcatattgattgtgctcaagcgtataacaatcaagcagagattggttctgctcttaaga

SEQ ID NO: 118028 - DNA, 261 bp, Glycine max
ggaagacaccaatcttctctccacgcccttcttgggtaaccgtctgaagtgcagcaatggcagatggattgcattcgcagcatccatcggtagttcagaagttatctggacagtcttatcttgtgtccaggcttgctcctaatcactccagaaactgttctaccactggtagttacttcaatggaggtttgcagtcttcaggtttggttccagtcacggcacacgcgccggctgagaaaggggtgtctggatttttgttgg

SEQ ID NO: 118029 - DNA, 265 bp, Glycine max
cttcactcacagttacttgaacaccgactcagtctctcaccagtcaccaacaaaacaaaatccaatggcgccgtctttcgcaatcaacggcgctttccccagcgccagagtcactcctccttccgtcaccggccgattcaccgccgtctacagcaaggtccaaaacatctgcatcgaccactccctccctcttccctccgttctcaaaaaccctttcaccgtcgtcgacggtccccaaagctccgccgccggcaaccctggtctc

SEQ ID NO: 118030 - DNA, 178 bp, Glycine max
gctttctcctcggtccacagagacaaaatgtaagacaggtgccaacagttcatcacgaaagataggactagctgagccgagatcactaactaaaacgaatttaatactaatcgaaaatactaatagaatagaaatagaactgtcttttcatatagatatcccttcaacacaacatagg

SEQ ID NO: 118031 - DNA, 273 bp, Glycine max
gcaacataaagatgtagaagaaggagaggtggaaaaggacaagagaaaaccttttgccactaagcgagcttatttctactgggttacccgtgaggaaggttcctttgaatggtttaaaggggtgatgaatgaggtggaagagaatgacaaggaaggagttattgaacttcacaactattgcacaagtgtgtacgaagaaggagatgctaggtcagctttgatcacaatgcttcagtctcttcaccatgccaaaaatggtgtggatatagtttc

SEQ ID NO: 118032 - DNA, 272 bp, Glycine max
attcatcactagaagtgttggatgcatttctatttctaactaatgattgtgcttattattattgttgagaaagaaaagaatggcaaagttaataaaattctttgagttgaacacaggggccaagattccttctgttgggttaggcacttggcaagctgagcctggtgttgtagccaaagctgtcaccacagccattctggttggatacaggcatattgattgtgctcaagcgtataacaatcaagcagagattggttctgctcttaagaagc

SEQ ID NO: 118033 - DNA, 266 bp, Glycine max
tgcatgtatctatgaatgatggaaccaccacaaacgaggttgatgatcaacgttttcatagtgagtttcttagcactacttgtgaacttggtggtgggagtgctcggcgctgataactatagcagagatgattttcctcttgactttgttttcggttcaggaacctctgcttatcaggtggaaggagctgctaacaaagatggaagaactcctagcatctgggacacctttgcctacgctggatatgcccatggagaaaatggaga

SEQ ID NO: 118034 - DNA, 292 bp, Glycine max
  unsure (1)..(292): unsure at all n locations
gagaatggctcccaagggtttaacctttctggctgtgttaatatgcgtttcagcactgtcactgagtccttctgttgcgggggaagggcaaaataatggccttgttatgaacttctacaaggaatcatgccctctaggctgaagacantcatcagcagaacaagtgcaagctgtctctgacgaagcgtcgcacagagagacacttgctnnttctgcctggctgcaggggaacgatgcttccatgnagcgtgtgctgttcagnnagttgtgatgcttcagnctgttgctggac

SEQ ID NO: 118035 - DNA, 263 bp, Glycine max
atccggcctggcagctgctgatcaactgaataaaatgggccatactgtaactgtgtatgaaagagctgataggattggagggcttatgatgtatggcgttcccaacatgaagactgacaaagtggatatagttcaacggcgggtcaaccttatggcagaagagggaattaactttgtggtgaatgctaatatcgggcatgatcctttatactctcttgatagacttcgggaggaaaatgatgctattgtcttggctgtaggag

SEQ ID NO: 118036 - DNA, 262 bp, Glycine max
gcttggtgtgatgaataagagcttccctgaacttggtttggttgctgaacagtgcattgaaatgagttggatcgattcggtgttgttttgggacaactatccagtggggacttcggttgatgttttgcttcaaaggcataatacacaggagaaatacttgaagaagaaatcagattatgtgcagcaaccaaatttccaaaactggcttgaaggtatatggaacaagatgatggagtagaaaaactgctcttgcattgatcct

SEQ ID NO: 118037 - DNA, 272 bp, Glycine max
gagataaaactcggagagaaagggtactagtacgtacctgcaggctgcagcaacctcgaagctagttcaaactagtgggaggttgtgtgcatagaagcacaaacaaattacagaaaaagtcatcatcatactcagaattaatacaaattaagcattgatcttgaattaatggctcgcggaaaggttcagctgaagcgaattgagaaccctgtgcacaggcaagttaccttctgcaagcgccgagctgggcttcttaagaaggctaaggagct

SEQ ID NO: 118038 - DNA, 273 bp, Glycine max
gattttgtccatccaaaccttaaaaagattcagtgaagaacaacgttaatggcatctcttggtgtgcaagcagttcatcctcctccattaacatccacctccgacccacctcctctttttgatggcaccaccaggttgtacatcagttattcttgcccctatgcacaacgtgtatggatcgctcggaacttcaagggactaaaagacaagatcaatttggtccctataaaccttcaagacaggccagcttggtataaggagaaagtctaccct

SEQ ID NO: 118039 - DNA, 214 bp, Glycine max
atccggcctggcagctgctgatcaactgaataaaatgggcatactgtaactgtgaatgaaagagctgataggattggagggcttatgatgtatggcgttcccaacatgaagactgacaaagtggatatagttcaacggcgggtcaaccttatggcagaagagggaattaactttgtggtgaatgcgaatatcgggcatgatcctttatactgct

SEQ ID NO: 118040 - DNA, 266 bp, Glycine max
ctttgctttcctggctctttcagaagatgttgaacaagttgtggacataagtggcaaccccattttcccaggtggcacatattacattatgccatcaacttggggcgctgccggtggtggattgaaactaggccggacaggaaactcaaactgcccagttactgttttgcaagattactcagaaatcttccgtggcacaccagtcaaattcagcatacctgggataagccctggaatcatctttacaggtactccacttgaaatcg

SEQ ID NO: 118041 - DNA, 266 bp, Glycine max
gtgatatagaaaaacactttgaaccttatgggaatgttcttcatgttcgaattcggcggaactttgcatttgtgcagtttgagacacaagaagatgctaccaaagctatagagtgtacaaatatgagtaagatcctggacagggtggtgtctgtggagtatgctctgagggatgatggtgagaggggggacaattatgacagtcctagaagaggtggttatgagagatcacccagtccttatcacaggcgaccaagtcctgactat

SEQ ID NO: 118042 - DNA, 264 bp, Glycine max
ctctccaggccttacagtatgtgcaggagaacccagatgaagtttgccctgctgggtggaagcctggggagaagtccatgaaaccagaccctaaacttagcaaagactactttgcagcggtgtagctaggatactagatagttaagagtggctatctgcatctgtatcagtcagtgtgaattgcaaaagggtcttgtttcttaatgttttgtaagtccttaaattttgagccgcagggtatgggaatatactaataaatgcatg

SEQ ID NO: 118043 - DNA, 264 bp, Glycine max
acgacatgctctcctcgatcgagaggttccgcgccacttacctcccgctcgtgccgcccattctggtggccatgctcaacaacgccgccgctatcaagggcaagtacgatatcacgtcgctgcattcggtgctctccggtggggctccgttgagcaaggaggtcatagagggctttgtggccaagtatcccaacgtcaccatccttcagggttatggtttgacggaatccaccggcgttggggcctccaccgactccttggagg

SEQ ID NO: 118044 - DNA, 265 bp, Glycine max
gggtttatcatctgcttcaatggggaagggaacagggagcttcggtaagaggaggaacaagacccacactctctgtgtgaggtgtggccgccgcagcttccacctccagaagagtcgctgcgccgcttgtgctttccccgctgcacgcacgcggaaatataactggagcgtcaaggcaattcgcagaaagaccaccggaactggcaggatgagatacttgcgtaacgtgcctcgccgtttcaagagtggcttcagagaaggtacc

SEQ ID NO: 118045 - DNA, 264 bp, Glycine max
gtaagaagcaatggaggaagcaaagggagtgtggaagcacgttttccttgcaaagttcaaggacgacgtcactccagagcggattgaggagctcatcaaggactatgccaatcttgtcaatctcatcccacccatgaagtcattccattggggcaaggatgtaagtgctgaaaacatgcatcaaggcttcactcatgtgtttgaatcaacctttgagagtacagaaggcattgcagagtatacagctcatcctgcccatgttga

SEQ ID NO: 118046 - DNA, 261 bp, Glycine max
aaatttttcataagatgaaggaaaaagttttgggctcatctgatcctgattctggtaaaggaaagagcaagatgaagaagaacataactcatggctttcacttggtaaaggggagatcaggtcatgccatggaagactatcttgttgctcaattcaagcaagttgacgacaatgaattgggtttatttgcaatatttgatggccactcaggtcacagggtacctgattacttgaagtctcatgggtgtgagaagatcttga

SEQ ID NO: 118047 - DNA, 264 bp, Glycine max
gctggccatcatggtgttgctgttgctgtggtggttcaaggaagtccaagtcaaaaaagaaatcaggaaaaggtctcttcagtgtgttctccaagaacaagaacaagaagaaaatgatggggaaagactatgttagaaaagggtcagggttcatgtttgatcttgaagagattgaagaagggcttgaagggtatgaggatctagagaaatcatccctcatgtcccagaaaagttttgagaagcgattcgggcagtcaccagtgt

SEQ ID NO: 118048 - DNA, 259 bp, Glycine max
ggataagacactagtcttccaattttctgtcaagcatgaacagaagcgtgactgcggtggtggctacatgaagttgctcagtggtgatgttgatcagaagaaatttggtggggatactccttacagtattatgtttggcccagatatctgtggttacagtacaaagaaagtacacgctattcttacctacaatgacacaaaccacttgataaagaaggatgttccttgtgagactgaccaacttactcatgtttacaca

SEQ ID NO: 118049 - DNA, 260 bp, Glycine max
cgtcactccttgctcttagccctcctcctcttcgccgcggtggccaccgccgcgatggcgtggcgcgtccgacgccgacgacatcctgatccgtcaggtggtgccagatgttggcgaacctcagaggaggacaacctgctgaacgccgagcaccacttcacgagcttcaaggccaagttcgccaagacctacgccaccaaggaggagcacgatcatcgcttcggcgtcttcaagtccaacctccgcagagccaggctgca

SEQ ID NO: 118050 - DNA, 270 bp, Glycine max
agaggatatgacgttggtggtggaggggatttgtagtaatagggaggatgagaagtgggagatggtggaggaggactttgatagtagtaaggaggtggtggagatggagatggaggtcaaggggaaagaaaatgatggggaggatgatgaagagaagaaggaaaagaagaaaaaggagaagaaagacaaggatggcaaaactgatgcagagaagatcaagaagaaagaagatgatgggaaggatgatgaagagaagaaggaaaagaagaa

SEQ ID NO: 118051 - DNA, 260 bp, Glycine max
caagaagtacgacaaattaagacagggcctaagagaaggtgttgtatagatgatacagcgagagcaaaatgtattctcattggggtcgattgatgcttctcattgcttgcattcttccatctttggttgaatgcagagagaggcactacgaatttcatgtggtgtctaaacaaactaatagattgtgttcaagcaaatctagtgtcaccattaatggcaagttcccgggacccactctttacgccagggaagacgataca

SEQ ID NO: 118052 - DNA, 260 bp, Glycine max
gtcttcaacttcacccattcatacgtggtgttgttactgctgctcttttctcttttcttttctctttagttctctcttcccctttctttttctttttcttcttcttctgagcttgtttaagcttttcttccattaacatattatcacaatgtgtggtattcttgctgttcttggttgttctgatgactctcgagccaaaagggtccgcgtgcttgagctctctcgcagattgaagcaccgtggccctgactggagtgggc

SEQ ID NO: 118053 - DNA, 259 bp, Glycine max
ggaatggatgccataaaactggagggagggtcgccttcgagaattgttgcagcaaaggctattgttgaggctggaattgctgtcatgggccatgtaggccttactccccaggccattagtgttttaggggggtttagacctcaaggaaagaatgttgctagtgctgtcaaggttgtagagacggcattggctttacaagaagcagggtgcttttctgttgttctagagtgtgtgcctgcaccagttgcggctgcaacca

SEQ ID NO: 118054 - DNA, 255 bp, Glycine max
ttctttttctctctttctctctgcttgcggtgcttcacaagccagatctaacttgtctctgtgttctccgatctagtactactatcaatggccggaaaaggagatggtcctgctatcggaatcgatctcggcaccacctactcctgcgtcggagtgtggcagcacgaccgtgtcgaaatcatcgccaatgaccagggtaacagaaccacgccgtcttacgtcgctttcactgattccgagcgtttgatcggtgac

SEQ ID NO: 118055 - DNA, 264 bp, Glycine max
gttcattcccaggttgtgatggcagcagcaccagcagctaccttcgctattggaaccaccggttccctcggccaaagaggaagctcgcttcctcaatcaaagtcctttgggttgagattcaactctctgaatcatttgaagagcttctgtggcctcaaggccatgtcatccgtgagatgtgagtcggaatcctccttcttcggtaacaaaaccggtgctgctctacgggcgtcttttgcatccaaagctcaaaaggaaaacaac

SEQ ID NO: 118056 - DNA, 263 bp, Glycine max
gaagatggcttcacgcatgttcgtatcttctctgattcgatcctcccttcgtagatctcaatcgaaaccctcgatttccgcatccgcatcgaggctcacgtcatccaaccgtgcctctccgcacggttacttgctgaaccgcgtcgccgaatacgctaccgcggcggcggctgctaccgctcctccctctgctccgcctccgggcaagaatgatgttagcggcggcgggaagatcaccgatgagttcaccgggaagggctcga

SEQ ID NO: 118057 - DNA, 261 bp, Glycine max
  unsure (1)..(261): unsure at all n locations
gaaagttgaagaaacaatggcgtatgctaatgctgcttcaactagcccaacaacatcttcanacctctccccgcaacccatggaagggttgcacgaggtgggtccccctccgtttctcaccaaaaccttcgacgtggtggaagacccatccaccaacgacatcgtttcgtggagcagatcccgcaacagtttcgtcgtttgggactctcacaagttctctaccaccatcctgcctcgctacttcaagcacaacaatttctt

SEQ ID NO: 118058 - DNA, 254 bp, Glycine max
agcagagagcaggaattgggaaattcctcgatcttttgaactcgtcaagtgcgtgcaaactgtacaataatcttcatcgtccttgaaattcccaatcccctgtagtggtagtaagtttctagcaatcgagaatgggagggcacgtaggtctcaacattctcccccataagcgatggaacgtttacaatttcgacaacagagagaaggtccgtcgcgacgaagagcaagccgccatggaggagcagctcaagcgt

SEQ ID NO: 118059 - DNA, 255 bp, Glycine max
cggaccctctcttcaggtcaccatctagactggaatcatggctgatggaccacagcatccatcaggtgttcagaagctagctggacagtcttacctggtgtccaggcttagccccaactttaactctaggaattattctgcaactggttcttacgtcaatggcggaatgcactcgcctgggttggctgttgtgtcacctgtatctccagttactgtgcatgctccagcagagaaaggagtgagtggatttctagt

SEQ ID NO: 118060 - DNA, 255 bp, Glycine max
gccctcgccggttcccttctcggctttggaaccctagctatcattatcggctccctcatggcctacaatcacgtcggcggcgacaccactcacggtaaccacattatgaacatcccttttcagaattcctgctactatttataattatgattttaatgatggataggtctgttctttgcgatactgggaacactcttgttcattccgggtttctactatacgcgctttgcctagtgtgcttacaagggatacaaa

SEQ ID NO: 118061 - DNA, 259 bp, Glycine max
ttctgaaccaacacaatgatggaatggaagggtcttgcgttcttctgcggtttgatagatagctagccatgttggcatgaagatttgagcgggaaaataataagacaacatacataacgttttctcaaaacggcagtttgcctgcactgatcagttcttagagcatgaattcagcatccccgcagtttgtttcctcaagaaggatgagtgtgtacgatccgatccaccagattagtatgtggggagaaggcttcaaaag

SEQ ID NO: 118062 - DNA, 263 bp, Glycine max
tttcaaacacaacttcgcttattaaatctcttcttccaattccttctttcattcattcccaggctgagatggcagcggcaccagcagctaccttcactattggaaccaccggttccctaggccaaagaggaaactcgcttcctcaattaaagtcttctgggttgaaattcaactcccagaatcatttgaagagcttctgcggcctcaaggccatgtcatccgtgagatgtgagtcagaatcgtctttcttggttaacaaaact

SEQ ID NO: 118063 - DNA, 266 bp, Glycine max
ggatctttctttccgcttctgaatccgtgccctagcttcttcctcctccgccattgcagcagggcacacaaccttcgtcacaaacccaattcgcgagggatcggattcgccatcatggggaagaagaagaagagagtttcctcgaaggtgtggtgttattactgcgatcgcgaattcgacgacgagaagatcttggtgcagcatcagaaagccaagcacttcaagtgccatgtctgccacaagaagctctccaccgccggcggcat

SEQ ID NO: 118064 - DNA, 263 bp, Glycine max
tgtttcaagatccagacctcttcccaatgaagaacctctctttcttcctcatcaccacccgattcgccgccttctccgccgtcagatctgatccctcagatcaccgctacaaagaaggcgactccgtccctctctacgccaacaaagttggccccttccacaaccctagcgaaacctaccgttacttcgaccttcccttctgtgaaccaggtgatttgagagagaagaaggaggcgctcggggaggtgctgaatggggaccgt

SEQ ID NO: 118065 - DNA, 258 bp, Glycine max
gcagatattcgtaaaaactttgaccggcaagaccatcacccttgaggtggaatcctccgacaccattgacaacgtaaaagctaagattcaagacaaggaagggatcccacctgaccagcagagacttatctttgcgggtaaacaacttgaggatggtcgcacccttgccgattacaacatccaaaaggaatcaaccctccatctcgtgcttcgcctcaggggtggcatgcaaatctttgtcaagactttgaccgggaa

SEQ ID NO: 118066 - DNA, 260 bp, Glycine max
cagagagagacgcagccatggggcgaagaccgcgaggtgttataggcaaattaagaacaaaccataccccaagtcacggttttgccgtggtgttcctgatcccaagatcaggatttacgatgttggtatgaagaagaagggtgttgatgagtttcctttctgtgtccatctggttagttgggagaaggaaaacgtttctagtgaggccctggaagctgctcgtattgcttgcaacaagtacatggccaaatttgctggaa

SEQ ID NO: 118067 - DNA, 263 bp, Glycine max
gcagtcactgctctgtttcaccgagtttgggcgtttagatcagaaccaaatcgtgttctcttccattggcaaacatggcaactcaaatgagcaagaagagaaagtttgttgcggacggagtgttctttgccgaactgaacgaggttctgacacgtgtcttggcggaggacggttactccggcgtcgaagttagggttacgccgatgcgcaccgagatcatcatcagagccaccagaacccaagccgttctaggtgagaaggga

SEQ ID NO: 118068 - DNA, 264 bp, Glycine max
ctctctctctctctctctctccctctctccttccccaagatgtcgagcgccgatcccgagcaccgagaagaggaggaggcacccgccgtcggcgacgacgacggacaccggagcacacgtcgctcccatcgtcaagctcgaggaggttgctgtcaccaccggcgaggaggacgaagatgcaatcctagatctcaaatcgaagctttaccggttcgacaaggatgggaaccagtggaaggagcggggcgcgggcaccgtgaagtt

SEQ ID NO: 118069 - DNA, 251 bp, Glycine max
gcgtgattccttggcggagtgcgagcgtgcaccgagccgcggcgagacaaaacgctgcgttgggtcgctcgaggacatgatcgactttagccacctctgttttgggccgaaacgtcgccgttcggactacccagaacgtgaacgggtccaagaagagtgtggtggtggggcccgttacgggaatcaacggtggtaaagtcacccaatccgtgtcgtgccaccagagcctgttcctctatctgctttactac

SEQ ID NO: 118070 - DNA, 261 bp, Glycine max
ggaggagcagccactagtcctcaagtaccacaacggccagctcctgaagggccgcatcaccgtcaatctcatctggtacggcaccttcaccccgatccaacggtccataatcgtggacttcataaactcgttaagcagcgcgccaaacgcgcctctcacctcgaccgccacgtggtggaaaaccacggagaagtacaaggtgggaggaggatcccctgcgctcgtcgtagggatgcagttcctacacccggcttacacgct

SEQ ID NO: 118071 - DNA, 244 bp, Glycine max
attgattgttgtaagactttgtaattgaggtgctgcaatggcttcaagtcaggaagaggtgactcttttgggagtaattggaagcccatttgcttgcagggtgaagattgcccttaagttgaagggagttgaatacaaatatgtggaagaaaaaggagccaacaagagtgatttgcttctcaaatccaacccagttcacaagaaagttccagtttttattcacaatgagaagcccatagcagag

SEQ ID NO: 118072 - DNA, 260 bp, Glycine max
ggtggatacctaggcacccagagacgaggaagggcgtagtaagcgacgaaatgcttcggggagttgaaaataagcgtagatccggggattcccgatataggtcaacctttcgaactgctgctgaatccacgggcaggcaagagacaacctggtgaactgaaacatcttagtagccagaggaaaagaaagcaaaagcgattcccgtagtagcggcgagcgaaatgggagcagcctaaaccgtgaaaaggggttgtgggaga

SEQ ID NO: 118073 - DNA, 262 bp, Glycine max
gttcagtctttcttggaactttgttactctcacacatgtctcgctccgtgcctttggtttcaaccatttttgtgcttgcttctgcttctggtggccactgagatgatggggccaacaatggtggcagaagcaagaacttgtgagtctcagagccaccgtttcaaggggccatgtttgagtgacaccaactgtggctctgtttgccgaaccgaacgtttcactggaggacactgccgtggcttccgtcgcagatgcttctgca

SEQ ID NO: 118074 - DNA, 253 bp, Glycine max
atcttagttatctaattacctcaattaatcccttaattgcaagcatcatggctgaggagaaacaccaccaccacttccaccaccacaagggcgatgatgtgcctggcgaggttgattataagaaggaggagaagcaccacaagcatcttgagcaccttggggaacttggtgctgcggctgccggtgcttatgccttgcatgagaagcatgaggccaagaaagacccagagcatgctcacaggcacaaggtaga

SEQ ID NO: 118075 - DNA, 259 bp, Glycine max
gctggaggctattctatggggtattggaacagctataggggagcttcctccttactttatctccagggcagcacgcttgtctggtgggagagtagatgccatggaagaattagacagcgaagatgaaagagtcttgagtcgaataaagtgctggtttctatcacactcgcaacatttgaatgtctttactattctagtgcttgcttcggttccaaatcctctatttgaccttgccggcatcatgtgtggacaatttggc

SEQ ID NO: 118076 - DNA, 247 bp, Glycine max
ctcattaattgcaagaatggcacttcgttgcttggtgatgtccctttctgttctcttcactcttggtcttgcgagagaaagccatgccagagacgaagatttttggcatgctgtttggccaaacactcccattccaagttcattgcgagatcttctaaagcctggccctgcaagtgttgcaaatcgctgatcaccctatgcaaattgaagaaacacagtacccgaaaaccttcttccataaagaaga

SEQ ID NO: 118077 - DNA, 261 bp, Glycine max
tctcattttgcccttcttggagttggacatcaagtattatgacttaggccttccttaccgtgatgagaccgatgataaagttacaattgaaagtgcagaagcaactctcaagtacaatgtagcaatcaagtgtgcaactatcactccagatgaagctcgtgtgaaggagtttggcctgaagtcaatgtggaagagtccaaatgggactattaggaacattttgaatggaactgtcttcagagaaccaattcttgcaaaaac

SEQ ID NO: 118078 - DNA, 258 bp, Glycine max
ctcggccgggttcgacccggttcatctcgggtccaacgcgttcaagcaagcgagtatgctacttgctctattcgcaggcggtgacggctatagggttgaggagaataacggctgcctcatgcttggctggcacactcggccactcatcgctacctccgcctggaagcttccctccccgaacgacttgcactgtaaactgtagattaattggctcctggatgggtggtaaataataaaaaatggttggttgaacttgtt

SEQ ID NO: 118079 - DNA, 106 bp, Glycine max
agccaataaaaaacgttgttgatagcaggaagatgcacttcgcaattgcacaaggaaaacaacggaagccaagtttccgcgcattttgtcacataagaaaaacgaa

SEQ ID NO: 118080 - DNA, 258 bp, Glycine max
gttataagacaattaattaagttatttgacacaaaagtcagaagctagggtggtgaagactcaataaaatggactcttgggttagaatgctgtttctcattgcttgcattgttccagctttagtcgagtgcaaagtgaggcactacaaattgcatgggggactggaggattccaccaaggtaaggtccaggcaaaccaatggtcaccgttaatgggaaatttccaggacccactctttacgctagggaagatgataca

SEQ ID NO: 118081 - DNA, 257 bp, Glycine max
aagaactagaactagggtctcatcattgccatcagtaaacgacaatgatttacgacgttaactctcctcttttccgatccttcctcagccagaagggaggctcctctgataagaggaaatcggacgaacagaagccaaaagagcagaaacccaaagccagcgagaacaaacctataatgactgagtgataacagctgagctgcattcagtagtagaatgaaaataggtggtaggtattgtatttggtgctaaactaa

SEQ ID NO: 118082 - DNA, 253 bp, Glycine max
cctatggccgtcactccttgctcttagccctacacctcttcgccgccgtggccaccgccgcgatggcggtggccgcagtccgacgccgacgacatcctgatccgtcaggtggtgccagatgttggcgaagcgaagaggaggacaacctgctgaacgccgagcaccacttcgcgagcttcaaggccaagttcgccaagacctacgccaccaaggaggagcacgatcatcgcttcggcgtcttcaagtccaacct

SEQ ID NO: 118083 - DNA, 255 bp, Glycine max
atactggttacattgattacgataagctcgaggaaagggcgcttgattttcgccccaagatacttatttgtggtggcagctcctaccctcgagagtgggattatgccaggtttaggcacattgcggataagtgtggagctgtgttgttgtgtgacatggcgcagattagtggcataattgcagccaaggaatgtgtgaatccttttgattattgtgacattgttacttcaacaactcacaagagtcttcgaggtc

SEQ ID NO: 118084 - DNA, 253 bp, Glycine max
atactggttacattgattacgataagctcgaggaaagggcgcttgattttcgccccaagatacttatttgtggtggcagctcctaccctcgagagtgggattatgccaggtttaggcacattgcggataagtgtggagctgtgttgttgtgtcgacatggcgcagattagtggcataattgcagccaaggaatgtgtgactccttttgattatggcaacttgttcacttcaacaactcacaaagtcttcgagg

SEQ ID NO: 118085 - DNA, 207 bp, Glycine max
ctcagactttaagtagaaggtcagatgatgggtacaattggaggaaatatggtcaaaaacaagtgaagggaagtgaaaatccaagaagttattacaaatgcacataccccaattgccctacaaagaagaaggttgagaggtctttagatggacaaattactgagatagtttataagggtactcataaccatcctaagcctcaaaata

SEQ ID NO: 118086 - DNA, 261 bp, Glycine max
ctccatcatcatatcatagccttttctttcatagctactacactactttatcactttcattctttaattgggttcaaagaagcttaattaattggttgcagagattgaaaattaggaaaatggtgagtgttgaagagattcgtaaggcacaacgtgcggaaggccctgccaccgtgatggctattggcacggccactcctcccaactgcgtagaccagagtacctatcctgactattatttcagaatcaccaacagtgatc

SEQ ID NO: 118087 - DNA, 244 bp, Glycine max
ctcgagcaaaaacttaagttcattccttgtgttttgctttcttcctcaaaaccaaacatgtcgaacacatgcggcaactgcgactgcgctgacaagactagctgcaccaagggaaacagctatggtgttattgtagagactgagaagagttacatcgagactgttgtcatggatgttccagcagctgagcatgatgggaagtgcaagtgtggcactaactgcacttgcacggactgcactgtgg

SEQ ID NO: 118088 - DNA, 248 bp, Glycine max
tctcaatcaaggattgccctcttgttggggatcatggagtgtctagtcttttggcatcggcttcaaatttatcaagggttaagcttcagactttgaacatcacagatttctctttggctgttatttgccattatggaaaagcgataacaaatctggtcctctctggtctaaaaaatgtaactgaaagggggttctgggtcatgggggctgctcaagtctgcagaaactactgtcacttactgttactg

SEQ ID NO: 118089 - DNA, 256 bp, Glycine max
agcaacgtataataatgcacatgaaatggctgctggttcagatgtaatctttactgatgatgtgagccttcaagttttctttgagcatctgcaaaggttggctgtccaatcatgaggacagataatagtagagattgacattttatgggttctggactttggtttggggaattcaccaatgatgtgtgtgtcctgcgttgtgctgttgcattcagtacttttcctttctttcctttgttcttaacaaagagaagct

SEQ ID NO: 118090 - DNA, 250 bp, Glycine max
gcgagtgttccgaaagctgatgctatttttatgaagtggatttgccacgattggagtgatgagcactgcttgaagtttttgaagaactgctacgaggcactaccagacaatgggaaggtgattgtggcagaatgcattcttccagtggctccagactctagcttggccacaaaaggtgtggttcacatcgatgtgatcatgttggcacataatccaggtgggaaagagagaacagagaaagagtttgagg

SEQ ID NO: 118091 - DNA, 245 bp, Glycine max
atttccagatcacgaaactaaagaagatggagaaagcgatcagcagacagaagattttgcttcatcatctcaacccttcatcgtctacccacgtcaacgaatcatcctccctctatgcttcagcatgtgtggcgggggacagcgctgcttatcaaaggacatcgacattcagggatgatgttgtgatcgtggctgcttatcggactgctcattgcaaaggtaaacgtggtggtttcaaagatact

SEQ ID NO: 118092 - DNA, 247 bp, Glycine max
tgcctgttgaagaacagccaaagcaaattattgtcactcgtaaaggaatgttggatccattggaggttcacctgctggatttccccaacattgttattaaaggaagtgaactgcaacttcctttccaggcatgtttgaaaattgagaaatttggggaccttatattgaaggccacagaaccccaaatggttttgttcaatatctatgatgactggctgaagagtatttcttcatacactgcatctcc

SEQ ID NO: 118093 - DNA, 190 bp, Glycine max
atgtattgttgtaactttttgattcctaaattctctaaaattcgaaattctaatttcgttaggggaaagagattgtttgtgtgtgagtgagtatggctggaaaaggcgagggtcctgctatcggaatcgatttgggaacgacgtactcttgcgtcggcgtgtggcaacacgatcgtgttgaaatcatagc

SEQ ID NO: 118094 - DNA, 101 bp, Glycine max
gtagcattcagtgaaacactagctagggtattgggagctctcgttgtttcggagttagggaccttacgcagccatggccactgctacgaatgccgccgccg

SEQ ID NO: 118095 - DNA, 117 bp, Glycine max
gacactgccattcgtcaccaacaaggttgtccacaattacagcaacatcgtgggaggaggagatggacttggtggtgcgtgacctcaacgtgaatgagagggtgaggagcgaaggga

SEQ ID NO: 118096 - DNA, 256 bp, Glycine max
gtggtgttactaatgtgtcaagtattgaggagctttgctttataaaagatctgcatctaaggactgtggatcagcttggtgtggacggatctgttattgcaaagcatctagaagaattggagcaacttctgaaggggatagctatgatgaaagaattgactaaaaggactcaggactatttagtctcctttggagaatgcatgtcgactaggatctttgctgcatatcttaacaaataggtgtcaaggccgccaat

SEQ ID NO: 118097 - DNA, 263 bp, Glycine max
atttgggaagagccaaacacgactacagaagaagccatggaaaacgttctggtcacggtcccgggtgcgattctgcatctgatagaaaaggattccagcgtgcaccttgcttcgggcgacctcaccatatcgaccctcggagaaggcgacaaagtggtggcggttctggcatgcgtcggcgatcaggttcagtggccgttggcgaaagacgtgtcagcggtgaagctggatgagtcgcactattcttcacggtccaggtccca

SEQ ID NO: 118098 - DNA, 255 bp, Glycine max
tgcagcgacacctccctcccgcagtagccatggttctcaaaactgaactatgccgattcagtggtgccaagatctaccccggaaagggcatcacatttgttcgttgtgattactaggtttttctgtttgccaactcaaaatgtaagctctatttccacaaccgcctgatgccctcaaagctcacctggactgctatgtacataaagcaacacaaaaaggacattgctcaagaagctgtgaagaagaggagacgcg

SEQ ID NO: 118099 - DNA, 200 bp, Glycine max
atttttctctctcccttagtcaaagggattcatcgttcttcttcccaggttatttagaaaagcaaaatggtgaagatttgctgcattggtgctggatatgtggggggtcctactatggcagtcattgcacttaagtgcccatccattgaagtcgctgttgttgatatctctaaatcccgcattgcagcctggaacagcga

SEQ ID NO: 118100 - DNA, 253 bp, Glycine max
  unsure (1)..(253): unsure at all n locations
gggaaaccccagagggtcaaaaggctattcattctctgaagaatgtttatgcccattgggttcctgaggacagaatcctttgcaccaatttgtggtctgctgaactctcaaagcttgcagccaatgctttcctggcccagaggatctcctcggtgaatgccatgtcggcactttgtgaggcaactggtgctgatgtctcccaggtgtcacatccaatccgcancagactcaagaattggaccaagttcctgaa

SEQ ID NO: 118101 - DNA, 251 bp, Glycine max
gagaaagaaaaagcttgagagatggagaacttccctgtgatcaacttggagaatatcaatggtgaggagaggaaggctatcttggaccaaattgaagatgcttgccagaactggggattttttgagttggtgaatcatggaataccccttgaacttttggatacggtggaaaggttaacaaaagagcattataggaaatgcatggagaagaggttcaaggaggcagtgtcaagcaaaggttagaagatgaa

SEQ ID NO: 118102 - DNA, 252 bp, Glycine max
atagattttcgggtaccatagttggagtggaagatatttctcctcattgggtaaattcaaaatggcgatcactcaaggttcaatgggatgaacctgcagctgttcccagacctgatagggtctcaccatgggagatagaaccctttgttgcttctgcttctacaccctcagttcaacctactatggtaaagactaaaaggccccggccacccagcgaaactccagatgttgacacacatctgttgcttctgt

SEQ ID NO: 118103 - DNA, 252 bp, Glycine max
ctcatcgtatttggaactcaatcttgaggatgtagaaccctgtgtctcaggtccaaaaaggcctcatgaccgtgtcccttacagagaaatgaaggtagactggcatgcctgcctcaacaataaagttggattcaagggttttgctgtaccaaaagaatctcagaataaggttgcagagttcacattccaagggacaccagcacatcttaggcacggtgatgttgttatagctgctatcaccagttgtacaaa

SEQ ID NO: 118104 - DNA, 259 bp, Glycine max
gtattccttcaagaagggttctgctcgctctgccagcaaaagtcaggagaacaagtcatctagagtatcaaagtcatctactaatgcaaataattatggttcagttccttctcaaagttcaagtgtacctgcaaacagtactgaggatgacatggatgattttgatccaagaggaacttctaccaaaacttcagccggaaactctaaccaggttgatctctttggacaagatttaatcggtgacctcatggatgctcca

SEQ ID NO: 118105 - DNA, 208 bp, Glycine max
caggcaagccccactcaaccaccacacctctcctcgttcacgctacccctttctgctcttcttctacctttcaagttttaaaagtataaagatggcagagacattcctatttacctcagagtcggtgaacgagggacaccctgacaagctctgcgaccaaatctccgatgctgtcctcgacgcttgcctcgagcaggacccagacagc

SEQ ID NO: 118106 - DNA, 140 bp, Glycine max
gagggagggtcctaaccttctcaagttggccaggaaggagcagtgcttggctcttgggactaggctcaggtccaagtacaagatcaagtaccagttctacagggtcttccctactggggaggttcagtatttgcacccta

SEQ ID NO: 118107 - DNA, 240 bp, Glycine max
gtcgacatcttcatccccaaggatcgaagaactggtgagtcaaggggttttgcattcgtgcgttacaagtatgctgatgaggctcagaaggccgttgagaggctcgacgggagaatggttgatggtcgtgaaataaccgtccagtttgcgaaatatgggcctaatgctgagaggattcacaaaggaaggattattgccacatccccgagatcaaggcgatcaaggcgccgtagcaccagg

SEQ ID NO: 118108 - DNA, 231 bp, Glycine max
aataactctaaactaaacacttccatacacaaattttctctcccagaaaaaaaaaatattttcatttcattttcgagtaaaagtaaaacacagttcctgatcaatggcatctcgccgccgcatgttattgaaggtcataatcctcggagacagcggggttggtaaaacatcactgatgaatcagtatgtgaatcgtaaatttagtaatcagtataaggcaaccatcggtgc

SEQ ID NO: 118109 - DNA, 259 bp, Glycine max
tccacatttcaacaaccatagccatggctttctccttctgcaaagcacttgtccttgcctgctccttctgcttatttgcgtctttggcttttggacgcgatttctccattgtgggctattcatcggaggacttaaagtccatggataagctcattgaactctttgaatcatggatgtcaaaacatggcaagatttaccaaagcattgaggagaagcttcttaggttcgagattttcaaggataacctaaagcacattga

SEQ ID NO: 118110 - DNA, 229 bp, Glycine max
ctcgagcgctctcttctttttactctctctctgtctctctctacgctttctcgttcgagatccctcaagggatccactaactgaaggagaaatggggttgacattcaccaagcttttcagccggcttttcgccaagaaggaaatgcgaattctgatggtgggtctcgatgcagctggtaagaccaccatcctgtacaagctcaaacttggagagatcgttaccacaatt

SEQ ID NO: 118111 - DNA, 258 bp, Glycine max
cgaccatgaacatggcgatcgtgcttctgttcatggttttcgcagtttcatcagctttagacatgtcaataatatcacatgacaacgctcatgcggatacggccacgaggcgcaccgacgacgaggtgatgtcaatgttccaggagtggctggtgaaacacgacaaggtgtacaacgcgctcggtgagaaggagaagaggtttcaaatcttcaagaacaatctgcgctttatcgatgaacgaaactctctgaaccgaa

SEQ ID NO: 118112 - DNA, 263 bp, Glycine max
gccatttctttcgtcttaatttgttctcttcagccatggcgatggtgcaagatgaacgatgcgttcagaaaagctactggattgaacatacgacggacttgtccgtagagtcaatgatgctcgattccaacgcctctgatctcgacaaggaggagagacccgaagttttgtccctactaccaccatatgaaggaaaatcagttgtagaacttggagcaggtattggaagattcacagttgaattggccaagaaagctggccat

SEQ ID NO: 118113 - DNA, 252 bp, Glycine max
ctttatcaactcactcatcaatctcgtttgttctcactaactattacttcatcatgtcgtcgagcacagttggtcaagtcatcaaatgcaaagctgcggtttcatgggaggcagggaagccacttgtgattgaagaagtagaggtggcaccaccacaagctggtgaagtgcgtttgaagatcctctacacctctctttgccacactgatgtttacttctgggaagccagggccaaactccttgtttctcgta

SEQ ID NO: 118114 - DNA, 139 bp, Glycine max
ctcgagccgattcggctgagattgaccaggtgtttcccattatccccattcaccggttggaagaaaagccttcggtgaggggtattctctcggacttgacttgtgacagcgacggtaagattgacaagttcatcaacgg

SEQ ID NO: 118115 - DNA, 137 bp, Glycine max
ctagactcttctttttctctaagtctaaggggtgccctgagatcactttgagcaatggtgaaggctgtggcagttcttggcagcagcgagggtgtcactggaactattttcttcactcaggagggaaatggtccaac

SEQ ID NO: 118116 - DNA, 235 bp, Glycine max
gggagcttgagaaaaagtttagtggcaaggatgtaatcttggttgccacccgaaggattttgaggccaccaaagaagggttctgctgctcagcgtcctcgtagtcgcactcttactgctgttcatgaagcaatgctggaggatgttgtattgcctgctgagattgttgggaagcgtgtgacgttccgaattgatggatccaagattatgaaggttaacttggacccaatggagcg

SEQ ID NO: 118117 - DNA, 136 bp, Glycine max
cactcattaattgcaagaatggcacttcgttgcttggtgatgtccctttctgttctcttcactcttggtcttgcgagagaaagccatgccagagacgaagatttttggcatgctgtttggccaaacactcccattc

SEQ ID NO: 118118 - DNA, 221 bp, Glycine max
gttatattagacccttttataaacctctttcaaggcttttcaatcacaccctttctctaatcacttcttcttgtgctggcataacttcaacaacttattctttgttctcgatctcacgatggctcatttggccctgtctcagatggctgtaactgttcctgttggcagcgatttgtctctcagaagatctgcggttaaggcacctaacttaaactttgggg

SEQ ID NO: 118119 - DNA, 238 bp, Glycine max
aaactggttacattgattacgataagctcgaggaaagggcgcttgattttcgccccaagatacttatttgtggtggcagctgctaccctcgagagtgggattatgccaggtttaggcacattgcggataagtgtggagctgtgttgttgtgtgacatggcgcagattagtggcataattgcaggcaaggaatgtgtgaatccttttgattattgtgacattgttacttcaacaactca

SEQ ID NO: 118120 - DNA, 219 bp, Glycine max
ctcaatcgttttctacataatacaaacctctctaatttttgaagcttattatacccaatctcgatatgcagatcttcgtgaaaaccctaactggcaagacgatcaccttggaggtggagtcctctgacaccatcgacaacgtgaaggccaaaatccaagacaaggagggcattcctccggatcaacagcgtttaatctccgcgggaaaacagctcgaag

SEQ ID NO: 118121 - DNA, 220 bp, Glycine max
cttctgcagccgttgctattccctcattcactggcctcaaggcaagcgcaggcaaagtgagtgccgcagttaaagtctcagctccccaagccacaaggttgggcatcaaggcttcgctgaaagacgttggagtcgctgttgtggccactgccgcgagtgcagtgctggctagcaacgccatggccattgaagtgtagttgggtggtgataacgggtctct

SEQ ID NO: 118122 - DNA, 247 bp, Glycine max
gttcattcccaggttgtgatggcagcagcaccagcagctaccttcgctattggaaccaccggttccctcggccaaagaggaagctcgcttcctcaatcaaagtcctttgggttgaaattcaactctctgaatcatttgaagagcttctgtggcctcaaggccatgtcatccgtgagatgtgagtcggaatcctccttcttcggtaacaaaaccggtgctgctctacgggcgtcttttgcatccaagc

SEQ ID NO: 118123 - DNA, 246 bp, Glycine max
aaagaaagtggggtgagtttcttgtgggttttaagagaatctgagcatggaaaattgccctgtgggtacagagagtcggtaaaagataagggtctaattgtgacatggtgtaaccaacttgaattgctggctcaccaagccactggctgctttgtgactcattgtggctggaattccaccctcgaaagtcttagcctcggcgttccggtggtgtgtgtgccacagtgggctgacaagttgcctgat

SEQ ID NO: 118124 - DNA, 230 bp, Glycine max
gaatacttcttatgcaactatagtgaggctaagagattggtccataattaatcaaaatgttggctatattccacaaagcttttgctcatccacctgaagagctcaacagccctgcatcttacaaaggttccaagaagcctaaggttcccgaggaaactctcaaagatttcctttcccaccatcctcacaacacttgctctatgagctttggtgatgctgctgttctagct

SEQ ID NO: 118125 - DNA, 255 bp, Glycine max
ttcttctcttgcggctagggttttagcgcagcttcttctagatttaaggaagatgggtaaggaaaaggttcacatcagtattgtggttattggccatgttgactctgggaagtccactaccactggccacctgatctacaagcttggaggcattgacaagcgtgttattgagagatttgagacggaagctgctgagatgaacaagaggtctttcaagtatgcctgggtgcttgataagcttaaggctgagcgtga

SEQ ID NO: 118126 - DNA, 260 bp, Glycine max
ctgcggcttatataagaaaacacgtgataaaattcttcttcgaagatgtcagtttcccacagacatccgaagtcgataatgtatttttggaagaggtagaggattccctcagaaaggcatttcttgaggctgattcagctttggccgatgattgcagcgtgaatagttcatcaggcactacggcccttactgctttgatatttggaaggcttctaatggtggcaatgctggcgactgccgagcagttctctgtcgcaaag

SEQ ID NO: 118127 - DNA, 236 bp, Glycine max
ctctttctctagtcctgttatttctcagcgcgtaaagcatggctttgttggtggagaaaaccacgagtggtcgcgagtacaaggtcaaggacctttcccaggccgacttcggccgcctcgagatcgagctggccgaggttgagatgcccggcctcatggcctgtcggaccgagttcggcccttcccagcccttcaagggggcccgcatcaccggctccctccacatgaccatccag

SEQ ID NO: 118128 - DNA, 242 bp, Glycine max
ctcactcacaactcagtgaaagagaatccgaggcgaagagaagagaaaaattaagatggaggggaaggagcaggatgtgtcgctgggagcgaacaagttcccggagagacagccgattgggacggcggcgcagagccaagacgacggcaaggactaccaggagccggcgccggcgccactggttgacccgacggagtttacgtcatggtccttttacagagcagggatagcagagtttgtgg

SEQ ID NO: 118129 - DNA, 242 bp, Glycine max
tttgcgagatagaagcgtaacatgcggctaccctaacctcgtcttcctctctactaatttcagctatggccgacgaagctgtggttgttccagatcccacccagatcgatgtcaagctctttaaccgctggagcttcgaggatattgaggttactgacatttcactggctgattacattggagttgcggcatccaagcacgccacatatgttcctcacaccgccggaaggtactccgtgaag

SEQ ID NO: 118130 - DNA, 225 bp, Glycine max
caagttttgggcactgatgtttatgatccttcgtctgtgctcatttcttataattcctccacgaggatacttttttgcggtggcagggtgtaagttaatccaacgtatcaggcaaatgtgttttgagaaggttgtcaacatggaggttagttggtttgatgagcctgaaaactcaagtggtgccattggtgcaaggctctcagcagatgctgcttctgttcgtgc

SEQ ID NO: 118131 - DNA, 261 bp, Glycine max
ccaaatcatcacacacacatactaagaagcgcaattcttctacaatggatctcctccttctggaaaagaccctcataggtctcttcctcgctgcggtggtcgccatcgccgtctccaccctccgcggccggaaattcaagctcccaccgggcccactccccgtcccaatcttcggcaactggctccaagtcggcgacgacctcaaccaccgcaacctcaccgatttggccaaaaaattcggtgacatcttcctcctccgca

SEQ ID NO: 118132 - DNA, 260 bp, Glycine max
attgttgtaactttttgattcctaaattctctaaaattcgaaattctaatttcgttaggggaaagagattgtttgtgtgtgagtgagtatggctggaaaaggcgagggtcctgctatcggaatcgatttgggaacgacgtactcttgcgtcggcgtgtggcaacacgatcgtgttgaaatcatagccaacgatcagggtaacagaactaccccatcctacgtggctttcaccgacacagaacggttgatcggcgatgcgg

SEQ ID NO: 118133 - DNA, 254 bp, Glycine max
tgatgagcatctgataaattattttgttaggaataatgttctgaagccaattattgatgtctttgtttctaatggcaatcgctacaatctgctccattctgctgttctggaactttttgagtttattcggaaggaaaatctgaaattattgctgagatacatagtcgattctttttgggaccagctggtgaaatttgagaatttggcttcaattcactcactgatagttaaatatgagcagtgtttggataatg

SEQ ID NO: 118134 - DNA, 246 bp, Glycine max
caaaatttgaggatgattgtcgagctataattggaattcaatcatatgtcttattcacattagacaagctgatatataaacttgttaaacagcttcaagctgttgccgctgatgagatggataataagcttttacaactatatgcatatgagaaatcgagaaaacccggaaaatttgttgacatcgtttatcatgaaaatgcccgtgttcttctccatgacgagaacatatatcgtattgaatatt

SEQ ID NO: 118135 - DNA, 248 bp, Glycine max
gtaacttccgttcctcccagtttccggttcaaccaataagtaaataaataaatacataaccgaaccgaaccgaaccggcggatctcggttgttccatggaggctcacggcggcgggctccgccgagtccttgttctcgccttctgcgtcgctggaatctggtcggcatacatctaccaaggcgttctgcaggaaaatgtgtcgacgaagcgattcgacggtgaaaggttcgagcaccttgcgtttctg

SEQ ID NO: 118136 - DNA, 248 bp, Glycine max
ggctatggttgaggagctcttaaaagaatatgacaatgtgtgcaccctcagggttcgcatgccaatttcatctgacttgagcaatccacgcaatttcatcaccaagatttctcgttataacaaagtggtcaacattccaaacagcatgaccattttggatgaacttctgcctatttcaattgagatggcaaagcgaaacttgaggggcatctggaacttcacaaatcctggggccgtgagccacaatg

SEQ ID NO: 118137 - DNA, 256 bp, Glycine max
gaaccccgtcgctcagtaattgtacccggataggcggctaagaataataatctgagacgaccaacctcagcctcttaccatgagtaagctacaaagtgatgcactgagagaggcaatttcccaggtggtgagtaattcaaaggagaaaaatcgtaaattcaccgagactattgagctgcaaattggattgaagaactatgatcctcagaaagataagcgtttcagtggttctgttaagcttccgcatattcctcgc

SEQ ID NO: 118138 - DNA, 251 bp, Glycine max
ggagtttgcaagggaaatggtgcagagacaggctgcgtggatgagggttgtggggttggcggtttcggctgggattagtactcccggaatgtgtgccagtcttgcttactttgatacctatcggagggcaagacttccggcaaaccttgtccaggctcagagggacttgtttggggcgcatacttacgagagggttgatcgccctggggcttttcataccgagtggacgaaactcgctcgcaatagtgggg

SEQ ID NO: 118139 - DNA, 258 bp, Glycine max
gaagagcgaagagaatggctcccaagggtttaatctttttggctgtgttatgcttctcagcactgtcactgagtcgttgtcttgcggaggataatggacttgttatgaacttctacaaggaatcatgccctcaggctgaagacatcatcaaagaacaagtcaagcttctctacaagcgccacaagaacactgctttctcctggctcagaaacatcttccatgactgtgctgttcagagttgtgatgcttcactgttgc

SEQ ID NO: 118140 - DNA, 255 bp, Glycine max
tttttctctctcccttagtcaaagggattcatcgttcttcttcccaggttatttagaaaagcaaaatggtgaagatttgctgcattggtgctggatatgtggggggtcctactatggcagtcattgcacttaagtgcccatccattgaagtcgctgttcttgatatctctaaatcccgcattgcagcctggaacagcgaccagcttcctatctatgaacctggccttgatggtgttgtgaagcaatgccgtggca

SEQ ID NO: 118141 - DNA, 252 bp, Glycine max
gccaagtgaaagtgagaaaaaataaatatcaaagagcataatgtcagggatcattcacaagattggggagacccttcatgtgggagggcacaagaaggaggaggagcataagggtgagcaccatgctggagaatacaaaggggagcaccatggtgaacacagtagtgagtacaaaggagagcatcatggtgaacacaaagctggagagtaccatggtgagcacaagccagagcacaaagaggggttcctaga

SEQ ID NO: 118142 - DNA, 255 bp, Glycine max
ggcgcggcacccacacacacagttcgtcggaatgggaagggtgattcgcgctcagcgtaagggtgctgggtcggtgttcaagtctcacactcaccaccgcaagggtccggcgaggttccgcagcctcgacttcggcgagcgcaacggctacctcaagggcgtcgtcaccgacatcatccacgaccccggtcgcggcgcccctctcgccaaggtggcattccgccaccccttccgctacaagaagcaaacggagct

SEQ ID NO: 118143 - DNA, 232 bp, Glycine max
aaatgttgacagttgatcccaccaaaagaattacagttgaagaagcactagcccatccataccttgaaaaactgcatgatgtagctgatgaaccaatctgcatggagccattttcatttgattttgagcaacaacaattggatgaagagcaaataaaagagatgatctacagggaagcattagcactcaatcctgagtatgcttaaagcagaaaaactcaaggacttaagca

SEQ ID NO: 118144 - DNA, 251 bp, Glycine max
cagggacatcaaaggatcaaatcttttggtgaacaatgaagggatattgaaggtagcggattttggattggcaaatttctccaattctgggaacaagcagcccctcactagtcgtgttgtcaccttatggtcaccgtcctccggaacttttgctcggttcaacagcttatggtccatccgtggatctctggagtgttggctgtgtatttgcagaattactaattgggaagcctatacttcaggggagaact

SEQ ID NO: 118145 - DNA, 255 bp, Glycine max
  unsure (1)..(255): unsure at all n locations
ggggaagagaaaaagaactagctagcttgctagagtgtgagaactctagcatatactagtactactacattccttcatcttcctttttatttttcaccataaaaaaacaagagcacaaagatggtgagagctccttgttgtgaaaagatgggtttgangaagggtccttgggctaccgaggaagatcaaattctcacatcttacatccaaaaacatggccatggcaattggcgtgccctcccaaagcaagcaggc

SEQ ID NO: 118146 - DNA, 250 bp, Glycine max
cttcattctttctctcttctctctctgtccgaagatggcttcacgcaggttcgtatcttctctgattcgatcctcccttcgtagatctaaatcgaaaccctcgatttccgcatccgcatcgaggatcacgtcatccaaccgtgcctctccgcacggttacttgctgaaccgcgtcgccgaatacgctaccgcggcggcggctgctaccgctcctccctctgctccgcctccgggcaagaaggaggttagc

SEQ ID NO: 118147 - DNA, 248 bp, Glycine max
atagatactatcgtgtggcagactccagcgaatcccccgcaccctaacgattacgtctttcgaaacgggattcgatacgttagaccattttacttcgaattcatcgctcatgttaaaaatcggtgggcagggaaaaccattgtggatttgttcgctgaggaattcaaaggtcgaccttatgagtattatgttagtgcagtgaaatgtggaaggattcaagtggatggtgagatggtaccggtttcata

SEQ ID NO: 118148 - DNA, 250 bp, Glycine max
ttatctcacagcttatccagatacaaattgaagtttagtgcagagaaggtggataccatgattgtccaggccattggtttactagatgatcttgataaagagttgaatacctatgccatgagggttcgagaatggtatggttggcattttcctgagcttactaaaataatacaggataacatcctatatgccagggcagtcaagttgatgggtgatcgtgttaatgcagctagcctggatttctctgaga

SEQ ID NO: 118149 - DNA, 253 bp, Glycine max
gtgaaagaatgggtgagaaaagcaagattttgatcataggaggcaccggctacatcggcaaacatatagtggaagcaagcgcaaaggctggaaatcccacttttgctttggtgagggaatccacactctctgacccctccaaggcacaactcatccacaattttgaggctttgggcgttaatttggtccgcggggatctgtacgatcatgagaagttggtgaaagctatcaagcaagtagatgtcgtcatatc

SEQ ID NO: 118150 - DNA, 250 bp, Glycine max
gtttggaaactctactttcctcattgactcaattccagtggcagagttccaaggtcgtccgctagctgatcaccctgctgtgaaaaatggacgtccacctggtgctctcaccataccccgcgatcttcttgatgcatcaactgtcgcagaagccctcagtgtcatctcctgttggtacgaggacaagactgagtggggaaatcgtgttggatggatctatggatctgtgacagaggatgtggtcactgga

SEQ ID NO: 118151 - DNA, 240 bp, Glycine max
ccagtaacacttaccagtatggctatccaacaatctctgttagacaggcctagaaaatctgtttcctaaactatctgcttaatcttttctatagctgctgtcatgatctcatcagcctttgttggttcttatctcatcaaatccacctccttcttcaaccaatcctctcctcaacatctctgtgatcatgcacttgatagggcaacatgtttaacccatgtctcagaagtggtacaaggt

SEQ ID NO: 118152 - DNA, 248 bp, Glycine max
gtggaagatgtcccagagaaataccagtcacacttcagcgaatacatcaaacgtgggatagaagctgatggtattgaggcactgaataaaaatgttcatgctgccatccgggctgatcctactctcaagaaatctgataagcagaccccgaatgagcataagaggtacaacttaaacaagctgacatatgaggagaggaaggctaagttgatttcacgtgtggcagctctcaactctgctgctgataa

SEQ ID NO: 118153 - DNA, 243 bp, Glycine max
agcaactttgcaagattttgaggaggggttgcgagcttgcagtgaagcagctaagacatggatgactataccggcaccgaagagaggtgagattgtgagacagattggtgaagcattgagggccaaattggatcctttgggtaggctggtgtctcttgagatgggaaaaattctcccagaaggaattggggaagttcaggaaattattgatatgtgtgattattgtgttgggctaagcagaca

SEQ ID NO: 118154 - DNA, 247 bp, Glycine max
tgggaatgtcagcagcttctggatggaccaaataaagacccattgctatgtgacttactcgtctgtggatgaagccattgagacacggaatgctgtatataatttgcaatggccaccaaatggtgggcgtctcttagttgctgagtatgttgatcctgaagaagtgaaaatgaagttagaacctcctcctactcaggctgcatctgtcagcactgtgccagcagttcctcctgcacctccctcacag

SEQ ID NO: 118155 - DNA, 289 bp, Glycine max
gcattcggctcgactaccaatgcatttggaagagcatttggctgttaagcacttttctgttgagggtcagctggagtttaaggctgtcctctttatccccaagagggcaccttttgatctttttgacactaagaagaagcctaacaacatcaaactgtatgtccgcagtgttttcatcatggacaactgtgaggagttgatgccagaatatcttagctttgttaagggtattgtggattctgaggatcttcctctcaacatttctagagaaatgctgcagcagaacaag

SEQ ID NO: 118156 - DNA, 272 bp, Glycine max
cacaatttcaattgtcttttttttacataatcatggccatgaaacgtgctgttcaatccctgcttgcctcatcttccaccctcaccaggaaccttcatgcctcaggagaaaaaagaagattgtaggggtgttctacaaagggaatgagtatgcttcgaatcccaattttgtgggatgtgttgaaagatttttgggtatacgtgagtggttggaatcacagggtcaccagtacatagtcactgatgacaaagaaggacccgattcagaactag

SEQ ID NO: 118157 - DNA, 270 bp, Glycine max
ctcgctctatttctcagtctctgtgtttgcggctgaggattccgaacgagtgaccttcttcgtttctcgcaaagtttaagtaatcatgggtaaggaaaaggttcacatcaacattgtcgtcattggacatgtcgactctgggaagtcaactaccactggtcacttgatctacaagcttggaggtattgacaagcgtgtgattgagagtttcgagaaggaggctgccgagatgaacaagaggtcattcaagtatgcctgggtgctcgacaa

SEQ ID NO: 118158 - DNA, 274 bp, Glycine max
cagaaccctcgatcactcccacgcgctcctatatcctctccttcaccgtcgctctctccaacgatcacaacaacatcgtcatcccatggcaaacgccgcatctggtatggcagtccatgatgactgcaagttaaggtttttggagctgaagacaaagaggacacaccgtttcatagtttttaagattgaggagcagcagaagcaggtcattgtggagaagcttggtgagccagcccaaggctatgaagatttcactgccagccttcctgctgat

SEQ ID NO: 118159 - DNA, 214 bp, Glycine max
cttaaaatctccgatttcggtctctctgcgctgccggaacagcttcgttacgatgggctcctccacacacagtgcggcatccctgcctacgtggcacccgaagtgttaagaaaaaaaggctacgatggttccaaagctgatatctggtcatgcggcgtcgttttgtatgttcttctcgctggctttcttcctttccaacacgagcttctcatga

SEQ ID NO: 118160 - DNA, 274 bp, Glycine max
aaattactgggctgaggttaccgttgcaaaccataacccacttgggaggcttgataactggaggttgagctgggactggatgaatgatgagtttatatattcaatgaaaggggcttatccttcggttgtggatgcttctgattgtctctttggtaagcaaggaactttctatagggatcttgactttgcccttgtgttgaattgtgagagaaggccaaccataattgatctccctcccaccaagttcaatgattccgaccttgggaagattccc

SEQ ID NO: 118161 - DNA, 277 bp, Glycine max
gttttgataacaacaatctcgttgtggttttccaacgctgcgagcgcagtcgaagatctagctagaggcagagaacgttctcttctccctgatcctctggaaagttcttagccgatggcgatcttctacgctttggtggccagaggcacggtggtgctggcggagttcagcgccgtcaccggcaacaccggcgccgtctcccgccgcattcttgagaagcttccggcggagtccgactccaggctctgcttctctcaggatcgctacatcttccaca

SEQ ID NO: 118162 - DNA, 268 bp, Glycine max
acaaaagctggtgtgaaatggcttgttgatgtaggtgttaagaatgttcctaccttcttccatcaccaaactgagaagtttgagaaggcctcaaatataggcaacaaaagccatgttattccaatcatagaccttgcagatattgacaaagatccaagtaagcgccaagggcttgttgacatagtgaagaaagcatctgaaacatggggtttctttcaggtgatcaatcatgatatccctttgagtgttcttgaggagatgaaaaatg

SEQ ID NO: 118163 - DNA, 269 bp, Glycine max
gttcattaacatatacaaattctctgtgttgtgttgtgtacttgtgttaattgtgttgttgttgtaggaaatttaagtgaagagagaatgatgatgaagtctgctatgtgtgcattggtgcttgtggcactggttgtggttgaagtggggcccatggctgaggctgcggtgacttgcaacccaacacagttgactccttgtcttccggcaattaattcaggttctgcaccttcgagtgcttgttgccagaagctgaaggagcaaaagcc

SEQ ID NO: 118164 - DNA, 268 bp, Glycine max
ttctgctttcactctctgactcaatcgttctaatccacaaaaaatgaccttaaattacaacattgccctcgccttctctgcggtgctcacgctgctcctctttcccctactgaccgtaggggagctcgtggaggagcagccactagtcctcaagtaccacaacggccagctcctgaagggccgcatcaccgtcaatctcatctggtacggcaccttcaccccgatccaacggtccataatcgtggacttcataaactcgttaagcagc

SEQ ID NO: 118165 - DNA, 271 bp, Glycine max
caccgtttctttcacttcacaaaaatgaaaaacatgaaattgtgttcggtgatgctatgcttatcactagcgttccttcttggggccacagcagaacaatgtggcacacaagctggtggagcgttatgcccccctagattatgttgcagcaaatttgggtggtgtggtgacacagattcctactgtggagaaggttgccagagccaatgcaaatctgcaacaccctcaacaccaactccaacaacacctagtagtggtggagatattagca

SEQ ID NO: 118166 - DNA, 267 bp, Glycine max
cgaagtccgaaccggcgcgtaccggcagctcttccacccggagcagctgatcagcggcaaggaagacgccgccaacaacttcgcgcgtggccactacaccatcggaaaggagatcgtcgatctctgcctcgacaggatccgaaaactcgccgacaactgcactggtctccagggcttccttgtcttcaacgccgtcggtggcggcaccggttccggcttgggctcgcttctcttggagcgtctctccgttgactacgggaaaaagtc

SEQ ID NO: 118167 - DNA, 265 bp, Glycine max
atactttcatatattgagcacggaaagagagaaggagccacccttttgacaggaggtaatacagtgggcaacaaaggttactacatagaacctacaattttctccaatgtaaaggaggacatgctaatagcacgggatgaaatatttggccctgtactagcgctgatgaagtttaagaccatggaggaagcaattaaaagtgctaacaataccaagtatggcctagcagcaggaattgtaaccaagaatttggatactgcaaaca

SEQ ID NO: 118168 - DNA, 268 bp, Glycine max
ccataattgtaatcccacaaatgtttcctcagctgaagtggttctacgtggtggtcgcatacatcttagcgccatccctggcattctgtaacgcttaccgaacgggcctcaccgacatgaacatggcacacaattacggcaaagtggcactctttgttatagcagctatgagcgggagagacaacggggtggtggcaggactcgtaggttgtggtctggttaaatctgtggtctccgtggcttgcactctgatgctcgatttcaaaac

SEQ ID NO: 118169 - DNA, 256 bp, Glycine max
tgagaaacatggcttccttaagctccttagtgctgctccttgcagtactaatgctatcacctcaagttcttgcagactatgagaatcccccagtgtacaagcctcccactgagaaaccaccagtttataagcccccagttgagaagcctcctgtttacaagcctccagttgagaacccaccagtttataagcctccagtagagaagccaccagtgtacgagccaccagttgcgggacctccagtgtacaagccccc

SEQ ID NO: 118170 - DNA, 264 bp, Glycine max
attctctctgtgtatttccctacctctcccttcaagatgcagatcttcgtcaagaccctcaccggcaagaccatcacccttgaggtggaaagctctgacaccatcgacaacgtcaaggccaagatccaggacaaggaaggaatccccccggaccagcaacgtctcattttcgccggaaagcaacttgaggacggccgtacccttgctgactacaacattcagaaggagagtactcttcacctcgtcctccgtctccgtggtggc

SEQ ID NO: 118171 - DNA, 263 bp, Glycine max
ctctctctctttctctttctctctcatccagatcttgcaaaaaaaaaaaaaacccaatggcagcgagcgctcccactccacgcgaagatttcgtgtacatggcgaattggcggagaaggccgagcgctacgaggagatggtggatttcatggagaaggtctccgcctccgccgaaagcgaggagctgaccgtggaggagcgaaacctcctttccgtggcctaaaagaacgtaatgggagctcgccgggcctcctggcgaataa

SEQ ID NO: 118172 - DNA, 264 bp, Glycine max
ggatgaggctgatgaaatgctttcccgtggttttaaagatcagatctatgatatattccagttgcttccatctaagattcaagtgggagttttctctgctacaatgcctcccgaggcacttgagatcacaaggaagttcatgaacaaacctgtgaggatccttgtgaagcgtgatgagctcaccttggagggtatcaagcaatttcatgtcaatgttgagaaagaggaatggaagcttgacacactgtgtgatctttatgagac

SEQ ID NO: 118173 - DNA, 265 bp, Glycine max
ggaaaaatggtttcgctgaaactgcagaagcggatcgcagccagcgtcctcaagtgtggcagaggaaaggtttggcttgaccccaatgaagtcaacgaaatctccatggctaattctcgccaaaacataaggaagctggttaaggatgggtttattatcaggaagcccaccaagattcactctcgctcacgtgcccgccgaatgaaggaagccaagaggaaaggacgtcactctggatatggtaagcgtaagggtacaagggagg

SEQ ID NO: 118174 - DNA, 260 bp, Glycine max
ctctcctacgggtctgcaattccacttgtgtatcggcctaggcttatgctttgtggtggtgaaggtacagggctggatcatcttggccctgcggttttacatgagctggaaaaatttccagtacattcattgggacttccatctcttctgtcagatcctagtgcaaagacaccagaggaggcattggtacatatatttggtgaagctagaagaacaacaccatcaattctctacttaccacaatttgatgtttggtggga

SEQ ID NO: 118175 - DNA, 258 bp, Glycine max
gacagaagagagcgtcctagtcgcaaccctaataagaagaaccacagcttcaagcgagtgacatccaccagccatgggtcgtatgcacagccgcggtaagggtatatcctcttctgctttgccctacaaaaggacaccccctagctggctcaagatctcttcgcaagatgtggaagaaaatatctgcaagtttgcgaagaagggtttgaccccgtctcagattggtgtcattcttcgagattctcacggtattgctca

SEQ ID NO: 118176 - DNA, 263 bp, Glycine max
caaagtttcttcctttctctgctctttgccttctctgacacatttggtgccttgtagagcgtgttttggcaggaaggtggtatggcgaaggacgttgaggttgctgagcgtggctccttctctgggaaggactaccaggaccctccaccagcaccactcattgatgctgaggagctcacaaagtggtccttttacagggctctcattgctgaattcattgccactttgctcttcctctacattactgtgctcacagtcatagg

SEQ ID NO: 118177 - DNA, 261 bp, Glycine max
tcgacatcttcaccggaaagggccaagacatggtcttcaccgtctacggcgagcactggcgcaaaatgcgccgcatcatgaccgtccccttcttcaccaacaaggttgtgcaacaataccgccatggatgggaatcggaggctgccgccgtcgtcgaggtcgtcaagaaaaaccccgacgccgccgtctccggcaccgtcatccgccgccgccttcagctcatgatgtacaacaacatgtaccgcataatgttcgaccgga

SEQ ID NO: 118178 - DNA, 262 bp, Glycine max
ggctccacaaaacatctcatcaatcacccaacaaaatggcgctgcttctgataattcccatctcactggtcaccctctggctcggttacaccctataccagcgattaagattcaagctccctccgggtccacggccctggccggtagtcggtaacctctacgacataaaacccgtccgcttccggtgcttcgcggagtgggcgcagtcttacggccccataatatcggtttggttcggttcgaccctaaacgtcatcgtttc

SEQ ID NO: 118179 - DNA, 262 bp, Glycine max
ctgagattcagatgatggcgagtgagtcgcaaaactgggtgttcatggtcactgcacagacaccaaccaacattgccgttatcaagtattgggggaaaagagacgaaaccctcatcttaccggttaacgacagtatcagtgtcactctcgatcccagccacctctgcaccaccaccactgctgccgtcagtcccgctttccaccaagatcgcatgtggctcaatggaaaggagatttctctttctgggggcaggttccagag

SEQ ID NO: 118180 - DNA, 262 bp, Glycine max
ctttctttcaggttcttaacttgatcagtgtgcagtgtccaaatcataagggtagttgcaaattgcaatggctaagcatgatgttgagggtggttccttctctgcaaaggactaccatgatcctcctccagcaccgttgattgatgctgaggaactcacacagtggtccttctacagggctttgattgctgagttcattgccacaatgctcttcctttacatcacagtgctcactgtgattggttacaagagccagagtgat

SEQ ID NO: 118181 - DNA, 261 bp, Glycine max
  unsure (1)..(261): unsure at all n locations
cagaaaggtccggaggcggcggcgcggttgccgacagtgactccggtgacgaagtgcaaactgcggcttctgaagctggagcggatcaaggactaccttctgatggaggaggagttcgtggcgaatcaggagcnactcaagccgcaggaggagaaggccgaggaagacagatccaaggtcgatgatctccgaggctctcccatgagcgtcggaaacctcgaagagctcatcgacgagaatcacgctattgtctcctcctcc

SEQ ID NO: 118182 - DNA, 259 bp, Glycine max
ggccaaggtggggtgaaccgtgacaagggagcaagtgatcaaaagcttgaaaggggtaatcttgcattggagaagagtgcgcatagaggtaatgaagtaagagtaattaggggtttgagggatccacaacatccaactgggaagatttacgtctatgatggcctttacaagattcaaaattcctgggtggagaaagcaaaatctggtttcaatgtattcagatataacttagtcaggttgcccggacagcctcaagctt

SEQ ID NO: 118183 - DNA, 258 bp, Glycine max
attcatcactagaagtgttggatgcatttctatttctaactaattattgtgcttattattattgttgagaaagaaaagaatggcaaagttaataaaattctttgagttgaacacaggggccaagattccttctgttgggttaggcacttggcaagctgagtctggtgttgtagccaaagctgtcaccacagccattctggttggatacaggcatattgattgtgctcaagcgtataacaatcaagcagagattggttc

SEQ ID NO: 118184 - DNA, 256 bp, Glycine max
caaaaaagtggtgtcatcatgtgagaagaagaagaaaagcgtggtgggtgcagaaaagaagaagagtgatagtgggcgagctcgtaaaaacgtgtacagaggaatcaggcaaaggccatggggcaagtgggccgcggagataagggacccacacaagggtgttcgtgtctggctcggcaccttccccaccgccgaagaagccgcccaagcctacgacgacgccgccatacgcatccgcggcgacaaggccaagctc

SEQ ID NO: 118185 - DNA, 255 bp, Glycine max
gcagaactttgtggtggctgagcaagggggagaacaaggattggaatacgtagtgttcaagacacaccacaacgccgtgagcagctacattaaggatgtgtttagggcaatcccttcggaggttctttccaattcttacaaccttggccagagtcaagtgcgtcagctcaagtatcaaggaaactccggccctttggtcaacccataaataacaacaagcatatatgaaggtgtggtgaggccatcttatatgaa

SEQ ID NO: 118186 - DNA, 256 bp, Glycine max
cagagatgctctgaaacggtgctactacactctggagcaagggtataactcaatgccaattaacgttccgggaacactgttccacaaggcgatgaaggcaaggaaggagcttgcacaaatcgtggcccaaataatctggagcaggaggcagaggaagatgattgattacaaggacttgttgggttcattcatggatgagaaatcagggctcaccgacgaccagatagcggataatgttattggcgtcattttcgca

SEQ ID NO: 118187 - DNA, 258 bp, Glycine max
ccagatccgatcctcgatggcggcggcgtcgcggaggctccgggacctgcagtccgaggccgggaacaagatctgcgttgactgctcccagaagaacccgcagtgggcctccgtctcctacggcgtcttcatgtgcctcgaatgctccggcaagcaccgtggcctcggcgtccacatcttccttcgtccgatcggtcaccatggactcctggtccgacatccagatcaagaaaatggaagccggcggcaacgacaagc

SEQ ID NO: 118188 - DNA, 262 bp, Glycine max
cgaattcggaagcagcaaaactaaagcccaaaaacccataccaagatgctcctccgaagccactgttgctacctcggcataatcgccgggctagcagtgttcctcgcaacgacgtcgttcgccgacgcgcaatcctgcaacggcatcctcgtctcatacgcctacaccggcggcctgcggttgccgcccaacgtctccgactcggctaagcagccgtaccggttcgagtcgacggtgacggttctcaacaacggcctcgacg

SEQ ID NO: 118189 - DNA, 261 bp, Glycine max
  unsure (1)..(261): unsure at all n locations
gaaggttctgagcagatgaggatggaaaattctgcattgagggaaaaactggtnnatactcaactgggaccaagggaagagataactttgagcagcattgacagcaagagggctgcacctgtaagtacagaaaacttgttatcaagagttaacaattccggatctaatgatagaactgcagagaatgagaatgacatctgcgagaacaaaccaaattctggtgcaaagctgcatcaactactggatacaaatcctagagct

SEQ ID NO: 118190 - DNA, 259 bp, Glycine max
ggcgactgttccgcacccattatccctcgcaagtgtaggttttgctaaccgaacctcctccatctccagatccactctcaaatgctgcgctcaatctccttctccttcactagttgacaacgcccagaagtttctcgaagcttccaagaaggggaacgtcattcctctcttccgctgcatattttccgatcacctcactccggtgcttgcgtaccggtgcctggttaaggaggacgagagagatgctccgagttttctc

SEQ ID NO: 118191 - DNA, 257 bp, Glycine max
cagaaacctacaaattttttgatgcggttgagaagcattatggaattcacattgagtacatgttccctgatgcggttgaggttcaggcattagtaagaactaaagggctcttctcattttacgaggatgggcatcaagagtgctgccgagtaaggaaggtgaggcccttgaggagagcccttaagggtctcaaagcatggatcactggacagagaaaagatcagtctcctggtactaggtctgaaatccctgttgtc

SEQ ID NO: 118192 - DNA, 252 bp, Glycine max
ctcatgagggctaccgatgttatgattgctggaaaggtggctgttgtggctggatatggtgatgttggcacagggttgtgctgctgcaatgaagcaggctggtgctcgtgtcatcgtgaccgagattgatcccatctgtgcccttcaggctctcatggaaggccttcaggttctgaccttggaggccgttgtttctgaggctgatatctttgtcaccaccaccggtaacaaggacatcatcatggttgacca

SEQ ID NO: 118193 - DNA, 254 bp, Glycine max
  unsure (1)..(254): unsure at all n locations
gaaaaatccaagaagtctgtgagcatcaccgagtttctgaagcctgctgagggggaagcatactataacccaggacgtggtaggggccgtggccgtggttcacgaggcggaggcggttaccatggaagtgccaccaacaatgcacctgctccatccattgaagatcccgggcatttcccaaccttgagtgccaagtgaggccttcccagaacccttttgacatatctctgtcctattttcaatnctgggntctc

SEQ ID NO: 118194 - DNA, 254 bp, Glycine max
tgtcactttacccaatcctaacactttcttctctctgttttccttcttcctcgcatcaatgcagttggacggcgttctcctcggcatgtgcaaccctctcctcgacatctctgccgtcgtcgacgacgctttcttgcaaaaatacggtatcaagttgaacgatgcgattctcgccgaggataaacacaaacctatgtatgaagaattggctaacaatcctaatgtggagtacattgctggaggtgctactcaga

SEQ ID NO: 118195 - DNA, 252 bp, Glycine max
ggtctctgtctactcttcaattattcccaacctctcacctcttcatcttcttcttccttacctttgaccagagacagagcagcactcacattcacaacgaaggtttcctattcatcagacatggtgaaggcaatcagagttcacgaactcggtggccctcaagttctgaagtgggaggatgtggaaattggagatccaaaagaaggcgaggtccgtgtgaggaacaaagccattggggttaatttcattgat

SEQ ID NO: 118196 - DNA, 251 bp, Glycine max
cgccatgctcgtgacggcgtcgcagctggcttcctacgagcagttcaaagagatgattctcgagaacggcgtgatgcgcgacggcctcgggacccacgtcacggcgagcttcgcggcggggttcgtggcggcggtggcgtccaaccccatcgacgtgatcaagaccagggtgatgaacatgagggtggtgcccggggaggcgccgccgtacgccggcgcgtttgattgtgctctgaagacggtgcgcgcgg

SEQ ID NO: 118197 - DNA, 252 bp, Glycine max
cggctcgagctcttcttctcttgcggctagggttttagcgcagttcttctagatttaaggaagatgggtaaggaaaaggttcacatcagtattgtggttattggccatgttgactctgggaagtccactaccactggccacctgatctacaagcttggaggcattgacaagcgtgttattgagagatttgagactctagctgctgagctgaacaagaggtctttcaagtatgcctgggtgcttgataagctt

SEQ ID NO: 118198 - DNA, 259 bp, Glycine max
agggtttgcggtttcagagtttgtgacgcacgcatccatggccaccaccaccaacgccgccgcagccccgccgcgccagctctcccagaaggaagccgacatccagatgatgttagccgccgacgtccacctcggcaccaaaaactgcgacttccaaatggaacgttacatcttcaagcgcaccaacgacgggatttacattattaaccttgggaagacatgggagaagcttcagttagcagctagggttattgttgca

SEQ ID NO: 118199 - DNA, 277 bp, Glycine max
attcagctcgagtcgaggtcagttgcagtaaaaatggtttcgctgaaactgcagaagcggctcgcagccagcgtcctcaagtgtggcagaggaaaggtttggcttgaccccaatgaagtcaacgaaatctccatggctaattctcgccaaaacataaggaagctggttaaggatgggtttattatcaggaagcccaccaagactcactctcgctcacgtgcccgccgaatgaaggaagccaagaggaaaggacgtcactctggatatggtaagcgta

SEQ ID NO: 118200 - DNA, 253 bp, Glycine max
gagacagaagctattgaaataacagtgacaaagttgcttttgagatcatactacggcattgtcagaaaaaatgttgaggatcttatccccaaagcaattatgcatttcttggtactttactacttcatatccttgtagaattttcaaggtaaacaacaccaagagagagctgcacaacgtcttcattaaaaagctatatagagacaacctgtttgaagaaatgttgcaagaacctgatgagatagctgtgaaa

SEQ ID NO: 118201 - DNA, 248 bp, Glycine max
cggcatgaatgcagccggaacaattcttggcatttaccttatcgaccatgctggacgaaaaaaattagctctttctagtctgggaggagtaattgtatctttggtcatcttggcctttgcattttataagcaatcatccacgtcaaatgagttgtatggatggcttgcagttgtaggcttagccttgtatattggttttttctcgccaggaatggggcctgtgccatggactcagttcagagatatat

SEQ ID NO: 118202 - DNA, 250 bp, Glycine max
ctcgtgactacgaacattgcaggaagaaagaaagaaaggcgatggacctaggaacctatgacgtgccagaaggagtggacattctgggaagatacgatgcagagtttgcaaaaatcctcgcaaaagatgctttgaaattcgttgctgaactgcaacgtgagttccggaacgatatcaagcatgcattagagcgcagaagagaggcaaagaagaagtacaatgaagggtctcttccggggtttgatcctgc

SEQ ID NO: 118203 - DNA, 253 bp, Glycine max
ggcaacgtgcgctcgcgggaagctgagcgtggacacgccgtccttgtctagttacatgcgacggaaacacgtggacattcaggagaaggtgttcgattacttcaacgcgaacccgcgccttcacactcccgttgagatctccaaggacgagcatcgcgacctctgcatgacgccgttaacgggactcgtcagagatcccgggattcgacccctccgttacgtagtcgacgatcccgctaagtacttcgccatt

SEQ ID NO: 118204 - DNA, 248 bp, Glycine max
gttaggttacctctgtgacatttgtgctgctagttcatatatttgcggctgacaccgagaaggaaagcaggaaaaaaacaaaaaggagcagatgggtagctcaggtttctcatggaaattggcggatcatccaaagcttccaaagggtaagactgtggctgttgtggtattggatggttggggagaggccacacccaatgagtacaactgcatccacaaggctgaaacacctgcatggattcacttaa

SEQ ID NO: 118205 - DNA, 246 bp, Glycine max
  unsure (1)..(246): unsure at all n locations
cagcgaggtggcgaagttgaacaatgaatcggacgatttgcagaactctatcagactcactaaggatatcatcaaggctatcattatggacgtgatgttcggaggcacggaaactgtatcgtcacgantcgagtgggccatggtggagctcatgagaagcccagaagatcaaaagcgggtccaacaagagctggcggatgtagtgggcctggaccgtcgggccgaagagtccgatttcgagaaact

SEQ ID NO: 118206 - DNA, 255 bp, Glycine max
ggaacattcaattgcaagcttgcttgcacaaagcgccagttagttcaaaggaacgaggctcaaaattgcctgagctgtggccagccagactgatcaaagtgccttattggttgtcgagttcccaagttggagtttatggaaagccagcccctcaagatttcactgctgattatgaacactggaaacgtgtagtatccaagtcttatctagacgggatgggaattaaatggtcaaatgtacgcaatgtcatggata

SEQ ID NO: 118207 - DNA, 244 bp, Glycine max
cgcatgcagatgctaagcgtttgattggaaggcgtttttccgatgcatcagtacaaggtgacatgaaattgtggccgttcaaggtgattcctggccctgctgagaaacctatgattgtggtgaactacaagggggaggagaaacagttttgcgcggaagagatatcctccatggttcttatgaagatgaaggagattgcggaggcgtatctaggttccaccataaagaatgcggttgtcactgt

SEQ ID NO: 118208 - DNA, 246 bp, Glycine max
ctgcaaaccgtggggttctctcggagtttggtcaatttcatcagttttttccttcaagagacccaagtggatgggagattccttttctccatggatggataatgggtcaaagccaagttggtgttccttcaatgcttcctcacatgggtgctagtcgtgataatctatcccaacacattggttcttcttccataaaggcatctaatccttccacttctaatgttgatgcagcgatgccatcttcag

SEQ ID NO: 118209 - DNA, 247 bp, Glycine max
gaggaaacacaagctcaagcgtcttgttcagtcaccaaactctttcttcatggatgttaagtgccagggttgcttcaacataaccactgtctttagccactctcagactgttgttgtatgcggaaactgccagactgtcttgtgtcaaccaaccggtggccgggcaaggctaaccgagggatgctcctttaggaagaagggagactgagtggattgccatctttttttgtttgtgattggagagttt

SEQ ID NO: 118210 - DNA, 245 bp, Glycine max
tgaaaacaaagcagtgtctgctgtgggcaaagctgctggagcaaaatggaagaccatgtctgatgctgaaaaagcaccttatgtggcaaagtctgagaaaaggaaagtggagtacgagaagaacatgagagcctataacaagaaacaggcggaaggtcctactggtggggatgaagaagaatctgagaagtctgtatctgaggtgaatgatgaagatgatgatgaggaaggcagtggcgaggaag

SEQ ID NO: 118211 - DNA, 259 bp, Glycine max
caaaatttgaggatgattgtcgagctataattggaattcaatcatatgtcttattcacattagacaagctgatatataaacttgttaaacagcttcaagctgttgccgctgatgagatggataataagcttttacaactatagcatatgagaaatcgagaaaacccggaaaatttgttgacatcgtttatcatgaaaatgcccgtgttcttctccatgacgagaacatatatcgtattgaatattcacctggaccaatg

SEQ ID NO: 118212 - DNA, 256 bp, Glycine max
ctcttcttctcttgcggctagggccttagcgcagttcttctagatttaaggaagatgggtaaggaaaaggttcacatcagtattgtggttattggccatgttgactctgggaagtccactaccactggccacctgattacaagcttggaggcattgacaagcgtgttattgagagatttgagaaggaagctgctgagatgaacaagaggtctttcaagtatgcctgggtgcttgataagcttaaggctgagcgtga

SEQ ID NO: 118213 - DNA, 267 bp, Glycine max
ttcagctcgagggacgagatagaccccagaagtggtttctgcagacctcattcaatcttctacagcaagcgtaagctcctcccactccctccctacaatgcctttgacgtcaccaccttcatctcctcccgcgcccaccgcgccaccacgccttcgtcgacgccgccaccgcccgccgcctcacctacacccagctatggcgttccgtggagggcgtggcagcctctctctccgtggacatggggatccgaaagggcaacgtggtcc

SEQ ID NO: 118214 - DNA, 255 bp, Glycine max
tccaaggctaccactcggtcttatacaacatactttgctgaagctttgattgcagaagccgaagctgacaaagacgttgttgcaatccatcgcgctatgggaggtggaactggcatgaatctcttccatcgccgtttccaacaagatgctttgatgtggggatagcagaacagcatgctgttacatttgctgcaggtctggcttgtgaaggtcttaaacctttctgtgcaatttactcatcattcatgcagaggg

SEQ ID NO: 118215 - DNA, 221 bp, Glycine max
gaagaaaggggtcgaattggactccccaagctgtttctactctgtttctgacaaactttactaacccttatcaaacatgagtggtcgcttttctcgcacaattatgttggcaacctgccctctgatataagagagtcagaaattgaagatctattctacaagtatggccgtataatggatattgaattgaaggttcctccccgccctccatgttattgctt

SEQ ID NO: 118216 - DNA, 293 bp, Glycine max
cacgcgtacacacgcacggaactcggaattcgaacagatatcgtacggccaagaggtcaagctcatccagttggcagctctaccccctactttggcccttcattaaagctagactttgagttggaaatggctactattgttggacctggaaatgaattgggaaaacctgtggatattaacaatgctaaagatcacatctttggacttgttctgatgaatgactggagtgctcgagatattcaggcatgggaatatattcctcttggtccatttcttggcaagagttttggcac

SEQ ID NO: 118217 - DNA, 255 bp, Glycine max
cttttctttctttcatcctcaaatcaaaacctaaaattcccaccttcaactttctcccccaaatcgaccacccccaccactgccaagtttcattattttatatatttattcgtatatatacatacaaagagagggggggaatggattcggatcagggaaagcttttcatcggtgggatttcatgggatacgacggaggacaagctcaaggagcatttcggaaactatggcgacgttttgagcacctccgtcatgc

SEQ ID NO: 118218 - DNA, 253 bp, Glycine max
ttcaatgggaagcctgttctttttggcatccattttgcacccttttaaatggctgcatatctgagaacatagctaccgggttctggagtgtaggaatctttgttactggtgttggcacctgatgtttttagctcagtttgcattggttttgccaccatgtgtgtcttagttttctaagtttttacagctagctgtaccactgtatgagtctttgtttaccaaatgtctcatgtgtctgaactatgctcttcac

SEQ ID NO: 118219 - DNA, 225 bp, Glycine max
gggttttagcgcagcttcttctagatttaaggaagatgggtaaggaaaaggttcacatcagtattgtggtcattggccatgtcgactctgggaaatccactaccactggtcacctgtttacaagcttggaggcattgacaagcgtgttattgagaggtttgagacggaagctgctgagatgaacaagaggtctttcaagtatgcctgggtgctggacaaacttaa

SEQ ID NO: 118220 - DNA, 257 bp, Glycine max
ctcgagccgtgccaccgtcctctccttgttcttccacctccccaccctcgaccagcaggtacagtgcgagttccgagacctcccagaaccggtcagcatccccgtctgcattcctcttcccggcaaggacctgttggacccggttcaggaccgcaaaaacgaggcctacaagtgtctcctacaccactgcaagcgataccaaagaagccgaggggataatcgggaacagcttcgaggagctcgaaccgggagcctgg

SEQ ID NO: 118221 - DNA, 251 bp, Glycine max
cgcaggatgcctgggatgcaactttttcccggaggagaaaaagaagcagaagagggccaagaagaagtactgaggcgtgaggcagaggccctggggaaagtaggccgcggagattcgtgaccctcgtcgtgctgccgggtctggctcggcacgttcggaaccgccgaggatgccgcccgggcctacgacaaggccgcgattgagttccgcggcccacgggccaagctcaatttccccttggtggacgagtc

SEQ ID NO: 118222 - DNA, 249 bp, Glycine max
acgaccgtcttccccaatcgcctgcgtctctctctgaattgacaagcttaaagacaaagtcttaaatggctggtccaaggattgcccatgctaccttgaaaggtccgagtgtggttaaggagataataattggaatacacttggcttagctgctggtagcgtgtggaagatgcaccactggaatgaacagaggaaaaccaggaccttctacgatttactggaaaagggtgagatcagtgttgttgcaga

SEQ ID NO: 118223 - DNA, 90 bp, Glycine max
cgatcaccttaataatgtttactagtaataatgtggaagctgtacgtttgttaattctaggttaaataatagagcaattgtttttgaact

SEQ ID NO: 118224 - DNA, 249 bp, Glycine max
gttctcagatccatccatcagtggtgggcgatgttgttgatctcagatccagactgagggggtgaaggaacatgaagtcgtcgatgcgtctgttgaggatcgggcttgtgtcggcgtggtactcgtcgaacattgggtgctgctcctgaacaagtacctccttagcaactatggcttcaagtaccctatcttcctcaccatgtgtcacatgaccgcttgctccctcttcagctacgtcgccatcgcctg

SEQ ID NO: 118225 - DNA, 250 bp, Glycine max
tactgagtgaagattatatttcactttctttctttggatgatgaagaatgggttctaagtccgctatcgcctcgttactggggcttctggttacatcggatcatggcttgtcatgagactcatcgagcgtggcataccgttcgagccaccgtactcgaccacgcggatatgagggaggtaaagcatttgctggatctgccaggtgcagagagcaagctgtctctgtggaaggcagaacttacagaagagg

SEQ ID NO: 118226 - DNA, 256 bp, Glycine max
gtccatccaaaccttaaaaagattcagtgaagaacaacgttaatggcatctcttggtgtgcaagcagttcatcctcctccattaacatccacctccgacccacctcctctttttgatggcaccatcaggttgtacacagttattcttgcccctatgcacaacgtgtatggatcgctcggaacttcaagggactaaaagacaagatcaatttggtcctaataaaccttcaagacaggccagcttggtataaggagaa

SEQ ID NO: 118227 - DNA, 253 bp, Glycine max
acatttggtgctgggatgtttgagatggagaatgtgaagggtggatccccttatggtgcaggtacctatgccggggatggttccagacaaccaactgagttagaattggctcaagcttttcatcaagggaagtatttgctggcattgctaagaagcttaagggatcatctcagtgagatctctatacatctaccatttcatgtttctatatacttaagcaagcaaaagagttatgtgcgtcatatgtccagtt

SEQ ID NO: 118228 - DNA, 251 bp, Glycine max
ggctcgggatgctattggggttcattccttgtacattggatgggggttagatggctctgtttggatttcatcagagatgaaaggtgtgaatgatgattgtgaacactttgagtgttttccacctggtcacttgatcctagcaaagaaagagggttccgcagatggtacaatctttcttggttctctccggctattccatctgccccttatgatcctcttgttttaagacacgcctttgagcaggcagtcat

SEQ ID NO: 118229 - DNA, 250 bp, Glycine max
cttatgagggaatattccaagttatttagaagtgagttctctgatgataatgattctcagggttctcaaccttgttctcccactgttcagagatctcttgaggatggcattcccggtggtcattgtcatgccttgacagacagctttcaaaacttagttcctttaattttaagccaaataataggaaatcagggcagatgctccttccgtaataagagttaaggtgcccaatatctctgcaacttatgag

SEQ ID NO: 118230 - DNA, 243 bp, Glycine max
cttctctctcaacaacttcaccttcttcctcctcgatcatgtctcacttcaagggcaagtaccatgatgagcttatcgccaatgctgcgtacattggcactcctggaaagggtattcttgctgctgatgagtcaacagggacaattggcaagcgtttggccagcatcagtgtagagaacattgaatccaacaggcgagctcttagggagctgcttttcactgctcctggtgttcttcaatatc

SEQ ID NO: 118231 - DNA, 250 bp, Glycine max
cggtgcagacatgggtatatacttcccatacactgaaactgagcgtaggttaacagaattccactctgacattgaaacacctctttacagctcagtggagaatgaggaacacatatgcgtattgaaggaccgaacaaaccaataatcttcaccatggcaaggcttgacgctggtgaagaactccacggggcttgtcgagtggtacgggaagaacgcacgcctccgcgagttggtgaacctggtggtggtg

SEQ ID NO: 118232 - DNA, 250 bp, Glycine max
cttcaccttcgcccacaacaaatcccattcctgcatctcctccttcagcatcgctgcaaactttactttccatttttgtccttcctccccgagaaaaaaatggcgaacgcagcatctggtatggccgtccatgtgactgcaagctaaagtttttggagctcaaggcgaagaggacgtaccggtttatcgtttttaagattgaggagaagcagaagcaagttattgtggagaagctgggtgagcctgcaaa

SEQ ID NO: 118233 - DNA, 248 bp, Glycine max
gcaaagacttcaatgagctacttgctagtggaagtgacaagatttctgcagtggctggtggaggtgcagcggttgctgttgctgctgcaccagcgggaggcgctggtggcggtgctgcacctgctgccgaagaaaggaagaaaagaaagtagaagagaaggaggaatctgatgatgatatgggcttcagtttgttcgactaaaaggactgaagtgtgttttgtgtttttacatttggagttctattta

SEQ ID NO: 118234 - DNA, 250 bp, Glycine max
ataagtggccctttccctcatggtttctctgagctgagaaacttgaccagcctctttctccaatccaacaacatttctggacaattaccattggatttttcggtttggaataaccttagtgttgtcaatttgcaaacaattccttcaatgagaacatccccttttcaatttcaaaactgactcatctcacctcattagtccttgccaacaactccctttcgggtcagattcctgatctcgatattccaag

SEQ ID NO: 118235 - DNA, 255 bp, Glycine max
caattttccggcaagttcgtgcacctcgaaactcatcggcgcgaggtggttctcaggcggatacgaagccatcccactggaagacacaacgagaccactgagttccgctcgccaagagactccgacggccacggcagcacactgcgtcgatcgccgccgggaggtacgtctctcaggcgtccacgttcgggtacgcgaagggcgtcgccgccggcatggcgccgaaggggcatcgccggtgtataaagtctgctg

SEQ ID NO: 118236 - DNA, 249 bp, Glycine max
gtcatagtattatcattcattctcatctttctctcttctctctccacccaaaccctaactcccgaccctgttcccctctcgtatccgtcatgaaaggaggaaagtccaagaccgaatctaagagagccgatccaaacttgctgtgaataagaagggagccgccaccaaggctaggaaacccgccggcaaggggaaggcagcgaaagaccctaacaagccaaagaggcctccaagtgctttcttcgtttt

SEQ ID NO: 118237 - DNA, 248 bp, Glycine max
tctttctctctcccttagtcaaagggactcgtctttcttctcccaggttatttagaaaagcaaaatggtgaagatttgctgcattggtgctggatatgtggggggtcctactatggcagtcattgcacttagtgcccatccattgaagttgctgttgttgatatctctaaatcccgcattgcagcctggaacagtgaccagcttcctatctatgaacctggccttgatggtgttgtgaagcaatgccg

SEQ ID NO: 118238 - DNA, 245 bp, Glycine max
tattgggggattttggtggatcgttatgaggagatgattgagaattatcacccggggcttggggatcataggtggcctctggtgacccattttgtagggtgcaaaccttgtgggaagtttggggattacctgtggagaggtgcttgaagcagatggatagggcctataactttggtgataaccagattttgcagatgtatgggttcactcataagtcccttgctagccgcaaggtgaagagggtg

SEQ ID NO: 118239 - DNA, 245 bp, Glycine max
caaaatttgaggatgattgtcgagctataattggaattcaatcatatgtcttattcacattagacaagctgatatataaacttgttaaacagcttcaagctgttgccgctgatgagatggataataagctttacaactatatgcatatgagaaatcgagaaaacccggaaaatttgttgacatcgtttatcatgaaaatgcccgtgttcttctccatgacgagaacatatatcgtattgaatatt

SEQ ID NO: 118240 - DNA, 246 bp, Glycine max
aatttttattttttaacagctctgtactgaagaaaacggcgattgagagggagagtttgagaatggtgaagaaggaggagttcttgagagaaaacggcgacaacgaaaaccgttccgtctcgcggagtgactccctcccaacttcatcttcggagttgccacttctgcatatcagatagaaggtgcttgtaaggagggtggtagaggtcctagcatatgggatgcctttacacacacggaaggaaa

SEQ ID NO: 118241 - DNA, 243 bp, Glycine max
cgaactccgacggcaccactaacggcgcaatcactgaggcgcagagacagcagcaacagcaaggggggaaggcgttaccgctaagaagccgccgtcaaatgaccgtcacagcaaggtggacggtcgcggcgccgcataaggatgccaatcatatgcgccgcacgtgtgttccagctcacgcgcgagcttggccacaagtccgacggtcaaaccatcgagtggctcctccgtcaggccgagcct

SEQ ID NO: 118242 - DNA, 239 bp, Glycine max
tgctcatctacttactgttggaggggcctataatgatgctccacataaaactcagatatcatgccgcactgatcgtgctggacttattgatgctggtccttggataagaattccatatccctttcaatgggagcaccttcatttgatgcaggtgaagcctttgccatgatgatggcatcttttgtttctcttgtagagtccagtggagctttcattgctgtatataggtatgcaagtgc

SEQ ID NO: 118243 - DNA, 250 bp, Glycine max
atttccgctggctgtcaaagcctatacaaacataggagatgggaatacacaagcgaatatcatcatttccactgatcaatatgacagggaggatttccctgtcaactatgaaaatgcaaagttttttgttaaaaatcatacagtgaagatgatgtgcacaaaagtattaaatataatgtgtggtcatcaacactcatggagacaagaagctgcagagtgctcatgaagatgctaagaggatagcttctgg

SEQ ID NO: 118244 - DNA, 264 bp, Glycine max
cagtcagttgttagacacaatagtcaggttcattacaaaaagcgccggcctcacccttccttaccctccgtttctcaatctcgccgccgggcaactgcttcatctctccggcgaacgcaaccgaattcttttcccatggcagagaatctgatagcgccgaagcttcccgtcgaaggaaagcgcaacattctcatcaccagtgccttgccttacgtcaacaacgttcctcacctcggcaacatcattggatgcgtttgagtgctg

SEQ ID NO: 118245 - DNA, 264 bp, Glycine max
aggttgtgatgttcacctcattgcggatgctgctgctgatgatgattggaacggtgattgcgcgctctactctcactactccgggcagctgattgttcttccgcacaatgtagcacttccggtgtcccttaaggtgctggagcacgaggtgtatgctgttgcgcctgttaagaaggttttgggtggtggtgctggctgcagctttgcggctcttggacttgtgaacatgttcaatgctggtggtgccgttgaaggctggtttac

SEQ ID NO: 118246 - DNA, 265 bp, Glycine max
gaagtaatggcgaacatagacatcgaagggatcttgaagcagcagcagccttatgatgggcgcgttccgaagacgaagatagtgtgtactttgggccctgcttctcgatccgtagaaatgaccgagaagcttctgagggcagggatgaacgttgctcgtttcaatttctctcatggcacccacgactatcaccaggaaaccctcaacaatctcaagactgccatgcacaacactggcatactctgtgccgtcatgttgacactaa

SEQ ID NO: 118247 - DNA, 265 bp, Glycine max
gcttatttcagcaggacttagaatttgggtttatagtggagatacagatggtagagtaccagtgctttccacaaggtacagcttaagctctcttgcgttgcctatcactaaatcatggaggccatggtatcatgacaatgaggttagtgggtggtttgaagaatataaagggcttacatttgcaacgtttcgaggagctgggcatgcagttccctgttttaaaccaagcaactcacttgcgttcttctcctccttctcaatggag

SEQ ID NO: 118248 - DNA, 264 bp, Glycine max
caatgggtgtgaactcttactccaacagcatgaagatccaagccgagatacaaatgccacccttagaaatccacaaggttcgtttgccaccagaacgcaccaccttgcagaaactcagacacagactctctgagatcttcttcccagatgatccactccacaggttcaagaaccaaacatgcctcatcaagctcctccttgcacttcaatactttttccccattttccaatgggcccctctctacaaccttcccttctccgctc

SEQ ID NO: 118249 - DNA, 267 bp, Glycine max
ctgtggcgtacggtgctgctgttcaggccgcgatcttgagcggcgaaggagacgagaaggttcaggatttattgctgctggatgttacaccactcagtctcggtcttgaaactgctggtggtgtcatgactgtgctgattccgcggaacacaactattcccacgaagaaggagcagattttctcaacctattctgataaccagcccggggtgttgatccaagtgtttgaaggagaacgggctagaacaaaggaaacaatcttctcgg

SEQ ID NO: 118250 - DNA, 263 bp, Glycine max
cttgtgccgtttgtgttgttttcgggacgaagaagaagatggtgtcaggttctggaatctgcgcaaagcgggtggtggtggacgcgcgccaccacatgctgggtcgtctagcctccatcgtggcgaaggagcttctgaacggccagaaagtggtggtcgttcgctgtgaagagatttgcatctcgggcgggctggtgaggcagaagatgaaatgacttgaggttccttcgcaaacgcatgaacaccaaacctcccatggcccc

SEQ ID NO: 118251 - DNA, 264 bp, Glycine max
actacatggcttcctcaagggaattagtacgtatcgtgagcatccaaaaatctccaattatacatctttttggtgaatcaattgctggagcagccaccattagaggttttggacaagaaaaaaggttcatgaagaggaacctctatcttctggattgttttgcacgaccattcttctgtagtcttgcagctattgagtggctctgcctgcgcatggaattactttcaacctttgtttttgctttctgcctgtattacttgtcag

SEQ ID NO: 118252 - DNA, 259 bp, Glycine max
ctctaacatcacaatttcaattgtcttttttttacataatcatggccatgaaacgtgctgttcaatccctgcttgcctcatcttccaccctcaccaggaaccttcatgcctcaggagaaaaaaagaagattgtaggggtgttctacaaagggaatgagtatgcttcgaatcccaattttgtgggatgtgttgaaagagcattgggtatacgtgagtggttggaatcacagggtcaccagtacatagcactgatgacaaa

SEQ ID NO: 118253 - DNA, 255 bp, Glycine max
tgaagatccactacttggtgatgttcaggtctacccagagaaaggaacagttgctttttctgctggtttgcatggctgggcttttaccctgactaactttgccaagatgtatgcatccaagtttggagttgatgaaggaaagatgatggaaaggctctggggtgaaaacttttttgatccagccacaaagaaatggaccagcaagaatagtggttctgctacctgcaagcgtgggtttgttcagttctgttatag

SEQ ID NO: 118254 - DNA, 220 bp, Glycine max
  unsure (1)..(220): unsure at all n locations
ctcacaatttttattttttaatgatactattttgttattgttattgatggtatcatcatcgggaaaaagcagngaaatggatagggtgaagggtccatggagcccagaagaggacgaggccctgcgggcgctggttcaggcccacgggcctcgaaactggtcggtgataagcaagtccattccggggagatccgggaaatcgtgccgttacggtggtgca

SEQ ID NO: 118255 - DNA, 260 bp, Glycine max
tgctgtttcaactccattagccttgattattgatggtaccagccttgtttatattcttgacagcgagcttgaagaagagctctttcaactagcaaatagatgttctgttgttctctgttgtcgagtggctccgctgcagaaggctgggattgtagcccttgtgaagaataggaccgatgacatgacactagccattggagatggtgctaatgacgtatcaatgatccaaatggctcatgttggagttgaatcagtggaca

SEQ ID NO: 118256 - DNA, 262 bp, Glycine max
tccaaactcagaccatgaatgttgggagagaccagaggacatggatacagccaggactacgtatgctgttgatgcaccaaacgcggcttccgatgtcgccggtgaaacagccgccgctctagccgccgcatccatggcattccggtcatcggacccgggttactcggagacattgcgtcgtaatgctattacagccttccaatttgcagataactacaggggtgcttacagtgacaatgataatgttaatataatgcctgcc

SEQ ID NO: 118257 - DNA, 256 bp, Glycine max
ccgatctcgtacttcgagcgcgagtcaaagattccggcgtaccaccaccgcgtcgctgcggcggtgcactcggtggggaaagtgccgttgggaattaagaggaaggggctccggatcgtggtgaccggcggcgcggggttcgttgggtcgcacctggtggatcggttgattgcgagaggggacagcgtgatcgtggtggacaatttcttcacgggaagaaaagagaacgtgatgcatcattttggaaaccctagat

SEQ ID NO: 118258 - DNA, 261 bp, Glycine max
agagtcttttttcactcttcagttctcgttgttgttcttcgctttcctgaaactagggttttcaatttcgattcattcgttaataattaaagatgtttgggagggcaccgaagactagcgataatacgaggtactacgaaatcctcggcgtctcgaagaacgcttcgcaggatgatctgaagaatccttacaagaaagccgccatcaagaatcaccctgacaagggcggtgatcccgagaagtttaaaggctggcacaagc

SEQ ID NO: 118259 - DNA, 260 bp, Glycine max
caaaagtgagcacactgtctgatgttgaagggttatgcgtatcatttgctggtatttataactcatctgatcctgtacttgctgtaaaggaatatttgaaggaagaaccatatacagctgaagaaattgaagcagttacaggggaaaagctgacttcatttttgaacaataatgcagcttatttagaagtgttaaaagttgcaaagcaatacaagttgcatcagagagctgctcatgtgtattcagaaccaagagggttc

SEQ ID NO: 118260 - DNA, 261 bp, Glycine max
cttctgctacttcctactccaaccgcacttctgctccgcaattatcatgggcaaggtcaagatcggaatcaacggatttggaagaattggccgtttggtagccagagtggctctgcagagagacgatgttgaactcgttgccgttaacgaccctttcatcaccaccgattacatgacatacatgtttaaatacgacagtgttcatggacactggaagcatcacgatgtcaccgttaaggacgagaagaccttctcttcggt

SEQ ID NO: 118261 - DNA, 254 bp, Glycine max
catagggtttccaccctctctctcatgcatttttgctctcacgagttcttctttgccgttgccctcttattctttgctgtatttggagccttcttttgtgtggaacagagcagatttcacctccctgggttttttgaaccgtgcccatgtctaaagttttcagctttaccggaaatgatgatttctaccatgggggccctatttatcctaacccgaaggaaccatgtctcttcttgtctcttgccgtcaagttg

SEQ ID NO: 118262 - DNA, 254 bp, Glycine max
gataaattgcatatgctaacagatgggaatggctagtggactggaaacaatttgtggacaggcttatggagctctacaatatcaaagaattggaatgcaaacatacactgctatattctctctcatattggtttctattcccgtgtctatcctttggatcaacatggaaagcatactagttttcataggccaggaccctctaatttcgcatgaagcagggaagttcacaatttggcttgttcagcactttttgc

SEQ ID NO: 118263 - DNA, 165 bp, Glycine max
gaaacatggcttccttaagctccttagtgctgctccttgcagctctaattctatcccctcaagttcttgcaaactatgagaatcccccagtgtacaagcctcccactgagaaaccaccagtttataagcccccagttgagaagcctcctgtttacaagcctccag

SEQ ID NO: 118264 - DNA, 257 bp, Glycine max
ctaaaataaaaaaccctaacttctgaacctttcaccgcatcgccaccgattccctatctccactaatcaaagaaaagaaaatgagtagacgctcgagcagaactgtctacgttgggaatctacccggtgatatccgtgaaagagaagttgaagatttgtttctgaagtacggacacataacacacattgacctaaaggttcccccaagaccacctggttatgcatttgtagagtttgaagatgctaagatgctgagg

SEQ ID NO: 118265 - DNA, 261 bp, Glycine max
gccaaccattaaccgagccaatgtttatgtgggtttccaagtgcagctagatctgactggtattttcatgcatggaaaaataccaactttgaagatatcccttattcagataagaagagctcacttgtggcagaagatccacgagagtgttgttatggatctctgtcaggttttggatcaagagttggatgctttggagattgaaactgttcagaaggaaacagtgcatccaaggaaaagctacaaaagaacagttcttgt

SEQ ID NO: 118266 - DNA, 254 bp, Glycine max
tacagtacttctgattttgttcactttggagttctacttccctttcttctgttatcacagttgttctttcaacttgcatggtgtggctccatagtaaagttccttcctggattagagggaccccttccttttgttcttgaaaccgggtatgtgggagtgggtgaatcagaggatgtgcaggcattctactacttcattgagtcagagatcaatccaaaggtagatcctctcatgctttggctcatggtggccct

SEQ ID NO: 118267 - DNA, 258 bp, Glycine max
aaaagttgcaagagttaaagcaaaaaccaaagtgagagagaaaatgatgaagccatcgatgctcagatctcttcactctgccgccacccgcggcgcctcccacctctcccgccgtggctacgcctccgagccggtgccggagcgcaaggtggccgttctaggtgccgccggcgggatcgggcaacccctctcccttctcatgaagctcaaccccctcgtttccagcctctccctctacgatatcgcggaactcccggt

SEQ ID NO: 118268 - DNA, 257 bp, Glycine max
attctttctctcttctctctctgtccgaagatggcttcacgcaggttcgtatcttctctgattcgatcctcccttcgtagatctcaatcgaaaccctcgatttccgcatccgcatcgaggctcacgtcatccaaccgtgcctctccgcacggttacttgctgaaccgcgtcgccgaatacgctaccgcggcggcggctgctaccgctcctccctctgctccgcctccgggcaagaaggaggttaaggcggcgggaag

SEQ ID NO: 118269 - DNA, 253 bp, Glycine max
cccttcctctggtggcgacaatgtcgactcctgctaggaagaggctgatgagagacttcaagaggctgcaacaagacccgcctgcagggatcagtggtgccccccaggataacaacataatgctgtggaatgctgtcatatttggtcctgatgatactccatgggatggaggcacgttcaagttgacactccaatttactgaggactatccaaataaaccaccgactgtacgatttgtgttcgcatgtttcat

SEQ ID NO: 118270 - DNA, 249 bp, Glycine max
gtgagactgaggttgggtttggaaggcaagggcttgtgttgtcacaatccaagagagaagtaatggcgaacatagacatcgaagggatcttgaagcagcagcagccttatgatgggcgcgttccgaagacgaagatagtgtgtactttgggccctgcttctcgatccgtagaaatgaccgagaagcttctgagggcagggatgaacgttgctcgtttcaatttctctcatggcacccacgatatcacca

SEQ ID NO: 118271 - DNA, 252 bp, Glycine max
ttcatttttctctctcccttagtcaaagggattcatcgttcttcttcccaggttatttagaaaagcaaaatggtgaagatttgctgcattggtgctggatatgtggggggtcctactatggcagtcattgcacttaagtgcccatccattgaagtcgctgttgttgatatctctaaatcccgcattgcagcctggaacagcgaccagcttcctatctatgaacctggccttgatggtgttggaagcaatgcc

SEQ ID NO: 118272 - DNA, 255 bp, Glycine max
ctctctactactgctagctgtgacttgttttgagttcaatcaaatcgcattggtatctgaaatcaggaaagatggttagcgtactgagatcaggcaggcacaaagggcagaaggcccagcaaccatccttgccattggaactgcaaacccaccaaaccgtgttgatcagagcacctatcctgattactacttcagaatcaccaacagtgaccacatgaccgagctcaaagagaaatttcagcgatgtgtgacaat

SEQ ID NO: 118273 - DNA, 253 bp, Glycine max
gaggaatcaaaattagggttcaaaatctcattgaggagaaagaagaagaaggatgtggcacgaggcgagaaggtcggagaagaaggtccacgacatgatggacgcggctcggaagagagcgcaacgacgcgccgtttacctcgccaagagacgcggcgatcctcagcaatccattcagctcgtcggctttcctagccgaacctatcgcgacgacgctctctaccaagcctcacaggatcagcaggcctgatac

SEQ ID NO: 118274 - DNA, 256 bp, Glycine max
ttgaggccaggcaagccccactcaaccaccacacctctcctcgttcacgctacccctttctgctcttcttctacctttcaagttttaaaagtataaagatggcagagacattcctatttacctcagagtcggtgaacgagggacaccctgacaagctctgcgaccaaatctccgatgctgtcctcgacgcttgcctcgagcaggacccagacagcaaagttgcctgcgaaacatgcaccaaaacaacttggtcatg

SEQ ID NO: 118275 - DNA, 256 bp, Glycine max
ctccaacttaagaataagtttagttgatgccctaacagggaaggttgttagtacaggacctgaatcgtcagctaaggtggaaattgtagtccttgagggtgattttgaagaggaaagtgaaacttggatgcctgaagagttcaagagcaatattgtgagagagagggaaggaaaaaagcctcttcttacaggagatgtaattttatatcttaaagatgggattggtatggtgggtgaaatttcaatacagataatt

SEQ ID NO: 118276 - DNA, 255 bp, Glycine max
gcggtccaaacactcttctctgcagcttttgcctacaactcccttcaccatggctgaacaaaccgagaaagcttttctgaagcaaccaaaagtgtttctcagcacaaagaagactgggaagggaaagagacctggaaaaggtgggaaccgcttttggaagtccattgggcttggatttaagactcccagggaagccatcgaaggaacctatattgacaagaagtgccccttcactggcaatgttccatccgtggc

SEQ ID NO: 118277 - DNA, 247 bp, Glycine max
gggaattcatcaacttctctgttcagatagcacttgatgtgtcaatggtttacttttttggctggaaagcccttgcctatttgatactttccacttttgttggtggtgggatgcatccaatggctggtcacttcatttccgagcattatgtgttcaatcctgaccaggagacttattcttactatggacctctgaattatctcacttggcatgtgggataccataatgaacaccatgtttcccaaga

SEQ ID NO: 118278 - DNA, 249 bp, Glycine max
gtgtgcaccattgtcgccttgcgtgcgccggttgcgcaccccctatcttgcgcatccccaatcacctcatcgaaactactaacaccttcacaatcgttcaccagcgctacagaacccagatctcgggttccaatcgtcgagccatgtccaaggcacgcgtctacaccgatgtcaatgttcttcgccccaaagagtactgggattacgagtccctcaccgttcaatggggtgatcaagatattatgaggt

SEQ ID NO: 118279 - DNA, 159 bp, Glycine max
catttgcagagagagagagagagagagagggaagacggttgtggggattctatgggggccaccgttcactcgccgctagtcacttatgcttccgtcatatctctgcttacactctgtcctccgtttgtcatacttctatggtacaccatgactcttgct

SEQ ID NO: 118280 - DNA, 273 bp, Glycine max
gtcgcgcaagaacccttttccttcgcgtcctggaacctcctaatcacaacaacgcttcgctttcccaaacatttacccctggattctccttccacacgctctcgcactcccaggaaaaggatggcatttgccccaaaccgcttataacttttgttttaggaggccctggtagtggaaaaggtacacaatgtgcaaaaattgttgaaacctttggatttaagcatctgagtgctggagatcttttgagaagggagatggtttctgatagtgaat

SEQ ID NO: 118281 - DNA, 279 bp, Glycine max
ggatcgaggcttcttcgagtttcacagccaagtcgtaaaagggtttcaagggatggaaaacatgcagagcttctggcaattgggtgatgaactccgtgggcactcaaaagcatcggaggatcacaagtggttaatggttgcctcgaaactggccgaacagacaagattgaagggggagcgtgtgaacaaccttgatctttcaaagggacccattgaaacaaggtcaagggataaatttgggttccaggaagagaacaaatttgattctcttaacttgag

SEQ ID NO: 118282 - DNA, 263 bp, Glycine max
ctctaataacatttctaatctcattctccttctgttcaaacactctctctcatggcatcagataagaagattaggatcggcatcaacgggtttggaaggattggccgtttggtggccagggttgcccttcaaaggaatgatgttgaacttgttgctgtcaacgatcctttcatcaccactgattacatgacatacatgttcaagtacgacaccgttcatggccagtggaagcattttgatgtgaaggtgaaggactctaagac

SEQ ID NO: 118283 - DNA, 265 bp, Glycine max
gtcaaaggctgttaaaaccatgaagaagggagagaaagtgcttttgacagttaagccacaatatggatttggtgagaaggggaagccagaacaaggggatgaaggtgcagttccaccaaatgcaacattgcagattactcttgaattagtttcatggaaaactgtttcagaagtaactgatgacaagaaggtcataaagaagatcctcaaggaaggggaaggatatgagcgtccaaatgagggggccattgttaaagtgaactaa

SEQ ID NO: 118284 - DNA, 271 bp, Glycine max
ccgtgatgagcttcatcaacgagaagcgtatctaccttgtatctgatgaaatatactctgcaacagtttttagccaccccagtttcataagcattgctgagatattagaggaagacacagacatcgaatttgaccgctacctcgttcacattgtttatagtctttcaaaggatatggggttcccaggcttcagagttggcatcatatactcttacaatgatgctgtggtccattgtgcacgcaaaatgtcaagcttttgagtggtgtcaac

SEQ ID NO: 118285 - DNA, 262 bp, Glycine max
gggccaccagaattgggtgaaagtaacgggcgagtaccttacttttcctggtggtggaacccaattcaaacatggggcacttcattacattgactttatacaagagactgtacctgacattgcttggggaaaacgcacacgtgttatactagatgttggatgtggtgttgccagctttggaggtttgctctttgatagagatgtacttgcaatgtcgatatcaccaaaggatgaacatgaagctcaggtacaatttgcgctt

SEQ ID NO: 118286 - DNA, 265 bp, Glycine max
caatcgttttctacataatacaaacctctctaatttttgaagcttattatacccaatctcgatatgcagatcttcgtgaaaaccctaactggcaagacgatcacctttgaggtggagtcctctgacaccatcgacaacgtgaaggccaaaatccaagacaaggagggcattcctccggatcaacagcgcttaatcttcgccggaaaacagctcgaagacggcagaaccctcgccgactacaacatccaaaaggagtccacgctcc

SEQ ID NO: 118287 - DNA, 263 bp, Glycine max
ctctgagaagacgtgtcggtagctgaagcattttataagcctccactttcctgaactagttttaacatacaatctttcaagtacacctccccagcttccatttaagaatggagatcactagaataggccaatggttaagtcttctgatatgtgtactactattactgcagacagaaggggttcctgtgggaatcacttttgttgaaaatgcagtggcaaaaggggctgtttgtttggatgggagtcctccagcttaccacttc

SEQ ID NO: 118288 - DNA, 266 bp, Glycine max
cgccgtcagcggcactcgcagaacctccctcttaacctggctcacttccgtcatcaccgtcttcatcatcgccttcatcatcgtagtcggcttcgtccacggaaaagcctccaacttgacgccgtttctcccttacggcgtcgacggcgtcttcaacgccgccgcagtagtgtattggtcctactccggtttcgacatggttgccaccatggcggaagaaacaaagaacccttcgagggatatccctattggcttagttggatcat

SEQ ID NO: 118289 - DNA, 270 bp, Glycine max
gagaggccaacctacaccaaccttaatcgtttagtttctcaggtgatatcatcactgactgcttccctgaggtttgatggagccttgaatgttgatgtcaatgaattccagaccaaccttgtgccataccccaggattcattttatgctttcatcttatgctcctgtaatttcagccgagaaggctcaccatgagcagctatcagttggtgaaatcaccaacagtgcattcgagccatcatctatgatggccaagtgtgatccccgccat

SEQ ID NO: 118290 - DNA, 270 bp, Glycine max
ctcgctctatttctcagtctctgtgtttgcggctgaggattccgaacgagtgaccttcttcgtttctcgcaaagtttaagtaatcatgggtaaggaaaaggttcacatcaacattgtcgtcattggacatgtcgactctgggaagtcaactaccactggtcacttgatctacaagcttggaggtattgacaagcgtgtgattgagaggttcgagaaggaggctgccgagatgaacaagaggtcattcaagtatgcctgggtgctcgacaa

SEQ ID NO: 118291 - DNA, 274 bp, Glycine max
atggtgttggtgatgttatctctcttttgtggtttaaacgaagccttccccgttactgtactcaatttattgagatatgcatcatgctatgtgccgaccatggtccttgtgtctctggtgctcacaatactattgtgacagcaagggctgggaaggacctagtttctagtcttgtatcaggtttgcttacaattggtcctcgatttgggggtgccattgatgatgctgctcgctacttcaaggatgctcatgacagggcgcttagtccttatga

SEQ ID NO: 118292 - DNA, 257 bp, Glycine max
cggaagaaacgcagcattgggagatagaaagagagagagatagagagagagagaaagacccttacccttctctatcgctcgctttcctttgacgcttctgacccttgctttgtctgcgtcttccttctttctttctttctttctctgtgtgtcgtaatggctctcccagactgcttcttcccgtcccaactccctgatcccctccttcatctactcctcttcctccaaaacgctcgctctccaccacatgctcaaca

SEQ ID NO: 118293 - DNA, 261 bp, Glycine max
gccaaaagtttctgataatgcaaaagacctagtgaagaagatgctagatcctgacccgaagcggcggcttactgcacaggacgttttagatcatccatggttacaaaacgcaaataagtctcctaatgtttccttaggagaaactgttagagcaaggctcaagcaattttctgtaatgaacaagcttaagaaaagagctttaagggtgattgctgagcatttgacggtagaagaagctgccgggctaaaagagggattcca

SEQ ID NO: 118294 - DNA, 260 bp, Glycine max
gcaactttcttcagtcaagttatggctaagattggtggaaacactgctggcccaggtgatgctgtggtcaatgtttacattaatcatgacaagaagtttgcctttgtggagatgaggtctgttgaggaagctagcaatgcgatggctctggatgggattatttttgagggggcacctgttaaggtcaggagacctactgattataatccttccttagctgctaccctaggcccaagccaacctaacccaaaccttaatct

SEQ ID NO: 118295 - DNA, 259 bp, Glycine max
caacaagttaatagcattccgcaaaatggctgccaccaccttagtctctgaagtcactctcccctcctcctccggccagcggaagatgccgctgatgggcctcggcaccgcgccggaagcaaccagcgcggttaccacaaaagatgctgttcttgaggccatcaagcagggctacaggcactttgatgctgcttctgcttatggtgtggaacagtctgtgggagaagcatagctgaagcacttaagcaaggactaattg

SEQ ID NO: 118296 - DNA, 266 bp, Glycine max
gtggcttttagtttctccactttcattctcactcatcgcaccctcttgcaaagttaccatgaatttcttcaactgggttcatactttcatcgtttttcatgtctttgctgcaacacaccacttctccttatgagcagattcctccgaacaactccccaccaactttctagatgctgccaagttgcctgaggtatttgattggatggtcagaatcagaagggaagattcatgagaatcctgaattgggttatgaagaatttgagacc

SEQ ID NO: 118297 - DNA, 265 bp, Glycine max
tttgcacaccctgttgagtttgatagccttgtcttttctgggtatcttcctagtcttttgtttcatcatgttaaccataattataggaaaatcaataggggaccctgattatgctccagtaaaaggcacagtgtttaaccagctattatacttcaacacactccatgactaccatgctcaactggccaaaactaatccaacttttcggctactggctccggatcaaagcgagttgtacaccgcagacccgcgaaatgtcgaacac

SEQ ID NO: 118298 - DNA, 268 bp, Glycine max
atctaatattggagaaagggcatagcagagttcctgtctattatgagcagcctacaaatattattggacttgttctggtcaagaatttattgacaattgacccagaagaagaaatacccgtgaaaaatgtgaccatccgaagaattccaagggttccagaaacgttgccactttatgatattttgaatgagttccagaagggccatagccacatggctgttgttgtcagacattgtgagaagacagggcaacagtcttccaacaataa

SEQ ID NO: 118299 - DNA, 259 bp, Glycine max
atcacatcaagcaacaatccatcattgtggagtcaatttcaccaatcagacaagggtccttctatgtagacataccagagccagaccctgatgatgccaaaatagccaagaccatagaaactgagttccacaaattggagaatcagaagaatggctttaccaactcactaaatggtcttagagttaatggccattgaaagctatgctactaaagctactagtaactgtgttttttggcctgtcctgagccacttttatt

SEQ ID NO: 118300 - DNA, 257 bp, Glycine max
cttgaaagactctcttttctctctctgaactctgaagcaaaacaacattaccagagtggttctagtaattcagtgctgctagaagatggaaactagtgaatggcatatcgagcgaagatctagcttcggctctgaatcccccttagcaagagaggcaggaaatgtgcctgaaactgggtcactctctattgtggtgcttggtgcttctggtgatcttgctaagaagaagacatttcctgcacttttccacctatacc

SEQ ID NO: 118301 - DNA, 257 bp, Glycine max
attggattgcccccaacttatgaggctgaatactgttgaagacctttggatgctggaagactgttgccgagaagcaggggcaggactgggaagccctgagggtgaggtgatggaagtggtgtgatcagagccccaggcatgactgtgatggtggaactgttgccttaatgacatcctctaccttatgtaacttggtgccattttgaaacttgaatatagaaggtttccagagaggaaaaaaaaaggagaaaagaaac

SEQ ID NO: 118302 - DNA, 254 bp, Glycine max
gaaaacttgtgaaccactggaggaagattccttcaggccaatccttcaccactatgatggtcccaagttccgtcttgagctgaatgtgcccgaggcgttgtctcttctggatatatttgcagaacaagacaccttcaatgacactttcgaggctttgccggcataaaaggagattaatagcaaataatgcaacaagaatatcactcacagagacaatagataattagaggtttcggttggtttgaaagttatat

SEQ ID NO: 118303 - DNA, 255 bp, Glycine max
cttctcttgcggctagggttttagcgcagttcttctagatttaaggaagatgggtaaggaaaaggttcacatcagtattgtggtcattggccatgtcgactctgggaaatccactaccactggtcacctgatttacaagcttggaggcattgacaagcgtgttattgagaggtttgagaaggaacctgctgagatgaacaagaggtctttcaagtatgcctgggtgctggacaaacttaaggctgagcgtgaaag

SEQ ID NO: 118304 - DNA, 260 bp, Glycine max
ctacctcgaaagaccaatcgacgaatctcaggaatcgaaatcgccacgcgacaccgaaggccacggcacgcacaccgcctccaccgccgcaggcccgatcgtctccaacgcaagcctcttccactatgcgcagggcgaagccagaggaatggctacgaaagcaagaatcgcagcctataagatctgctggaagctaagttgcttcgactctgacatcctcgccgccatggacgaggctgtctccgacggcgtccacgtca

SEQ ID NO: 118305 - DNA, 260 bp, Glycine max
aaaaaatataccttttcagtttccactcattgatctaaagccttactcttgcaatcaatacaattaagtattattcaaagtcccaaccatgtcaccaacaaacacttttgcaattttggtcttcttctgctgtgccatttcctttaccttcgcttctgaccctgacacacttcaagacctttgtgtggcacttccctcttcaggtgtgaaggtgaatggatttgcttgcaaggctgagtcaaatgtaacagaagctgatt

SEQ ID NO: 118306 - DNA, 262 bp, Glycine max
atttctaatctcattctccttctgttcaaacactctctctcatggcatcagataagaagattaggatcggcatcaacgggtttggaaggattggccgtttggtggccagggttgcccttcaaaggaatgatgttgaacttgttgctgtcaacgatcctttcatcaccactgattacatgacatacatgttcaagtacgacaccgttcatggccagtggcagcattttgatgtgaaggtgaaggactctaagacccttctctt

SEQ ID NO: 118307 - DNA, 263 bp, Glycine max
gtcaatgatattgatgcgaactctgagaaatgactatgcaaagtatgctcgggaagatgatgatttggaaagtctggagagagatgttagtgaagaatctggctggaaacttgtgcatggtgatgtttttcgaccgcctcgcaacttagttattctttcagctgttgttggcacaggtgctcagcttgcgttgctggttcttcttgtcgtcttgttggctattgttgggatgttgtatgttgggcgaggagccatcatcacta

SEQ ID NO: 118308 - DNA, 251 bp, Glycine max
ctggtgtattcactgacaaggacaaggctgctgctcacttgaagggtggtgccaagaaggttgtcatctctgccccaagcaaagatgcacccatgtttgttgttggtgttaacgagaaggagtacaagccagagcttgacattgtttccaatgctagctgcactaccaattgtcttgctcccctcgccaaggttatcaacgaccgatttggaattgtggagggtcttatgaccactgttcatgccatcaca

SEQ ID NO: 118309 - DNA, 252 bp, Glycine max
cgatctctcgttgatctccaactgccgcctccattcgccatggaccccaactgctcctgtgccacagatggatcctgctcctgcgctggctcctgcaaatgcaaacaatgcaaatgcacctcctgcaagaaaagctgctgttcctgctgccccgtgggctgtgcgaagtgctcccagggctgcatctgcaaagaggcttcggacaagtgcagctgctgcgcctgaagtgggggcgtcctcacaatggtgtaa

SEQ ID NO: 118310 - DNA, 252 bp, Glycine max
ctatagtaaaaaaaaggacattcattcatctatggctacccttattgctcccagcaaccactctccccaagaagatgctgaagctctcagaaaggcttttgaaggatggggaactgatgagaacactgtcatagtaattttgggtcatagaactgtgtatcagaggcagcaaatcagaagagtttatgaggaaatttaccaggaggatctgtgaagcgcctagagtctagatcaaaggagactttgagaaag

SEQ ID NO: 118311 - DNA, 261 bp, Glycine max
ccctaaacgactctatctctcttcgttttgttcttccttgcgctcctcctcgttcgttcgttctccctcgcgtagatcggcaatggcggagaccgagacgtttgctttccaggctgagatcaaccagctcctcagtctcatcatcaacaccttctactccaacaaggaaatcttccttgcgttgactcatcagcaacgcctctgatgctttggacaagattagatttgagagtttgacggacaagagcaagctcgatgctc

SEQ ID NO: 118312 - DNA, 259 bp, Glycine max
tacgtgctgaagtcctttcagctcagcagggtcaagtggctcagccatcaaatgttgagtctcaaaacactggggatattgacccagagttcctagcagctcttccagctgatattcgagccgaagttctagctcagcagcaagcacagaggttgcatcagtctcaggagctggaaggtcaacctgtggaaatggatacagtctcaataattgcaacttttccatcagatttacgagacgaggttctcttgacatcacc

SEQ ID NO: 118313 - DNA, 227 bp, Glycine max
tgcctttgggatttcaaaagaaactatgcaaaatgtttgtaataagtttgtggtgaaagacgaagatttgattttattggcttatcccaagtcagaccaagggagatcccaagtggatccaatctgtgaccatctgggatcgctcaccctggatagagactgatgtaggatatgatatattaatcaaaaagaaaggaccacgactcatgacctcccatcttcccatg

SEQ ID NO: 118314 - DNA, 224 bp, Glycine max
agaaggtgcactctgtggcttggaattgcattggcacaaaacttgcttctggttccgtggaccaaactgcgcgaatatggcatattgagccacatgggcatggcaaggtcaaagatattgaattgaaaggtcacactgatagtgtggatcagctatgctgggaccccaaacatgctgatttgattgcaactgcatcgggtgacaagactgttcgtttgtgggat

SEQ ID NO: 118315 - DNA, 224 bp, Glycine max
tgcatttgcagagagagagagagagagagagggaagacggttgtggggattcgatgggggccaccgttcactcgccgctagtcacttatgcttccgtcatatctctgcttacactctgtcctccgtttgtcatacttctatggtacaccatgactcttgctgacggatctgtttccgagacattccattatttaaggcagaatgggttgcagggtttgctacat

SEQ ID NO: 118316 - DNA, 226 bp, Glycine max
gggccaccagaattgggtgaaagtaacgggcgagtaccttacttttcctggtggtggaacccaattcaaacatggggcacttcattacattgactttatacaagagactgtacctgacattgcttggggaaaacgcacacgtgttatactagatgttggatgtggtgttgccagctttggaggttttctctttgatagagatgtacttgcaatgtcgttagcacca

SEQ ID NO: 118317 - DNA, 225 bp, Glycine max
agcaaactacttgtacttcttcagaatggtaagcatatggtgcaagaaggtgccttaactgctttggcatcagttgctgattcttctcaggaacacttccaaaaatattatgatgctgtaatgccatatctgaaagctatattggttaatgcaaccgacaagtctaaccgtatgcttcgtgctaagtccatggagtgtctaagtttagttggaatggctgttggg

SEQ ID NO: 118318 - DNA, 223 bp, Glycine max
tatgcttctggccttccattggctcttgaagttataggttcaaacttgtttggaagagaaatagtagaatgggaatataccctagatctgtacgaaaaaatacatgataaagatatacaaaagatacttaagatatcctttgatgctttggatgaacatgagaaggatctttttcttgacatagcatgcttcttcaagggatgtaaattagcacaagttgaat

SEQ ID NO: 118319 - DNA, 225 bp, Glycine max
caaaggtaaggtaggttaacactcttcttcatcgtcgtcgcaatgggacgtgtgatccgtgcgcacgtaagggagcaggctcggtcttcaagtcccacacgcaccaccgcaagggccctgcacgcttccggagcctggacttcggggagcgcaacggctacctcaagggcgtggtcaccgacgtcatccatgaccctggccgcggcgcgccgctcgccaaggtcg

SEQ ID NO: 118320 - DNA, 225 bp, Glycine max
gcgagagaaagaagagagagatcgaaaatggcgttggctttcgacgagttcggaaggccgttcataatcctgaaggagcaggagcagaagagcagactccgaggattggacgctcagaaagccaacatctccgccggcaaagccgtggctcgcatcctccgaacctccctcggccccaaaggcatggacaagatgctccagagccccgacggcgacgtcaccatc

SEQ ID NO: 118321 - DNA, 223 bp, Glycine max
aataattcaagagaagtagcaatgcagcgaatgggtagccaagctaccagtggattaagaaaagttgactcggcaaatgattcagctactggagttacccccaaaaaaggaatgattctacctttccaaccacttgcaatgtcttttgacactgttaattactacgtcgacatgcctgcagaaatgagagatcaaggagtgacagaagataggctacaactgc

SEQ ID NO: 118322 - DNA, 224 bp, Glycine max
aaaaaattgttttcgtgtggaaacaaaaaaacaattcaaaaacaaacatatgatggtgaagccgagtagcgaaaagccagaggagcatagggattccaagtactacaaaggggtccgaaagagaaaatggggcaaatgggtatccgaaataagactacccaacagccgtcagaggatttggttgggatccttcgacacccccgagaaggccgcgcgtgccttcg

SEQ ID NO: 118323 - DNA, 224 bp, Glycine max
ggtgggtttactgaagatggcggtatataggctgaattagcgtctaggggtaaggtagaacggggtttatcgattatagaacaggctcctctagatggatataaagtaccgccaagtcctttgagttttaagctgtagctagtagttctctggcaaataattttgtaggtttaattattaaggtttagggctaagcatagtggggtatctaatcccagtttggg

SEQ ID NO: 118324 - DNA, 224 bp, Glycine max
caaaccctaacactcctcttcctcttcgatcatcacctctccacaatgccgccgaagttcgacccctcccagatagtcgacgtcttcgtccgcgttaccggcggcgaagtcggcgcggcgagttccctggccccgaagatcggtcccctcggtctctcccccaagaagatcggagaagacatcgccaaagaaaccgccaaggactggaagggcctccgcgtcac

SEQ ID NO: 118325 - DNA, 221 bp, Glycine max
cacagaccttatttattctggcatgtgcttcatatatcatgagattagttatggctcaatccactagatgtgtaggccttgctggataggctgttatgggccactgtctggcactcaatattgctgagaaaggctttcccatttctgtttacaaccgaaccacttccaaggttgatgagacagtagaacgagcaaaacaagaaggaaatcttccagtttat

SEQ ID NO: 118326 - DNA, 221 bp, Glycine max
gccaaatcaatcaaattctttgagttgaacacaggggccaagattccttctcttgggttagggacttggcaagctgaacctggtgttgtagctgaagctctcaccacagccattcaggttggatacaggcatattgactgtgctagtgcgtataagaatcaagcagagattggttctgctcttaagaagctttttgatgatggtgtggtgaagcgtgagga

SEQ ID NO: 118327 - DNA, 221 bp, Glycine max
cttggtttcggtttcaggtagactggactcctgagctacataaaaaatttgtgaaggctgtcgaacaactaggtatcgatcaagccattccttctagaatattggagataatgacagtggaaggcttgacaaggcacaatgtggcaagccatcttcagaaatatagaatacacaagagacaaagtgcacccagggaagaagatcggaaatggcataatcaa

SEQ ID NO: 118328 - DNA, 216 bp, Glycine max
gcaaggtcaagatctgaatcaacggatttggaagaattggccgtttggtagccagagtggctctgcagagagacgatgttgaactcgttgccgttaacgaccctttcatcaccaccgattacatgacatacatgtttaaatacgacagtgttcatggacactggaagcatcacgatgtcaccgttaaggacgagaagacccttctcttcggtgaca

SEQ ID NO: 118329 - DNA, 218 bp, Glycine max
gttccccccttctcataaacaacgcgttttctcttctgcttcgtatctattctttgcttttggtcttggttgattcaaggccttcacagcattcgttgcggcattttaatcgatttatccaagcaggactgaatgaactaatggagtctaaaggtgggaaaaagaagtctagtagtagtagtagtaaatcattgttctacgaagctcccctcggatac

SEQ ID NO: 118330 - DNA, 218 bp, Glycine max
ctctctaataacatttctaatctcattctccttctgttcaaacactctctctcatggcatcagataagaagattaggatcggcatcaacgggtttggaaggattggccgtttggtggccagggttgcccttcaaaggaatgatgttgaacttgttgctgtcaacgatcctttcatcaccactgattacatgacatacatgttcaagtacgacaccgtt

SEQ ID NO: 118331 - DNA, 218 bp, Glycine max
gataactgtggatttgttcagtttcccacttttggattgacagcatggaataactcattggattttgatttcagcatgacttatgtcggagcaggaatgatttgttcccatcttgtacattgatcattgcgtcttggtgctgtgattgcatggggcattatgtggcccttaatcagggagacaaaaggggaatggtttcctgcaagcataccagaaag

SEQ ID NO: 118332 - DNA, 220 bp, Glycine max
gctctgagagattccaacattgagttgctgctagatcttcctaacatcgacctccaatatgtagcttccagccaagacaacgcaaacagatgggtgcaagacaatgtcagaaacttttggaatgtcagattcaggtacattactgtgggaaatgaagtgaagccttgggactcatttgcacagtttgtagtgcctgcaatgcaaaacatccaaagagcaa

SEQ ID NO: 118333 - DNA, 219 bp, Glycine max
gcaaggtcaagatcggaatcaacggatttggaagaattggccgtttggtagccagagtggctctgcagagagacgatgttgaactcgttgccgttaacgaccctttcatcaccaccgattacatgacatacatgtttaaatacgacagtgttcatggacactggaagcatcacgatgtcaccgttaaggactcgaagacccttctcttcggtgacaagc

SEQ ID NO: 118334 - DNA, 221 bp, Glycine max
gctgtggaaaggaaacctcattgccaccatgaacttctccagcaagtaccaagtgcagagccaagagaactttgagcccttcatgaaggcgatgggtctgcctgaggacctcatccagaaagggaaggacatcaagggggtgtcagaaatcgtgcatgaagggaagagagtcaaactcaccatcacctatgggtccaaggtgatccacaatgagttcacct

SEQ ID NO: 118335 - DNA, 218 bp, Glycine max
tttttctctctcccttagtcaaagggattcatcgttcttcttcccaggttatttagaaaagcaaaatggtgaagatttgctgcattggtgctggatatgtggggggtcctactatggcagtcattgcacttaagtgcccatccattgaagtcgctgttgttgatatctctaaatcccgcattgcagcctggaacagcgaccagcttcctatctatgaa

SEQ ID NO: 118336 - DNA, 218 bp, Glycine max
caagtggtttgacaccaattaccattacattgttcctgaattgggtcctgatgttaagttctcctatgcatcacacaaggctgtcgatgaatttaaagaggccaaagttctgggagttaatactgtacctgtgcttgtgggacctgtatcctacttgttgctgtcaaaaccagctaagggtgttgagaagtcatttacccttctttccctaattgaca

SEQ ID NO: 118337 - DNA, 218 bp, Glycine max
gggaagccggggcctcggcctcggcggctttcaaagcccccaccttcacagccctatcaacaaaaaaccctaaccctatttttttcttcattttctaattctactctgatcgtcgccgccgccactagagatgcctgccctggcttgttgcgtggatgctgcagcacctcccggctatgcatttgccggctccatctcttttccggcgccggtcgccc

SEQ ID NO: 118338 - DNA, 217 bp, Glycine max
aacaacttctgctacttcctactccaaccgcacttctgctccgcaattatcatgggcaaggtcaagatcggaatcaacggatttggaagaattggccgtttggtagccagagtggctctgcagagagacgatgttgaactcgttgccgttaacgaccctttcatcaccaccgattacatgtcattcatgtttaaatacgacagtgttcatggacact

SEQ ID NO: 118339 - DNA, 215 bp, Glycine max
gaagtactcaaattagcatggctgtcacggttgcattcttgaatttgatcatcatgttttcagtagtctctacaagcaagtcactgagcttaaactactattcaaaaacatgccctgatgtggaatgcattgttgccaaggcagtgaaggatgccactgctagggacaaaactgttccagctgcacttctgcgaatgcacttccatgactgtttc

SEQ ID NO: 118340 - DNA, 215 bp, Glycine max
gttcctctttccttctctagcacaatttacaatctcaatggctggaatttgctgtggtgttgttggagaaggtgacactccggctccactcgagcccactcctcgcccctccaggcgccggagtttggacatcttacctttaaaatatatcgccgacatgcccatgccgccgccggaggctttacggaagcgtcccaagctcaacctcagggact

SEQ ID NO: 118341 - DNA, 212 bp, Glycine max
ggatggtagaaggagcagagccgatgtggtagagcagttcctcccagaccacaatgaatccatttctgcagttcttgacaagtttggtgccatgggaattgacacccccggcgtagttgcattgcttggagcacacagtgttggtcgaacccattgtgtgaagttggtgcaccgtttgtacccagagattgatccagctctgaaccctgacc

SEQ ID NO: 118342 - DNA, 218 bp, Glycine max
gcttcacgcaggttcgtatcttctctgattcgatcctcccttcgtagatctcaatcgaaaccctcgatttccgcatccgcatcgaggctcacgtcatccaaccgtgcctctccgcacggttacttgctgaaccgcgtcgccgaatacgctaccgcggcggcggctgctaccgctcctccctctgctccgcctccgggcaagaaggaggttagcggcgg

SEQ ID NO: 118343 - DNA, 273 bp, Glycine max
ctcttcttctcttgcggctagggttttagcgcagttctctctagatttaaggaagatgggtaaggaaaaggttcacatcagtattgtggttattggccatgttgactctgggaagtcactaccactggccacctgatctacaagcttggaggcattgacaagcgtgttattgagagatttgagaaggaagctgctgagatgaacaagaggtctttcaagtatgcctgggtgcttgataagcttaaggctgagcgtgaaagaggaatcacaatt

SEQ ID NO: 118344 - DNA, 272 bp, Glycine max
gctaaacctctcagtggttctgctaggagttgcactaaagttcacaagaagggcattgcacttggtagatcagtggaccttacaaagtacagtggctatgatgaattagttgctgaattggatcagctgtttgaatttgggggtgaattattgtcaactaaaaaagattggcttatcgtctttactgataatgagggtgatatgatgcttgtaggcgatgatccatggcaggaattctgtgccatggttcgcaaaatttatatctaccctaa

SEQ ID NO: 118345 - DNA, 271 bp, Glycine max
aacatttctaatctcattctccttctgttcaaacactctctctcatggcatcagataagaggattaggatcggcatcaactggtttggaacgattggccgtttggtggccagggttgcccttcaaaggaatgatgttgaacttgttgctgtcaacggtcctttcatcaccactgattacatgacatacatgttcaagtacgacaccgttcatggccagtggaagcattttgatgtgaaggtgaaggactctaagacgcttctctttggtga

SEQ ID NO: 118346 - DNA, 269 bp, Glycine max
cgcaaaatgtcaagctttggattggtgtcaacacagactcagtatcttttagcatcaatgctaaatgatgatgagtttgtggaaagttttctggtagagagtgcaaaaaggctggcacaaaggcatagagttttcactggggggttggccaaagttggcataaagtgcttgcaaagcaatgctggtctctttgtgtggatggatttaaggcaacttctcaagaagccaacgcttgactctgaaatggagctttggagagtgatcattga

SEQ ID NO: 118347 - DNA, 263 bp, Glycine max
gtctaagaaggagtgtgatttgattcgaaagcagtggcatataattgttgatggcggtgatatcccacccccgattaagaattttaaggatatgaggtttccggagccggttttgaagaagttgaaagctaaggggattgtacaaccaacacccattcaggtgcaaggtctgcctgttatcttatctgggcgggatatgattgggattgcattcacgggctcaggaaaaactctggtctttgtgcttccgatgatcatgatgg

SEQ ID NO: 118348 - DNA, 272 bp, Glycine max
gccacaccagcatccatcaccaatgtcactgtggagttccttcaattccccgcggtggtgacacctcctgcctctaccaaatcctatttccttggtggcgcaggggtgagagggttgaatattgaagaagaatttgtaaagttcacgggaataggtgtttattcggaagacaaggccgtgtcatcactcggtgccaaatggaagggcaaaagtgcagctgaattgctggactcacttgacttctacagagatatcatcaaaggtccgtttga

SEQ ID NO: 118349 - DNA, 272 bp, Glycine max
gaaaaggcagaaaagtgcttaagaaaggttgagggtagaattaaaggtcgagatagaataccttttcattatctcctgagtttatatggaagtgttggaaagaaagacgaagtctatcgtgtgtggaatacttacaaatcaatttttccaagaataccaaacttgggataccatgctattatttcttctctggttaaattggatgatatcgagggtgcagaaaaactatatgaggaatggatttcagtaaagtcaagttatgatcctagaat

SEQ ID NO: 118350 - DNA, 271 bp, Glycine max
ggccaggcaagccccactcaaccaccacacctctcctcgttcacgctacccctttctgctcttcttctacctttcaagttttaaaagtataaagatggcagagacattcctatttacctcagagtcggtgaacgagggacaccctgacaagctctgcgaccaaatctccgatgctgtcctcgacgcttgcctcgagcaggacccagacagcaaagttgcctgcgaaacatgcaccataaccaacttggtcatggtcttcggagaaatcacg

SEQ ID NO: 118351 - DNA, 271 bp, Glycine max
attcccaattcctaattgtttaaacctaattctcatttcttcatcgttcgattcttctcctcctaaagatgcagatcttcgtgaaaactttgaccggtaagaccatcacccttgaggtggagtcctccgacaccatcgataacgtgaaagctaagattcaagacaaggaagggatcccacctgaccagcagagacttatctttgcgggtaaacagcttgaggatggtcgaacccttgccgactacaacatccaaaaggaatccactctcca

SEQ ID NO: 118352 - DNA, 265 bp, Glycine max
cccagctcccactcaggcctggactcaaccccagagtccctcgcacaagtacgaggttagacgccgtgtcctcgggcaggggtggaggtgagagagtatagctataagattatatgggaaacacatgtgaatacttaatggtggcattcactattggcaaagattgatgaacttcatagccatttccggtgtcatgcagtactagaatcgttccgtagtaaagtgggttttagacggtcgaaacgcagaacgagggcgagccctc

SEQ ID NO: 118353 - DNA, 267 bp, Glycine max
gccacaccagcatccatcaccaatgtcactgtggagttccttcaattccccgcggtggtgacacctcctgcctctaccaaatcctatttccttggtggcgcaggggtgagagggttgaatattgaagaagaatttgtaaagttcacgggaataggtgtttatttggaagacaaggccgtgtcatcactcggtgccaaatggaagggcaaaagtgcagctgaattgctggactcacttgacttctacagagatatcatcaaaggtccg

SEQ ID NO: 118354 - DNA, 270 bp, Glycine max
cagaacatgcatacaacaaattaacaaggctagccgtggagacttaagtcctgacgaattgaaggagcgacaggccagggcaatgcaggatccagaaattcagagcatccttcaagaccctgttatgagacaggtattgattgatttccagggaaatcccaaggctgcacaggaacacacgaagagtccaatggtgatgaataagatccagaagctggtcagtcggggaattgtccagatgaagtaagtgtgtggcaggtggcagttcgt

SEQ ID NO: 118355 - DNA, 263 bp, Glycine max
gttggtgttagtcttggtgtagtgtagctagggagggatatatatctgagtaacatggcatcagagcttgaattgcccccaggcttcagattccatccaacggacgaggagctggtgttgcactatctctgccgcaaatgcgcgtcgcagccaatcgccgttcccatcatcgccgaaatcgacctctacaaatacgacccctgggacttacccggattggctacttatggagacaaagagtggtacttcttttcaccacggga

SEQ ID NO: 118356 - DNA, 266 bp, Glycine max
ggcaagggatcagctcatcgagcagaatgttgcattagatctagcaagaagagaagcagaaactgcaattcgtgctcgtaatgactttttggcagttatgaaccatgagatgagaactcccatgcatgcagttattgcactctcttcattactacaggaaacagatttgacagctgagcaacgactgatggtggagacaatattgaaaagcagcaatttgttggctaccctcatcgatgacggtttggatctttcacggcttgaag

SEQ ID NO: 118357 - DNA, 268 bp, Glycine max
ggggtgttaaatagaaaagaggagtttgagaatggcaacgatcagcgcggttcaggtggagttcctggagtttccagcggtggttacttcaccagcctccggcaagacctatttcctcggcggcgcaggggagagaggattgacgattgaggggaagttcataaagttcacaggcataggagtatacttggaggataaggcggtgccatcactcgccgctaagtggaagggtaaaacttcagaggagttagttcacaccctccacttc

SEQ ID NO: 118358 - DNA, 268 bp, Glycine max
tccaaacaaaacccatcaaagtctttctccctcagtgatcatatattcattcagttctatacaaaatcctcaaaaactcttcctctctgccatgaccatggaatacagaaccttagaactcaacatcatatccgcaaaggacatcaagaatgttaatctcttctccaagatggacgtatacgccgccgtttcgctctccggtgaccctctccaccctcagggcgccaccacccacgtccacaaagacgccggcagcaaccccacgtgg

SEQ ID NO: 118359 - DNA, 267 bp, Glycine max
ctctatttctcagtctctgtgtgtgcggctgaggattccgaacgagtgaacttcttcgtttctcgcaaagtataagtaatcatgggtaaggaaaaggttcacatcaacattgtcgtcattggacatgtcgactctgggaagtcaactaccactggtcacttgatctacaagcttggaggtattgaaaagcgtgtgattgagaggttcgagaaggaggctgccgagatgaacaagaggtcattcaagtatgcctgggtgctcgacaag

SEQ ID NO: 118360 - DNA, 205 bp, Glycine max
agagagccggcctcactgttccaagggcacatagtcttgtctgtgttccacttgcaaggatcggcgttgcatctaaactcctttcttaattaagatcatcgtcatcatcatcatatgtaatatttactttttgtgtgttgataatcatcatttcaataaggtctcattcatctactttttatgaagtatataagcccttccatgc

SEQ ID NO: 118361 - DNA, 265 bp, Glycine max
agaaaaatgaagtctttccatctcacagtgacagctttgtgctgtgtagtggttgtgcttggagtgcttccactctccctagatgcacaactagatccctccttttacagagacacttgtcccagggttcactccattgttcgtgaagtcgtcaggaacgtttcaaagaaagatccccgtatgcttgctagtctcattagacttcactttcatgactgctttgttcaaggatgtgatgcatcagttttgttgaacaacactgcca

SEQ ID NO: 118362 - DNA, 268 bp, Glycine max
caacgagatttctcagccaaagaacaaggatcagaatcgtttaatcaagttgaggaagatggcactaagtctccggaggaatatcaacactgaaccctaacgcccctctttacattcccgccgcgtaccgccaagtggaggatttttctccagaatggtggcagctggtgacgacactgacgtggtaccatgactactggctaagccagcagcacgatgatggagccttctatggcgaggatgggtttgatggcaatgatgtggttga

SEQ ID NO: 118363 - DNA, 263 bp, Glycine max
caacgaaatttctcagccaaagaacaaggatcagaatcgtttaatcaagttgaggaagatggcactagtctccggaggaagatcaacactgaaccctaacgcccctctttacattcccgccgcgttccgccaagtggaggatttttctccagaatggtggcagctggtgacgacactgacatggtaccatgactactggctaagccagcagcacgatgatggagccttctatggcgaggatgggtttgatggcaatgatgtgg

SEQ ID NO: 118364 - DNA, 268 bp, Glycine max
acatagccggcctcactgttccaagggcgcatactcctgcctgagttccacttgcgaggatcggcgattcatctaaactcctttcttaattaagatcatcgtcatcatcatcatatgcaatatttactatgtgtgtacggataatcgtcatttcaataaggtctcattcatctacttcatatcaagtatataagcccttccatgcaacattgacaacaacggctgtccgccgtcacttgtgctgtataatcggactcagagcaccgtc

SEQ ID NO: 118365 - DNA, 265 bp, Glycine max
ggggaaaggagaatggcaggtcttgcaaaggagtacccaaaattggtcaggaaggaaacgctgttggagccatctgaccttcgtttcttccaaaatcattcatcccagatggcagcattggattatcttgtctcgttagagagtgatatttttgttcccacatatgatggaaatatggccaaagtggttgagggccaccgcagatatcttgggttcaagagaacgattttattgaacagaaagctcctagttgaattgatagatc

SEQ ID NO: 118366 - DNA, 263 bp, Glycine max; identical to SEQ ID NO: 118363

SEQ ID NO: 118367 - DNA, 263 bp, Glycine max
tgtgaaaccaacgtgattcctgggaagtatggtttcattgctcagctgaatgagggtcgccacctcaagaagagaccaactgagttccgtgttgataaggtcctccaaccctttgatgataacaagtttaacttcactatagttgggcaataagaggtcctgtttcagctagaaataagcaatgatggggaggctcaattctttcccaatgtgcctattgatgttgagaattctcctagttttgttgccatcaatgtgagtcc

SEQ ID NO: 118368 - DNA, 275 bp, Glycine max
gggaaactgaagccgaacttgggtcgattcactaatccccctgattggcttgaaattttgacctattttcgaggatctgaactgcagaattattttactcggattctagaggatgatttgaaggctatcatcaagcctgagtatgttgaccatattccaaaagctgtgcaagggaatgtggggcaggtgctagaccagaaagatgagagagagaagaaggaggagctttgtgctgatcttgagcttaatcaagttatagatcgtaatgttggtga

SEQ ID NO: 118369 - DNA, 278 bp, Glycine max
cataaacgcctttcttctccgtttccgtttcctcgttcgaattcgctttttgatctgcgaaaatgagagagtgcatctcgatccacattggtcaggctggtatccaggtcggaaatgcttgctgggagctctactgcctcgagcacggcatcgggcccgatgggcaaatgccaagtgacaagacagttggcggtggtgatgatgctttcaatactttcttcagcgagactggtgctggaaagcacgtgccacgtgcagtgtttgtagatcttgagccc

SEQ ID NO: 118370 - DNA, 265 bp, Glycine max
cagaccttaatttttctctcattcgcttcaaatttcaggggatcaattatggctcaaccctcaacaagaatatgccttgctggactggctgttatgggccagaatctagcactcaatattgctgagaaaggctttcgcatttctgtttataaccgaaccacttccaaggttgatgagactgtagaacgagcaaaacaagaaggaaatcttccagtttatggctaccatgaccccgaagcttttgttcattccattcaaaagccta

SEQ ID NO: 118371 - DNA, 263 bp, Glycine max
gtagccaaacactctgaaattctcagttatgtcgtggcaagcgtatgtggatgatcacctactgtgtgaaatcgaaggtaaccacctcactcacgccgctatcatcggccaagacggaagcgtttgggctcagagcaccaacttccctcagttcaaacctgaggaaataactgccatcaataatgactttaatgagcctggatcacttgctccaactggattgtatatcggtggcaccaaatacatggtcatccagggtgagc

SEQ ID NO: 118372 - DNA, 261 bp, Glycine max
ggccttttaaggtcattgctggtgctgctgacaagccaatgatcgtggttaactacaagggtgaagagaagcaatttgctgcagaagagatctcttctatggtgctcatcaagatgcgtgagattgctgaggcttaccttggctccacggtgaagaatgctgttgtcactgtccctgcttacttcaatgattctcagcgtcaagctaccaaggatgctggagtcattgctggtcttaatgtgatgcgaattatcaatgagc

SEQ ID NO: 118373 - DNA, 263 bp, Glycine max
gcacaagatggagtttttcacgaaaacgagcgtggtgaagctgaggagccacctggacaagtacctcgtggcggatgccgacggcgcgcgggtccgccagagccggaggagctccggcagggggacgtggtggacggtggaggaagtggcggcggaaggagggattaataataaggttcgcctgaggagctgccacgggaggctcttaacggcgacacagacgccgtttctgctaggcatgacggggaagacggtgctgcaaa

SEQ ID NO: 118374 - DNA, 263 bp, Glycine max
cttttgtcttcgttccattatctagttctcaattctcttcaccgtttgcctctgaaagaaatgggtagtcttgaagcggaaagaacaacagtaggattggcagcaagagacccttcagggattctctccccatacacctacaatctaagaaacacaggccctgatgatgtttacattaaagttcactactgtggaatttgccattctgatctccaccagattaaaaatgatcttggcatgtccaactatcccatggtcccagg

SEQ ID NO: 118375 - DNA, 271 bp, Glycine max
gctttgagtgcattggaaatgtctctgtgatgagagctgctttggagtgctgccacaagggctggggaacatcagttattgtgggtgttgcagcatcagggcaggaaatatctacccgtcccttccagttggtgagtggacgtgtctggaaaggaacagcttttggtggcttcaagagcaggtcacaggtgccttggcttgtagacaagtacttgaagaaggaaatcaaggttgatgagtatattacccatactttgaccctttcggagat

SEQ ID NO: 118376 - DNA, 273 bp, Glycine max
gtcgcttcttcgtaggtgcagctgcaatggtgaagggacgccaaggagaacgtgtcagactctacgtgaggggtacaatccttggatacaaaaggtccaagtcaaaccagtatccaaatacatccctgatccaaattgagggtgtgaatgccaaagaagaagtagcatggtatgctggcaagaaaatggcctatatctacaaggctaaggtgaagaagaatggaagccattaccgctgcatatggggcaaggttacaaggcctcatggtaaca

SEQ ID NO: 118377 - DNA, 273 bp, Glycine max
ctcgagcggtcgttgcatcatatttagatagtggaagccctgtagatgagcaaggtgttgaagatgcctttgagctccttcatgaaatgaatgaacgtgtcaggacagggatctgggttggggattgttttatctacaacaattcttcttggaggcttaactattgtgttggtggtgaggttactacaatgtttcatttggaccgtcctatgtacttgttgggatatcttgccagccaaagtaaggtctatttgatggacaaagaattcaatg

SEQ ID NO: 118378 - DNA, 275 bp, Glycine max
caagattcatcatcaatcttgtgacaggaagtgacaagattcatcatcaatcttgtcacttcctgtgaggaactcaagctccgcatcactgaccttgatcaaatcagcctagtgccaaatgctcagtatttgcttacgagcttgctcagccgaaggcacaaaggtagacgaaggttggggtcataggagagcaagcacccagattccttggctacttccattgccttcaagtgtgctgatctgcatggctccacgatcaaactgattgatccgta

SEQ ID NO: 118379 - DNA, 131 bp, Glycine max
cgccgcccgagatggggttgttttgcttgtggatttgagggtaagctctatgtgatgggtggacggtcaagctttactattggaaactccaagtttgttgatatatataaccctgagagacacagctggtg

SEQ ID NO: 118380 - DNA, 127 bp, Glycine max
atacaaacctctctaatttttgaagcttattatacccaatctcgatatgcagatcttcctgaaaaccctaactggcaagacgatcaccttggaggtggagtcctctgacaccatcgacaacgtgaag

SEQ ID NO: 118381 - DNA, 125 bp, Glycine max
tggggatcttggatgtcaggggatgggaattcctgttggtaaattggccttgtacacagcactaggagaagttagaccatcagcatgtttgcctattacgattgatgtggggacaaacaatgaga

SEQ ID NO: 118382 - DNA, 197 bp, Glycine max
caatacccttttgatttgtgaaaggaaagcaaacatgcttgatcaggtccaacaccctacaatcatggacaaggttgctggccagctccatctccgttctggtgtttctggtattaggagttatgaaggagcctactgccaccccacaatgtaccaaagaccctcttttgggaattactcgaatgctgcattgcagt

SEQ ID NO: 118383 - DNA, 254 bp, Glycine max
atcttctgagagtgtttggttgaaagtagcaaagatgtttcctttcgggcataagggtcaaaagataaaggggactatggtggttatgcagaagaatgtgttggatatcaacagcatcaccagtgttggagggatcgttgaccaaggcttaggcttcataggcagtgcagtcgatgcacttacttttgcagccaccaaaatctccatccagttgattagtgctaccaaggctgatggtgggaaaggaaaaattg

SEQ ID NO: 118384 - DNA, 125 bp, Glycine max
ttctcttgcggctagggttttagcgtattcttctagatttaaggaagatgggtaaggaaaaggttcacatcagtattgtggtcattggccatgtcgactctgggaaatccactaccactggtcac

SEQ ID NO: 118385 - DNA, 125 bp, Glycine max
ggaatttgtcaaagattatatatttccttgcctgcgtgctggtgcagtttatgagaggaagtatttgcttgggacctcaatggctcgccctgtaattgcgaaggccatggttgatgttgccaaag

SEQ ID NO: 118386 - DNA, 121 bp, Glycine max
catcggggcgctgagccaggtctccggcgtgacaggttgccagtggggcgacgagggcaaagggaaactcgtcgacatattggcccagcacttcgaaatcgttgctcgctgccagggtgga

SEQ ID NO: 118387 - DNA, 123 bp, Glycine max
gcaaagcgcagggagtatctgagtccttccatcttgcacttctacaagactcccgtgatcatagtggagggtaagaagcagtacctgtttgacgagattgggagaaggtacgtggatgcgttt

SEQ ID NO: 118388 - DNA, 120 bp, Glycine max
  unsure (1)..(120): unsure at all n locations
gatagatgtctttgtgagttagagatgtttatagaggatggtgaggatcgggantatnnnaagaggaagagtgnnattaatgagggaatggaggagtttgtgagtgatcctttggcggtt

SEQ ID NO: 118389 - DNA, 119 bp, Glycine max
ctcattaattgcaagaatggcacttcgttgcttggtgatgtccctttctgttctcttcactcttggtcttgcgagagaaagccatgccagagacgaagatttttggcatgctgtttggc

SEQ ID NO: 118390 - DNA, 241 bp, Glycine max
gagaaagtttgttatagagagagaaagcgcgctgctgcttcttctgctgctgcttcgacagtgagaagagagagagaagcgctcttctccgtaccgtttctagagagagaaactgatggccggagttaatccgaacggcgtcgccgattttccggcgactccaacgcacggcggacagttcattcagtacaacatattcggaaccctcttcgaggttacggcgaagtaccgtcctccgatc

SEQ ID NO: 118391 - DNA, 124 bp, Glycine max
ctctcttttttttttgccctatctcatagggtttccaccctctatctcatgactttttgctctcacgagttcttctttgccgttgccctcttattctttgctgtatttggagccttcttttgtg

SEQ ID NO: 118392 - DNA, 126 bp, Glycine max
aggaggagaccccattctataccggcacattcgaagaacccgtatacatggaatctagacaaaataggaaggagtcgaaccccccaaagctggtttcaagccaaccccatggcttccatgactttt

SEQ ID NO: 118393 - DNA, 101 bp, Glycine max
atcggctacgcggccgacataggacactccgctggcgacgacataactaaaaaaacccgaccccgtgcagttggggtcttcgtcataggattctggatcct

SEQ ID NO: 118394 - DNA, 125 bp, Glycine max
cggctcgagcagctttccgttgcacaaacagtgaagtgacagtccagcccagcccctatttgagttaccggctacccaaggactttgtagacctctctactggggaggacgctcacaagctaata

SEQ ID NO: 118395 - DNA, 246 bp, Glycine max
cttcactctcgtcaagctgagaagaagaagcaagaagagttgaaggacaagtttgacaacctctgcaaggtgatcaaggatgttttgggtgacaaggttgagaaggttgtggtctctgaccgcgttgtagattcaccatgctgtcttgtgactggcgaatacggttggaccgcaaacatggaaaggataatgaaggcccaagctctaagggacaacagcatggcagggtacatgtcaagcaagaag

SEQ ID NO: 118396 - DNA, 170 bp, Glycine max
cacagccacgtctgcgtcagtgccagcgagagcaagctctccgagatgtctgtccccctgctccgggacccgtcgatgtcccctctaggggtggccactctcaccccctcctccacttgcccctctctggttcaagggcggtacggtgccactgacctgaggaccccgca

SEQ ID NO: 118397 - DNA, 154 bp, Glycine max
tttctaatctcattctccttctgttcaaacactctctctcatggcatcagataagaagattaggatcggcatcaacgggtttggaaggattggccgtttggtggccagggttgcccttcaaaggaatgatgttgaacttgttgctgtcaacgat

SEQ ID NO: 118398 - DNA, 277 bp, Glycine max
ctgatctagggtttgtgactgtacatgctataaatataaattattgagcatcgaaggagtgtctctctttttcactcactctgcacccaccattactcagcactgccattcttcaatcacactaatggctgtcaccttctcagatctcacaccgaagagggcatcaaatccctcgatcaatacctttctgggaaaacctatatctctggggatcaattgacaaaggatgatatcaaagtgtatgcagctgttgtggaaaagccaggagactcttttc

SEQ ID NO: 118399 - DNA, 274 bp, Glycine max
ggttaagcggtgagatttgcgaatctgagaaatggcggattcttctcgggaggagaacgtttacatggcgaaattggcggacaggccgagcgttacgaggagatggttgagttcatggagaaggttgcaaagactgtggaggttgagagttgacggtggaggagaggaatctcctctctgtggcttcacagaacgtgattggtgcgaggagggcttcgtggaggatcatatcctccattgagcagaaggaggagagcaggggcaatgaggacca

SEQ ID NO: 118400 - DNA, 274 bp, Glycine max
gtttcctcaaaagaggtagcacggctgaagaagttggttgcatattggaaacaacaagctggtagaacaggttttaaggaagcgctattttaatgtaatagtagacatgcagggcaagatcagagtttactgtcgactaagacctcttagtgacaaagagattgttgagaaagaaagagaagttcttactgcagttgatgaatttactgttgaatacccatggaaagatgatcaactgatgcagtacatatatgaccgagttgctgatgctaat

SEQ ID NO: 118401 - DNA, 272 bp, Glycine max
caaagttattagagaaagttcaacatgagttgttatctgtgtatgcaaaccaactccttgagaaagagcactctggatgtcatgctttacttagagatgataaggttgaagacttgtcaagaatgttcaggctattctctaaatacctcgaggcttagatcctgtttccaatatatttaaacagcatgttaccactgaaggtatggctttggtgaagcaggctgaagatgcagctagcaacaaaaaggcagaaaaaaaggagattgtaggtc

SEQ ID NO: 118402 - DNA, 266 bp, Glycine max
gcagagccaacaacaagaagaacaaaaccaacatcaacaaccacaagaagaagaagcttgcaaattagaagaatcttgagttgaaagggaagaacacacaagaacaaagagaggaagaaacgcgaatgaagggagaattagagtgccaccagggttcagatttcaccccactgatgacaaattggtgaatcactacttgtgtaggaagtgcgcgggtcaaccaatcgcggttcccatcatcaaagacaccgatttgtacaagtttg

SEQ ID NO: 118403 - DNA, 272 bp, Glycine max
cttatctttctcttgttaactaattaaaatgactctcacaaaggacttgttctttgtgaccgctctatgctgcacctctgccgcatatgctgcaaggtttgacatcacaaaccgatgctcataccctgtttggtccgcggctgtcctggcggtggcaggaggctgaactcgggccagtcatgggctttagacgtgcctgcaggaacgaaaggggcccgcgtttgggcccgaaccggctgcaacttcgacggctcgggccgcggtggatgcca

SEQ ID NO: 118404 - DNA, 270 bp, Glycine max
cggtgcggccttgatcattggcatttatgatgaaccaatgactccaggtcaatgcaacatggtagttgaaaggcttggcgattatctcattgatcagggtctctaatctttgctttatgtcttgttatcgtgcatatttcattgcttctgtacaagtttttgcatcgacctggactggaatgctttgattgcagtgtaataatcttgttgtgagtatgaaaagtcacgggatctgcgtgtagtgaagaaagtgtttgatgcttgagaaat

SEQ ID NO: 118405 - DNA, 274 bp, Glycine max
ataaattccgtccaaggctaaatactggcgagagatcgatagcgaacaagtaccgcgaggaaaagaagaagaaaaggaaggaaactgagagtgctgagttgcagaatgggaatgacgataatgcaggagaaaagaagaaaaaggaaagaagcatgccgagaaggaagaatctcctgaaatgccaagcaagaagaaaggcaaaaaaaaaagaaaagtggggactaaggtgaagtcatctgctaatcaatctggtgaatgacaaccatttttgtat

SEQ ID NO: 118406 - DNA, 273 bp, Glycine max
gcaggtgcaggaggagggtatggggacgcgaaccagaggatagactacgtgttcaaggtggtgctgataggggactcggcggtggggaagtcgcagatactagctcggtttgcgaggtacgagttcagcttggactccaagtcaccatcggtgttgaatttcagacaaggaccttggtcatagattatcagaccgttaaggctcagatctgggacactgctggccaagaacgatacagagcagttacgagtgcatactacaggggtgctgtgg

SEQ ID NO: 118407 - DNA, 269 bp, Glycine max
gtgatccgatccagaggttaggtgcctacatgttggagggtctaagagcaaggttggagtcctcagggagcataatctacaaggccttgaaatgtgaacaaccaacaagcaatgatctcatgacttacatgcacatcctgtacagatttgcccatattggaagtttgcttacacatctgcaaatgctgtcattggagaagcaatgctgaatgaatcaagaattcacataattgacttccaagttgcacagggcactcagtggctgttgc

SEQ ID NO: 118408 - DNA, 268 bp, Glycine max
cccaaaagccattgcattgtggtgaatgtttgagtgcagaaggtaaaaaagaaaatggtggtgaagattcgattggcaaggctcgggtgccggaaccacccattctatcgtgtggttgttacggatagcaaaacaacaagaatggcaagcaacttgaagttttaggtttctacaatcccgtcgcaggcaaggatgatgacaaaagaatgagcctcaaactggagagaatcaagtattggctttccgttggagctaagccttcagagcc

SEQ ID NO: 118409 - DNA, 254 bp, Glycine max
aaaactcaacactgctcgcttagtggggtaagcggcgacgacgacgatgaaggtggtggcactcgttagcggtagtaatgacagttgctatgccatgatgaaggctatccactatggccatgagattgttgcattggccaattgatgccgcttgatgattccgtggacgagctcgatagctacatgtactcaactgttgggcatcaaattattgtcagatatgctgaatgcatgggattgccattgttcaggag

SEQ ID NO: 118410 - DNA, 271 bp, Glycine max
tagagaatggggactctactcatgagttgacagaacaaagtggagaagagcactacacagaggatcaggaggaacagaatggagaggaaggaagccaagaggaggcagttgtagtggatgcagattctacagatggtgcagtactcgttaatggtaacgaggctgacgaagagtggggtacgaataatgaaggagccccgtcagcctaaaagcaattggttggggtggtgtgaaaatcgaaattttgtctctggtgattaattgtttctga

SEQ ID NO: 118411 - DNA, 268 bp, Glycine max
gggatctagagtcttcagtttctcctcgttgttcttcgctttcctgttttcaatttcgattctttcgttaatttaataagatgtttgggagggcaccgaagaagagcgataatacgaggtactacgaaatcctcggcgtctcaagaacgcttcgcaggatgatctgaagaaggcttacaagaaagccgccattaagaatcaccccgacaagggcggtgatcccgagaagtttaaagagctggcgcaagcttatgaggttctgagtgac

SEQ ID NO: 118412 - DNA, 275 bp, Glycine max
ctcgagccgtttcttcttctcgtttttactttgacagtttctagagagagaaagtttgttatagagagagaaagcgcgctgctgcttcttctgctgctgcttcgacagtgagaagagagagagaagcgctacttctccgtaccgttctagagagagaaactgatggccggagttaatccgaacggcgtcgccgattttccggcgactccaacgcacggcggacagttcattcagtacaacatattcggaaacctcttcgaggttacggcgaagta

SEQ ID NO: 118413 - DNA, 272 bp, Glycine max
ggccaggcaagccccactcaaccaccacacctctcctcgttcacgctacccctttctgctcttcttctacctttcaagttttaaaagtataaagatggcagagacattcctatttacctcagagtcggtgaacgagggacacctgacaagctctgcgaccaaatctccgatgctgtcctcgacgcttgcctcgagcaggacccagacagcaaagttgcctgcgaaacatgcaccaaaaccaacttggtcatggtcttcggagaaatcacgac

SEQ ID NO: 118414 - DNA, 269 bp, Glycine max
agaagctgtgatttcatacactcagcatttgaatgccattgagagtggtaaagttgaaaatgtccctgcccctgccattgctattgactactggaggcttcccaaggatgcaactctcaaggatgttgtcactgtgattgcgctgatgaggctcatcacagggatgttaaccactttgcttctgatattcatcatcaagggaaggaattaaaagaggctccagctcctattggttatcactgagtcattgttgtaaattttttaacaaa

SEQ ID NO: 118415 - DNA, 265 bp, Glycine max
ctcatctgcttcccctagcaaccttcttcttacttctctccgcttcttatctccagattgctggggcggaagcacaaccgttgactagtctcaagcttaactctcatattcttcaggagtctactgctaaagagattatgaaaatcccgaggcaggatgggaggctgctataaatcctcgtttctccaattatacagttgaacaatttaagcgccttcttggagtcaaaccaatgcctaagaaggaacttagaagtacacctgct

SEQ ID NO: 118416 - DNA, 220 bp, Glycine max
ctcacaatttttattttttaatgatactattttgttattgttattgatggtatcatcatcgggaaaaagcagagaaatggatagggtgaaggtccatggagcccagaagaggacgaggccctgcgggcgctggttcaggcccacgggcctcgaaactggtcggtgataagcaagtccattccggggagatccgggaaatcgtgccgcttacggtggtgca

SEQ ID NO: 118417 - DNA, 262 bp, Glycine max
gtttcgaatagattatcctactacttgggaatagtgttgcaatggcttcaagtcaggaggaggtgaccttttgggagctactggaagcccatttgtgtgcagggttcatattgccctcaagttgaagggagttcatacaaatatgtcgaagaaaatttgaggaacaagagtgaactgcttctcaaatccaacccagttcacaagaaggttccagtgtttattcacaatgagaagcccagagcagagtctcttgtgattgttg

SEQ ID NO: 118418 - DNA, 270 bp, Glycine max
cttttgcttccttaacctattttgttatcctcaattttcaatggctcaatcccattctggaaaaacctcttccatgacttcaatactcctcctgtttatgcttcttatcagtaatacaggcacaacaggtgcacaatctgtgtatgctatggaagagttggcaacaatctgccatcgccacaagaagtagtttccctttttaaacagtacggcttccaaaggatgagaatctatgatcgaaaccatgaagtcctccaagctctgagagat

SEQ ID NO: 118419 - DNA, 266 bp, Glycine max
aaagggactcgttgttcttctcccaggttatttagaaaagcaaaatggtgaagatttgctgcattggtgctggatatttggggggtcctactatggcagtcattgcacttaagtgcccatccattgaagttgctgttgtgatatctctaaatcccgcattgcagcctggaacagtgaccagcttcctatctatgaacctggccttgatggtgttgtgaagcaatgccgtggcaagaacctcttcttcagcactgatgttgaaaagc

SEQ ID NO: 118420 - DNA, 269 bp, Glycine max
gtcagggcaaaggcagcagagagcaacagttctatctgtggttcgacccaactgcagatttccatacctattccattctttggaatcctcagcgcataatcttctcagtggatgggaccccaataagagaattcaagaaatggaatcaaaaggagttgcattcccaaaggaacagccaatgaggatatactctagtctatggaatgctgatgactgggcaacaagaggtggacttgtgaagacagattggacacaagctccattcacag

SEQ ID NO: 118421 - DNA, 263 bp, Glycine max
gaaatcctgagcttccattgtgctcactcatctcttacaacgaaaccctcttcatcttgttctatctgtgacgagcatcatggcctcaagagcagtgttattgttggctatgtgtgtgcttccggcgatggttgtgccattcgcccagcaaagaaccctttttgcgtgaagggtcgtgtctactgtgacccttgccgtgctggttttgagacctcagctaccacctacattgctggtgctgagattatgttgcaatgcaagag

SEQ ID NO: 118422 - DNA, 262 bp, Glycine max
ctcacatcatgtatcgcttggcttctaacctcgcttccaaagcaaggattgctaggagtagcagcctcagattggaagtaggctgagtttgagcagaaactatgcggctaaagacattaaatttggtgtggaggtcgggctctgatgcttaagggtgttgaagagcttgctgatgctgtcaaattaaccatgggtcccaagggccgtaatgttgtgattgagcaaagttttggtgcccctaaagtaaccaaagatggagtaa

SEQ ID NO: 118423 - DNA, 262 bp, Glycine max
cgaaaccctcttcatcttgttctatctgtgacgagcatcatggcctcaagagcagtgttattgttggctatgtgtgtgcttccggcgatggttgtggccattcgcccagcaaagaaccctttttgcgtgaagggtgtgtctactgtgacccttgccgtgctggttttgagacctcagctaccacctacattgctggtgctgagattatgttgcaatgcaagagcagggttagcaacgaggttgtgtacacgaagaaggggta

SEQ ID NO: 118424 - DNA, 261 bp, Glycine max
ttctcctaaaacatctcaatgggttcttcttctattacaacatcgcccgcaaccatgaccatggctgcgatcgtgctcctgttcacggtctttgccgtttcctccgccctagacatgtcgataatctcgtacgacgcgcccacgcggacaaggccgccacgttgcgcaccgaggaggagctgatgtccatgtacgagcagtggctcgtgaagcacgggaaggtgtacaacgcgctcggcgagtaggagaagcgcttccaga

SEQ ID NO: 118425 - DNA, 263 bp, Glycine max
ctcaacacaggcatgctcataaggtcaggttataaaaagtactaggtactcggcaaatcttacgccgcctgtttaccaaaaacatcacctctagcatcaccagtattagaggcaccgcctgcccactgacacatgttaacggccgcggtaccctaaccgtgcaaaggtagcataatcacttgttccttaaatagggacctgtatgaatggctccacgagggttcagctgtctcttacttttaaccagtgaaattgacctgccc

SEQ ID NO: 118426 - DNA, 266 bp, Glycine max
aaacatctcaatgggttcttcttctattacaacatcgccctgaaccatgaccatggctgcgatcgtgctcctgttcacggtctttgccgtttcctccgccctagacatgtcgataatctcgtacgacagcgcccacgcgacaaggccgccacgttgcgcaccgaggaggagctgatgtccatgtacgagcagtggctcgtgaagcacgggaaggtgtacaacgcgctcggcgagaaggagaagcgcttccagatcttcaaggacaa

SEQ ID NO: 118427 - DNA, 267 bp, Glycine max
atgagatgctcaaccgcatcaagaaacaaggccttgatatcacccctcgtattctcattatcactcgtcttctcgctgatgcagtaggaactacctgtggccaacgtctagagagggtatatgatactggctattggacattctcagagttcctttcagaacagaaaagggaattgttcgcaaatggatctcaagattcgaagtctggccatacctagagacttacactgaggatgtcggccttgaacttgccaaggagttgcaagc

SEQ ID NO: 118428 - DNA, 264 bp, Glycine max
gtagctattatactctctagagtaattgcggaatctgctagaattttctaataatggcgaaagacgttgagcaggtcacagagcaaggtgaatactccgcgaaggactaccatgaccctcctccggcaccgttgatgacccagatgagctcacaaagtggtccttgtacagagccgccatacctgagttcatagcaacactcctttttctttacatcaccgtgttgaccattattggctacaagagacagagtgacaccaaaat

SEQ ID NO: 118429 - DNA, 259 bp, Glycine max
ctagactcttctttttctctaagtctaaggggtgccctgagatcactttgagcaatggtgaaggctgtggcagttcttggcagcagcgagggtgtcactggaactattttcttcactcaggagggaaatggtcaaccaccgtaactggatctcttgctggtcttaagcctggtctccatggcttccatgtccatgccttgggggacactaccaatggttgcctgtcaactggagcgcatttcaatcctaataacaacga

SEQ ID NO: 118430 - DNA, 258 bp, Glycine max
atgcggaagaccactttagccataggtgatggtgcaaatgatgttggaatgattcaagaagctgacattggtgttggaatcagtggggttgaaggtatgcaggcagtaatggctagtgactttgctattgcccagtccggtttttggagcggcttctggtagtccatggacactggtgctacaagagaattgcacaaatgatatgttatttcttctacttaaatatagcatttggcctcaccatattctattttgagg

SEQ ID NO: 118431 - DNA, 257 bp, Glycine max
ttctctcacatttcattacttctagcaagctattacatcttttccttcctctgtctacatttcatttcattcaaaacaatcatggcatctcttcattccacatgttcaacaaaaaccgtcctttatgcattgtattgttggcctcttccatggcaacttctaccaggattttgacataacatggggagatggtcgtgccaagatactcaacaacggcgatcttcttactctttcccttgacaaagcctccggatcag

SEQ ID NO: 118432 - DNA, 261 bp, Glycine max
gatcaatgcccttgatggtaggaaatcatatgccacacgcaccatctttttcttgacaccacgtggcactctcaagcctgtggctatagaacttagcctccctcatgctggacctaattcccggtcaaagcgcgtgttacacctcctgttgatgctactactaattggatgtggcagctcgccaaggcccatgtttgctccaatgatgctggggtgcaccaacttgttaaccattggttacgtacacatgccaacttggaa

SEQ ID NO: 118433 - DNA, 258 bp, Glycine max
taattgttaaaggaagcgaaagatagattgatcaaattatcgcagaggaattgcagatgggttggagagggatactgggttttgaatatggtatagttcaggccccattaggccctgatatctctgctccccccttgttgctgcagttgccaatgctggtgctcttggacttcttagggcccctgattgggaatcgccggattacttgagggaactcataaagacgactaggaccttaactgataaacccttcggggt

SEQ ID NO: 118434 - DNA, 262 bp, Glycine max
cgagatctaggcgagggccacttcggcaaggtcagcttgtactactacgatccgaccaacgacggcactggcgtgatggtggcggtgaaagcccacaaggcatcgtgcggcccccagcaccgctcgggctggaacacgagatcgccattctgcacacgctctagcacgagcacatgcatcaagtacaagggctgctgcgaggaccaaggcgagaagtcgctgcagctggtcatggagtacgtgcccctgggcagcctccgag

SEQ ID NO: 118435 - DNA, 261 bp, Glycine max
attgaacaactcttcacacaacaaaacttttttctggcattgtagcatcatgactggcagagaaatcctccatatgatgaaggtgaaagcagggtttggaacaccagacacagggaatggaaaaggcaaaattcaaaacacattacacatggctttcacttgatgaagggcaaatcagcgcatcctatggaagattatttagtttcagaatttaagcaagaaaaggacagagaattaggcttgtttgcaatatttgatggc

SEQ ID NO: 118436 - DNA, 247 bp, Glycine max
ggggaattgagaagcggcgctacgatgtttttctgtgttttagaggggaagacacgcgctacaccttcacaggtaatctctatgctgctttgcggcaggcgagattgatgaccttcttcgatgatgggttcagagtggcgaccaaatctttgacgttgttcttcaagcaattcaggaatcaaggatttcaatcgttgttctctccgaaaacttcgcttcttcctcgtggtgccttgaagaactgtga

SEQ ID NO: 118437 - DNA, 254 bp, Glycine max
tttctaatgtcattctcgttctgttcaaacactctctctcacggcatcagataagaagactaggatcggcatcaacgggtttggaaggattggccgtttcgtggccacggctgccctccacaggaatgatgtgaacttgttgctgccaacgatcctttcatcaccactgactacacgacatacatgctcaagtacgacaccgctcacggccagtggcagcaccccgacgtgaaggtgaaggactctaagacctt

SEQ ID NO: 118438 - DNA, 268 bp, Glycine max
tcggatctagagtcttcagtttctcctcgttgttcttcgctttcctgttttcaatttcgattctttcgttaatttaataagatgtttgggagggcaccgaagaagagcgataatacgaggtactacgaaatcctcggcgtctccaagaacgcttcgcaggatgatctgaagaaggcttacaagaaagccgccattaagaatcaccccgacaagggcggtgatcccgagaagtgtaaagagctggcgcaagttatgaggttctgagtga

SEQ ID NO: 118439 - DNA, 278 bp, Glycine max
caaatctgatcaaaaggctacagaaagagcaattgacttcatgtatggatggtttatggatccattaacatctggagactatcccaacagcatgcgatcacttgtgaggacaaggttaccaaagtttactgcagaggcaatccagactacttatttgttcattttattttcttggcctaaactattactctacaacatatgcctctgacggacctgatctaagcgaagcccgtcctagctacttaacagattctcttgtcactcctgcatatgaacgt

SEQ ID NO: 118440 - DNA, 184 bp, Glycine max
tgctgagattgtggagtctgcggatacatacttgtctactggtccaacttatactgactacagctctgtggcgtattcacttcatctcaggaaggacatagcgatcaatgctgcagcctgatcccagtatacatccgacgaatgcacctgctattcggtcgtgtggctgatgaagggttgcctc

SEQ ID NO: 118441 - DNA, 276 bp, Glycine max
ctggtcttattgatgatgtagccttgaattgtcttgcttgggttagtggatctgattatgccgtgctatcgtgtattaataaaaggttcaataaactgatcaatagtgggtatctatatgggttgaggaaacaattgggggctgtggagcatttggtgtatatggtttgtgatccaagaggatgggtggcctttgaccccaagataaacaggtggatttctgtacctaagataccttgtgatgagtgctttaatcatgcagacaaggagtccttgg

SEQ ID NO: 118442 - DNA, 278 bp, Glycine max
tgcagttatggaatgttgcgtttcacagtacttctccgagatgggttcactctgtgtatttggctgccattgcggctgactatgccagggaggtggaggcggggctgatggagtacaagccagatagcatcatcagtgtccatcgctggatgcggcatatgccatggtgggttgctagagtggcaaggtgtgcaggggagagtgatttttgtcacagtgatcacggaccttagcacatgtccagcctaattggtcgcatccttgggtgaatagatgtt

SEQ ID NO: 118443 - DNA, 230 bp, Glycine max
caggagacattcttgtggggtaggtactctatggaaatgtccgctgtcatttgacaaggactgggttttcactgatcaagcattagctaatgatcgtgtaaagagaggagttgctgttaaggagccatctgctccccatggagttcgtctttggattgaggactatcctgatgcttctgatgggctagagatatgggatgccatcaagtcctggggtgcaagaatatggc

SEQ ID NO: 118444 - DNA, 265 bp, Glycine max
gtcaaaggacttggaagaaaaggccgagatgaagaagatgtacggcctgatcgagacctacaagttgaacggccaattcagatggatttcatcgcagatgaaccgtgtgaggaatggagagctctaccgcgtgatctgcgacaccaggggtgctttcgtgcagcctgctgtatacgaggcttttggtttgacagtggttgaggccatgacttgcggcttgccaagattcgccacatgcaatgtgggtcctgctgagatcattgtg

SEQ ID NO: 118445 - DNA, 261 bp, Glycine max
attcgatatggaagttgtccagcttggtgactcttgatttgtctgagaatcggattatggccctacctgctacgattggtgggctttcgtcgttgaccagattggacttgcattccaatagaatcacggagctgcctgattcttttggtaatctgctgtagtctggttgatctggatcgtagggtagatcagttaacactatggccggcttctttgtagcaggttggtgcgtctagaggagctcgatttgagttcaaatca

SEQ ID NO: 118446 - DNA, 267 bp, Glycine max
tgtatgattgcctgaaaccagtagttttggttggtgggttgcaggatagtgtctttgctagtttccttttgggatggggaatcacaattggtgctggtttggcttcttatcccattgacactgttcgaagaagagtgatgatgacttcgggagaagctgtgaagtacaagagctcttttcatgcagtccagacaatcgtcacatatgggtgtggggagtgactcttcaaaggtgctggtgcgaacatagtgcgtgctgttgcaggtg

SEQ ID NO: 118447 - DNA, 268 bp, Glycine max
agagcattgggtatatataacaagtataatgaagttccctctgtgatggctgcaaagattttggcatgctttcttgtggtgatcttggtttgggaaatccctggattctttgacatattttggagcccatttgctttatttgtgggttatactgatcctgcagagcctgatctccctcgaatgcatgagtggcatttcagatctgggcttgatcgctacatctggataattggaatgatttatgcctactttcatccaaatgttgaga

SEQ ID NO: 118448 - DNA, 270 bp, Glycine max
caggagggtctggtgtttacccgtatggacgcctgagaataatgtccagatatcctgtaccaaatatgtgatgtgactaagcgagagactgatctatcatctgcggagttcatagagaaatttgggatgtccaaggatgccttttacaagttacccaaatggaaacaaaacaaactcagaatggctgttcagtgattctgattgcttgagagtgttcttagcctgcggtcagctccctgcagtgaggtttcagtgaggaactagacatgt

SEQ ID NO: 118449 - DNA, 225 bp, Glycine max
ctcgcggcacccacacacacagttcgtcggaatggtaagggtgattcgcgctcagcgtaatggtgctggttcggtgttcaagtctcacactcaccaccgcaagtgtccggcgaggttccgcatcctcgacttcggcgagcgcaacggctacctcaagggcgtcgtcaccgacatcatccacgaccccggtcgcggcgcccctctcgccaaggtggcattccgcca

SEQ ID NO: 118450 - DNA, 271 bp, Glycine max
ctggagtgcagatcgtcccccgggcaatgaaccatgagattggaacatcaggaggaaaatatcggcgggggcagctaaagtagtggaataccttgcacgacagagcaaaccctcctgtcagtgatagagacggcatatgcagcgaggatattactggatgtaaggttagcgatccaaagcgttcagacggtggtcttgcaaagcttgttccgagtggtgacaaatcacacggttcataccgtgtcatgggaacttatgggtacggtgcccc

SEQ ID NO: 118451 - DNA, 245 bp, Glycine max
cggcggcaacagggagagaagatgaagttcaatccacgtgtgtcgagcagccgccgcaagagccgaaaggctatttcacggcgccatcgagcgtgcggcgggtgcttatgagcgctcctctctcggcggagctgcggtctaagtacaacgtgaggtcgatcccagtacggaaggaggacgaggtgcaggtgatgcgaggaacatacaagggtcgcgaagggaaggtgactcaggtctaccgtcga

SEQ ID NO: 118452 - DNA, 262 bp, Glycine max
gcaaaaagaaagaatcccaggcgaggagaaagatggaggggaatgagcaggatgtgtcgttgggagcgaacaagttccccgagagacagccgattgggacggcggcgcagagccaagacgacggcaaggactaccaggagccggcgccggcgccgctggttgacccgacggagtttacggcatggtcgttttacagagcagggatagcagatttggtggccacttttctgtttctctacatcaccgtcttaaccgttatggg

SEQ ID NO: 118453 - DNA, 265 bp, Glycine max
  unsure (1)..(265): unsure at all n locations
gntcctgttgggaaggnttctgtcgaaatggcaaaaaatcttcctagggaaatgctgattaatcttttnaattgtntggaatcaacctttgcgatatgtcttgtttgcaacgntcctcctgaagagcctgttattacgatgtgtggtcatgtcttcngttatcaatgngtancagaatatttgactggtgatgataatacgtgcccgtcagttaattgtaaagaactaantggcgatggatcttgttttctccanagctactttg

SEQ ID NO: 118454 - DNA, 269 bp, Glycine max
gtgccttctctgggatggatcctaccaagggttgatatgagtggtgcctacattgtgaggcaagctgcaaagagcattgttgcaaatggacttgctaggagggcaattgttcaagtttcctatgccattggtgtgcgctgagcccttgtctgtgtttgttgacactgatggcactgggaagatccctgacaaggaaatcctcagcattgtgaaggagagttttgacttcaggtctggcatgatctccatcgaccttgagctcaagaggg

SEQ ID NO: 118455 - DNA, 273 bp, Glycine max
atagtcagtcaatatatgtaagctttgaagatggaagtattggcattcttactgtccctgcgctcagattaagatgtagaataaatcaatctgcttatctccatcccaacccaagcttgagagtgcatcctcttgtgattgctgcacatccctccgaacccaatcaatttgcattaggactcaccgatggtggagtacatgtacttgaaccactagaggcagaaggaaaatggggtactccacctccgaacgagaatggtgccgggcctagca

SEQ ID NO: 118456 - DNA, 274 bp, Glycine max
atgaagtctttccatctcagagttacagctttgtgctgtgtagtggttgtgcttggagtgcttccactctccctagatggacaactagatccctcctttgacagagacacttgtcccagggttcactccattgttcgtgaagtcgtcaggaacgtttcaaagaaagatccccgtatgcttgctagtctcattagacttcactttcatgactgctttgttcaaggatgtgatgcatcaggtttgttgaacaacactgccaccatagagagcgagc

SEQ ID NO: 118457 - DNA, 262 bp, Glycine max
tcaactaccagtggtcatgtgatctacaagcttggaggtattgacaagcgtgtgattgagaggttcgagaaggatgctgctgagatgaacaagaggtcattcaagtatgcctgggtgcttgacaagctcaaggctgagcgcgaaagaggaattaccattgatattgctttgtggaagtttgagaccaccaagtactagtgcacagtcatcgatgcccccgtacatcgtgactttatcaagaacatgattactggtacctccc

SEQ ID NO: 118458 - DNA, 274 bp, Glycine max
ctaatatattccattctctctgtgtattgccctacctctcgcttcaagatgcagatgcttcgtcaagactcgcaccggcaagaccatcagccgtgaggtgtatagctcggacaccatcgacaacgtcaaggccaagatccaggacaaggaaggaatccccccggaccagtagcgtctcatgttcgccggaaagctacttgaggacggccgtaccctggctgactacaacattcagaatgagagtactcgtcacctcgtcctccttctccgtggt

SEQ ID NO: 118459 - DNA, 239 bp, Glycine max
tcttcagttctcgttgttgtgctgcgctgtccttgaactaggggttttcaatttcggttcagtcgttgataattaaatatgtttttgagggcacctgagaagagcgagaatacgagttactactagatcctcggcgtctcgaagaacgctgcgcatgatgatctgaagaatgcttactagatagccgccatcaagaatcaccctgacaatgtcggtgatcccgagaagtttaaagagct

SEQ ID NO: 118460 - DNA, 261 bp, Glycine max
tggagaagttacatatgttggaagcttagtagacaatttcaaggttggagacaaagtagctgcgggatgtcttgtttgtgtcctgctcactcatgccggaactgtgtcaacaatcttgatagttattgccagcaagtgattcccacatattgtgcaaagtatgtggatggcaccatcacatagtggggattctcagactgcagtgtatcagatgagcactttgttgtcaacattccagtgtgccctacctctgtatgctgc

SEQ ID NO: 118461 - DNA, 280 bp, Glycine max
ctctagcgcgagcgcaaaggtgaagctcatgctcaggattggagaggcatagcctcgagccctgccagacacggtggattgattctcgcggcgtttgttctggggttgcaagctgtcgaggtaatggcaatatgcgcagtgcggaacaatctgataacctacgtgacgattgagatgcagtgcccgttgtccaaggctgccaacctagtcactaacttggtggggaccatctgtctccgcgccctcctcggcggctatctgtccgactcttacgtcggct

SEQ ID NO: 118462 - DNA, 146 bp, Glycine max
atgaagtcgttccatctcagagtgacagctttgtgctgtgtagtggttgtgcttggactgcttcgactctccctagatggcacaactatatccctccttttacagagacacttgtcccagggttcactccattgttcgtgaagtcg

SEQ ID NO: 118463 - DNA, 263 bp, Glycine max
gtatgcacgctgagcatggagcacagaaccctataactcaacctggcttcagcaagaggatgtcaaagactggaatatattctcaaagatgtatgtagatgctgtgctttcagtctccggcgatcaagagagcaagactcccgtcgacagaaacggcggcaccaacccaacatggaattttccggtcaagttcacttgtgatgaatcggtggcgcggcataaccgtttggccctcgaaatcaagatccgctccgatcgcgccc

SEQ ID NO: 118464 - DNA, 254 bp, Glycine max
tgtatgattccctgaaaccagtagttttggttggtgggttgcaggatagtttctttgctagtgtccttttgggatggggaatcacaattggtgctggtttggcttcttatcccattgacactgttcgaagaagagtgatgatgacttctggagaagctgtgaagtacaagagctctttgcatgcattccaaacaatcgtcgcaaatgagggtgccaagtcactcttcaaaggtgctggtgcgaacatattgggt

SEQ ID NO: 118465 - DNA, 268 bp, Glycine max
atcaaccttcgtgtcttgcaggttcgtgatcattttcattaccagaaggtgggtggcaaattgcaatggctaagcatgatgttgatggtggttccttctctgcaaaggactatgatgatcctcctccagcaccattgattgatgctgatgaactcacacagtggtccttctacagggcttgtattgctgagttcatggccacaatgctcgtcctgtacgatcacagtgctcactttgattgggtactgtagccagattgatgtaaagt

SEQ ID NO: 118466 - DNA, 238 bp, Glycine max
cggccaatgagcttgctgcttctgctcagtgccttggcagggtcttgagggcattggtgggcgaagataagcttgttgtgtccacctcctcctcccgtcttcacactgctgttgatctagttaacgagaccaagttggatgatgagatcaagtcatggctagcttttgctgcccagaaaattgttgaagttaacgcattggctaaagcagtgtctggccacaaggatgaggccttctt

SEQ ID NO: 118467 - DNA, 266 bp, Glycine max
ttcatggttcatggaaaaccaagatgcgtcaagagtttggccatggtggctggtggtactcggatcacgcccattgaccaagtggcgcaacgtattttgaaggacccatgagtaccacaccgaaatgcatgtagtgtatgcgaatcgcacagaggatgatatattactgagggaggatttggatgagtgggcgaagatacataatgaccggttcaagctatggtacgtggttgaaatcgcaaaggaagggtggaaatacagtgtag

SEQ ID NO: 118468 - DNA, 186 bp, Glycine max
cattaacatcaatggactcgcaagacaatcactcatcaattcaggtgggcattattgagcaatcatttctgcctgggccatttgctgtggagatgtcttcggcagtttacaaggggtgggttttcactgatcatgcccttcctgcggatcttatcaagagtaggaatggtattggaggatccatcc

SEQ ID NO: 118469 - DNA, 172 bp, Glycine max
tcttgtaagtccctgctgcctcctctgccctgtgttgctgtggtaggcactcagcaataatcctcggttctctgtgctgtcttaggtccctgtcctctgtgcgggaggcggtttaggaagcaagagtccggatctttcatgctgcacaatatgagcatgcaaaaagcttttt

SEQ ID NO: 118470 - DNA, 240 bp, Glycine max
ctttgttgcgatatcacgtacacctcgtccgtcacaatgcatctagctgtggcggccaacgctggcgtttcaccgtcgccgttccgacgtcatccccttctccggtcatccttctccggcgtctccgttaagctcactccccaatccataacgttttcacgcttgaagcccctcaccgtcttcgccgccaccaagaaggccgtcgctgtcctcaaggggacctccgccgtcgaaggcgtc

SEQ ID NO: 118471 - DNA, 255 bp, Glycine max
tctctcactcgcgaacacacactgaactagagaacatcattggagtcttggcggatgagtccttcagcattatcatgccttattgcgtccaaagaggccttattggcgagatcattagcagatttgatggtgtaggtgtctactttgaaaggtgtgtaactgttactttggacctgcgtgttgtcttataagcactatgctgatttgtctgccaagcctttctttagtggtgtggtggattacatgatctctggc

SEQ ID NO: 118472 - DNA, 264 bp, Glycine max
ttctgctcgagcgttacgattggtcaatgcagttctcctggactgtgctgggaaagatggactaagtgagagctctgtgagggatcttctccatggatctgaatatgtgcttacatatgaagacagagatggagattggatgcttgtgggtgatgttccttgggagatgttcactgattcatgtcggagactaaggatcatgaaaggctctgaggcaattgggctagctccaatgtccatggaaaaatctaggaggcaaaacta

SEQ ID NO: 118473 - DNA, 259 bp, Glycine max
tgtgagtttgttgatcgagatggctagaagcagtgtgatgaaaatgaaggtccttgttgtcttgcgttgctacaattttggtagcatggcaatgccatgcgtacgatatgttccctctccgaatgaacactggctatggtgcccgtactccggaggtgaaatgcgcaagttggaggcttgctgtggaagcacacaacatctttggctttgagaccattcctgaagagtgcgttgaagcaacaaaggaatacatccatgg

SEQ ID NO: 118474 - DNA, 257 bp, Glycine max
aggctcgaggcccactgtaaggagtataaaaatctgaattccttttttgccatcgttatgagactaagtaacgttgctgtgagccgcttggcactaacgtgggagaaactggccaggcaagttcaagaagttctatgcggagtttgaaagtgtaatgcgcatgattgcaaatacggcactacagtgagatgctacaggagccaacccttcaatcctgatgcaactcatgctagtaagaaggagcaggatttccggag

SEQ ID NO: 118475 - DNA, 263 bp, Glycine max
cagcacaaagcgggttactgtctgttcaagctaccatctctctctctctttcttagtgcctccttgccagaagttaaaatggcccaagaaactttcctattcacatctgaatcagtgaacgaggggcaccctgacaagctctgtgaccagatctccgatgctgtgctcgatgcatgcttggagcaggaccctgacagcaaggttgcctgtgaaacctgcaccaagaccaacatggtgatggttttcggagagatcacaaccaa

SEQ ID NO: 118476 - DNA, 117 bp, Glycine max
caaatgttaaggaataaggttcctgtaactggtctgaagacaccattccgagacggtttgctgaagcatgttgctgaagatgttctaaagttggcgaaggatggcttggagagaaga

SEQ ID NO: 118477 - DNA, 255 bp, Glycine max
catgggttcaacaggtgagactcagattactccaacccatgtatctgatgaagaggcaaaccttttcgccatgcaactagccagtgcctcagtactccctatggttctcaaatcagctcttgagcttgatctgttggaaatcatagccaaggctggccctggtgttcacctttccccctccgacattgcttctcggctcccaacacacaaccctgatgcacccgttatgttggaccgtatattgcgcctcttggc

SEQ ID NO: 118478 - DNA, 261 bp, Glycine max
aagacacactcgttcatatatctctctgctcttctcttctcttctacctctcaagtttttgaagtataaagatgggagagacattcctattcacctcggagtcagtgaacgagggacaccctgataagctctgcgaccaaatctccgatgctgtcctcgacgcttgcctcgaacaggacccagacagcaaggttgcctgcgaaacatgcaccaagaccaacttggtcatggtcttcggagagatcaccaccaaggccaacg

SEQ ID NO: 118479 - DNA, 246 bp, Glycine max
ttcatcctcaaataagccacatgtacccttctgacaaagctgtgtaaagtattagaatctgatgctgtagaaagatcctagttgcctttgtgtatatttactgcctgcttgtgtgtttctatgtgtgggttttccctgtatcttgtagaaatgttggggtgttttcctctgccatatggctcgtggcctgcgagcgaactatttcaagtgtagtttaccttcatttttgatgaggtgatttaaatt

SEQ ID NO: 118480 - DNA, 214 bp, Glycine max
cctttgttcactcttcttctcttgcggctagggttttagcgcagttcttctagatttaagggcgatgggtaaggaaaaggttcacatcagtattgtggtcattggccatgtcgactctgggaaatccactaccactggtcacctgatttacaagcttggaggcattgacaagcgtgttattgagaggtttgagaaggaagctgctgagatgaac

SEQ ID NO: 118481 - DNA, 225 bp, Glycine max
cttgaagcaattcctctggatgatgccactcaaccctcttgtttctttcagcttttcggtgctctgaaagagctcaagagaccgatgtggatgctgatgctggtcacagctgtgaactgggtggggtggtttccttacttccttttcgacactgactggatggctcacgatgtctacggtggacactgctggggaggacgcgtacgcgaagggagtgcgcgtggg

SEQ ID NO: 118482 - DNA, 243 bp, Glycine max
aagcaatggcagcgggataatttagagtcactgatattacgagaggggtctttttgtaaacctccttttcaatgtcaaagcaccaatttataaaacgctgcagatgtagaggttatgtgcaactgatctgtccagtttgtgtatgaaatggatttgataaagtttttgctagttatttactacattttgggattaataagtgcattatatgcatatttttccggaaatctacagttttttgta

SEQ ID NO: 118483 - DNA, 259 bp, Glycine max
ggaagtgattgtgatgttattgcacacctgtacgaggcatacatggagaagactttgtggacatgctggatggtatcttctcatttgttctactggacacccgtgacaacagttttatagtggctcgggatgctattggggtcacttccttgtacattggatgggggttagatggctctgtttggatttcatcagaaatgaaaggcctgaatgatgattgtgaacactttgagtgttttccacctggtcacttgtactc

SEQ ID NO: 118484 - DNA, 252 bp, Glycine max
gttatgtacaaactagtttttatagctatcaacattaggagtaactttcaaccttgccagcatcactggtatgatgtatatttaattaaagcacacttttccccgaccgtatacttaaaatgacaaagccattcttttaaatatttgtgactctttcctaaagccaaagtttctgttgaattatgttttgacacacccctaagtacaaggtggtatggttgtatacacatgctgccttcttggggattcaaa

SEQ ID NO: 118485 - DNA, 252 bp, Glycine max
gcgtcctattgaagtgcctgaaactggtctactatgtgacctcctttggtctgatcctagtagtgacattcggggttggggagagaatgaccgcggagtttcctatacttttggtgctgatagggtgacagaattccttcagaagcatgatcttgatttgatttgcagggcccatcaggtcatggaagacggatatgaattctttgctaacaggcaacttgtaaccatcttctcggctcctaattactgtgg

SEQ ID NO: 118486 - DNA, 250 bp, Glycine max
tgctcttactggaaacaccaaaaaggtaacaaaagagaactgtatgagggttggtatggatggccttatattgaaacctgtttctgttgacaaaatgaggggtgttttatcagaactattggagcgccgagttctgttcgaaagtgtttaacctgttagattgttgtacatagctatatcaaatttggagaagagcacaaacttatgaagcaatgaggcaattgacattagttgtcatcctttttgctgt

SEQ ID NO: 118487 - DNA, 255 bp, Glycine max
gtgcccggtaatcgcataaaacttaaaactttacagtcagaggttcaattcctcttcttaacaacatacccatggccaacctcctactcctcattgtacccattctaatcgcaatggcattcctaatgcttaccgaacgaaaaattctaggctatatacaactacgcaaaggccccaacgttgtaggcccctacgggctactacaacccttcgctgacgctataaaactcttcaccaaagagcccctatgacccg

SEQ ID NO: 118488 - DNA, 139 bp, Glycine max
cggctcgagcctccataaacctggagtgactacatggatgccccccaccctaccacacattcgaagaacccgtatacataaaatctagacaaaaaaggaaggaatcgaaccccccaaagctggtttcaagccaacccca

SEQ ID NO: 118489 - DNA, 270 bp, Glycine max
gataataaagtgcctataatcatgattggtcctggcactggattggctcctttcagaggtttcttgcaggaaagattagctctgaaagaaggaggagctgaactcggcccctcagttttattctttggatgcaggaaccgtcaaatggactacatctatgaagacgagttgagtcacttcgttaatactggcgcacttgatgagctcattcttgccttctctcgagagggacccaccaaggagtatgtacaacataaaatgatggagaag

SEQ ID NO: 118490 - DNA, 270 bp, Glycine max
cttgagaccatggcgcatagcttgaaatatccaggaggtattatagagcatatagctggagatttgaatgccgattctgttcttggcacagcagatgtagtgatatatggatcctttcttgaagaacagtcttttccagagattttgatcaaagccatgtcctttgagaaaccaattattgcacctgatgttcccatgatcagaaaatatgttgatgacagggtgaatggctatcttttcccaaaggataatattagagttctgagacaa

SEQ ID NO: 118491 - DNA, 271 bp, Glycine max
ggaggtggaactggcatgaatctcttccatcgccgtttcccaacaagatgctttgatgtggggatagcagaacagcatgctgttacatttgctgcaggtctggcttgtgaaggtcttaaacctttctgtgcaatttactcatcattcatgcagagggcttatgaccaggtggtgcatgatgtggatttgcagaagctgcctgtaagatttgcaatggacagggctggattagttggagcagatggtcccacacattgtggttcttttgatg

SEQ ID NO: 118492 - DNA, 267 bp, Glycine max
attgaaggaaaaatcaatgcaaggaacagtgatccaagtctgagaaaccggactgggccagttcagctgccatacactttgctccatcgttcaagtgaggaagggttgactttcaaaggaattcccaacagtatctctatctaattaaaaagagtttgtggtttccttatctatgttgtacttctgaataacatagactttatgcatgtctatgcgtaattattgcctgaacttctgcactattgtatttggatgctctcggttttc

SEQ ID NO: 118493 - DNA, 136 bp, Glycine max
cggctcgagcctccataaacctggagtgactacatggatgcccgccaccctaccacacattagaagaacccgtatacataaactctagacactaacggaaggaatcgaaccccccaaagctggtttcaagccaacc

SEQ ID NO: 118494 - DNA, 277 bp, Glycine max
ccccactcaaccaccacacctctcctcgttcacgctacccctttctgctcttcttctacctttcaagttttaaaagtataaagatggcagagacattcctatttacctcagagtcggtgaacgagggacaccctgacaagctctgcgaccaaatctccgatgctgtcctcgacgcttgcctcgagcaggacccagacagcaaagttgcctgcgaaccatgcaccaaaaccaacttggtcatggtcttcggagaaatcacgaccaaggccaacgttga

SEQ ID NO: 118495 - DNA, 273 bp, Glycine max
caaacttgtgcggttgcatgctatagcattgctgttggaggaggatttgcttcgtatctgttgggattaaacaggacgacttatgagttgtcaggagttggaaacgagggtaataatccaggtgctatcaaagaacctggatttggttggatgactggcttcctttttgtggtttgctttgttggtctcttggccttgattccactcagaaagatcatcatagttgacctcaaattaacttatccaagtggcttggcaacagcagttctcatc

SEQ ID NO: 118496 - DNA, 268 bp, Glycine max
gtccaaggaagctcgaagcaggtttaggaccaggtccccttgagaggtcagaggggcctgtgtgggtgctgggtactccagaggtgccactggtggaagggtcagcggagcccagcaggaagggtgggccagccaggccattcttagtccctgggttggggaggcagggagctagggcagggaccaaatgaacagaaagtctcagcccaggatggggcttcttcaacagggcccctgccctcctgaagcctcagtccttcaccttgcc

SEQ ID NO: 118497 - DNA, 268 bp, Glycine max
cgctgctcatctggtcaacaaagactatctagctaaatacgagaaagccgttaacctgatgaaaaatctcccgtcagatgatccacgtagtttcgcgcaacaagccaaagttcattgtgcttattgcgacggtggatatcaccaactaggcttccctgaccttgatctcgaagtgcacttctcttggctcttctttccttaccacagatggtatctctatttccatgaaaggatattggcgagcttgatcaatgatccaacctttgct

SEQ ID NO: 118498 - DNA, 263 bp, Glycine max
cagtgagccaagatcacgtcattgcaacctctgcctcccagagccggggtttcaccgtattagccaggatggtctcaatctcctgacctcgtgatccatccgcctcgccctcccagagtgctgggattacaggcgtcaccaccgtgaccggctcagactgtactctcctagccatctgaaatacgttttctagggaaatgtttcaacgtgcgcaacgttgcggcggcgggcagaggactactacagatgcaaaatcccccctt

SEQ ID NO: 118499 - DNA, 268 bp, Glycine max
gaacaattactttagtgttttctcatgtcacataaaagtcatctaagaagaattacaagatcatcatcacaataacaagatgagttcaggaattagagcatggagtgtggcagcaagtgttggaattgtggaggccttgaaagaccaaggcatatgcaggtggaatcatgccttaagatcatctcaacaccatctcaaaaaccatgttggctcattctctcaggctaacaagctttcttcttctgctatgatatccacaacactaaaa

SEQ ID NO: 118500 - DNA, 265 bp, Glycine max
gccgatacaataggcattgcaatgcgaagagttttactcggagaaatagagggaacatgtatcacacgtgtaaaattagaaaacataccacatgaatattctaccataataggtattgaagaatcagtacatgaaattttaatgaatttgaaagaaattgtattgagaagtaatctgtatggaactcgggacgcgtctatttgttacaaaggtcctggatatgtaaccgctcaagacatcattttaccaccctctgtggaaatcg

SEQ ID NO: 118501 - DNA, 270 bp, Glycine max
ctagccgcagcagcctcaggaggagaataaggatgtctcacaggaagttcgagcacccaaggcacgggtcactgggatttctccccaggaagcgtgctgctcgtcacaggggaaaagtgaaggcattccccaaggatgacccatccaaggcacccaagctcactgcattcttgggttacaaggctggtatgactacacttgttagagaggtcgagaagccaggatcaaagcttcacaagaaggaaacatgtgagcctgttacaattattg

SEQ ID NO: 118502 - DNA, 266 bp, Glycine max
ggacctagtcctaaagggttgctccgccgatcccattcaagaggttaccggcaccaagtcttgctccgaccaacacgccgatctcgaggctcaagactatgccggcgtgacccccatgcgccgcctcaccatgcggcggttccgtcagcgttacatgtactattcatattgctatgatactttaaggtaccctgtgccacaacccgagtgtgtcattgtaccctccgagaaacaaaggtttaaggagaccggaaggttgaaatttg

SEQ ID NO: 118503 - DNA, 265 bp, Glycine max
gttcattctctttgcgcagttccctacctctcctttcaagatgcagatcttcgtcaagaccctcaccggaaagaccatcacccttgaggtggaaagctctgacaccatcgacaacgtcaaggccaagatccaggacaaggaaggaattcccccggatcagcaacgtctcatcttcgccggaaagcagctcgaggacggccgtaccctcgccgactacaacatccagaaggagtcaacccttcaccttgtccttcgtctccgtggt

SEQ ID NO: 118504 - DNA, 266 bp, Glycine max
cgcaggtaagacagagagaaagaactgacctcagcggcggcggcggcggcaacagaagaacaaccaccaccacacacaatgggtcgcgtgagaacaaaaacggtgaagaaatcctcccgccaggtgattgagcgttactactcgcgcatgaccctcgacttccacacaaacaaaaagtctctcgaagaagtggccatcatcccttccaagaggctgcggaacaagatcgcgggtttctccacgcatctcatgaagcgcatccagaa

SEQ ID NO: 118505 - DNA, 266 bp, Glycine max
gaagtagatgatcaagtttcggattcttcttctgatgaaagaacacgatcgagcacacctcagaaccataacattgaagctggagctagagatggtgcgagaaataacaatggtaaaagccagttgggtagggaagagagtccagactcagaatcacaaggttggagtcccaataagcttcagaaaatgaacccttccaaccctatggatcaatccactgcagaagccacaatgagaaaagctcgtgtatcagttcgtgcccgatc

SEQ ID NO: 118506 - DNA, 273 bp, Glycine max
ccaatatattccattctctctgtgtatttccctacctctcccttcaagatgcagatcttcgtcaagaccctcaccggcaagaccatcacccttgaggtggaaagctctgacaccatcgacaacgtcaaggccaagatccaggacaaggaaggaatccccccggaccagcaacgtctcattttcgccggaaagcaacttgaggacggccgtacccttgctgactacaacattcagaaggagagtactcttcacctcgtcctccgtctccgtggt

SEQ ID NO: 118507 - DNA, 263 bp, Glycine max
aagaaaatgtggcttgtgcagctctcaaccccatttctgaacggacatggtcattccaccacccttctctccaagcacagttcggcggtgactcagacccactgggccccaccgagtttcctgcctcaaatcaatgcgatgaagacaatgcaggggagagtggtgtgctccaccagcgacaagacggtggcagtggaggtggtgcggctggcccctcacccaaagtacaagaggcgcgtgaggaagaagaagaagtaccaggc

SEQ ID NO: 118508 - DNA, 257 bp, Glycine max
ggcaaagctgaagcctgcattccagaaagatggaaccacgacagcagggaatgctagccaaattagtgatggtgcagcagctgtgctcctcatgaagagaagagtggctgtgcaaaaggggcttcctattcttggaatcttcaggagttttgctgctgttggagtagatcctgcagtcatgggtgttggccctgctgttgctatcccagctgcagtgaaatctgctggtcttgaacttggcaacattgacttatttg

SEQ ID NO: 118509 - DNA, 261 bp, Glycine max
ctcaagtccaacctacccctttttcttctcccaccaacttcaccgtcttcttcctcgatcatgtctcacttcaagggcaagtaccatgatgagcttattgccaatgctgcttacattggcactcctggaaagggtattcttgctgctgatgagtcaacagggacaattggcaagcgtttggccagcatcagtgtagagaatgttgaatccaacaggcgtgctcttagggagctgcttttcaccgctcccggtgctcttaaa

SEQ ID NO: 118510 - DNA, 262 bp, Glycine max
gttgggagctctccaaagaaactggttggttttaagaaaatagtttcaagaagttcaactatattcttttagatattatgtattgttttactctgattaggttactgtgataggcatttattcatattctttctataccactgtcattaatatattaaaaagatgtatgtgttagactatcgaaagggccttattctctctttctcatagactgaccttcttttggaatttctgagtcatttattttccttagctttttcca

SEQ ID NO: 118511 - DNA, 265 bp, Glycine max
gaagtagatgatcaagtttcggattcttcttctgatgaaagaacacgatcgagcacacctcagaaccataacattgaagctggagctagagatggtgcgagaaataacaatggtaaaagccagttgggtagggaagagagtccagactcagaatcacaaggttggagtcccaataagcttcagaaaatgaacccttccaaccctatggatcaatccactgcagaagccacaatgagaaaagctcgtgtatcagttcgtgcccgat

SEQ ID NO: 118512 - DNA, 266 bp, Glycine max
atccaattccaaagagatgctatgattccaattaaaaattcgttaggtcctttaggaatagcccctcaagttgcccattttgatttttaccgtttaataactcataatcagatctcgataattaaaaatgggcaacttgacaaattaaaagaaacttttcaagtattccaatattatttcctggacgaaaacgagagaatttataaacctgatctgtgtagtaacatcattttaaatccattctatttgaattggcattttctcca

SEQ ID NO: 118513 - DNA, 259 bp, Glycine max
cttagccatggcagcgtgccagaagatcaaggtcgccaaccccatacgtcgagatagacggaaatgacatgactagggttatctggaagtcaatcaaggacaagctcatttcgcccttcttggagttggacatcacgtattatgacttaggccttccttaccgtgatgagaccgatgatacagttacgattgcaagtgcggaagcaatctcaagtataatgtggcaattaagtgcgcaactattactccagatgaagct

SEQ ID NO: 118514 - DNA, 255 bp, Glycine max
cttagccatggcagcgttccagaagatcaaggtcgccaaccccatcgtcgagatggacggagatgaaatgactagggttatctggaagtcaatcaaggacaagctcattttgcccttcttggagttggacatcaagtattatgacttaggccttccttaccgtgatgagaccgatgataaagttacaattgaacgtgcggaagctactctcaagtataatgtggcaattaagtgcgcaactattactccagatga

SEQ ID NO: 118515 - DNA, 259 bp, Glycine max
atcaatggggagccaatccagcggcttggtgcttacatggtagaagggcttgttgcaaggacgcaagcatcggggaatagcatctatcatgcccttaggtgcaaagagcctgagggtgatgaattgctcacttacatgcaactgctgttcgaaatctgcccctacttaaaatttggttacatggctgccaatggagccatcgcggaagcgtgcagaaacgaggatcgcatacacatcatagacttccaaattgctcagg

SEQ ID NO: 118516 - DNA, 265 bp, Glycine max
gtttgttgtgagctataagctagtttatcgtgaggagaatatgaagttgtttgttttctttgttgctgcagtagttttggtagcatggccatgccatggcgcaggctaccaaaggttccctctccgaatgaaaactggctatggtgagcgttcttcggaggtaaaatgcgcaagttttaggcttgctgtggaagcacacaacatccgagcctttaaaaccattcctgaagagtgcgttgaaccaacaaaggactacattaatggc

SEQ ID NO: 118517 - DNA, 258 bp, Glycine max
atcaaattcaaagagatgctatgattccaattaaaaattcgttaggtcctttaggaatagcccctcaagttgcccattttgatttttaccgtttaataactcataatcagatctcgataattaaaaatgggcaacttgacaaattaaaagaaacttttcaagtattccaatattatttcctggacgaaaacgagagaatttataaacctgatctgtgtagtaacatcattttaaatccattctatttgaattggcatt

SEQ ID NO: 118518 - DNA, 257 bp, Glycine max
cttctacctctcaagtttttgaagtatagagatggcagagacattcctatttacctcagagtcagtgaacgagggacaccctgacaagctctgtgaccaaatctctgatgctgtcctcgacgcttgcctcgaacaggacccagacagcaaggttgcctgcgaaacatgcaccaaaaccaacttggtcatggtcttcggagaaatcacgaccaaggccaatgttgactacgagaagatagtgcgtgacacctgcagga

SEQ ID NO: 118519 - DNA, 233 bp, Glycine max
  unsure (1)..(233): unsure at all n locations
ctggggttaaagaacatgtcaaaatggagtanctgaagcaacccctaaaagattcacttctcgttttcctttttaaggaacatttgtgggttacagcaaaatatgtagataaacgtgtctgacatcattacatttttcgaatttgattcgtgtattctantgtttccatcctttgaaccgagttgttcctaagattcataatcgtaccatgtttctttttaatgagatgaaaa

SEQ ID NO: 118520 - DNA, 277 bp, Glycine max
caattcaataccatttaccaaactcactcatcaattctcatctttcttctcactaactattaattcatcatgtcgagcacagctggccaagtcatcaaatgcaaagctgcggtttcatgggaggcacggaagccagttgtgattgaagaagtagaggttgcgccaccacaagctggtgaagtgcgtttgaagatcctctacacctctctttgccacactgatgtttacttctgggaagctaagggccaaactccattgtttcctcgtatatttggtc

SEQ ID NO: 118521 - DNA, 273 bp, Glycine max
gaacgccattgatgccaaaccgaagcttcgagacttacatcttcgcgctcttcaatgagaaccaaaagcccggcccaatagtcgaacgcaactggggcctcttccaacctgatttcactcccgtctacgactccggaatcctccgcaacggacaggtttaatctttttggtttaacttttcaccttaacactaataatgataagtgcaggtaccagacccctattaaaaagagagtcattacatattagtaagacctaaagaaatatgatttt

SEQ ID NO: 118522 - DNA, 274 bp, Glycine max
cgtgaagaggcgggcatgacacagcaagacgagaagaccctatggagctttaatttattaatgcaaacatcacctctagcatcaccagtattagaggcaccgcctgcccagtgacacatgtttaacggccgcggtaccctaaccgtgcaaaggtagcataatcacttgttccttaaatagggacctgtatgaatggctccacgagggttcagctgtctcttacttttaaccagtgaaattgacctgcccgtgaagaggcgggcatgacacagca

SEQ ID NO: 118523 - DNA, 272 bp, Glycine max
cagcaattcacactggtctttgcttctcgttactcatttctcacctaactttctattcttctcagtctcagatcagaaccttagccatggcagcgttccagaagatcaaggtcgccaaccccatcgtcgagatggacggagatgaaatgactacggttatctggaagtcaatcaaggacaagctcattttgcccttcttggagttggacatcaagtattatgacttaggccttccttaccgtgatgagaccgatgataaagtcacaattgaa

SEQ ID NO: 118524 - DNA, 270 bp, Glycine max
ctacaccgggcagttcgtctactgcggcacgcaggccaccctcgtggtcggcaacgtgttgcccatccgatccatccccgaaggtgccgtcatctgcaacgtcgagcatcaatacggcgcccgcggcgttttcgccagagcctccggtgactactgctattgctataagccacaaccctgataacgacacctctaggctccagctcccttctggtgcgaagaagattgtgccatgtgggtgcagggcgatgattcggcaggttgcaggtg

SEQ ID NO: 118525 - DNA, 274 bp, Glycine max
ctacaccgggcagttcgtctactgcggcaagaaggccaccctcgtggtcggcaacgtgttgcccatccgatccatccccgaaggtgccgtcatctgcaacgtcgagcaccacgtcggcgaccgcggcgttttcgccagagcctccggtgactatgctattgttataagccacaaccctgataacgacacctctaggatcaagcttccttctggtgcgaagaagattgtgccaagtgggtgcagggcgatgattgggcaggttgcaggtggaggg

SEQ ID NO: 118526 - DNA, 273 bp, Glycine max
gcttcacctttcttcatttcacttcagagagagagaacaaaacagaatgggcgtcgtggtgatcgacggcagcaccgtgcgcgacttcgtgaacgacgaaaccgccttcaccaagagcgtggacgagcagttctcggcgctggacctcaacaacgacggcgtcctctcgcgctcggagctccgcacggccttcgagtccatgcgcctcatcgagacgcacttcggcatcgacgtttccacgccgccggagcagctcgcgaactctacggactc

SEQ ID NO: 118527 - DNA, 268 bp, Glycine max
atttttcttcctcagtagtgtcatttacgcttctcttctctgcagcaactatgcctaaccctaaggtcttcttcgacatgaccatcggcggtcaatctgctggccgcatcgtgatggagctctacgccgacgtcactccccgcaccgccgagaacttccgcgcgctttgcaccggcgagaagggcgtagggcggagcggcaagcccctccactacaagggctcgtccttccaccgcgtgatcccgagtttcatgtgtcagggtggcga

SEQ ID NO: 118528 - DNA, 270 bp, Glycine max
ggcgaagatccaggacaaggaaggaatcccactcgaccagcagaggcttatttttgctggcaaacagctagaggatggaaggaccctcgctgactacaacatccagaaggagtcaactctgcacttggtgttgcgtcttcgtggggggttttaagctggagctgatttctgtgtgatgttcgatgttggattttcccaaacattttaagaagaaatgtgatgtgtaatgggtctgtaatgacctttgaaaataagtttggtttgtgttga

SEQ ID NO: 118529 - DNA, 267 bp, Glycine max
ttcttctcttgcggctagggtttagcgagctcttctagatttaaggaagatgggtaaggaaaaggttcacatcagtattgtggtcattggccatgtcgactctgggaaatccactaccactggtcacctgatttacaagcttggaggcattgacaagcgtgttattgagaggtttgagaaggaagctgctgagatgaacaagaggtctttcaagtatgcctgggtgctggacaaacttaaggctgagcgtgaaagaggaatcaccat

SEQ ID NO: 118530 - DNA, 240 bp, Glycine max
ggtgtatagacaatgtcgtgttgctgatcattccattggcccattggaaattcgtgttgtgaggaatgggacctcttgaggagcttatggattatgcaatctcaagaggtgcgtccataaatcaatataaggtgccaagatgtgtgaatttcacacccataatggagttattggactctagggttgtgtctgtgcattatagccaggaattcaccacattggacccctgatatgaggatg

SEQ ID NO: 118531 - DNA, 272 bp, Glycine max
ctttagccgaggtcaggaggagcactagctaagttcacaatttcacaatggctaggggactaaagaagcatttgaaaaggctcaatgctcctaagcattggatgcttgacaaactgggtggtgcatttgcgcctaaaccctcatctggaccacacaaatcgagggagtgcctccccctcattcttattctgcgaaaccggctgaagtatgctctgacataccgtgaagtcattgctattctgatgcagcgccatgttcttgttgatggcaaa

SEQ ID NO: 118532 - DNA, 273 bp, Glycine max
cacttgtcggaagacttaacaagaaaagttccaagggactgactgagcttcagagaatgggaatagggcttgttatagctgtaatggcgatggttacagctggaatagttgaatgctacagacttcagtatgcagacccagtatgcccccactgcagtggcacaagctctttaaccatcttttggcaaattcctcagtacacacttattggagcttcagaggttttcatgtatgtaggccagttagagttcttcaatgctcagacgccagatg

SEQ ID NO: 118533 - DNA, 270 bp, Glycine max
gtttgttgttgtaactcgttcttcttcttttgttgttctgtgtttgtgtttgttttttctctcacctgaaaatgtcttgctgcggtggtaactgtggttgcggaagctcctgcaagtgcggcaacggctgcggaggctgcaagatgtacccagacttgagctacactgagtcaaccaccaccgagaccttggtcatgggagtggcacctgttaaggctcaatttgagggtgctgaaatgggtgtgcccgctgagaacgatggctgcaaat

SEQ ID NO: 118534 - DNA, 267 bp, Glycine max
ctcagccgcctcggctagggttcggaaacgaagaagggttctgttttcttttcgcgatgagggccaagtggaagaagaagcgtatgaggaggctgaagaggaagcgccgaaagatgagacagagatccaagtagtgcgttaaacctagtttgtttccgttgcttttagaattgcttatgttgtcaaataggacacccagttgttagtggcactggtctctcctttttgatgtgttgatacttttgttggatgttattgcgtcttatg

SEQ ID NO: 118535 - DNA, 273 bp, Glycine max
gggagagatgcagtagtagtagtgggtggtaacagagaagaaaatagggggtttggtttggtgagttacccaagagaaaggatgaagagggaacgcgagcagcgcggttccatcgcagggacctcaagctgcggttattcaagcggaaaatcgaatctttgggaggaagaaggaggcatggacgagcttcttgcggtggtgggttacaaggttaggtcatcggacatggcggaagtggcgcagaagcttgagcgtctcgaagaagccatggga

SEQ ID NO: 118536 - DNA, 240 bp, Glycine max
ttggccgtaggctgcgaactgttggtcttcggtcgagaattgatggagtttgccatttggaagcatagcatgatttgtgctggttgggtgaattggcaggagatgaaccaaccccgttgtttgtttggatctagtagtcttggttcgattgctattgttgctgggggaagtgataagtatggacatgttctgaaatcagctgagttgtatgactcttcaacaggtatgtgggaattttac

SEQ ID NO: 118537 - DNA, 269 bp, Glycine max
aacctacctctttttcttctctctcaacaacttcaccttcttcctcctcgatcatgtctcacttcaagggcaagtaccatgatgagcttatcgccaatgctgcgtacattggcactcctggaaagggtattcttgctgctgatgagtcaacagggacaattggcaagcgtttggccagcatcagtgtagagaacattgaatccaacaggcgagctcttagggagctgcttttcactgctcctggtgttcttcaatatctcagtggtgtc

SEQ ID NO: 118538 - DNA, 250 bp, Glycine max
gtaatattaataattttcatgatttgagaagccttcgcttcaaagcgaaaagtcctaatagtagaagaaccctccataaacctggagtgactacatggatgccccccaccctaccacacattcgaagaacccgtatacataaaatctatacaaaaaaggaaggaatcgaaccccccaaagctggtttcaagccaaccccatggcctccatgactttttcaaaaaaaaagtagtgagaaaaaaaggggggc

SEQ ID NO: 118539 - DNA, 275 bp, Glycine max
gaatgactcctggcagtggcgctaggcaagcgccccttagccaggctgtcgggcttgcgtccaagcgcactaacacctagtactgcacggggctcaatcagagctggtcttctaggccagaacgtgacctctccgcaaggtacctggcccctgactcctatatccaggactcgagaccgtctgacacctggcaatgcatgactgaccgatgagtagactcagcatacgcatgcgtgcggctgctgtcctatcagacttcgcttgtgtcagatggg

SEQ ID NO: 118540 - DNA, 269 bp, Glycine max
gaatgcctcctggccgtggccctggcaggcgccccttaccaggctgtgggcttggtccaaggcactacacctgtactgcaggggctcaatggagctgtataagaagccagaagtgcctctccgcagggacctgcccctgctcctattccggactcagacctctgaccctgcaatgctgcctaccatgattggcctggcagaggcaggcgtgcggctgctgtcctaccagacttcactggtgtcagatggggagacctggcacgtcatgg

SEQ ID NO: 118541 - DNA, 266 bp, Glycine max
  unsure (1)..(266): unsure at all n locations
catttggatacataggtatggtctgagctatgatatcaattggcttcctagggtttatcgtgtgggcacaccatatatttacagtaggaatagacgtagacacacgagcatatttcacctccgctaccataatcatcgctatccccaccggcgtcaaagtatttagctgactcgccacactccacggaagcaatatgaaatgatctgctgcagtgctctgagccctaggattcatctttcttttcaccgtagtgncctgactggca

SEQ ID NO: 118542 - DNA, 265 bp, Glycine max
ttcggttctttacttgttgggttgttctgatcttctctcatagcaatcaaatcacactcccatcttctcatctcgtaaaccctaaaccccgttttcagtagcatcgagatcgatcgaacatggatgaggagtacgatgtgatcgtgttgggcacgggtctcaaggagtgcattctcagcggtcttctctgcgtcgatggcctcaaggttctgcacatggacaggaatgactattacggaggagaatccacttcgctcaatcttat

SEQ ID NO: 118543 - DNA, 269 bp, Glycine max
ggtttgcagtcactgctctgtttcaccgagtttgggcgtttagatcagaaccaaatcgtgttctcttccattggcaaacatggcaactcaaatgagcaagaagagaaagtttgttgcggacggagtgttctttgccgaactgaacgaggttctgacacgtgaattggcggaggacggttactccggcgtcgaagttagggttacgccgatgcgcaccgagatcatcatcagagccaccagaacccaagccgttctaggtgagaagggaa

SEQ ID NO: 118544 - DNA, 271 bp, Glycine max
attttatatcttcttcgaaaccatacttatccccaccttggctatcatcacccggtgaggcaaccagccagaacgcctgaacgcaggcacatacttcctattctacaccctagtaggctgccttcccctactcatcgcactaatttacgctcacaacaccctaggctcactaaacattctactactcactctcactgcccaagaactatcaaactcctgagccaacaacttaatatgactagcttacacaatagcttttatagtaaagata

SEQ ID NO: 118545 - DNA, 265 bp, Glycine max
ctttgaatctagttttcagtgatcagaagcagcagttatatgagtgtatgaatggaatgatgatcactgtgctataatgtactgaaaccaccatattacagaaatatttactacatattttccatctgtagtttctcagaagggctatggattagtttgaactgtcaaatccttgcatacttctgtgacacccctgcccattgtctgtctttaattaaccaaggtgttaggcgtgactgtcacaactgtcatgttgtccagtaaa

SEQ ID NO: 118546 - DNA, 257 bp, Glycine max
attacttgatcaccttttttgagaaaagatatatatcaatggcaactccgagtgtgttagaagtccgccctcctgctttaacttccatctctgaaccacttccattttttgatggaaccacaaggttatacatttgctatctgtgcccttttgcacaacgcgcatggataactaggaactgtaagggactgcaagacaagatcgaattggttcctattgatcttaaaaacaggcctgcttggtataaggaaaaagtt

SEQ ID NO: 118547 - DNA, 258 bp, Glycine max
cgcataaaaagagggaccatatgatgtggtggttctaccacgaggtaatctgggcgcacagaatttatctgagtctgctgctgtgaaggagatactgaaggagcaggaaaaccggaagggcctgatagccgccatctgtgcaggtcctactggactgttggctcatgaaataggttttggaagtaaagttacaacacaccctcttgctaaagacaaaatgatgactggaggtcattacacctactctgagaatcgtgt

SEQ ID NO: 118548 - DNA, 260 bp, Glycine max
taaatgcaccgttctctatcctgcttctgcaaaggctagcaatgagattgaggaaggactttcaaaccgtggatttgaggttactaggatgaatacatatacaacggtgccagttcaacatgttgaccatacggttctaaagatagcacttgctgcccctgttgttacagtagcttcaccatcttctattcgtgcctggaagaatcttctttcagattctgagtggaacaattctgttgcatgcattggtgagacaactg

SEQ ID NO: 118549 - DNA, 212 bp, Glycine max
gaagtttttaaagatttcactggaacgatacgttgtgaagacccaaaccccaatctttacacgtttgttggaaacttagagtacgagcgccagatttatcctcttgatcctagtcaaattcttctccgagattctaagctcaggaacactgattacatctatggggtggccattttcactggtcatgacagcaaagtcatgcagaattccac

SEQ ID NO: 118550 - DNA, 263 bp, Glycine max
caaactcagggtagggcagagagagagagagagagagagagagagagagagaatgggagggtgtgctatgcgcggtgcatggatggcgctggtgtcgacactaatctcacactcgagcgccaagaaggcgcgagacaacatctcacgcgctatctcaatcttgggaatctgtgctctaaattctaatcttcccgcgatagatgtcgtcgaacttgtggtgagggaattagaaacggctccgctgttacactcgggccgtggat

SEQ ID NO: 118551 - DNA, 260 bp, Glycine max
caaactcagggtagggcagagagagagagagagagagagagagagagagagaatgggagggtgggctatcgcggtgcatggtggcgctggtgtcgaccctaatctcccactcgagcgccaagaagaagcgaaacaacttctcacgcgctgtctcaatcttggaatctctgctctaaattctaatcttcccgacatagatgtcgtcgaacttgtggtgagggaattggaaacggatccgctgttcaattcgggccgtggat

SEQ ID NO: 118552 - DNA, 260 bp, Glycine max
  unsure (1)..(260): unsure at all n locations
cttctgtagttaatttgcttcccttttttcacactcactatcactaaatggcttcctctgttgctttagttttgggtctatgtctagcactcaacatggttctgccgacacgtgcagctacccacacagtgggagacacctcaggttgggcactcggtgctgattacagtacatgggccagtggcttgaaattgaaagtcggagatagtcttgttttcaattatggggctggtcacacagtggacgaatngaaagaaagt

SEQ ID NO: 118553 - DNA, 258 bp, Glycine max
atataagatcacagaattttcgcagtccaagagtacacgcatcccaaaccgttttgatttggaacgtgttacgctctaaatttgcatggcatattgtctttaactgagtcaatttcgcttaataaaacctctcttcactactctgctttaccaacccaaccccctgttcctgtgtgtgtgagtgaccgagtgagtttgtttttctcagctgatatatatggcgcttgatcgctccattataagcaaaacgacgtggta

SEQ ID NO: 118554 - DNA, 242 bp, Glycine max
ctgcccagaaatgaagccggcccaacccgacaccagccgttgttctaacttattgctgggcagtgccaccatgcacccctgatgttcgccgtctggcgagcccttagccttgctgtagagacttccgtcacccttggtagagtttattttttcgatggctaagatactgctgatgctgaaataaactagggttttggcctgccaaaaaaaaaaaaaaaaaaataaaaaagaagtaaaaagaa

SEQ ID NO: 118555 - DNA, 258 bp, Glycine max
tctgcatcatattgcacacagagatcgtgatcgaaaatggcgacgttgaaggttcctgcacaactttcttctccattggaagacagtgagcaattgcgaaaagcttttcaagggtggggaacgaatgaaggattgataatatcaatcctgggtcacagaaacgcggctcagcgtaagttgattcgtgaagcttatagtacaacccatggagaagatcttcttaaagatttagacaaagaactttcaagtgactttgag

SEQ ID NO: 118556 - DNA, 253 bp, Glycine max
cggctcgaggcagagctggtagagtcttggtctttgtaatgggaaaagaaggggtccatggaggcggattgactacgaaggcatactcaatggcaaaatacttgagagactctgggttctagctgctaggcagactgttaagtattaggggaaaattgctcttaaactttcctagctataagcttaagtcttaattctggaaattgtattagcaatgcagggtgatggggtatgaacctgtgtctccgttgta

SEQ ID NO: 118557 - DNA, 256 bp, Glycine max
aaaggggttcaattctagctagttctattacatcgtccgcgaccatgaacatggcgttcgtgcttctgttcatggttttcgcagtttcatcagctttagacatgtcaataatatcacatgacaacgctcatgcggatagggccacgaggcgcaccgacgacgaggtgatgtcaatgttcgcggagtggctggtgaaacacgacaaggtgtacaacgcgctccgtgagaaggagaagaggtttcaaatcttcaagaa

SEQ ID NO: 118558 - DNA, 254 bp, Glycine max
cttcaatttaaacacagaaacaaaatcaccaccttcaaagtcttctctctcgagaatcatcgaataaaactagggtttccgatcgtcgtcgaggagaatgccgaagaacaagggaaagggaggaaagaaccggaagcgcgggaagaacgaggcggacgacgagaagcgggagcttgtgttcaaggaggacggccaggagtacgcgcaggtgctccggatgctggggaacggccgctgcgaggcgatgtgcatcg

SEQ ID NO: 118559 - DNA, 257 bp, Glycine max
gttcattcccaggttgtgatggcagcagcaccagcagctaccttcgctattggaaccaccggttccctcggccaaagaggaagctcgcttcctcaatcaaagtcctttgggttgaaattcaactctctgaatcatttgaagagcttctgtggcctcaaggccatgtcatccgtgagatgtgagtcggaatcctccttcttcggtaacaaaaccggtgctgctctacgggcgtcttttgcatccaaagctcaaaagga

SEQ ID NO: 118560 - DNA, 258 bp, Glycine max
accagatgaagccgtctcgaaatgtacagcatatggtactgattttggggcttgtgttcgcaggcatcactgtagcgaactgtggtgatattttctgtgacaaatgtacatatggtagaattgctccgactgctgatgagaatgctcagcctgtacgagtttgtgaccggtgcatggcggaagtgtctcagcggctgactagtgcaaaagagtcatcaagtaaacctgcattgcagagtcatgaggatcttgcaagga

SEQ ID NO: 118561 - DNA, 257 bp, Glycine max
tccaaatttccatggcttctgcggatgttgaataccgatgctttgttggtgggctcgcttgggccactgacaactacgatctggagaaagccttctctcagtacggtgacgtcgttgaatcgaagattatcaacgatcgtgagactggaagatccaggggatttggatttgttaccttcgcctccgaggattcaatgagggatgcgatcgaagggatgaacggtcagaaccttgatggacgcaacatcactgtgaac

SEQ ID NO: 118562 - DNA, 258 bp, Glycine max
ccgagattcattcttcaccaaaacttcgcaaagaaacactacacatccatggcaactgctggcgtgcaagaagttcgtgttccccctctaacttccacctctgagccaccttctctctttgacggaaccaccaggttgtacatcagttatatttgtccctatgcgcagcgtgtttggatcactcggaactataagggactacaagacaagatcaaactggttcctattgacctacaaaacaggcctgcttggtataag

SEQ ID NO: 118563 - DNA, 261 bp, Glycine max
gtgatttggagtttggagcgactgaactaatcattaatttgcactcgctgtttcagcttcatcacccttcttttgcatcatttatatctcttgagaaatggcacaagaaacctttctattcacatctgaatctgtaaacgagggtcaccccgacaagctgtgtgaccagatctctgatgcagtacttgatgcgtgccttgaacaggaccctgacagcaaggttgcctgtgagacatgcaccaagaccaacatggtcatggt

SEQ ID NO: 118564 - DNA, 255 bp, Glycine max
ggaggaggcgcgtaaagcagggcttgcgccggctgaactcgatgaagatggaaaggaaatcaatcctcacattccccagtatatgtcttctgcaccttggtatcttaatgctgagagacctagtttgaaacatcagaggaaatggaaatccgaccccaattacaccaaatcatggtatgatagaggtgctaaaatctttcaggcagacaagtatcggaaaggtgcatgtgagaattgtggagctatgacacatga

SEQ ID NO: 118565 - DNA, 247 bp, Glycine max
ggatttgatggtgtagttgaggatggaccaggagcgacactagcgactgtggccgagtacatggtggatggttctgtgaggaatgtgttgcgtcgtaaggataggtatcttgatcgccgcaagagactgataattgcgatggatgctgcttttgggatgggatatttacactcgaaaaatattgtgcattttgacgtgagatgtgacaatttgctcgtgaacttgaaggatcctatgcggccaatat

SEQ ID NO: 118566 - DNA, 253 bp, Glycine max
ctgacccacttgcattgtttctagcacgacatctaacgaggcaagaacatcacggtggtgaaaatcatcgagccatcagcgagcgaggttcgtgaagcaactgggtttggaaccactttcatgatggacaatgttttgaccgagggtccagagctgagctcgaagcacgttgggagggctcaggggctgtttggcttggcctctttggaggaccgtggaatggtgatgctcattagcttggctttcagtgagg

SEQ ID NO: 118567 - DNA, 250 bp, Glycine max
aaaaaaccctaattattattattaaacatgaggccgattctgatgaaaggccacgagaggccactgacgttcctcaagtacaacagggacggcgatctccttttctcctgcgccaaggaccacaaccccaccgtctggttcgccgacaacggcgaacgcctcggcacctaccgcggccacaacggcgccgtttggtgctgcgacgtctcaagagattcgggtcggctcataacgggaagtgcggatcaga

SEQ ID NO: 118568 - DNA, 252 bp, Glycine max
gcagaggtcaaacataccaaggacgtgaactcgatgttgcttgaacttgcactttggttattggctatagctctgtcgctgcacttgcgtcccatacccactgcaatatcaaacgcacttcgccatctcccaaacccaccaagcccaaagcctcgtcttcccttcataggacaccttcatctcttaatagacaaacttctccactacgcactcatcgacctctccaaaaaacatggtcccttattctctctc

SEQ ID NO: 118569 - DNA, 252 bp, Glycine max
cggcggcgacagtcactctccgacaacaacacttccgcggcgaaaaatgtctctggtggcgaacgaggatttccagcacattctgcgtgtgctgaacaccaacgtggatgggaagcagaagataatgttcgctatgacctccatcaagggtattggaaggagattcgccaacatcgcttgcaagaaggccgatgttgacatgaacaaaagggctggtgagttgagtgctgcagagttggatagtgtgatgac

SEQ ID NO: 118570 - DNA, 252 bp, Glycine max
gaaaatcatccctctcggtttgatgttcttctgcatcctcttcaattacacgattctgagagacacaaaggatgttctggttgttactgccaaagggagcagtgcggagattataccctttctcaaaacgtgggtgaaccttcccatggccgttgggttcatgttgctgtacacaaagctagcgaatgttttgtcaaagcaagctcttttctactccgtgattcttccattcattgctttctttggggcttt

SEQ ID NO: 118571 - DNA, 272 bp, Glycine max
cagcaatatgtctcccttactgtcccagagctgactcagcaaatgtgggatgccaaaaatatgatgtgtgctgctgatccccgacacggccgatacttgactgcatctgctatgttcaggggaaagatgagcaccaaagaggttgatgaacaaatgatcaatgtgcagaacaaaaactcgtcatactttgttgaatggattcccaacaatgtgaagtccagcgtttgtgatattccacccaggaatttgaagatgtcatccacatttattgg

SEQ ID NO: 118572 - DNA, 271 bp, Glycine max
ctttgagttgaacacaggggccaagattccttctcttgggttagggacttggcaagctgaacctggtgttgtagctgaagctctcaccacagccattcaggttggatacaggcatattgactgtgctagtgcgtataagaatcaagcagagattggttctgctcttaagaagctttttgatgatggtgtggtgaagcgtgaggacttatggatcacttccaaactctggtgttcagatcatgcaccagaagatgtgccaaaagcattggat

SEQ ID NO: 118573 - DNA, 270 bp, Glycine max
catggcttcttcactcagaatttcaagactcatctctcgctccttttcttctacctccttcttttcacgaggtgggaatggtttccttggttcaagacactgcaaatacagcacttcttctgccattgaagaagaacccgttaaaccatcagtgcaagtagaacacacccaactcttaattgatggaaaatttgtagatgctgcttctggtaaaacttttccaactttagatcctaggacaggtgaagtaattgctcatgttcctgaggg

SEQ ID NO: 118574 - DNA, 276 bp, Glycine max
caagccccactcaaccaccacaccactctctctgctcttcttctacctttcaagtttttaaagtattaagatggcagagacattcctatttacctcagagtcagtgaacgagggacaccctgacaagctctgcgaccaaatctccgatgctgtcctcgacgcttgccttgaacaggacccagacagcaaggttgcctgcgaaacatgcaccaagaccaacttggtcatggtcttcggagagatcaccaccaaggccaacgttgactacgagaagat

SEQ ID NO: 118575 - DNA, 280 bp, Glycine max
aaagatctcaattaattagatttccctctctctttctctctctaactatattgcaaacctttccctctgctttcaaaatcagcaaattcatgggtcttagagacattggtgcttcactgcccccagggtttcggttttacccgagtgatgaggagttggtccttcattacctttacaaaaagatcactaatgaggaagttctgaagggtaccttgatggaaattgacttgcacacgtgcgagccatggcaactcccagaggtggctaagctcaatgcaaa

SEQ ID NO: 118576 - DNA, 281 bp, Glycine max
gtagctagccaacaaaggagaagatattggaatagagagatcaaaaggggaggctatggcagcgtttgggattcgaatcatgctattgatggcagcttgcttgcttccactatctgtggaagctatggttcgccactacaagttcaatgtggtgctgaagaatgccacaagattgtgttcaacaaagccaattgtcaccgtaaatggaaagttcccaggtcccaccatctatgctagggaagatgacactgtactggttaaggcggtcaatcatgtcaagt

SEQ ID NO: 118577 - DNA, 264 bp, Glycine max
gcagcagcatgagagggtgtcctgcaaggaagcatgttgagaggtgcttggaagagcctaccatgctaattgtcacctatgaaggtgaacataaccaccccaagtataccaacacaatctgcaaatgcatgaaactatgtggagagcttaaccagatcaagccaatcattcaattcgtcaaatcctctatgtgattggcttgagatgctgctgtacatatttttagtgatgcaaacaagcagggatggataatattgttggcgc

SEQ ID NO: 118578 - DNA, 272 bp, Glycine max
gtactcttctatggtcctccgggatgtgggaaaactttgttagccaaagcaattgctaatgaatgtcaagctaacttcatcagtgtgaaaggtccagaactgcttacaatgtggtttggtgaaagtgaagctaatgttagagaaatttttgacaaggccagacaatcggctccatgtgtcctcttctttgatgagcttgactctattgccactcagagaggaagcagtgttggggatgctggtggtgctgctgatagagttctaaatcaact

SEQ ID NO: 118579 - DNA, 272 bp, Glycine max
caagtcctcctttctcacagctaggtggtggtgattagtgtacatatatatatggttgatctgggtatttatcagatccctacgagcactttcgacccatttgcggaggcaaaagaaacagatgctcccggggcaaaagagtatgtgcatatccgcatacaacagaggaatgggaagaagagtcttaccacagtgcaagggctgaagaaagagttcagctacgagaagatcctcaaagacctcaagaaagagttctgctgcaatggcaatgt

SEQ ID NO: 118580 - DNA, 271 bp, Glycine max
tgaatcaacaatcatgtcggacgaagagcaccatttcgagtccaaggccgacgccggagcctccaaaacctaccctcagcaagccggtaccatccgcaagaacggctacatcgtcatcaaaggccgcccctgcaaggttgtggaagtttcgacttccaaaactggaaagcacggtcacgctaagtgtcactttgttggaattgatattttcactgccaagaaacttgaggatattgtgccctcttctcacaactgtgatgttcctcatgtg

SEQ ID NO: 118581 - DNA, 259 bp, Glycine max
ggtgaagccatgcatcttaaacaggttgaagaagagcaagatggtatacttttcgccatgaacatgatgtctaccatggtgtatccgtttgtggttcggaccgcgattgagttagggatctttgacatcatagcgaaagccggtgaaggtgcgaactactcagcagaggagattatagagcaacttggcacaaagaaccctgaagctcccacgatgttggaccggcttctcaggttattggctagtcactccatgctat

SEQ ID NO: 118582 - DNA, 263 bp, Glycine max
gtttcgttggagtcagaggcgatgatgtcttcaattagattcctatggatcctggtggtgtgtttgacggcatcatgcgcgctaagccaaccgcagaagctatcagcgtacgatgttctcatggagtacggcttcccggtgggtcttcttccgaagggagccatagggtattcactgaacagagacagcggcgagttcgctgtgtattttgaaggagcctgcagcttcgacatagattcctacgcgctcaagtacaagtccac

SEQ ID NO: 118583 - DNA, 272 bp, Glycine max
gtgagagaataggaaaaagggaaatatggcatttgcaggaacaactcagaagtgcatggcttgtgacaaaacagtttatctggttgataagttgacagcagataaccgagtgtaccataaggcttgcttcagatgccaccactgcaaaggaacactcaagcttagcaactataactcttttgagggggttctttactgcaggccacacttcgaccaactgttcaaaagaactggtagtcttgacaaaagcttcgaaggacaccaaaaattgc

SEQ ID NO: 118584 - DNA, 273 bp, Glycine max
gtcgtcgtggtcgtgtcgcagcaaaaccaagccacccactaacttgtttggtccaagacatggctctgatcctgcatgctaccaaaacaaacaagaatgccttcaagactctgattgcggcagagtacagtggcgtccaagtggaattggcccctaatttcgagatgggtgtctctaacaaaactcctgaatttctcaagatgaatcctattggaaaggttcctgtcttggaaacgcccgatggtccagtctttgagagcaatgcaatcgctc

SEQ ID NO: 118585 - DNA, 282 bp, Glycine max
cgtgtggaaatcttgcggaggctgttggtgacctcgcaggctcgggcagtggctccaggtggagccaccaggctgacagataaggcagtgaaggactattccgcttaccgtccttcccttcttctttgggccctcgtcgatctcatttacaacatgtttaagaatgtgcctaccagtaacacagagggaggctggtcctgctctctcgctgagtacatccgccacaacgacatgcccatctacgaagctgccgacaaagccctgaaaaccttccaggaggag

SEQ ID NO: 118586 - DNA, 285 bp, Glycine max
gagaacctcttttcctttcgatttacctttgattcatacaagctcacaagtcaattttggtttatcattcctagaagaaggaaccattaatcattgacatggccatggcatatgttgctaggtcatcagagtcatctcaagtgcttactttccattccactgctaaatggaatgctcactttgatgccttgaaacaaactaacaaactgatggtggttgatttcactgcatcatggtgtggaccttgcaaactcatggatccagttatccaagagtttgctacaa

SEQ ID NO: 118587 - DNA, 260 bp, Glycine max
ctcttcctcccttggagacaaagaagagccaccgctgcgacgccgttcgtgcatttttgaggtgccgctgtcatgtttgggcgtggtggaccaaggaggagtgataactccaaatattatgatattctcgggatttccaaaaatgccagtgaagatgaaatcaagaaggcctatagaaaggcggctatgaagaaccatccagataagggaggagatcctgaaaagtttaaggagttaggtcaagcatatgaagttttaag

SEQ ID NO: 118588 - DNA, 267 bp, Glycine max
cttttcatcattctcatatcctcaatcaccccccctcgcactcgctcttcccttcctctggtggcgacaatgtcgactcctgctaggtagaggctgatgagagacttcaagacgctgcaacaagacccgcctgcagggatcagtagtgccccccaggataacaacataatgctgtggaatgctgtcatatttggtcctgatgatactccatgggatggaggcacgttcaagttgacactccaatttactgaggactatccaaataaa

SEQ ID NO: 118589 - DNA, 269 bp, Glycine max
taaacacaaaatcaagcacacaagcaaattcacttctctgttctgacacacatattaagttcccgagaaagatctagagagtaattaagatgggtacgtggttcacaaatgcaaggccgtatctgctgttagtggcagttcaatttgggtctgctggcatgttcatatttgcgatggatgctataaagaagggtatgagccattacgtgttcatcgtctatcgtaatgccatcgcctctgtatctcttgctcccttcgcatttgttctt

SEQ ID NO: 118590 - DNA, 238 bp, Glycine max
tttgttgtgaaactaaggcctaatcagaatggtgaagttcacagctgaagagctacgtcgtattatggactataagcataatatccgtaatatgtctgtcattgctcatgttgatcacggaaaatcaaccctcactgattctcttgtggctgctgctggtattattgctcaagaagttgccggtgatgtccgtatgaactgataccgggcagatgaagctggacgtggtataacatca

SEQ ID NO: 118591 - DNA, 275 bp, Glycine max
gtcttagggcgctatgatatcggtctggttcggttcgactctaaacgtcatcgattcaaactcggagttagccaacgatgttctgacggagcacgatcagcagctggtggaccggcaccggagccggtcggcggcgaacttcacacgcgactggaacgatctcatatgggccgaatattggccgcactatgtgaacgagatgaagctgtgcacgctcgaggtttccacgccgaagcgactcaaatctctcagatccattatggacgacgacgtca

SEQ ID NO: 118592 - DNA, 280 bp, Glycine max
ctctactactgctagctgtgacttgttttgagttcactcaaatcgcattggtatctgaaatcaggaaagatggttagcgtactgagatcaggcaggcacaaagggcagaaggcccagcaaccatccttgccattggaactgcaaacccaccaaaccgtgttgatcagagcacctatcctgattactacttcagaatcaccaacagtgaccacatgaccgagctcaaagagaaatttcagcgcatgtgtgacaagtctatgatcaagacgagatatatgta

SEQ ID NO: 118593 - DNA, 277 bp, Glycine max
ctttgagttgaacacaggggccaagattccttctcttgggttagggacttggcaagctgaacctggtgttgtagctgaagctctcaccacagccattcaggttggatacaggcatattgactgtgctagtgcgtataagaatcaagcagagattggttctgctcttaagaagctttttgatgatggtgtggtgaagcgtgaggacttatggatcacttccaaactctggtgttcagatcatgcaccagaagatgtgccaaaagcattggataaaaca

SEQ ID NO: 118594 - DNA, 263 bp, Glycine max
ctcaacaacttctgctacttcctactccaaccgcacttctgctccgcaattatcatgggcaaggtcaagatcggaatcaacggatttggaagaattggccgtttggtagccagagtggctctgcagagagacgatgttgaactcgttgccgttaacgaccctttcatcaccaccgattacatgacatacatgtttaaatacgacagtgttcatggacactggaagcatcacgatgtcaccgttaaggacgagaagacccttct

SEQ ID NO: 118595 - DNA, 261 bp, Glycine max
ctcttcttctcttgcggctagggttttagcgagctctgctagatttaaggaagatgggtaaggaaaaggttcacatcagtattgtggtcattggccatgtcgactctgggaaatccactaccactggtcacctgatttacaagcttggaggcattgacaagcgtgttattgagaggtttgagaaggaagctgctgagatgaacaagaggtctttcaagtatgcctgggtgctggacaaacttaaggctgagcgtgaaagag

SEQ ID NO: 118596 - DNA, 263 bp, Glycine max
gtttgacccaactgcagatttccacacttattcaattctttggaatccccaacgcattgtgtaagcattaaccacccaatccatatcttctctctctctctatctatctataattgcaaactgcagctagatatagatcatatgtttgtgtagcacataagttactaatttcatgttttataattgcgtgttgcagtttttctgtggatggcacccccatcaaggaactcctattgattccaaatagccaaccgatgaggata

SEQ ID NO: 118597 - DNA, 261 bp, Glycine max
gttcacatcagtattgtggtcattggccatgtcgactctgggaaatccactaccactggtcacctgatttacaagcttggaggcattgacaagcgtgttattgagaggtttgagaaggaagctgctgagatgaacaagaggtctttcaagtatgcctgggtgctggacaaacttaaggctgagcgtgaaagaggaatcaccattgatattgctttgtggaagtttgaaacaacaaagtattattgcacagttattgatgcg

SEQ ID NO: 118598 - DNA, 263 bp, Glycine max
caaaaaacccttctttctttcaggttcattacttgatcagtgtcaaaagggtagttgcaaattgcaatggctaagcatgatgttgagggtggttccttctcagcaaaggactaccatgatcctcctccagcacctttgattgatgctgaggaactcacacagtggtccttctacagggctttgattgctgaattcattgccacattacttttcctttacatcacagtgctcactgtgattggttacaagagccagagtgatgt

SEQ ID NO: 118599 - DNA, 267 bp, Glycine max
cccaattccattcattcattcattcgttcttcttctttcaccaacaacaaagaaaacagagaaactttcatttcatatattttcatcatcgcagcaaaggaatcaatcaatcaaaaaccatggcaggcttcagtggcgacgaaaccgctcctttcttcggcttcctcggtgccgctgcggccctcgtcttctcctgtatgggagcggcgtacggaacggcaaagagtggggtgggggtggcgtcgatgggcgtgatgaggccggagc

SEQ ID NO: 118600 - DNA, 267 bp, Glycine max
tcggcggccaaatgcccgtcatcaaggtggggagaatggcggggcaatttgcgaagcgaggtcggattcgtttgaggagaagaacggcgtgaagcttccgagttacagaggggacaacattaacggagactcctttgacgagaagtcgaggattccggatccgcagaggatgattagggcttattgccaagccgcggcgacgctgaatcttctcagagctttcgccaccggtggttatgctgctatgcagagggttactcagtggaa

SEQ ID NO: 118601 - DNA, 264 bp, Glycine max
ctcattccttcatttttaaacctagctccatctccctccactcaccataacatggcatcagaagcaaatgctgccaacaccaacttctgtgtaaatgttagcaacaatggctacattagtgctaatgaccccttgaactggggtgcggcggcggaggctatggctgggagccacctcgacgaggtcaagcgcatgctagaggagtaccggaggcccgtcgtcaagctcggtggagagaccctgaccatctcgcaggtcgcggcg

SEQ ID NO: 118602 - DNA, 262 bp, Glycine max
cagagagcctatcattccgcgcacggaccgtcctttcaagacgagcattgttttcgcacacgacaagggaacttcggtgctcttcaaagtgctttccgcgttcgcgttccgtaacatcagtctaacgaagatcgagtcacggccgcatcggaaccgtccgattaggctggtggatgacgcgaacgtgggaacagcgaacacttcgagtacttgttctacgttgattttgaggcctccatggctgaggttagggcacagaacg

SEQ ID NO: 118603 - DNA, 263 bp, Glycine max
gggtcatctcttgtggaggaagacaagcttagccttgcaactacacttcttgaaaaggccaaggctaaaggggtttctttgttgcttccaactgatgttgtcatagcagacaagtttgctgctgatgctaacagcaagactgtgccggcatcaagcatcccagatgggtggatggggttggatattggtcctgattccatcaagacatttggtgaagcattggatacgactcagaccattatttggaatggaccaatgggtgt

SEQ ID NO: 118604 - DNA, 275 bp, Glycine max
agaacactctcttgaacattcatggatccagtgagcgtgtggggtaacacgcccttggcgacggtggatcccgagatccatgacctcatcgagaaggagaagcaccgccaatgccgcggcatcgagctcatcgcctccgagaacttcacctccttcgcagtcatcgaggccctcggcagcgccctcaccaacaaatactccgagggcatgctcggcaaccgctactacggcggcaacgaattcatcgaccagatcgaaaacctctgccgctcacg

SEQ ID NO: 118605 - DNA, 263 bp, Glycine max
cttctcttgcggctagggttttagcgcagtgtcttctagatttacggaagatgggtaaggaaaaggctcacatcagtattgtggtcattggccatgtcgactctgggaaatccactaccactggtcacctgatttacaagcttggaggcattgacaagcgtgttattgagaggtttgagaaggaagctgctgagatgaacaagaggtctttcaagtatgcctgggtgctggacaaacttaaggctgagcgtgaaagaggaatc

SEQ ID NO: 118606 - DNA, 262 bp, Glycine max
taaattctcaaagatttaaactttgtctcagagtttccaaattcacccaaccccagagagaaaatgtctctaatcccaaatttcttcggtggcataaggatcaacgttttcgatcctttttccctcgacgtctgggaccccttcaaggattttcctttcccaaacactctttcttcagcttcctttcctgaattttctcgggaaaattctgcattcgtgagcactcgtgtggattggaaggagaccccagaagcacacgtat

SEQ ID NO: 118607 - DNA, 264 bp, Glycine max
cgctgcttgtttgtgcctgcgtagttacaaagtaaaaagagggaggactaggacaaatgttgttggcagtcatcatgtcgagcgcttcgttgaaggagatgaggaacggtggtgaggcttatagcaatggtcatggtggtggtggtgtgagtcacttgtatggagaggattgtgccactgaggaccagcttatcactccatggactttctctgtggccagtggatgcagtttactgagagatcaggctacaacaaagggctggc

SEQ ID NO: 118608 - DNA, 263 bp, Glycine max
gccgaggaatcttcaacgtcgacggagaatcctggagcttccagaagaagatggcgagtcttgaactcagcaagaactcgataagatccttcgccttcgaggtcgtcaaattcgaaatcaaagaccgactcatccctctccttgttctgtccaaacaaaatgactgtgttttggatttacaagacgttttcaagagattctcgttcgacagcatttgtagattctccttcgggttggaccctatgtgtctggagctgtctctg

SEQ ID NO: 118609 - DNA, 258 bp, Glycine max
ctttattctagttttgttccaccacttgtctatgaggttcttggaagctcaaaggaccttgcagttggaccttttctattgcttctcttgtgatgggatccatgttgcatcaggaagtgtctcccacaacagatccaattctgtttcttcagctagctttcacttcaacattatttgccggtctctttcaagctttgcttggaatcctaaggctaggcttcataattgattttctatctaaggccattcttattgggt

SEQ ID NO: 118610 - DNA, 260 bp, Glycine max
gttacttcttctctggttgattcggatctagagtcttcagtttctcctcgttgttcttcgctttcctgttttcaatttcgattctttcgttaatttaataagatgtttgggagggcaccgaagaagagcgataatacgaggtactacgaaatcctcggcgtctccaagaacgcttcgcaggatgatctgaagaaggcttacaagaaagccgccattaagaatcaccccgacaagggcggtgatcccgagaagtttaaaga

SEQ ID NO: 118611 - DNA, 260 bp, Glycine max
actcgagcgaatcggctcgagttggaaaattagcctcacaaaacgcaaagatcaaacaaaccaaggacgagaacacgaagttgcttgaacttgcacttggtttattggttttggctctgtttctgcacttgcgtcccacacccactgcaaaatcaaaagcacttcgccatctcccaaacccaccaagcccaaagcctcgtcttcccttcataggacaccttcatctcttaaaagacaaacttctccactacgcactcatc

SEQ ID NO: 118612 - DNA, 254 bp, Glycine max
ttgcattcgtggttgcagatactcaaaaacttgcagatatggccgcaaactcagctgttgttgattatgataatgaaaatcttgaaccacctattttatctgttgaagatgctgttgaaagatctagcttttttgaagttcctccttttctctatccaaaacatgttggtgatatatcaaaaggaatggctgaagcagatcacaagattctttctgctgagatgtaacttgggtctcaatactatttttatatg

SEQ ID NO: 118613 - DNA, 256 bp, Glycine max
aaccgatttcgtgtttccagtggctatcttggagctgagtttcaagagaccatggattccggttttaatcaaatgcattccagtgaacttgcttcttcagttgttggaaaccgctttccaggctacatggaatatccaggagtaggatcgaggcaacagttccctgttgaaaggaaatgggcccttgggcttcagtctcgagcccatcctcgtgaaataatgactgaggttcttaaagctttgcaagaattaaatg

SEQ ID NO: 118614 - DNA, 250 bp, Glycine max
tgggcacagtggctcacgccagtaatcccagcactttgggaggctaaggtgggcagatcccttgagcccaggagttcgagaccagtttgggcaacatggtgaaaccgtatctttacaaacaatacaatataaaaaatacaaaaattagccgggtgtggtggtgcatgcctgtaatcccagctacttggaaggctgatgagggaggattgcctgagcctgggaggcggaggttacaatgtgctgagattgc

SEQ ID NO: 118615 - DNA, 249 bp, Glycine max
gtgagggtgattttgcagagagttaacagcacaaaccactcactctcttaacttgagattattttttttctttccccaaacccaaagaggcatgagttgcaacgggtgccgcgtccttcgaaagggttgcagcgagtcttgtatcctgcggccgtgtctacagtggatcgatacgcccgaagcacaaggccatgccactgtcttcgttgccaaattctttggccgtgccgacctcatgtccttcatttc

SEQ ID NO: 118616 - DNA, 245 bp, Glycine max
atcgtattggtaggttgaaaaacaaagagtgtgtgttgttgttgtgtggtttggttttcacttttgttcatcgtttgcgagacacacaggagagaagagatggcgacgacggtggtggcggaacagaagccgaagacgaagattgtgtgcacgctggggcccgcatcgcgctctgtcccaatgatcgagaagcttctgcgcgcgggcataaacgtggctcgcttaaacttctcccatgggtccca

SEQ ID NO: 118617 - DNA, 255 bp, Glycine max
ggtttgggtttctcttcctcccttggagaaaaagaagagccaccgctgcgacgccgttcgtgcatttttgaggtgccgctgtcatgtttgggcgtggtggaccaaggaggagtgataactccaaatattatgatattctcgggatttccaaaaatgccagtgaagatgaaatcaagaaggcctatagaaaggcggctatgaagaaccatccagataagggaggagatcctgaaaagtttaaggagttaggtcaag

SEQ ID NO: 118618 - DNA, 255 bp, Glycine max
cgcctggacatagggatttcattaagaatatgattactgggacatcccaagctgactgtgctgttcttatcattgattcgaccactggtggttttgaagctggtatttccaaggatggacagactcgtgaacatgctctgctttcattcacccttggtgtgaaacagatgatttgctgctgtaacaaaatggatgctactacacccaagtattccaaggccaggtatgatgaaattgtgaaggaagtctcttcct

SEQ ID NO: 118619 - DNA, 257 bp, Glycine max
gccgaggaatcttcaacgtcgacggagaatcctggagcttccagaagaagatggcgagtcttgaactcagcaagaactcgataagatccttcgccttcgaggtcgtcaaattcgaaatcaaagaccgactcatccctctctctgttctgtccaaacaaaatgactgtgttttggatttacaagacgttttcaagagattctcgttcgacagcatttgtagattctccttcgggttggaccctatgtgtctggagctg

SEQ ID NO: 118620 - DNA, 258 bp, Glycine max
aaattagttcattctctttgcgcagttccctacctctcctttcaagatgcagatcttcgtcaagaccctcaccggaaagaccatcacccttgaggtggaaagctctgacaccatcgacaacgtcaaggccaagatccaggacaaggaaggaattcccccggatcagcaacgtctcatcttcgccggaaagcagctcgaggacggccgtaccctcgccgactacaacatccagaaggagtcaacccttcaccttgtcct

SEQ ID NO: 118621 - DNA, 270 bp, Glycine max
ggcatcaaacatcatatttacagtgaaagatgataatcctattggggcaaccttaattggaagagcatatgtgcctgttcaggagatcttgcatggtgaagaaatagatagatgggttgaaatattggatgagcataaaaatccaatacatggacattccaagatccatgtgaagttgcaatattttgatgtttcaaaagaccgcaactgggctctaggcattagaagtccaaaatttcctggagttccttatactttcttttcacaaag

SEQ ID NO: 118622 - DNA, 251 bp, Glycine max
gtgacactgccgagcgtgtcctcgagatgatccagcttctcctggaccttcttgaggcacctgacccttgcaccctcgagacattccttggaagagtccctatggtcttcaatgttgttatcctttctccccatggttactttgcccaagataatgtcttgggataccctgacactggtggacaggttgtttacatcttggatcaagttcgtgccttggagaatgagatgctcaaccgcatcaagaaacaa

SEQ ID NO: 118623 - DNA, 256 bp, Glycine max
cttctatccagatcacaagtactactcacactcactggagatcactctccatcgataccattgttagcatcaatgcccgccacatctcatgtcactcgcggcaactacaaccgtctacagtggattcgacatgcaccgatggtacttatgctagagctgctgttccaagtggtgcatccaatgggatctatgacgaccttgtaatttctagatctacgatctgtctaccttggaatatgtgtatcaaaggctgttg

SEQ ID NO: 118624 - DNA, 248 bp, Glycine max
tacagtttacgaatccttgctctactctgcatggcttcgtttaccttcaggtgttgattccaaaaccagaaagatgttcattgaggaagtcaacgaactggtggagctgaacccattaaggaactcactggttggattgcccggtgtgagtggtctctcaactgaacaacgaaagagactgactattgcagttgaattagtggctaacccgtccataattttcatggatgagcctacttctgggttag

SEQ ID NO: 118625 - DNA, 249 bp, Glycine max
ggctataaagagacagatattcagatatcttggttttgggagattgttggaagaatgacagcagatcaaaggaaggttcttttattcttttggacatctgtaaaatatttaccagttgaaggtttccgtggtttggcttcccgactctacatatacagatctattgaacctggtgatcgcctgccttcatctcacacatgctttttccggctgtgtttcccagcttattcatctatggctgtcatgaaa

SEQ ID NO: 118626 - DNA, 255 bp, Glycine max
cggctcgaggctgtggttatcatcttcttcttcctctttcttagatctcttctttctctacgccgcacgccgaaaccatggccggaaaaggagagggtcctgctatcggaatcgatctcggaaccacctactcttgcgtcggtgtgtggcaacatgaccgcgttgaaatcatcgccaacgaccaagggaacagaaccacgccgtcttacgtcggattcactgacaccgagcgtctcatcggtgatgcggccaaga

SEQ ID NO: 118627 - DNA, 255 bp, Glycine max
cttagataccttggatgagcctgaagccaaggcatcaatgatctggataattggtgaatatgcggaaagaatcgacaatgctgatgaacttcttgaaagtttcttggaaagtttcccagaagaaccagcacaagtccaactacagttgctgactgctacagtctaacttttccttaagaagccaactgagggcccacaacagatgattcaggttgttttgaacaatgccacggtggagacagataatcctgattt

SEQ ID NO: 118628 - DNA, 241 bp, Glycine max
caaactagtaatattattcttcgaatccattttattattcataatgggtattttcacatttgaggatgaaaccacctcccctgtggctcctgctaccctttacaaagctctagttacagatgccgacaacgtcatcccaaaggctgtcgaagccttcaggagtgttgaaaaccttgaggggaacggtggccctggaaccatcaagtcgatcactttcgttgaggatggagaaagctagttt

SEQ ID NO: 118629 - DNA, 260 bp, Glycine max
gagaaagtccttgctgggaaatcgcagattgaggactactttccagaatttgctcgctacactactcctgaggatgctactcccgagcccgggcaggacccacgcgtgacccgggccaagtacttcattcgctatgagtttctgaggatcagcactgccagtggagatgggcgtcactactgctaccctcatttcacctgcgctgtggacactgagaacatccgccgtgtgttcaacgactgccgtgacatcattcagcg

SEQ ID NO: 118630 - DNA, 249 bp, Glycine max
ataggaggacctgactacttggatctcccatttgttgaaaagatatgggagataacagcaaataacataatcatggtttctgcaattggaaatgatgggccactttatggaactttgaacaatccagcagatcaaagtgatgtcatcggtgttggtggtattgactatagtgaccatatagcctccttttcctcacgtggcatgagtacctgggaacttcctcatggttatggccgcgtgaagcctgac

SEQ ID NO: 118631 - DNA, 247 bp, Glycine max
aaaaatggcaatctccatacccagtagacaacttttcatagatggagagtggaaagtccctcttctcaacaatcggtttccgatcatcaaccccgctactgaagacatcatagggcatattccagccgctactaaggaagatgttgaccttgcggtggatgctgctaaaagagccttttcccataacaaaggcaaagattggtcttcagctcctggctctgttcgtgctcgctatcttcgagccatc

SEQ ID NO: 118632 - DNA, 252 bp, Glycine max
  unsure (1)..(252): unsure at all n locations
tgttcttccacacaacatacgacacacnctctctgnaatccanagncgaaaatgnttttcaagagttacgttgagatgctgagggntgctcaactcaatacacggcaaggttatgccatgcttctngtnatcgtcgacgtcattgaccagaacagagcacttgtcgatgcccctgatatggtgaggtcccaagtcaatttcaaaaggctttcccttaccgacatcaagattgacatcaagagggtccctaag

SEQ ID NO: 118633 - DNA, 256 bp, Glycine max
cgttctttctcaaagccgcactcaactttctaaaaccaaatcggtttgaatcctcatttcccgcctctcactggaaagcagcaaaatcacctttctctactatctatctgttccttttgtactctgagtgggtagaagtcatggtaaggctcactgctgacttgatttggaaaagccctcatttcttcaacacgattaaagagcatgagttagatctcagaggcaacaagatagctgtaattgaaaacttgggtgc

SEQ ID NO: 118634 - DNA, 256 bp, Glycine max
cgctctttcagctttgactttggtggaaactaaagactagtcaaaatggtgaagttcacagctgaagagctgcgtcgcattatggactataagcataatatccgtaatatgtctgtcattgctcatgttgatcacggaaaatcaaccctgactgattctcttgtggctgctgctggtattattgctcaagaagttgcaggtgatgtccgtatgactgatacccgtgcagatgaagctgagcgtggtattacaatca

SEQ ID NO: 118635 - DNA, 267 bp, Glycine max
tgttggtgggggtggcatctttgtcactatgctctcccttattattggatttgatgcaaaatctgctactgcaatctccaagtgtatgattacgggtggagcagcagcgacagttttctacaatttgaggcaaaaacatcctacgcttgacatgccagtgatcgactacgacttggcacttcttttccaaccagtgctggtgcttggaatcagcattggagttgccttcaatgtgatttttgctgattggatgatcacagtcttgtt

SEQ ID NO: 118636 - DNA, 254 bp, Glycine max
cttgctgaacacacacacacacacacacacacaggtggggactgggcacagctcttcacaccattcattctggtcatttcccccaaaggcatcccagcctgggggccagtggggaactgagggcaaggggatatagtgatggggctcagatggactgggaggagggggagggtgatgcattaattaatggcttcgttaattaatgtcatgttgcttgtcgctttctcagtgtgtgtgtgtggtccatgcacact

SEQ ID NO: 118637 - DNA, 249 bp, Glycine max
attatcattcgggtaatggacacatcactagtgtttactgtgaggaggagtgaggcagagctgatagctccggcgaagccacccctcgtgaagtgaagctactctcagacatagatgaccaagattggttacgtttccaaattccggtgatacagttctatcgccacgacccatcaatggcagggaaagaccctgtcgatgtgataagaaaggctgtggccataacgcttgtgttttactatccttttg

SEQ ID NO: 118638 - DNA, 247 bp, Glycine max
ctgagattaggggattactcaatacacttccacagttcactggttctgcgggaatgtttttctcctactgtatggtgtttgggatgtcactgatgaaggcgccaagctggagaatcatgttgggtgttctttcaatcccttctcttatttactttgcactcacactgttgttcttgcctgagtctcccagatggctcgtcagtaagggccgaatgcttgaggccaagaaggttttgcagcgccttcg

SEQ ID NO: 118639 - DNA, 242 bp, Glycine max
  unsure (1)..(242): unsure at all n locations
cacaaatcaatctccaggctatctatcaagtaagaaagctgttaagaggaggagaatggctgatgatggaagcaggagggaattgatattcaggtcgaagcttccggatatctacatccccaaacatatgcccctccactcttactgcttcgagaaacanagagagtgtggttcacgcccctgcctgatcaatgcccccacgggagacgtctacagctaccacgaggtggacagcaccgcca

SEQ ID NO: 118640 - DNA, 251 bp, Glycine max
ctcaaacacaaattcaaactgaaacacaaatggaaactgaaaatagtcaactaggattgaaggagtaccttaagcctcctcctgttgtgcatgatatggatgatgaggaaatgatatggagagcttcaatgactgcgaagatccctgattacccgtttgatcgtgttccaaaggttgccttcatgttcttgacaaggggtcctgtgttcttggcacctttgtgggagcaattcttcaaagggcatgaaggg

SEQ ID NO: 118641 - DNA, 267 bp, Glycine max
ctttggaacagaaagggaaaaaacagtcttatcctgacaggagcggtctatactagtgcagatttcaacacttttttttaacgttttaattactatagtgttatgtagagatttgattgagcagctaatgtttctgaactttacttactaattttcagtgtccttaagggttctgtagtgttatcaaagcaaaagaaaatgctgcataaaaataccaaacttcagcaactgttaatactcagatcatatacctcttaataaatagca

SEQ ID NO: 118642 - DNA, 270 bp, Glycine max
atcaggagcgaagttgggcgggacttcagagatccgcctcccttgcccttcccccgcccccggacggtcacagcacccaaaccgcaggccctgctctggcaggcaggcaaagctaggcagaagaggattcccaggatcctgggtctgttccctgccccagtgctgcagaacggacttgggagctctcctttgctgctcccgcgggtcacccagcgagtgctgagaccccattttctgtcgaggcgggccgagtcttcccttatccccaga

SEQ ID NO: 118643 - DNA, 270 bp, Glycine max
  unsure (1)..(270): unsure at all n locations
gttctctctctcccaaactcaatccctgtgagtgctttctttctgtaactaacttgttccctcgttaaccctaatcatcaactcaagcagtgaatgaatctgtggacggacgagaactcctcggtgatggaggccttcatgtcgtcctccgatctctcctcaatctggccctcgccggcnccgccgcaatccacggcggtcttcaatcaggacaccctccagcatcgcctgcaggccttgatcgaaggcgcccganagacctggacctac

SEQ ID NO: 118644 - DNA, 265 bp, Glycine max
caataacaatattattctcctcattccttcatttttaaacctagctccatctccctccactcaccataacatggcatcagaagcaaatgctgccaacaccaacttctgtgtaaatgttagcaacaatggctacattagtgctaatgaccccttgaactgcggtgcggcggcggaggctatggctgggaccacctcgacgaggtcaagcgcatgctagaggagtaccggaggcccgtcgtcaagctcggtggagagaccctgacca

SEQ ID NO: 118645 - DNA, 264 bp, Glycine max
cgtttcttctcttcactctgcccgctgcatcaatggcttcagagaagaaactttcgaacccaatgagggagataaaagtgcagaagctcgtcctcaatatctctgttggcgagagtggagatcgtctcaccagacgcctccaaggtgttggaacaacttagtggccaaaccccagtgttttccaaagcaaggtacactgttcgttcctttgggattagaagagatgagaagattgcatgctatgtcactgtcagaggtgacaag

SEQ ID NO: 118646 - DNA, 264 bp, Glycine max
ctggcaagaagtttgagattattcttgattttcttggtttggtggagaaattttattacctctcagggagatatgacattgagctgactgtcggggatgctgtcatggagaactctttcttatggctgcttggtcaagttgatttagatcttcctgaagcacctgagaaggcagcccgtcttcctccatccctgttgatccttactcaagatatgggcccaaagccgagatagcccacttattcagggctccagaaaagcgacc

SEQ ID NO: 118647 - DNA, 276 bp, Glycine max
ggggaacgtgttggcgccttaagcattgtctgcaagtcagctgatgttgcaagcagggttgagagccagctgaagctagtgattaggcccatgtactcaagtcctcccattcatggtgcatccattgtggctgccattctcaaggaccggaatttgttcaatgactggactattgagttgaaggcaatggctgatccatcatcagtatgcgccaagaacttttcgatgctttatgttccagaggcacacctggcgattggagtcacattatcaaac

SEQ ID NO: 118648 - DNA, 269 bp, Glycine max
ctcaattttcaatggctcaatcccattctgggaaaacctcttccatgacttcgatactcctcctgtttatgcgtcttatcagtaatacaggcacaacaggtgcagaatctggtgtatgctatggcagagttggcaacaatctgccatcgccacaagaagtagtttccctgtttaaacagtacggcttccacaggatgagaatctatgatcgataccatgaagtcctccaagctctgagagattccaacattgagttgctgctagatctt

SEQ ID NO: 118649 - DNA, 258 bp, Glycine max
tgaagagtgagagagagagagagagagaggcacttggaatccaaaaatgagagaaatcatcagcattcacataggtcagtgccgggatccaggttggcaactcctgctgggaactctactgcctggaacatggcatccagcccgatggcatgatgccaagtgactcctccttcggtgtagcccacgacgccttcaacaccttcgtcagcgaaaccggatccggcaagcacgtccctcgcgccgtcttcgtcgatctcg

SEQ ID NO: 118650 - DNA, 260 bp, Glycine max
ctcgagcgcaaggatgtgggtgcaaccttgtcatttgccaatggggttttgacgatgaagcaaatcatctcttaatgcacaggaacttgcccgctgtcagatgggttggtggtgtagagttggaattgatagctatagcaactggtggaagaattgttcctaggttccaggagttatctccagaaaagttgggaaaggctggtatggttcgagaaaagtcctttggtacaacaaaagaccgaatgctgtacattgaacat

SEQ ID NO: 118651 - DNA, 262 bp, Glycine max
gcgggccccgggccccgcacgggccgcgttcctgtcgggatcggcgggagaaggcagaggatcgtcgtcaccggcggcgcgggctacgtcgggagccacctcgtcgactcgctcatcgcgcgcggcgacgacgtcgatgtcatcgacaatttcttcaccggaagaaaagagaacctggtgcacctgttcgggaaccctaggttcgagctcatccgacacgacgtcgttgagccgattctgctggaggtggatcagatctatc

SEQ ID NO: 118652 - DNA, 260 bp, Glycine max
caaatctgatcacaaggctacagacagagcaattgacttcatgtatggatggtttatggatccattaagatctggagactatgccaacagcatgcgatcacttgtgaggacaagattaccaaagtttactgcagagcgatccgaactacttattggttcatttgatctcattagcctaaactattactctacaacatatgcctctgacgcacctgatctaagcgaagccgtcctagctacttaacagattctcttgtcac

SEQ ID NO: 118653 - DNA, 263 bp, Glycine max
ataaaataaaaagaaattttacaaaaatgccttcctcttccaccaccatagtctcctaatgcgtgatccaccccgaccagaaatcaaacatgaaacccttgagactctctgtttctgaccttccaatgttgtcatgtcactacatccaaaagggcgtgttactcaccgccccgccctcctcttttgacgcttaatactttcttttaaacacactctttctatcgcgctctctcactttcccgctctcgcgggaaggtttgaga

SEQ ID NO: 118654 - DNA, 262 bp, Glycine max
ctagagatgagttttgcaggttttctttctcttcaatcaatgtctgctacctgcggcttcttcttcttctctctcacccttctcttctccttcttctccttcctcgtcttcatctccaggatgaagccctggtgtaactgcgatctttgctagagctacttgacggtgagttggctgaaatcgttttcaatctctgcgactggtacactcatctcttgcgtaaatctccaaccggcaccatccacgttcacgtgctgtggaa

SEQ ID NO: 118655 - DNA, 270 bp, Glycine max
aattcactctgtacaattcttcgttcgttctctgcagttatatcctttttgagcttcaatggcggacgctgaaaccttcgctttccaggctgagatcaaccagcttctaagtctcatcatcaacacattctacagcaacaaggagactttcttgcgtgaactcatcagcaatgcttctgatgctttggatagattcgattcgagagcttaaccgacaagagcaagctcgatgctcagccagagctcttcattcgtcttgtgcctgacaag

SEQ ID NO: 118656 - DNA, 262 bp, Glycine max
gtagctattatactctctagagtaattgcggaatctgctagaattttctaataatggcgaaagacgttgagcaggtcacagagcaaggtgaatactccgcgaaggactaccatgaccctcctccggcaccgttgatcgacccagatgagctcacaaagtggtccttgtacagagccgccatagctgagttcatagcaacactcctttttctttacatcaccgtgttgaccattattggctacaagagacagagtgacaccat

SEQ ID NO: 118657 - DNA, 257 bp, Glycine max
ggcgtgtggttcgtgttggtctttcagtacgacgggagcgttggaaggagctcattatctggccactggtgagctcgtgagccttagcgagcaacagcttgtggattgcgatcacgtgtgtgatccagaagaatatggagcgtgtgactcaggctgtaatggtgggttgatgaacaacgcattgagtacatacttcagtctgggggagtacagaaagaaaaggactatccatacaccgggagagatggcacctgcaa

SEQ ID NO: 118658 - DNA, 256 bp, Glycine max
ccggatatgaccggtttgttgaggtcgaaaaaaatcgccacgtggagcaagctcttgctgggtcttcgagtaaccgcttttgttttctgcttggcgtctttctcggtgttggccactgataagaaacagggctgggctatcgactctttctatttatacaaggaattcaggtatagtttgtcagtgaatgttattgggtttgtgcattccgcgttgcagatatgtgatcttgggcggtactttgcaacgggaaagc

SEQ ID NO: 118659 - DNA, 259 bp, Glycine max
ctttctcatgggaaagtttgccctagccaatatcctcttggtccttctcttgaacttgagcactttgctcaatgatcttgcttgtccctattgcccttacccttctcccaagcctccaaaaaagcctcccgttgtgaaaccaccggttcacaaaccaccaaaaccatgtccaccacccaagtcatctccaaaaccaccccatgtacaccctccctatgttccaaaacctcctcactaccctaaaccaccagttcatcca

SEQ ID NO: 118660 - DNA, 256 bp, Glycine max
tctttctctagtcctgttatttctcagcgcgtaaagcatggctttgttggtggagaaaaccacgagtggtcgcgagtacaaggtcaaggacctttcccaggccgacttcggccgcctcgagatcgagctggccgaggttgagatgcccggcctcatggcctgtcggaccgagttcggcccctcccagcccttcaagggggcccgcatcaccggctccctccacatgaccatccagaccgccgttctcattgagacc

SEQ ID NO: 118661 - DNA, 254 bp, Glycine max
atggctcgtcactccttgctcttagccctcctcctcttcgccgctgtggccaccgccgcgatggcgtggcgcgtccgacgccgacgacatcctgatccgtcaggaggtgccagatgttggcgaagcgaagaggaggacaacctgctgaacgccgagcaccacttcgcacgcttcaaggccaagttcgccaagacctacgccaccaaggaggagcacgatcatcgcttcggcgtcttcaagtccaacctccgcag

SEQ ID NO: 118662 - DNA, 252 bp, Glycine max
tctaataacatttctaatctcattctccttctgttcaaacactctctctcatggcatcagataagaagattaggatcggcatcaacgggtttggaaggattggccgtttggtggccagggttgcccttcaaaggaatgatgttgaacttgttgctgtcaacgatcctttcatcaccactgattacatgagatacatgttcaagtacgacaccgttcatggccagtggaagcattttgatgtgaaggtgaagg

SEQ ID NO: 118663 - DNA, 263 bp, Glycine max
gagaatatcattctgtcatttaatcttcaaacatcagatattatgcctgcatttccatacactgccccattctcctccatggtgcccgatgcgtgtcgcattgtgagatcctttatcaaaggctctgttgattacttgtcttatggcatacatgtgaatttctttggtgttgtgagaaagtacttggacatgttcctgattgatgtactaaatgtaacactgcttgagaaaatcaatagtgacaatgtcactgtacctcaact

SEQ ID NO: 118664 - DNA, 258 bp, Glycine max
cattcttatttgtttcctctcttcactttcactctctctctctctctcagccatcatcatgggagcagtgattctcccagatctcggcaccgagattttgattccggtctgcgccatcattggaatagggttcgccctcttccagtgggtcttcgtctccaaggttaagctctccgctgcagagacgcttcccctaacgccgccggcaaaaatggctacaacgattacctcatcgaagaagaggaaggcctcaacgat

SEQ ID NO: 118665 - DNA, 255 bp, Glycine max
gatattcttatagatgggattaacatatgctcaatagggttgaatgatttgaaaataaagctaagcatcatccctcaagaaccaactcttttcaagggaagcattagaaccaacttggaccctctaggcctgtactcagatgatgatttatggaaggcattagaaaaatgtcagcttagagaaactatcagccgtctaccaaatctcttggactctttggtgagtgatgaaggtggaaattggagcttgggacag

SEQ ID NO: 118666 - DNA, 251 bp, Glycine max
ccaaaataaggatctagagctaattgaacagatcgagatttgccatgaagatgataaaatttttgacaaaatgcatagactgaaggtggcagacgttgaaaagcttacccagaccgtgagagaactataagaggctgtccttgcagagtggtgcagctggcaaatgctgtgagagatttcaacggaaatttcaagaaatgaatgaagaaagaaaaactcttgaccgggagttagctcgtgccaaggtaaca

SEQ ID NO: 118667 - DNA, 249 bp, Glycine max
gcaagaagtgtcaggcaaaatacatctgctagtggtgctcgtcctaatcctcaagggtcctttcattatggctccatcaatataactgatacttatgtgtttaaggttacatccctggtgccaatcaatggtacaaatcgagctactattaatgggatctcatttctcaagcctgaggttccattccggcttgctgacaagcatcaattaagaggaacatataagcttgattttcccagcaagccaatg

SEQ ID NO: 118668 - DNA, 252 bp, Glycine max
aagaaaatgaaggccatagtgataacgaggccaggaggtcccgaagtgctccaacttgaggaagtggaagatcccctagtcggagacgacgagcttctcatcggagtccacgccacttcccttaacagagccgatacctttcagaggaaaggctcctaccctccccctaagggcgccagccttacctcggtctcgaatgttccggaactgtcctttccctgggtaaaaacgtttccagctggaaaatcggtg

SEQ ID NO: 118669 - DNA, 216 bp, Glycine max
gctatttttatgaagtggatttgccacgattggagtgatgagcactgcttgaagtttttgaagaactgctacgaggcactaccagacaatgggaaggtgattgtggcagaatgcattcttccagtggctccagactctagcttggccacaaaaggtgtggttcacatcgatgtgatcatgtcggcacataatccaggtgggaaagagagaccagag

SEQ ID NO: 118670 - DNA, 297 bp, Glycine max
atgagatagaccccagaagtggtttcttcagctccaattcaatcttctacagcaagcgtaagcacctcccactccctcccaacaacgccttagacgtcaccaccttcatctcctcccgcgcccaccgcgccaccacagccttcgtcgacgccgccaccgcccgccgcctcacctacacccagctatggcgttccgtggagggcgtggcaagcctctctctccgtggacatggggatccgaaagggcaacgtggttctcatcctctcccccaactccatccacttcgccgttgtgtgc

SEQ ID NO: 118671 - DNA, 286 bp, Glycine max
aactgataaaaccaatagcatctgtgaaaaagttacctatcaccttaattctgtctcctgatctgcctactcatgccattggtgatgaaaagcgacttacacaaactcttttgaatgttgtgggtaatgctgtcaaattcactaaggagggctatgtttctataagagtatcggttgcaaaaccagaatctttacaggattggcgacctccagagttttatccagcatctagtgatggccatttctacatacgagtccaggttaaggactctggatgtggcatccc

SEQ ID NO: 118672 - DNA, 293 bp, Glycine max
gcagagcgaccttgaagagctatggctgtcggaaagaataagaggatttccaagggaaagaagggtggcaagaagaaagccgctgatccctttgccaagaaagactggtacgatatcaaggccccttccctcttccaggtcaagaatattggcaaaaccctcgtctctcgtacccagggaaccaagattgcatccgaaggactcaaacatcgggtttttgaggtctcattggctgatctccaaggggatgaagacactccttcaagaagatcgtttgagagctgaggacgttc

SEQ ID NO: 118673 - DNA, 287 bp, Glycine max
tcggatctagagtcttcagtttctcctcgttgttcttcgctttcctgttttcaatttcgattctttcgttaatttaataagatgtttgggagggcaccgaagaagagcgataatacgaggtactacgaaatcctcggcgtctccaagaacgcttcgcaggatgacctgaagaaggcttacaagaaagccgccattaagaatcaccccgacaagggcggtgatcccgagaagtttaaagagctggcgcaacttatgaggttctgagtgacctgagagcgtgagtatat

SEQ ID NO: 118674 - DNA, 290 bp, Glycine max
cattaaaagcactgcccttaataactaaaatctcaaagttagggggcaagctttctactgcgtcatctgttccagaagtgcaattagctcagtatgttccagcactggaaagactggctaccatgaggttgctgcaacaggtgtctaatgtgtaccaatctatgaagattgagaccttatcagggatgatccccttcttggactttgctcaagtggaaaagatctctgtagatgctgttaaacagaagtttgtatcgataaaatttgaccacatgagaaatgctgtgatt

SEQ ID NO: 118675 - DNA, 217 bp, Glycine max
gccttgtgacgtctttctgtcatgtagcttttagggtgtagctgtgaaaatcatcagaactcttcactgaagctaatgtttggaaaaaatatatacttgaagaaccaatccaagtgtgtgcccctacccccagctcagaagtagaaagggtttaagtttgcttgtattagctgtgccttcataattttgctatgtaaatgtgacatattaataataa

SEQ ID NO: 118676 - DNA, 241 bp, Glycine max
cttcctcttcctcagtagtgcgattttcgattctcttctctgcagctatgcctaaccctaaggtcttcttcgacatgaccatcggcggtcaacctgccggccgcatcgtgatggagctctacgccgacgtgactccgagcaccgccgagaacttccgcgcgctctacaccggcgagaagggcgccgggcggacggcaagcccctccactacaaaggctcgtccttccaccgcgtgatcccg

SEQ ID NO: 118677 - DNA, 190 bp, Glycine max
gcccttttggtaagagccaaggctaactcagaggcaactctgggaacctacaagggtaactcacagcttgctgatggtgcctcagagagcctccatgtttcgaactacagctactgatcaatcgaagttggtgttgtttgaagagactagtgcgagtaggaatcggtattatgggtacaacaaccgaatt

SEQ ID NO: 118678 - DNA, 194 bp, Glycine max
atagcatctcctttaccaccattctagatatcagagaactttgcagctctcttaggtttttaaaaaacaccacgcaaacagcaagatggccacttccaccagtaacatgctactaaattatgttccagtttctgtgatgctcccactcggagttgtcaatgttgacaatgtttttgaagacccagatggcctta

SEQ ID NO: 118679 - DNA, 180 bp, Glycine max
caagcccctcaaggcttcctctgctgactggaaccccaagtgcttggccacatctttgctgacaaacacctgtgggcactggaagagaacctggtcgtcacttctaactcgtcattcaccaacagcagcctagcgttgcccccattacaacacgactcccccaacatgtcgacataggat

SEQ ID NO: 118680 - DNA, 286 bp, Glycine max
  unsure (1)..(286): unsure at all n locations
gtttcctctgatgtcaaaaagccgaaagctccaccttctaattacgcagcaagaggcagcgtctaactccactgtcccacagcagcagcagcaacagcaagaaacagaagatgaagacgaaatcgtcgaagagcagtgtcacgtgaccttcacgggcttcccctggtggctccnaggcgttcgagatggccgcaaaattctgttacggcgtcaagatcgacctgacgccgtccaatgtggcggcgctccggtgcgctggggagtttctcgacatgaccgaggatta

SEQ ID NO: 118681 - DNA, 185 bp, Glycine max
ggaggagagagacagttcaatggccttgttgatgtctacaggaagacattggcatctgatggtgttgctgggctctaccgtggtttcaacatctcatgtgttggaatcattgtgtatcgtggtctgtactttggattgtatgattccgtgaaaccagttgtcctcaccggatcattgcaggatag

SEQ ID NO: 118682 - DNA, 276 bp, Glycine max
ggctacccgcgtggttcagcttttggtctttcgatcggaaatcgcactgttaagggtagagaggagtttcgcaagtatcattctgcagccattgatgtgcctggtcctgaagttgatagattggcagcaatggcagggaagtataaagtacatttagtgatgggtgtgatagagagggacggctacacactttattgcaccgttctgttctttgattctcagggtcattacctaggaaagcacaggaaaatcatgccaactgcattggagcgggtt

SEQ ID NO: 118683 - DNA, 186 bp, Glycine max
accgtttctttcacttcacaaaaatgaaaaacatgaaattgtgttcggtgatgctatgcttatcactagcgttccttcttggggccacagcagaacaatgtggcacacaagctggtggagcgttatgcccaaatagattatgttgcagcaaatttgggtggtgtggtgacacagattcctactgtg

SEQ ID NO: 118684 - DNA, 180 bp, Glycine max
agaagatgagggagttgatgatgcagctgttaaggttgttgacattgttgacacattcagacttcaggagcaacccgcattcgataagaagcagtttgttaccttcatgaagaggtttatcaagaatttgactcccaagctcgatgcagagcaccaggagttgtttaagacgcacatcga

SEQ ID NO: 118685 - DNA, 180 bp, Glycine max
ggaaagggtgtgagaagagaatggagagtaaagaggaagatgttaacgttggagcaaacaagttctcagaaaggcaaccaattggtacagcagctcagggtggtggtgacaaggactacaaggaggcacccccagctcctttgtttgaacctggtgagctcaaatcatggtccttctaca

SEQ ID NO: 118686 - DNA, 270 bp, Glycine max
cctagctagctagctaaaatggaattagttctacatttcctaaacaccacaacaattggagttgtttctctaatcttcctcttgtgtttgtttttgtatggtcccttaaaaaaagttcacggtagcagcaaagaggctcccacagttggtggtgcatggccaatatttggccacctcccattgttgattggttctaagtcacctcataaagccttgggtgctttggctgagaagcatggacccttgttcaccatcaagctcggtgccaag

SEQ ID NO: 118687 - DNA, 248 bp, Glycine max
gcttggaaaattagcctcacaaaagcaaagatcaaacaaaccaaggacgagaacacgatgttgcttgaacttgcacttggtttattggttttggctctgtttctgcacttgcgtcccacacccactgcaaaatcaaaagcacttcgccatctcccaaacccaccaagcccaaagcctcgtcttcctctcataggacaccttcatctcttaaaagacaaacttctccactacgcactcatcgacctctc

SEQ ID NO: 118688 - DNA, 182 bp, Glycine max
ctcatctggaaacttaatcattgatttttactgggggatggaactttatccacgcattggaaaacattttgagcataaaagtcttccaaatctgcagtttgtgaagacttttatgggctgttcttgcactgacctactgcataaagcagtatgaagaaaatggaaaagtagcggactcattg

SEQ ID NO: 118689 - DNA, 149 bp, Glycine max
tgcttgtctcaaagattaagccatgcatgtgtaagtatgaactaattcagactgtgaaactgcgaatggctcattaaatcagttatagtttgtttgatggtatctactactcggataaccgtagtaattctagagctaatacgtgcaac

SEQ ID NO: 118690 - DNA, 281 bp, Glycine max
  unsure (1)..(281): unsure at all n locations
ccgtctttatgtccctttatttttttgagggttaaaaactgctgtgaaatatttttctaggattttggctaatcgtctatcagctgctcgctcaaaagagaggaagatgcggtacatttctgaattagagctcaaagtacaaacacttcagacagagacaaccacattgtctactcagtttaccaaattacaggtgtgtacggtctgagttgagccaatattcccttttcttcagttttccaatgatatttnatggtgtcgaataatgtttgctctagcat

SEQ ID NO: 118691 - DNA, 280 bp, Glycine max
ctaatgttcttgctcttggtgctgatctttcttttgacaccaaaattggggagttaacaaaatccaatgctggactgagcttcaccaaagatgacttgattgcctcattgactctgaatgacaaaggtgatgctttgaatgctgcatattaccatgtagttaaccccttgaccaacactgctgttggtgctgaagtgacccatagattctcaactaatgagaacactctcactcttggtacccaacatcaattggatccattgaccacattgaaggcacg

SEQ ID NO: 118692 - DNA, 269 bp, Glycine max
gtaactctcaattccttcttccccagcaatttgtgcaaccacaaagaattgtggcacaacaagcaaatgaccagcctcaacttgagtctctaatgcacacttcccactaaagtccacaatttcaatcttgccacttcctctagcaatgtaaatcaactgaaccgtaggttgattgggtatgatggtgccttaatagcacccggttcaagtttcactctaatcacacttaacccaacatccccaataaaaggaaaatcttgctccgttaa

SEQ ID NO: 118693 - DNA, 257 bp, Glycine max
cagcctccaaatccaatggcttcagagaagaaactgtcgaacccaatgagggagatgaaggtgcagaagctcgttctcaatatctctgttggagagagtggagatcgtctcaccagagccgccaaggtgttggaacagcttagtggccaaaccccagtgttttccaaagcaaggtacactgttcgttcctttgggatgagaagatatgagaagattgcatgctatgtcactgtcagaggtgacaaggcgatgcaact

SEQ ID NO: 118694 - DNA, 245 bp, Glycine max
gcaccccctcagacgaagaagtgattctagcgtcagtcgtgccaaagaagcgaccgggaagaagagtcttcaaggagacaaggcaccccgtctaccgaggagtgcgtcgcaggaacaaacacaagtgggtctgcgagatgcgagtccccaacaacaactcacggatttggctcgggacatacccaacgcccgaagatgccgcacgtgcgcacgacgttgcggcgctcgcgctcaggggaaagtcg

SEQ ID NO: 118695 - DNA, 270 bp, Glycine max
  unsure (1)..(270): unsure at all n locations
gcaccccctcagacgaagaagtgattctagcgtcangcnggccaaagaagcgagcgggaagaagagtcttcaaggagacaaggcaccccgtctaccgaggagtgcgtcgcaggaacaagaacaagtgggtctgcgagatgcgagtccccaacaacaactcacggatttggctcgngacatacccaacgcccganatggccgcacgtgcgcacgacgttgcggcgctcgcgctcaggggaaantccgcgtgcctcaacttcgcggactcca

SEQ ID NO: 118696 - DNA, 144 bp, Glycine max
tcctcgatcatggctcacttcaaggtcagttaggatgatgagcttatcgcgaatgctgcgtacattggcactcctggagatggtattcttgctgctgatgagtcagcagggacagttggcaagcgtttggccagcatcagtgta

SEQ ID NO: 118697 - DNA, 267 bp, Glycine max
tatccagaatcctggtctctgtctactcttcaattattcccatcctctcacctctcgatcttcttcttccttacctttgaccagagacagagcagcactcacattcacaacgaaggttgcctattcatcagacatggtgaaggcaatcagagttcacgaactcggtggccctcaagttctgaagtgggaggatgtggaaattggagatccaaaagaaggcgaggtccgtgtgaggaacaaagccattggggttaatttcattgatgt

SEQ ID NO: 118698 - DNA, 263 bp, Glycine max
ggacgctgcctggccgtacttgcaaattgtgtatgaacgtcttctaaggttcgttgcgtcaccatagactgatgcaaagttggcaaaaaggtatattgatcattcatttgttctgtgactgttagacctttgtgattcagaggatcccatggagcgggattacttgaagacagttcttcatcgtatttatgggaaatttatggttcaccgaccattcatcagataagcgatcaacgatatatgctaccgctgcatgtttgaaa

SEQ ID NO: 118699 - DNA, 264 bp, Glycine max
ctcgagccgaaaactggtccaacattggataatacccatgtaagtactgtggtaaagggacattttgggtacttggatccagaatacttcaggaggcagcaactgactgacaaatctgatgtttactcgtttggtgtggttctctttgaggtattgtgcgctcgaccagcattgaaccccacccttgctaaggagcaagtgagtctggctgagtgggcagctcattgctaccagaaaggcattcttgactcaattattgatcct

SEQ ID NO: 118700 - DNA, 245 bp, Glycine max
gtcttgatgctgacaactgcaaggtcctcgtcaacattgagcaacagagtcctgatattgctcaaggtgtgcacggccacctcacaaagaggcctgaggagattggtgctggtgaccaaggtcatatgttcggctatgccactgacggagactcccgagctcatgcccttgagccatgtccttgccacgaagctcggtgccaatctcaccgaggttcggaagaacgggacatcccctgggctgag

SEQ ID NO: 118701 - DNA, 265 bp, Glycine max
atactacactatacttgtcaaccctttgagagttagaatggctgctgctattgaaatccccacaatagtgtttccaaactcctctgcccaacagaggatgccagtggttggaatgggatctgcccctgacttcacatgcaagaaagacacaaaggaggctatcattgaggccgtgaaacagggttacagacacttcgacactgctgctgcttatggctctgaacaggctctcggtgaagctctcaaggaagctatccatcttggc

SEQ ID NO: 118702 - DNA, 265 bp, Glycine max
agcagaccccggtgacgcatttttggtgccaattccttattatccaggttttgaccgggatttgaggtggagaacaggaattaaacttgttccagttatgtgcgatagctcaaacaatttcaagttgacaaagcaagcattggaagatgcgtatgagaaagccaaagaggataacattagagtaaagggcatgctcatcaccaatccttcaaacccattaggcacagtcatggacagaaacacactaagaaccgtggtgagcttc

SEQ ID NO: 118703 - DNA, 265 bp, Glycine max
tagatcgcagagaagaacagagatagatccatccatcaattccaatggccgatcagctcatcgaagaacagatctccgagttcaaggaagccttcagcctcttcgacaaggacggggatggtctcttttctcagatcccttttctctctctctttctctcttatttcattagatctcattccagtctcgtttatctttattacccttttgattattttgttaaattgttaatcttttgtcctttgggtgccttctcctttcactt

SEQ ID NO: 118704 - DNA, 266 bp, Glycine max
gtgagcttaaaagtttgacgcatctgtacctaagcttcaacaatttcaagggagaaattcccaaggagctagcaaatcttccagaccttcgctatctatatctccatgaaaaccgtttagctggaagaataccaccggaattgggcacactgcaaaatcttcggcacttggatgctggtaacaatcatttagtgggtaccataagggaactcattcgtattgaaggttgctttcctgcactacgcaatctgtatctaaacaataat

SEQ ID NO: 118705 - DNA, 256 bp, Glycine max
tcagcagtcacactgaggtgttaattgctcatagtaaaaatggagtctgtcaagttcattaacatgagtgccaaacactcctccatcttcttattagccatgtatctttgttctgatcttagcttcagcaaatgccaaaattcacgagcacgagtgtgttgttgaagcaactccagtgaagaggctgtgcaaaacccacaacagcatcaccgtgaatgggcaatacccgggcccaacgttggaaatcaacaatgga

SEQ ID NO: 118706 - DNA, 261 bp, Glycine max
ctttttctctcagattcttgcgcggtttatcatgggggatagtcagtattcgttttctctcaccacatttagcccttctggaaagcttgttcagattgagcatgctttgacggctgttgggtctggacaaacgtctttgggaattaaagctgcaaatggagttgtcattgctaccgagaagaaattaccatctatattggttgatgaagcatcagtccagaaaattcagttattaacaccaaatataggtgtcgtatatag

SEQ ID NO: 118707 - DNA, 256 bp, Glycine max
gtacactgttcctatggctaccaccgaagttgcttggtcgctagcaccaacagaggctgcaaggcaattcacgtctccgggggagcttcctccatgctcctccgtgacgccatgaccagagcccccgtggttaggttcaactccgccaaacgtgcttctcagcttacgttctacctggaagaccctctcaatttcgattcccttgccgtcgttttcaacaagtcaagcaggtctgcgagattgcaagatattaagg

SEQ ID NO: 118708 - DNA, 255 bp, Glycine max
caaaaccctatctctcaccaacttccgctacttcctactccaacacatttcttttttcccgcagtcatgggcaaggtcaagatcggaatcaacggatttggaagaattggccgtttggtggccagggtggctctgcagagagacgatgttgaactcgttgccgttaacgatcctttcattaccaccgattacatgacatacatgtttaaatacgacagtgttcacgggcactggaagcatcacgatgtcaccgtt

SEQ ID NO: 118709 - DNA, 240 bp, Glycine max
ccctagtcaaggagatgcatcgctgcagaggttggttgagaaaagagaaaatgctgaggatttgctgcattggggctggatatgtgtgggggtccaacaatggcagtcattgcactgaaatgcccctcaattgaagtggctgttgttgacatctctaaatccaggattgcagcatggaacattgaccagctccctatctatgagccaggccttgatgatgtggttaggcagtgtcgtggg

SEQ ID NO: 118710 - DNA, 255 bp, Glycine max
caacaacttctgctacttcctactccaaccgcacttctggtccgcaattatcatgggcaaggtcaagatcgggatcaacggatttggaagaattggccgtttggtagccagagtggctctgcagagagacgatgttgaactcgttgccgttaacgaccctttcatcaccagcgtttacatgacatacatggtgtagatacgacagtgttcatgggagcactggaatcatggctatgtcgcggttaagggcggaga

SEQ ID NO: 118711 - DNA, 260 bp, Glycine max
cttatactagttttctacgattattcatagtgaggcaatagtagcatcaattcacactggtctttgcttctcgttactcatttctcacctaactttctattcttctcagtctcagatcagaaccttagccatggcagcgttccagaagatcaaggtcgccaaccccatcgtcgagatggacggatatgaaatgactagggttatctggaagtcaatcaaggacaagctcattttgcccttcttggagttggacatcaagt

SEQ ID NO: 118712 - DNA, 261 bp, Glycine max
cttgtttcatctaataatggctgcaacaacacgttcacgtgcattcatctacgatgtgttcctcaacttcagaggggaagacacacgctatggtttcaccggcaatctctacagggctctttctgacaagggaattcgtaccttctttgactcagagaagcttcacagcggagaggaaataacacctgcacttttgaaggcaattaaagattccagaattgccatcactgtgctctctgaagactttgcttcttcctcatt

SEQ ID NO: 118713 - DNA, 260 bp, Glycine max
gtcaaggctgagaacgggaagcttgccatcaatggaaatcccatcaccatcttccaggagcgagatccctccaaaatcaagtggggcgatgctggcgctgagtacgtcgtggagtccactggcgtcttcaccaccatggagaaggctggggctcatttgcaggggggagccaaaagggtcatcatctctgccccctctgctgatgcccccatgttcgtcatgggtgtgaaccatgagaagtatgacaacagcctcaagat

SEQ ID NO: 118714 - DNA, 260 bp, Glycine max
ccaattcttattctgtcgctctctttctctctgcttgcggtgcttcacaagccaaatctaacttgtctctgcgttctccgatctagtgctactatcaatggccggaaaatgagatggtcctgctatcggaatcgatctcggcaccaccttttcctgcgtcggagtgtggcagcacgaccgtgtcgaaatcatcgccaatgaccagggtaacagaaccacgccgtcttacgtcgctttcactgattccgagcgtttgatcg

SEQ ID NO: 118715 - DNA, 256 bp, Glycine max
gcacacacaaacccgtccctcacactctgcaaaccctagcggcactacacactagttctatcgctatctccccaagatgtcgagcgccgatcccgagcacagagaagaggaggaggcacccgccgttggcgacgacgaggacaccggagctcacgtcgctccaatcgtcaagctcgaggaggttgctgtcaccaccggcgaggaggacgaagatgcaatcctggatctcaaatcgaagctttaccggttcgacaag

SEQ ID NO: 118716 - DNA, 243 bp, Glycine max
gttgtagttgttgatggttaccaaggccagcctttgatctttacacctgttaattgtaacaaaggtgtcattcgtgtttccactgatctcaacatctatttccccgttgccagaagttgtccacagaccacagtgtggaagcttaaggactatgattattcagcatcacagaggtttgtgacaactggtggtgatttcggcaaccccggttcgcaaaccgtggcgaattggtccaggatttag

SEQ ID NO: 118717 - DNA, 180 bp, Glycine max
gtctagaaccactaaccccgcattgctgttgatcgtcacgctcgcatctatagataacggctctccagacctgagctttccgcgtcagcaagtaggaatcgtttttgctgcagagaataaaaggaccacgtgcaatacttaaaaaaaagaaaaaaaaaaaaaaaaaaagggggggccccc

SEQ ID NO: 118718 - DNA, 205 bp, Glycine max
tcgttcttgtcgtcgccgtcaccatcttcgccttcgttgtcaccagcaagggcgctggcgaagttggtgtctaatagagtgtataaggagtataggcttggggattactcgaactggttgcagaatagggttaacaacactaagacgtggaacaggatcaggagttgcttgcaatctgggaaagtctgcactgagtttcaatcca

SEQ ID NO: 118719 - DNA, 225 bp, Glycine max
cttaatttgtctctcattcgcttcaaatttcaggaaatcaattatggctcgaccctcgacaagaataggccttgctggactggctgttatggggcaaaatctagcactcaatattgctgagaaaggctttcccatttctgtttataaccgaaccacttccaaggttgatgagactgtagaacgagcaaaacaagaaggaaatcttccagtttatggctaccatga

SEQ ID NO: 118720 - DNA, 255 bp, Glycine max
atcgaggggcgctgtttactgcacttgttgtcatatatgcacttacttcagggattgctggatacactgcaacttcattctattgtcagttggaaggaacaaactgggttaggaatctgctgttgactggatgccttttctgtggacctctgtttctgactttctgctttctgaacactgttgcaattgcttacaaagctactgctgctcttccatttgggacgattgtggttatagttctcatatggtcacttg

SEQ ID NO: 118721 - DNA, 252 bp, Glycine max
ctgagaatggaggcgctaagtcgctccgtggaagacgtattcgaggatttcaagggccgaagagccggcatcatcaaagctcttaccaccgatgttgaagatttctacagccaatgtgatcctgagaaggagaatttgtgcttatatggatcacctaatgagcaatgggaagtaaatttacctgttgaagaagttcctccagagcttcctgagcctgtcctgggcattaactttgctagggatggcatgcag

SEQ ID NO: 118722 - DNA, 140 bp, Glycine max
taacaatatatagaattgtagactgatgttttagcatttttccaacacacacaacgtacagataaaagcagtcgaccgcacttatggtaatcagttttgtataacttaaaataattaaataaatgaataaatccaaaaca

SEQ ID NO: 118723 - DNA, 255 bp, Glycine max
tgatgaatggttccatacaggggatattggagagtggcaacctaatggaagcatgaaaattattgatcggaagaagaatatatttaagctttcacaaggagaatatgttgctgtcgaaaacctggagaatatttacggtcaagtttcttctattgaatctatatgggtttatggaaacagttttgaggccttccttgtggctgttgttaaccccagtaagcaagcacttgaacattgggcccaagaaaatggtat

SEQ ID NO: 118724 - DNA, 258 bp, Glycine max
gtctgttttagtgactctgacacgatgctgtcctcaccttccaaatacccagttatttattcaagaggggggaagtgggtagaggatgggatgttttggaagcactttgcaacttaccactatctgaaaatcccctggcgttgcggggagaagctttgaatgcactgaagagaattccttctaaatgaaggcaggtgatagtgttctttctgtaagtaaagggaaagaaaaaaaacatagtttgcttaccaggtggag

SEQ ID NO: 118725 - DNA, 262 bp, Glycine max
tgagaagagaaaaatggcaatctccatacccagtagacaacttttcatagatggagagtggaaagtccctcttctcaacaatcggttttcgatcatcaaccccgctactgaagacatcatagggcatattccagccgctactaaggaagatgttgaccttgcggtggatgctgctaaaagagccttttcccataacaaaggcaaagattggtcttcagctcctggctctgttcgtgctcgctatcttcgagccatcgcttca

SEQ ID NO: 118726 - DNA, 257 bp, Glycine max
cacctttctcctaaaacatctcaatgggttcttcttctattacaacatcgccagaaaccatcaccatggctgcgatcgtgctcctgttcacggtctttgccgtttcctccgccctagacatgtcgataatctcgtacgacagcgcccacgcggacaaggccgccacgttgcgcaccgaggaggagctgatgtccatgtacgagcagtggctcgtgaagcacgggaaggtgtacaacgcgctcggcgagaaggagaag

SEQ ID NO: 118727 - DNA, 262 bp, Glycine max
gttatttcacgcgttctctctccaatttggccctccctttccttcgttcctcactcactgcaacggcgccggagatccgtcgctctcctcctccaccaccaccgcgatgggcgccaattccatgctcgccgagttctctcacgatctcgacgaccagatctcccagctcatgcagtgcaagccactctccgagcaacaggtccgaggtttatgtgagaaggctaaggagattttaacggatgaaagtaatgttcagcctgtt

SEQ ID NO: 118728 - DNA, 261 bp, Glycine max
gggcaagctttctactgcgtcatctgttccagaagtgcaattagctcagtatgttccagcactggaaagactggctaccatgaggttgctgcaacaggtgtctaatgtgtaccaatctatgaagattgagaccttatcagggatgatccccttctttgactttgctcaagtggaaaagatttctgtagatgctgttaagcagaagtttgtatcgatgaaagttgaccacatgaaaaatgctgtgatttttagtaaaaagag

SEQ ID NO: 118729 - DNA, 260 bp, Glycine max
cgggactttcactagccgcagcagcctcaggaggagaataaggatgtctcacaggaagttcgagcacccaaggcacgggtcactgggatttctccccagctaagcgtgctgctcgtcacaggggaaaagtgaaggcattccccaaggatgacccatccaaggcacccaagctcactgcattcttgggttacaaggctggtatgactcacattgttagagaggtcgagaagccaggatcaaagcttcacaagaaggaaaca

SEQ ID NO: 118730 - DNA, 261 bp, Glycine max
gtccgggctgtgctagggcccggcgggcgctggtgaggcctctggtcgggcttcttccgcgcgtgtgatccgacgaacttaagagggaggggtgattttctgggttttcaacgtcttggtcctcgtctcaaaagtgtatcttcggccgggcgcggtgtctcacgtctatcatcccagcactttgggaaggtaagttgggtggatcatttgaggtcaggagttcgagaccagcctggccaacatagtgaactctttactaaa

SEQ ID NO: 118731 - DNA, 259 bp, Glycine max
cagtttttagccaccccagtttcataagcattgctgagatattagaggaagacacagacatcgaatgtgaccgcaatgctcgttcacattgtttatagtctttcaaaggatatggggttccctggcttcagagttggcatcatatactcttacaatgatgctgtggtccattgtgcacgcaaaatgtcaagctttggattggtgtcaacacagactcagtatcttttagcatcaatgctaaatgatgatgagtttgtgg

SEQ ID NO: 118732 - DNA, 257 bp, Glycine max
  unsure (1)..(257): unsure at all n locations
ctcatcaatctcgtttgttctcactaactattgcttcatcatgttgtcgagtagagttggtcaagtcatcaaatgcaaagctgcggtttcagaanangcanggaagtcacttgtgattgaagaagtagaggtggcaccaccacaagctggtgaagtgcgtttgaagatcctctacacctctctttgccacactgatgtttacttctgggaagccaagggccaaactccattgtttcctcgtatatttggtcatgaag

SEQ ID NO: 118733 - DNA, 259 bp, Glycine max
acaccacctgacaggccttctgggcctccaaagcccatccttggggttccccctccctgtgtgaaatgtattatcaccagcagacactgccgggcctccctcccgggggcactgcctgaaggcgagtgtgggcatagcattagctgcttccggccctcctggcacccactgtggcctggcatcgcatcgtggtgtgtcaatgccacaaaatcgtgtgtccgtggaaccagtcctagccgcgtgtgacagtcttgcattc

SEQ ID NO: 118734 - DNA, 257 bp, Glycine max
cagaattctctaaaagagatctttttctgctctttgaagaaagaagggtctttgcttgattttggagatgtctctgctctcagatctcatcaaccttaacctctccgataccaccgagaaggtgatcgcagagtacatatggatcggtggatcaggaatggacctgaggagcaaagcaaggactctcccaggaccagttagcgacccttcagagcttcccaagtggaactatgatggttccagcacaggtcaagctc

SEQ ID NO: 118735 - DNA, 257 bp, Glycine max
ctcgagccgttcaacttcacccattcatacgtggtgttgttactgctgctcttttctcttttcttttctctttagttctctcttcccctttctttttctttttcttcttcttctgagcttgtttaagcttttcttccattaacatattatcacaatgtgtggtattcttgctgttcttggttgttctgatgactctcgagccaaaagggtccgcgtgcttgagctctctcgcagattgaagcaccgtggccctgact

SEQ ID NO: 118736 - DNA, 261 bp, Glycine max
tgttataaaacttatatttcattaattatttagtaaaaattcaacttttacatagacatcatcataagatcaaaaaaatacaaaagaactgcaactaatacagatcatgctattaccgtagttggttatggaaaatctcgtggtggtaccaagtattggctggtgaaaaattcatggggcgctggatggggtgagaaagggtatataaggatgaagagagatatacgtgccaaggaaggtttatgtggaattgctatgaat

SEQ ID NO: 118737 - DNA, 255 bp, Glycine max
  unsure (1)..(255): unsure at all n locations
aattaatgtactttaatttttcattttcttttaggatatttagaccacccttgttccacgcaaaccagagtgtgtcagtgtttgtgtgtgtgttaaaatgataactaacatgtgaataaaatactccatttgaaactcttcggttatttgatantgctatgaataatgtttaaatgtcattatgtaatgctattcaattagctttattactttctcaaatagttgaatatgttctatcacttaaaaacttaaaaa

SEQ ID NO: 118738 - DNA, 255 bp, Glycine max
gacttaacaacagcacaaagcgggttactgtctgttcaagctaccatctctctctctctttcttagtgcctccttgccagaagctaaaatggcccaagaaactttcctattcacatctgaatcagtgaacgaggggcaccctgacaagctctgtgaccagatctccgatgctgtgctcgatgcatgcttggagcaggaccctgacagcaaggttgcctgtgaaacctgcaccaagaccaacatggtgatggtttt

SEQ ID NO: 118739 - DNA, 256 bp, Glycine max
gtccttggagctacaaactctcgtcctgatttgatattgatcggacaccaagataatgcggaatttgctcttgctatgtgcccaactgaaccctatgttctttcaggaggaaaggacaaaacagtggtgttgtggagtattgaagaccatataacatctgctgctacagactccaaatctggtgggtcaattatcaaacaaaactctaaatctggagaaggcaatgacaaaactgctgatggccctactgttggac

SEQ ID NO: 118740 - DNA, 257 bp, Glycine max
aatctatgaggggtatgcactcccccatgccatccttcgtttggatctcgctggtcgtgatctaactgatcatttgatgaagatcctcactgagagaggatacatgttcaccacctctgctgagcgagaaattgtccgtgacatgaaggaaaaacttgcatatgttgccctagattatgagcaagaactcgagactgcaaaaagcagttcatcagttgagaaaagctatgagcttcctgatggacaagttatcacaa

SEQ ID NO: 118741 - DNA, 257 bp, Glycine max
ttttgaaacgtgagactgagaatggaacgtggggttcttgatagtatcattaataggctgcttgaagtcagaggcagaccagggaagcaggtgcaactttctgaggctgagatcaagcagctttgtcttgtctccagggatatcttcttgaggcagcccaacctcttggaactcgaggcaccaattaagatctgtggagatgtccatggtcaatattccgaccttctgcgactttttgagtatggtggattgcctcc

SEQ ID NO: 118742 - DNA, 255 bp, Glycine max
ctccttttggtttatacagagacagggagacaagacagagcaatacaggttactaccaatggctaccaaggtttatattgtttattattctacatatggacatgttgagaagctagctagagagatagaaaaaggggctgcttcggtggatggagtagaagcaaaactgtggcaggtacctgaaaccttgcctgaagaggtccttgcaaagttgggagcacctccaaagagtgatgctccaattattactcccaa

SEQ ID NO: 118743 - DNA, 247 bp, Glycine max
  unsure (1)..(247): unsure at all n locations
atcactcttcttccatagtttcgtctgtgtctgtaactctgcatttaccaagagcagatattataagatgggagacgctgaggatattgaaccccttgtttgcgaaaatggatctggaatggtgtaggcaggatttgtaggagacgatgcaaaagagaaatganatatagcattgttggtcgtcctcgtcacactggtgtgatggttggtatgggccagaaagatgcatatgttggtgatgaggcac

SEQ ID NO: 118744 - DNA, 253 bp, Glycine max
caaatcttaccccgcctgtttaccaataacatcacctctagcatcaccagtattagaggcaccgcctgcccagtgacacatgtttaacggccgcggtaccctaaccgtgcaaaggtagcataatcacttgttccttaattagggacctgtatgaatggctccacgagggttcagctgtctcttacttttaaccagtgaaattgacctgcccgtgaagaggcgggcatgacacagcaagacgagaagaccctat

SEQ ID NO: 118745 - DNA, 253 bp, Glycine max
agagagagaagcattggttgttaatgatggcggaggggaaggaagagggtaaatttagcgaggaaagcgtgaagctgttcgtgggtacagtgccgaagcgcatggcggaagatgaagtgcttgcaatgttcaaggagttcgctttggttgacgaggtcaacatcatcagagacaaagctagtcgtgcctcccgaggttgttgctttgtaatttgtccgtccagggaagaagcggataaggcggtcaatgcttg

SEQ ID NO: 118746 - DNA, 253 bp, Glycine max
tgctgccgcgcctgcaggcccgctactactccatcgcctcatcctccaaggtccaccccaactctctgcacatctgtgcggtggttgtggagtcgcagaccaaggctggccgcatcaacaagggcgtggccaccaactggctgcgggccaaggagcctgccggggagaacggcggtcgtgcgctggtgcccatgttcgtgcgcaagtcccagttccgcctgcccttcaaggccaccacgcctgtcatcatggt

SEQ ID NO: 118747 - DNA, 254 bp, Glycine max
ggagcagcagcagctcatcgacgaccacttcctcttcgacaagcccgtgtcgcccctgctgctggcctcgggtatggcccgcgactggcccgacgcccgcggtatctggcacaatgacaataagaccttcatggtgtgggtcaacgaggaggaccacctgcgggtcatctccatgcagaaggggggcaacatgaaggaggtgttcacccgcttctgcaccggcctcacccagattgaaactctcttcaagtcta

SEQ ID NO: 118748 - DNA, 254 bp, Glycine max
tgggctatgaagatgaggaacgttccagattactcttggtggaaggctctatagctgagaagtggaaggatcgactcggtaaaaaagttaagcgctgggatatgaagcttcgtcatcttggactcagtaaaagtgattctagcaatagtgattccactcagagtcagaagtctggcaggaactcgaacccccggcaagcacgcaactaaatcccgaaatacaaaaagtaacacagtggacttcctattaagact

SEQ ID NO: 118749 - DNA, 253 bp, Glycine max
aattagcttattttctccatacaacaagatgggtaaattcaacctctctcatagggtggtattggctcccatgaccagatgcagagcgctcaatgggactccactggcagcacatgctgaatactacgctcagagatcaacaccgggtggatttctcatcactgaaggcaccttgatctctccaacttcttctgggtttcctcatgttcctggaatatactcagatgaacaggtagaggcatggagaaatgta

SEQ ID NO: 118750 - DNA, 241 bp, Glycine max
gtactttgaagccacttgctattgaattaagcaaaccacatccagatggagataatttgggtcctgagagtatagtggtgttgcctgcaactgaaggtgttgatagtacaatttggctatcggccaaggctcatgttattgtgaatgactctggttatcatcagctcgtgagccattggttaaatactcatgcagtgatggaaccatttgccatagcaaccaataggcatctcagtgtgct

SEQ ID NO: 118751 - DNA, 253 bp, Glycine max
gtgaaagttggaatggcgaaaaaggcagtgttgatcggaataaactacccaggaacaaaggcggactgagaggatgcataaacgacgtgtggagaatgcatcgctgcctgatcgagcgatacggtttgtccgaagacgacatcaccgttttgatcgacacggacgagtcctacacggagcccaccgggaagaacatccggtcagcgctgaccaggctggtccgatcggcggagccggggacgttctgtttgtg

SEQ ID NO: 118752 - DNA, 250 bp, Glycine max
gcctgatattgcagctccgggagttaacattctcgctgcatggattggaaatggcacagaagtggttcccaaaggaaaaaagccctcactatacaagataatctcagggacttccatggcttgcccgcatgtttcagggcttgcaagcagtgtcaaaacacgcaaccccacttggagtgcctcctcaatcaaatctgccatcatgacttcagcaattcaaagcaacaacttgaaggctcccataacaacg

SEQ ID NO: 118753 - DNA, 249 bp, Glycine max
aagaaatctgaattgtcggcattagttgatcgggccactggaggaggcagtatcaaagatggacaggtggaacttatgcttcataggcgcatgctctttgatgatggcagaggagtagacgaacgtcttgatgaactagtgtgccaaaatgatagatgtcaaggactaacagtaagaggaaattattatgtgggcatccacaaacttggagctggttcacactggcgccgtacaactggtcaggaagtt

SEQ ID NO: 118754 - DNA, 251 bp, Glycine max
  unsure (1)..(251): unsure at all n locations
cggctcgagttcagttctctatgtactataaagtcatgacatctgcatataganatagtttcacttcttcctttccaatctgggtacttttccccccaccgatgtcagttgccctggctgaaaccgacaatgcantgtcaaataggagaggacaatgatgtccattgtcctctcctatctgacattgcattggtggttccagcatgacaactaaacacggtgggacagatggacatcattgtcttgtttct

SEQ ID NO: 118755 - DNA, 229 bp, Glycine max
gcctgatattgcagctccgggagttaacattctcgctgcatggattggaaatggcacagtagtggttcccaaacgaaataagtgctcactatacgagataatctcagggtattccatggcttgcccgcatgtttcagggcttgcaagcagtgtcataacacgcaaccccacttggagtgccgtctcaatcgaatctgccatcatgacttcagcaattcgaagcaacaac

SEQ ID NO: 118756 - DNA, 251 bp, Glycine max
ctcgagccgaatcggctcgagccgcctcatgaaaaccacccaaaggatcaaccaactcaatgcacagctcctcactactagatcaggcggcattgccattcttgcacccgatgacagtgccttctcagaactcaaagcaggcttcctcaactctctttctgatggccaaaagctcgagctcttacagttccacgttatttcagactacgtgtctagctccaactttgatacactgaccaaccccgtgagaa

SEQ ID NO: 118757 - DNA, 253 bp, Glycine max
taacaagggtactgtggaaatcattacacctgtggaactcattaggaagggagacaaggttggatcttctgaagctgcattgcttgccaagctaggcataaggcccttctcatatgggcttgtggttctctctgtttatgataatggttcagtgttcagccctgaggttcttgatcttactgaggatgacctcattgggaagtttgctgctggtgtctcaatggttacttcactttcattggctatttcatat

SEQ ID NO: 118758 - DNA, 227 bp, Glycine max
cagaaaagatgagcggcggtggtgggtcttcgagttgtgctacggttccgatcccagacaatgtacgcaaaatcatccaggacatccgtgagatcaccggcaagcagcacaccgacgacgaaatctacgccatcctccgtgaatgctccatggatcccaatgagaccgctcagaagcgtctctatttagatacttttcatgaggtgagaaggagacgtgaccgaaag

SEQ ID NO: 118759 - DNA, 269 bp, Glycine max
gtctgcttgttcttgtttgatttgtttatttttactcgaggaaacaaatcatataggaagagggttttgggttggggggagcgccaggggacatgctcgagatcccttgtggctcactattggaacataagcttaaattaaattaagttttaaattaatggtttggatagaagtatgatacttgatagaacattatggcggaagttgatccatgtaaccgaccccacctagtgggataatgcgttgttgttgttgttgttgtatatgta

SEQ ID NO: 118760 - DNA, 273 bp, Glycine max
aaagaacaagtcaagcttctctacaagcgccacaagaacactgctttctcctggctcagaaacatcttccatgactgtgctgttcagagttgtgatgcttcactgttgctggactccacaagaaggagcttgtctgagaaggaaacaatagaagctttgggttgagaaatttcaggtacattgagaccatcaaagaagctttggaaagggaatgcccaggagttgtttcctgtgctgatatcctcgttctctctgccagagatggcattgttt

SEQ ID NO: 118761 - DNA, 187 bp, Glycine max
cttgtgctttcttaacctattttgttatcctcaattttcaatggctcaatcccattctggaaaaacctcttccatgacttcaatactcctcctgtttatgcttcttatcagtcatacaggcacaacaggtgcacaatctggtgtagctatggaagagttggcaccatctgccatcgccacaagaagt

SEQ ID NO: 118762 - DNA, 114 bp, Glycine max
aacaaatatgggttctgccatgcttgcaatggatctgggatggatgggccctaattattctatctctacagcttgtgctacaagtaacttttgtatattgaatgcagcaaacca

SEQ ID NO: 118763 - DNA, 173 bp, Glycine max
cggctcgagcaagaccaagcgcactattcaatttgttgactggtgccccaccgggttcaagtgtggaatcaattaccagcctccgactgttgttccaggtggtgatcttgccaaggttcagagggccgtgtgcatgatctccattccaccagtgttgttgaagtcttctctcg

SEQ ID NO: 118764 - DNA, 271 bp, Glycine max
gtctgcttgttcttgtttgatttgttgattattactcgaggagacaaatcatataggaagagggttttgggatgaggggagcgccaggggacatgcgcgagatcccgtgtggctcactattggaacataagctgaaatgagattgagtattaaattaatggtttggatagaagtatgatacttgatagaacattatggcggcagttgatccatgtaaccgaccccacctagtgggataatgcgttgttgttgttgttgttgtatatgtaac

SEQ ID NO: 118765 - DNA, 158 bp, Glycine max
gaactgcatgatacttccttaagaatggctgccaagggtgtcattagagaagttctggactggcgtaactcccgctctgtcttttaccagagactgcacaggagaattggtgagcaatcactgatgaacagtgtgagagatgcgctggtgaccaattg

SEQ ID NO: 118766 - DNA, 267 bp, Glycine max
atctaaaccatcactacacctaagctcgtcaccatagcctatagatcgaaaccttcccgaaatgcttgcaaaaatacctgcccataagtggaataaaatctcatgaaagatatgaacaccgaaattgcgtgtatccgcttaggaacgcctatgttatccctgtgacatgccccaccattgcgagggagttcttgagaaaacaagatgcaacttttgcatcaaggtcacaaagtgtgtccactgatctcattagtaatggatattcaa

SEQ ID NO: 118767 - DNA, 202 bp, Glycine max
gcagcattccaatattttgacaaggatggtagtggctacattacagttgatgaacttcaacaagcttgtgcagaacataacatgactgatgcttttcttgaagatattattagagaagttgatcaagataatgatggaagattgattatggtgaatttgctgccatgatgcaaaaaggcaacgctggaattggtaggaggac

SEQ ID NO: 118768 - DNA, 270 bp, Glycine max
gaattaaagtagcaacaaatactcttccctacacttggcagaattaaaatggttcaacaagaaatccgaaggggtcccaggacagaacaggaggactacaaattagtgtattttgttaacatgtctggagatcgtagatgggatttatagcaaaggtatcaggttttcaggtggagggagactgtaaataggtatgaatatttggacatgctaagttatacatgaagcacccctttaaccacctcactttgttgtaggtttgaatagaac

SEQ ID NO: 118769 - DNA, 270 bp, Glycine max
gcagacttaacaacagcacatagcgggttactgtctgttcaagtatgatctctctctctctttcttagtgcctccttgccagaagttaaaatggcccaagaaactttcctattcacatctgaatcagtgactgaggggcacctgacaagctctgtgaccagatctccgatgctgtgctcgatgcttgcttggagcaggaccctgacagcaaggttgcctgtgaaactcgcaccaagaccaacatggtgatggttttcggagatgtcacaa

SEQ ID NO: 118770 - DNA, 270 bp, Glycine max
  unsure (1)..(270): unsure at all n locations
gccagaggccgnctccgggaggaaaccgccagtctttacttccaacaactcatctccgcggtggacttctgccacagccgcggcgtcttccaccgcgacctcaagccggagaacctcctcctcgacgacgatggcaacctcaagtcactgacttcggcctcagcactttctccgagcatctcaggcacgacggcctgctgcacactacgtgtggcacgccggcctacgttgcgcctgaggtcatcggaaaaagaggttacgacggcgcca

SEQ ID NO: 118771 - DNA, 208 bp, Glycine max
gtttgtgaactgtgctgctgtgtctccatttgaatggcatccattttccataacttccgcccctgataatacttaccttagcgttcacataaaaatacttggtgattggactcgaagtctgaaagccaaattcacacagggtgccagcaacccctcattgaacaagagactcctaagagctgaatgcttgaaaggagataacagccca

SEQ ID NO: 118772 - DNA, 197 bp, Glycine max
ctaatttcatggttgctgatctaccttttttgtgacaggctgtttctcattgggctcagtaaatttgggaaaggagattggagaagcatttcaagaaatgttgttgtgacaagaacaccaactcaagtagctagccatgcccagaaatactttcttccgccagaattcgggtgaagatagagaggaagagatcaagc

SEQ ID NO: 118773 - DNA, 269 bp, Glycine max
catgaccaagattgacaggcgatccggcaaagagcttgagaaggagcccaagtttttgaagaacggtgatgctggttttgttaagatgattccaaccaaacccatggttgttgaaactttctccgagtatcctccacttggaggtttgctgttagggacatgcgtcaaactgttgctgtgggagtcatcaagaacgttgagaagaaggatcctaccggagccaaggtcaccaaggctgcccagaagaagaagtgaatcgtgcgggctgg

SEQ ID NO: 118774 - DNA, 268 bp, Glycine max
ggacaagggaggcattaatctcacagccacttgcccccagagtgagctggatgctgaaactgtgaagagcattctggctgaatacaagattcataatgccgatgtgactctacgtagtgatgctacagctgatgacctcatgatgtggtggaaggaaacagagtttatatcccctgtatctatgtgttaaataagattgaccaaatctccattgaggaattggatatcatctataagggaccggtatgtgtacccatctctgcccatc

SEQ ID NO: 118775 - DNA, 119 bp, Glycine max
acttcaacttcacccattcataggtggtgttgttactgctgctcttttctcttgtcttttctctttagttctctcttcccctttagttatcattatcttctacttctgagcttgtttaa

SEQ ID NO: 118776 - DNA, 263 bp, Glycine max
ctgtgctctgctctcatctcattcatattcatttcaatggcaactcaaggtcaagtcattacctgcaaagctgcggtggcctgggaacccaacaagcccttaaccgtccaagacgttcaggttgctccgcctcaggccgcgaggtccgtgtccaaatcctcttcaccgctctctgccacaccgatgcttacacttggggcggcaaggatccccgaaggtctcttcccccgtaattctcggccacgaagctgcagggattgtgg

SEQ ID NO: 118777 - DNA, 265 bp, Glycine max
agaagctgtgatttcatacactcagcatttgaatgccattgagagtggtaaagttgaaaatgtccctgcccctgccattgctattgactactggaggcttcccaaggatgcaactctcaaggatgttgtcactgtgatcgcgctgatgaggctcatcacagggatgttaaccactttgcttctgatattcatcatcaagggaaggaattaaaagaggctccagctcctattggttatcactgagtcattgttgtaaattttttaa

SEQ ID NO: 118778 - DNA, 265 bp, Glycine max
caaaatcatataattctctttcatctgaattttccctttcaaatctcttcctttgaagttttcgtagttctctgcatcatggagatggaacgcgtcttcgagtttcctcacactcacatgtgtcggcgcccgagaaagaagcgagattgggctgggacatcatggaagtccccaaggctcaggtaggattgttttgtggacaagatgttgggactatttcaagctttgctccttcaaggggtccctcagaaaataaaactagttc

SEQ ID NO: 118779 - DNA, 259 bp, Glycine max
tctattcttaactcaacttctgctacccactctcttcttccaagtccaaccacgcttttctctacagtcatgggcaaggtcaagatcggaatcaacggatttggaagaattggccgtttggttgccagagtcgctctgcaagagacgatgtggagctcgttgccgttaacgaccctttcattaccaccgattacatgacatacatgtttaaatacgacagtgttcacggacactggaagcatcacgatgtcaccgttaa

SEQ ID NO: 118780 - DNA, 264 bp, Glycine max
  unsure (1)..(264): unsure at all n locations
ccaaggttgaagagtgacagggagaggtttccaccaaacaacgtgcagaatatgcttgctggtgctgggttgttgtggattgggtngtcagggttcaacggtggagcaccatatgctgcaaacattgcatcttcaattcggtgttgaacacaaacatttgtgcagccactggcctccttgtgtggacaactttggatgtcattttctttgggaaaccttcggtgattggagctgtgcagagcatgatgactggacttgtatgca

SEQ ID NO: 118781 - DNA, 267 bp, Glycine max
gctcaattctctgagcttgtcaatgactattacaacaatgggttgccctcaaatctcactgccagcagaaaccccagcttggattatggattcaagggagctgaaattgcaatggcctcttattgacctgaactccaatcttggcgaacccggtgacgagccacgtgcaaagcgccgagctacacaaccaagatgtgaactctctcgggctgatttcatcaaggaagacacatgaggctattgagatcctcaagctcatgtcctcca

SEQ ID NO: 118782 - DNA, 153 bp, Glycine max
ctcccaagggtttaacctttctggctgtgttaatatgcgtttcagcaccgtcactgagtccttctgttgcgggggaagggcaaaataatggccttgttatgaacttctacaaggaatcatgccctcaggctgaagacatatcacagaacaagt

SEQ ID NO: 118783 - DNA, 289 bp, Glycine max
gtttttcaaattattctgtggcaaggagagaagaaaagatcatagaaagtggtgattcttcgaatattgaagagagaaatatggggttgagattgaaggagacattctacttgtcccatggagcaccaactcttgccgtagccgcttcaatccctgcgtggaacttctacaattcgtggaaggagcattttccgacgagaccctcttccattctaattatccccgcccactgggacacccatgttcccaccgtcaacgtcgttcaccagaatgataccatctacgactt

SEQ ID NO: 118784 - DNA, 286 bp, Glycine max
cagaaattatcacgatcttcattgaggactatgtcacagctcctcagggcctaacaaaggtcttgagagattcagggctgagcaagtacatgttcccagtgtctcgcatgcccaagaatggtgaagattggccaaccgtcgatgacatggttcagaagaatcagcgcctagtcgtcttcacttccaaatcagccaaggaagcttctgagggcattgcttatcagtggacatacgtagtagaaaaccaatatggagatgatggcatgaaagctggttcttgtccaag

SEQ ID NO: 118785 - DNA, 289 bp, Glycine max
accacctttatcaccggtgttttccaggcttgtttgggtttttttaggctgggaatattggtggacttcttttcccattctaccattaatggcttcatgggaggagacagcagtaattctcatcctccatcaactaaagggtgtatttggcatgaaacatttttcaaccaaaacgaacttggtggcagtggtgtcgagcatagtcaacaatagacaagagattaggtgggaacctaccattcttggcgtgatctttgttgctttcttgcaatttaccaggcacctgagg

SEQ ID NO: 118786 - DNA, 286 bp, Glycine max
tctcttcctctctcagctgtctttttaatcccccttttctcattttcccttttgcaattttcactaacagtccttctttctatcttagctctcagaaacttcaataacaatgaagaaagttgtgttgaaggtggaagtacatgatgacaaaatcaagcaaaaagctatgaaggttgtctctggcatctcaggggttgagtcagtttctgtggacatgaaagacaagaaattgaccgtaattggggacattgatccagtaaaagtagcagccaagctgaggaagctt

SEQ ID NO: 118787 - DNA, 272 bp, Glycine max
atgaacttgaggactcctcacagatgcaaggggttgtacaaaccgcccttgttctatgctcttcagtgtatgtaatgataagcttctttgggttcctcctatttggcgaaggaactcttgatgatgtactggccaatttcgataccgatcttggaattcctttcggttctgtgctcaatgatgctgttcgaataagctatgctgcgcacttatagctggaatttccagtggccttcttccggttgcgtcttaacatatatggtctcctcttc

SEQ ID NO: 118788 - DNA, 186 bp, Glycine max
tggacattggatccttctgagcgtgatgcctttttagcaaatgaagccactaagatgttgacttcaaacaattgggtcattttggaaattgcttccactagatctccacttgacctcctaagggcaaaacaggcatatcaagcccgtttcaaaaagtcccttgaagaagacgttgcctatcatact

SEQ ID NO: 118789 - DNA, 263 bp, Glycine max
gatggcttctcctcttcttactccttacaagatgggcaaattcaatcctgtcccatagagttgttttggcaccgctgaccagacagaggtcttacgacaacgtcccacaaccccatgccatcctctactactcccagagaacttccaacggaggccttctcattactgaagccactggcgtctctgacacggctcaaggctatccgcaaacccctggcatatggactaaagacatgttcagcttggaacccttgtcgatgcgt

SEQ ID NO: 118790 - DNA, 279 bp, Glycine max
acaaattacactctttgcctcgcaccttcaacttaaccttttctactcataatcttaacaacttgctagaagaagataaagaaagagaaaaagtgtgtgtgtgtgagagagagcaatggctggctcgtgggcacgccgttctctgattgttctggctatcatttccttcggatgtttatttgcaatttccattgctaagcaggaagccacaaaattggggacggtcatcgggattgatctccgaacgacctattcatgtgttggtgtttacaagaacgg

SEQ ID NO: 118791 - DNA, 279 bp, Glycine max
gcacatgctacctagggggcgtgtctatcgttatgctcctggcacgggtatgacagatgttcccatgcccgaggttgctggaggtatgttttctgttccatatgatgtgcgtgggatgacactgcgtgatagcatcaatctcggagcaagttcctgttggggctttagcaacagtcctgagctaatgcttcaccagagcaacagaggacgatgctgggtaagaatctctacccccttgtggaacagttagagcctgacaatgctgccaaagtgacaggc

SEQ ID NO: 118792 - DNA, 285 bp, Glycine max
aaacaatttaccagctatacttgttccttttgaaggttagaagtgctacaatacaaacaatggcagctactcaggaagatgtgaagcttttgggtattgtgggaagcccatttgtgtgcagggtccagattgcccttaagttgaagggagttgaatacaaatttttggaagaaaatttgggcaacaagagtgatttgcttctcaaatacaaccctgttcacaagaaggttccagtgtttgttcacaatgagcagcccatagcagagtctcttgtgattgttgaat

SEQ ID NO: 118793 - DNA, 230 bp, Glycine max
cacgaccagggggtgaaggtggagcttgcggagtcctccagggccggtgttaaggccagcagtgactgggtgatggagagcatgaacaagggcactgacagctacggcgtcaccaccgggttcggtgctacctcccaccggagaaccaaccaggccgttgccttcaaaagggagctaatggggtttttgaatgctggaatatttggcaatggtacagagtccaattgcac

SEQ ID NO: 118794 - DNA, 120 bp, Glycine max
atcaataaacattgtgatagatacaagtatataacatcagggcatgaacatgacttgataaattaagtagacttagtttcaatactataataggagggaccaattcatgttcatgccctg

SEQ ID NO: 118795 - DNA, 281 bp, Glycine max
ttggggtttcgcctcatccatctgtgtgcaacaaccacaaagtgtatagcgtgtgttcttcctagaggggggaaaaatggctacactttcagatattggggttgcagctggcttgaacattttgagtgcatttattttttttgtggcatttgctattttgagacttcaaccttttaatgatcgggtatacttcccaaaatggtacgtgtagggattaagaacagatcctgtgcacggaggagcgtttgtgcgcaagtttgtcaatttagattggcgatcat

SEQ ID NO: 118796 - DNA, 283 bp, Glycine max
cctcgatcatgtctcacttcaagggcaagtaccatgatgagcttatcgccaatgctgcgtacattggcactcctggaaagggtattcttgctgctgatgagtcaacagggacaattggcaagcgtttggccagcatcagtgtagagaacattgaatccaacaggcgagctcttagggagctgcttttcactgctcctggtgttcttcaatatctcagtggtgtcatcctctttgaggaaaccctctaccagagcacagctgcaggcaagccctttgtgaatgt

SEQ ID NO: 118797 - DNA, 286 bp, Glycine max
cttaacaacagcacaaagcgggttactgtctgttcaagctatcatctctctctctctgtctaagtgcctccttgccagatgttacaatggcccatcaaactttcctattcacatctgaatcagtgaacgaggggcaccctggacaagctctgtgaccagatctccgatgctgtgctcgatgcatgcttggagcaggaccctgacagcaaggttgcctgtgaaacctgcaccaagaccaacatggtgatggttttcggagagatcacaaccaaggccaacgtggact

SEQ ID NO: 118798 - DNA, 247 bp, Glycine max
gttgtttctcagccgcctcggctagggttcggaaacgaagaagggttctgttttcttttcgcgatgagggccaagtggaagaagaagcgtatgaggaggatgaagaggaagcgccgaaagatgagacagagatccaagtagtgcgttaaacctagtttgtttccgctgcttttacaattgcttatgttgtcaaataggacacgcagttgttagtgggcactggtctctcctttttgatgttttgata

SEQ ID NO: 118799 - DNA, 255 bp, Glycine max
tcttcctcaccgattgctagaatggaatttcgatgctcagtcatctcttttaccattctcttctctcttgctcttgcaggagagagccatgtccatgcatcgctacctgaggaagattattgggaagctgtttggccaaacactcccattcccactgcactgcgagagcttctaaagcctctccctgcaggtgttgaaaccgatgaactccctaagcaaattgatgatacacagtacccaaaaacattcttctat

SEQ ID NO: 118800 - DNA, 277 bp, Glycine max
atcttcctcacctatcctcgtacctccactggacctttgaccaggccacagggaagttggacatagccttcagacacacaggaatctctggaacagacaagtgggttgcatgggctatcaatcccagcaacaacctcaattcagctatgacgggagcacaagctctggtggctatcataccatctagcggtgccccaaatgcatatacttcttccattgcaaatcccggaaccacactggcagagggagccatctcttataatcactcaagattgac

SEQ ID NO: 118801 - DNA, 279 bp, Glycine max
gggctgaatatgaagcaattggttggggaaagcctgaaactaaatatacgaaagatgggccaggagcacccggaggacaatcctggacagtgcaatggttgaacatttgacaactcctacttcaaggacatcaaagaaaaaagggatgaagatctattggtattgccaactgatgctgctctttttgaagacccatccttacaggtatatgctgagaaatatgctgaagatcaggaagcattctttaaagattatgctgaagcccatgctaaacttagc

SEQ ID NO: 118802 - DNA, 199 bp, Glycine max
gaactgcaaagggcttctccagcctagtttgttctcagatcttcttcttccatggaccagtacgagtaggtggagaagataggcgagggaacatacggcgtcgtttacaaggctcgcgaccgcgccaccaatgagacaatcgctctgaagaagattcgcctcgagcaggaggacgaaggcgttcccagcaccgccattc

SEQ ID NO: 118803 - DNA, 278 bp, Glycine max
cctttatggagacactacttccaaaacactcaggggcttatctttgttgtggatagcaatgatcgtgaccgtgtagttgaggctagagatgagctccaccggatgttgaatgaggatgagttgagagatgctgttctcctggtatttgccaacaaacaagatcttccaaatgctatgaatgctgcagaaatcacagacaagcttggtcttcattctctacgccaacgccactggtatatccagagcacatgtgccacctctggggaaggactatatga

SEQ ID NO: 118804 - DNA, 280 bp, Glycine max
  unsure (1)..(280): unsure at all n locations
atggcgtccatggccactttcttcacccacanctccttcccctcccactctctctccaaaaccttcgatacccatctcgccccatccccgaaagtcaacgtatttgcgaacttcccggcgaggaggcacgtgggggttcgagtttcgaacgcgctgatcgaaccagacggagggaagctggtggagcttgtggtgagggataattcagaaagagacttgaagaagggtgaggctctttcgttgccgaggatcaagctttcaaggattgacctggagtggg

SEQ ID NO: 118805 - DNA, 279 bp, Glycine max
gtgtcgtgtcttcttctctaaaatacaaaaccctaacttctgaacctttcaccgcatcgccaccgattccctatctccactaatcatagaaaagaacatgagtagacgctcgagcagaactgtctacgataggcatctacccggtgatatccgtgaaagagaagttgaagattcgtttctgaagtacggacacataacacacatcgacctaaaggtacccccaagaccacctggatatgcatttgtagagtttgaagatgctcaagatgctgaggatgc

SEQ ID NO: 118806 - DNA, 259 bp, Glycine max
gggagatgctgttcgggtaccaaccattcgcgacgaaggatcctaggatcttcgagagggccgaggagtttgtcggggacaggttcgtcggggaggaaggggagaagctcctcaagcacgtgctgtggtccaatgggcctgagactgagtctccaacacttgagaacaagcaatgcgccggaaaagacttcgtcaccttggtttcgaggcttttcgttgtggagttctttcttcgctaagattccttcgagattcaagt

SEQ ID NO: 118807 - DNA, 274 bp, Glycine max
caatttgcatctaacatacccataccagacatcaaggaagaccaagtgctcatcaaggttgtggctgcggcgcttaatcctgcagattatatgagggctcttgggtttttcaaggacactgatgcacccttacctattgttccagggtttgatgctgctggtgtggtggtgagagtgggaagtaaagtgagctaattcaaggttggagcagatgtttatgtcactcacattggataacctgggaatatccaaacaccattgggatttggcagat

SEQ ID NO: 118808 - DNA, 274 bp, Glycine max
tggccatgtcacctggctgctaggccagagccatgccaggctgcgtccctccgaggcttgggataaagcaaggggaccttggcgctctcagctttccctgccatctccagcttgttgtcccaatgaaatactgagatgctgggctgtctctcccttccaggaatgctgggcccccagcctggccagacaagacgactgtcaggaagggtcggagtctgtaaaaccgagcatacagtttggcttttttcacattgatcgattttatatgagataa

SEQ ID NO: 118809 - DNA, 278 bp, Glycine max
gaggaaaatgatgctattgtcttggctgtaggagccacaaaaccaagggatcttccagtacctgggcgggagctgtcaggagttcattttgctatggagtttcttcatgcaaatactaaaagcttgcttgatagcaatctccaggatggcaacttcatttctgccaagggaaagaaagttgtggtcattggtgggggtgacacgggcacagattgcatagggacatccattcggcatgggtgtagtagcattgtaaatctggaacttctccctcagcc

SEQ ID NO: 118810 - DNA, 278 bp, Glycine max
attcattccccttatctttctctcttctctctccccgcccaaaccctaactccctaccctattccgctttctctcatccatcatgaaaggaggaaagtccaagaccgaatctaagagagccgatgccaaacttgctgtgaataagaagggcgccgccaccaagactaggaaacccgccggaaaggggaaggcagcgaaagatcctaacaagccaaagaggcctccaagtgctttcttcgttttcatggaggaattcaggaaggtgttcaacaaggaac

SEQ ID NO: 118811 - DNA, 278 bp, Glycine max
gccagcgagtgagtgagcgagccaggtatggttttcggtgttcccctctttgtgttcgttcgcgacgatggggtccatccccgatccaggcgagttgagcgagttgactcagccgagcttcgacgagttccagcgccaaacctctctcatgaccagctgcaccctcctctggaaggagctctccgaccacttctcctccctcgagcaagacctcaaccacaaatccgaagccctcaagcgcaagattcacacgctcgacaactccagctcggactccc

SEQ ID NO: 118812 - DNA, 272 bp, Glycine max
attcatggctttctttattctctccttcctcttccttcttcttgtttcatctgccactgcttgtgatcgctgcttgtatcaatccaaggcttcctatttctccaaagcttctgctctttcatctggggcatgtgggtatggctctttggcactagacataagtggtggacaccttgtcgctggtgtggattctctcttcaaaaatggagcaggttgtggtgcctgctttcagataagatgcaagaacccaactctatgtagcaaagaaggta

SEQ ID NO: 118813 - DNA, 102 bp, Glycine max
cacattgcagcaagcgtctatcaccgagacttgaagccaaagaatatactggccaatgcaaactgtaaacttaagatatgtgattttgggttagctagagtt

SEQ ID NO: 118814 - DNA, 274 bp, Glycine max
gtttctctctcctccccatatattcctcttcttcttcagaactcagaactcagtcgggccacttcacttttagaaacccagttttgcatctgggtttttgcctgttgaagtgccaattttgaagataataataaaaacaattatgacttggaaaagcagaggagaattgccttctagaagcgtcatctcgcagagatgggtactgtttctctgcttaggaagtttctgtgctggaatgctcttcactaccaggatatggaccatacctgaaaac

SEQ ID NO: 118815 - DNA, 274 bp, Glycine max
cagaaattatcacgatcttcattgaggactatgtcacagctcctcagggcctaacaaaggtcttgagagattcagggctgagcaagtacatgttcccagtgtctcgcatgcccaagaatggtgaagattggccaaccgtcgatgacatggttcagaagaatcagcgcctagtcgtcttcacttccaattccgccaagaagcttctaagggcatgcttgatcagtgggaatacgtataaaaaacccataggggagttaatggcatgaaagctggt

SEQ ID NO: 118816 - DNA, 270 bp, Glycine max
gttacagcttacgactccttgctctactctgcatggcttcgtttaccttcaggtgttgattccaaaaccagaaagatgttcattgaggaagtcatggaactggtggagctgaacccattaaggaactcactggttggattgcccggtgtgagtggactctcaactgaacaacgaaagagactgactattgcagttgagttagtggctaacccgtccataattttcatggatgagcctacttctgggttagatgcaagagctgctgcaatt

SEQ ID NO: 118817 - DNA, 238 bp, Glycine max
ctgcatcctactttaactgatgtaatagtattcacatctactccagacaaagtgaacaacaaatactacctgggacctgctccacttgaagacatggctaggcaaatagcaactgcatacggcccttgcggaaacaacagggattacattttccttctagaaaaggccatgcatgatattggccatgaggatgacttggtgatagagcttgccaatgaagtgaagaaagtacttggag

SEQ ID NO: 118818 - DNA, 264 bp, Glycine max
gccgccgatccccgccatggccgttacctgacagcatcagccatgttcaggggaaagatgagcaccaaggaagtggacgagcaaatgatcaacgtgcagaacaagaactcgtcctacttcgttgagtggattcccaacaacgttaagtcgagtgtgtgtgacatccctccgaggaacttgaagatgtcgtgcactttcattggaaactccacctcaattcaggagatgttcagaagggtgagtgagcaattcactgcaatgtac

SEQ ID NO: 118819 - DNA, 172 bp, Glycine max
gcccaagattttgggctggtggaagaagcttgcttcccctacacatgcactgattctccatgtattatgaatgaagactgctttcgttactactcctctgagtaccactatgtaggaggtttctatggtggctgtaatgaagccctgatgaatcttgatttggtccatcatg

SEQ ID NO: 118820 - DNA, 257 bp, Glycine max
cccatgtcaaggaattggggccaaaactggcagagcaactcctaccttaatggacagagtctttcctttttggtcaccactagtgatggtcgcagtgtgctctcatacaatgctgcaccaccaagttggtcctttggacagacctacactggaaggcaattccgctactaatttatcaacccttttcatggagggtgcattttctctcaggtacagaaactttctagtaggagaaagaaacacaaagaaaattgtat

SEQ ID NO: 118821 - DNA, 254 bp, Glycine max
ggcaacagaaacaaaagtggcagtattaggtggcatcaccgaagtgcagggagctgccaacatcatcgagatcaacaatctcgctcgctttgctgtagaggaacaaaacaaaagagagaattcagttctggagtttgtgagggtgattagtgcaaagcagcaagtggttgctggagtgaattactacataacattggaagcaaaagatggtgagattaaaaatgagtataaagcgaaggtttgggagagggaat

SEQ ID NO: 118822 - DNA, 256 bp, Glycine max
gggacttgacgttatacaacaggcccagtctggaactgggaaaacagcaactttctgctctggaattctgcagcaacttgactatagtgtgactgaatgccaagccttggttttagcaccaactagggagcttgctcagcaaattgaaaaggttatgcgggcactcggagattatcttggtgtgaaggtgcacgcatgtgtgggaggtaccagtgttcgtgaagaccaacgcattctatcaagtggtgttcatgtt

SEQ ID NO: 118823 - DNA, 256 bp, Glycine max
cgaagagaatggctcccaagggtttaatctttttggctgtgttatgcttctcagcactgtcactgagtcgttgtcttgcggaggataatggacttgttatgaacttctacaaggaatcatgccctcaggctgaagacatcatcaaagaacaagtcaagcttctctacaagcgccacaagaacactgctttctcctggctcagaaacatcttccatgactgtgctgttcagagttgtgatgcttcactgttgctgga

SEQ ID NO: 118824 - DNA, 253 bp, Glycine max
ctttgcaacacaacaaaaaaagacaacacagagagaagcgtcttaataaacgctcttctctgaaaaacctgatttcttctcttcttctcttctctttcgtttcgatcttcgatctctgaaaatgagagagtgcatttcaatccacatcggtcaggccggtattcaggtcggaaacgcctgctgggagctctactgcctcgaacacggcattcagcctgatgggcagatgccaagtgataagactgttggtgga

SEQ ID NO: 118825 - DNA, 266 bp, Glycine max
ctgtgtttgcggctgaggattccgaacgagcgaccttcttcgtttctcgcaaagtttaagtcatcatgggtaaggaaaagactcacatcaacattgtcgtcattggacatgtcgactctgggaagtcaactaccactggtcatttgatctacaagcttggaggtattgacaagcgtgtgattgagaggttcgagaaggaggctgctgagatgaacaagaggtcatctcaagtatgcctgggcgcttgacaagctcaaggctgagcg

SEQ ID NO: 118826 - DNA, 265 bp, Glycine max
ctctcttctctctccccgcccaaaccctaactccctaccctattccgctttctctcatccatcatgaaaggaggaaagtccaagaccgaatctaagagagccgatgccaaacttgctgtgaataagaaggtcgccgccaccaagactaggaaacccgccggaaaggggaaggcagcgaaagatcctaacaagccaaagaggcctacaagtgctatcttcgttatcatggaggaattcaggaaggtgttcaacaaggaacatcccg

SEQ ID NO: 118827 - DNA, 257 bp, Glycine max
gctcgacggaaagcatgtcgtgttcggacaggtcatcgaaggattgaacgttgtcaaggacatcgagaaggtcggatccagctccggcaggacctccaagcccgttgtcatcgccaactgcggtcaactctcttagacgacgttgacccgcggctttaatctctgaatctgtgttatttctttcggtgtcgtttttgccttttttttctcttcttttctttctcgtgtcgtcgtttaggggattgtggtgttaagga

SEQ ID NO: 118828 - DNA, 256 bp, Glycine max
ttgcaacactaattttctctttccctttttttggacttatccttctttctgcaactccaaaatgggttccaaaggggcaaaaaatctagcactctcttcagccttgttgctccttttggtcggttttgcaacctcagacatcaatcaagacaaagcagaatgtacggataaacttcttggtctagctggttgtctttcctatgttggtggcgaagcaaagtccccaccatggattgttgctctggtatcaaagagg

SEQ ID NO: 118829 - DNA, 258 bp, Glycine max
agttgtgccctacattacatctgaatttgattgataataaaagagtaaatattcgcccgcgataattttgattttattgaattttttttttatttttgccaattctatttattctttctaataataaaaaatattctaataactaataataaaaaggaaaataaagattcattagaatattataaaataacaaataatagaacaaaacaagattctttagttatatatgtaaaaaaaaaatggtttatttataagaat

SEQ ID NO: 118830 - DNA, 255 bp, Glycine max
ctcgaccggaaaagaagaggaaaaggagagtggagaggaagaaaaggattgaagttggcgctgtgagaaagagaaagagtgacatcggagtctgggaaggaattgcaatggatggatgtgatagagacgctcaaatctcatctcgaccaatcgagaaggtggtggttcaccctctcgtgcttctcagcatcgtcgacaactacaacagagtcgccagagacactcgcaagcgcgtcgtcggcgtcttgctcggct

SEQ ID NO: 118831 - DNA, 254 bp, Glycine max
gaaaatccggaggaccgagtgcctcccacgcccggtcgtactcataaccgcatcaggtctccaaggtgaacagcctctggtcgatggaacaatgtaggcaagggaagtcggcaaaatggatccgtaacctcgggaaaaggattggctctgagggctgggcacgggggtcccagtcccgaacccgtcggctgtcggtggactgctcgagctgcttccgcggcgagagcgggtcgtcgcgtgccggtcgggggacg

SEQ ID NO: 118832 - DNA, 253 bp, Glycine max
gtgatcggtacttgagaccctggattattccggtgccagagataactttcacagcaagaaccgatgaggatgagtgcttagttttggctagtgatggactctgggatgtaatgaccaatgaagaggttggagaagtagcacgccacattcttagaaggcgccgcagatcattgtcaatggaggaagcatctcctgcacaagttgttgccgacagcttgactgaaattgcattaggtagaaatagtaaagataa

SEQ ID NO: 118833 - DNA, 256 bp, Glycine max
aagacccaaggctgctgagtgttgcagaggcatgtctgagtcggacacgaagaagaagaagcagcagcagcgcaggttcgtgaaagcatgaaggagaagaagggttgatgatcaagccccagagcttcacgcgccccatcgacacctcccaatggcccattctcctcaaaaactacgagcgcctcaacgtccgcaccggccactacacccccattccctccggctactcccccctgaagcgccccctctccgagta

SEQ ID NO: 118834 - DNA, 266 bp, Glycine max
tttgaggccaggcaagccccactcaaccaccacacctctcctcgttcacgctacccctttctgctcttcttctacctttcaagttttaaaagtataaagatggcagagacattcctatttacctcagagtcggtgaacgagggacaccctgacaagctctgcgatcaaatctccgatgctgtcctcgacgcttgcctcgagcaggacccagacagcaaagttgcctgcgaaacatgcaccaaaaccaacttggtcatggtcttcgg

SEQ ID NO: 118835 - DNA, 256 bp, Glycine max
ggcaccagagacgaggaagggcgtagtaagcgacgaaatgcttcggggagttgaaaataagcgtagatccggggattcccgatataggtcaacctttcgaactgctgctgaatccacgggcaggcaagagacaacctggtgaactgaaacatcttagtagccagaggaaaagaaagcaaaagcgattcccttagtagcggcgagcgaaatgggagcagcctaaaccgtgaaaacggggttgtgggagagctataca

SEQ ID NO: 118836 - DNA, 248 bp, Glycine max
atttcaatgcaaagatatccgactttgggttggccaagttgttgttgtttgactcaagtagaacgaatacgatgatccgaggaactcgaggatatgtggctcctgaatggttcaagaatgttgctgtgacggttaaagtggatgtttacagctttggggtgatgttgttggaaaatatttgctgcagaagaagtgtgatgaccatggaacccgaggaagaagagaaggcaatattgacagattgggct

SEQ ID NO: 118837 - DNA, 254 bp, Glycine max
caaatcaaagccatggccacctccaacttctctattgttctctccgtctccctagccttctttttggtgctacttaccaaggcacactcgaccgataccgtttctttcaccttcaacaagttcaacccagtccaaccaaacattatgctccaaaaagatgctagtatttcatcctctggggtgttacaactcaccaaagttggcagcaacggcgtgcccacctcgggatctctcggtcgtgccctttacgctgc

SEQ ID NO: 118838 - DNA, 257 bp, Glycine max
caaactccatcctcttaggctaatgtattggggtcatgagtggtgcttctcttttaataaggcaagatctaaagatcacatcagtccaagtagaaatccttgttgggtgcttaaatgtgtgttccctgataagatctcttgcttcaggcaagacctctgattggattgggagaaggtacaccataatggttgctgcagcaacattcctgattggtgctattctgatgggtttggccccttcattcacattcctaatg

SEQ ID NO: 118839 - DNA, 260 bp, Glycine max
caaatttctccatagttatgggcacttccattctcgacgccctgaacgttcgcgtggaaggttccggcgacaagtaccttgtcctggcccacggcttcggcacggaccaatccgcgtggcagcgcgtgctcccttacttcacccgcaactacagcgtcattctctacgacctcgtctgcgccggcagcgtcaaccccgaccacttcgactaccgccgttataccaccctcgacgcctacgtcgacgacctcctcaacatc

SEQ ID NO: 118840 - DNA, 257 bp, Glycine max
aagcaagctcatcctagagttttaaaaatggctccagcctcctccatggctctctcttccccatccttggctggcaaggccgtgaagctgggcccatcagcccccgaagtcgggagggtcagcatgaggaagaccgtcaccaagcaggcctcctccggaagcccatggtattgcccagaccgcgtcaagtacttgggcccattctctggcgagcccccgtcctacctcactggcgagttcccaggtgactacggctg

SEQ ID NO: 118841 - DNA, 255 bp, Glycine max
gctcgacgggaagcatggcgtgttcggacaggtcatcgaaggattgaacgttgtcaaggacatcgataaggtcggatccagctccggcaggacctcgaagcccgttgtcatcgcgaagtgccgtcaactctcttagacgacgttgacccgcggctttaatctcggaatctgtgtgatttctttcggtgacgtatatgccttgatgatctcttcgtctctatctcgcgtcgacgtttaggggattgtggtgttaag

SEQ ID NO: 118842 - DNA, 256 bp, Glycine max
cgaatttctcccacgacaacgtatcacaagctcccaatatagcaagcagcaaacatgatttcttccgtgtcctttccagcgtctcttcccgccgttaacttctccggcaacgccatggcttcgccgtcgtgccgcgtcaaatcccggccaatagtcgccttcgccaccgccactgccaccgctgaagctcgctcttcctggacggagcaaccgagaccttcctatctgaactcctcttgctcttcgctttacgata

SEQ ID NO: 118843 - DNA, 254 bp, Glycine max
cattacaccacgcttctaaattctgagaatgaattcgtaagatcgaagcaatagcctttttctctgccgccactggtttcgatcccacacccacaaacgcaaaccctccatcctttgaatgctcttgcgttttcctttcactacctcattcctaactcacacacacacaacgggtgatatcaatgtcgactcctgctaggaagaggctcatgagagatttcaagaggctgcaacaagacccgcctgcaggaatc

SEQ ID NO: 118844 - DNA, 254 bp, Glycine max
agcaaagagagtgagataagaaggaagaagaagaagaagagatggcaaatgaactacccgtcaaagcttttggttgggctgcttcagacacttctggcacccttgccccttttcatttctccagaagggaaaatggcgtcgatgacgtcactctcaagattctcttctgcggggtttgccactctgatctccacactctcaaaaacgactggggtttcaccacctaccctgtcgttcctgggcatgaaattgtt

SEQ ID NO: 118845 - DNA, 269 bp, Glycine max
ctcttattgttcatcgcagactcaacactctctccagacacttccttcatcaaatggcttctcacgacggcatctccgctgcttcttcagattccgtcttcaatcacctcgttcgtgctcccgaagatcctatcctcggggtaactgttgcttataacaaagatccaagtccagttaagctcaacttgggagttggtgcttaccgaactgaggaaggaaaacctcttgttttgaatgtagtgaggcgagttgagcagcaactcataaat

SEQ ID NO: 118846 - DNA, 263 bp, Glycine max
caggctgctatttggagatggatgacaccaatgaaaaagccacagccctctgcgcatgatgcctttgtcggcaactggaagcctagcaagaatgatactatggagaatcgtcttcctggatttggcactacaatgaacattctctatggggatggtgtttgtggacaaggtgatgtggactcgatgaacaatatcgtttcccattaccagtattatcttgaccttctaggtgttggtcgagaacaggctgggccccatgaaat

SEQ ID NO: 118847 - DNA, 253 bp, Glycine max
  unsure (1)..(253): unsure at all n locations
gggccccggcggcggccccgacctgatcgtcgacgacggaggcgacgccaccctcctcatccacgagggcgtcaaggccgaggagctctatgagaagaccggggaactccccgaccctaactccactgacaatgcgaatgaanagatcgtgcttancattatcagcgattggttgaagatcgatctcaccatgtaccgtaagatgaaggagtgtctcgttggggtttgtgacgaaaccaacactggtgttaag

SEQ ID NO: 118848 - DNA, 248 bp, Glycine max
atttcaatgcaaagatatccgactttgggttggccaagttgttgttgtttgaccaaagtagaacgaatacgatgatccgaggaactcgaggatatgtggctcctgaatggttcaagaatgttgctgtgacggttaaagtggatgtttacagctttggggtgatgttgttggaaaatatttgctgcagaagaagtgtgatgaccatggaacccgaggaagaagaaaaggcaatattgacagattgggct

SEQ ID NO: 118849 - DNA, 251 bp, Glycine max
agagtatgttgatcgagataactagaaacagtgtgatgaaaatgaaggtccttgttttcttcgatgctacatatatggtagcatggcaatgccatgcgtacgatatgttccctctacgaatgaacactggctatggtgcccgtactccggaggtgaaatgcgcaagttggaggcttgctgtggaagcacacaacatctgcggctttgagaccattcctgaagagtgcgttgaagcaacaaaggaatacatc

SEQ ID NO: 118850 - DNA, 267 bp, Glycine max
catctttcaatttcaatcaacggttatacccttttctatttgagcatcatcatgtccaccgcagcgcagccaaggccaagaaaaggcgtcgtcaaagaagcccttctcccatcctaccttcgcggcgatgatagcggaggcgttaccgattctgaaggagagaccgggttcgagccattaggcgttaaccaatttcttcgaaggcaggcacaaggagttgcttccaacttacaagaagcttgttctcgttcatctcaagaagtctgt

SEQ ID NO: 118851 - DNA, 261 bp, Glycine max
ccgacaagcccaagccccaagcccaacaatctgcatccccggccgcggcccgtgcaaccaaatgggccgtggacagctggaagtccaagaaggccctgcagctgcccgaataccccaaccaggaggatctcgaggccgtcctccgcaccctcgacgcttccgctcacatcgtcttcgccggcgaggcccggacactcgaggagcacctcgccgatgccgccatgggaaatgccttcttcctcaatggcggagactgtgccg

SEQ ID NO: 118852 - DNA, 259 bp, Glycine max
ctctctctctcggatttcttgcgcggtttatcatgggggatagtcagtattcgttttctctcaccacatttagcccttctggaaagcttgttcagattgagcatgctttgacggctgtcgggtctggacaaacgtctttgggaattaaagctgcaaatggagttgtcattgctaccgagaagaaattgccatctatattggttgatgaagcatcagtccagaaaattcagttattaacaccaaatataggtgtcgtata

SEQ ID NO: 118853 - DNA, 201 bp, Glycine max
caagacccaagtcactgttgagtactacaatgacaagggtgccatggttccaatccgcgtccacactgtgcgcatctccacacagcatgatgagcctgtcacaaatgatgagattgcagctgagcttaaaggacacgtgattacgcctgtgattcctgagtagtaccttgatgagccgaccattggccagttgaacccttc

SEQ ID NO: 118854 - DNA, 256 bp, Glycine max
cgaattcctcccacgacaacgtatcacaagctcccaatatagcaagcagcaaacatgatttcttccgtgtcctttccagcgtctcttcccgccgttaacttctccggcaacgccatggcttcgccgtcgtgccgcgtcaaatcccggccaatagtcgccttcgccaccgccactgccaccgctgaagctcgctcttcctggacggagcaaccgagaccttcctatctgaactcctcttgctcttcgctttacgata

SEQ ID NO: 118855 - DNA, 247 bp, Glycine max
atgggctcctcgatttgactacatcctaacccagcaggccatggtggcggtggacaatggaacacctattaaccgggacttaatcagcaacttcctgtcagacccagtgcatggagccattaaagtttgcgctgaactgagacccacagtagacatttctgtgccaccagatgcagactttgttcgtccagagttgcgttccagcaattagaacttaaaatcaattatggctttcacttcgaatcat

SEQ ID NO: 118856 - DNA, 264 bp, Glycine max
  unsure (1)..(264): unsure at all n locations
ctttctctctaaaatctttgaaaatggtatccaaaaacccgaacccgcccgagggattctacttggatcccagtggtggcatgcctcttcctgggatgcctcccttcgcctccgtctccgccgcaaccgctgcgaactcgccggaggacgccgccaagaagatccgcaagccctacaccatcaccaagtcgcgggagaactggaccgaacccgancacgacaagttcctcgaagcaattcaatgtttgatcgtgattggaaaaa

SEQ ID NO: 118857 - DNA, 260 bp, Glycine max
caagggatttccatggaagtctcaaaagaagaagctcgagtggcacccgcaccggccctagtggcgatgctgccatcccctggcatgggccacctaatcccaatgatcgagttcgcaaagcgagtggtgtgctaccataacctggcggtgagcttcgtgatccccactgacggcccaccttcaaaagcccaaaaggcagttctggaggcccttccggactcaatttcccacaccttcctccctccggtcaatctctccga

SEQ ID NO: 118858 - DNA, 259 bp, Glycine max
gtgtgcaaaagagcgtcgtagtcgcaaccctaatcagaagaagcgcagttcaagcgagtgacagccaccagccatgggtcgtatgcacagccgcggtaagggtatatcctcttctgctttgccctacaaaaggacacctcctagctggctcaagatctcttcgcaagatgtcgaagaaaatatctgcaagtttgcgaagaaaggtttgaccccgtctcagattggtgtcattctcagagattctcacggtattgctcag

SEQ ID NO: 118859 - DNA, 254 bp, Glycine max
gttgggaggaggcactgtggcagaagtcttaggagtgtaaaacagagacgcaaaatgaagacgattctatcgtccgagaccatgaatattcccgacggcgtgagcatcaaggttcacgctaaggttatcgaggttgagggccctcgtggaaaactcgtgcgagacttccaccatctgaacttggacttccaacttattaccgacgatggcggtaaaaggaagctcaagattgattcttggtttggttctcgtaa

SEQ ID NO: 118860 - DNA, 254 bp, Glycine max
gcgcccaatgaagggaatgcttaccggtcctgttaccattctcaactggtcctttgttagaaatgaccaacctagatctgagaccacctaccagattgctttgtctatcaaggacgaagtggaagaccttgaaaaggctggcatcactgttatccaaattgatgaagctgctttgagagagggtcttccactgaggaaatcagagcaagctcactacttggactgggctgtccatgccttcagaatcaccaatg

SEQ ID NO: 118861 - DNA, 252 bp, Glycine max
cgtttgcgttgttgtttgcgaataaatggcaactaagaggagcgtgggaacgttgaaggagggtgatttgaaggggaagagggtattcgtgatggtcgatctgaacgtgcctttggatgacaaccttaacatcaccgatgacactagagtccgtgctgctgttcccaccatcaagtacttgactggttatggtgctaaagtgatcctttctagccatttgggacgtccaaaaggtgtaacacctaaatacag

SEQ ID NO: 118862 - DNA, 256 bp, Glycine max
tagaaatcccatattttccccccacattaactcacccaacccctctttctaaaaggcctcaaggatacactccggacttaattacgttattttgttagggtcaccgtttcgagatattctaaacttgtactgaaaaatatggagggaaaagaagaggacgtaagagttggagccaacaggtacggagagaggcagccaatagggaccgctgctcaggctaaagactacagagagccaccgtcggcgcctctcttcg

SEQ ID NO: 118863 - DNA, 255 bp, Glycine max
tagaaacagtgtgatgaaaatgaaggtccttgttttcttcgttgctacaattttggtagcatggcaatgccatgcgtacgatatgttccctctccgaatgaacactggctatggtgcccgtactccggaggtgaaatgcgcaagttggaggcttgctgtggaagcacacaacatctttggctttgagaccattcctgaagagtgcgttgaagcaacaaaggaatacatccatggcgaacaatatagatcagactc

SEQ ID NO: 118864 - DNA, 258 bp, Glycine max
agtgaaaattggggcctggctactgcacaagaatttgagcctgtgcctcggatctgtcggctaatcttagccgtcttcgaagatgatattcgtaaccctcaatgggctccccaaggaggttatggcattaatccagattgggttatcttgcgtaaagactacaacgataaccaaggtcgcgttactccatacatgatataccttgatcatgatcatgctgaaatcatactggctgttagtggactcaatttggggaag

SEQ ID NO: 118865 - DNA, 266 bp, Glycine max
gccgggtaagttttttcgtgagaagatgatgaaggaaggaaccgtgatgccgatgcctgacataaaagataaaatgccggaaaggtcgtttttgccccggagcattttatcgaaattaccgttttcggtttcgaagattgatgagttgaagcaagtcttcaaggcttctgataacggctccatggagaagatgatgaaggactcgttggaggagtgcgagcgtgcaccgagtagcggcgagacaaaacgctgcgttgggtcgctcg

SEQ ID NO: 118866 - DNA, 264 bp, Glycine max
  unsure (1)..(264): unsure at all n locations
ttctttgatgtcaaagtaatagctatgaatagtcatcgactcccggtaaagggtagaagagtacgacctattatgggacatacaatgcattacagacgtatgattattacgcttcaaccgggttattctattccacctcttagaaagaaaaaaacttaaatcaaaatacttaatagcatggcgatacatttatacaaaacttctaccccaagcacacgcaatggagccgtagacagtcaagtanaatccaatccacgagatcat

SEQ ID NO: 118867 - DNA, 257 bp, Glycine max
cactttgctgtccgccttgaccgagcagagcttcgtcttggccctcgattttgccctaaagtactctcagtcactacagacaccgtcgtcgtcgtcgtcgtcatcaatggcaccgaagcagaccaaggctgagaagaagatcgcttacgatgcgaactgtgcgacctaatggaggagtacggccagatcctcgttgtgaactccgataacgtgggatcgccatagctcgagactattctcaagggtctccgtcgcga

SEQ ID NO: 118868 - DNA, 258 bp, Glycine max
gccaggatgattgctgatgtatcaaaatcggacaagatcgtggttgagaaatcgaccgtgcctgtgaaaacagctgaggcaattgagaggattctgactcacaataggaaaggcatcaatttcacaattctgtcaaaccctgagtttcttgctgagggtacagcaattgcagacctgtttaagccggatcgagtcctcatcggaggcagggaaactccagagggtcaaaaggctattcattctctgaagagtgtttat

SEQ ID NO: 118869 - DNA, 255 bp, Glycine max
ctcactcactcactcactcgcaagcaaaaagaaagaatcccaggcgaggagaaagatggaggggaaggagcaggatgtgtcgttgggagcgaacaagttccccgagagacagccgattgggacggcggcgcagagccaagacgacggcaaggactaccaggagccggcgccggcgccgctggttgacccgacggagtttacgtcatggtcgttttacagagcagggatagcagagtttgtggccacttttctgtt

SEQ ID NO: 118870 - DNA, 252 bp, Glycine max
ccctagttcgcttgcagtcacacaagaggccaatcctattcatagctcgagatgggtgaagaagtgaaggtagttgttccagaatcagtgttgaagaagcgcaagagggaggaggaatgggcgttggccaagaagcaagaactcgatgctgccaagaagaagagagccgagagccgcaaactcatctacaacagagctaagcagtacgctaaggagtacgatcaccaggagaaggaattgattcggttgaaa

SEQ ID NO: 118871 - DNA, 275 bp, Glycine max
acgcgtacgagctcgaatcgctcagccaccataccaacacaccatatgagcgtacgagttacgacggtggcatcggcaatgaccttggcaccacctactcttgcgttgccaactacgagggcaatggcgttgagatcatcgccaacgaccagggttccttcaccaccccttctttcgtctccttcaccgctgaggagcgtctgatcggtgaggccgccaagaaccaggctgccatgaaccccatcaacaccgtcttcgatgtcaagcgtcttatc

SEQ ID NO: 118872 - DNA, 257 bp, Glycine max
atggataaatccactccacattccacgtacagatggattgggactttcgtgatagcatccatctacgttttgcgcgttgtttatgtgcagggtttttacattgtctcttatggactcggaatctaccttctgaatctcttgattggttttctctcccctttggttgatcctgagctcgatccctccgactcccctttgcttccaaccaaaggctccgatgagttcaaacccttcattcgccgccttccggagttcaa

SEQ ID NO: 118873 - DNA, 259 bp, Glycine max
ttttcaacttcgcggtgtgagtgagacggagagtgctaagcaatcgtcttctcttctcggagcttggctttgcttatcgattctctctcctctcgtttctctaattccaaggtttgtaaaagatggcagatgccgaggatattcaaccccttgtttgcgacaatggaactggaatggtcaaggcaggatttgctggtgacgatgctcctagggctgtctttcccagtattgttggccgacctcgacatactggtgttat

SEQ ID NO: 118874 - DNA, 253 bp, Glycine max
gcatgctgtgtgttaggtggtgagaagaacgaaaaaaaaagaaagatcatggcgatggcaaacttggctcgacggaagggttacgccgtcgttttgtcgtcgaggtcgtcgctttgtctgacaaggtggagggggttcgcgtccggatctgacgaaaacgacgtcgtggtcatcggcggcggtcccggcggctacgtggcggccattaaagcggcgcactgggtctgaaaaccacttgcatcgaaaaagtggc

SEQ ID NO: 118875 - DNA, 254 bp, Glycine max
aatggcgaacatagacatcgaagggatcttgaagcagcagcagccttatgatgggcgcgttccgaagacgaagatagtgtgtactttgggccctgcttctcgatccgtagaaatgaccgagaagcttctgagggcagggatgaacgttgctcgtttcaatttctctcatggcacccacgactatcagcaggaaaccctcagcaatctcaagactgccatgcacaacactggcatactctgtgacgtcatgcttg

SEQ ID NO: 118876 - DNA, 255 bp, Glycine max
ggccggtcgatccgggcggaagacattgtcaggtggggagtttggctggggcggcacatctgttaaaagataacgcaggtgtcctaagatgagctcaacgagaacagaaatctcgtgtggaacaaaagggtaaaagctcgtttgattctgatttccagtacgaatacgaaccgtgaaagcgtggcctatcgatcctttagtccttcggaatttgaagctagaggtgtcagaaaagttaccacagggataactggc

SEQ ID NO: 118877 - DNA, 256 bp, Glycine max
aaaaaaacacaatggcagcgagcgctcccactccacgcgaagagttcgtgtacatggcgaactgcgcggagcaggccgagcgctacgaggagatggtggagttcatggagaaggtctccgcctccgccgagagcgaggagctgaccgtggaggagcgcaacctcctctccgtcgcctacaagaacgtaatcggcgctcgccgcgcctcctggcgcatcatctcctccattgagcagaaggaggagagccgcggcaa

SEQ ID NO: 118878 - DNA, 254 bp, Glycine max
cgcaagcaaaaagaaagaatcccaggcgaggagaaagatggaggggaaggagcaggatgtgtcgttgggagcgaacaagttccccgagagacagccgattgggacggcggcgcagagccaagacgacggcaaggactaccaggagccggcgccggcgccgctggttgacccgacggagtttacgtcatggtcgttttacagagcagggatagcagagtttgtggccacttttctgtttctctacatcaccgtct

SEQ ID NO: 118879 - DNA, 252 bp, Glycine max
aaacactcataacacaaagcacaaagcaaagctcatccttgagttaaaaaatggcagcagcttcttccatggctctctcatccccatccttggctggcaaggccgtgaagctgggcccatcagccccagaagtgggaagggtgagcatgaggaagaccgtcaccaagcaggtctcctcaggaagcccatggtacggcccagaccgagtcaagtacttgggcccattctctggcgagcccccgtcctacctaa

SEQ ID NO: 118880 - DNA, 254 bp, Glycine max
gacaaaactgaatggggaaaagaagttgggtggatatatggttctgtgacagaggatatcttgactggatttaaaatgcattgccatggttggcggtctgtgtattgcattcctaagcggcctgcattcaaggggtctgcgcctatcaacctttcagatcgtctgcatcaagttcttcggtgggctcttgggtctgttgagatttttttcagcagacattgtccaatctggtatggttatggtggtgggttgaa

SEQ ID NO: 118881 - DNA, 255 bp, Glycine max
attagggtttttgagtgcggtgcggcgatcctagcactctcttctgcagctttcgccgacagcttcattcaccatggctgagcaaaccgagaaggcttttttgaaacaaccaaaagtgtttctcagctcgaagaaaactgggaagggaaagagacccggaaagggtgggaaccgcttttggaaatccattgggcttggatttaagactcccagggaagccatcgaaggaacctacattgacaagaagtgcccctt

SEQ ID NO: 118882 - DNA, 255 bp, Glycine max
gcagctcaatgagttcgtccgcaagaccggtggcgccggcaaaggtcgcactaacatgcgccgcaccgtcaagagtgctcctcagagcatttggtatggccctgaccgtcccaagtacttgggtccattctcggagcagattccatcatacctgaccggagaattccctggtgactacggatgggacactgctggattatcagctgacccggaaaccttcgccaggaaccgggagctggaggtgattcacagcag

SEQ ID NO: 118883 - DNA, 254 bp, Glycine max
ttccccttcttggtggtctcttgagtgtctggtactctgactttttccatgcccagactcaccttgttgctcccttcgaccaataccttcaccgattccctgcctacctccagcagctctccatggagtccaacggaaagaccatcacctctgatggatcttctgccaagtacaccactggccccattctcttcggcgagccttgcaccaacgctcagcactccttcttccagctcgtccaccaaggcaccaag

SEQ ID NO: 118884 - DNA, 252 bp, Glycine max
accgaatgagagcatcaaactcttcttcttcgatttccattgcgaacgttactttttcttcttctttctcttcattttcttcgctcttcgatcttcgtccggggactgctccgaataccaccaccaccactcgccgatggccacgatcggaggcttacacgactcccaaggctctcaaaacagcgtcgaaaccgaagccctcgctcgattcgccgtagacgaacacaacaagaagcagaattcgcttctgga

SEQ ID NO: 118885 - DNA, 245 bp, Glycine max
gcccaagattttgggctggtggaagaagcttgcttcccctacacaggcactgattctccatgcaaaatgaaggaagactgctttcgttattactcctctgagtaccactatgtaggaggtttctatggaggctgcaatgaagccctgatgaagcttgagttggtccatcatgggcccatggcagttgcttttgaagtatatgatgacttcctccactacaaaaaggggatctaccaccacactgg

SEQ ID NO: 118886 - DNA, 247 bp, Glycine max
cactttgctgtccgccttgaccgagcagagcttcgtcttggccctcgattttgccctaaagtactctcagtcacaacagacaccgtcgtcgtcgtcgtcgtcatcaatggcaccgaagcagaccaatcctgagaagaagatcgcttacgatgcgaactgtgcgacctaatggaggagtacggccagatcctcgttgtgaactccgataacgtgggatcgaaccagctccagaacattcgcaagggtc

SEQ ID NO: 118887 - DNA, 235 bp, Glycine max
caagagcagataaaacccttagccatcacaaccatcatggccacatctgctattcagcaatcggcattcactggtcaaactgctctgaagcagctcaatgagttcgaccgatagaccgttggagccggcaaaggtcgcactgacatgcgccgcaccgtcaagagtgctcgtcagagcatttagtatggccctgaccgtcccaagtacttgggtcccatctcggggcagaatccat

SEQ ID NO: 118888 - DNA, 250 bp, Glycine max
agaagggtgagctaaagtcaattttccttcctttcctttccactagtcacataatctcgctagtggacatggccagactcttcgccttgcacgacgtcgacgtcaccatcatcagcaccgcacataacgccaccgttttccaaaagtccatcgatttagatgcgagtcgcggtcgccccatcagaacgcacgttgtcaacttccccgtcgcacaagtgggtctccccgttgggatcgaagccttcaacgt

SEQ ID NO: 118889 - DNA, 250 bp, Glycine max
gggctctgatacttgccatggagatacgttccgcagaacctccaatgatgaagctattaaaagaagcagcagaagaaggactggttagttccagccaaatggtgaaagggttttctcgtttggcagaatccctagatgatcttgctcttgatattccatcagctaaggcattgtttcagtcatttgtccccaaggcaatatctgaaggatggcttgatgcttcacttaccaaacctgcaactgaagatgg

SEQ ID NO: 118890 - DNA, 254 bp, Glycine max
cgcatctggtggcaaccaaaatgcatatgatggtcgtatggattctagtaggtatatgcagcctcaaagcgctgcaggtggattccctccttatggttcttctgcctacagtgctcctgggtatgggtatggtccagctagtaatggcattggttatggtgcatatggaagttatggtggtgccactgctgggtatggtggacctgctgctgcaacatatgggaatcctaatgtccctaatgctgcttatgctg

SEQ ID NO: 118891 - DNA, 251 bp, Glycine max
atccgaggcgaagagaagagaaaaattaagatggaggggaaggagcaggatgtgtcgctgggagcgaacaagttcccggagagacagccgattgggacggcggcgcagagccaagacgacggcaaggactaccaggagccggcgccggcgccactggttgacccgacggagtttacgtcatggtccttttacagagcagggatagcagagtttgtggccacttttctgcttctatacatcactgtcttaac

SEQ ID NO: 118892 - DNA, 250 bp, Glycine max
cagtgggataaccattgtcgctgatcttgaaacaatgaagattgttgagtaccatgatgagcttattacgactgttcctaaggcggagaacaccgaataccgggcttcgcatttgaagcctcccttcggtcccaagcttcattcttggtcctcccgtcaaccggatggaccaggctacactctcgatggacacagtatcagctgggccaattggaagttccacataggttttgacatgcgagctggtgcg

SEQ ID NO: 118893 - DNA, 246 bp, Glycine max
aggccttccatggcttccgcttgtgcttcctctgcaattacagctgttgccatctctacgccgagttccgggcagaagaatggatcaggaggttgttttcttagtggaaggaaattgagggtgaaaaaggagagagcagcaattggaggacgatcgatgggcactacagtgtgcgcagttgctgagcctgacagacctctatggtacccaggcagcacccctcctccatggcttgatggcactcta

SEQ ID NO: 118894 - DNA, 249 bp, Glycine max
gacttaacaacagcacaaagcgggttactgtctgttcaagctaccatctctctctctctttcttagtgcctccttgccagaagttaaaatggcccaagaaactttcctattcacatctgaatcagtgaacgaggggcaccctgacaagctctgtgaccagatctccgatgctgtgctcgatgcatgcttggagcaggaccctgacagcaaggttgcctgtgaaacctgcaccaagagcaacatggtgat

SEQ ID NO: 118895 - DNA, 249 bp, Glycine max
ctaataaaccttgatttcgctacgctcaataagaacccggaatagcggaaatcggttcgtgttccgcttccaaactcagtcgtctttgcccaagtgtgaactgcggacgactctccagtggttccattccttcttactttacttctgggtcaacccaacccgaatgggaagaagagggtcagccaaacagcggtccactttgtacatttgctgaggcagaccaatcgggcattttagaaaagggaaggg

SEQ ID NO: 118896 - DNA, 251 bp, Glycine max
ggcagaaagcaagctcatcctagagttttaaaaatggcagcagcctcctccatggctctctcttccccatccttggctggcaaggccgtgaagctgggcccatcagcccccgaagtcgggagggtcagcatgaggaagaccgtcaccaagcaggcctcctccggaagcccatggtacggcccagaccgcgtcaagtacttgggcccattctctggcgagcccccgtcctacctcactggcgagttcccagg

SEQ ID NO: 118897 - DNA, 261 bp, Glycine max
ggaagaaaccctagccactctcccggcgtcacgatgcagatcttcgtgaaaaccctaacgggtaaaacgatcacgttggaggtggagtcttcggacaccatcgacaacgtgaaggccaagatccaggacaaggaaggcatccctccggaccagcagcgcctcatcttcgccgggaagcagctggaggacggccgcaccctcgccgactacaacatccagaaggagtccacgcttcacctcgtcctccgcctccgtggcggc

SEQ ID NO: 118898 - DNA, 257 bp, Glycine max
gctatgaacaatgatgagctacatgtggttatgttcccattccttgcatttggccacattagtccatttgttcagctctccaacaagttgttctctcatggtgttcatgtcactttcttgtcagctgcatccaacattcccagaatcagatcaactcttaatctcaatccagccatcaatgttatctcactaaagttcccaaatggtataaccaacactgctgaattgccacctcacttagctggaaatctcataca

SEQ ID NO: 118899 - DNA, 252 bp, Glycine max
gtggtgccttatcgctgtggttatcatcttcttcttcctctttcttagatctcttctttctctacgccgcacgccgaaaccatggccggaaaaggagagggtcctgctatcggaatcgatctcggaaccacctactcttgcgtcggtgtgtggcaacatgaccgcgttgaaatcatcgccaacgaccaagggaacagaaccacgccgtcttacgtcggattcactgacaccgagcgtctcatcggtgatgcg

SEQ ID NO: 118900 - DNA, 256 bp, Glycine max
gcccactttttttcttccaacgctcctcctccttctcatagccttcgccacctctgtctccggccgccgtgacctcgtcggagactttctccggctgccctccgaaactgataacgacgacaacttcaagggcacccggtgggccgtcctcctcgccggttccaatggttactggaattacagacatcaggctgatgtttgtcacgcctatcaaatattgaggaaaggtggtctgaaataagaaaatattattgtt

SEQ ID NO: 118901 - DNA, 244 bp, Glycine max
cagcgatggaagaagacttcgacatccccggcggcgaggaaatggatctcggcgaagacgaggtcggcgaggagagggagatcggctctggcggcctcaagaagaagctcctcaaggaaggtcaaggctgggaaacccccgaagtcggtgacgaagtccaagttcattacacggggactttgctcgacgggactaagttcgattcgagccgcgacagggattctcccttcagcttcacgctcgg

SEQ ID NO: 118902 - DNA, 251 bp, Glycine max
agcatttctctgtggagggccagcttgagttcaaggccatcctctttgtcccgaagagggcaccctttgatttgtttgacaccaggaagaagatgaacaacatcaagctttatgtcaggagggtgtttataatggacaattgtgaggagctcattcctgagtaccttggatttgtgaaaggtgttgttgactccgatgacttgccgctcaacatctctcgtgagatgctgcaacaaaacaagatcctgaag

SEQ ID NO: 118903 - DNA, 251 bp, Glycine max
caatatagcccaagccctatacaaccaaaccctaacacacacccatttgattcagtttccatggctagcctcaaggttgcatttttggctgcagtgctctgcatggttgtggtgagtgcacccatggcacatgcagctatcacgtgcgggcaggtgacgaatagcctgatcaattgcatcggttacctccagaacggaggaacgccgccgtcgggatgctgcaacggagtgaagagcctcaatgccgccgc

SEQ ID NO: 118904 - DNA, 248 bp, Glycine max
  unsure (1)..(248): unsure at all n locations
gttaggtcttcttcacctttcgaattttggaatccatgggtcagggaactccgggcggcatgaaccggcagggcgaccggaagccggacggcggcgacaagaaggagaagaagttcgagccgtcggctccgccggcgcgcgtggggcggaaacagcggaancntaaaggtccggaagcggcggcgcggttgccgacagtgactccggtgacgaatgcaaatgcggcttctgaagctggagcggatcaa

SEQ ID NO: 118905 - DNA, 250 bp, Glycine max
ggaagtctcaaaagaagaagctcgagtggcacccgcaccggccctagtggcgatgctgccatcccctggcatgggccacctaagcccaatgatcgagttcgcaaagcgagtggtgtgctaccataacctggcggtgagcttcgtgatccccactgacggcccaccttcaaaagcccaaaaggcagttctggaggcccttccggactcaatttcccacaccttcctccctccggtcaatctctccgacttc

SEQ ID NO: 118906 - DNA, 250 bp, Glycine max
gaaaaaatgggttcttcttcttctatgtggacggtgtgtgtgattttggcatcactggcctctgcagcactctgtgccaacccacgcaggccagtggatgtacaatttggccgaaactacgtgcccacatgggcctttgatcacatcaaatatttcaatggtggttctgacattcagcttcatcttgacaagtacactggtactggcttccagtccaagcggtcttacttgtttggtcacttcagcatgt

SEQ ID NO: 118907 - DNA, 243 bp, Glycine max
gctgattacaccctcaagctccttcacaggagaattccccctgctgtccctggaattatgtttttgtctggtggacagtctgaggttgaagctaccctcaacttgaatgccatgaaccaatctccaaacccgtggcacgtgtcgttctcgtatgccagagccctccaaaacactgccttgaagacatggggaggccgcccagagaacgtgaaggcggcacaagatgcactccttttccgtgcc

SEQ ID NO: 118908 - DNA, 248 bp, Glycine max
ggccaacagagaaaagatgacccaaatcatgtttgagaccttcaatgtgcctgccatgtatgtggccatccaggctgttctctccttgtatgccagtggtcgcacaactggtattgtgttggactctggtgatggtgtgagtcacactgtaccaatctatgaggggtatgcactcccccatgccatccttcgtttggatctcgcaggtcgtgatctaactgatcatttgatgaagatcctcactgaga

SEQ ID NO: 118909 - DNA, 243 bp, Glycine max
caggaagaagagaggccacgtgagtgccggccatggccgcatcgggaagcaccggaagcaccctggaggacgcggtaatgccggaggatgtcaccaccaccggatcctctttgacaagtaccaccctgggttcttcggcaaggtcggaatgcgctattttcacaagctccgcaacaaattctactctccgatcctcaacatcgacaagctctggtccctggttccgcaagaagtgaaggacaa

SEQ ID NO: 118910 - DNA, 246 bp, Glycine max
gtttcttcctttctctgctctttgccttctctgacacatttggtgccttgtagagcgtgtgttggcaggaaggtggtatggcgaaggacgttgaggttgctgagcgtggctccttctctgggaaggactaccaggaccctccaccagcaccactcattgatgctgaggagctcacaaagtggtccttttacagggctctcattgctgaattcattgccactttgctcttcctctacattactgtgc

SEQ ID NO: 118911 - DNA, 229 bp, Glycine max
attcgtccatcgatatcggcttcttcaggtgctatgataatggctcgctcgtttctacgcgggtcgctgcttcctctcacgatcgtgtccctagtacgtctatctgtgattgccattgtattggagattcccacgacgttgggtctgttcattatgattgatcttgcaacgacctatttcaggggtacatttctacagctatctgccatatggatatcatatccagtga

SEQ ID NO: 118912 - DNA, 250 bp, Glycine max
ggttgaacaactgcacaaaattttcaagctctgtggctccccacctgacgaatactggaaaaagtctaaacttcctcatgcaactttatttaagccagagcaaccatatgatagttgccttcgacagtcctttaaagatttgccaacgaccagtgtacatctgctacaaactcttctttctgttgaaccatacaaacgtggaactgcaacatctgctctatcatcagagtatttcaaaacaaaaccttat

SEQ ID NO: 118913 - DNA, 250 bp, Glycine max
gaaaaatcccagtgagagagagaaaagaaaagaacgaaaaaccaagaagcttcgaaacgatcgtgtgagatgaacaagtgcgaactgtgcaaagttccggcgaggatcttctgcgagtcggaccaggcgagcttatgctgggactgcgacgctaaggttcacagcgccaacttcttggtcgcgagacacgcgcgaaccttactctgccgcacgtgccgctctcccacgccgtggaaggcctccggcgcct

SEQ ID NO: 118914 - DNA, 245 bp, Glycine max
gcaaaattctcttccgtttcaggattagggtttcaccgttacagtgaaacatggcaaaaccaaagcgaatctctctgcgtatctttgcgctgctcctcttgatttccacctcttcgtttcagcttctccgcgcttccgatgacgccgatgatgatgcgatcttctatgattcgttcgacgaggattttgaagaccgttgggttgtgtctcagaaagatgagtacagtggtgtctggaaacatgcc

SEQ ID NO: 118915 - DNA, 248 bp, Glycine max
agaggctccattgctccgtcaaaaactacgattggggtctcccaggtcgcgtctccgaggttgccagactccacgcgctcaattccgcgtctgaattccacgcggaggaccctttcgccgagctttggatgggtacccatgattcaggcccttcctttttagcttcctccaatggaaatgagaatggtgtctccctcaaggcttggatttccgagaaccctgatgtgctcggtcacaaggttcttcac

SEQ ID NO: 118916 - DNA, 246 bp, Glycine max
gagaacttcaagtgagggtgagagtgacacaaatctagagagagcactagtactctaaaagtctattatattcttcaaaatatgaccatgcatcgcgagtcttgggcttttgtcttcggcgttatgggcaacatcatctcctttggagtgttccttgctccattgccaaccttttaccaaatctacaagaagaaatccactgaaggtttccagtcacttccttatgttgttgcactgttcagtgca

SEQ ID NO: 118917 - DNA, 245 bp, Glycine max
caggaaacagtaccctcaagctgtcatactttatgctgattactatgatgcctaccgcactgtcatgaagaatccaagcaaatacggattcaaagagaccttcaacgtttgctgtggatcaggagaaccaccttataacttcactgtgtttgccacatgtggcacacctaatgccactgtgtgttcaagcccttctcagtacatcaattgggatggtgttcatctcacggaggccatgtacaaag

SEQ ID NO: 118918 - DNA, 242 bp, Glycine max
gtttcttcctgtctctgctcttgggcttctctgacacatttggtgccttgtagagcgtgtgttggcaggcaggtgttatggcgatggacgttgatgttgctgagcgtggctccttctctgggaaggactaccaggaccctccaccagcaccactcattgatgctgaggagctcacaaagtggtccttttacagggctctcattgctgccatcattgccactttgctcttcctctacattact

SEQ ID NO: 118919 - DNA, 247 bp, Glycine max
tgaccaattacaaattacactctttgactcgcaccttcaacttaaccttgtctagtcataatcttaacaacttgctagaataagattaataaagtgaaaaaatgtgtgtgtgtgagagagagcaatggctggctcgtgggcacgccgttctctgattgttctggctatcatttccttcggatgtttatatgcaatttccattgctaaggaggaacccacaaaattggggacggtcatcgggattgat

SEQ ID NO: 118920 - DNA, 246 bp, Glycine max
gcaatttgtgtgtttgaacaatacggtggtatcagttggcgtcacactgaaacaggccttgatgagatatttacagaagtcagaacagatgtgagtctaattgttagatcaattgttaccgtcggcaactacgacaatatagtagattgggagttcaagacaagtggttcaatcaagccctcgatatcactatcaggcattttggaagttaagccagtggacattactcacacagaccaaataaag

SEQ ID NO: 118921 - DNA, 249 bp, Glycine max
gaagaatgttctcatttttgatctcggtggtgggactgttgatgtctctcttctcaccatcgaggagggtattttcgaggtgaaggccactgctggtgatactcacttgggaggtgaagattttgataacagaatggtgaaccattttgttcaggaattcaagaggaagaacaagaaggatattagtggaaatgccagagctctgaggaagttgagaacacatgtgaacgggcaaagaagactctctct

SEQ ID NO: 118922 - DNA, 261 bp, Glycine max
gaattcggctcgagctggcattgcttgagcagtcctacattaaggatgataaggtagcagtaaaggacttcgtcaagcaaactattgcaactattggagaaaatattaaagttaagaggtttgtgcggttcaaccttggagaaggtttagagaagaaaagccaggattttgctgctgaagtagcggcacaaactgcagcaaaaccagcacctatactggtgaaagaggagcctgctgttgcagatgcagaagccaaggaga

SEQ ID NO: 118923 - DNA, 226 bp, Glycine max
accaccacccatgggttgcacggcgtcgaagctggaaaacgaggacacggtgcggcggtgcaaggcgcggcgccgcctcatgaaggaggcggtctacgcgcgccaccacctcgctgctgcccactccgactactgccggtccctccgcctcaccggctccgccctctccaccttctccgccggcgaacccctctccgtctccgaccacactcccgccgtcttcctc

SEQ ID NO: 118924 - DNA, 245 bp, Glycine max
ctatggctcgtcactccttgctcttagccctcctcctcttcgccgcgtccgacgccgacgacatcctgatccgtcaggtggtgccagatgttggcgaagcgaacgaggaggacaacctgctgaacgccgagcaccacttcgcgagcttcaaggccaagttcgccaagacctacgccaccaaggaggagcacgatcatcgcttcggcggcttcaagtccaacctccgcagagccaggctgcacgcc

SEQ ID NO: 118925 - DNA, 243 bp, Glycine max
cctccttcccctcccactctctctccaaaaccttcgatacccatttcgcccctgccccgaaagtcaacgtctttgtgaacttcagggcgaggaggcacgttggggtgcgagtttcgaacgcgctgatcgaaccagatggagggaagctcgtggagcttgtggtgacggattttgagagggatttgaagaagggtgaggctctttcgttgccgaggatcaagctctcaaggattgaccttgagt

SEQ ID NO: 118926 - DNA, 218 bp, Glycine max
tcgccgaacaagccgaacgcgatgaagaaatggtggaagcaatgaagaatgtggcgaagtaaacgtggaattgacggtagaggagcggaaccttctgtcggttgggtacaagaacgtggtgggtgctcgtagggcttcgtggaggattctttcctcgattgaacagaaagaagaagctaaagggaacgatgtgagcgtgaagaggataaaggagtata

SEQ ID NO: 118927 - DNA, 244 bp, Glycine max
gttaggtcttcttcacctttcgaattttggaatccatgggtcagggaactccgggcggcatgaaccggcagggcgaccggaagccggacggcggcgacaagaaggagaagaagttcgagccgtcggctccgccggcgcgcgtggggcggaaacagcggaagcagaaaggtccggaggcggcggcgcggttgccgacagtgactccggtgacgaatgcaaatgcggcttctgaagctggagcgga

SEQ ID NO: 118928 - DNA, 260 bp, Glycine max
gggattcgggtcgagggcatctggtggcaaccaaaatgcatatgatggtcgtatggattctagtaggtatatgcagcctcaaagcgctgcaggtggattccctccttatggttcttctgcctacagtgctcctgggtatgggtatggtccagctagtaatggcattggttatggtgcatatggaagttatggtggtgccactgctgggtatggtggacctgctgctgcaacatatgggaatcctaatgtccctaatgctg

SEQ ID NO: 118929 - DNA, 239 bp, Glycine max
cagatagaggcccttaaggccattggagttactgaggtggtgctagccatcaactaccaaccggaggttatgttgaatttcttgaaggattttgaaacaaagctcggcatcaagatcacatgttctcaggaaactgaaccattgggaacagcaggtcctctggctcttgccagggataagctgatagatgactctggagaaccccttttttgttctcaacagtgatgttatcagtgagt

SEQ ID NO: 118930 - DNA, 239 bp, Glycine max
ctcgagccggcaattccttcttctcccagaatcggtcactaaatccgcaatcatgaagctcgataccaccggtctcgaatcgtttcccacactgcttgcgcctcaaaacgacgtcgttggagaactctccgccgctccatccttcgaccttccgaattccaacgatttcgatgggtttgtgaaagaagctattcagatggtgaagcccgcgaagggtactacgactcttgcttttatat

SEQ ID NO: 118931 - DNA, 240 bp, Glycine max
acttgaccctgctctcctgcgtcctgggagattggatagaaaaatagaaatccctctgcctaatgaacaatcaaggatggaaattcttaagattcatgctgctggtatcgctaagcatggtgaaatagactatgaagctgttgtgaagcttgcagagggatttaatggggctgatcttcgaaatgtctgcacagaagctggaatggcagcaattcgtgcagagcgtgattatgtgatcca

SEQ ID NO: 118932 - DNA, 240 bp, Glycine max
tctcaccctcctcttcacacattttctgtgcgctctaacaaacattctcgttcacactttcagattgtgtgaagatgggggcgggtggccgaactgatgttcctcctgccaacaggaagtcagaggttgaccctttgaagcgggtgccatttgaaaaacctccatttagtctcagccacatcatgaaggtcattccagctcactggttccagcgttctattttccgcgcattctcctatg

SEQ ID NO: 118933 - DNA, 238 bp, Glycine max
cacacacacaaattctcaaacccaaatcccaagtctcctaaaaccctaattcgcagtgaaaatgagagaactcttgcacatccagggagggcaatgcggtaaccagatcggcgcgaagttctgggaggtgatatgcgacgcgcacggcatcgaccacaccggaacgtacagcggcgactccgagctccaattggagcgcatcaatgtttattaccatgaagccagcggcggaaggtac

SEQ ID NO: 118934 - DNA, 236 bp, Glycine max
gtcttgggtcatttaaaatcttgacggccaaagctattgaggctaatgatgggaagcccctgccactgtatcagaaagctctatgtgggctgactgctggtgctatcggagcaactgttggtagtccagcagatttggcactcattcggatgcaggctgatgcaacattacctgctgctcagcgccgaaattacactaatgccttccatgcactctatcgatgtactgctgatgaa

SEQ ID NO: 118935 - DNA, 251 bp, Glycine max
ggccacctctgctattcagcaatcagcattcgcaggtcaaactgctctgaagcagctcaatgagttggtccgcaagaccggtggcgccggcaaaggtcgcaccaacatgcgccgtaccgtcaagagtgctcctcagagcatttggtatggccctgatcgtcccaagtacctgggtccattctcagagcagattccgtcatacctgaccggagaattccccggtgactacggatgggacactgctggactat

SEQ ID NO: 118936 - DNA, 248 bp, Glycine max
tagaaacagtgtgatgaaaatgaaggtccttgttttcttcgttgctacaattttggtagcatggcaatgccatgcgtacgatatgttccctctccgaatgaacactggctatggtgcccgtactccggaggtgaaatgcgcaagttggaggctagctgtggaagcacacaacatctttggctttgagaccattcctgaagagtgcgttgaagcaacaaaggaatacatccatggcgaacaatatagat

SEQ ID NO: 118937 - DNA, 250 bp, Glycine max
  unsure (1)..(250): unsure at all n locations
gtcagtggcgccgcggctttgctcaaatcggctcaccctgattggagccccgccgcnctaaggtccgccatgatgaccaccgccaccgtcctcgacaaccgcaaccagatcatgaccgacacagccaccgggaacagctcaactccttacgatttcggtgctggccatcttaacctaggacgagccatggatcctggcttggtgtacgatatcaccaacaatgattatgttaatttcctttgcggtattg

SEQ ID NO: 118938 - DNA, 250 bp, Glycine max
cacttttgtgttgtgttgggaaaccctaaaccccgttttcggtgagatcgagatcgatcgaacatggatgaggagtacgatgtgatcgtgttgggcacgggtctcaaggagtgcattctcagcggtcttctctccgtcgatggcctcaaggttctgcatatggataggaacgactattacggaggagaatccacttcgctcaatcttattcagctttggaagagattcaggggagatgacaagcctcctc

SEQ ID NO: 118939 - DNA, 252 bp, Glycine max
ggaagggtgagcatgaggaagaccgtcaccaagcaggtctcctcaggaagcccatggtacggcccagaccgagtcaagtacttgggcccattctctggcgagcccccgtcctacctaaccggtgagttcccaggcgactacggctgggacactgctgggctttccgcagacccagaaaccttcgccaagaaccgtgaactcgaagtgatccactccaggtgggccatgctcggagccttgggctgcgtcttc

SEQ ID NO: 118940 - DNA, 199 bp, Glycine max
cgacgcagaaggttcatccaatctccgaatcctttaatcgcattgcaaccatgtcgaggagaaaggtcagagagccaaaggaggaaaacgtgactcttggcccagctgttagagatggcgaacatgtctttggcgtcgctcgcatatttgcctccttaaatgataccttcattcatgtcactgatctgtctgggaggga

SEQ ID NO: 118941 - DNA, 253 bp, Glycine max
tagtcctgttatttctcagcgcgtaaagcatggctttgttggtggagaaaaccacgagtggtcgcgagtacaaggtcaaggacctttcccaggccgacttcggccgcctcgagatcgagctggccgaggttgagatgcccggcctcatggcctgtcggaccgagttcggcccctcccagcccttcaagggggcccgcatcaccggctccctccacatgaccatccagaccgccgttctcattgagaccctcac

SEQ ID NO: 118942 - DNA, 229 bp, Glycine max
tgtgagaatggagtttcaagggttaccggaaggttgcattgctagtatactctctcgcactacgccggcggacgtgtgtaggttttccgtcgtatcaaagattttccgttcggcggctgaatcggacgctgtgtggaaacgttttctcccttccgataacaattcaatcatttcccagtctccttcgcctctcaactatccttcaaagaaggagctctatctcgctctc

SEQ ID NO: 118943 - DNA, 243 bp, Glycine max
cggtgacggaggcggtggacgcggctccgttgaagagtagtaagaggtttgttataaggataaaggctggggtctatagagagaacgttgaggtgcctaagaagaagaacaatatcatgttcttgggtgatgggaggaccaacactatcatcactgctagcagaaatgttgttgatggtagcaccaccttccactctgccaccgtcgctgtggtgggttcaaatttcttggcccgggacttaa

SEQ ID NO: 118944 - DNA, 249 bp, Glycine max
tgctcatcaagtccaagaaccaacctaccttttgcaatctcaattcaatggcgtcctctcttcattgcgaacgcttcctctcctcttccctcctctccaggtccctccttcgccccgccgcttccgcttcccaccgctctttcaacaccaacgccatgcgccagtatgacaaccgcgccgacgaccacagcaccgacatcgatcgtcactccgaacgctctttccctagcactgcgcgccgcgacgata

SEQ ID NO: 118945 - DNA, 247 bp, Glycine max
ctcgagcgatatagcccaagccctatacaaccaaaccctaacacacacccatttgattcagtttccatggctagcctcaaggttgcatttttggctgcagtgctctgcatggttgtggtgagtgcacccatggcacatgcagctatcacgtgcgggcaggtgacgaatagcctgatcaattgcatcggttacctccagaacggaggaacgccgccgtcgggatgctgcaacggagtgaagagcctca

SEQ ID NO: 118946 - DNA, 250 bp, Glycine max
agcaaaaggccatataatttttttttatttgaaataatgtccgggatcatccacaagattgaggagaccctccatgtgggagggcacaagaaagaggagcacaaaggagaacaccatggtgagcacaaaggtgaacacaaaggagaacaccatggtgagcacaaaggtgaacacaaaggagaacaacaccatggggagcacaaggagggacttgtggataagatcaaggacaagatccatggttatggcc

SEQ ID NO: 118947 - DNA, 250 bp, Glycine max
caatatagcccaagccctatacaaccaaaccctaacacacacccatttgattcagtttccatggctagcctcaaggttgcatttttggctgcagtgctctgcatggttgtggtgagtgcacccatggcacatgcagctatcacgtgcgggcaggtgacgaatagcctgatcaattgcatcggttacctccagaacggaggaacgccgccgtcgggatgctgcaacggagtgaagagcctcaatgccgccg

SEQ ID NO: 118948 - DNA, 249 bp, Glycine max
gggatatggattcgtggagttctattcacgagcgacggctgagaaagtcttgcagaactataatggcacgatgatgcccaatacagatcaggcattccgtctgaattgggccacattcagtgcgggggaaaggcgttcttccgatgctacttctgatctctctatatttgtgggggacttggccattgatgttactgatgctatgctgcaagagacttttgctggccgatattcatctattaagggagc

SEQ ID NO: 118949 - DNA, 247 bp, Glycine max
aaacaaatgagaacttccgcctgctgtatgacaccaaaggccgattccgtcttcactcagtcatagatgacgaggctaagttcaagctttgcaaagttcgctcagtgcagtttgggcaaaaaggtatcccatacttgaacacctacgatggtcgcactatccgctacccagaccctctcatcagagctaatgacaccattaagttggatttggaggagaacaagattgtcgatttcatcaagtttga

SEQ ID NO: 118950 - DNA, 244 bp, Glycine max
gtggtgccttatcgctgtggttttcatcgtcttccttctcttatatttcttttttttttttgtcttcgccgcacgccgaaacaatggccggaaaaggagagggtcctgctatcggaatcgatctcggaaccacctactcttgtgtcggtgtgtggcaacatgaccgagttgaaatcatcgccaacgaccaagggaacagaacgacgccgtcttacgtcggcttcactgataccgagcgtctcat

SEQ ID NO: 118951 - DNA, 242 bp, Glycine max
gcgactgcgcttcacgatgggtgcttacaagtatgtttcggagctatggcgcaagaagcagtctgatgttatgagattcttgcagcgggtgaggtgctgggagtaccgccagcaaccttctattgtccgtttgacaaggtctactcgcccagacaaggctcgccgcttgggtttcaaggctaagcagggttatgtgatttaccgtgttcgtgtacgaaggggtggccggaagagaccagttc

SEQ ID NO: 118952 - DNA, 244 bp, Glycine max
attctctgtgtagaagccatgtcaaagggtcctggtctctactctgacattggcaagaaagcccgagatctcctcttcaaggactaccacagtgaccagaagttcaccatcactacctactcacccactggagttgctataacatcctcagggaccaagaaaggtgatctttttgtggctgatgttaacacccagttgaagaacaagaacatcaccactgatatcaaattagacactaattcca

SEQ ID NO: 118953 - DNA, 252 bp, Glycine max
  unsure (1)..(252): unsure at all n locations
gtcagtggcgccgcggctttgctcaaatcggctcaccccgattggagccccgccgcnctaaggtccgccatgatgaccaccgccaccgtcctcgacaaccgcaaccagatcatgaccgacgacagccaccgggaacagctcaactccttacgatttcggtgctggccatcttaacctaggacgagccatggatcctggcttggtgtacgatatcaccaacaatgattatgttaatttcctttgcggtattgg

SEQ ID NO: 118954 - DNA, 246 bp, Glycine max
cttttcttgaaacttccctctttccttaaaggattccctcctagatttggtgggattatcccaagtttcagctgctaccactcatcagcattgccatttcctgtttcactcaccacatggaaaagcttattcgcatgttccctttgcttcttcttcttcttctgttccccacttttgccttcgctggccatgactatggccaagctctgagcaagagccttctcttctttgaagcccagagatctg

SEQ ID NO: 118955 - DNA, 248 bp, Glycine max
aaaagaccaggatttggctggggacttttcccacgccggagatggcggcacgggcccacgacgtggcggcaatggccctgaggggccggtatgcctgtctcaacttcgctgactcgacgtggcggttaccaattcccgccactgctaacgcaaaggatatacagaaagcagcagcagaggctgccgaggctttcagaccaagtcagaccttagaaaatacgaatacaaagcaagagtgtgtaaaagtg

SEQ ID NO: 118956 - DNA, 249 bp, Glycine max
cttcccttctccaacatgccaaacgacagcgttctgagtcttttcttcttcgttaccctcttcacatgccttctctctgctaattcccacgatgaccatattttcctaccgagtcaactccatgacgatgactcagtgagttgcactgctaccgacccaaaccttaactacaagccggtgatcggaatcctgacccaccccggcgacggtgcctctggccggctcagcaacgccaccggggtttcttac

SEQ ID NO: 118957 - DNA, 232 bp, Glycine max
aaaaaccatagtaatctagataataattaacatcagccctcactcgaccgcacaccaaacccttccttcctatctctcactaatctaatggaatccgcagcactgtcgcgcataggcctggagggcctggcggtgatgggccaaaacctagccctaaacatcgcagaaaagggggttcacgatctccgtgtacaaccgcacggcctccaaagtggaccagaccgtagatcgt

SEQ ID NO: 118958 - DNA, 244 bp, Glycine max
ctcaacgaagaggttaaagagacggcaacactttgctgtccgccttgaccgagcagagcttcgtcttggccctcgattttgccctaaagtactctcagtcacaacagacaccgtcgtcgtcgtcgtcgtcatcaatggcaccgaagcagaccaaggctgagaagaagatcgcttacgatgcgaactgtgcgacctaatggaggagtacggccagatcctcgttgtgaactccgataacgtggga

SEQ ID NO: 118959 - DNA, 245 bp, Glycine max
tcggtgttcacttgatccttcataagtcgtcatcatcatcatcatcatcaccgttgattgaagaagatgccgatcagaaacatcgccatcggaaggcctgaagaggctactcaccccgacacgttgaaggcggggttggctgagttcatctccaccttgatcttcgtgttcgccggttcaggttccggcatcgcctacaacaagctcaccgacaacggcgccgccactcccgccggcctcatctc

SEQ ID NO: 118960 - DNA, 245 bp, Glycine max
gcagaaagcaagctcatcctagagttttaaaaatggcagcagcctcctccatggctctctcttccccatccttggctggcaaggccgtgaagctgggcccatcagcccccgaagtcgggagggtcagcatgaggaagaccgtcaccaagcaggcctcctccggaagcccatggtacggcccagaccgcgtcaagtacttgggcccattctctggcgagcccccgtcctacctcactggcgagttc

SEQ ID NO: 118961 - DNA, 245 bp, Glycine max
gcaattgaagttgaagtcttgcccttctctcttcaactccaaacacaagacatcatcatccatggctgcctccgtctccactgtcggagctgtcaacagagctcttttgaacctgaatgggtctggacctggggtttcagctcccagttcatccttctttgggagcagcttgaagaaggttattggctcaagggtccccaacacaaagatttcctctggaagcttcaagattgttgctgtagaag

SEQ ID NO: 118962 - DNA, 234 bp, Glycine max
cactattcttcttcgcagcaatggcgcgagtggatctggacgggaaccccatgaaggcacttacgatctgcatgatcggcgctggcggcttcataggctcgcatctctgcgagaagctcatgtccgaaacccctcacaccgtcctcgccctcgacgtctacaacgacaagatcaaacacctcctcgaaccctccgattccccctgggccggccgcatcaccttccacagaacat

SEQ ID NO: 118963 - DNA, 246 bp, Glycine max
atctgggacaatgggtggggcatgtgggtatgggaatctctacagccaagggtatggaacaaacactgctgctctaagcactgcactgttcaacaatggcttgagctgtggctcttgctatgagattaggtgtgccaatgaccacaggtggtgccttccaggttctattgtggtcactgccaccaatttctgtcctccaaacaatgccttgcccaacaacaatggtggctggtgtaaccctcctct

SEQ ID NO: 118964 - DNA, 246 bp, Glycine max
ctcacacatcgttttatccgaaagcaagcattatcagaagcagaaagaaagaataagaggttgcagcaacaatggcagccatggctgcgcttcagagctcaatggtcggtctctccctctcctccaactctttcttaggccaacgcctttctcccatcaccctcccctctcttcttccgggtaagtcaacagagaagcaatgtcctattgtaatgaggcttaaacgatgggaacggaaggagtgta

SEQ ID NO: 118965 - DNA, 238 bp, Glycine max
tgggagggtcaccagtgtgctgaagggttgttcaggaaacgcttgtggggtggtacttttggagaagtctataaaagaccttcatgctgggtggatcacatgtcactggacaatgaaacaggattggatccaccaggcataagagttaggcctgtctctggacttgtagctgctgattactttgctgcaggatacttcgtttgggcagtcctaattgctaacttggcacgcattggtt

SEQ ID NO: 118966 - DNA, 240 bp, Glycine max
  unsure (1)..(240): unsure at all n locations
tcgcaacacatcaaaacnagacaacccagagagcgcgtattaataaacgctcttctctgaaaacccccatttcttttcttctttcttcttctctttcgcttcttcgatcttcgatcttcgtcgctgaaaatgagaaagtgcatttcaatccacatcggacaggccgagattcacgttggaaacgcctgctgggagctttactgcctcgaacacggcattcagcctgatgggcagatgcca

SEQ ID NO: 118967 - DNA, 247 bp, Glycine max
ccctttcctctccaccagccacttctccagctccagctcctgccaaggtggttgctcctgcactctctccttccttggctcccggccccagcctctccaccatctctccctctggcgatgatagtggggctgaaaagttgtggtcctttcagaagatgattgggagcttagtattcggatgtgctttgctgtccttgttgttctagacatcatcgatctctgtcttcggacttgcagatttttctgc

SEQ ID NO: 118968 - DNA, 244 bp, Glycine max
ctcacttgtcactcgtcactctgccacttcttcgtcggtgtcaaactcacacaaactcagcattcaaaaccctcttcctgcgccaccgccggaaaatggaggcggtgggttcgagactcagccgcgcctcctcccgctacggcgcccccaccgtgttcagcggccccgtcagaaagtggaagaagaagtgggtccacgtcaccccctcttccttacacaacaacagctctcactctcacactaa

SEQ ID NO: 118969 - DNA, 242 bp, Glycine max
ctctcttgagtatcttgtgaggaatcttctgaaactctacgttgacattgagttcactggttctcacacacagttctatgacaagtttaacatccgccataatattgctgaactcctcgaatacctgtggcaagtccctagtcatcataatgcttggagacagattgctaaagaggaggaaaagggtgtctatctgaatttcttaaactttctgattaatgatagtatttatcttcttgatg

SEQ ID NO: 118970 - DNA, 245 bp, Glycine max
attcagtggaacctgccgagagcaggaggccattccgtgcactccttgatgttggtcttgttaggactacaacaggaaatcgcgtctttggtgcccttaagggagctctggatgggggtttggatattcctcacatcgacaagaggtttgctgggtttgataaggagaagaaggagcttgatgctgaggttcatcgcaaatatgtttttggtggacatgttgctgcctatatgaagatcttggca

SEQ ID NO: 118971 - DNA, 244 bp, Glycine max
gttgtggtgcttttgaaagatgaggccgattctgatgaaaggtcatgagaggccattgacgttcctgaaatacaacagggacggcgatctcctcttctcctgcgccaaggaccacaaccctaccgtctggtttgccgacaacggcgaacgcttgggcacttatcgcggccacaacggcgccgtttggacctgcgacgtctcaagagattcggctcgactcatcacgggaagtgccgatcagacc

SEQ ID NO: 118972 - DNA, 241 bp, Glycine max
gctgaaccttcctctgcacaatctccttcaaaaagcttctcatccatggcgaaaacgctcatttcgtctccatcgttcatcggcacgccgctcccctcgctccctcgccaccacctcccccaccgcaccaggtttgtcactaccaaagtccacgtcagcctccatgaacttgcccctattcaatccttaattcactccattgacttctccggaatcgttaccagatccgaaggccttctct

SEQ ID NO: 118973 - DNA, 237 bp, Glycine max
tcttgaccggtcccatcccgctctccttcggatgcctgaagaaaattcaatttctcaatttggcgcacaacaagctctacggctgtgttcccgacaacctttgccaaattccttctatccgcaacaatgggaatctctctttggcgaacaattatttcaacgaaattggaccttcgtgttggagtttgataaagtccaaggttttggatgtgtcaggaaactgcattccggggcttc

SEQ ID NO: 118974 - DNA, 239 bp, Glycine max
tgcatttgcagagagagagagagagagagatggaagacggttcgggggattcgatgggggccaccgttcactcgccgctagtcacttatgcttccgtcatatctctgcttacactctgtcctccgtttgtcatacttctatggtacaccatgactcttgctgacggatctgtttccgagacattccattatttaaggcggaatgggttgcagggtttgctacatatatggcccaccccc

SEQ ID NO: 118975 - DNA, 238 bp, Glycine max
gcagaacgaggagaagcagaaggagcaaaagcaatggcgccgaagaagccgagaaccacgacaaggaaccctgatttggttagggggattggcaagtattcgaggtcgcagatgtaccacaagaggggcatctgggccatcaaggccaaatacggtggcgttttgccccgccacgatcccaagcccaagcccgaggccccggcccagaagccgcccaagttctacaccgcggacgatg

SEQ ID NO: 118976 - DNA, 239 bp, Glycine max
gtggtagaagggttcaagttcgaacagaggcacgggaaagagcgcgtgagagtggcgcgcgtgtggaagacgaggcatgggcagcacttcgttgtggagtggcgcgtgggcatcactctcttctcagactgcgtcaactcgtatctccgcgatgacaactctgacatcgttgctactgataccatgataaacacagtgtatgcaaaagcataggaatgctcagacatactctctgctga

SEQ ID NO: 118977 - DNA, 252 bp, Glycine max; identical to SEQ ID NO: 118939

SEQ ID NO: 118978 - DNA, 245 bp, Glycine max
cgccgccagatctcagacacacactctcactctctctccctcaccttccataatgcagagcctccggccactgctcgcggcggcgctgctcctcctcgccaccctctccgacgcgcacaacatcaccagcatcctcgcaaagcaccccgagctctccaccttcaaccactacctcaccctcacccacctcgcccccgaaatcaacggcaaaaccaccatcaccgtctgcgccgtcgacaacgccg

SEQ ID NO: 118979 - DNA, 241 bp, Glycine max
aaaaagaatcgcattttctttgtcaatgatacatatcttccgagtgctacaccaggtccactagttaagtacagacaagaagaattggaggttttaagaggagatggaacagggaagcgcagagactttgacagaatctatgattatgatatctataatgatttgggcaatccagatggtggtgatcctcgcccaatcattggaggctctagcaactatccttaccctcgcagggttagaa

SEQ ID NO: 118980 - DNA, 239 bp, Glycine max
  unsure (1)..(239): unsure at all n locations
gttgcaaggcaagccagatctgattgttggaaactacagtgatggaaacattgtcgcttctttgttggcacataaattaggtgtcactcagtgtaccattgctcacgcacttgagaagaccaaataccccgaatccgacatttactggaaaaaattggaagagagataccacttctcttgccaattcacagctgatctatttgccatgaaccacacagatttcattatcaccagtncct

SEQ ID NO: 118981 - DNA, 236 bp, Glycine max
gagaatggctcctagggtttaacctttctggctgtgttaatatgcgtttcagcaatgtcactgaatccttctgttgcgggggaagggcaaaataatggccttgttatgaacttctacaaggaatcatgccctcaggctgaagacatcatcacagaacaagtcaagcttctctacaagcgccacaagaacactgctttctcctggctcaggaacatcttccatgactgtgctgttca

SEQ ID NO: 118982 - DNA, 142 bp, Glycine max
tctcaccctcctcttcacacattttctgtgcgctctaacaaacattctcggtcacactttcagattgtgtgaagatgggggcgggtggccgaactgatgttcttcctgcaaaggaagtcagaggttgacctttgaagcgggt

SEQ ID NO: 118983 - DNA, 242 bp, Glycine max
gtctccgcggtggcgccaagaagcgcaagaagaagacctacaccaagcccaagaagatcaaacacaagcacaagaaggtcaagctcggcattctccagttctacaaggtcgacgattctggaaaagtgcagaggctccgcaaggagtgccccaacgccgagtgtggtgccgggactttcatggccaatcacttcgaccgccactattgcggcaagtgtggcttgacctatgtctaccagaag

SEQ ID NO: 118984 - DNA, 270 bp, Glycine max
gcgacccaagaaagggggttcgtgtttggcttggaactttcagcactgctgaagaagctgcaagagcttacgatgctgaagcaaggaggatccgtggcaagaaagccaaggtgaatttccctgatgagccttcaggcgctgcttcctcaaaacgtctcaaggcgaatccagaggctcagccaatgaagaaaaatctgaactctgtgaagccgaaaataaaccagatgttcaattttggtgacaatcttgagggctactacagccctatag

SEQ ID NO: 118985 - DNA, 262 bp, Glycine max
cgtcaccaccgggttcggtgctacctcccaccggagaaccaaacagggcggtgccttgcagaaggagctaattaggtttttgaatgctggaatatttggcaatggtacagagtccaattgcaccctaccccacacagcaaccagagcagctatgctagtgagaatcaacacactcctccaaggctactcaggaatcaggtttgaacttttggaggcaatcacaaagcttctgaacaacaacattaccccatgtttgccactt

SEQ ID NO: 118986 - DNA, 276 bp, Glycine max
gctcggcaaaaacaaagtaagagttcactcaatctcactgtgttgtgagttgtgtgtgagcaccaaccaacaatggtgtctctgactccgttatgtttctttattaccttgttgatcgctggtgcagacgcagcggcggaccccaaacggtgcgttttgacaccggggggttgagcagagacacctttcccaaaggattcttattcggaacggccacgtctgcgtaccaagtggagggtatggcccacaaagacggtcgcggcccaagcatttggg

SEQ ID NO: 118987 - DNA, 258 bp, Glycine max
cggctcgaggagaaatttaactcgaccttgtatgatgaatgggttaacaagggcaatgcaccggcactgcccgagactcttaagaattacaacaagctggtgtctcttggcttcaagattatattcttgtcaggaagaacactggacaaacaggccgtaacagaagcaaacttaaagaaggctggctaccacacatgggaaaaattaattctcaaggatccacaagatccttccactccaaatgcagtttcatacaaa

SEQ ID NO: 118988 - DNA, 257 bp, Glycine max
tcttgatcatgtcacttgctggtaaaatcagcattgaaattggggtgcatgcaagcgctgcaaagtggttcaacctctttgcaacgcaactccatcatgttcaaaaccttaccgaaagagtgcatgaaaccaagctacatcatggtgatgactggcatcacaacgaatcgatcaaacactggacttgtaccatagatggtaaggttacaacatatcacgagagtattgaatccgttgatgaacctaacaaaacaatc

SEQ ID NO: 118989 - DNA, 256 bp, Glycine max
aaaaatgtcgtcgttgataacagatttgctccgtcaaaccggcggcaccgcgtcatcgacggcgtctggcgacggagctggagcgccatggcgccgacctcaatgatcctctttggagcgccaagtgcctcttttccttccctcacctcattcgccaagtacaccttgattacctggaaaatggtgcagacattataatcacagcatcttaccaagccaccattcaagggtttaaagccaaaggctattctgatga

SEQ ID NO: 118990 - DNA, 258 bp, Glycine max
aatttctcattctccctttcctctccgaaccctcgatcactctcacgcgctcctatattcgctcctccaccgtcgctctctcgaacaaccacaacaccatcttcatcacatggcaaacgcagcatctggtatggcagtccatgatgactgcaagttgaggtttttggagctgaaggcaaaaaggacacaccgtttcatagtttttaagattgaggagcagcagaagcaggtcattgtggagaagcttggtgagcctgc

SEQ ID NO: 118991 - DNA, 259 bp, Glycine max
gataagatccttccatctagcagcaccttaggatggcatagccttaaagttaagggcgaggttcaaacgaagaaaggcttatggtggatacctaggcacccagagacgaggaagggcgtagtaagcgacgaaatgtctcggggagttgaaaataagcgtagatccggggattcccgatataggtcaacctttcgaactgctgctgaatccacgggcaggcaagagacaacctggtgaactgaaacatcttagtagccag

SEQ ID NO: 118992 - DNA, 262 bp, Glycine max
atttccaccaaacaccaaagaaagaggtgaagtcaaatggtccttagttctgggagtgttgatgcttgagtcttgacggaacgaacggaaaaggggatctcaatggacaacaccaagccccttatcgaactggaactcgacgatgatggcagaatcagaagaaccgggaatgtgtggactgctagcatacacattataacagtggttgtaggggcaggggtgctgtctttggcatgggttatggcacaactaggatggttag

SEQ ID NO: 118993 - DNA, 264 bp, Glycine max
ctttctctcttctctctccacccaaaccctaactcccgaccctgttcccctctcgtatccgtcatgaaaggaggaaagtccaagaccgaatctaagagagccgatcccaaacttgctgtgaataagaagggagccgccaccaaggctaggaaacccgccggcaaggggaaggcagcgaaagaccctaacaagccaaagaggcctccaagtgctttcttcgttttcatggaggagttcaggaaggtattcaacaaagaacatcct

SEQ ID NO: 118994 - DNA, 257 bp, Glycine max
gccagatgactgggatgaggatgcacccatggaaatcttagatgaagaagcagagaaacctgaaggatggttggatgatgagccagaggaaattgatgacccagaggcaactaaaccagaagactgggatgatgaggaggatggtgaatgggaagccccaaagattgaaaacccaaagtgtgaggccgcccctggttgtggtgaatggaagaggccaacgaagaggaatccagcttataagggaaagtggagtgctc

SEQ ID NO: 118995 - DNA, 255 bp, Glycine max
  unsure (1)..(255): unsure at all n locations
tcgagcgaatcggctcgagcctatgtagagagctcttcctcactctcattcgtacccgncgnagcagcacgtcctgtcgtcaccgtgcaggccctcgccagtgacatggccaccgacgcctccgccaccgtccctatccctgacgtcatgaagtcctccatccgcccggacatcgtcaacttcgtacactccaacatctccaagaacagccgacaaccctatgcagtcagccgccgcgctggccaccagacttcc

SEQ ID NO: 118996 - DNA, 259 bp, Glycine max
gcctgaagaggcgactcaccccgacacgttgaaggcggctttggctgagttcatctcaaccttcatcttcgtgttcgccggctcaggctccggcatcgcctacaacaagctcaccgacaacggcgctgccacccctgccggcctcatctccgcctccatcgcccatgcattcgccctcttcgtcgccgtctccgtcggcgccaacatctccggcggccacgtcaaccccgccgtcaccttcggcgccttcgtcggcggc

SEQ ID NO: 118997 - DNA, 254 bp, Glycine max
attttcgattctcttctctgcaactatgcctaaccctaaggtcttcttcgacatgaccatcggcggtcaacctgccggccgcatcgtgatggagctctacgccgacgtgactccgagcaccgccgagaacttccgcgcgctctgcaccggcgagaagggcgccgggcggagcggcaagcccctccactacaaaggctcgtccttccaccgcgtgatcccgaacttcatgtgccagggcggcgacttcaccgccg

SEQ ID NO: 118998 - DNA, 254 bp, Glycine max
aagcccaatgggattggtgagctgttggagatttttgggagcgtgattactgggtttgctttgcccttgaaagaggaacacaaaatcttcttgtggagggttttggtccccttgcacaagccgaaatctattccggcctactttcagcaattgtcctactgtgttatgcagtttatagagaaggagccaaagttagcgagcattgtgataaggggattgttgaatattggccagcaacaaatagccagaaagag

SEQ ID NO: 118999 - DNA, 256 bp, Glycine max
ggagccgtagcagcagcggaagtctagctttgggcagcgaatcacaatggcgagaggattgaagaagcatttgaagaggcttaatgccccaaagcattggatgcttgacaaactgggtggtgcatttgctcctaagccctcatctggaccacacaaatccagggaatgcctgccactcatactcattttgcgaaaccggctgaagtatgctctgacataccgtgaagtcattgctattctgatgcagcgacatgtc

SEQ ID NO: 119000 - DNA, 259 bp, Glycine max
cctcacttcaaacttgacaaaaatggcaacagaattggcatcatctcccaattgggttccaagcgcagcacatgtttggcagcctttgccgccctccttctcctcttcctccgcggtctccgccgccgccgatacaacctccccccaggcccaaagccctggcccatcataggcaacctaaacttaattgggtcccttccacatcggtcgatccacacgcttagcaaaaaatacgggcccatcatgcacgtatggttcg

SEQ ID NO: 119001 - DNA, 255 bp, Glycine max
gtgattgttgtgactcgttcttcttcgtcgttatcttcttcttttgttgtttgtgtgtttgttttttctctcacctgaaaatgtcttgctgcggtggtaactgtggttgcggaagcgcctgcaagtgcggcaacggctgcggaggctgcaagatgtacccagacttgagctacaccgagtcaaccaccaccgagaccttggtcatgggagtggcaccagttaaggctcaattcgagagtgctgaaatgggtgttc

SEQ ID NO: 119002 - DNA, 256 bp, Glycine max
ctcgaaaatgctggcacgcctcgccgcgagtcgcttcaacgagatccgtcagattttccgtcagccttctagggctttctcgaccgctctgaactaccaccttgacacaccggacaacaaccctaaacttccatgggaattcaccgaggccaatcaagcaaaggttaaggagattttgtctcactatccatccaactataagcaatctgctacaattcctcttttggatcttgcccagcagcagcatggtggctgg

SEQ ID NO: 119003 - DNA, 250 bp, Glycine max
agatgctgaggctgcaattcgtgctcttgatcgagtagaatttggtcggaagggacgcagactccgtgtggaatggacaaagcatgaacgtggtgttagaaggcctgctagttcaagaagatcttcagctattgggaggccatcaaagaccttgtttgtaattaattttgatacataccataccagaacaagggacttggagaggcactttgaaccatatggaaagattgtcagtgtgaggatcagaagg

SEQ ID NO: 119004 - DNA, 252 bp, Glycine max
gggatccagatctgcgacgaacggggtgctgcctctggcgcgcaaggtggcattgattaccggaattaccggccaagacggttcgtacctgacggaattccttctagacaagggttacgaggtgcacggtctgatccgtcgctcctcgaacttcaacacgcagcgcatcgaccacatctatgtggatccccacaacgcccacaaggcccgcatgaagctccactacgccgatctctccgacgcctcctccct

SEQ ID NO: 119005 - DNA, 255 bp, Glycine max
ctctgtgacatttgtgctgctagttcatatatttgcggctgacaccgagaaggaaagcaggaaaaaaacaaaaaggagcagatgggtagctcaggtttctcatggaaattggcggatcatccaaagcttccaaagggtaagactgtggctgttgtggtattggatggttggggagaggccacacccaatgagtacaactgcatccacaaggctgaaacaccctgcatggattcacttaaaaagggtgctcctgaa

SEQ ID NO: 119006 - DNA, 259 bp, Glycine max
gcgcgttccggcagtacggagagatcgaggactgcaaggccgtcaccgacaaggtctccggcaagtccaagggctacggcttcatcctcttcaagacgcgccgcggcgcgcatatacgcgctcaaggagccgcagaagaagatcggcaaccgcatgacagcgtgccagctggcatccatcggaccggttagcaacccgccgccgacgccgatggcgccttcagcggctccgtcgtcgtcggtttcggagtacacacaga

SEQ ID NO: 119007 - DNA, 257 bp, Glycine max
caattttctagggttttattcattttccgatggcttctgcagatgttgagtaccgttgctttgtcggtgggctcgcttgggccactgacgaccatgccctcgtgacagccttctctcagtacggcgaaatcgttgaaacgaagattatcaacgatcgtgagactggcagatccaggggttttggatttgtgaccttcgccacggagcagtccatgaacgatgcgatcggagcgatgaatggacagaacttggacggc

SEQ ID NO: 119008 - DNA, 259 bp, Glycine max
accgggcaatgggttttctccccagaaatcccaaccgatgttattgttgcagttggagaatccactttttctctccataagtttattctggcggctaagagtaactacatcagaaaagtgataatggaatcagaggagagtgacctaacaagaatagagatttccaacatacctggaggacaagaagcttttgagaaagccgcgaaattctgttacggcgttaacttcgagatcaccgttcacaacgtggcggcgctgc

SEQ ID NO: 119009 - DNA, 257 bp, Glycine max
tttccctgtcacaaacacagattcacttcgaaactgaacgctgcagcagaagatgttcaaaaaattttctggcgaagatgtgtctgcacagaaccaagtgaaggcatctgctcaacgaaaaatacgacaaagtattgctgaagagtatccgggccttgaacctgttttggatgatatacttcccaagaagtcccctcttatagttgctaaatgtcagaaccatctcaatctggttcttgtgaacaacgtgcctttgt

SEQ ID NO: 119010 - DNA, 254 bp, Glycine max
gcagacttaacaacagcacaaagcgggttactgtctgttcaagctaccatctatctctctctttcttagtgcctccttgccagaagttaaaatggcccaagaaactttcctattcacatctgaatcagtgaacgaggggcaccctgacaagctctgtgaccagatctccgatgctgtgctcgatgcatgcttggagcaggaccctgacagcaaggttgcctgtgaaacctgcaccaagaccaacatggtgatgg

SEQ ID NO: 119011 - DNA, 249 bp, Glycine max
ctccctttcaaggttgggtgatggcaattgtcatggctctcttgagtggttttgcaggagtatatactgaggctattattaaaaaacgtccttcacggaacataaatgttcagaacttctggttgtatgtctttggcatgtgtttcaatgctgttgcaatattggttcaagattttgatgcggtgatgaacaagggattcttccatggatattcattcattacagttctgatgattttcaaccatgcac

SEQ ID NO: 119012 - DNA, 252 bp, Glycine max
ctctgacttcatttctgcagaagtctgaagaaacttggaagaaagccaaacaagacgcacgtgattttcctagtgcactgaaggtagcacatgaaaaatatttggctgctttgcaatctgtagttaaatgtttggaaggtcacaagattgaccctgtaaaatttctgcctgggtggcaacttaagaataagattaccaacttggagaaagatattagtgataccaataaaaaaattgatgagaagtcaatgc

SEQ ID NO: 119013 - DNA, 253 bp, Glycine max
gtgagagagagagtgagagagtgagtgagatagagagagacgcttcgcaaatctcaatcgaatctcagaaaaatgagagaaatcatcagcattcacataggtcaggccgggatccaggtcggaaactcctgctgggaactctactgcctcgaacatggcatccagcccgacggcatgatgccttctgactccaccttcggtgtagcccacgacgccttcaacaccttcttcagcgaaaccggatctggcaagc

SEQ ID NO: 119014 - DNA, 251 bp, Glycine max
cgagggcaaacctcctgattggcaagactttgttgggattatcacactccttattatcaattcaacaataagtttcattgaggagaacaatgctggtaatgctgccgcagctctgatggctcgtctagcacctaaagctaagttccttcgagatgggaaatgggttgaggaggatgctagcattcttgttccgggtgatataattagtgttaagctaggggatattatccctgcggatgctcgtccaactg

SEQ ID NO: 119015 - DNA, 249 bp, Glycine max
gcccaagccctatacaaccaaaccctaacacacacccatttgattcagtttccatggctagcctcaaggttgcatttttggctgcagtgctctgcatggttgtggtgagtgcacccatggcacatgcagctatcacgtgcgggcaggtgacgaatagcctgatcaattgcatcggttacctccagaacggaggaacgccgccgtcgggatgctgcaacggagtgaagagcctcaatgccgccgccaaga

SEQ ID NO: 119016 - DNA, 250 bp, Glycine max
gttgccaatgatccatctggaaaagcgatcaatgcactcgagcagcatattaaaaaccttttgtgtccatccactcccttgttcttcaataccctttatgaccccttcagagaaggtgcagattttgttcgtggataccctttcagtcttcgtgaaggtgtgccaactgctatctcccatggactttggctcaacatcccagactatgatgctccaacacagcttgtgaagcctctcgagagaaacacta

SEQ ID NO: 119017 - DNA, 254 bp, Glycine max
ccctatctctctctgtctctatatctgtatttctgaattttgggaatagaaaaaccctaagcaaagcaaagcggtaaggatggggaacacggagaagctgatgaaccagatcatggaattgaaattcacttcgaaatcgctgcagcgtcaatcgcgtaagtgcgagaaggaggagaaatcggagaagctgaaggtgaagaaggcgatcgagaaaggcaacatggacggcgctcgaatctacgcggagaacgcga

SEQ ID NO: 119018 - DNA, 237 bp, Glycine max
ggctcgaggagagtggtttcagtgagtgaacggtgttcacttgatacttcataagtcgtcatcatcatcatcatcatcaccgttgattgaagaagatgccgatcagaaacatcgccatcggaaggcctgaagaggctactcaccccgacacgttgaaggcggggttggctgagttcatctccaccttgatcttcgtgttcgccggttcaggttccggcatcgcctacaacaagctca

SEQ ID NO: 119019 - DNA, 253 bp, Glycine max
  unsure (1)..(253): unsure at all n locations
ttttacattactcaatacactacactaacacaatccccttccctcttctctttctatccaaattctccaccagccatggcagtttcttcagcaacagcttcctccaaactcatactattcccccatgcatcatcatcctcttcccttaattccacacccttccgctgcctccancaccaacacccacaaactaacccctctctcctcctccttcctccaccccaccaccgtcctccgccgcaccccttcttcc

SEQ ID NO: 119020 - DNA, 250 bp, Glycine max
gcagcattcactgaaagcactcagtagggtttgcggtttcagagtttgtgacgcacgcatccatggccaccaccaccaacgccgccgcagccccgccgcgccagctctcccagaaggaagccgacatccagatgatgttagccgccgacgtccacctcggcaccaaaaactgcgacttccaaatggaacgttacatcttcaagcgccgcaacgacgggatttacattattaaccttgggaagacatggga

SEQ ID NO: 119021 - DNA, 247 bp, Glycine max
caaggccagagcgaagagcttcaacctcatgaatacaacactggtactttcactctgtccaatctgggaatgtttggtgttgatcgctttgatgctattctgccacctggaactggagcaataatggctgttggagcatcggagcccactgttgtggctacaaaggatggtcgcattggaatgaagaaccaaatgcaggtcaatgttaccgctgatcatcgagtaatctatggtgctgatttggctt

SEQ ID NO: 119022 - DNA, 246 bp, Glycine max
aacaatccaactcttttcttattgcttgttgcgttctccctcgttttcgcggccgtgtcggcctcttcggacggcggcaacgaggaaccgctgatcatgcaggtggtcgatggcggtgacgtccggctgggagcagagcaccactttttggagttcaagcgcaggttcgggaaggcgtacgattccgaggacgagcacgattacaggtacaaggtgttcaaggctaacatgcgccgcgcccgccgc

SEQ ID NO: 119023 - DNA, 248 bp, Glycine max
tcagaaccctcgatcactcccacgcgctcctatatcctctccttcaccgtcgctctctccaacgatcacaacaacatcgtcatcccatggcaaacgccgcatctggtatggcagtccatgatgactgcaagttaaggtttttggagctgaagacaaagaggacacaccgtttcatagtttttaagattgaggagcagcagaagcaggtcattgtggagaagcttggtgagccagcccaaggctatgaa

SEQ ID NO: 119024 - DNA, 244 bp, Glycine max
tttaattccaagattttgagaatgtctagctgtgggtgtggaagtagctgcaactgtggcagcaactgcggttgcaacaagtactcttttgacttgagctatgttgagaagacaaccacagagactcttgttttgggtgttgggtctgtgaaggcccaattggagggtgctgaaatgggtgttgcagctgagaacggtggctgcaactgtggatcaagctgcacctgcgacccatgcaactgca

SEQ ID NO: 119025 - DNA, 240 bp, Glycine max
gcgcaaactctatgaaggtggagttacattgcctacaaactttcttagcaagatcactcctataccaataattaaggaactttttcgaactgatggcgaacagttcctcaagtatccaccacctaaagtgctgcaggtcgacaagtctgcatggatgactgatgaagaatttgcaagagaaacaattgctggtttgaatccaaatgtcatcaagattattgaggagttcccactaagtag

SEQ ID NO: 119026 - DNA, 238 bp, Glycine max
cgggcgttggatcagatgactttgaccaaatcagtggtgtatgaggtcctgaggatagagcccgcggtgccgttccagtacgcgaaggccagggaggatctggtggtggagagccacgatgcgatatacgagatcaagaagggagagatgatcttcggatatcagccgttcgctaccaaggatccgaagatcttcgagaacgccgaggactttgtggcccacaggttccttggccacg

SEQ ID NO: 119027 - DNA, 239 bp, Glycine max
cgacgtcgttgcggtcattgcttccatcgaataccgtctggcaccagaacatagactacccgcggcatacgaggatgccgtggaggcactgcagtggatcaaaaccaacaaagatgattggctgacaaactacgtcgattactccaacgtttttctcatggggagtagtgccggaggaaacatagcctacaacgcgggtctacgagcagccacggttgatggtacttataatcagattc

SEQ ID NO: 119028 - DNA, 235 bp, Glycine max
ggagcccaaatttttgaagaatggtgatgcaggtatggttaagatgattccaaccaagcccatggtggttgaaactttctctgagtatcctccccttggtcgttttgctgtgagggacatgcgtcaaactgtggctgtcggagtcatcaagagtgttgagaagaaagaccccaccggagccaaggtcaccaaggccgctgccaagaagaagtgattgcatttgggcaattttgct

SEQ ID NO: 119029 - DNA, 230 bp, Glycine max
ggtgacagcaaagcaaaggagaccgtagctgaagcattacacctcatgagtcttggaacaaatgacttcctagagaactactacaccatgcctggtagagcatctcaatacacaccccaacagtaccaaatttctctggctggcatagctgagaacttcatacggagcctctatggtcttggtgctaggaagatttccctaggagggttacctcccatgggatgcttgcc

SEQ ID NO: 119030 - DNA, 234 bp, Glycine max
tctacactaactaaagccgagcagcgagagagagaaaccctagcaaaaatgccggctggtcacggtttgagatcccgcaccagagattccttctctcgtcccttcaggaagaagggtaccatcgccctcaccacatacctcagaacctaccacgtcggcgattatgtcgacgtcaaggttaacggcgccgtccacaagggaatgcctcacaagttctaccatggccgcaccggt

SEQ ID NO: 119031 - DNA, 234 bp, Glycine max
ccctcgagcgaatcggctcgacataacacaaagcacaaagccaagctcatccttgagttaaaacatggcagcagcttcttccatggctctctcatccccatccttggctggcaaggccgtgaagctgggcccatcagccccagaagtgggaagggtgagcatgaggaagaccgtcaccaagcaggtctcctcaggaagcccatggtacggcccagaccgagtcaagtacttggg

SEQ ID NO: 119032 - DNA, 237 bp, Glycine max
cttcccttctccaacatgccaaacgacagcgttctgagtctcttcttcttcgttaccctcttcacatgccttctctctgctaattcccacgatgaccatattttcctaccgagtcaactccatgacgatgactcagtgagttgcactgctaccgacccaaaccttaactacaagccggtgatcggaatcctgacccaccccggcgacggtgcctctggccggctcagcaacgccacc

SEQ ID NO: 119033 - DNA, 236 bp, Glycine max
acgacatagaccgcctcatccggctcaatctggattcctggtccgaccgggttcttctgatggaagaagccaagaagataacgtttgagttgacagtgaagcagctgatgagctttgatccaggtgaatggactgagactctaaggaaagagtacgtgcttgtgattgaaggatttttctcagtccctttgcctctcttctcaagtacctaccgtagagccattaaggctaggacg

SEQ ID NO: 119034 - DNA, 234 bp, Glycine max
atcgagataactagaaacagtgtgatgaaaatgaaggtccttgttttcttcgttgctacaattttggtagcatggcaatgccatgcgtacgatatgttccctctccgaatgaacactggctatggtgcccgtactccggaggtgaaatgcgcaagttggaggcttgctgtggacgcacacaacatctttggctttgagaccattcctgaagagtgcgttgaagcaacaaaggaa

SEQ ID NO: 119035 - DNA, 234 bp, Glycine max
cttcggtggacgagaaatacacgcagtggaagtcccttgttcctgtcctctacgactggctcgccaaccacaacctcgtctggccctctctctcttgcaggtggggcccccagcttgaacaagccacttacaagaatcgccagagactctacctttctgagcagactgatggtagtgtgccgaatactctggtgattgcgaattgcgaggttgtgaagcctagggttgctgctg

SEQ ID NO: 119036 - DNA, 233 bp, Glycine max
ggaggttgtgaagaaggggtgcgaggctctgcatagatgcgaggacatggtcaataacctaggtttgttctctcccaacgagaccaaagaagatatcagcaccaccaatctcaagtacattctggtgccattttatcttgcggagttgacagaaaaattagcacaggatgacaggatacatatccaaaaggcttcccaggcaaaactaaaggagttaattccatttggggacc

SEQ ID NO: 119037 - DNA, 233 bp, Glycine max
ccttctcaaatattcttgagatccccattttctccgaagcaaagccatggctaagggtcctggtctctactctgacatcggcaagaaagctagggatctgctgttcaaggactaccacagtgaccagaagttcaccatcaccacctactcaccgactggagtggctattacagcatcaggaaccaggaaaagtgaactgtttctggctgatgtcaacacccagttgaagaaca

SEQ ID NO: 119038 - DNA, 230 bp, Glycine max
gacaaacatctgatgctgcagctagaaagaggaaaggaaaatgtatagagggagatgatgttttagagtccccaaatgaaggaaaaacattaaatgaaaaacgtttagcaaccttggacatttttgcaggttgtggtggcttatcagaggggttgcagcagtcaggagtttcatcaactaaatgggctattgagtatgaagaacctgctggggatgcatttaaagctaat

SEQ ID NO: 119039 - DNA, 233 bp, Glycine max
gttggaaatgagaggttcaatattttcagtggatgttcatctggccaaacagccaccatagttcttcgtggtggagctgatcagttcatagaggaagcagagcgaagtttgcatgatgcaatcatgattgttaggagggctttgaagaattcaacagtggttgctgggggaggtgcaatagatatggagataagccggtatctgaggcagcatgcacgtacaatagctggaaa

SEQ ID NO: 119040 - DNA, 229 bp, Glycine max
cggctcgagctcgacgaatcggctcgaggcaccattgggagatagacagagagagagcgtgaacgagagagatagacccttacccttctctatcgctcgctttcctttgacgcttctgacccttgctttgtctgcgtcttccttctttctttctttctttctctgtgtgtcgtaatggctctcccagactcttcttcccgtcgcaactccctgatcccctccttcatct

SEQ ID NO: 119041 - DNA, 234 bp, Glycine max
gttttacattttattcgttctccggtgaaacagaaacagagagagagagtgagaaaaaacgaaacgatggagggaggagtctcctacgcgcgcatgcctcgtgtcaaaatccgcgagctgaaggacgactacgccaagttcgagctccgcgacaccgacgcgagtatagccaacgcgctgcggcgcgtgatgatcgcggaggtgccgacggtcgccatcgacctcgtggagatc

SEQ ID NO: 119042 - DNA, 233 bp, Glycine max
caactctccttgaggctcttgaccaaatcaatgagcccaagaggccctcagacaagccactcaggcttccattgcaggatgtctacaaaattggtggtattggtaccgtgccagtgggacgtgttgagactggtgtcgtgaagcccggtatggtggtgacttttggtcccactgggctgacaactgaggttaagtctgttgagatgcaccatgaggctctcacagaggctctt

SEQ ID NO: 119043 - DNA, 232 bp, Glycine max
gcaccttaggatggcatagccttaaagttaagggcgaggttcaaacgaagaaaggcttatggtggatacctaggcacccagagacgaggaagggcgtagtaagcgacgaaatgcttcggggagttgaaaataagcgtagatccggggattcccgatataggtcaacctttcgaactgctgctgaatccacgggcaggcaagagacaacctggtgaactgaaacatcttagta

SEQ ID NO: 119044 - DNA, 231 bp, Glycine max
gggaaggctttcattacggcttttagatctggtgcagttatgggttttctccttgctgcaaatggtcttttggttctttacattgccatcaacttgttcaagatttactatggtgatgactggggtggtctttttgaggccatcactggttatggtcttggtgggccttctatggctttgttcggaagagttggtggaggtatctatactaaggctgctgatgttggtgct

SEQ ID NO: 119045 - DNA, 237 bp, Glycine max
cgacatcgtagcagtcattacttccatcgaataccgtctggcaccagaacatagactacccgcggcatacgaggatgccgtggaggcactgcagtggatcaaaaccaacaaagatgattgagctgacaaactacgtcgattactccaacgtactactcatagggactagtgccggacgccacatagcctacaacgcgggtctacgagcagccacggttgatggtacttataatcaga

SEQ ID NO: 119046 - DNA, 235 bp, Glycine max
  unsure (1)..(235): unsure at all n locations
caacctctcaagtccaacctacccctttttnttctcccaccaacttcaccgtngtcttcctacgatcatgtctcacttcaagggcaantaccatgatgagcttattgccaatgctgcttacattggcactcctggaaagggtattcttgctgctgatgagtcaacagggacaattggcaagcgtttngccagcatcagtgtagagaatgttgaatccaacaggcgtgctcttagg

SEQ ID NO: 119047 - DNA, 231 bp, Glycine max
ggaagtctcaaaagaagaagctcgagtggcacccgcaccggccctagtggcgatgctgccatcccctggcatgggccacctaatcccaatgatcgagttcgcaaagcgagtggtgctaccataacctggcggtgagcttcgtgatccccactgacggcccaccttcaaaagcccaaaaggcagttctggaggcccttccggactcaatttcccacaccttcctccctccgg

SEQ ID NO: 119048 - DNA, 233 bp, Glycine max
ggaatcagaggctccccctaacttctggggccacaccccggaagaagaatactacacctcccaaggcgttcgcaacaccaagtcccacttcgaaacccccaacggcaaaatcttcacccagtccttcctccctctcaacctccaaccccaccaagtcaaagccaccgtctttatgacccacggctacggctccgacaccggctggctcttccagaaaatctgcatcaacttcg

SEQ ID NO: 119049 - DNA, 233 bp, Glycine max
ctccctttcaaggttgggtgatggcaattgtcatggctctcttgagtggttttgcaggagtatatactgaggctattattaaaaaacgtccttcacggaacataaatgttcagaacttctggttgtatgtctttggcatgtgtttcaatgctgttgcaatattggttcaagattttgatgcggtgatgaacaagggattcttccatggatattcattcattacagttctgatg

SEQ ID NO: 119050 - DNA, 230 bp, Glycine max
ctgctccgtaccagtttcactgcataaatttgagagaaaactctgcaaacatgttggtttatcaggacctccttacaggtgatgagcttctctcggactccttccgttacaatgaaattgagaatggaatgctgtgggaagttgaggggaagtgggttgttaagggagcagttgatgttgacattggtgcaaacccttctgctgagggtggagaagatgagggagtcgat

SEQ ID NO: 119051 - DNA, 232 bp, Glycine max
  unsure (1)..(232): unsure at all n locations
ccgctctctgctcttcttcttcccccacaccggaggagagaaaaccaaaatcactcttcactgttagggttagggtttcgattttccccttatccaatctcgcagcagcgagatgnggcgccaattcgttgccatcggcggaatcaaacttcgatctcgacgagcagatctcgcagctcatgcaatgcaagccactttccgagcaccaggttagagttttatgtgagaaggc

SEQ ID NO: 119052 - DNA, 232 bp, Glycine max
gaaagggtgaaagggtgtgagaatggagagcaaagaggaagatgtaagggttggagcaactaagttctcagaaaggcaaccaattggtacagcagctcagggtgacaaggactacaaagaaccacccccagcacctttgtttgagcctggtgagctaaagtcatggtccttctacagagcttgaattgctgagtttgtggccactttcttgttcctctacattaccatctta

SEQ ID NO: 119053 - DNA, 232 bp, Glycine max
gagctgcacctctcagaggcaacatatttgctttggaattgatggaggccaaattttttcgctttctcaagattgtgggtgttggatacaaagccagagctgaagctgcagggcgtctgttgtatctcaaattggggtacagtcatgatgtggaactagctgtccctcctgctgtccgtgttttctgcttcaaaaacaatgtaatttgctgcactggaatagacaaacaaag

SEQ ID NO: 119054 - DNA, 232 bp, Glycine max
ccatgacatcagggtgcgaacagattcaaatcctgaacacagtgcaagttttgctcctctgttgatctttggtggccacataccttttagattgtccagacatggtggctttgaagctctatttaatggggctccaggaatcggtctgacacagggtaacacaggcgattattttatcggtcctggactagaagaactgtttgaacagctttcagctaacaacaggcaaggt

SEQ ID NO: 119055 - DNA, 232 bp, Glycine max
gatctctccgctctctcatcataccgcactctcgggtagttacttcctcttccctctcactctcaatggggtctccatttcctcgcccacgctcaccgcctccaccagatgaagaaaaggccatgtggggtatatgcatccctctccgagagtggagagtattattcccaccgaccgccaactcccctactagacaccgtcaactatcctattcatatgaagaatctctctg

SEQ ID NO: 119056 - DNA, 228 bp, Glycine max
gagaaagaaaaaagaggcgcaagatgagtggtagggtttctgggaaggtgaagtggttcaacgatcagaaggggtttggattcataacccctgacgatggcagcgaggaactcttcgttcaccaatctcagatcaaatctgacggtttccgaagcctagctgaaggagagtccgttgagttcgctattgaatctgaatctgacggacgcgccaaggctgttgatgtca

SEQ ID NO: 119057 - DNA, 229 bp, Glycine max
aaagcacaaagcaaagctcatccttgagttaaaaaatggcagcagcttcttccatggctctctcatccccatccttggctggcaaggccgtgaagctgggcccatcagccccagaagtgggaagggtgagcatgaggaagaccgtcaccaagcaggtctcctcaggaagcccatggtacggcccagaccgagtcaagtacttgggcccattctctggcgagcccccgtc

SEQ ID NO: 119058 - DNA, 95 bp, Glycine max
cttgctcatcaagtccaagaaccaacctacggtttgcaatctcaattcaatggcgtcctctctcattgcgaaggcttcctctcctcttcgctcct

SEQ ID NO: 119059 - DNA, 230 bp, Glycine max
cgtgaggagaatatgaagttgtttgttttctttgttgctgcagtagttttggtagcatggccatgccatggcgcaggctaccaaaggttccctctccgaatgaaaactggctatggtgagcgttcttcggaggtaaaatgcgcaagttttaggcttgctgtggaagcacacaacatccgagcctttaaaaccattcctgaagagtgcgttgaaccaacaaaggactacat

SEQ ID NO: 119060 - DNA, 248 bp, Glycine max
cttcggctcgagagcgaggtgactagagacagtgtgatcaacatgaaggtccttgttttcttcgttgctagaattgtggtagcatggcaatgccatgcgtacgatatgtgccctctccgaatgaacactggctatggtgcccgtactccggaggtgaaatgcgcaagttggaggcttgctgtggaagcacacaacatctttggctttgagaccattcctgaagagtgcgttgaagcaacaaaggaata

SEQ ID NO: 119061 - DNA, 233 bp, Glycine max
  unsure (1)..(233): unsure at all n locations
gcacgcaggaggaggagattgatcgagagaagagaagatgactacacgcttcaagaagaacaggaagaagagaggccacgtgagtgccggccatggccgcatcgggaagcaccggaagcaccctggaggacgcggtaatgccggaggcatngcaccaccaccggatcctctttgacaagtaccaccctgggttcttcggcaaggtcggaatgcgctattttcacaagctccgc

SEQ ID NO: 119062 - DNA, 230 bp, Glycine max
atcggtgttcacttgatctcatcataatcgtcagcgtcaattgaagaagatgccgatcagaaacatcgccgtcggaaggcctgaagaggcgactcaccccgacacgttgaaggcggctttggctgagttcatctcaaccttcatcttcgtgttcgccggctcaggctccggcatcgcctacaacaagctcaccgacaacggcgctgccacccctgccggcctcatctccg

SEQ ID NO: 119063 - DNA, 225 bp, Glycine max
gcgaatccctctctctctttctctttctctctcatccagatcttgcaaaaaaaaaaaaacacaatggcagcgagcgctcccactccacgcgaagagttcgtgtacatggcgaactggcggacaggccgagcgctacgaggagatggtggagtccatggagaaggtctccgcctccgccgaaagcgaggagctgaccgtggaggagcgcaacctcctctccgtcgc

SEQ ID NO: 119064 - DNA, 228 bp, Glycine max
ctcgagcgagcacactacacacacacactgtgtttgtgaaactctcacacagactagtcacggcaacaagtttctgtcggtccactcgcatcagcaacaccccttgtgaaagatcagctggacatcgtgatcccaacgatcaggaacctggatttcttggcagatgtggaggccatgctttgagccttaccatctcattattgtgcaagctggagacccttcaaagat

SEQ ID NO: 119065 - DNA, 231 bp, Glycine max
ctcaagcgccgaagaagctttccatgttcgcaaacatctctccactgtctctagatatggtgctgcgaaagacattgctgacaataacttcgtaccttccaaaatccccaagggatgtgttccgatccatttgaatctcgtggcgaggcatggaactcgatctcctacaaagaaaaggataaaggagttagataatttgtcagagcgtctggacattcttgtaagggatgc

SEQ ID NO: 119066 - DNA, 229 bp, Glycine max
gcaaggaggatccggagcaagaaagccaaggtgaatttcccggatgagccttcaggcgctgctgcttcctcaaaacgcctcaaggtgaatccagaggctcagccaatgaaggaaaatctgaacaccgtgaagccgaaaatgaaccagatgttcaattttggtcacaatctggagggctactacagcccaatagatcaggtggaacagaaaccactggttaaccagtatg

SEQ ID NO: 119067 - DNA, 229 bp, Glycine max
gaaaaagaagaagagaaaaaagatgagcgacggaggaaaacgacaaggtggaagagcgttgccgccgccgccaagaggccctccgcctcctcccccctctcgccctcgcctcgaacccgtcgatcgcgaaaagacatgtccgttactgctgcgagtgttcactaagattggtagtcaccattccatggaagactttgccgtcagaggcaaagagcccaaagacgaggtt

SEQ ID NO: 119068 - DNA, 228 bp, Glycine max
gcgggtcgtcgcgtgccggtcgggggacggattgggaacgggccctatcggggcctcttccccgggcgtcgaacagtcaactcagaactggtacggacaaggggaatccgactgtttaattaaaacaaagcattgcgatggtccctgcggatgttgacgcaatgtgatttctgcccagtgctctgaatgtcaaagtgaagaaattcaaccaagcgcgggtaaacggcg

SEQ ID NO: 119069 - DNA, 228 bp, Glycine max
gcctcaatggagtcccagatgttgtggagtgctcattcgtgcaatccactgttactgaacttccctactttgcttccaaggtgaggcttgggaagaatggagtggaggaagttctgggcttaggacctctctcagattttgagcaacaaggcctcgaaagccttaagcctgaactcaaatcatcaattgagaagggaatcaaatttgccaaccagtaattgaacatgt

SEQ ID NO: 119070 - DNA, 225 bp, Glycine max
caaaaccctaatcagagaaattctctgtatccacaagtaatcgattctaaccccgatgctccctcacctctccttatcaccaatcactcgtcctcttcgcaaccctgcctctacccttccgttgactacaacgacctcgtcgagaacctattctctgaggatgccaccgccgcctgttccccctctgcgccgccggaggccaccgaggaagtcctcttccggatc

SEQ ID NO: 119071 - DNA, 226 bp, Glycine max
caccaattcattctcatacattccttcttcttcttcttcttcttcttcttctttcacaatcacaatggcgcgagtggatctggatggtaaccccatcaagccacttacgatctgcatgatcggcgctggcgggttcatcgggtcgcacctctgcgagaagctcatgtccgaaacccctcacaccgtcctcgccctcgacgtctacagcgacaagatcaaacacctc

SEQ ID NO: 119072 - DNA, 222 bp, Glycine max
ctcaacttctgctacccactctcttcttccaagtccaaccacgcttttctctacagtcatgggcaaggtcaagatcggaatcaacggatttggaagaattggccgtttggttgccagagtcgctctgcaaagagacgatgtggagctcgttgccgttaacgaccctttcattaccaccgattacatgacatacatgtttaaatacgacagtgttcacggaca

SEQ ID NO: 119073 - DNA, 228 bp, Glycine max
gccgacaaccctatgcagtcagccgccgcgctggccaccagacttccgccgagtcctggggaaccggtcgtgccgtctcccgtatcccccgtgttcccggcggcggaacccatcgcgccggccagggagccttcggaaacatgtgtcgtggaggacgcatgtttgccccgaccaagatctggcgccgctggcacaggaaactcaatgtgaaccagaagcgctacgccg

SEQ ID NO: 119074 - DNA, 261 bp, Glycine max
ccggtttctctctctctctctctctcatggcgaatctagcacacttctccaagagagccctaagaagcgcacacgcgctcgcaaggcaccacgtgcagccgcagctgctggcagcggaacgcgcttttgcgacggaggcggcgaaatcgatatccccgtcggcggatcgcgtgaagtgggactaccgagggcagaggaagataatcccgttagggcagtggctccccaaagtggccgtggatgcttacgtagcacccaacg

SEQ ID NO: 119075 - DNA, 253 bp, Glycine max
atgagattgagggaccctttgaggtgtcttctgatggcactgtgaagtttgaggagaaagatggaattgactatgcggccgtcacagtccagctaccgggaggcgaacgtgttccgttcctcttcaccatcaagcagttggtggcatcagggaagccagacagctttagtggagagtttctggtcccatcataccgtggaagctctttcttggaccccaagggaagaggtgcctctacaggttatgacaatgc

SEQ ID NO: 119076 - DNA, 254 bp, Glycine max
caatcccacacgcttcttactcgactcataacttttctgctccccgttgagaaagatttgaatccaaaggaaaaataacgctaatggctccaagagacagccgagccaccgcgctcattgggcccggcccaagcctatcaccggcccacaaagagatccgctacagaggcgtcaggaaacgcccctggggccgctacgccgccgagatccgcgatcccggcaagaaaacccgcgtctggctcggcactttcgac

SEQ ID NO: 119077 - DNA, 253 bp, Glycine max
ccttcttctctgctaatgctgcagctcaggcttcaaggaagtcctctccaagagtgaccaacgaggctgttcagaaggctgctgctgcattgaagggttcagatcatcgccgtgcaacaaatgtcagtgccagactggatgctcaacaaaagaagctcaaccttccaatccttccaaccaccactattggatccttccctcagactgtagaactgaggagggtacgccgtgagttcaaggctaacaagatctc

SEQ ID NO: 119078 - DNA, 252 bp, Glycine max
ggatgcccccatgtttgttgttggtgttaacgagcacgagtacaagccagagcttgacattatttccaatgctagctgcacaaccaactgccttgccccgctcgccaaggttatcaatgacaggtttggcattgttgagggtttgatgaccactgttcattccatcactgctacccagaagactgttgatgggccatcagccaaagactggagaggtggaagagctgcttcatttaacatcattcctagcag

SEQ ID NO: 119079 - DNA, 262 bp, Glycine max
  unsure (1)..(262): unsure at all n locations
ctcaagtccaacctacccctttttcttctcccaccaacttcaccgtcnctcttcctcgatcatgtctcacttcaagggcaagtaccatgatgagcttattgccaatgctgcttacattggcactcctggaaagggtattcttgctgctgatgagtcaacagggacaattggcaagcgtttggccagcatcagtgtagagaatgttgaatccaacaggcgtgctcttagggagctgcttttcaccgctcccggtgctcttaaa

SEQ ID NO: 119080 - DNA, 259 bp, Glycine max
ctagcacacaaaacttgctatagcagtaagctataactcatttgaggctctgtgagaattgagaaatggctaaagatgttgaggttcaggagcaaggaggagagtactctgccaaagactaccatgacgctcctccagcacctttgttcgacccagaggagctcacacagtggtccttctatagagccctcatcgctgagttcatagcaacccttctcttcctttatgtcactgtgctcaccattattggctacaaaag

SEQ ID NO: 119081 - DNA, 255 bp, Glycine max
gaaaaatattaaataaaaccgccacaaatttctccatagttatgggcacttccattctcgacgccctgaacgttcgcgtggaaggttccggcgacaagtaccttgtcctggcccacggcttcggcacggaccaatccgcgtggcagcgcgtgctcccttacttcacccgcaactacagcgtcattctctacgacctcgtctgcgccggcagcgtcaaccccgaccacttcgactaccgccgttataccaccctcg

SEQ ID NO: 119082 - DNA, 256 bp, Glycine max
cgacacaatccaaatcaagcatcaccatgttccgccaccgcttcctcctcatactgtaccccgcacaaggccacatacaccccgcattccaactcgctaagagactcgttagtttaggcgcacacgtcactgtttccaccaccgtccacatgcaccgtcgcatcaccaacaaacccaccctccctcacctctcctttctccccttctccgacggctacgacgacggtttcacctcctccgatttctccctccacgc

SEQ ID NO: 119083 - DNA, 254 bp, Glycine max
aaaattttgtgaattctgagtgctcttgattttgataaaaaggtatgattacgggtggagcagcagcgacagttttctacaatttgaggcaaaaacatcctacgcttgacatgccagtgatcgactacgacttggcacttcttttccaaccagtgctggtgcttggaatcagcattggagttgccttcaatgtgatttttgctgattggatgatcacagtcttgttactaataattttcgtaggaattgcaacc

SEQ ID NO: 119084 - DNA, 253 bp, Glycine max
gagggaaagatgcagatattcgtgaaaaccctaaccgggaagaccatcacccttgaggtggagtcaagcgacaccattgacaatgtcaaagccaagattcaggacaaagaagggattcctccggatcagcagaggttgatcttcgccggtaaacagctggaagatggccgtaccctcgctgattataacatccaaaaagagtcaacattgcatcttgttttaaggcttcgtggtggtatattgagccatcttt

SEQ ID NO: 119085 - DNA, 252 bp, Glycine max
ctctctgctcttcttctacctttcaagtttttaaagtattaagatggcagagacattcctatttacctcagagtcagtgaacgagggacaccctgacaagctctgcgaccaaatctccgatgctgtcctcgacgcttgccttgaacaggacccagacagcaaggttgcctgcgaaacatgcaccaagaccaacttggtcatggtcttcggagagatcaccaccaaggccaacgttgactacgagaagatcgt

SEQ ID NO: 119086 - DNA, 249 bp, Glycine max
ctcgaccggaatcaacaatcatgtcggacgaagagcaccatttcgagtccaaggccgacgccggagcctccaaaacctaccctcagcaagccggtaccatccgcaagaacggctacatcgtcatcaaaggccgcccctgcaaggttgtggaagtttcgacttccaaaactggaaagcacggtcacgctaagtgtcactttgttggaattgatattttcactgccaagaaacttgaggatattgtgccct

SEQ ID NO: 119087 - DNA, 259 bp, Glycine max
ggcgagctcttagggagctgcttttcactgctcctggtgttcttcaatatctcagtggtgtcatcctctttgaggaaaccctctaccagagcacagctgcaggcaagccctttgtgaatgtcttgaaggaagctggtgtgcttcctggcatcaaggttgacaagggcacagtcgagcttgctggaactaatggagaaaccaccactcagggtctagatggccttggtcagcgttgtgccaagtactacgaagctggtgc

SEQ ID NO: 119088 - DNA, 257 bp, Glycine max
gcttcctgggtcccttgcactgcttgtgttggctgctcaacaaccactccctttgctccagctaagtccaccactttcaagaaagttggatgtggtgcttctcagtgcaaacaggtacggaaccccacttgcgacggaagcgcgtgtgcattcaacttcacttatggcacttcctcagtggcagctagcctggtccaagacacagtgaccctagccactgatcctgtcccagcctacgcctttgggtgcattcaaaa

SEQ ID NO: 119089 - DNA, 252 bp, Glycine max
atcatcagtctttctgctggtggaagctacgttgtgactccagaaggaatattcacagatgaggtttccattggggcatttcatgcaattgctagaaacagaattttagttgcctctgcagggaatgatggacccacacctggaactgttctcaatgtggctccttgggtcttcacaattgctgctagcacattagacagagactttagcagtaatttaaccatcaacaataggcaaattacgggagccagt

SEQ ID NO: 119090 - DNA, 252 bp, Glycine max
gtcgaaggaagtgagccagcagaggaaggactacgtagaccctccgccagcccccctcatcgacttggccgagattaagctctggtccttctacagagccctcatcgccgagtttatcgccacactcctcttcctctacgtcaccgtcgccaccgtcattggccacaaaaaacagaccggaccatgtgacggcgttggccttctcggcatcgcatgggccttcggtggcatgatctttgtcctcgtctactg

SEQ ID NO: 119091 - DNA, 252 bp, Glycine max
ctcataacacaaagcacaaagcaaagctcatccttgagttaaaaaatggcagcagcttcttccatggctctctcatccccatccttggctggcaaggccgtgaagctgggcccatcagccccagaagtgggaagggtgagcatgaggaagaccgtcaccaagcaggtctcctcaggaagcccatggtacggcccagaccgagtcaagtacttgggcccattctctggcgagcccccgtcctacctaaccggt

SEQ ID NO: 119092 - DNA, 248 bp, Glycine max
gcaacccaagcctgatccacgcccagagcatcctcgccatctgggccacacaagttatcctaatgggtgccgttgaaggttaccgtattgctggtggccccctcggtgaggtcactgacccaatctacccaggtggcagcttcgacccattgggccttgctgatgacccagaggcttttgctgagcttaaggtgaaggaactcaagaacggacgattggccatgttctctatgtttggcttctttgtt

SEQ ID NO: 119093 - DNA, 249 bp, Glycine max
ctctctctctcggatttcttgcgcggtttatcatgggggatagtcagtattcgttttctctcaccacatttagcccttctggaaagcttgttcagattgagcatgctttgacggctgtcgggtctggacaaacgtctttgggaattaaagctgcaaatggagttgtcattgctaccgagaagaaattgccatctatattggttgatgaagcatcagtccagaaaattcagttattaacaccaaatatag

SEQ ID NO: 119094 - DNA, 245 bp, Glycine max
ttccccttcttggtggtctcttgagtgtctggtactctgactttttccaggcccagactcaccttgttgctcccttcgaccaataccttcaccgattccctgcctacctccagcagctctccatggagtccaacggaaagaccatcacctctgatggatcttctgccaagtacaccactggccccattctcttcggcgagccttgcaccaacgctcagcactccttcttccagctcgtccaccaa

SEQ ID NO: 119095 - DNA, 250 bp, Glycine max
caagagcaaagaaactaagaagattttgagcacaatggcatccacacaatgcttcttgcaccaccatgccctcaccactccaaccagagcttcatcacagcgcttagttgtgagcaccaaaccaaaccacattgtttgcaaggcacaaaagcaggttgtccaagagggtgaggacactactaacattgtctctcgcaggttggccctcactgttctcattggtgctgctgctgttggctctaaggttgca

SEQ ID NO: 119096 - DNA, 252 bp, Glycine max
gcaaaaagaaagaatcccaggcgaggagaaagatggaggggaaggagcaggatgtgtcgttgggagcgaacaagttccccgagagacagccgattgggacggcggcgcagagccaagacgacggcaaggactaccaggagccggcgccggcgccgctggttgacccgacggagtttacgtcatggtcgttttacagagcagggatagcagagtttgtggccacttttctgtttctctacatcaccgtcttaa

SEQ ID NO: 119097 - DNA, 250 bp, Glycine max
gtcggaacaaggtagccgtactggtaggtgcggctggatcacctccttttcagggagagctaatgcttgttgggtagtttagtttgacactgcttcacacccaaaaagaagcgagttatgtctgagtcaaatttggagatggaagtcttctttcgtttctcgatggtgaagtaagactaaactcatgagcttattatcctaggtcggaacaagttgataggagctacttttttcacccccatccatgtcg

SEQ ID NO: 119098 - DNA, 247 bp, Glycine max
gagaaagcgaaacgcatagaatcgaaagaggggaaaagaaaaagaaaagttagggttagggattttgagagatggcatcgactaagaagatcaccctgaagagttcggacggtgaggccttcgaggtggaggaggcggtggcgctggagtcgcagacgatcaagcacatgatcgaggacgactgcgccgacagtggaatccctctccccaatgtcaccagcaagattctggcgaaggttatcgagta

SEQ ID NO: 119099 - DNA, 246 bp, Glycine max
ctagaaacagtgtgatgaaaatgaaggtccttgtgttcttcgttgctacaattttggtagcatggcaatgccatgcgtacgatatgttccctctccgaatgaacactggctatggtgctcgtactccggaggtgaaatgcgcaagttggaggcttgctgtggaagcacacaacatctttggctttgagaccattcctgaagagtgcgttgaagcaacaaaggaatacatccatggcgaacaatata

SEQ ID NO: 119100 - DNA, 248 bp, Glycine max
gaaaacgcagttctcaccatttccctctcgattgtgagacttgttgttgttaactgaacttttctgagcaagaatgtctgggcgtggaaagggaggcaagggtttgggaaagggaggagcgaaacgacaccgtaagtgctgcgcgataacattcagggaatcaccaagcccgcgattcggcgtttggctcgtaggggtggcgtgaagcgtatcagtggtctcatctacgaagagacacgtggcgtgct

SEQ ID NO: 119101 - DNA, 247 bp, Glycine max
cgagcagaaagcctggatatgactcgtgatgatctttttaacatcaatgctggcattgttaagacgctgtgtactgctattgctaagtattgcccccatgcccttgttaacatgataagcaatcctgtgaactccactgttcctattgctgctgaagttgtcaagaaggcaggaacttatgatgagaagagattggttggtggtaccacccttgatgttgttaaggcaaaaactttctatgctggga

SEQ ID NO: 119102 - DNA, 249 bp, Glycine max
cccatgtcaaggaattggggccaaaactggcagagcaactcctaccttaatggacagagtctttcctttttggtcacctctagtgatggtcgcagtgtgctctcatacaatgctgcaccaccaagttggtcctttggacagacctacactggaaggcaattccgctactaatttatcaacccttttcatggagggtgcattttctctcaggtacagaaactttctagtaggagaaagaaacacaaagaa

SEQ ID NO: 119103 - DNA, 244 bp, Glycine max
gtttgttgttgtaactcgttcttcttcttttgttgttctgtgtttgtgtttgtcttttctctcacctgaaaatgtcttgctgcggtggtaactgtggttgcggaagcacctgcaagtgcggcaacggctgcggaggctgcaagatgtacccagacttgagctacactgagtcaaccaccaccgagaccttggtcatgggagtggcacctgttaaggctcaatttgagggtgctgaaatgggtgt

SEQ ID NO: 119104 - DNA, 245 bp, Glycine max
gcatattccggtggtggaaggaaagtgacacgtgtggaggtaacacttgatggtggagaaacatggcacgtgtgcacattggaccatactgagaaacctaacaaatatggcaagtattggtgctggtgcttctggtctttggaggtggaggtgcttgacctacttggggccaaggagattgcggttcgagcttgggatgaaggtctcaacactcagcctgaacacctcatttggaatgttatggg

SEQ ID NO: 119105 - DNA, 249 bp, Glycine max
gtttgttgttgtaactcgttcttcttcttttgttgttctgtgtttgtgtttgttttttctctcacctgaaaatgtcttgctgcggtggtaactgtggttgcggaagctcctgcaagtgcggcaacggctgcggaggctgcaagatgtacccagacttgagctacactgagtcaaccaccaccgagaccttggtcatgggagtggcacctgttaaggctcaatttgagggtgctgaaatgggtgtgcccg

SEQ ID NO: 119106 - DNA, 244 bp, Glycine max
gcacaaactatcatggccacggcaacagcagctgccacctcgtcctttatggggacgcgtctcctggaggctcactccggagcggggcgagtgcacgcccgattcggcttcggcaagaaaaaggctcccgccccaaagaaagcctccaggggatcgggccgagacaccgacagacccctttggtatccgggcgccaaagcgcccgaatacctcgatgggagtcttgtcggagatacgggttcga

SEQ ID NO: 119107 - DNA, 248 bp, Glycine max
agagaatggctcccaagggtttaatcttttgtgctgtgttatgcttctcagcactgtcactgagtcgttgtcttgcggaggataatggacttgttatgaacttctacaaggaatcatgccctcaggctgaagacatcatcaaagaacaagtcaagcttctctacaagcgccacaagaacactgctttctcctggctcagaaacatcttccatgactgtgctgttcagagttgtgatgcttcactgttg

SEQ ID NO: 119108 - DNA, 245 bp, Glycine max
gcctcaatggagtcccagatgttgtggagtgctcattcgtgcaatccactgttactgaacttccctactttgcttccaaggtgaggcttgggaagaatggagtggaggaagttctgggcttaggacctctctcagattttgagcaacaaggcctcgaaagccttaagcctgaactcaaatcatcaattgagaagggaatcaaatttgccaaccagtaattgaacatgttatcacatacgtgtctg

SEQ ID NO: 119109 - DNA, 242 bp, Glycine max
gcttcttcgagtttcacagccaagtcgtaaaagggtttcaagggatggaaaacatgcagagcttctggcaattgggtgatgaactccgtgggcactcaaaagcatcggaggatcacaagtggttaatggttgcctcgaaactggccgaacagacaagattgaagggggagcgtgtgaacaaccttgatctttcaaagggacccattgaaacaaggtcaagggataaatttgggttccaggaa

SEQ ID NO: 119110 - DNA, 233 bp, Glycine max
ctcgagccgcgcgtacaagcaggccagcatgttgctcgcgctttttgcgggtggggaagggtatagggtggaagagaacaatggttgtctcatgttgggatggcacactaggcccttgattgccacctccgcgtggcaactcgctgcaactcgctgagtcgactcgccgattcctcaaccagcttttttattatttgtgtaaattttatgataattcctattcatgcccaccg

SEQ ID NO: 119111 - DNA, 248 bp, Glycine max
aatggaggggacccggactacgtggcccttctcccttcaggatttgctatactcccagatgggaccactgcacatggaggtggcattggtgacattggacatggtggttctctcttgactgtggcatttcaaatattggttgattcggttccaacggcaaagctttctcttggatcagttgctactgttaacaatctcattgcctgcactgttgagagaattaaggctgctttatctggtgaagttgc

SEQ ID NO: 119112 - DNA, 252 bp, Glycine max
atcggaagaaaccctagccactctcccggcgtcacgatgcagatcttcgtgaaaaccctaacgggtaaaacgatcacgttggaggtggagtcttcggacaccatcgacaacgtgaaggccaagatccaggacaaggaaggcatccctccggaccagcagcgcctcatcttcgccgggaagcagctggaggacggccgcaccctcgccgactacaacatccagaaggagtccacgcatcacctcgtcctccgc

SEQ ID NO: 119113 - DNA, 240 bp, Glycine max
gaaactcacagcttcaatcctcgaccacaccacccatcagcgacatgcttcctctttcccttctcaagactgcccaaggccaccctatgttggtggaactgaaaaatggggagacatataacgggcatttggttaattgcgatacatggatgaacatccatctccgagaagtcatttgtacatctaaagacggagatagattttggaggatgcctgaatgctatatacgaggcaatacaa

SEQ ID NO: 119114 - DNA, 238 bp, Glycine max
ctccttcgccacaactctctgccaacatgggtatctccagagattctatgcacaagaggcgtgccactggtggcaagaagaaggcctggaggaaaaagagaaagtatgagcttggtcgccagcctgctaacactaagctgtcaagcaacaagacagtcaggaggatccgtgttagaggtggaaatgtgaaatggagggcattgagattggatactggaaattactcctggggaagtga

SEQ ID NO: 119115 - DNA, 252 bp, Glycine max
tcggatcatcaaaatcagaaagaattgggggaatggagaacaaccagcaacaaggcgctcaagcccaatcgggaccgtaccccggcggcgccggtggaagtgcaggtgcaggtgcaggtgcaggcgcggccccgttccagcacctgctccagcagcagcagcagcagctgcagatgttctggtcgtaccagcggcaagagatcgagcacgtgaacgacttcaagaaccaccagctccccttggcccgcatca

SEQ ID NO: 119116 - DNA, 246 bp, Glycine max
cgcgccaccgtcgacgcagctccgaccacctcctttggttccctcactttctcgctcttcttcttctcagaaatatgccttctcagaaggttgaaacgggtcatcaagactcggtccatgatgttgcgacggattactatggtaagaggctggccacggcttcatcagatcacacaattaagataattggggtcagcaacacggcctcccagcatctagcaactttgactggtcaccaaggacctg

SEQ ID NO: 119117 - DNA, 247 bp, Glycine max
atcggtgttcacttgatccttcataagtcgtcatcatcatcatcatcatcaccgttgattgaagaagatgccgatcagaaacatcgccatcggaaggcctgaagaggctactcaccccgacacgttgaaggcggggttggctgagttcatctccaccttgatcttcgtgttcgccggttcaggttccggcatcgcctacaacaagctcaccgacaacggcgccgccactcccgccggcctcatctcc

SEQ ID NO: 119118 - DNA, 240 bp, Glycine max
tgtcaaactgttgctgtgggagtcatcaagaacgttgagaagaaggatcctaccggagccaaggtcaccaaggctgcccagaagaagaagtgaatcgtgcgggctggttcatcaggggatgttggttacaataaatgttggtttcttttctgtactcttgtgtcttcttttctaggtagcttgtttttcggacaaagtttgaagtctccaccatcatctcgcaactgttgttcccagaac

SEQ ID NO: 119119 - DNA, 241 bp, Glycine max
ctggcggcatgccttacacatgcaagtcggacgggaagtggtgtttccagtggcggacgggtgagtaacgcgtaagaacctacccttgggaggggaacaacagctggaaacggctgctaataccccgtaggctgaggagcaaaaggaggaatccgcccgaggaggggctcgcgtctgattagctagttggtgaggcaatagcttaccaaggcgatgatcagtagctggtccgagaggatga

SEQ ID NO: 119120 - DNA, 237 bp, Glycine max
ccagcagcaccaccgggggaggagcttcccctgcattgtccgctcaatatctggcggaggagctgtcggaggattaccgcaatctgtcggagctggcttttagaggggaatatgaaacgtgtctggtgtacacggaggagatgaaggagcgatgcgtggaacagttcaagcaggggacggtgtgtatggaacagctggcagcggtggaaggattgtgcgagttggcgaggaaggcgg

SEQ ID NO: 119121 - DNA, 239 bp, Glycine max
ctcaggcttccattgcaggatgtctacagaattggtggtattggtaccgtgtcagggggacgtgttgagactggtgtcggtcagcccggtatgggggttacttttcgtcccactgggctgataactgatgttaagtctgttgagtagcatcatgaggctctcagagaggctcttccaggtgacaatgttggctttaatgtgaagaatgtcgcagtcaaggatctcaagcgtggttttgt

SEQ ID NO: 119122 - DNA, 241 bp, Glycine max
gaaaaccagtgtggaggccctggtcgaacttaatatgctcaaaaaccttacgggctcagccatggctggtgctcttggtgggttcaatgctcatgctagcaatattgtgtctgctatctacattgccactggtcaggatcctgcccagaatgtggagagttctcactgcatcaccatgatggaagctatcaatgatggcaaggaccttcacgtttcggtgaccatgccctccattgaggtt

SEQ ID NO: 119123 - DNA, 239 bp, Glycine max
taaatgggttgtctgaggaacaagcagggcaagaactgaagcttccagacttgttgaacagtgatgctgttagagaaatccacgctaatatcgaaaaagaatgggattttcttcaaaggtcagcttgccaaaccgctgcgggaagggctctgtggaagcatgccatccatgatccactggctgacttgctggcaggggagacttacttgagaaacctccatgaaaagatcaagaaagac

SEQ ID NO: 119124 - DNA, 247 bp, Glycine max
atcatggccacctctgctattcagcaatcagcattcgcaggtcaaactgctctgaagcagctcaatgagttggtccgcaagaccggtggcgccggcaaaggtcgcaccaacatgcgccgtaccgtcaagagtgctcctcagagcatttggtatggccctgatcgtcccaagtacctgggtccattctcagagcagattccgtcatacctgaccggagaattccccggtgactacggatgggacactg

SEQ ID NO: 119125 - DNA, 247 bp, Glycine max
agcaaagctcatccttgagttaaaaaatggcagcagcttcttccatggctctctcatccccatccttggctggcaaggccgtgaagctgggcccatcagccccagaagtgggaagggtgagcatgaggaagaccgtcaccaagcaggtctcctcaggaagcccatggtacggcccagaccgagtcaagtacttgggcccattctctggcgagcccccgtcctacctaaccggtgagttcccaggcga

SEQ ID NO: 119126 - DNA, 247 bp, Glycine max
ctcccccaacacttccttatcttatatcttctcctcctccatctttgagattctcaaagaaacttctgaagatggctggcatagcattcggaagcttcaatgattctgtcagttttgcctccatcaaggcctacattgctgagttcatctcaacccttctctttgtttttgccggtgttggttcagccatagcctatgctaagttgacatcagatgcagctcttgatccaactgggttggtagccgt

SEQ ID NO: 119127 - DNA, 248 bp, Glycine max
cggcgggtccgccaagaaactcctccgcgcgccggacttcacgagggaaaccgtcttcaactccgccgccgtcctccccgtcctctccggcggccccaccgtcaccttcgacgccaacgagcctctccgggaacgcgtcttccacttctcccgcgaaccattcagaaactcaaacaacgagccaacaacactgtcaacaacaaggaactaacggaagttatgggaaaacatgtaaatgacggttggaa

SEQ ID NO: 119128 - DNA, 248 bp, Glycine max
ctcgagccgcttccgccgcctgtgccggtgcctgcgccgccgcaagcgacggcgaagacagataccatgtacttcgacccgtcggattcaatcccgaagctgcacacggactcgagctgttcggagcaggtggtatcgccggaattcgcgagcgaggtgcaaagcgagcccaagtggaacgcgtgggagaaaagcctcgaatttccatttaattacgtggatgccactctcaacaacagcttcatggc

SEQ ID NO: 119129 - DNA, 249 bp, Glycine max
aacacaacaaaaaaagacaacccagagagcgcgtcttaataaacgctcttctctgaaaacccccatttcttttcttctttcttcttctctttcgcttcttcgatcttcgatcttcgtcgctgaaaatgagagagtgcatttcaatccacatcggccaggccgggattcaggttggaaacgcctgctgggagctttactgcctcgaacacggcattcagcctgatgggcagatgccaagtgacaagaccg

SEQ ID NO: 119130 - DNA, 236 bp, Glycine max
ggctcgagcgtgctcgagcacaactccactcttagctgccattggattttcttcttccatttctcatcctttctaagcttttttcgattacccatttggagattctgtcctaatggctcttgctccttccaaagtttcctccttttccgggttttctcccaaacccagtgttggggatgctctgaaaaacccaacttgctctgtttctctgagctttgcgaatgtgaaacttggaa

SEQ ID NO: 119131 - DNA, 250 bp, Glycine max
atttccctttacttgctaaaacatggtccaagaaaagaaactagttgacgaggtgtccggttggctcaaaatttatgacgacggttcagtcgaccggacatggtccggaccggaccaattcaagttcatggccgaaccggcccctccccatgaacaattcatagacggcgttgccattcgcgacgtcgccgttactcacggtggtggccagagtggccaccatgtccgactttatctgccagagataaag

SEQ ID NO: 119132 - DNA, 244 bp, Glycine max
ggttttctgattaactctttcttctcataactctgccgccgcaacagccccaaatccaatggcttcagagaagaaactttcgaacccaatgagggagatagaggtgcagaagctcgtcctcaatatctccgttggcgagagtggagatcgtctcaccagagccgctaaggttttggaacagcttagtggccaaacccctgtgttttccaaagcaaggtacacggttcgttcctttgggattaga

SEQ ID NO: 119133 - DNA, 240 bp, Glycine max
tcggccgcctcgagatcgagctggccgaggttgagatgccgggcctcatggcctgccggaccgagttcggcccatctcagcccttcaagggggcccgcatcaccggctcccttcacatgaccatccagaccgctgtcctcatcgagaccctcaccgctctcggcgccgaggttcgctggtgctcctgcaacatcttctccactcacgaccacgccgccgtcgccatcgcccgtgacagcg

SEQ ID NO: 119134 - DNA, 245 bp, Glycine max
gttcgctcttcctctcccagacaaacacatggctttgcccaatcagcaaaccgtcgattaccccagcttcaagctcgtcatcgtcggtgacggtggcacaggaaagacaaccttcgtgaaaaggcatctcactggtgaattcgagaagaaatatgaaccgaccattggtgtggaggttcatccgttggattttttcactaactgcggaaagattcgattctattgttgggatactgctgggcaag

SEQ ID NO: 119135 - DNA, 248 bp, Glycine max
ccgtcacaactatggatacaatcaagtccttcaagggctacggcaaagttgacgagttggagcagcaagcctatcagaagaagacacgtaagcgcctcataataatcacagtctcttcaatcgttctaattgcggtgatcatcgccgctatcgcaggggttgtcatacacaagcgcaacacctcatcatctccctcatccgactcgcccccgcaaactgagttaaccccggccgcgtcactcaaagcg

SEQ ID NO: 119136 - DNA, 246 bp, Glycine max
tgaaaattgcaacttacgccaatgcaagaaccaccctggaggcaagaaagggtgttgggaaggctttcattacggcttttagatctggtgcagttatgggttttctccttgctgcaaatggtcttttggttctttacattgccatcaacttgttcaagatttactatggtgatgactggggtggtctttttgaggccatcactggttatggtcttggtgggtcttctatggctttgtttggaagag

SEQ ID NO: 119137 - DNA, 246 bp, Glycine max
caagaaccgtgaactcgaagtgatccactccaggtgggccatgctcggagccttgggctgcgtcttcccggagttgctgtcccgcaacggggtgaagttcggagaagccgtgtggttcaaggccgggtcccagatcttcagcgagggtgggctcgactacttgggcaacccaagcctgatccacgcccagagcatcctcgccatctgggccacacaagttatcctaatgggtgccgttgaaggtta

SEQ ID NO: 119138 - DNA, 239 bp, Glycine max
attaattgcaagaatggcacttcgttgcttggtgatgtccctttctgttctcttcactcttggtcttgcgagagaaagccatgccagagacgaagatttttggcatgctgtttggccaaacactcccattccaagttcattgcgagatcttctaaagcctggccctgcaagtgttgaaatcgatgatcaccctatgcaaattgaagaaacacagtacccgaaaaccttcttctataaag

SEQ ID NO: 119139 - DNA, 243 bp, Glycine max
cccaaagtgcttctctcctctgtctttttctctctcttgctatccttttggctagtggcactgctgcaagtgcaactccaagaagcgcagtgccaagccaccatgtttcaacattcaacagaagcctttttccttccacttttctctttggaattggttcttctgcttaccaggcagaaggagcagcaagtgtagatgggagaggaccaagcatatgggacacctacactagacagcatactg

SEQ ID NO: 119140 - DNA, 243 bp, Glycine max
atttccctttacttgctaaaacatggtccaagaaaagaaactagttgacgaggtgtccggttggctcaaaatttatgacgacggttcagtggaccggacatggtccggaccggaccaattcaagttcatggccgaaccggcccctccccatgaacaattcatagacggcgttgccattcgcgacgtcgccgttactcacggtggtggccagagtggccaccatgtcagactttatctgccaga

SEQ ID NO: 119141 - DNA, 243 bp, Glycine max
gctttgagagagagagagggaggagggagagtgttgacgctccatcaagatgggtatttctagggattccatgcacaagaggcgtgccactggtggcaagaagaaggcatggagaaagaagagaaagtatgagcttgggcgtcaggccgcaaacaccaagttatcaagcaacaaaactatccggaggattcgtgttcgaggtggcaatgttaaatggagggcattgaggttggataccggcaa

SEQ ID NO: 119142 - DNA, 244 bp, Glycine max
cggctcgagaagagacagaacaacagatgaagcattttgccttggtgtttcttttggccattttggtccctcaggagtgtttccatgtcagtgtggaagcaagggatgattttgtcagaactagaggcatccacttcatgctgaatggatacccttactatgcaaatggcttcaatgcctactggttaatgtacacagcttctgacccatctcagagattcaaggtttcaaatgcctttagaga

SEQ ID NO: 119143 - DNA, 240 bp, Glycine max
cccatgtcaaggaattggggccaaaactggcagagcaactcctaccttaatggacagagtctttcctttttggtcaccactagtgatggtcgcagtgtgctctcatacaatgctgcaccaccaagttggtcctttggacagacctacactggaaggcaattccgctactaatttatcaacccttttcatggagggtgcattttctctcaggtacagaaactttctagtaggagaaagaaa

SEQ ID NO: 119144 - DNA, 240 bp, Glycine max
cagaatttctatctatctcttgtttcaatttcaacaacggttactcctttttcgttttgagtttcaatcaagccatcatcatgtctaccgcatcgcaacccaaggccaagaaaacggcgtcgtccaagaagcccctctcccaccctcccttcgccgtgatgataccagaggcgattgcgagtctgaaagagagaaccggttcgagccaatacgcgataaccaaatacatcgaagggaagc

SEQ ID NO: 119145 - DNA, 242 bp, Glycine max
cgtccctcacattctgaagaagtgccctgatgccattccagaccctaaggccgtgcagtacgtgagaaacgaccgtggcacccccatgattctagacaacaattactacagaaatatattggacaacaagggcttgttgatagtggatcaccaactagccaatgacaagaggaccaagccttatgtgaagaaaatggccaagagccaggactatttcttcaaggagttttctagagccatta

SEQ ID NO: 119146 - DNA, 242 bp, Glycine max
agaaaaacaagtagttgagaactaagaagaaggaaatggcttcctcaatgatctcctccccagctgttaccaccgtcaaccgtgccggtgccggcatggttgctccattcaccggcctcaaatccatggctggcttccccacgaggaagaccaacaatgacattacctccattgctagcaacggtggaagagtacaatgcatgcaggtgtggccaccaattggcaagaagaagttcgagact

SEQ ID NO: 119147 - DNA, 243 bp, Glycine max
ctgtgtttgcggctgaggattccgaacgagcgaccttcttcgtttctcgcaaagtttaagtcatcatgggtaaggaaaagactcacatcaacattgtcgtcattggacatgtcgactctgggaagtcaactaccactggtcatttgatctacaagcttggaggtattgacaagcgtgtgattgagaggttcgagaaggaggctgctgagatgaacaagaggtcattcaagtatgcctgggtgc

SEQ ID NO: 119148 - DNA, 242 bp, Glycine max
tgttgttggagtgagcgaagaatatgtattctagagattcatggggtggaccgttggagataaacgcgacggactcggcgacggaggacgagcggagcggaacctgcaggacgttgacagggcagcgctgtcgcgtcccttggatgagacgcagcagagctggctccttggccccggcgagcagaagaagaagaagtacgtcgatctcggctgcatcatcgtcagccgcaagatcttcaagt

SEQ ID NO: 119149 - DNA, 243 bp, Glycine max
cgaaatgagttccggcgacgaattgccgttcacaagaaactcactgtgacaagcctaggagggtttgacacatgctacacagccccaatagttgcaccaacaataacattcatgttctccggcatgaatgtgacactcccaccggacaacatcctcatacacagcacggctggcagcgtcacgtgcttggccatggcaccggcgccagacaacgtgaactcggtgttgaacgtgatcgccaac

SEQ ID NO: 119150 - DNA, 264 bp, Glycine max
aaagtttcttcctttctctgctctttgccttctctgacacatttggtgccttgtagagcgtgttttggcaggaaggtggtatggcgaaggacgttgaggttgctgagcgtggctccttctctgggaaggactaccaggaccctccaccagcaccactcattgatgctgaggagctcacaaagtggtccttttacagggctctcattgctgaattcattgccactttgctcttcctctacattactgtgctcacagtcatagggt

SEQ ID NO: 119151 - DNA, 262 bp, Glycine max
gtgttagatctgtacccgcctagccattgatttggaaaagtccaagcttcaaagatgagtaagcttcagagagatgctcttagagaagctatctcaggaatcatgactgattccaaggaaaagaacaggaaatttgtggagaccattgaactccaaattgggctgaaaaactatgatccccagaaggacaagcgttttagtggctctgttaagttgcatcacattcctcgccccaagatgaagatttgtatgcttggagatg

SEQ ID NO: 119152 - DNA, 264 bp, Glycine max
gaagagaatggctcccaagggtttaatctttttggctgtgttatgcttctcagcactgtcactgagtcgttgtcttgcggaggataatggacttgttatgaacttctacaaggaatcatgccctcaggctgaaaccatcatcaaagaacaagtcaagcttctctacaagcgccacaagaacactgctttctcctggctcagaaacatcttccatgactgtgctgttcagagttgtgatgcttcactgttgctggactccacaag

SEQ ID NO: 119153 - DNA, 265 bp, Glycine max
tctcgagccgaatcggctcgagctctttcttcctcttcctcagtagaccgattttcgattctactctctgcaactatgcctaaccctaaggtcttcttcgacatgaccatcggcggtcaacctgccggccgcatcgtgatggagctctacgccgacgtgactccgagcaccgccgagaacttccgcgcgctctgcaccggcgagaagggcgccgggcggagcggcaagcccctccactacaaaggctcgtccttccaccgcgtga

SEQ ID NO: 119154 - DNA, 266 bp, Glycine max
ctgaaccaaatcatcacacacacatactaagaagcaacaattcttctacaatggatctcctccttctcgaatagaccctcataggtctcttcctcgctgcggtggtcgccatcgccgtctccaccctccgcggccggaaattcaagctcccaccgggcccactccccgtcccaatcttcggcaactggctccaagtcggcgacgacctcaaccaccgcaacctcaccgatttggccaaaaaattcggtgacatcttcctcctccgc

SEQ ID NO: 119155 - DNA, 269 bp, Glycine max
aattaagaaatcaaagagacagaaagttgagagagaagtgttcacgtctttgagaaatgggtgcttcggcatcggtcacagaaaaatccatccatgaattcatggtcaaggatgctaagggcagagacgtgaacctcagcacctacaaagggaaggttcttcttgtagttaacgtcgcttcaaaatgtggatttacaaattccaattacacccagttaactgagctttacagcaaatataaagacagaggtcttgagatactggcattt

SEQ ID NO: 119156 - DNA, 267 bp, Glycine max
ggttcttctactggaagaggacgatggtttcgccggcggaggcgaagctgccggagaaggagaaggacaaggagaatgcgaaggccgagaagagcgtggtggagtccagttattgggggatttcgaggccgaaggttgtgagagatgacggaacggagtggccttggaactgcttcatgccgtgggagagttatcgttcaaacgtgtccatagatcttactaagcatcatgtgccaaagaatgttctggataaagttgcttacagga

SEQ ID NO: 119157 - DNA, 261 bp, Glycine max
accggatcccccttcgaagtgaattatattgcagcgaatcacacacactctgaacaacgcccaccatgcaggccagtgataggtttaacatcaattcccagcttgagcatctccaagccaaatatgttggaactggccatgccgatttgaacagatttgagtgggcagtgaacattcaacgagatagctatgcatcatatattggacactaccctttactgggattctttgctattgctgaaaatgaatctattggaagag

SEQ ID NO: 119158 - DNA, 259 bp, Glycine max
caccaatcgaagaagaaacaaccgtaacagatctccgtttctcgccaaacaaagaacaaaataatggctgccttcagcggtgacgaaaccgctcctttctttggcttcctcggagccgccgctgccctcgttttttcctgtatgggcgcggcgtacggcaccgcgaagagcggcgtcggggttgcgtcgatgggcgtgatgaggccggagctggtgatgaaatcgatcgtgccggttgtgatggcgggtgtgttgggta

SEQ ID NO: 119159 - DNA, 263 bp, Glycine max
ctttctccgagaacaaaaaaaaaaacgtgattcgctcttctcttcgaataaaccacaaaaccaacaaacgagaagaggagtgagagaagatggggttgtcgttcacgaagctgttcagcaggttgtttgcgaagaaggaaatgaggattctgatggtaggtctcgatgctgctggtaagacaaccatcttgtacaagctcaagcttggagaaatcgtcaccaccatccccaccatcggatttaatgttgagactgtggagtac

SEQ ID NO: 119160 - DNA, 264 bp, Glycine max
cttgatttcgaacaagaaatggagactactaagagtagttctgcagtggaaaagagctatgaattgcctgatggacaggtcattacaataggttctgagagattccgttgcccagaagtactgttccagccttctctgattggtatggaagctactggaattcatgaaacgacatacaattccatcatgaaatgtgatgttgatattaggaaggatctgtatggaaacatcgtgcttagtggagggtctactatgtttccggga

SEQ ID NO: 119161 - DNA, 265 bp, Glycine max
ggcgtttgctcacgacttggagttggaatcctcttcttcccctctggtgttctcagtacggaggagtgaaccggagctggtggctccggccaagcccactccccgcgaaattaagatcctatctgagatagattctcaggcgggtcttcgtacccaaattccaatcatacagttctaccgtaacgacccatcattggcaggcaaggacccagttcaagccattcgaaacgctcttgcggaagcacttgttttctactacccgttt

SEQ ID NO: 119162 - DNA, 259 bp, Glycine max
aacaaacccactaagatggcttcctttgtatccttcctagtgctgcttcttgcagcccttatcctcatgcctcaagggcttgctacttactacaaaccaattaagaagccaccagtgtacaagcctccagtgtacaagccaccagtgtacaaaccaccggtttataagccaaaaccaccggtttacaagccgaaaccaccggtttacaagccaccatataagaagccaccatacaagaaaccaccttatggaaagtacc

SEQ ID NO: 119163 - DNA, 261 bp, Glycine max
acttggacttgcagaggatccggcaagcttaaggtggtatgtgcaggcagagctggttcattgtcgctttgcaatgcttggggtcttcggaattctagtgacagatctacttcgcgtcacaggaattagtaagataccggtttggtttgaagctggtgcggtaaaatacgactttgccaatacaaagacactcttccttgttcaactagttctgatggggtttgtggaaactaaaaggtatatggattttgttagtcctgg

SEQ ID NO: 119164 - DNA, 260 bp, Glycine max
aggaaaatggcgggtacggtttcgacttgtttcttcttcgtgtttcttctttctctccttcttcctcttcagatctccgctgaggaatcctcggagaaggagttcgtactcacattggatcactctaactttcacgacactgtcagcaagcacgatttcatcgtcgtcgagttctacgccccatggtgtggtcactgtaagaagcttgctccggagtatgagaaagctgcttctatcttgagtagtcatgatcctcctat

SEQ ID NO: 119165 - DNA, 254 bp, Glycine max
aagaaagagaggaaaaatgccgctcaagttggcgggaggagccactgtcggttcccttctcctatgtgttgctatttctctctttcacatcgctggggccgaagatccctacaggttcttcaactggaatgttacttatggtgacatttaccctcttggtgttcgccaaacgggaatattgatcaacgggcaattcccaggtccagatattcattctgttaccaacgacaacctcatcatcaatgtcttcaaca

SEQ ID NO: 119166 - DNA, 254 bp, Glycine max
caaacaaccttctttctttttctgtgagcctttctttcaggttcttaacttgatcagtgtgcagtgtccaaatcataagggtagttgcaaattgcaatggctaagcatgatgttgagggtggttccttctctgcaaaggactaccatgatcctcctccagcaccgttgattgatgctgaggaactcacacagtggtccttctacagggctttgattgctgagttcattgccacaatgctcttcctttacatcac

SEQ ID NO: 119167 - DNA, 256 bp, Glycine max
cttaccccttgctaccaacactgagcttaaccgagcttcgcaaagatgaatcgggaaaagttaatgaagatggccggttcggttagaactggaggaaagggtactgtgagaagaaagaagaaggctgtccacaagacaacaaccacagatgacaaaaggcttcagagcaccctgaagagaataggggtgaatgccatccctgctattgaagaggtcaatatctttaaggatgacgtagttatccagtttctaaatc

SEQ ID NO: 119168 - DNA, 255 bp, Glycine max
atcgagccgattcggctcgaggttcacgagacctcgcaggagccattgcctgagtcgatggatgacattaactctgctcattcgttgagcgttgaggctgcttatattaaccagaatttttcgcagcaggtgcttattagggatgggaataaggttacttttgatgaggctaacccttttgcgaatgagggtgaggaggttgcttctgtggcttataggtataggaggtggaagcttgatgatgatatgtatctt

SEQ ID NO: 119169 - DNA, 258 bp, Glycine max
aaggtattgaagaccaacgtgtctgccctggtggagcttaacatgctcaaaaaccttgctggttctgctgtcgctggtgctcttggtgggtttaatgctcatgctagtaacattgtttctgccatctttatagccactggccaagatccagctcaaaatgttgagagttcccattgcataaccatgatggaagccatcaatgatgggagggaccttcacatctcagtgaccatgccctccattgaggtgggtactgtt

SEQ ID NO: 119170 - DNA, 260 bp, Glycine max
cgtcaaactgttgctgtgggagtcatcaagaatcgttgagaagaaggatcctaccggagccaaggtcaccaaggctgcccagaagaagaagtgaatcgtgcgggctggttcatcaggggatgttggttacaataaatgttggtttcttttctgtactcttgtgtcttcttttctaggtagcttgtttttcggacaaagtttgaagtctccaccatcatctcgcaactgttgttcccagaactgggttcttgatcgacggt

SEQ ID NO: 119171 - DNA, 262 bp, Glycine max
cttaccccttgctaccaacactgagcttaaccgagcttcgcaaagatgaatcgggaaaagttaatgaagatggccggttcggttagaactggaggaaagggtactgtgagaagaaagaagaaggctgtccacaagacaacaaccacagatgacaaaaggcttcagagcaccctgaagagaataggggtgaatgccatccctgctattgaagaggtcaatatctttaaggatgacgtagttatccagtttctaaatcccaaag

SEQ ID NO: 119172 - DNA, 254 bp, Glycine max
gggaactacaaggggccactcacgctctcactgaagcaggggtctcttttagtgatgagaggaaacagtgctgacatggcaaggcacgtaatgtgtccatcccctaacagaagggtcagcatcaccttcttcagagtgaggccagactccaaccaatgccaaacaccaactcccactaccatgacaagtgcaatgactatgtggcaaccgggcattgctgctagtccatatgctttgccaaatagtgctctaac

SEQ ID NO: 119173 - DNA, 257 bp, Glycine max
ctcacaacaacatcagaatcagaaacaacaatggccaacactaacttggaagatgttccctctctggatctcatgactgagctccttcgtcgtctcaagtgctcttccaaacctgacaagcgtcttattctcattggcccacctggatctggaaaaggcacccagtcaccaatcataaaagatgagtactgcttatgccacttagctactggtgatatgttaagagcagctgtagcagctaagacccctcttggtgt

SEQ ID NO: 119174 - DNA, 241 bp, Glycine max
caccggtgacatgggagctgatttttatcatcgatacaagggtgacataaaaatagcgaaagaaatttggctgtactctttcagattctctatctcatggtcaagaatattcccaaagggcaagggagcagttaacccccttggggttaaattctacaacaatgtcatcgatgagatcctagcaaatggtttaaaaccttttgtcactctttttcattgggactttccacaagctcttgaa

SEQ ID NO: 119175 - DNA, 256 bp, Glycine max
gtttcagtgagtgatcggtgttcacttgatccttcataagtcgtcatcatcatcatcatcatcaccgttcatcgaagaagatgccgatcagaaacatcgccatcggaaggcctgaagaggctactcaccccgacacgttgaaggcggggttggctgagttcatctccaccttgatcttcgtgttcgccggttcaggttccggcatcgcctacaacaagctcaccgacaacggcgccgccactcccgccggcctcat

SEQ ID NO: 119176 - DNA, 256 bp, Glycine max
cacaggctgcgcagtgtttgaacgttgaaggagagcgtagaggcagtggttttctttttttgatttctctttgtagaatcgaatcgagttaatttttgatcgtgtgagtgtccgatcttgaaatccacaacaacaatggtgagaggattgctcaacaagctcgtctctcgctccctctcggtcgccggaaaatggcagcacaatcaactccgccgcctcaacatccacgagtaccagggtgctgaattgatgagca

SEQ ID NO: 119177 - DNA, 258 bp, Glycine max
gtcatttttcagatccgaggttgagctcctctacccatcatgatggagctcggatacctgaatcagggtcagccttctagaggaacaacaccacttgtcactcttccattgttgctttcaacacttgtgttcttctccactttcacacatgccttctcttcttctgtgtttccggaattgaatcctattaaacctaggcactcacgtcttctcaggagtgctgtgcaacgagaaactcctacatctcagttgtctgaa

SEQ ID NO: 119178 - DNA, 251 bp, Glycine max
ctctctctctctcacccagatcttgtagcaatggcgagcgctcccactccacgcgaagagttcgtgtacatggcgaactggcggagcaggccgagcgctacgaggagatggtggagttcatggagaaggtctccgcctccgccgagagcgaggagctgaccgtggaggagcgtaacctcctctccgtcgcctacaagaacgtgatcggcgctcgccgcgcctcctggcgcatcatctcctcaatcgagcag

SEQ ID NO: 119179 - DNA, 251 bp, Glycine max
ctcgagccgttcttgaggaagaagaaaaaaaggtgaaatatagagtgaagaagaagaaatagagggttttggtgtttgaatcgtgaaaatgttcagaaaccagtacgacacggacgtgacgacatggagcccggcggggaggctgttccaggtggagtacgcgatggaggcggtgaagcagggctcggcggcgatagggctccgatccaagacccacgtggtcctcgcatgcgtcaacaaggctaactccg

SEQ ID NO: 119180 - DNA, 252 bp, Glycine max
gtcgagtttcacagcagcaatggtgtacgtcaaggctcagaaatcaaaagcctacttcaagagatatcaagtcaagttcaagagaagaagagagggaaaaaccgattaccgtgccaggattcggttgattaatcaggacaagaacaaatataacactccgaaataccgatttgttgttcgctttagcaacaaggacattgttgcacaaataatatctgctagcattgctggcgatattgttcttgctgcagc

SEQ ID NO: 119181 - DNA, 252 bp, Glycine max
ctcattctccatacctcaacgaagaggttaaagagacggcaacactttgctgtccgccttgaccgagcagagcttcgtcttggccctcgattttgccctaaagtactctcagtcacaacagacaccgtcgtcgtcgtcgtcgtcatcaatggcaccgaagcagaccaaggctgagaagaagatcgcttacgatgcgaactgtgcgacctaatggaggagtacggccagatcctcgttgtgaactccgataac

SEQ ID NO: 119182 - DNA, 255 bp, Glycine max
cccaagcccaagcccaagcccgttcataaaatcctcctgcagcagcacccagtacccagccctctgcgtctcatccctctccgtctacgcctccagcatccaacaggaccctcaccaactggttcagacagcactctccctctccctgaaccgcacccaagccaccaaaaccttcgtggctaactgcaacaaattcagaggcctgaaacccagagagcacgctgcactcaaggactgcgccgaggaaatcagcga

SEQ ID NO: 119183 - DNA, 265 bp, Glycine max
ggagattaaagacactactaaagaagggtatagttttgaagagctatgcatcaagaaagaagccattgagggagaagagaagttttgtgcaaaatccttgggaacagtaattggttttgccatttcaaagctgggaaagaacattcaagtactttcaagttcctttgtcaataagcaagaccaatacactgtgggaggagtgcagaatcttggagacaaagcagtgatgtgtcattagctaaatttcagaactgccgtattttac

SEQ ID NO: 119184 - DNA, 264 bp, Glycine max
attcttcatccatagacatggccaccgtcacttctgcagccgttgctattccctcattcactggcctcaaggcaagcgcaggcaaagtgagtgccgcagttaaagtctcagctccccaagccacaaggttgggcatcaaggcttcgctgaaagacgttggagtcgctgttgtggccactgccgcgagtgcagtgctggctagcaacgccatggccattgaagtgttgctgggtggtgatgacgggtctctggctttcgttccca

SEQ ID NO: 119185 - DNA, 259 bp, Glycine max
ggaaaaagagttcagctgagatggactttttctccgaatatggtgatgccaaccggtacaaaattcaagaagtcattgggaagggaagttatggtgttgtctgttcagccattgacactcacacaggtgaaaaagtggcaattaagaagattcatgacatcttcgagcatatatctgatgctgctcgtattctccgtgagataaagctgcttagacttctacgacatcctgatattgttgaaataaaacacattatgct

SEQ ID NO: 119186 - DNA, 246 bp, Glycine max
ggcggtgtggagaatgaagggtttagagggaatggtgtggcgggtgagaaacctaaaaaagttttgattttgatgagtgacactggtggggggcatcgagcttccgctgaagctatcaaagctgctttctatcaagaatttggagatgattatcaggttttcgttactgatttgtgggctgatcacacgccttggccattcaaccaacttcccaggagctatagttttctggtgaaacatgggccg

SEQ ID NO: 119187 - DNA, 248 bp, Glycine max
agagaatggctcaagcaatggcatcaatgactagcttacgtggttcctctcaggctgtgttggaaggtagccttggctccacacgcttgaatgtggggagtggaagcagggtggcctcagtcacacgtgcagggttcacagttagagcacagcaacaacaagtgaatggtggtgaggtacaaagtagccgtagggcagtgctttcacttgttgctgctggtttgaccactggctcttttgttcaagct

SEQ ID NO: 119188 - DNA, 261 bp, Glycine max
cattaacatctctaaccatggcagcagaagaccaggctcatgactctggtgacgcgaacaagttcccggagagacataccctttggaaggccggaaaagcccagacgacggcaaggactaccaggagccggagccggcgccactggttgaacccgacggagtttacgtcatggtccttttacagagcagggatagcagagtttgtggccacttttctgtttctatacatcactgtcttaaccgtcatgggagtcgccgggg

SEQ ID NO: 119189 - DNA, 264 bp, Glycine max
gcttggtcttcccggattccaatcgcctgaaagggaaccggatcttttctctttaagctcaccaaagcttgatgagaagccactcttccctttgcttcctactaaagacgggatttgctcgtcggggcagaaagctgttgtttctggcaacacaagaggttttgctgataccatggatgggttttctcaagggaagtttgctggtaatacagggatgaacgcggtgctatcacctagaccttctggagctcaaccttctgctat

SEQ ID NO: 119190 - DNA, 259 bp, Glycine max
cgttagggtcgtcttcggatcggtggaacttgactgcgccggcgtgaattccgacgctgcgagtggcaccgaattgcgatagcggtgacgaatatgaaggttttcgttaagactctcaaaggcactcacttcgaaatcgaagtgacgccgcaagacacggtttctgaagtgaagaaaaatatagaaactgttcagggtgcagatgtctatcctgctgcacagcaaatgctaattcatcaagggaaagttcttagggatg

SEQ ID NO: 119191 - DNA, 258 bp, Glycine max
cattgatctaccaagcaatgtgaatgaaatacgacccggtcaagatgtcacagtggtgacagacaccgggaaatcatttgtatctacattgagatttgatactgaggttgaactagcttacttcaaccatggaggtatcttacaatatgtcatcagaaacttgatcaatgctaaacattgaatcagatataaaccaagtttgtaggttgaattgatagcacccactggcgctgattcttaactttggtcttaataatc

SEQ ID NO: 119192 - DNA, 257 bp, Glycine max
aaggggacaatgaggttctgtttgcggacagggttctgaagtttacgggctccgggaagatgaaacgctgcgttctgatgatcacggattctgcgatttacatcgttgaccctgaggtggacgcgctgaagcggagaatagtgcttgcggcggtggagagggtttgtctgagtgaactgagtgataattttttcgcggtgattgttccgtcggagtatgatttgctcatggctagtactcggaagacggagattgtc

SEQ ID NO: 119193 - DNA, 257 bp, Glycine max
gcagaattcaacaggaatgaggatggccaaacttttagaggcacatcccaaggtgaagcgggtctactatccaggcttgccgagtcaccctgaacatgagcttgccaagaggcagatgactggtttcggtggtgttgtcagttttgagattgatggagatctacataccacaataaaatttattgattcattgaaaatcccatatattgcggcctcgtttggtggctgtgagagcattgtggatcaacctgctattt

SEQ ID NO: 119194 - DNA, 241 bp, Glycine max
ggctcgagctttttacttcccctatggctcaccactccttgctactagccctcctcctcttcgccgcagtggccaccgccgcgatggcggtggccgcgtccgacgccgacgacatcctgatccgtcaggtggtgccagatgttggcgaaccgaagaggaggacaacctgctgaacgccgagccccacttcgcgagcttcaaggccaagttcgccaagacctacgccaccaaggaggagcac

SEQ ID NO: 119195 - DNA, 135 bp, Glycine max
caaagacgttgagcaggttaccgagcacggtgaatactccgcgaacgattaccatgacccacctccggcgccgttgatcgacccagatgagctcactaagtggtccttgtacagagccgccatagctgagttcat

SEQ ID NO: 119196 - DNA, 259 bp, Glycine max
cgctgatgatgtcaagaaaccccttgtcaacaagcacaaacccaaaccagctaagctcagggctagcattacccccggaacagtgttgattcttcttgctggtagatttaagggaaagagggtagtgtttttgaagcagctaccttctagggttgcttcttgtaacaggtcctttcaaggttaatggagttcctttgagacgtgtgaatcaggcctatgttattggcacatcaaccaaagtagatgtctctgctgttaa

SEQ ID NO: 119197 - DNA, 256 bp, Glycine max
gaaacctcgtaaccattctcagcatagatggaggtggtatcaggggtatcattccagctgtagttcttgaccacttcgaaaaggctcttcaggcatgggataaaagtgcatcactagcaagttattttgatgtcatagcagggactagcacaggagtatacatgactgctatgctcactactcctcacccagacgaccccactcaccctctgtttactcccagcggaatcatagaattttataaaaaatacggtcc

SEQ ID NO: 119198 - DNA, 260 bp, Glycine max
attcaaaccctcggccagtttctcggcccccaacgcccctcctcctccgccgccgctaccgccaccgccgccacatccccttcctccacctcctccctcgccgtcggttccgacgaagactctgacggcggcgtcacccaccactccccaacccaagtcctcaagaacttcaacgctattcgcctcctccggatcgagctccccatcggcgaactaggcatcgaagacggtgtgctcctcaaatggcgcgccgatttcgg

SEQ ID NO: 119199 - DNA, 262 bp, Glycine max
gcataatggctgaattaattgtcaaggagcctctgttcaggggtaaaagtgaacttgaacaactcgacaagatgtttcgaaccctaggtacacccgacgagaaaatttggccaggattatccaaattacctggggctaaagcaaattttgttcaagcaaccgattaatacactaagaaagaagtttccagccgcgtcatttactggtttgccagttttatctgagctgggatttgacttgttgaagcggctgctaacttatg

SEQ ID NO: 119200 - DNA, 262 bp, Glycine max
cactcataacacaaagcacaaagcaaagctcatccttgagttaaaaaatggcagcagcttcttccatggctctctcatccccatccttggctggcaaggccgtgaagctgggcccatcagccccagaagtgggaagggtgagcatgaggaagaccgtcaccaagcaggtctcctcaggaagcccatggtacggcccagaccgagtcaagtacttgggcccattctctggcgagcccccgtcctacctaaccggtgagttccc

SEQ ID NO: 119201 - DNA, 258 bp, Glycine max
cgcttgaccaccttcgaagactccgagaaggagagtgaatacggttacgttcgcaaggtttcaggacccgtcgtcgttgcggatggcatggctggtgctatgtatgaactcgtgcgtgttggtcatgataatctcattggtgaaattattcgtctcgaaggggattctgctaccatccaagtttatgaggaaactgctggtttgatggttaatgatccggtcttacggacgcacaagcctttgtccgtggagttgggt

SEQ ID NO: 119202 - DNA, 256 bp, Glycine max
gtaactgctgatgctcaggcagtacagaggcaccgtgcaacaattatagaatgtgtgaaggattcagatgcttcgattcagaaaagagcccttgaacttgtttatgttttggtgaatgaaactaatgtgaagcccttggcaaaagagcttatagattatctggaagtcagtgatcttgatttcagaggggaccttactgccaaaatttgctccattgtagcaaagtattccccagagaagatctggtatattgatc

SEQ ID NO: 119203 - DNA, 256 bp, Glycine max
agcaatggctaatacaccttcgaattcttcaattctcctctccctttttctattggccatcgccctctccctcgctgagtcccaatctttcatcggagtaaactacggccaggtcgccgacaaccttccggcgccggaggacacggccagcctcctcaaatccaccaccatcggaaaagtccgtctctacggcgccgatcccgccatcatcaaggccctcgccaactccggcatcggaatcgtcatcggcgcctcc

SEQ ID NO: 119204 - DNA, 253 bp, Glycine max
aatttacctgctgaacccctctgttttggatcgaattgaactgaggcccacttctattgagaaagaggtgtttccaaagattgctgcagagaaaaagctatttgcaatggtcctgccaggattttggatggacattggacaaccgagggactatatttctggcctgaggctttacctggactcattgaagaagaagtcatcatctaagttggccagtggctctcaatttgtagggaatgtcattgtggatgag

SEQ ID NO: 119205 - DNA, 252 bp, Glycine max
gtcgttgtagcgccgcagccagcggttgaatttggaaaaagatgtctcaccggaagttcgagcacccgagacatggttcccttggctttctcccaaggaagcgagcttctcgtcatcgcggaaaggtgaaggctttcccaaaagacaatcctagtcaaccatgcgggttgactgcttttgtgggctacaaggctggaatgacccacattgttagagaggttgagaaacctggatcaaagcttcataagagag

SEQ ID NO: 119206 - DNA, 250 bp, Glycine max
cggggagagaccaaagagtgtgttgtgttgtgttggtaattaagaaaagagcaaaaatgccgctcaagttggcgggagtagccactgtcggttcccttcttctatgtgttgctatttctctctttcacatcgctggggccgaagatccctaccgcttcttcaactggaatattacttatggtgatatttaccctcttggtgttcgccaaacgggaatattgatcaacgggcaattcccaggtccagatat

SEQ ID NO: 119207 - DNA, 259 bp, Glycine max
aaaaacaaaaacaaaaaaatccgcgattcgctcttctcttggaaaattgaacaccagaagtacgaccgaaaaagaagagcggtttagaagtgtgagaaagatggggttgtcgttcacgaagctgttcagcaggttgtttccgaagaaggaaatgaggattctgatggaaggtctcgatgctgctggaactgcaaccatcttgtacaagctcaagcttggagaaatcgtcaccactatccccaccatcggatttaatgtt

SEQ ID NO: 119208 - DNA, 262 bp, Glycine max
  unsure (1)..(262): unsure at all n locations
ncagtttcattttccctcactatctcgctcaccatacgctccgctctactcctccaatggccgaccagctcaacgacaagtacatcgccgtgttcaaggcggccttcagcctcttcgacaaggacggcgatggttgtattactactaaggaacttgggactgtgatgcggtcactagggcaaaacccaactgaggcagaactgcaggatatgattaatgaggttgatgctgatggcaatggaaccatcgacttcccagagtt

SEQ ID NO: 119209 - DNA, 254 bp, Glycine max
ggaacaagggttttagggcagggtctagtgcttataaataccctgcattagccactagatttcacaaactgaggcacacagaaaaaatgggttcttcttcttctatgtggacggtgtgtgtgattttggcatcactggcctctgcagcactctgtgccaacccacgcaggccagtggatgtacaatttggccgaaactacgtgcccacatgggcctttgatcacatcaaatatttcaatggtggttctgacatt

SEQ ID NO: 119210 - DNA, 255 bp, Glycine max
gtctaaaagcgaagacttgaagcttttgggaggctggttcagcgcgatttgccctgatgggtgcagattgcccttaacctcaagggtctagaatatgaggttgttgaagagaccttgagtcccaaaagtgacctgcttcttaagtccaaccctgtgcacaagaaaatcccagtgttcttccatggagataaagtcatttgtgaatctgcaatcatagttgagtacattgatgaggcttggactaatgttccctcc

SEQ ID NO: 119211 - DNA, 253 bp, Glycine max
gattgggaaggcgagggattgcgctgcgtctcttcctcttctctttcgattcatccctcattcataatcttccattccaacaacctcagcctcacactcacacatacacacatctgaacgcgtatcgtccctcccatggcttcaaagcgcatcctcaaggagctcaaggacttgcagaaagacccaccaacttcttgcagcgctggtccagtagctgaggacatgttccattggcaagcaacgattatgggtc

SEQ ID NO: 119212 - DNA, 249 bp, Glycine max
cttggagcctaacttgggtgggctcaccgttgagcaggctatccagagcaagaagttgttcatcttagatcaccatgactatctcattccacctttgaggaaaatgaatgcaactaccacaaagacttacgctgtgagaaccatatttttcttgaaaagtgatggaaccttgacgccattggccattgagttaagtaagccgcatcctcagggtgaaggataggtcccggttagcgaagtctacgtgcc

SEQ ID NO: 119213 - DNA, 249 bp, Glycine max
ggctgtgcttggagcattgaagggggaactttcagccactgctgtcaatgctcctatggttgctcctgaggtgttgtcagaattggccccatatgtggtgctggctgagaagctgggcaggctagctgtgcagttggtgtgttggaggaagtggaatcaaatctgtgaaggttgtttatcgatcagctaggggcccagatgacttggacactagacttctgcgagccatggttacaaaaggcctcattg

SEQ ID NO: 119214 - DNA, 254 bp, Glycine max
  unsure (1)..(254): unsure at all n locations
caaatgcactcatggagggtgtgttattagtccctccaactacattgcacacgaaggcaaactctactgcaagcaccaccacatccaactgatcaaggagaagggcaatttaagccaacttgaaggtgaccatgagaagagtnacagaggaagagaaaatcaacggtgaagtggttgcagctgagacatgaaatgaaatgaaatgcttgagttatgacaaatgaatattctcttcctcaagttccatatttctg

SEQ ID NO: 119215 - DNA, 252 bp, Glycine max
gataactagaaacagtgtgatgaaaatgaaggtccttgttttcttcgttgctacaattttggtagcatggcaatgccatgcgtacgatatgttccctctccgaatgaacactggctatggtgcccgtactccggaggtgaaatgcgcaagttggaggcttgctgtggaagcacacgacatctttggctttgagaccattcctgaagagtgcgttgaagcaacaaaggaatacatccatggcgaacaatatag

SEQ ID NO: 119216 - DNA, 187 bp, Glycine max
tacctatgcgaagctgtacggagcaggcggagcggtacgaagagatggtggagttcatgcagacggaggtggtggggtggacgccggcgtcggagctcacggtggaggagcgcaacctcctctcggtggcctacaagaacgtgatcgggtctctgcgtgccgcgtggcgcatcgtgtcctccatcga

SEQ ID NO: 119217 - DNA, 250 bp, Glycine max
tgatttcagtgagtgatcggtgttcacttgatctcatcataatcgtcagcgtcagttgaagaagatgccgatcagaaacatcgccgtcggaaggcctgaagaggcgactcaccccgacacgttgaaggcggctttggctgagttcatctcaaccttcatcttcgtgttcgccggctcaggctccggcatcgcctgcaacaagctcaccgacaacggcgctgccacccctgccggcctcatctccgcctcc

SEQ ID NO: 119218 - DNA, 250 bp, Glycine max
tccaaatcctctctttgcgattgtgctttgatctgcttcctactgcgatagtttctctactgttacatggccatggcggtttccgcaattggttttgaaggtttcgagaaaaggttggaaatatcctttttccagccgggactttttgctgaccctgaaggaaggggtctaagggctcttacaaaatcccagttgggtgagattctaacaccagctgcttgcaccattgtttcttcgctcaaaaacgata

SEQ ID NO: 119219 - DNA, 248 bp, Glycine max
caagattggaggtattggaactgtgccagtgggacgtgttgagaccggtgtcttgaagcctggaatggtggtgacttttgcaccaactggactgacaactgaagtcaagtctgtggagatgcaccatgaatctcttacagaggcacatcatggtgacaatgtgggattcaatgttaagaatgttgctgttaaggatttgaagcgtggttatgttgcctcaaactcaaaggatgaccctgcaaaggagg

SEQ ID NO: 119220 - DNA, 246 bp, Glycine max
aaaacactcataacacaaagcacaaagcaaagctcatccttgagttaaaaaatggcagcagcttcttccatggctctctcatccccatccttggctggcaaggccgtgaagctgggcccatcagccccagaagtgggaagggtgagcatgaggaagaccgtcaccaagcaggtctcctcaggaagcccatggtacggcccagaccgagtcaagtacttgggcccattctctggcgagcccccgtcc

SEQ ID NO: 119221 - DNA, 250 bp, Glycine max
ggcaattcaagcctttaagaagtttggaaacaagctgaaggaaattgaggacaaaatctcagggaggaacaagaattcaagccttaggaaccgtaatggaccggcgcagatgccctacactgtgcttcttcctaccagtggggaaggccttactttcagaggaattcccaacagcatctctatctaatgagagtgtgtggtgtgtggtgtgtggttttccttccttccaacgtacctctcattgacaaat

SEQ ID NO: 119222 - DNA, 253 bp, Glycine max
gtaagaccctcctctccaaatgtgtaccctccgtaccagccaaatcaagcaacaaacccaacaccaaaacaaacccactaagatggcttcctttgtatccttcctagtgctgcttcttgcagcccttatcctcatgcctcaagggcttgctacttactacaaaccaattaagaagccaccagtgtacaagcctccagtgtacaagccaccagtgtacaaaccaccggtttataagccaaaaccaccggtttac

SEQ ID NO: 119223 - DNA, 263 bp, Glycine max
agaacatggaaactcaccacaaggtggatgcgatgatggagaaggtgttgagggagcatgaggaggctagggctaaggaagatgctgactctgataggaagaaggatctttttgatattttgttgaacctcattgaagctgatggtgctgacaataagctcactagagagagtgccaaagcctttgctctggacatgttcatcgccggcacaaacggccccgcaagcgtcctagatggtcactggcggagctggtgagaaacc

SEQ ID NO: 119224 - DNA, 254 bp, Glycine max
gccaaagctcccccttctggctcaagcttcagccaatgccaaaatgttgttgttgaagcactccatgttaatgcaacatgctcttacaaggattgcactttcggagggatatggaatggtggtgggggagctggagaaaacaacttttttattgcctcatttttctttgaagttgccgatgaggctggttttgttgatccaaacgcccccaatgccaaagttcgtccgtggattttgagaatgcagcaaaggtt

SEQ ID NO: 119225 - DNA, 251 bp, Glycine max
atcgagcgaatcggctcgagcatggccaccgtcacaacccaagcctccgccgcgatttatccggccatgtgcctcgaactcgaggtttctgaccggctcttccggtaaactcaaccgggaagtgactatgaggccaatggggtgccctccttctgcctctttcaaggttgaagccaagaagggagagtggttacctggcttggcctccccaacttacctcaatggactcttcctggtgacaatggatttga

SEQ ID NO: 119226 - DNA, 250 bp, Glycine max
gcagtagcactactcccttattgtgctctttgttctttatttcttccttactttttgcttcctgcacccatgcctcctcccaggcacctcctccaattgtggatggactttcatgggatttctataggacgagctgtcgcatgcttgaagggatagtgagcaatcatctccagaaggtgttcaagaaggacaatggtcaagctcctgccttactcaggatctcttccatgactgctttgttcagggttgc

SEQ ID NO: 119227 - DNA, 253 bp, Glycine max
cgcggtttttgctatgaacttgctcagatgtgttatatatctggaatggcatttacacctgagccagtagttcccccagtcagtgctcgccctgatcaagtggaaaaggttcttaaaactcggtatcacgatgccaagaataaactgcaaggaaaagagcttgatttactcattgttatcttgccggataataatggatcactatatggtgacctcaaacgtattttgagacagatctaggacttgtttcaca

SEQ ID NO: 119228 - DNA, 246 bp, Glycine max
tactggcgcggtgtctggagtttcaggtgcatctgaagacaatattagagagctttttgctaaagcgtacaggtctgcgcctgctattctctttattgacgagattgatgcaattgcatctagaagagagaatttgcagcgtgagatggagaaacgtattgtgacgcaattaatgacttgcatggatcaatcagataggcttcttcaaccagcggatgagtggagagttctggtgatgatcatcat

SEQ ID NO: 119229 - DNA, 251 bp, Glycine max
ggggaaatttgcgttgtttttcgcggtacagctcacacacactgaacggtaagtatggcggacaaggctgttacaatccgaacccgaaagttcatgaccaacaggcttctttccaggaagcagtttgtcgttgatgttcttcatccagggagggcaaatgtttccaaggctgaacttaaggagaagctagctaggatgtatgatgtgaaagaccctaatactgtatttgtcttcaaattccgaacacattt

SEQ ID NO: 119230 - DNA, 250 bp, Glycine max
cccagttcatccttctttgggagcagcttgaagaaggttattggctcaagggtccccaacacaaagatttcctctggaagcttcaagattgttgctgtagaagagaagaaagagattgaagagacccagcagaccgacaaggacagatggaagggtcttgcctatgatatctcagacgaccaacaggacatcacaagaggaaagggtttggttgactcccttttccaagctccacaggatgctggaactc

SEQ ID NO: 119231 - DNA, 249 bp, Glycine max
ctaacctaaaccctactcattctccatacctcaacgaagaggttaaagagacggcaacactttgctgtccgccttgaccgagcagagcttcgtcttggccctcgattttgccctaaagtactctcagtcacaacagacaccgtcgtcgtcgtcgtcgtcatcaatggcaccgaagcagaccaaggctgagaagaagatcgcttacgatgcgaactgtgcgaccaatggaggagtacggccagatcctcg

SEQ ID NO: 119232 - DNA, 249 bp, Glycine max
caatcatcttttgtttgttcttcagtactttagtgtgtgatttaattccaagattttgagaatgtctagctgtgggtgtggaagtagctgcaactgtggcagcaactgcggttgcaacaagtactcttttgacttgagctatgttgagaagacaaccacagagactcttgttttgggtgttgggtctgtgaaggcccaattggagggtgctgaaatgggtgttcagctgagaacggtggctgcaactgt

SEQ ID NO: 119233 - DNA, 250 bp, Glycine max
cacaaggcagaaagcaagctcatcctagagttttaaaaatggcagcagcctcctccatggctctctcttccccatccttggctggcaaggccgtgaagctgggcccatcagcccccgaagtcgggagggtcagcatgaggaagaccgtcaccaagcaggcctcctccggaagcccatggtacggcccagaccgcgtcaagtacttgggcccattctctggcgagccccgtcctacctcactggcgagttc

SEQ ID NO: 119234 - DNA, 257 bp, Glycine max
gcagtagatagcctggttcctataggccgtggtcaacgagaacttataatcggggaccgacaaactggaaaaacagctattgctatcgataccatattaaaccaaaagcaaatgaactcaagggccacctcagagagtgagacattgtattgtgtctatgtagcgataggacagaaacgctcaactgtggcacaattagttcaaattctttcagaagcgaatgctttagatatcccattcttgtagcagccaccgct

SEQ ID NO: 119235 - DNA, 249 bp, Glycine max
cccaaaccaaaccctggctgaagaagagaattgcttgagaagaagaacacagaaatgggctccgaactgattttcagagggcacgagagccagcccgtggacgacgcgtactcaccaaagccccacaaaccctggctcaccgtgactcgcccgattcactacatgctccgtgagcagcgactcctcttcgttctcctcggcgtcatcatagcaaccctcttcttcacattcgtcccttactcttcccct

SEQ ID NO: 119236 - DNA, 249 bp, Glycine max
gcggaatcagctagaattttctaataatggccaaagacgttgagcaggttacagagcaaggtgaatactccgcgaaggattaccatgacccacctccggcgccgttgatcgacccagatgagctcactaagtggtccttgtacagagccgccatagctgagttcatagcaacactccttttcctttacatcaccgtgttgaccattattggctacaagagacgagtgacaccaaaatccccggtaacac

SEQ ID NO: 119237 - DNA, 247 bp, Glycine max
gcgagttgttgtaaagctagccttgttgcagccatggccacccacgcggctctagcttctacaaggatccccactaacaccaagttcccatccaaggcttcacactctttcccaacccaatgcgcctcaaagagacttgaggtgacagaattctctgggctaagatccacttcatgtgtgacatatgctaacgatgctagagaatcttccttttttgatctgtagcttcccaactcactcccaagac

SEQ ID NO: 119238 - DNA, 248 bp, Glycine max
caacacactactttttgccattatctcaaagtgctgcagattacaaggcagcaagtagagctctggacttcttctttggttggtattctgatccggttttctatggtgactatccggagagtattaaatcttcagtaggttctaggctcccaaaattcacaaaagctgaatctgaaggtctaaaaaattccatagattttcttggtgtgaattactacacccttattatgcggaacatgctgaacctg

SEQ ID NO: 119239 - DNA, 252 bp, Glycine max
  unsure (1)..(252): unsure at all n locations
aaacttctgcaacaacnatggttgcaatggcagcagcaacagcatcctcccagttgattttctcaaagcctcgttcaccctcgcgtctctnccccttccanctatgtgtctttgacaccaaacaagtgctgtcaagttcaagtggcaggagaaggcatgtggggggttctggagttaggtgcatggcggtgggagaagctgcaacgcactggagactaagaagagaagtggatatgagcttcaaacactcac

SEQ ID NO: 119240 - DNA, 250 bp, Glycine max
gcgagttgttgtaaagctagccttgttgcagccatggccacccacgcggctctagcttctacaaggatccccactaacaccaagttcccatccaaggcttcacactctttcccaacccaatgcgcctcaaagagacttgaggtgacagaattctctgggctaagatccacttcatgtgtgacatatgctaacgatgctagagaatcttccttttttgatcttgagcttcccaactcactcccaagaccaa

SEQ ID NO: 119241 - DNA, 244 bp, Glycine max
caacacactactttttgccataatctcaaagtgctgcagattacaaggcagcaagtagagctctggacttcttctttggttggtattctgatccggttttctatggtgactatccggagagtatgaaatcttcagtaggttctaggctcccaaaattcacaaaagctgaatctgaaggtctaaaaaattccatagattttcttggtgtgaattactacccacttattatgcggaacatgctgaa

SEQ ID NO: 119242 - DNA, 247 bp, Glycine max
  unsure (1)..(247): unsure at all n locations
aaacttctgcaacaaccatggttgcaatggcagcagcaacagcatcctcccagttgattttctcaaagcctcgttcaccctcgcgtctctgncccttccaactatgtgtctttgacaccaaacaagtgctgtcaagttcaagtggcaggagaaggcatgtggggggttctggagttaggtgcatggcggtgggagaagctgcaaccactgagactaagaagagaagtggatatgagcttcaaacact

SEQ ID NO: 119243 - DNA, 246 bp, Glycine max
aaggcagaaagcaagctcatcctagagttttaaaaatggcagcagcatcctccatggctctctcttccccatccttggctggcaagagagtgaagctgggcccatcagcccccgaagtcgggagggtcagcatgaggaagaccgtcaccaagcaggcctcctccggaagcccatggtacggcccagaccgcgtcaagtacttgggcccattctctggcggcccccgtcctacctcactggcgagtt

SEQ ID NO: 119244 - DNA, 242 bp, Glycine max
gcaagatgtcgaagagaggacgcggtggttcggcggggaacaagttccggatgtcgctgggtctgccggtggcggcgacggtgaactgcgccgacaatacgggggcgaagaacctataacatcatatcggtgaaagggatcaaagggcgtttgaaccgtctcccctcggcttgcgttggcgacatggtgatggccaccgtgaagaaggggaaacccgattgaggaagaaggttttgccagct

SEQ ID NO: 119245 - DNA, 246 bp, Glycine max
ggcggtccaaacactcttctctgcagcttttgcctacaactcccttcaccatggctgaacaaaccgagaaagcttttctgaagcaaccaaaagtgtttctcagcacaaagaagactgggaagggaaagagacctggaaaaggtgggaaccgcttttggaagtccattgggcttggatttaagactcccagggaagccatcgaaggaacctatattgacaaaagtgccccttcactggcaatgtttc

SEQ ID NO: 119246 - DNA, 251 bp, Glycine max
ctgagtttccacactgcataccttaggtcttccgaattcgaagttaatttgcaagatggctaaggaaaaggctcagatcaacattgtggtggttggtcatgtggaccctgaggaggcaaccaccattaacgagctgaagaagcctgttgtggagaaagaagctccagggcatgccatatgagggcatgcacgtacggcctcggaggggaaccagaaaattatgtaacaaaataatctggaaccctaatgta

SEQ ID NO: 119247 - DNA, 242 bp, Glycine max
caacttgctccctcagtagcgaagaagaagccacagagatctagtctcctactctcatccgtaataaatatatggcatctcacatcgttggatacccccgtattggtaactatagagagctcaagttcgctctcgagtctttctgggatggcaagagcagcgccgaggatttgcagaaggtgtcttctgatctcagggcatccatctggaagcagatggctatgctgggatcaagtacatcc

SEQ ID NO: 119248 - DNA, 247 bp, Glycine max
tccgatggctaatctctcactcttgttcttcggtctcctcctattctccgctgccgtagccaccgtcgaacgaatcgacgatgaagacaaccttctgatccgtcaagtggtgccggacgcggaggaccaccacctgctcaacgcggagcaccacttctccgccttcaagacaaagttcgccaagacctacgccacgcaggaggagcacgaccaccgcttcgtatcttcaagaacaacttgctccgcg

SEQ ID NO: 119249 - DNA, 243 bp, Glycine max
gaccgattctgcaaaagatataaagaacaaggtaaacaaacatgcattttctggtgggcaagattctatagagaaacataggcaattaggggctaatcttgaggtagatataccagtcaaataccttacttttttcttagaagatgatgatgaacttgaacacataaagaaggaatatggagaaggacgcatgttaactggcgaggtaaagcagcggtagttcaagttttgactgaactagtg

SEQ ID NO: 119250 - DNA, 242 bp, Glycine max
ctcgagccgattcggctcgagctcgacgctcttcctcaccgagtgctagaatggaatatcgatgctcagtcatctctgttaccattctcttctctcttgctcttgcaggagagagccatgtccatgcatcgctacctgaggaagattattgggaagctgtttggccaaacactcccattcccactgcactgcgagagcttctaaagcctctccctgcaggtgtttaaatcgatgaactccct

SEQ ID NO: 119251 - DNA, 241 bp, Glycine max
gggctcaatgctgctcagtctcagaccctttctcaccaccatcttctttctcacactcacagtgcttcaggtttcagcatcatcctcagtgattttctacaacaagtgccagctcccagtgtggcccgggatccagcccagcgcaggaaagcccgttctggcccgcggaggcttcaagctcgccccaaaccgggcctactccctccagctccccgtctatggtccgggcgcttctggggcc

SEQ ID NO: 119252 - DNA, 239 bp, Glycine max
cagcgtccggtccgggccgtacgggcagatcttcaggcccgacaactttgtgttcgggcagtccggggcaggaaacaactgggccaaggggcactacactgagggtgctgaactcattgattctgttctcgatgtggtgcgcaaggaggctgagaactgcgattgcttgcaaggttttcaagtgtgccattctctgggaggaggaactggatcagaatgggtaccttgttgatttctaa

SEQ ID NO: 119253 - DNA, 241 bp, Glycine max
  unsure (1)..(241): unsure at all n locations
tagagatgctgctccttgctggcgatcgttcgggaagaaacagtaatgctactgacatgggaaagaaggggagttggttttctgcaatcaaaagagttttcacacaccactccaaagagaaggattcagataataacaaaggcacaaaagagaagaagaaaagtctaggaaaactaaagcatggagaggccaattcattcatccccttttnagagagccaagtagcattgagaaaatcttt

SEQ ID NO: 119254 - DNA, 248 bp, Glycine max
  unsure (1)..(248): unsure at all n locations
aaacttctgcaacaacnatggttgcaatggcagcagcaatagcatcctcccagttgattttctcaaagcctcgttcaccctcgcgtctctgccccttccanctatgtgtctttgacaccaaacaagtgctgtcaagttcaagtggcaggagaaggcatgtggggggttctggagttaggtgcatggcggtgggagaagctgcaancactgagactaagaagaaagtggatatgagcttcaaacactca

SEQ ID NO: 119255 - DNA, 264 bp, Glycine max
ctcggctctcggctcgttcttacacactctcattcgccttggccgcagcagcacgtcctctcgtcaccgtgcaggccctcgacagtgacatggccaacatagcctccgccaccgtccctatccctgacgtcatgaattcctccatccgcccggacatcgtcaacttcgtacactccaacatctccaagaacagccgacaaccctatgcagtcagccgccgcgctggccaccagacttcgccgagtcctggggaaccggtcgtgc

SEQ ID NO: 119256 - DNA, 234 bp, Glycine max
cacatagagtcatagagacatcatcatcggattggaatggaatatgcgagtagcaacaacagcagcatcatagaacgtggtgcttcgctgccatcaacgggttcagacgccaagaagcgaagagtgacgtacttctacgagcccacgatcggcgattactactacggtcaggggcacccaatgaagccgcaccgaatccgcatggcgcactacccatcgtccactactccctcc

SEQ ID NO: 119257 - DNA, 237 bp, Glycine max
gaagagcccactgtcgcggtggaacccgctcccgaacctgccaccgccgagcctcccccggaggagaaggaggagcccaaacctgaagccaaggctaagaaaaccaaggaacccaaacctaaaaaggtttccagaccacgcaaccctcccactcatccttcctacgaggagatgattaaagacgcaattacctcgctgaaggagaaaaccggtcgagccaacacgcgattgcgaagt

SEQ ID NO: 119258 - DNA, 241 bp, Glycine max
cttcccagccctcacctcaacgctgcatcttcacgtcgtctcacgacggtgcatatagtagagagggaaaatgagtcgaggaggcgcagtagcagcagcgaagggaaagaagaagggtgctacattcaccattgactgtgcaaagccagtggaagataagatcatggacattgcttctctcgaaaagtttcttcaagagaggatcaaggttggtggcaaagctggtgctcttggtgacagt

SEQ ID NO: 119259 - DNA, 230 bp, Glycine max
gtttctagtatgtgcacagccctatagacgaattaccagcttagcgaggagatcggtcgcggtcgtttcggcaccatcttccgctgcttccacccactctccaacgtaacctacgcctgcaaactcatcgacaaatccctcctccatgactccaccgaccgcgactgcctccagaacgaacccacattcatgaccctcctttacactcacccaaacatccttcaaatctt

SEQ ID NO: 119260 - DNA, 235 bp, Glycine max
ctcaatcaacctctcttcttcaccgtcgcaaaccacaaactcaccgtggttggcgccgacgcctcctacctcaaacccttcaccaccaaagtcctcatgctaggacccggtcaaaccaccgatgtattgatcaccggcgaccagccaccttccccctactacatggcggcgcgtgcgtaccaatctgcccaaaacgccgcgttcgacaacacaccaccaccgccatactcgaata

SEQ ID NO: 119261 - DNA, 238 bp, Glycine max
ctcactcacaaacgcacactgaattcaaaaacatcgaaagagagaggcatggccgagcaaaccttcatcatgatcaagccagatggcgttcaaagaggccttattggcgagattattagcagatttgagaggaagggtttttacttgaaagggttgaaactcgttactgtggaccgtccttttgctgagaagcactatgctgatttgtctgaaagcctttctttagtggtttggtgga

SEQ ID NO: 119262 - DNA, 256 bp, Glycine max
tttctcagtctctgtgtttgcggctgaggattccgaacgagtgaccttcttcgtttctcgcaaagtttaagtaatcatgggtaaggaaaaggttcacatcaacattgtcgtcattggacatgtcgactctgggaagtcaactaccactggtcacttgatctacaagcttggaggtattgacaagcgtgtgattgagaggttcgagaaggaggctgccgagatgaacaagaggtcattcaagtatgcctgggtgctc

SEQ ID NO: 119263 - DNA, 254 bp, Glycine max
ccggaaagcacgtgcctcgcgccgtcttcgtggatcttgagcccaccgtgatcgacgaagtccgaaccggcgcgtaccggcagctcttccacccggagcagctgatcagcggcaaggaagacgccgccaacaacttcgcgcgtggccactacaccatcggaaaggagatcgtcgatctctgcctcgacaggatccgaaaactcgccgacaactgcactggtctccagggcttccttgtcttcaacgccgtcggt

SEQ ID NO: 119264 - DNA, 252 bp, Glycine max
tgtgtcttcctcgatccatggctagttgtatggtttatgcgtgttacatttatattgttctgggaatattagtgttgaaaggtgcagaggcacagcgtgcgttctttgtgtttggggattctcttgtggataatgggaacaacaactttttggcaactacagctcgagcagatgctcctccttatggcattgatttcccaaccggaagacccactggccgtttctctaatggctacaacattcctgacttca

SEQ ID NO: 119265 - DNA, 254 bp, Glycine max
ctcttcttctcttgcggctagggttttagcgcagcttcttctagatttaaggaagatgggtaaggaaaaggttcacatcagtattgtggtcattggccatgtcgactctgggaaatccactaccactggtcacctgatttacaagcttggaggcattgacaagcgtgttattgagaggtttgagaaggaagctgcttagatgaacaagaggtctttcaagtatgcctgggtgctggacaaacttaaggctgagc

SEQ ID NO: 119266 - DNA, 251 bp, Glycine max
gccgtagcccttggttgtcgggatcttacaaaactgaacatcagtggttgttcagcctttagtgacaatgctctggcttacctggccagtttttgtagaaagctgaaagttttgaatctctgtggatgtgttaaagctgcatctgacactgcgttacaggcaattgggcattactgcaatcagttacagtttttgaaccttgggtggtgtgaaaatgtcagtgatgttggagtgatgagtttagcatatgg

SEQ ID NO: 119267 - DNA, 249 bp, Glycine max
cttcctcactctcattcgcattggccgcagcagcacgtcctctcgtcaccgtgcaggccctcgacagtgacatggccaccgacgcctccgccaccgtccctatccctgacgtcatgaagtcctccatccgcccggacatcgtcaacttcgtacactccaacatctccaagaacagccgacaaccctatgcagtcagccgccgcgctggccaccagacttccgccgagtcctggggaaccggtcgtgccg

SEQ ID NO: 119268 - DNA, 250 bp, Glycine max
gtcccaaagagctaacaagagattcaagaccggcatggctaatgaagaggaacagaaaaaccacctcttcggcatcaaagatctcggtcacaagactctccttcagagtgatgcactctatcagtatatacttgaaaccagtgtctatccaagagagcacgagtgcttgaaagagatacgcaagatgactgcaaaacacccactgaacatcatggcaacaccagcagacgaaggacaacttctgagcatg

SEQ ID NO: 119269 - DNA, 247 bp, Glycine max
gctccactcactcaaatcctcttcagatctggggggtttgattgcgattctcactctgctgctcggatttgttcgtctgagatgtcgattttaccgaaaggcgattcggttcaaatcaggtaagtttggaacgataacctcgaggaggagttcgcgttgatccgtgaaatcgtggacgagtataactacgtggcgatggataccgagttccccggcgtggttctccgtccggtggggaatttcaaga

SEQ ID NO: 119270 - DNA, 247 bp, Glycine max
aatgctcagtggaactgaaaagctcactctcagaaccctaaccgggaacggcttaggtttcactggttcggatttgcacggtaagaacttcccaagagtgagtttcgctgctaccactagtgctaaagttcccaactttagaagcatagtagtacccaagtgtagtgtctcggcttccaggccaagctcgcagccaaggttcattcagcacaaaaaagaggccttttggttctataggtttctctca

SEQ ID NO: 119271 - DNA, 246 bp, Glycine max
ctcataacacaaagcacaaagcaaagctcatccttgagttaaaaaatggcagcagcttcttccatggctctctcatccccatccttggctggcaaggccgtgaagctgggcccatcagccccagaagtgggaagggtgagcatgaggaagaccgtcaccaagcaggtctcctcaggaagcccatggtacggcccagaccgagtcaagtacttgggcccattctctggcgagcccccgtcctaccta

SEQ ID NO: 119272 - DNA, 253 bp, Glycine max; identical to SEQ ID NO: 107209

SEQ ID NO: 119273 - DNA, 252 bp, Glycine max
gcagaaagcaagctcatcctagagttttaaaaatggcagcagcctcctccatggctctctcttccccatccttggctggcgaggccgtgaagctgggcccatcagcccccgaagtcgggagggtcagcatgaggaagaccgtcaccaagcaggcctcctccggaagcccatggtacggcccagaccgcgtcaagtacttgggcccattctctggcgagcccccgtcctacctcactggcgagttcccaggtg

SEQ ID NO: 119274 - DNA, 251 bp, Glycine max
gctaccatcaaatcattagccattggctaagcactcatgcaattgttgagccatttgtcatagcaacaaacaggcaactgagtgtggttcaccctatttacaaacttctgtttcctcactaccgtgacaccatgaatattaattcacttgcccggaaagccctggtcaatgcagatggtattatagagaaaacattcttgtggggtaggtactctatggaaatgtccgctgtcatttacaaggactgggtt

SEQ ID NO: 119275 - DNA, 246 bp, Glycine max
ctgacctaaaaaggatagattattatgtatcgattgaatcaatgactattcatgattccataagtgacccgatctcatactggatccaagctaaaggaatgttatggtaaaacttcgtctgaaacgatgtggtaaaaagcaacgtgcgacttgaaagacatgattagattagctgtggattcttacatccgccattttttctagtatatagaaatgaacatgctcttgactcgacatcgtttgttc

SEQ ID NO: 119276 - DNA, 245 bp, Glycine max
gaaaaaaaaaaacccttagccaacacaaccatcatggccacctctgctattcagcaatcagcattcactggtcaaactgctctgaagcagctcaatgagttcgtccgcaagaccggtggcgccggcaaaggtcgcactaacatgcgccgcaccgtcaagagtgctcctcagagcatttggtatggccctgaccgtcccaagtacttgggtccattctcggagcagattccatcatacctgaccgg

SEQ ID NO: 119277 - DNA, 244 bp, Glycine max
cgctcttctccgccacttctgaatctattgaatcaacaatcatgtcggacgaagagcaccatttcgagtccatggccgacgccggagcctccaaaacctaccctcagcaagccggtaccatccgcaagaacggctacatcgtcatcaaaggccgcccctgcaaggttgtggaagtttcgacttccaaaactggaaagcacggtcacgctaagtgtcactttgttggaattgatattttcactgc

SEQ ID NO: 119278 - DNA, 243 bp, Glycine max
cagtgaaagagaatccgaggcgaagagaagagaaaaattaagatggaggggaaggagcaggatgtgtcgctgggagcgaacaagttcccggagagacagccgattgggacggcggcgcagagccaagacgacggcaaggactaccaggagccggcgccggcgccactggttgacccgacggagtttacgtcatggtccttttacagagcagggatagcagagtttgtggccacttttctgttt

SEQ ID NO: 119279 - DNA, 246 bp, Glycine max
  unsure (1)..(246): unsure at all n locations
gccagatcatctgcaaggacttgttctccttccttcccaacagccatgtcttctnttcttcccggctcagccgagtcgcttgatctggcagtggaggccaaagacccgtctgagtccatctccattctttatcaggtacttgatgatccttcttcttctccagatgctctgcgcatgaaagagcaggccatcacaaacctcactgagcatctcagggaacagaatagggcagaggatttgcacagc

SEQ ID NO: 119280 - DNA, 246 bp, Glycine max
atccctagctctgtcgttccgtcgttgacgatggcgtttcgggtgcgaaccctgacctccgctctctctttcttctctctctcttgtccatcgcttccgccaatgtcttcttcgaagagcgtttcgatgacgggtgggaaaatcgatgggttaaatcagattggaaaaaagatgagaacgtggctggggagtggaaccacacctctggtcaatggaatggagacgctaatgacaaaggtattcaaa

SEQ ID NO: 119281 - DNA, 245 bp, Glycine max
cccttctccaacatgccaaacgacagcgttctgagtcttttcttcttcgttaccctcttcacatgccttctctctgctaattcccacgatgaccatattttcctaccgagtcaactccatgacgatgactcagtgagttgcactgctaccgacccaaaccttaactacaagccggtgatcggaatcctgacccaccccggcgacggtgcctctggccggctcagcaacgccaccggggtttctta

SEQ ID NO: 119282 - DNA, 243 bp, Glycine max
ggcaagccccactcaaccaccacacttctcctcgttcacgctacccctttctgctcttcttctacctttcaagttttaaaagtataaagatggcagagacattcctatttacctcagagtcggtgaacgagggacaccctgacaagctctgcgaccaaatctccgatgctgtcctcgacgcttgcctcgagcaggacccagacagcaaagttgcctgcgaaacatgcaccaaaaccaacttgg

SEQ ID NO: 119283 - DNA, 241 bp, Glycine max
ctcgcttgtgctgccttcgtttgcgtttttatcacagaggaattaacatatatatagcaagcatggcagtcacactctacgaccttagctcttcctctgggttgaagaaacttgatgagtaccttctcccacgcagttacatcaccgggtaccaagctacaaaggatgatcttactgtttatgcagctttgccaactgctccatcagatgaatatggaaatgtttccaggtggtacaagca

SEQ ID NO: 119284 - DNA, 248 bp, Glycine max
ctcaaacctcttcgttccttcgattcattccatttcttccaaaatggccaaagacccagttcgcgttctcgtcactggagccgcagggcaaattggatatgctcttgtccctatgattgctaggggagtgatgctgggtcctgaccagcccgtgatcctccacatgcttgacattcctccagcagcagagtcgttgaatggggttaaaatggaattggtggatgctgcattccctcttcttaaaggtg

SEQ ID NO: 119285 - DNA, 247 bp, Glycine max
atggctcccaagggtttaatctttttggctgtgttatgcttctcagcactgtcactgagtcgttgtcttgcggaggataatggacttgttatgaacttctacaaggaatcatgccctcaggctgaagacatcatcaaagaacaagtcaagcttctctacaagcgccacaagtacactgctttctcctggctcagaaacatcttccatgactgtgctgttcagagttctgatgcttcactgttgctgg

SEQ ID NO: 119286 - DNA, 244 bp, Glycine max
cccgtacaaagcaaactgctcgtaagtcaactggaggaaaagctcccaggaagcagcttgcaaccaaggctgcacgtaagtctgcaccaacaactggtggtgtgaagaagcctcatcgttatcgccctggaactgttgctcttcgtgagattaggaaataccagaagagcactgagctcctaatcaggaagcttcctttccagaggttggttcgtgaaattgcccaggatttcaagactgatct

SEQ ID NO: 119287 - DNA, 261 bp, Glycine max
cacaaaccattcccttttctcactacggcaatgaccacccaagcttccaccttcgccgtcgccgttccctccgtcgcaacccctttccgccgccaccggaatcccttcgttgttcgagcccaagcggaaccttcagataaatccgttgaaattatgaggaagttctcagagcaatacgcccgtaagtcaggaacatacttttgtgttgacaagggggtcacttctgttgttatcaaggggttggctgaccataaagatacg

SEQ ID NO: 119288 - DNA, 238 bp, Glycine max
gaaattcaccatggttttgctgacagaaattctagggacaaccatcgattgagttgtccttatagaggcagtgcttcaacagattatggaggttcaaattttcatgttaatgaggcaaagccggtcatattcccccaacagacggagatgtagtaggttttggttgaacaaaggactgttgggggaatatgacctactactactccgtctgttgttaacttggttccatctgttattg

SEQ ID NO: 119289 - DNA, 243 bp, Glycine max
gagaatgcagtgcaggccaatatggagcttgagttccagagaaacaaggagctatttgcttttctgaaatgggggtcaaatgctttccgtaatatgcttgttgtccctcctggttcgggtatagtacatcaggttaatcttgaatatcttggacgtgttgttttcaacactgagggcttgctctatcctgacagtgtggttggaactgattcacatacaacaatgatagatgggcttggagtt

SEQ ID NO: 119290 - DNA, 244 bp, Glycine max
ctcgagccgcttcagcctttctctctaactccctcactcacactcacagttaagcaatggcacggaaaggaggaaaggggcttcttgcagcgaaaaccaccgcggctaacaaggacaaagacaaggacaagaagagacctatttctcgttcatctcgtgccggaatccagtttcctgtgggacgtatccataggcagctgaaacaaagggtccaagctaatggacgtgttggtgccactgctgc

SEQ ID NO: 119291 - DNA, 244 bp, Glycine max
gcgtaatgtcatggaagagatctcaaacatcagttgtcagtgttaccgcaatgtagtgtatgaaaatccagaattcctggcctacttccatgaagccacaccagaggcagaacttggcttccttaacataggtagccgccctacaagaaggaagagctcagtaggaatcggacaccttcgtgcaattccctggttatttgcatggacacaaacaagattcgttcttccagcttggcttggagtc

SEQ ID NO: 119292 - DNA, 102 bp, Glycine max
ggggaagtcatatggctcatgcctatgatttttacaagcctaatcttgccagtgaatatccagtggttgatgggaagctttctcaaacttgttaccttatgg

SEQ ID NO: 119293 - DNA, 236 bp, Glycine max
ttgttcttctctctcaacaacttcacctttttgctcctcggtcatgtcttacgtcaatggcaagtaccatgatgagcttatcgccaatgctgcgtacattggcactcctggaaagggtattcttgctgctgatgagtcaacagggacaattggcaagcgtttggccattatcagtgtagagaacattgcatccaacaggcgagctcttagggagcggcgttccactgctcctggtg

SEQ ID NO: 119294 - DNA, 228 bp, Glycine max
tccagatcttgcaaaaaaaaaaaaacacaatggcagcgagcgctccaactccacgcgaagagttcgtgtacatggcgaactggcggaacaggccgagcgctacgaggagatggtggagttcatggaaaaggtctccgcctccgccgaaagcgaggagctgaccgtggaggagcgcaacctcctctccgtcgcctacaagaacgtaatcggcgctcgccgcgcctcctg

SEQ ID NO: 119295 - DNA, 242 bp, Glycine max
  unsure (1)..(242): unsure at all n locations
gtccgctgcgactctctttccttccctctttttccgaatctgaatcgaaatggcttcggagactgagacgtttgcttttcaggccgagatcaaccagctcctcagtctaatcatcaacaccttctacagcaacaaggagatatntcttcgtgagctcatcagcaatgcctctgatgctttggacaagattcgatttgagagtcttacagacaagagcaagcttgatgctcgcaagagttgtt

SEQ ID NO: 119296 - DNA, 236 bp, Glycine max
gagacacaatacagagtgagttgttgctccttcgccacaactctctgccaacatgggtatctccagagattctatgcacaagaggcgtgccactggtggcaagaagaaggcctggaggaaaaagagaaagtatgagcttggtcgccagcctgctaacactaagctgtcaagcaacaagacagtcaggaggatccgtgttagaggtggaaatgtgaaatggagggcattgagattgg

SEQ ID NO: 119297 - DNA, 233 bp, Glycine max
gtgaatagcaatgtagacattagaggacatgactttcaacttttaccatttggttctggtcgaagaggatgtcctgggattcaattgggtctgaccacatttggccttgttttggctcaattagtgcattgcttcaattgggagcttccatttggtgtgtctcctgatgacttagatatgagtgagatatttggcctttcactaccaagaagcaagcccttgctagctatacc

SEQ ID NO: 119298 - DNA, 247 bp, Glycine max
cttttcacttctctctagggttttagcactctctctctctctcgttttcgttcttcctttctgcctctctcagtcacacaccttctcgatgaccaacgacaacatcgccgtgacagatctcacttctgccctcaatgaagataatcgcgccgacctagtcaatgctctcaagagcaagattcagagtctggctggggcgcattctgatgttctagagactctatccccgaatgtcaggaagcgtgtt

SEQ ID NO: 119299 - DNA, 251 bp, Glycine max
cgtttctgtgcgatgcttcgccacggcgttccgttccgccactctaaaaacgctagtttctccataaggcagaaatcgagcggcggaagaaggccgaagaagaaaacgtaccacagagtgcccgaacttgacagagtaatggagctccgcaagaagccatccatgattctccacctcagctccctcatccaatcccaaccccaaaccctcttcctccgcgacctcgagaagcacgtgggcttcgtccgcaa

SEQ ID NO: 119300 - DNA, 239 bp, Glycine max
tgaaaacccaaagtgcttctctcctctgtctttttctctctcttgctatccttttggctagtggcactgctgcaagtgtaatcccaagaagcgcagtgccaagccaccatgtttcaacattcaacagaagcctttttccttccacttttctctttggatttggttcttctgcttaccaggcagaaggagcagcaagtgtagatgggagaggaccaagcatatgggacacctacactaga

SEQ ID NO: 119301 - DNA, 238 bp, Glycine max
ctttcactcttcttcgtctcaaacctcttcgttccttcgattcattccatttcttccaaaatggccaaagacccagttcgcgttctcgtcactggagccgcagggcaaattggatatgctcttgtccctatgattgctaggggagtgatgctgggtcctgaccagcccgtgatcctccacatgcttgacattcctccagcagcagagtcgttgaatggggttaaaatggaattggtgg

SEQ ID NO: 119302 - DNA, 238 bp, Glycine max
gacccgtgagcatgctcttcttgctttcaccctgaggtgtgaagcagatgatctgttgctgtaacaagatggatgccactaaccccaagtactcttcggctaggtatgatgaaatcgtgaaggaagtctcttcttacttgaagaaggttggttacaacccagacaagattccctttgttcccatctctggttttgagggtgacaacatgattgagaggtccaccaaccttgactggta

SEQ ID NO: 119303 - DNA, 235 bp, Glycine max
ctcttcttctcttgcggcaagggtttagcgcacttcttctagatttaaggaagatgggtaaggaaaaggttcacatcagtattgtggtcattggccatgtcgactctgggaaatccactaccactggtcacctgatttacaagcttggaggcattgacaagcgtgttatcgagaggtttgagaaggaagctgctgagatgatcaagaggtctttcaagtatgccttggtgctgga

SEQ ID NO: 119304 - DNA, 237 bp, Glycine max
ctgtaaagtgcaaagcctctattttttcttgtgaatttgaaggacgatgagttccacagaggtcgcagccaaaacgaagaagggtggaagagggaaacccaagaccataaagtccgtttcccgttcctccaaagcaggtcttcagttccccgtcggccgcgtcgctcgctacctcaaggatggtcgctatgaccagcgcgttggttccggttcccctgtttacctatctgcggttct

SEQ ID NO: 119305 - DNA, 238 bp, Glycine max
gaagaagaagatggagatgtatcagatctggagcaggagaatagcgttgggagcgttcgcgtttgttctgcttttcctatcggcctcagcagacgacgtcgttgtgctctctgaagataacttcgagaaggaagttggtcaggacagaggagctctcgttgagttctatgctccttggtgtggacactgcaaaaagcttgctccagaatatgaaaagcttggtagcagcttcaagaaa

SEQ ID NO: 119306 - DNA, 239 bp, Glycine max
caaccatcgagtggcatcctgatgacaaatgacattgctgatagcaatcctgaggaggctgtaccctgctttgcgttgtccaaaaatgactcgtatgtaatgtctgcatcaggagggaagatatctctgtttaatatgatgacttttaagactatgacaactttcatgcctccgccacctgcggcaacctttctagctttccatcctcaggataacaatattatcgctataggcatgga

SEQ ID NO: 119307 - DNA, 241 bp, Glycine max
gtctctggccaccgaaatgggaaggctagattcagaaggttacgttctcaccgttttggctccaaacgacgaagccatggcgaagttaacgacggatcagttgagcgaacctggcgcaccggaacagataatgtattatcacattattcctgagtatcaaaccgaagagagtatgtacaatacggttagaaggttcggtaaggttagctacgatacactgcggttaccgcacaaggttctg

SEQ ID NO: 119308 - DNA, 250 bp, Glycine max
aacactcataacacaaagcacaaagcaaagctcatccttgagttaaaaaatggcagcagcttcttccatggctctctcatccccatccttggctggcaaggccgtgaagctgggcccatcagccccagaagtgggaagggtgagcatgaggaagaccgtcaccaagcaggtctcctcaggaagcccatggtacggcccagaccgagtcaagtacttgggcccattctctggcgagcccccgtcctaccta

SEQ ID NO: 119309 - DNA, 245 bp, Glycine max
cgacgcggagacggcgtcgtcggactcgacaacttcaacgactactacgatccgtctctgaaaaaagcccgcaagtccctcctcgccaagcatgacgtcttcatcgtcgatggcgacctcaacgacgccaagctcttggcaaagctcttcgatgtggtcgcttacacccacgtgatgcacctcgcggcgcaggccggggttcgctacgccatggagaatccccactcctacgtccacagcaacat

SEQ ID NO: 119310 - DNA, 242 bp, Glycine max
cgcaacccatcactctttctttcttcctcttccccccacatactattacatcaaatctagggtttcctctgcgtctagggtttcttccttctgcaaccatcaatggcggcaatcacagctccccagcaccgatcctcgaagacggagtcctacgttgacaacaagcgcaaggatgacatccgccacgccaacatcgtggccgcacgctccgtcgccaacgcggttcgcaccagtctgggccc

SEQ ID NO: 119311 - DNA, 240 bp, Glycine max
cgaaatcctaaaagcacacccccttaaactatctctgtttatctcttcactcccttttatcttcttcaagggcaatggacaatggacgacactacaacccccgcaccgtcgaagaggttttccgggacttcaagggccgccgggctggcatgatcaaagccctcaccactgatgtcgaggaattttaccagcagtgtgatcctgaaaaggagagtttatgtctgtatggattccccactg

SEQ ID NO: 119312 - DNA, 240 bp, Glycine max
aaatccggcaaggcctgcctgtgagaccatctcaatttcttttctctttgtcgcaaagagaagagatctgcctcctttttccttcccaaatcaaatctatctcttcttcaagttgaaaatggggctgtcgttcaccaagttgttcagccggctgtttggcaagaaagagatgcgtatactaatggtgggtctcgatgctgcgggtaagaccaccattctgtacaagctcaagcttggaga

SEQ ID NO: 119313 - DNA, 238 bp, Glycine max
gcaagctcatcctagagttttaaaaatggcagcagcctcctccatggctctctcttccccatccttggctggcaaggccgtgaagctgggcccatcagcccccgaagtcgggagggtcagcatgaggaagaccgtcaccaagcaggcctcctccggaagcccatggtacggcccagaccgcgtcaagtacttgggcccattctctggcgagcccccgtcctacctcactggcgagttc

SEQ ID NO: 119314 - DNA, 239 bp, Glycine max
ctcactaacgcattttttctctatctctctctattcttcacccgaaactctctattttctcatgggttcggatacagagagagaaagctgcaactctcgccacttcgcatggctcatgaagtcatgcttccccaacccaaacgacgccgtcgcgaaactcgcgtcaccgccgcaatcccaccgtaactcccctgtacccgcaaccaccatatcctccctccccgatgacatcgttttag

SEQ ID NO: 119315 - DNA, 246 bp, Glycine max
aatggcaacagaaacaaaagtggcagtattaggtggcatcaccgaagtgcagggagctgccaacagcgtcgagatcaacaatctcgctcgctttgctgtagaggaacaaaacaaaagagagaattcagttctggagtttgtgagggtgattagtgcaaagcagcaagtggttgctggagtgaattactacataacattggaagcaaaagatggtgagattaaaaatgagtataaagcgaaggtttg

SEQ ID NO: 119316 - DNA, 237 bp, Glycine max
ctcgttctcccgactcaaccctgactcgcccgattccaaactcaaactcgcgctcatggcgaatcacccttccgacgctcccgccgacgacttcctcgaacaaattctcggcctcccgaccttcgcttccgccgactccggcctctccgccgccgatgtcggcctcgccggtgcggccactcagtctccgatgatgctgcagctcagctccgccgacgccaacgctcacctcgccgg

SEQ ID NO: 119317 - DNA, 234 bp, Glycine max
agatcatcgacacgctcgtgggtcccaccctcaaggacgaggtgatgaagatcacgccggtccagaagcagacccgggccgggcagaggacccggttcaagaccttcgtcgtcgtcggagacaacaacggccacgtcgggctgggcgtgaagtgcagcaaggaagtggcgacagctattcgtggcgcgattattctggcgaactgtctgttatccccgtgaggagggggtactg

SEQ ID NO: 119318 - DNA, 235 bp, Glycine max
tcgcatctgaactctcagtcgcttctcgaaccctactttcttccgcggtgattgcatttgaattcctgtaatggcgattgataatatttttaaaaatgaagctagtgcagaaaaaggagaccgtgccagaatggcttcttttgttggagccatcgctattgctgacttagtgaagacaaccttggggccaaagggaatggataaaattttgcagtcaacaggtacaggacgtgaa

SEQ ID NO: 119319 - DNA, 236 bp, Glycine max
gaccgattctgcaaaagatagaaagaacaaggtaaacaaacatgcattttctggtgggcaagattctatagagaaacataggcaattaggggctaatcttgaggtagatataccagtcaaataccttacttttttcttagaagatgatgatgaacttgaacacataaagaaggaatatggagaaggacgcatgttaactggcgaggtaaagcagcggctagttcaagttttgactg

SEQ ID NO: 119320 - DNA, 247 bp, Glycine max
cttcccagcctggatttggctatcaacaacaacttatgcctggtatgaggccaggtgcagctcctgtcgcccgaattctttcgtgccaatggttcagcagggacaacagggacagcgtcccggtggaaggcgtccaggtgcagttcagcagtcgcagcagccagttcctatgatgccacagcagatgcttcctaggggacgtgtctatcgttatgctcctggtaggggtattcctgatgttcctata

SEQ ID NO: 119321 - DNA, 245 bp, Glycine max
cgacgcggagacggcgtcgtcggactcgacaacttcaacgactactacgatccgtctctgaaaaaagcccgcaagtcactcctcgctcagcatgacgtcttcatcgtcgatggcgacctcaacgacgccaagctcttggcaaagctcttcgatgtggtcgcttacacccacgtgatgcacctcgcggcgcaggccggggttcgctacgccatggagaatccccactcctacgtccacagcaacat

SEQ ID NO: 119322 - DNA, 236 bp, Glycine max
gagaagcagaaggagcaaaagcaatggcgccgaagaagccgagaaccacgacaaggaaccctgatttggttagggggattggcaagtattcgaggtcgcagatgtaccacaagaggggcatctgggccatcaaggccaaaaacggtggcgttttgccccgccacgatcccaagcccaagcccgaggccccggcccagaagccgcccaagttctaccccgcggacgatgttaagaag

SEQ ID NO: 119323 - DNA, 234 bp, Glycine max
acgaaaccctcttcatcttgttctatctgtgacgagcatcatggcctcaagagcagtgttattgttggctatgtgtgtgcttccggcgatggttgtggccattcgcccagcaaagaaccctttttgcgtgaagggtcgtgtctactgtgacccttgccgtgctggttttgagacctcagctaccacctacattgctggtgctgagattatgttgcaatgcaagagcagggttag

SEQ ID NO: 119324 - DNA, 235 bp, Glycine max
gagaagcagaaagaggagacgaagcaatggcgccgaagaagccccgaaccacgtcgaggaaccctgatttggtcaggggaattggcaaatattcgaggtcgcagatgtaccacaagaggggcatctgggccatcaaggccaaaaacggcggtgttttgcccctccacgatcccaagcccaaacccgaggccccggcccagaagccgcccaagttctacccggccgatgacgtgaa

SEQ ID NO: 119325 - DNA, 251 bp, Glycine max
cttcaacaatggtgctcgaggcgacgatgatctgtatcgacaattctgaatggatgcgtaacggtgattactctccttctcgatttcaaggtgaagcagacgctgtgaatctcatttgcggagctagtacgcagtctaatccagaaaatacagtgggagttctcacaatggcagggaaaggcgttcgtgttttggtcacccctaccagtgatctgggcaagatcttagcctgcatgcatgggctagatata

SEQ ID NO: 119326 - DNA, 244 bp, Glycine max
gtttctattcctcactaggagctcctctccactggttcttcatctgcatgcacacagttgcatagttttggaaaccaagaagggtagcatcaacaagcagttctgaaaatggagatcaccaatgtcagtgagtatgaggctattgcaaagcagaagttgccaaagatggcgtttgactactacgcatctggtgcagaggaccagtggactctgcaagagaacagaaatgccttttccagaattt

SEQ ID NO: 119327 - DNA, 241 bp, Glycine max
ggctctctcatgcacttgcagtgagcgcaaacgacaaccctaattgcggtattctcagtgccttcgagagaaagaaaaaatggcagataatcttgttctccgtggcaccatgcgcgcccacaccgacgttgtgacggcgattgccactcccatcgacaactccgacatgatcgtcaccgcctcacgcgacaaatccatcatcctctggcatcttaccaaggaggacaagacttacggtgtc

SEQ ID NO: 119328 - DNA, 231 bp, Glycine max
gcagacttaacaacagcacaaagcgggttactgtctgttcaagctaccatctctctctctctttcttagtgcctccttgccagaagttaaaatggcccaagaaactttcctattcacatctgaatcagtgaacgaggggcaccctgacaagctctgtgaccagatctccgatgctgtgctcgatgcatgcttggagcaggaccctgacagcaaggttgcctgtgaaacctg

SEQ ID NO: 119329 - DNA, 231 bp, Glycine max
gtgctggaaagcacgtgccacgtggcgtgtttgtagatcttgagcccactgttattgatgaggtgagaaccggaacttaccgccagcttttccacccagaccagctcatcagcggcaaagaagatgccgccaacaactttgcccgtggccattataccattgggaaagagattgttgatctgtgcttggaccgcatcagaaagcttgctgacaattgcactggactccaag

SEQ ID NO: 119330 - DNA, 229 bp, Glycine max
caatccttttgtgtatgcaaaatgagaccatgcaaatgcaaatgcaatgttctctctgctctcattcttcttgtcacattcctttttgcttccgtccactgtgaagacccatatcggtacctcacttggaaggtcacctatggtgacatttatcctcttggtgttaagcaacaggggatcttaatcaatggacagtttccggggcctcaaatagatgctgttacaaatg

SEQ ID NO: 119331 - DNA, 228 bp, Glycine max
ctttcgcattgcaagcgctctctttctttgcttttccttccccctttcagtttcttcaacgctgcaactatccatggcaaaccgctggctcagacccgaggtgtatccactgttcgctgcggttggtgccgctgttgggatctgtggattccaattggttcgtaatatctgcatcaaccctgaagtcagggtgaacaaggagggaagaaaggcaggagtgttggagaa

SEQ ID NO: 119332 - DNA, 232 bp, Glycine max
gccctcgattttgccctaaagtactctcagtcacaacagacaccgtcgtcgtcgtcgtcgtcatcaatggcaccgaagcagaccaaggctgagaagaagatcgcttacgatgcgaactgtgcgacctaatggaggagtacggccagatcctcgttgtgaactccgataacgtgggatcgaaccagctccagaacattcgcaagggtctccgtggcgactccgtcgtcctcat

SEQ ID NO: 119333 - DNA, 233 bp, Glycine max
ggcgtaggcacacccgcaaggtacgtctacatggttttagacaccggaacagacgtcgtttggctccaatgcgccccttgccgcaaatgctacacccaagccgaccccgtttttgaccccaccaaatcccgaacctacgccggaatcccctgcggggcccctctctgccgccgcttggactcccccggctgcaacaacaagaacaaggtttgccagtaccaggtttcctacgg

SEQ ID NO: 119334 - DNA, 238 bp, Glycine max
ccagtgaggattacagattctatgctatttcagctgagtaccctgaattcagcaacaagggtaagacactagtctttcaactctctgttaagcacgagttgaagcttgactgtggtggtggctacatgaagttgctcagtggggatgttgatcagaagaaatttggcggggatactccttacagtattatgtttggcccagatatctgcggttacagtaccaagaaagttcacgctat

SEQ ID NO: 119335 - DNA, 238 bp, Glycine max
taagatccttccatctagcagcaccttaggatggcatagccttaaagttaagggcgaggttcaaacgaagaaaggcttatggtggatacctaggcacccagagacgaggaagggcgtagtaagcgacgaaatgcttcggggagttgaaaataagcgtagatccggggattcccgatataggtcaacctttcgaactgctgctgaatccacgggcaggcaagagacaacctggtgaact

SEQ ID NO: 119336 - DNA, 233 bp, Glycine max
gtgatacaatacagagtgcgttgttgctccttcgccacaactccctgccaacatgggtatctccagagattctatgcacaagaggcgtgccactggtggcaagaagaaggcatggaggaagaagagaaagtatgagcttggtcgccagcctgctaacactaagctgtcaagcaacaagacagtcaggaggatccgggttagaggtggaaatgtgaagtggagggcactgagat

SEQ ID NO: 119337 - DNA, 257 bp, Glycine max
attccattcattcgttcattcccaggttgtgatggcagcagcaccagcagctaccttcgctattggaaccaccggttccctcggccaaagaggaagctcgcttcctcaatcaaagtcctttgggttgaaattcaagtctctgaatcatttgaagagcttctgtggcctcaaggccatgtcatccgtgagatgtgagtcggaatcgtccttcttcggtaacaaaaccggtgctgctctacgggcgtcttttgcatcca

SEQ ID NO: 119338 - DNA, 254 bp, Glycine max
cggctcgagcagctagcgggtgaaggtttctccgccgcgccttatcacgccgtccgaaagcgtcgttgctgcgaaaccctagacagaagcgacgccgtagatggaggtggagcccgtggagccacagtcgctaaagaagctaagcttcaagtctctgaagcgcgctctcgatctcttctctcccattcacggacacctcgctcctcccgatgccgaaagcaagaaaatccgcactagccacaaggtgagcgtgg

SEQ ID NO: 119339 - DNA, 251 bp, Glycine max
  unsure (1)..(251): unsure at all n locations
gaccgattctgcaaaagatataaagagcaaggtaaacaaacatgcatttaatagtgggaangattctatagagcgacataggcaattaggggctaatctagaggtgaatgtgccagtcagataccatacttttatcttagaagatggtggtgaacttgaacacataaagaaggaatatggagaaggacgcgtgttaactggcgaagtaaagcagcggatagttcaagttttgactgagatagtggagaagc

SEQ ID NO: 119340 - DNA, 253 bp, Glycine max
cgcattgcttcgcctcacaacagcagctgcagcagcaatggctcccaaacgaggtggaaaggctccggctcttgccgctaagaagaagcctgagaaggtcacgaatccgttgttcgagaagcgtccgaagcagttcggaatcggaggggcgttgcctccgaagagagacttgactaggttcgtgaagtggccaaagaatgttcaaattcagaggaagaagaggattctgaagcagaggttgaaggttccccca

SEQ ID NO: 119341 - DNA, 254 bp, Glycine max
gctagcgggtgaaggtttctccgccgcgccttatcacgccgtccgaaagcgtcgttgctgcgaaaccctagacagaagcgacgccgtagatggaggtggagcccgtggagccacagtcgctaaagaagctaagcttcaagtctctgaagcgcgctctcgatctcttctctcccattcacggacacctcgctcctgccgatgccgaaagcaagaaaatccgcactagccacaaggtgagcgtggagtatggcgga

SEQ ID NO: 119342 - DNA, 256 bp, Glycine max
cttttacccactcctcgtcagggaagatctgaagcagcgctagcagcacacgtcctctaatggacgccgactcctctggagaagaagtggttattaaaacaagaaaaccatgtactatcacaaagcaaagagaacgatggacagaggaggaacataacagatttctagaagcctttaagctatacgggcgagcatggcagcgcatagaagagcatataggaacaaagactgctgtacaaatcaggagtcatgctca

SEQ ID NO: 119343 - DNA, 258 bp, Glycine max
ctcagaattctctaaaagagatctttttctgctctttgaagaaagaagggtctttgcttgattttggagatgtctctgctctcagatctcatcaaccttaacctctccgataccaccgagaaggtgatcgcagagtacatatggatcggtggatcaggaatggacctgaggagcaaagcaaggactctcccaggaccagttagcgacccttcagagcttcccaagtggaactatgatggttccagcacaggtcaagct

SEQ ID NO: 119344 - DNA, 255 bp, Glycine max
ggtttgactattttcgctcctaacgatgaagcgtttaaggcgaaatgcgtacctgatttgagcaagctcacgaacgctgaagttgtttcgctcttacagtatcacgccgccgctaagtatcttcccgttggatctctgaaaacgacgaaggattcaattaacacgttggcctccaacggcgccggaaagttcgatttgaccgtttccgtcgccggagattcccttacgctccacaccggagtcgattcctcgagg

SEQ ID NO: 119345 - DNA, 253 bp, Glycine max
cttccatcggcgcggcacccacacacacagttcgtcggaatgggaagggtgattcgcgctcagcgtaagggtgctgggtcggtgttcaagtctcacactcaccaccgcaagggtccggcgaggttccgcagcctcgacttcggcgagcgcaacggctacctcaagggcgtcgtcaccgacatcatccacgaccccggtcgcggcgcccctctcgccaaggtggcattccgccaccccttccgctacaagaagc

SEQ ID NO: 119346 - DNA, 254 bp, Glycine max
ttcgactccacggcgcagatccgaggagtttgggaaaccctaattcattctttttgcttctatctctattaccctaacaccagtgatggcaggtttggctccagaatgatcgcagtttgatgctcggcaatatgactctaagatgaatgaattgctttccgctgatggacaagaatttttcacttcatatgatgaagtctatgatagttttgatgcaatgggccttcaagaaaatcttctcagaggcatatatg

SEQ ID NO: 119347 - DNA, 263 bp, Glycine max
tgctatctctcccattctctcgcatctcaatacccttttgatttgtgaaaggaaagcaaacatgcttgatcaggtccaacaccctacgatcatggacaaggttgctggccagctccatctccgttctggtgtttctggtattaggagttatgaaggagcctactgccaccccacaatgtaccaaagaccctcttttgggaattactcgaatgctgcattgcagtatcctgtgatgccctcatgcaaagctactatggatttgt

SEQ ID NO: 119348 - DNA, 247 bp, Glycine max
atacattgtagtatcactattgtctcggaatttgttcttttgagttatggcaagcttaaaggtttcatgtgtggttttgatgtgcatggctgtgatgagtgcaccaatgatggtgcgagccgtgtcatgcaatgatgtttctgtgaacctagcaccgtgcctatcttacctgatacagggtggagatgttccagaatcgtgctgtagcggagtgaggaacattctgggatctgccaggaccaccttt

SEQ ID NO: 119349 - DNA, 251 bp, Glycine max
ggaaaatggctcttcttggatttcttctgggacttttcttaatggtcactcatgtcaaggggtatggttttggaggttggaccaatgcacatgccaccttctatggaggtggtgatgcttctgggacaatgggtggggcttgtggttatggaaatctgtatagccaaggttatggaactgatacaacagcactgagcactgctctgttcaacaatggcttgagctgtggtgcatgctatcaaattaaatgt

SEQ ID NO: 119350 - DNA, 256 bp, Glycine max
gaaaccaccaagtactactgcacagtcatcgatgcccccggacatcgtgactttatcaagaacatgattactggtacctcccaggctgattgtgctgtccttatcattgactccaccactggtggttttgaagctggtatttctaaggatggacagactcgtgagcatgctcttcttgctttcacccttggtgtgaagcagatgatctgctgctgtaacaagatggatgccactaccccgaagtactctaaggcta

SEQ ID NO: 119351 - DNA, 258 bp, Glycine max
ggtccttcttccgccgccccaaggagatcgagaccgccgacaaagttcccgccttcgtcgacaccttctacaatctagtcaccgacatctacgagtggggctggggccagtccttccacttctccccctccatccccggtaagtcccaccgcgaggccacgcgcctccacgaggagatggccgtcgatctcatcgaggccaagcccggcaacaaaatcctggacgtgggctgcggcgtgggcgggcccatgcgggcca

SEQ ID NO: 119352 - DNA, 255 bp, Glycine max
ggcacattgaagccattagccattgagttaagtttgccacatcctaggggacatgagtttggagccgatagtagagtagtcttgcccccagccgcagtcaacagcgctgaaggcacaatttggttaattgccaaggcttatgttgctgtcaatgacactggctatcaccaactcataagccactggttaaatactcatgccacaattgagccatttgtcatagcaacaaacaggcatcttagtgtgctccaccct

SEQ ID NO: 119353 - DNA, 255 bp, Glycine max
tggatgttgcacattttttgtttggaatctttgggaatgcttccgctctgttcctcttcttggctccagtgatcacattcaagaggattataaagaacagatccacagagaagttctcgggcattccatatgtcatgacactgctcaattgtctcctttcagcttggtatggtttgccttttgtgtctccccacaacatattagtctcaacagtgaatggcactggatcattcattgaaatcatatacgtgttaa

SEQ ID NO: 119354 - DNA, 253 bp, Glycine max
ggttcgactatattcgctcctaacgatgaagcgtttgaggcgaaaggcgtacctgatttgagcaagctcacgaacgctgaagttgagtcgctgcttacctatcacgccgccgctaagtatcttcccgttggatctctgggaacgacgaagtattcaattaacacgttggcctccaacggcgccggaaagttcgatttgaccgtttccgtcgccggagattgccttacgctccacaccggagtcgattcctcga

SEQ ID NO: 119355 - DNA, 239 bp, Glycine max
gtgctgcgtcggctagtctaagtcatggctctagatcttgcacgcaaccaaagcaaacaagaatgctttcaagactctgattgcggcagagtacagtggcgtccaagtggaattggcccctaatttcgagatgggtgtctctaatagaactcctgaattccttaaaatgaatcccataggaaaggttcctgtcttggaaacgcccgatggtccagtctttgagagcaatgccattgctc

SEQ ID NO: 119356 - DNA, 255 bp, Glycine max
ctcaaatctcttcgttccttcgattcgttccatttcttccaaaatggccaaagacccagttcgcgttctcgtcactggagctgcagggcaaattgggtatgctcttgtccctatgattgctatgggagtgatgttgggtcctgaccagcccgtgatcctccacatgcttgacattcctccggcagcagagtcattgaatggggttaaaatggaattggtggatgctgcattccctcttcttaaaggtgttgttgc

SEQ ID NO: 119357 - DNA, 248 bp, Glycine max
ctcatcattcccacttcccaatatggaatgctgcataatctccaggctcaagacccaacccatatggttcgcgcttctctttattgtgggattgttaacgattctcaaattggcattcgttgttctcagatgggtctacgtcaatttcctcagaccaccgaagaatctcaaaaagtacggatcttgggccgtggttactggacccaccgacggcattggaaagatcttcgccttcgagctcgctcgca

SEQ ID NO: 119358 - DNA, 245 bp, Glycine max
tggaaaattttcgacgggccattggtctgcgtatcaaggaaaacaaggaagtatacgaaggggaggtcaccgagctctctccagaagaaactgagagcgtaacaggtggttatggtaaaagtattagccatgtcatcattggattgaagacagtgaaaggaacaaagcaactcaagttggatcctaccatatatgatgccttgattaaggaaaagatagctgttggcgatgttatatacattgag

SEQ ID NO: 119359 - DNA, 251 bp, Glycine max
cttttgttttcaaggtttggaaaaccaagaaacttttagaaagacttttggcaaaggaagaagaagaagaaggaaaagaaagggctgaaagagaagatcgaggagaaaatagagggtgatcatcatcatcacaaggatgaggacacaagtgtccctgttgagaaagttgaggatgttgaaacagcacatgctgaaggaaagaaggggttcctcgacaaggttgaggagaagctaccagggcacaagaagac

SEQ ID NO: 119360 - DNA, 239 bp, Glycine max
ggccgttgatgcatttcgccaggccttgatcatggagggattgcttcctgaggaacacgatgattaccacgtcatgttaaggttcctggaagcgaggaagtttgatgttgagagagcaaagcatatgtgggctgatatgctacaatggaggaaggagtttggtactgacactattgtggaggattttgagttcaaggaaataggtgaggtggtgaattattatccacatggccatcacg

SEQ ID NO: 119361 - DNA, 247 bp, Glycine max
tgacgatggcgtttagtgtgcgaaaccctgagctccgctttctcattcttctctctctcttgtccatgacttgcgccaaggtcttcttcgaggagcgtttcgatgacggatggggaaatcgttgggttaaatcatattggaaaaaagatgagaacctggctggggagtggaaccacacctctggccaatggaatggagacgctaacgacaaaggtattcagaccagtgaggattacagattctacgc

SEQ ID NO: 119362 - DNA, 254 bp, Glycine max
gtggtgccttatcgctgtgggtatcatcttcttcttcctctttctgatctctcttctttctctacgccgcacgccgaaaccatggccggaaaaggagagggtcctggtatcggaatcgatctcggaaccacctactcttgcgtcgttgtgtggcaacatgaccgcgttgcaatcatcgcgaacgaccaagggaacagaaccacgccgtcttacgtcggattcactgacaccgagcgtctcatcggtgatgcggc

SEQ ID NO: 119363 - DNA, 254 bp, Glycine max
gctgaagtgtgtgatgcgaacccacagttaattttgagtggggagcttcgtgcccttcagccagtttttcagatttatggccgtcgacaggttttctctggacctatagttaccttgaaggtgtttgaagacaatgttttggttcgtgagttccttgaagagaaaggcaatggtagagttctagttgttgatggaggcgcgagtttacgctgcgctatattgggtggcaacctgtggtacaagctcaaaacaat

SEQ ID NO: 119364 - DNA, 246 bp, Glycine max
tcatgatttgatttgacacaggaggcacgttgctatgagttgctcttgctctgttgtgcaattgcaagtgaagaagccctaggtttttgcagatcgggaaatgacgacggcaacataccctccaccgccaccttagtacgggctttacaaagattacttggcaagaccctaattctgctcccgagcctccaccacctattgaaggcacttatctgtgttttggagccagttagactactagtgatg

SEQ ID NO: 119365 - DNA, 251 bp, Glycine max
cggctcgagtactcattctccatacctcaacgaagaggttaaagagtcggcaacactttgctgtccgccttgaccgagcagagcttcgtcttggccctcgattttgccctaaagtactctcagtcacaacagacaccgtcgtcgtcgtcgtcgtcatcaatggcaccgaagcagaccaaggctgagaagaagatcgcttacgatgcgaagctgtgcgacctaatggaggagtacggccagatcctcgttgt

SEQ ID NO: 119366 - DNA, 251 bp, Glycine max
ctcgagcgctcataacacaaagcacaaagcaaagctcatccttgagttaaaaaatggcagcagcttcttccatggctctctcatccccatccttggctggcaaggccgtgaagctgggactctcagccccagaagtgggaagggtgagcatgaggaagaccgtcaccaagcaggtctcctcaggaagcccatggtacggcccagaccgagtcaaggtacttgggcccattctctggcgagcccccgtccta

SEQ ID NO: 119367 - DNA, 252 bp, Glycine max
caccgccgttctcatctctcttcccagttctcacctcaccgctgcatcttcacgtcgtctctaacgagggaaaatgagtcgaggaggtgcagcagcagcgaagggaaagaagaagggtgctacattcaccattgactgtgcaaagccagtagaagacaagatcatggacattgcttctctcgagaagtttcttcaagagaggatcaaggttggtggcaaagctggtgctcttggtgactctgttaccgttac

SEQ ID NO: 119368 - DNA, 248 bp, Glycine max
gcgccgtcctcaagtgggccattgggttgagcataggcatggtttttgcctacgtgtccactttctccgtcggagcgggtcccatcacgtgggtttatagctccgagatcttccccttaaggcttcgcgcgcagggtgcggctatgggagttgtcgtgaatagggtcactagtggggtcatctcaatgactttcctgtccctctctaataagatcactattggtggggcattcttcctctttggggga

SEQ ID NO: 119369 - DNA, 244 bp, Glycine max
caacaatatcagcaatggccatgatcaacgccaaatgcgtcaacccaaagttccccaatcccaccaagctcgcaccatcaaaaccctcccttcagatcaaccttccaaagggcctcatagcctcacccgaaagcactaaactttcccccgcgacagcaatcgcaggagcaatattcacaaccctcggaacctgcgacgccgcattcgctgttcaacaaataggcgacatagcagaaggcgacaa

SEQ ID NO: 119370 - DNA, 246 bp, Glycine max
tggacgtactacaggtattgtgcttgattctggtgatggtgtgagccacacggtgcccatatatgaagggtatgctcttcctcatgcaattcttcggtttgaccttgctggacgagaactaacagagtacttggtgaaaatccttaccgagagaggatactccttcagcacctctgccgaaaaggaaattgtccgtgatgtgaaggagaaattggcatacgtggcccttgacttcgaacaagaaat

SEQ ID NO: 119371 - DNA, 248 bp, Glycine max
atttttctcactgtcttgtctctccagagaactgtatagagagagatggcagctgcaagatctggtgctgtgttaaatgggttgggatcttccttcttgaggggaggaaacaggagccaaacccttctggccactgctattggaggcaaagttggtgctgctgctgttactgttagtcctagaagactcattgtggtagctgctgctgcaccagagaagtcatggctccctggtgtcagaggtggtgg

SEQ ID NO: 119372 - DNA, 250 bp, Glycine max
ctcgagccggatttagatgcgagtcgcggtcgccccatcagaacgcacgttgtcaacttcgccgccgcacaagtgggtctccccgttgggatcgaagccttcaacgtcgatacgcctcgggaaatgacgcccagagtctacatgggcctatcccttctccaacaagtcttcgaaaaactcttccatgagttgcaaccggatttcatcgtcaccgacatgttccacccttggagtgtcgatgctgctgcta

SEQ ID NO: 119373 - DNA, 253 bp, Glycine max
cgcaactctctctgacaagggcgattctgtacatagtcatgcagtgcttggtggctatatgtggtgctggtgtggtcgaaggggttccgagcgctgaggtctatgacggggcttagtcggtggctgccagcacaatcgctaaagggtacaccagtagtgctggccttggagcagagattgttggcacatttgtgcttgtttacactgtcttctctgccactgatgccaaaagaaatgctagagactcccatgt

SEQ ID NO: 119374 - DNA, 256 bp, Glycine max
cagtgtctctttcaaagtgctgctgctgccagcattgacctgagctagagcagtaaccgtcatcaccactgccagtacggtaccatggctgtgcttcaatctttcgtttcggtccacccagattctcacttccccatacagaacctcccctacggagtgttcaagccccaatccgcttctcctcctcgtcccggcgtcgccatcggagacttcgtcctcgacctctccgaaatctcttccgctggtctcttcgacg

SEQ ID NO: 119375 - DNA, 246 bp, Glycine max
cagagagtggtatcagtgcgtgatcggtgttcacttgatccttcataagtcgtcatcatcgtcatcatcatcaccgatgatccaaggagatgccgatcacaaacatcgcaatcggaaggcctgaagaggctactcaccccgacacgttgaaggcggagttagctgagtacatctccacattgatcatcgtgttcgccggttcaggttccggcatcgcctacaacaagctcaccgacaacggcgcag

SEQ ID NO: 119376 - DNA, 250 bp, Glycine max
gtcactgctttgtttagatcagaaccagatcgtgttctcttcttccattggcaaacatggcaactcaaatgagcaagaagagaaagtttgtggcggatggagtgttcttcgccgaactgaacgaggttctgacacgtgagttggcggaggacggttactccggcgtggaggttagggttacgtcgatgcgcaccgagattatcatcagagccaccagaacccaagccgttctcggtgagaagggaaggag

SEQ ID NO: 119377 - DNA, 250 bp, Glycine max
gttgggagccctgggctgtgttttccctgaactcttggcccgcaacggtgtcaagttcggtgaagccgtgtggttcaaggccgggtctcaaatatgtagtgagggtgggcttgactacttgggcaacccaagcctgatccatgcacaaagcatccttgccatctgggccactcaagttatcttgatgggtgctgttgagggctaccgtattgctggtgggcctctcggtgaagtgactgacccaatctac

SEQ ID NO: 119378 - DNA, 249 bp, Glycine max
aaacaatgttgtctgtctgagtttacattgagagtgcccaagttcgaattcgaaagcaaaaacatgtttttggcgagacccattttccgaggaccctccctttgggcgttgcactcttcctatgcatattcctctgcctctgcagctgctattcaagctgagagaaccatcaaagaagggcccagaaacgattggagccgagaccaagtcaaatccatctacgactctcccattctcgatcttctcttc

SEQ ID NO: 119379 - DNA, 256 bp, Glycine max; identical to SEQ ID NO: 117202

SEQ ID NO: 119380 - DNA, 251 bp, Glycine max
tacgcagggctatatagcataaacatttgagtcttcattgcacaatgtcgacctcttccattaacgggtggtgcctctcttccatctccccagccaaaacctctctcaagaaggccacattaggccctctgtcttcgcaaccgttagcactccttcttctccttcttcttcttcttcttcttccttcccttctctcattcaagacaggcctgtctttgctgcccctgcccccatcatcaccccaactgtga

SEQ ID NO: 119381 - DNA, 244 bp, Glycine max
atcgagcgaatcggctcgagggctcgagaaacaactactcgatgattgagagaaacagtgtgtgttgtgttgtgttgtgtcggtggcatttttgttggttcgagtgagcgagggaagatgtactctagagattcatggggtggtccgttggagataaacgcgacggactcggcaacggaggacgagcggagcggaacctgcaggacgtggacagggcggcgctgtcgcgtcccttggacgagac

SEQ ID NO: 119382 - DNA, 244 bp, Glycine max
cctcgctctatttctcagtctctgtgtttgcggctgaggattccgaacgagtgaccttcttcgtttctcgcaaagtttaagtaatcatgggtaaggaaaaggttcacatcaacattgtcgtcattgacatgtcgactctgggaagtcaactaccactggtcacttgatctacaagcttggaggtattgacaagcgtgtgattgagaggttcgagaaggaggctgccgagatgaacaagaggtca

SEQ ID NO: 119383 - DNA, 243 bp, Glycine max
aaggatttgaagcgtggttatgttgcctcaaactcaaaggatgaccctgcaaaggaggctgctaacttcacagcccaagtcatcatcatgaaccaccctggtcagattggaaatggctatgccctgtcctcgactgccacacttctcacattgctgtcaagtttgctgaactcatgaccaagattgacaggcgatccggcaaagagcttgagaaggagcccaagtttttgaagaacggtgatg

SEQ ID NO: 119384 - DNA, 238 bp, Glycine max
gaccgattctgcaaaagatatagagaacaaggtaaacaaacatgcattttctggtgggcaagattcgcatagagaaacataggcaattaggggctaatcttgaggtagatataccagtcaaaaccttacttttttcttagaagatgatgatgaacttgaacacataaagaaggaatatggagaaggacgcatgttaactggcgaggtaaagcagcggctagttcacgttttgactgaa

SEQ ID NO: 119385 - DNA, 239 bp, Glycine max
ttcgagggtttgggtttctcttcctcccttggagaaaaagaagagccaccgctgcgacgccgttcgtgcatttttgaggtgccgctgtcatgtttgggcgtggtggaccaaggaggagtgatactccaaatattatgatattctcgggatttccaaaaatgccagtgaagatgaaatcaagaaggcctatagaaaggcggctatgaagaaccatccagataagggaggagatcctgaaa

SEQ ID NO: 119386 - DNA, 246 bp, Glycine max
acactatcctcttctcagtctcatacaccaaaccaaaaacctcactttccaatggcaatttcttgtgcagcagcaacaacctcaaagctcgcataccctcctcatgtccacttctctccttcaccccctccaattatctcttccttaaaacccacaaaccctccgccacacacctctcctcttccttcatccaccccaccacaatcctccacctcgccgctgccaacagcagcacccgccgccgct

SEQ ID NO: 119387 - DNA, 245 bp, Glycine max
ctgtaaagtgcaaagcctctattttttcttgtgaatttgaaggacgatgagttccacagaggtcgcagccacaacgaagaagggtggaagagggaaacccaagaccacaaagtccgtttcccgttctccaaagccggccttcagttccccgtcggccgcgtcgctcgctacctcaaggccggtcgctatgcccagcgcgttggttccggttcccctgtttacctatctgcggttctcgaatacct

SEQ ID NO: 119388 - DNA, 240 bp, Glycine max
tcccattccatggcttccactgaatcatcccctttcaagaaaattcagattcaaagggatgacactacatttgacgcatatgtggttggaaaagaggatgctcctggaattgttgtgattcagagtggtggggtgtggattacgaaattaagaaccatgccgtgaagatttctcagcttggtagtgggtttaaagctcttattccagatttatacagaggaaaggttggtctggatgttg

SEQ ID NO: 119389 - DNA, 242 bp, Glycine max
caaggcagaaagcaagctcatcctagagttttaaaaatggcagcagcctcctccatggctctctcgtccccatccttggctggcaaggccgtgaagctgggcccatcagcccccgaagtcggtagggtcagcatgaggaagaccgtcaccaagcaggcctcctccggaagcccatggtacggcccagaccgcgtcaagtacttgggcccattctctggcgagcccccgtcctacctcactgg

SEQ ID NO: 119390 - DNA, 241 bp, Glycine max
ctctttttcttctctctcaacaacttcaccttcttcctcctcgatcatgtctcacttcaagggcaagtaccatgatgagcttatcgccaatgctgcgtacattggcactcctggaaagggtatcttgctgctgatgagtcaacagggacaattggcaagcgtttggccagcatcagtgtagagaacattgaatccaacaggcgagctcttagggagctgcttttcactgctcctggtgttc

SEQ ID NO: 119391 - DNA, 237 bp, Glycine max
gctacgttgtgactccagaaggaatattcacagatgaggtttccattggggcatttcatgcaattgctagaaacagaattttagttgcctctgcagggaatgatggacccacacctggaatgttctcacatgtggctccttgggtcttcacaattgctgctagcacattagacagagactttagcagtaatttaaccatcaacaataggcaaattacgggagccagtcttttcgtaa

SEQ ID NO: 119392 - DNA, 233 bp, Glycine max
ctggtttgaaggtgaggattatgggaccaaattatgtccctggggagaagaaggatttgtatgttaaaagtgttcaaagaactgtcatttggatgggaaaaagacaggaaactgtggagatgttccctgtggtaacactgttgctatggttggtttggatcagttcataacaaagaatgctactttgactaatgaaaaggaagttgatgcccatcgcattcgagctatgaagt

SEQ ID NO: 119393 - DNA, 235 bp, Glycine max
cttctttctcttcttcttcctcttcttagcctccgccgccgccagcgtccccgcccacaacatcacccgcatgcttgccaaacaccccggcttctccaccttcaaccactatctctccccacccacctcgccgaagagatcaaccgccgccagaccatcaccgtcctggccctcgacaatgccgccatgtcctccctcctcgacaagcacctctccctccccaccatcaaaaacg

SEQ ID NO: 119394 - DNA, 242 bp, Glycine max
gggacggtagcagagattccgtgagttgcaaaaatgaaaacatgttctttctgcagagaccatgaacatcccggacggcgtgagcgtcaaggttaatgccaaggtcatcgaagttgagggccccgcggaaaattggtgcgagacttcaagcacttgaatctcgattttcagctcatcactgacgaaaacggtaaaaggaagctgaaggtggaggcctggttcggttctcggaaaacatccgc

SEQ ID NO: 119395 - DNA, 246 bp, Glycine max
acgaagggctatatagcataaacatttgagtcttcattgcacaatgtcgacctcttccattaacgggtggtgcttctcttccatctccccagccaaatcctctctcaagaaggccacattaggccttctgtcttcgcaaccgttagcactccttcttctccttcttcttcttcttcttcttccttcccttctctcattcaagacaggcctgtctttgctgcccctgcccccatcatcaccccaact

SEQ ID NO: 119396 - DNA, 242 bp, Glycine max
atttgcaaaaggggctcctcgtgggtcccgggaatatttggggcgaggtcctcctcctggctctggacgctgctttaattgtggccttgatggtcattgggcacgggattgcaaagctgggattggaagaataagtgttaccgctgtggggagagaggacatatagaaaggaactgcaagaacagccccaaaaaaattgagcacaaggcgaggacggagttattcacggtcaccagtcaggt

SEQ ID NO: 119397 - DNA, 234 bp, Glycine max
tggaaaattttcgacgggccattggtctgcgtatcaaggaaaacaaggaagtatacgaaggggaggtcaccgagctctctccagaagaaacgcgagagcgtaacaggtggttatggtaaagtattagccatgtcatcattggattgaagacagtgaaaggaacaaagcaactcaagttggatcctaccatatatgatgccttgattaaggaaaagatagctgttggcgatgtta

SEQ ID NO: 119398 - DNA, 232 bp, Glycine max
gttgaagaaaaagaacactttcactgatttcattgcatgtgctgagtatttgattgaaaaaaaattctgttctaaggaaaaactgtgcatcgaaggaagaagtgctggtggtttgctattggtgcagttcttaatatgagaccagatttattcaaggctgctgttgctggagtaccttttgtggatgttgtaacaacaatgcttgatccaactattcctctcactacctcag

SEQ ID NO: 119399 - DNA, 231 bp, Glycine max
cgagcatcatggcctcaagagcagtgttattgttggctatgtgtgtgcttccggcgatggttgtggccattcgcccagcaaagaaccctttttgcgtgaagggtcgtgtctactgtgacccttgccgtgctggttttgagacctcagctaccacctacattgctggtgctgagattatgttgcaatgcaagagcagggttagcaacgaggttgtgtacacgaagaaggggt

SEQ ID NO: 119400 - DNA, 237 bp, Glycine max
aaaaaagacaacccagagagcgcgtcttaataaacgctcttctctgaaaacccccatttcttttcttctttcttcttctctttcgcttcttcgatcttcgatcttcgtcgctgaaaatggagagtgcatttcaatccacatcggccaggccgggattcaggttggaaacgcctgctgggagctttactgcctcgaacacggcattcagcctgatgggcagatgccaagtgacaagac

SEQ ID NO: 119401 - DNA, 238 bp, Glycine max
cttgagttaaaaaatggcagcagcttcttccatggctctctcatccccatccttggctggcaaggccgtgaagctgggcccatcagccccagaagtgggaagggtgagcatgaggaagacgtcaccaagcaggtctcctcaggaagcccatggtacggcccagaccgagtcaagtacttgggcccattctctggcgagcccccgtcctacctaaccggtgagttcccaggcgactacg

SEQ ID NO: 119402 - DNA, 243 bp, Glycine max
gggttttggtgtttggtgtttgaatcgtgaaaatgttcagaaaccagtatgacacggacgtgacgacatggagcccggcggggaggctgttccaggtggagtacgcgatggaggcggtgaagagggctcggctgcgatagggctccgatccaagacccacgtggtcctcgcatgcgtcaacaaggctaactccgaactttcatcgcaccagaagaagatcttcaaggtcgacaaccacatcgg

SEQ ID NO: 119403 - DNA, 233 bp, Glycine max
gtgatttcagtgagtgatcggtgttcacttgatctcatcataatcgtcagcgtcaattgaagaagatgccgatcagaaacatcgccgtcggaaggcctgaagaggcgactcaccccacacgttgaaggcggctttggctgagttcatctcaaccttcatcttcgtgttcgccggctcaggctccggcatcgcctacaacaagctcaccgacaacggcgctgccacccctgccg

SEQ ID NO: 119404 - DNA, 231 bp, Glycine max
atcgtagagaaataagggaaaaatggtgtcgctgaaactgcagaagcgcctctccgcaagcgtgctcaagtgcggcagaggaaaggtttggcttgaccccaatgaagtcaacgaatctccatggccaattctcggcaaaacatcaggaagttggttaaggatgggtttatcatcaggaagccaaccaagattcactcccgctcacgtgctcgtaggatgaaggaggcaaag

SEQ ID NO: 119405 - DNA, 232 bp, Glycine max
gtttgatgttagtggggttactgcccgtgtcaacaatgggccgattcgtggtggagaagaacagcctgagagtgacatcgccggagaacataagagggacacacgacagtgccatcggcaacttcggaatacctcaatacggtggtagcatggccgggaacgtaatttaccctaaggctaacaaaaagggttgcaaagagttcgatgagttcgggatttccttcaaatcaac

SEQ ID NO: 119406 - DNA, 236 bp, Glycine max
cactttcaagccaatccaatcctcgcacacatgcatgttgtctctgccaaagttggggccaagtcataactacatttccattgttacgattctttctttccatcccaaccacttattccgcgtctgatccaatttctttctctcaccatggatcatcgcaaaccattgttacccacttcctctgacgatgctccaaatccacgcactcggaaggaccttgttctaatgatttgcgg

SEQ ID NO: 119407 - DNA, 255 bp, Glycine max
tcggctcgagattccattcattcgttcattcccaggttgtgatggcagcagcaccagcagctaccttcgctattggaaccaccggttccctcggccaaagaggaagctcgcttcctcaatcaaagtcctttggttgaaattcaactctctgaatcatttgaagagcttctgtggcctcaaggccatgtcatccgtgagatgtgagtcggaatcctccttcttcggtaacaaaaccggtgctgctctacgggcgtc

SEQ ID NO: 119408 - DNA, 242 bp, Glycine max
ctcactcttgttcttcagtctcctcctattatccgccaccgtagccgccgccgaacggatcgacgatgaagacgaccttctgatccgtcaagtggtgccggatgcggaggaccaccacctgctcaacgcggagcaccacttctccgccttcaagacaaagttcggcaagacctacgccacgcaggaggagcacgaccaccgcttccgtatcttcaagaacaacttgctccgcgccaagtcac

SEQ ID NO: 119409 - DNA, 238 bp, Glycine max
taagcatgggtttgtggaacacaacgaatgcagtgtcttgccgctttcacaagtttggtgatgaccaaaagaatctggtcttccaaggtgatgccacgtcttcttccaggggcatagactcacaaagttagacggtggaggaaaaccagttggtggcagtgtggggagagtgttatactcttctccagtgcacctttgggaaagctctacagtggtcgcaagctttgagaccgacttc

SEQ ID NO: 119410 - DNA, 232 bp, Glycine max
tatagcccaagccctatacaaccaaaccctaacacacacccatttgattcagtttccatggctagcctcaaggttgcatttttggctgcagtgctctgcatggttgtggtgagtgccccatggcacatgcagctatcacgtgcgggcaggtgacgaatagcctgatcaattgcatcggttacctccagaacggaggaacgccgccgtcgggatgctgcaacggagtgaagag

SEQ ID NO: 119411 - DNA, 229 bp, Glycine max
gtcgttgggagcgaacaagttccccgagagacagccgattgggacggcggcgcagagccaagacgacggcaaggactaccaggagccggcgccggcgccgctggttgacccgaggagtttacgtcatggtcgtgttacagagcagggatagcagtgtttgtggccacttttctgtttctctacatcaccgtcttaaccgtgatgggagtcgccggggctaagtctaagt

SEQ ID NO: 119412 - DNA, 234 bp, Glycine max
gtcgacgtagccatagccagaggcaacgcagccttctcctccggggactatcctgccgccatctaccacttctccgatgccatcgctctggctcgctcgaaccatgtcctctattcaaccgatccgccggatacgcctccctcacacactacgtatatgcattagcggatgccataaagacagttgaactcaagcccgactggtcgaacggttacagtcgtctcggtgccgcgc

SEQ ID NO: 119413 - DNA, 238 bp, Glycine max
acacactctcatagctgtagcggcgacactaagatcggagaaagaatggcgaaaacgacgtcgttgctgctctttacactgctcctcttcggaaccctagctctcatccaggcgaagaatcgaaggaggatttgaaggaggtgacccacaaggtttactttgatgttgagattaatggaaaagaagcaggtcgtattgtaatgggtctttatgggaaggctgttccaaaaactgcaga

SEQ ID NO: 119414 - DNA, 233 bp, Glycine max
gttgaaggaggtggctgttggaaagaaggactttgagcagctcatggaggttgttgggaatcttaaacatgagaatgttgttgagctgaaggggtattactattccaaagatgaaaactcatggtatatgattactacactcaggggagtctctctgctttgttgcatggtaaaagaggagaggatagggtgcctttagattgggataatcggatgaaaattgctttgggtgc

SEQ ID NO: 119415 - DNA, 234 bp, Glycine max
gcagaaagcaagctcatcctagagttttaaaaatggcagcagcctcctccatggctctctcttccccatccttggctggcaaggccgtgaagctgggcccatcagcccccgaagtcgggagggtcagcatgaggaagaccgtcaccaagcaggcctcctccggaagcccatggtacggcccagaccgcgtcaagtacttgggcccattctctggcgagcccccgtcctacctca

SEQ ID NO: 119416 - DNA, 230 bp, Glycine max
cgatacttagcccaccatggtgttgtcactgaagagtgtgacccatattttgatcaaattggctgttctcatcctggttgtgagccagcttatcggactcccaagtgtgttaaaagtgtgtaagtggaaaccaagtttggaagaagtcaaagcactatagtgttagtgcatacagagtcaactctgatccccatgatatcatggcggaagtttacaagaatgggccagtt

SEQ ID NO: 119417 - DNA, 130 bp, Glycine max
cactcataacacaaagcacaaagcaaagctcatccttgagttaaaaaatggcagcagcttcttccatggctctctcatccccatcctatggctggcaagagccgtgtaagctagggccatacagacccca

SEQ ID NO: 119418 - DNA, 238 bp, Glycine max
cattaattggtcgtgtattagcagacgatatatacagaggttcacgatgcattgccgttagaaatcaagatattggaattggacttatcaatcgatttaaaacccttcaaacccaaccatatctatccgaactccctttatctgtaggaatacatcttggatctgtcgattgtgttatggccaaagtcctactcatggtcacttggtggaattaggagaagctgtaggtattattgcg

SEQ ID NO: 119419 - DNA, 278 bp, Glycine max
attggctttctcttctctctctctctctctgtctctctctccttgtggcaaccaacttctgctccctttttctgcaatgggttgtgctggatcttcacaatccaagcctgatggggcagtaaaaaagatccggaaacctaagccttggaagcatcctcagcccataacagagactcagcttacacaattacgtgatgagttttgggatacagctcctcactatggtggccggaaagagatttgggatgctcttcgagctgctgctgaggctgatctaa

SEQ ID NO: 119420 - DNA, 271 bp, Glycine max
ggaacatctccgtgcgcccacacggttccgacacgctgtcgcaccaggagatcgatttgctgaagattgtgaagaaggcctccgatcccaaatctcttgggggtctcagcctccagcttcctctcattgcccgcttccctgacgctctgaagaaccggttggagtccctccagtcggcgttcgattatgcaatccaatctggagggtacgagtctcattaccaaggagtttaccccgtgaaatgcaaccaggaccggttcgtggtggagga

SEQ ID NO: 119421 - DNA, 268 bp, Glycine max
attcatcgtccatcgagaaaggaagaaaagaaacaaggtgacatcatcatggcttgctcgttttctcgcgggtctctgcttcctctcgccatcatcgtttccttaggatgtctatttgcgatttccattgcaaaggaggaagccaccaagttggggacggtcattgggattgatcttggaacgacctattcatgtgttggtgtttacaagaacggccatgttgaaatcatagccaatgaccaaggtaaccgtatcaccccttcttggg

SEQ ID NO: 119422 - DNA, 262 bp, Glycine max
cgagggtttgggtttctcttcctcccttggagaaaaagaagagccaccgctgcgacgccgttcgtgcatttttgaggtgccgctgtcatgtttgggcgtggtggaccaaggaggagtgataactccaaatattatgatattctcgggatttccaaaaatgccagtgaagatgaaatcaagaaggcctatagaaaggcggctatgaagaaccatccagataagggaggagatcctgaaaagtttaaggagttaggtcaagcat

SEQ ID NO: 119423 - DNA, 260 bp, Glycine max
ctcttcttctcttgcggctagggttttagcgcaggtcttctagatttaaggaagatgggtaaggaaaaggttcacatcagtattgtggtcattggccatgtcgactctgggaaatccactaccactggtcacctgatttacaagcttggaggcattgacaagcgtgttattgagaggtttgagaaggaagctgctgagatgaacaagaggtctttcaagtatgcctgggtgctggacaaacttaaggctgagcgtgaaag

SEQ ID NO: 119424 - DNA, 263 bp, Glycine max
ctactgccttcgatccttttgctgatgcaaatgctgatgactcgggtgctgggtcaaaggagtatgtgcatattcgcgtacagcagcgaaatggaaggaaaagcctgacaaccgttcagggattgaaaaaagaattcagctataacaagatacttaaagatgttaagaaagagttctgttgcaatggaacagttgttcaggacccagaactaggacaggttgttcaacttcaaggtgatcagaggaagaatgtttctaccttc

SEQ ID NO: 119425 - DNA, 255 bp, Glycine max
gccaggcaagccccactcaaccaccacacctctcctcgttcacgctacccctttctgctcttcttctacctttcaagttttaaaagtataaagatggcagagacgttcctatttacctcagagtcggtgaacgagggacaccctgacaagctctgcgaccaaatctccgatgctgtcctcgacgcttgcctcgagcaggacccagacagcaaagttgcctgcgaaacatgcaccaaaaccagcttggtcatggtc

SEQ ID NO: 119426 - DNA, 274 bp, Glycine max
cgcagagcgaggagcagcctcaggaggagaatgatgtctcacaggaagttcgagcacccagtgcacggttcactgggatttcttcccaggaagcgtgctgctcgtcacaggggaaaagtgaaggcattcctcaaggatgacccatccaaggcacccaagctcactgcattcttgggttacaaggccggtatgactcacattgttagagaggtcgagaagccaggatcaaagcttcacaagaaggaaacttgtgagcctgttacaattattgaga

SEQ ID NO: 119427 - DNA, 277 bp, Glycine max
tattggaactcaccgccgctacttctccagcttctcgcgttctcctcatctccgccggtgccagccacaccgttgcccttctctctgggaatgttgtgtgctcgtggggtcgcggagaggatggacagttaggccatggtgacaccgatgatagactcttagccactcatctcagtgcattggatgctcaacaaattgattctattgcatgtggagctggtcatacccttgcgtattccgaatcacgcaatgaactctatagttggggatggggtga

SEQ ID NO: 119428 - DNA, 272 bp, Glycine max
ctcatcaagtccaagaaccaacctaccttttgcaatctcaattcaatggcgtcctctctcattgcgaacgcttcctctcctcttccctcctctccaggtccctccttcgccccgccgcttccgcttcccaccgctctttcaacaccaacgccatgcgccagtatgacaaccgcgccgacgaccacagcaccgacatcgatcgtcactccgaacgctctttccctagcactgcgcgccgcgacgatatcttctcagatgtgttggatccattt

SEQ ID NO: 119429 - DNA, 265 bp, Glycine max
gtttttagggtttacaccgagcagcgacacctccctcccgcagtagccatggttctgaaaactgaactatgccgattcagtggtgccaagatgtaccccggttaggtcatcatatctgttcgtagtgattctcaggttttactgtttgccaactcaaaatgtaagcggtgtttccacaaccgcctgaagccctcaaagctcacctggactgctatgtacagaaagcaacacaaaaaggacattgctcaagaagctgtgaagaaga

SEQ ID NO: 119430 - DNA, 261 bp, Glycine max
ttcgagccgattcggctgagatccatctatcttttctaacatggctgctgggactggactctttgcagagattttggctggagatgcgtacaagtactatgctgatggagagtggaagaaatctgcttctgggaaaagtgtttccatcatcaaccccactaccagaaagactcaatacaaagttcaagcttgttcacaagaggaggttaataaggtcatggacttagcaaaatctgcacaaaagttatgggcaaagacccc

SEQ ID NO: 119431 - DNA, 269 bp, Glycine max
  unsure (1)..(269): unsure at all n locations
gcgagtcagtactgagtagggtttcaaatttccaatcggaatcggnanaaatgggcggcggcggcngcgatcacggccatggacacggacacggcgatttcaggaacaaggtctggagtatgagcgncggcccttactgccgtcccaagcactggaagcgcaacaccgccattgccatggtcggcgtcgttctcatctgcatccccatcgctatgaaatccgctgaactcgagcnacggccacatcaccctgttcgncccatcccttct

SEQ ID NO: 119432 - DNA, 269 bp, Glycine max
ctgagtctggaatgctcggattggggaagagaattcatgcgtctatgaggaggtggaggtttagatgtggcgctaaggtgttgaatgcgtttattgatatgtatgccaagtgtggttgtttggatgctgcctttgatgtctttagtggaatgatggcaaagaaagatgtggtgtcttggaattccatgatccaggggtttgccatgcatggacatggcgagaaagcacttgagctcttttcttggatggtacaggaaggttttgagcca

SEQ ID NO: 119433 - DNA, 244 bp, Glycine max
tggacaacttgtggaacaccagagccgtttcacgtgttccccgaccaccctcttacacggcctcgccaagggtgccagaggcatggttggtctcggtaggtcccgcagctcgcttccttctcaggttttcgacaacttcagcacgcaccgaaaactcactctctgcctttcctcctccaaaggcgttgtcctcttgggcaacgtggcaacctacgagtccgaagttcttaaatctctcagcttc

SEQ ID NO: 119434 - DNA, 219 bp, Glycine max
gtatttccctacctgtcccttcaggatgcagatcttcgtcaagacgctcaccggcaagaccatcacccttgaggtggaaagctctgacaccatcgacaacgtcaaggccaagatccaggacaaggaaggaatccccccggaccagcaacgtctcattttcgccggaaagcaacttgaggagggccgtacccttgctgactacaacattcagaaggagag

SEQ ID NO: 119435 - DNA, 257 bp, Glycine max
gcaagctcatcctagagttttaaaaatggcagcagcctcctccatggctctctcttccccatccttggctggcaaggccgtgaagctgggcccatcaggccccgaagtcgggagggtcagcatgaggaagaccgtcaccaagcaggcctcctccggaagcccatggtacggcccagaccgcgtcaagtacttgggcccattctctggcgagcccccgtcctacctcactggcgagttcccaggtgactacggctggg

SEQ ID NO: 119436 - DNA, 270 bp, Glycine max
cacaaggcagaaagcaagctcatcctagagttttagaaatggcagcagcctcctccatggctctctcttccccatccttggctggcaaggccgtgaagctgggcccatcagcccccgaagtcgggagggtcagcatgaggaagaccgtcaccaagcaggcctcctccggaagcccatggtacggcccagaccgcgtcaagtacttgggcccattctctggcgagcccccgtcctacctcactggcgagttcccaggtgactacggctggg

SEQ ID NO: 119437 - DNA, 264 bp, Glycine max
gtgaaacactagctagggtattgggagctctcgttgtttcggagctagggaccttacgcagccatggccactgctacgaatgccgccgccgccccaccacgccagctctcccagaaggaagctgacatccagatgatgttggccgccgacgtccacctcggcaccaagaactgcgacttccaaatggaacgttacatcttcaagcgccgcaacgacgggatttacatgatgaaccttgggaagacgtgggagaagcttcagcta

SEQ ID NO: 119438 - DNA, 258 bp, Glycine max
gagaatccgaggcgaagagaagagaaaaattaagatggaggggaaggagcaggatgtgtcgctgggagcgaacaagttcccggagagacagccgattgggacggcggcgcagagccaagacgacggcaaggactaccaggagccggcgccggcgccactggttgacccgacggagtttacgtcatggtccttttacagagcagggatagcagagtttgtggccacttgtctgtttctatacatcactgtcttaaccgt

SEQ ID NO: 119439 - DNA, 258 bp, Glycine max
cacatttcaaaatgaagcattgcatctcaaaacattttctaagttgtttcgctttgtttctgttgctagtcgcaacaacctatgccactgttgtccctaccaccacccaaaagccaccaagaagctttgcaaaccaattcctcatcccccagaacgcggcacgtgcggtgctgaggctgcggccattggtgtgggactccaaattagcacactacgcgcaatggtatgccaaccagaggcgcaacgattgtgccctag

SEQ ID NO: 119440 - DNA, 254 bp, Glycine max
aatttctctctgtttccttcttcaccgcatcaatggagttggacggcgttctcctcggcatgtgcaaccctctcctcgacatctctgccgtcgtcgacgacgctttcttgcaaaaatacggtatcaagttgaacgatgcgattctcgctgaggataagcacaaacctatgtatgaagaattggctaacaatcctaatgtggagtacattgctggaggtgctactcagaattcaatcagggttgctcagtggatg

SEQ ID NO: 119441 - DNA, 262 bp, Glycine max
gtggatgcttcaagcaccaggtgccacaagttatatatcgttgcataggaaaggacaaatttggagaggagatgaagaagaaatgtacactagatggtgtaaaggttaactattatgaaatcgacaatacacctacaggaacttgtgctgtttgtgtggttggtggtgaaaggtcccttgttgccaacttatcagctgcaaattgctacaagtctgagcatttgacgagaccggaaaattgggcattagttgaaaaggccaa

SEQ ID NO: 119442 - DNA, 258 bp, Glycine max
aacaaatcaaagccatggccacctccaacttctctattgttctctccgtctccctagccttctttttggtgctacttaccaaggcacactcgaccgataccgtttctttcaccttcaacaagttcaacccagtccaaccaaacattatgctccaaaaagatgctagtatttcatcctctggggtgttacaactcaccaaagttggcagcaacggcgtgcccacctcgggatctctcggtcgtgccctttacgctgccc

SEQ ID NO: 119443 - DNA, 256 bp, Glycine max
ggcaaccagaagcagccatggccactgcaaggactgtgaaggatgtttcacctcatgagttcgttaaggcgtactcctctcacctcaagcgatccggcaagatggagctgccagagtggactgatattgtgaaaactgcaagatttaaggagttggctccttatgatcctgactggtactatgtcagagctgcttccatggcaagaaagatctacttgagaggaggacttggtgttggtgcctttcagaggattta

SEQ ID NO: 119444 - DNA, 246 bp, Glycine max
atctgccctaatcatcataactgtaagaacctcttcacgaaagtgcgaaacttgatcagtgttggacgcgcttcctcctcctcctccgccgccgccaacgccatgggtgacgttcagatccacaagaccaaactctgcatcatcggaagcggtccctccgcccacacagccgccgtctacgccgctcgagccgagctgaagccgatcctcttcgagggctggatggccaacgacatcgcccccggc

SEQ ID NO: 119445 - DNA, 251 bp, Glycine max
gccctcgattttgcccgaaagtactctcagtcacaacagacaccgtcgtcgtcgtcgtcgtcatcaatggcaccgaagcagaccaaggctgagaagaagatcgcttacgatgcgaactgtgcgacctaatggaggagtacggccagatcctcgttgtgaactccgataacgtgggatcgaaccagctccagaacattcgcaagggtctccgtggcgactccgtcgtcctcatggggaagaacaccatgatg

SEQ ID NO: 119446 - DNA, 251 bp, Glycine max
gctagatgcaaggaactgggcataactgctcttcatatcaagctccgtgccacaggtggagacaagacaaaaacaccaggtcctggtgctcaatcagctcttcgagcccttgctcgttcaggaatgaaaattggtcgcatagaggatgtgacccccattccttccgatagcacacggagaaagagtggtagaaggggtagaaggctttaagcttcttatggtatatgactggagttgccatattttaattt

SEQ ID NO: 119447 - DNA, 254 bp, Glycine max
ctcataacacaaagcacaaagcaaagctcatccttgagttaaaaaatggcagcagcttcttccatggctctctcatccccatccttggctggcaaggccgtgaagctgggcccatcagccccagaagtgggaagggtgagcatgaggaagaccgtcaccaagcaggtctcctcaggaagcccatggtacggcccagaccgagtcaagtacttgggcccattctctggcgagcccccgtgctacctaaccggtga

SEQ ID NO: 119448 - DNA, 247 bp, Glycine max
ggcgccgtggggccgacatgccgggtgggccccgcacgtttttcgcctgcgcgtcggatcagaatcgcacggtttacgtcgcgggcggacacgacgaggcgaagaacgcgctgaggtcagcgcttgcgtatgacgtggccatggacgtgtgggtcccgctccccgacatgtcgcgtgagcgagacgagtgcaaggccgtgttccgacgcggcggcgcgctctgcgtcgtcggagggtactgcacgga

SEQ ID NO: 119449 - DNA, 261 bp, Glycine max
caaaaactcacactttggtggccacagcaacaatgacactgggagcctcactacaagctgcagctaccttcgtgcaagccaccaaggtgggcatggccactcgcaacctcaaatctacacaatgcatttcccaggcttttggcttggaacccgctgcagctaaactcatttgctcccttaagcccgatctcaaagattttgctcaaaaatgtgtcgactccaccagagttgcaggattcgcccttgccacgtcagctctcg

SEQ ID NO: 119450 - DNA, 254 bp, Glycine max
gacttctgccacagccgcggcgtctaccaccgtgacctcaagccagagaaccttctcctcgacgacgacggcaacctcaaggtcaccgacttcggcctcagcactttctccgagcacctccggcacgacggcctgctgcacactacgtgcggcacgccggcctatgtcgcgcccgaggtgattgggaaaagaggctacgacggcgccaaggccgatatttggtcttgtggcgtaatcctctacgtacttcttgc

SEQ ID NO: 119451 - DNA, 252 bp, Glycine max
cagagagtgatttcagtgagtgatcggtgttcacttgatctcatcataatcgtcagcgtcaattgaagaagatgccgatcagaaacatcgccgtcggaaggcctgaagaggcgactcaccccgacacgttgaaggcggctttggctgagttcatctcaaccttcatcttcgtgttcgccggctcaggctccggcatcgcctacaacaagctcaccgacaacggcgctgccacccctgccggcctcatctccg

SEQ ID NO: 119452 - DNA, 252 bp, Glycine max
gggcacagcagcgtccacgctttaatcgacgactaagtgcttcttctcgttttcttccctcgagttgttatcggtttttggcgggagtcgtcgcggtcgtcatcgtcattgaatcagccatgcctcggtactactgtgactactgcgacacctatttgacccacgattctccatctgttagaaagcagcacaatgcaggttacaaacacaaggcaaatgtgaggacttactaccagcaatttgaagaacaac

SEQ ID NO: 119453 - DNA, 250 bp, Glycine max
actcgttcctcttattagcgacggccattctcgccgttgtgtgctccgccgtgagcggttgctcgccatcggatagggcggcgctgctggcgttccggaaggcgctgagcgagccctaccttggcctcttcaactcgtggacgggctccaactgctgcctcgactggtacggcatcagctgcgacgccaccaccggccgcgtcaccgacatcaacctccgcggggagtccgaagaccccatcttcgagaa

SEQ ID NO: 119454 - DNA, 250 bp, Glycine max
ctcaaatccaagctcgggaacagagaaggagaaagagaatggacgccattgattctgtgttcgatccgttgagagaattcgcaaaggacagcgtgaggctcgtgaagcgctgccacaaacccgatcgcaaagaattctccaaggttgccgtgcgtaccgcaattggtttcgttgtgatgggattcgtgggtttcttcgtgaagcttattttcattccaattaacaacatcatcgtcggatctggttagga

SEQ ID NO: 119455 - DNA, 247 bp, Glycine max
tctcaagtccaacctacccctttttcttctcccaccaacttcaccgtcttcttcctcgatcatgtctcacttcaagggcaagtaccatgatgagcttattgccaatgctgcttacattggcactcctggaaagggtattcttgctgctgatgagtcaacagggacaattggcaagcgtttggccagcatcagtgtagagaatgttgaatccaacaggcgtgctcttagggagctgcttttcaccgct

SEQ ID NO: 119456 - DNA, 257 bp, Glycine max
aatcccacacgcttcttactcctctcataacttttctgctccccgttgagaaagatttgaatccaaaggaaaaataacgctaatggctccaagagacagccgagccaccgcgctcattgggcccggcccaagcctatcaccggcccacaaagagatccgctacagaggcgtcaggaaacgcccctggggccgctacgccgccgagatccgcgatcccggcaagaaaacccgcgtctggctcggcactttcgacaccg

SEQ ID NO: 119457 - DNA, 268 bp, Glycine max
gaagaagggtgagctaaagtcaattttccttcctttcctttccactagtcacataatcccgctagtggacatggccagactcttcgccttgcacgacgtcgacgtcaccatcatcaccaccgcacataacgccaccgttttccaaaagtccatcgatttagatgcgagtcgcggtcgccccatcagaacgcacgttgtcaacttccccgccgcacaagtgggtctccccgttgggatcgaagcttcaacgtcgatacgcctcgggaaa

SEQ ID NO: 119458 - DNA, 289 bp, Glycine max
gtcgcacgcacacgtcggctcgaggtcgctccgcaccagtttcaccgcacgaatatcttgttgtttggagcgatccgagaaaaactctgtaaacatgttggtttaccaggacctccttacaggtgatgagcttctctctgactccttccgttacaaggaaattgagaatggaatgctgtgggaagttgaggggaagtgggttgttaaaggagcagttgatgtagacattggtgcaaacccttctgctgagggtggaggagaagatgagggagttgatgatgcagctgtt

SEQ ID NO: 119459 - DNA, 260 bp, Glycine max
ctccctcctcttcacacattttcttagctctctccaacaatccctctcgttcacactttcagattgtgtgaagatgggggctggtggccgaactgctgttcctcctgccaacaggaagtcagaggctgaccctttgaagcgggtaccatttgaaaaacctcagtttagtctcagccagattaagaaggccattccacctcactgtttccagcgctctgttctccgctcattctcctatgttgtttatgacctcaccatag

SEQ ID NO: 119460 - DNA, 261 bp, Glycine max
ccgagttcggcccctcccagcccttcaagggggcccgcatcaccggctccctccacatgaccatccagaccgccgttctcattgagaccctcaccgcccttggcgccgaggtccgctggtgctcctgcaacatcttctccacccaggaccacgccgccgccgctattgcccgcgacagtgccgccgtcttcgcctggaagggtgagaccctccaggagtactggtggtgcaccgagcgcgccctcgactggggccccggtg

SEQ ID NO: 119461 - DNA, 259 bp, Glycine max
gtggtgccttatcgctgtggttttcatcgtcttccttctcttatattttcttttttttttgtcttcgccgcacgccgaaacaatggccggaaaaggagagggtcctgctatcggaatcgatctcggaaccacctactcttgtgtcggtgtgtggcaacatgaccgagttgaaatcatcgccaacgaccaagggaacagaacgacgccgtcttacgtcggcttcactgataccgagcgtctcatcggtgatgcggctaag

SEQ ID NO: 119462 - DNA, 263 bp, Glycine max
cactggtcacttgatctacaagcttggaggtattgacaagcgtgtgattgagaggttcgagaaggaggctgccgagatgaacaagaggtcattcaagtatgcctgggtgctcgacaagctcaaagctgagcgtgaaagaggaattaccattgatattgctttgtggaagtttgaaaccaccaagtactactgcacggtcattgatgctcctggacatcgtgactttatcaagaacatgattactggtacctcccaggccgact

SEQ ID NO: 119463 - DNA, 261 bp, Glycine max
  unsure (1)..(261): unsure at all n locations
atcgaaaagatgcaggcacggcagaattaccggaatttatggcacaccgatctcatgagatccattcaggccgatactccttattgttgcctcgcgttgtggtgtgcaccatgtgtgtcttaccttcttcgcaaacgagctctctatgatgatatgtcaaggtacacatgttgtgctggctacatgccttgcagtggtaggtgtggagaaagtaaatgtcctgaattttgcctttgcactgaggttttcctcngctttgga

SEQ ID NO: 119464 - DNA, 261 bp, Glycine max
caggttcagaccggagcaaaaaaacttgttacgatggtttcttccgacaaggatccacgagaggaagtccttcaagcatggtacatggatgatagtgatgaagatcaaagactcccccaccacaaagaacccaaggagtttgtctcgttggaccaacttgctgaacttggagtccttagctggaaattagatgctgataaccatgaaaatgatccagagctgaaaaagattcgtgaagagcgtggctacacctacatggat

SEQ ID NO: 119465 - DNA, 265 bp, Glycine max
cccttgtctgcaacaacaataacaatcttcatcatgcacaagagctcttcagattccacgttgggcccgggccgcctggacctctcccaggccttcttcaggcccataaacaacgccgcccctccctccccgaccaagcgccacaacaagatctccgtcatcggcgccggcaacgtgggaatggccatcgcgcagaccatcctcactcaggacctcaccgacgagctcgtcctcgtcgacaccaactccgacaagctccgcggcg

SEQ ID NO: 119466 - DNA, 259 bp, Glycine max
ggtgaacgaacgaggactcgtgacaacaatttgcttggcaaatttgagttatctggaattcctcctgctcccagaggtgttcctcagatcactgtttgcttcgacattgatgccaacggtatatcgaacgtgtctgcggaggacaaaaccactggacagaagaacaagattacaattaccaacgacaagggcaggctttctaaggaggagattgagaagatggtgcaggaagctgagaaatacaagtctgaggacgagg

SEQ ID NO: 119467 - DNA, 262 bp, Glycine max
gccaaggctgtggcaaaagaaccccgcatggctgcttcgttgctcagactacatttccatgattgttttgtcaagggctgtgatgcatcggtgttgctagatagcagtggaactattatcagtgagaagaggtcaaatccgaaccgtgattcagctcgaggatttgaagtcattgatgaaattaaatctgcactagagaaggaatgtccacatacagtgtcatgtgctgacattttggctctagctgctagagattccactg

SEQ ID NO: 119468 - DNA, 257 bp, Glycine max
gtgcagaagcaaatggcggcgagaagcaattgaaatttctgatctacggtcgcagcggttggattggtggtctactgggtaagctctgcgaagagcgcgggatccaatatgagtacggcaccggcagattggagaaccgctcgtcgttggaggcggacatagcggctgtgaagcccagccacgtgttcaacgccgcgggtgtcacgggtagacccaatgtggactggtgcgaatctcacccagttgaaaccatccga

SEQ ID NO: 119469 - DNA, 262 bp, Glycine max
caaacatgctttgcgtcaacactgccttcacctctttcttgcccagaaaatcaatttgcttcttttcctccaaatcaaccaccccaatttcctgcaccctccaaggaacagttgcagaaccaaaatctacagctgctggtgaacctcttttgctaaatgcagttcgtgggatagatgttgaaagacccccggtttggctcatgaggcaagcagggaggtacatgaagagttaccaaaccatctgtgagaaatatccttcatt

SEQ ID NO: 119470 - DNA, 258 bp, Glycine max
ctcagtctctgtgtttgcggctgaggattccgaacgagtgaccttcttcgtttctcgcaaagtttaagtaatcatgggtaaggaaaaggttcacatcaacattgtcgtcattggacatgtcgactctgggaagtcaactaccactggtcacttgatctacaagcttggaggtattgacaagcgtgtgattgagaggttcgagaaggaggctgccgagatgaacaagaggtcattcaagtatgcctgggtgctcgacaa

SEQ ID NO: 119471 - DNA, 259 bp, Glycine max
cgagctccaagcttggtggaaagaacttgtagaggtgggtcatggggatttgaaggataagccatggtggcaaaagatgcaaactcgtgaagagttggttgaagcttccgctaccctcatatggattgcttcagctcttcatgctgctgttaactttggacagtatccatatggaggtttaatcctgaataggccaactattagcaggagattcatgcctgagaaagggtctcctgaatatgatgcgttagctaagaac

SEQ ID NO: 119472 - DNA, 259 bp, Glycine max
ctttgaaacgcacagcttcaatcaccgaccacaccacccatcaacgacatgcttcctctttcccttctcaagactgcccaaggccaccctatgttggtggaactgaaaaatggggagacatataacgggcatttggttaattgcgacacatggatgaacatccatctgcgagaagtcatttgtacatctaaagacggagatagattttggaggatgcctgaatgctacatacgaggcaatacaatcaagtaccttcgag

SEQ ID NO: 119473 - DNA, 256 bp, Glycine max
gccatgtatgtggccatccaagctgtcctctccctatatgcaagtggtcgcacaactggtattgttttggactctggcgatggtgttagtcacactgtgccaatctatgagggctatgcactccctcatgccattcttcgtttggatcttgctggccgtgatctgactgactctttgatgaagatcctcactgagagagggtacatgttcaccacctctgccgagcgggaaattgttcgtgacatgaaggagaagc

SEQ ID NO: 119474 - DNA, 258 bp, Glycine max
gatcgttcttttcatatgttgcatctttcttttgcctttgtacttgtttgcctcgccggtgttgaagttgttggggcagccggaggagttggcggactatccggcgcggtgtcgatctggatgataccggtgcactttgcctttgcgtttcagttccctctgcagaggttcttgcagtgccagctgaagaccgcgcccatagcgtgggtgtctctggtggcgctcgtggtgcatgtgtttgtaagttggttgttcgtg

SEQ ID NO: 119475 - DNA, 253 bp, Glycine max
gcgttttggaagcagagaccgaaatacttcgagatggcccgtacagagcaaactgctcgtaagtcaactggaggaaaagctcccaggaagcagcttgcaaccaaggctgcacgtaagtctgcaccaacaactggtggtgtgaagaagcctcatcgttatcgccctggaactgttgctcttcgtgagattaggaaataccagaagagcactgagctcctaatcaggaagcttcctttccagaggttggttcgtg

SEQ ID NO: 119476 - DNA, 258 bp, Glycine max
ctctctctctctctcttctcttacacacacaagcactaccacattttctttggtctctcattttctctatagctagatgggttctggtgctttacaacttcttctgatcttgggtcttctggctagctcatgcttagcacaagccccaggtgctgcacccacacaaccacccactacaaccccatcaccaccaccaccaagatcagcacctgcaccagcacccaccccgccagcaacaccaccaccagcaacaccacc

SEQ ID NO: 119477 - DNA, 259 bp, Glycine max
gccaaacccaaacacaacaacacaaagaaaaaaagagcacaaacagaccaattccaacggttgaattttttggctgaagacaccccaccgacgttagtcaaataaaacatgtcttgctccgtcgcggtttccaattcgccggtgttctctccttcttcttccctcttctgctcgaagccctccatcatctcttcttcgccggaatccctctcgctctctctctcgcatctcaaaccttccaactcttctacgacgtcgt

SEQ ID NO: 119478 - DNA, 259 bp, Glycine max
ctcgagccgcttcaacaggagcagcaaaggcagtggcccttgtcctcccaaccctcaaaagcaaactcaatggcattgcactccgtgtgccaacaccgaacgtctcagtggtggacctcgtcgttcaggtctcaaagaagacctttgcagaagaagtgaatgcagcattcagagagagtgcagacaatgagctcaagggaatcctctctgtgtgtgatgagccacttgtgtccgttgacttcaggtgcactgatgtgtc

SEQ ID NO: 119479 - DNA, 239 bp, Glycine max
gtgtctcagagggtctgtgacacacagactcacttccaagttccaagctttggccatttattcccactgtttattgagaacaactgcagaacatggcacagattttggctccctctacgcaatggcagatgcgaatctcaagatcctctcccaatgcaagtccccgtacatcaaacatgatggagtgctttattgtgggaaacaaaatgagaaagtgtcacccacaagttctgctaaat

SEQ ID NO: 119480 - DNA, 259 bp, Glycine max
caaacagcatccgcggcagtgacggtaaccctccaacaacaacacttccgctgcgaaaaatgtctctggtggcgaacgaggatttccagcacattctgcgtgtgctgaacaccaacgtggatgggcagcagacgataatgttcgcaatgacctccatcaagggtattggaaggaggttcgccaacatcgcttgccagaaggctgatgttgacatgaacaaaagggctggtgaattgactgctgctgagttggataatgt

SEQ ID NO: 119481 - DNA, 256 bp, Glycine max
cttttgcttcctaggtttttatattttggtgtccatggcggaaaaaggagggaaggggcttggccctggaaaaaccacggcagcgaacaaggacaaagatatggttaaaaataggcccgtctctcgtcaatcccgtgctgggatccagtttcctgtgggacgtatccacaggcagttgaagcaaagggtacaagcaattggacgtatggggacgatgctgctgtgaacttagcctccattcgggaatatctgactg

SEQ ID NO: 119482 - DNA, 254 bp, Glycine max
gctgagatcattggaacctttgttttggtctacactgtgttctctgcaactgaccccaagaggaatgctagagattctcatgtgccggttttggctccacttccaattggctttgctgtgttcatggttcacttggcaaccatcccagtaacaggcactggcattaaccctgctaggagtctaggagctgctgtcatgtacaaccaacagaaggcctgggatgaccattggatcttttgggttggaccatttat

SEQ ID NO: 119483 - DNA, 254 bp, Glycine max
cacaggcgcagacgcaaacgcaaacgcaaacgcaaacgctcacgcagagcgtgatccattgacgaagatggtgcagcgtctcacctaccgcaagcggcacagctatgccaccaagtccaaccaacacagggtcgtcaaaacccctggtgggaagctcgtttatcagactaccaagaagagggccagcggacccaagtgccccgtcactggcaagaggattcaggggattccacacttgaggcctgcagagtaca

SEQ ID NO: 119484 - DNA, 252 bp, Glycine max
gtcgtgtcgcagcaaaaccaagccacccactaacttgtttggtccaagacatggctctgatcctgcatgctaccaaaacaaacaagaatgccttcaagactctgattgcggcagagtacagtggcgtccaagtggaattggcccctaatttcgagatgggtgtctctaacaaaactcctgaatttctcaagatgaatcctattggaaaggttcctgttttggaaacgcccgatggtccagtctttgagagca

SEQ ID NO: 119485 - DNA, 255 bp, Glycine max
cccaaaaccctaggtagagagctcttcctcactctcattcgcactggccgcagcagcacgtcctctcgtcaccgtgcaggtcctcgacagtgacatggccaccgacgcctccgccaccgtccctatccctgacgtcacgaagtcctccatccgcccggacatcgtcaacttcgtacactccaagatctccaagaacagccgacaaccctatgcagtcagccgccgcgctggccacgcggacttccgccgagtcct

SEQ ID NO: 119486 - DNA, 250 bp, Glycine max
ggcttatggtggatacctaggcacccagagacgaggaagggcgtagtaagcgacgaaatgcttcggggagttgaaaataagcgtagatccggggattcccgatataggtcaacctttcgaactgctgctgaatccacgggcaggcaagagacaacctggtgaactgaaacatcttagtagccagaggaaaagaaagcaaaagcgattcccgtagtagcggcgagcgaaatgggagcagcctaaaccgtga

SEQ ID NO: 119487 - DNA, 232 bp, Glycine max
cggcaattaatttacaatggccgtcacgaaaagcctctcaatcttcctcttcatcgcaatgagctgcgtcgccgcagctcaggcaacgaacttcaacatcacaaataactgcacctacacggtgtgggccgctgccgtgcccggcggcggcgcaaggcttaaccctggcgaatcgtggaacatcagcgtgacgaacggcacaacaggacgatgcatctggggtcgaacaaac

SEQ ID NO: 119488 - DNA, 246 bp, Glycine max
atgcattctctctcctccccaaaaatcgatttcgtgatgctgctgtaatcctcatgctcattcaccagttcatcacattcggttttgctagtactccactgtactttgtctgggagaaggtaattgggatgcatgacacaaaaagcatttgcataagggcactagcaaggttgccagtggtgatacccatatggttcttggccataatcttccctttctttgggcccatacactctgcagttggag

SEQ ID NO: 119489 - DNA, 253 bp, Glycine max; identical to SEQ ID NO: 106735

SEQ ID NO: 119490 - DNA, 250 bp, Glycine max
ctcaaccaacgtgacagagaaatggttgcacctgcgaggccacagttcgttctcttcggatcctccatcgttcagcttagtttcagccatggcggttggggttcccatctttctgacatctactctcgtaaggcagacatattgttgcgaggatactatggatggaactcacgacgtgccctccaaatcctttatcaagtttttccaaaggatgctgcaacacagccttctcttgtgattgtttattttg

SEQ ID NO: 119491 - DNA, 251 bp, Glycine max
gtggtggacaccttgcagctggtgtggattctctcttcaaaaatggagcaggttgtggtgcctgctttcagataagatgcaagaacccaactctatgtagcaaagaaggtaccaaagtggtattgactgatcttaatcacaacaatcaaactgattttgtgctaagcagcagagcctttgcgggcatggctcaaaagggtatgggccaacaaatactgaagcttggcattgctgaaattgaatacaagaga

SEQ ID NO: 119492 - DNA, 252 bp, Glycine max
ggcacatctgttaaaagataacgcaggtgtcataagatgagctcaacgagaacagaaatctcgtgtggaacaaaagggtaaaagctcgtttgattctgatttccagtacgaatacgaaccgtgaaagcgtggcctatcgatcctttagtccttcggaatttgaagctagaggtgtcagaaaagttaccacagggataactggcttgtggcagccaagcgttcatagcgacgttgctttttgatccttcgatg

SEQ ID NO: 119493 - DNA, 253 bp, Glycine max
attcgattacaacgtcttctggttctttgaagaagaacccttctctttgcgcgtgtcccgttctcttctccaatcctcctccatccccactgtgtgatctgatcctaaaccctatagccatgactaccatggaggttaagctatggaatgacaagcgcgagagagaaatgtatgacaactttggggagctttatgccattatcaaagccgctgagaggcttgagaaggcctatgttagagatataatctcacc

SEQ ID NO: 119494 - DNA, 250 bp, Glycine max
cgcagaggaaaaccctagctagtagtctcagttcgtttgagagagaaaaaatggcagagggtctcgttctccgcggaaccatgcgcgcccacaccgacgtcgtgacggcgattgccactcccatcgacaactccgacatgatcgtgacggcgtcgcgcgacaaatccatcattctctggcacctcaccaaggaggacaagacctacggtgtcccccgccgccgcctcaccggacattctcacttcgtcca

SEQ ID NO: 119495 - DNA, 241 bp, Glycine max
gtagtgtgtggttgaaagttaagaagtagcaaagatgtttccattcgggcacaagggtcaaaagataaaggggactatggtggttatgcagaagaatgtgttggatatcaacagcatcaccagtgttgacgggatcgtcggcaccggcttagacttcttaggcagtgcactcgatacagttacttttttagcctcctccatctccatccaacttattagtgctaccaaggctgatggtggg

SEQ ID NO: 119496 - DNA, 250 bp, Glycine max
ctcgagccgaatcggctcgaggggctcaacaggtgagactcagaacactccaacccatgtagctgatgaagaggcaaacctgtttcgccatgcaactagccagtgcctcagtactccctatggttctcaaatcagctcttgagcttgatctgttggaaatcatagccaaggctggccctggtgttcacctttccccctccgacattgcttctcggctcccaacacacaaccctgatgcacccgttatgtt

SEQ ID NO: 119497 - DNA, 249 bp, Glycine max
ctcgagccgggctcagccggaggtagggtccagcggctggaagagcaccgcacgtcgcgtactgtccggtgcgcccccggcggcccttgaaaatccggatgaccgagtgcctcccacgcccggtcgtactcataaccgcatcaggtctccaaggtgaacagcctctggtcgatggaacaatgtaggcaagggaagtcggcaaaatggatccgtaacctcgggaaaaggattggctctgagggctgggca

SEQ ID NO: 119498 - DNA, 250 bp, Glycine max
cggttatctctgccgccaaggcctaccacgagcagttgtcggtgccagagatcacgtatgccgtgtttgagcccgcgagcatgatggccaagtgtgatcccaggcatggcaagtacatggcttgctgcttgatgtaccgtggtgatgttgttcctaaggacgtgaatgctgctgttgccaccatcaagactaagaggactgttcagtttgttgattggtgtccaactggattcaagtgtggtatcaacta

SEQ ID NO: 119499 - DNA, 253 bp, Glycine max
aaaaagcatcaacgcttgaattctctcgcagctcatcgagaatgtcgaaggaagtgagccagcagaggaaggactacgtagaccctccgccagcccccctcatcgacttggccgagattaagctctggtccttctacagagccctcatcgccgagtttatcgccacactcctcttcctctacgtcaccgtcgccaccgtcattggccacaaaaaacagaccggaccatgtgacggcgttggccttctcggcat

SEQ ID NO: 119500 - DNA, 251 bp, Glycine max
aaaaaaagacaaagaagatcaaggaagtgtcacatgaatggtccttggtgaacaagcagaagcctatttggatgaggaagcctgaggagatcacaaaagaggagtattctgctttctacaagagtcttaccattgactgggaagagcatttggctgtcaagcacttctctgttgagggtcagttggagtttaaggctatactctttgttcccaagagggcaccttttgacctctttgacacaaggaagaag

SEQ ID NO: 119501 - DNA, 247 bp, Glycine max
ctcgagccgctcgagccgagagtttgttgtgagctataagctagtttatcgtgaggagaatctgaagttacttgttttctttgttgctgcagtagttttggtagcatggccatgccatggcgcaggctaccaaaggttccctctccgaatgaaaactggctatggtgagcgttcttcggaggtaaaatgcgcaagttttaggcttgctgtggaagcacacaacatccgagctattaaaaccattcct

SEQ ID NO: 119502 - DNA, 249 bp, Glycine max
atcccggtggccttttccctctctttctctggaaaattcccccgattttctcgagaaagtgaaacggaattatgagctttcaggacatcgaggctgggcggcccttcagttcgaggcgcgggttgatgaacgggaagcaagacccgacgcaagcggtggctgccggaatattccagatcaacaccgccgtctccaccttccagagactcgtcaacaccctcggaacccccaaagacacccccgacctcc

SEQ ID NO: 119503 - DNA, 249 bp, Glycine max
tctgagtattctgatcgctccctgagagagctcgtcgcggcggttgcagaagaagattgcaagatgaagttcaacatcgcgaatcccaccactggatgccagaagaagctcgagatcgacgacgatctgaaactgcgagcattttgggacaagaggatctcacaggaggtcatcggagatgcactcggtgaggaatttaagggctatgtcttcaaaattaccggaggttgtgacaaacaaggatttccc

SEQ ID NO: 119504 - DNA, 246 bp, Glycine max
ctgcgactctctttccttccctctttttccgaatctgaatcgaaatggcttcggtgactgagacgtttgcttttcaggccgagatcaaccagctcctcagtctaatcatcaacaccttctacagcaacaaggagttcattcttcgtgagctcatcagcaatgcctctgctgctttggacaagattcgatttgagagtcttacagacaagagcaagcttgatgctcagccagagttgttcattcaca

SEQ ID NO: 119505 - DNA, 267 bp, Glycine max
ctgcgtgctcgttgaatccatcctaagtgacttgcttgctgaaggcgacacgaggtagaaactaagaatgggggaagagaatgaagaaacaaaaacatttaaggatttgggcttatccgagtcattggtggaagcttgcgaaaaattgggttggaaaaatccattaaagatacagacagaagcaattcctcttgcattggaaggaaaagatgtgataggacttgcccaaactggttccggtaagactggagcttttgctcttcccat

SEQ ID NO: 119506 - DNA, 266 bp, Glycine max
ggcagccaaaacatctaccaacggcactcattattctcgctctcgccccgagtacattccaaaccgcatccccgacccgcattatgtccgcatcctggacaccacgcttcgcgacggcgagcaagcccccggagcctccatggtttccagccagaagcttgctcgccagctcgcgaagcttggcgtcgatgtcatcgaaggaggctttccttcagcgtcgcaggaagacttcaatgctgtcaagatgatagcacaagaagttggcc

SEQ ID NO: 119507 - DNA, 260 bp, Glycine max
attatcactcgctcactcccgttaaaattcaccgccaccatcaccaattcattctcatacattccttcttcttcttcttcttcttcttcttctttcacaatcacaatggcgcgagtggatctggatggtaaccccatcaagccacttacgatctgcatgatcggcgctggcgggttcatcgggtcgcacctctgcgagaagctcatgtccgaaacccctcacaccgtcctcgccctcgacgtctacagcgacaagatcaa

SEQ ID NO: 119508 - DNA, 254 bp, Glycine max
cttcaaaacactcataacacaaagcacaaagcaaagctcatccttgagttaaaaaatggcagcagcttcttccatggctctctcatccccatccttggctggcaaggccgtgaagctgggcccatcagccccagaagtgggaagggtgagcatgaggaagaccgtcaccaagcaggtctcctcaggaagcccatggtacggcccagaccgagtcaagtacttgggcccattctctggcgagcccccgtcctacc

SEQ ID NO: 119509 - DNA, 250 bp, Glycine max
gcgtcttcgagtttcacagcgaagtcgtaggagggtttcaaaagatggagaacatgcagagcttctggcaattgggcgatgaactccgtggacactcaaaagcatcggaggatcacaaatggttaatggttgcttcgaaattggcggaacagacaagattgaagggggagcgtgtgaacaaccttgatctttcaaagggccccattgaaacaaggtcaagggataaatttgggttccaggaagagaacaa

SEQ ID NO: 119510 - DNA, 249 bp, Glycine max
gggagatattgcacgtgcaaggtgggcaatgcgggaaccaaatcggttccaagttctgggaagtgatatgcgacgaacacggcatcgaccccaccggaaagtacaccggcgacgaggcctccgatctccaactggagaggatcaacgtctactacaatgaggcctccggcggaaggtacgttccccgggccgtcctcatggatctggagcccggcaccatggacagcatcagatccggcccatacggca

SEQ ID NO: 119511 - DNA, 245 bp, Glycine max
gccactcttccctcctacgaccacctcatcttcactgccttagctttcttcttatctggccttattttcttcctcaaacacaaatccacatccaaatccaaaaaattcaacctccctccaggcccccctggatggcctattgttggaaacctcttccaagttgctcgttccgggaaacctttctttgaatacgtgaacgatgtgagactcaaatatggctcaatcttcaccctcaagatggggac

SEQ ID NO: 119512 - DNA, 240 bp, Glycine max
ccgcactccgtcttcatcaatcagcatcaccaccgctccaacacaggggaaaatgagggagatccttcacgttcagggagggcaatgcgggaaccagatcggttcgaagttctgggaagtggtgtgcgacgagcacggcatagatccgacggggaagtacgtcggaaactcagatctacaactcgagcgcgtgaacgtgtactacaacgaagcttcctgcgggcgtgtttgtccacgcgc

SEQ ID NO: 119513 - DNA, 248 bp, Glycine max
gtgacttcggaattcccggtgcattttacataaagaacttcatgcaagttgagttctatctcaagtctctaactctcgaagacattccaaaccacggaaccattcacttcgtatgcaactcctgggtttacaattcaaaaaactacaagactgatcgcattttctttgccaacaatacatatcttccaagcgagacaccagctccacttttgaagtacagagaagaagaattgaagaatgtaagaggg

SEQ ID NO: 119514 - DNA, 236 bp, Glycine max
ccgcatgaagctccactacgccgatctctccgacgcctcctccctccgccgctggctcgacaccatcctccccgacgaggtctacaacctcgccgcccagtcccacgtcgccgtctcattcgagatccccgactacaccgccgacgtcgtcgccaccggcgccctccgcctcctcgaggccgtccgctcccacatctccgcctccggccgcgttcacatccgctactaccaagccg

SEQ ID NO: 119515 - DNA, 219 bp, Glycine max
atccaatggactctcccaacgctttgtctaccgctccggcagcgggtagtaggaagaacgcgacgctaatttgcgtcccaataatgggagaatcagttgaaaagatggagattgacgtggacaaagcgaaagccggagggcgagaccttgttgaaattcgattggattctttgaaaacctttgacccctatcgagtattcaacgcgtttcatcaacacc

SEQ ID NO: 119516 - DNA, 253 bp, Glycine max
  unsure (1)..(253): unsure at all n locations
cacagctctcctctcactttcatttctacatccctggctctgttccgtcgatgacgatggcgtttagggtgcgaaaccctgacctccgctttctcattcttctctctctcttgtccatcacttccgccaaggtcttcttcgaggagcgtttcgatgacggatggggaaatcgttgggttaaatcagattggaaaaaagatgagaaccctggctgggagntgaaccacaccntntgccaantgaantgagacgc

SEQ ID NO: 119517 - DNA, 204 bp, Glycine max
cagacgcgttggcaaaggcattcgtggagcactactacagcaccttcgacaccaaccggaacggtttagcgaatctgtatcaggagggttccatgctgaccttcgaagggcagaagatccagggcgcttccagcatcgtcgctaagctcacttccctccctttccagcagtgccaccactccatctccaccgtcgactgccagc

SEQ ID NO: 119518 - DNA, 255 bp, Glycine max
atcggaccactggtgctggtgccactgaggtggcattgaaatttgagcataggaacagcaaaggctgtaattatggccctccttacgagtggcaagtatacaacacccttggtggcagccatggaatacctaaagtacactacaaaggaagacaaggggaatattatgtgatggttatggacatgcttggtccaagcttgtgggatgtttggaattcctcaagccaggctatgactgcggaaatggttgcatgta

SEQ ID NO: 119519 - DNA, 263 bp, Glycine max
ccagattgccatgcattcaaggaatggccatatggaaaaggaaacaaatgcacagtcacatttacaggtcgccagagccattccgtggggagatagtggtggtggttggaaattcttttagtggacaagaaatatcaatggaacttgtgaaagtagtgaaggaactccacctcagttcaaaatcacttgacatttatgagggtttatctaaagtcatatccaaacacgagaactttcatcttcgtccacagatagagaccctt

SEQ ID NO: 119520 - DNA, 249 bp, Glycine max
cattgtcctctcaccacttctccaattgaaaaggcttcttcatcaaaagaacaatggctcaaatttgtttgctcttggtggggcttctctcaatgttctcctctgcctatggctacggatatggtggtggctgggttaatgcacatgccaccttctatagaggaagtgatgcctcaggaacaatgggtggggcatgtggatatggagacctctacagccaaggttatggaacaaatactgctgctttga

SEQ ID NO: 119521 - DNA, 249 bp, Glycine max
caatgccactttgtctgtactccaactggttgaaaatgcagatgagtgcatggttcttgacaatgaagcactttatgacatttgctttaggacattgaaactcagcacccctagctttggtgatctcaaccatctgatttctgcaaccatgagtggggttacctgttgtctgaggtttcctggacaactgaactctgacctcaggaagctggctgtcaatctgattccattccccgtgctcacttcttt

SEQ ID NO: 119522 - DNA, 242 bp, Glycine max
ccgctcgccgctttgtgggccacaccaaggacgtgctctccgtggccttttccattgacaaccgtcagatcgtgtctgcctctcgtgaccgcacgatcaagctgtggaacaccctgggagagtgtaagtacacaatccaagacggcgatgcgcattctgattgggtaagctgcgtccgtttcagccctagcacccttcagcccactattgtttctgcctcgtgggaccgcaccgttaaggtt

SEQ ID NO: 119523 - DNA, 251 bp, Glycine max
atcagatctggagcaggagaatagcgttgggagcgttcgcgtttgttctgcttttcctatcggcctcagcagacgacgtcgttgtgctctctgaagataacttcgagaaggaagttggtcaggacagaggagctctcgttgagttctatgctccttggtgtggacactgcaaaaagcttgctccagaatatgaaaagcttggtagcagcttcaagaaagccaaatctgttttaatcggcaaggttgactgt

SEQ ID NO: 119524 - DNA, 244 bp, Glycine max
ctacgaaaaggtggtgcggaatgcaatcaaaaaggttggaactgatgaggatgcactcacccgtgtggtcgtgagccgggctgagaaggacttgatgataatctcagaggtttactacaagagaaacagtgttcttcttgagcatgctattgccaaggaaacctctggggactacaagaagttccttctcacactgttgggaaaagaagactaaaaacttttcttcgagggcatttgtgattat

SEQ ID NO: 119525 - DNA, 240 bp, Glycine max
caagaatccctccctttctggctttctctctctaaaactatcatgtcctccaccgcggctcccgtccttcccatatccaacccccaaaccaccgccgcaggcacggcgccatcgaggctccggcgaacaacccggccttccgcgccttcatcaacaacctctccgcgtccctccgacacggcctcgaccagcgccgcccgtggtcggagctcggggaccgctccgcgttctcgaagcccg

SEQ ID NO: 119526 - DNA, 232 bp, Glycine max
  unsure (1)..(232): unsure at all n locations
caaagagctaacaagagattcaagaccggcatggctaatgaagaggaacagaaaaaccacctcttcggcatcaaagatctcggtcacaagactctccttcagagtgatgcactctatcagtatatacttgaaaccagtgtctatccaagagagcacgagtgcttgaaagagatacgcaagatgactgcaaaacacccactgaacnatcatgcaacaccagcagacgaaggac

SEQ ID NO: 119527 - DNA, 255 bp, Glycine max
ctcaagcgctggaggaagctccgcatgcagcacaagaaggcgaaggcggcatcgtccaacaacggtttgaagagaacgaggattggaaacggagagaggaggaaccggttaccggctgttcagaagaaagcgcgcgttctcagccggttggttcccggttgccggaaggtttcgttcccgaaccttctggaagaagccacggactatatctccgccttggagatgcaagtgcgagccatgacggctctggccgaa

SEQ ID NO: 119528 - DNA, 247 bp, Glycine max
gtcagtaacttcatcgctcaagcaattcgtggtgaacccttaactgtccaagttccaggaactcaaactcgcagtttttgctatgtctctgacatggttgatggacttatacgtctaatggaaggggaaaacactggtccaatcaacattgggaacccaggcgaatttactatgattgaacttgctgagaatgtgaaagagcttattaatccaaaagtggagataaatatggttgagaacactcctg

SEQ ID NO: 119529 - DNA, 240 bp, Glycine max
cgcctctgttacagctggtggctttcctccccagaacgacaatgtactgatagttataacttcctcaaatcaagtgtatgcatttgacatagaggccaagcagttgggagaatggtccacaagacacacacatgctcttcctaggagataccttgaatttcctggtgaagttattgggctctcattccctccatcagaaacttcatcttctccatcggcaacttcatcttcggttgttgt

SEQ ID NO: 119530 - DNA, 241 bp, Glycine max
gtaaagctagccttgttgcagccatggccacccacgcggctctagcttctacaaggatccccactaacaccaagttcccatccaaggcttcacactctttcccaacccaatgcgcctcaaagcagagacttgacgtgacagaattctctgggctaagatccacttcatgtgtgacatatgctaacgatgctagagaatcttccttttttgatcttgtagcttcccaactcactcccaagac

SEQ ID NO: 119531 - DNA, 242 bp, Glycine max
gctgtctgctgttagatctgtacccgcctagccattgatttggaaaagtccaacttcaaggatgagtaagcttcagagtgatgctctaagagaagctatctcaggaatcatggctgattccaaggaaaagaacaggaaatttgtggagaccattgaactccaaattgggttgaaaaattatgatccccagaaggacaagcgtttcagtggctctgttaagttgcctcatattcctcgcccca

SEQ ID NO: 119532 - DNA, 243 bp, Glycine max
cttcgacctcgcatcgcaccttcaacttaacctatgccacttgtaatcgtaaatagctttgctagaagaagagacaaagtgtgtctgtgtgtgtgagagagagagcaatggctggctcgtgggcacgccgttctctgattgttctagccatcatttccttcggatgtctatttgcgatttccattgctaaggaggaagccaccaagttagggacggtcatcggcacttatcttgaacaaccta

SEQ ID NO: 119533 - DNA, 226 bp, Glycine max
  unsure (1)..(226): unsure at all n locations
tgaaaatgaaggtccttgttttcttcgttgctacaattttggtagcatggcaatgccatgcgtacgatatgttccctctccgaatgaacactggctatggtgcccgtactccggaggtgaaatgcgcaagatggaggcttgctgtggaagcacacaacatctttggctttgagaccattcctgaagangtgcgtgaagcaacaaagggaatacatcantgcgaaca

SEQ ID NO: 119534 - DNA, 236 bp, Glycine max
gagctatggcgcaagaagcagtctgatgttatgagattcttgcagcgggtgaggtgctgggagtatcgccagcaaccttctattgtccgtttgacaaggtctactcgcccagataaggctcgtcgcttgggtttcaaggctaagcagggttacgtgatttaccgtgttcgcgtacgaaggcggtgccgtaagagaccatgttcaaagggtattgtttatgctagcccaccaaccaa

SEQ ID NO: 119535 - DNA, 258 bp, Glycine max
cgctctttggtttgctcaaccgatctccgcagcaatggtgaacgttccgaagacaaagaagacctactgcaagagcaaggagtgcaggaagcacacgctccacaaggtcacccaatacaagaagggcaaggacagcatcgccgctcagggaaaacgccgttatgaccgcaaacagtccggttacggtggccagaccaagcccgttttccacaaaaaggcgaaaaccaccaagaaaattgtgttgaggctccagtgcca

SEQ ID NO: 119536 - DNA, 243 bp, Glycine max
tccgaacgagcgaccttcttcgtttctcgcaaagtttaagtcatcatgggtaaggaaaagactcacatcaacattgtcgtcattggacatgtcgactctgggaagtcaactaccactggtcatttgatctacaagcttggaggtattgacaagcgtgtgattgagaggttcgagaaggaggctgctgagatgaacaagaggtcattcaagtatgcctgggtgcttgacaagctcaaggctgag

SEQ ID NO: 119537 - DNA, 238 bp, Glycine max
ggcgccggcgccgctggttgacccgacggagtttacgtcatggtcgttttacagagcagggatagcagagtttgtggccacttttctgtttctctacatcaccgtcttaaccgttatgggagtcgccggggctaagtctaagtgtagtaccgttgggattcaaggaatcgcttgggccttcggtggcatgatcttcgccctcgtttactgcaccgctggcatctcagggggacacata

SEQ ID NO: 119538 - DNA, 234 bp, Glycine max
ctactctactgcttcaccttctgctctagaaaattcagtggtgatacatggcttcggctactctctctgtagccaaaccagcccttcaggcaaatgggaaaggcttctctgaattctctggcctccgcagctcatcaggcttccttcccttttctagaaaatcttcagaggatttccattctgtcattgccttccagacctatgcagttggaagcagtggaggatacaagaagg

SEQ ID NO: 119539 - DNA, 204 bp, Glycine max
  unsure (1)..(204): unsure at all n locations
aaacaaccttctttctttcaggttcttgatcagtgtcaaaaccaaaagggtggttgcaaattgcaatggctaagcatgatgttgagggtggttccttcgctgcaaaggactaccatgatcctcctccagcaccattgattgatgctgaggaactcacacagtggtccttctacagggcgtttgattgctgagnttcatgccaca

SEQ ID NO: 119540 - DNA, 242 bp, Glycine max
aagacatatttggaacgcaggtttgagaattttgtgggctcttcacgagaagatctgatcaaagatgcacttattgcaactagggagtccttgcaaggtgaaaaactcaggagttctgtgtgcacaattgctgtggttggtgttggtgagccattccacattttggatcaggaaactgttcaacagttgattgatacttttgagattcgagggaggaagaagcgtcaccagcataagaagaa

SEQ ID NO: 119541 - DNA, 244 bp, Glycine max
accctactcattctccatacctcaacgaagaggctaaagagacggcaacactttgctgtccgccttgaccgagcagagcttcgtcttggccctcgattttgccctaaagtactctcagtcacaacagacaccgtcgtcgtcgtcgtcgtcatcaatggcaccgaagcagaccaaggctgagaagaagatcgcttacgatgcgaactgtgcgacctaatggaggagtacggccagatcctcgttg

SEQ ID NO: 119542 - DNA, 241 bp, Glycine max
cttggtgagtgtcactgctgaagagagaaccacgcagaactgacgcaatgggaagcacaagtttgcttcatctattacttggtgttgttttggctctgctgagtgtgtctcttgtggaaggagaagatgcatacaaatactacacgtggactgtgacatatggcattctttctccactaggtagtcctcagcaggtggttcttatcgatggtcagtttcctgggcctcaactagacttggt

SEQ ID NO: 119543 - DNA, 238 bp, Glycine max
aaaacactcataacacaaagcacaaagcaaagctctgccttgagttaaaaaatggcagcagcttcttccatggctctctcatccccatccttggctggcaaggccgtgaagctgggcccatcagccccagaagtgggaagggtgagcatgaggaagaccgtcaccaagcaggtctcctcaggaagcccatggtacggcccagaccgagtcaagtacttgggcccattctctggcgagc

SEQ ID NO: 119544 - DNA, 238 bp, Glycine max
cgaaactcagcgtttcttctgatcatggcaagcacgttgcggttatacttgacctgcattcggaacacgctcgaggccgcaatgtgcctccagaactttccctgccaagaagtcgaaaggcataacaagcccgaggttgaactcaaaaccagccctgaactcctgctcaatccggttttgatatgccgaaatgaggccgaaaaatgcttaatagaaacatctatcaattcattgcgga

SEQ ID NO: 119545 - DNA, 231 bp, Glycine max
ggttgtgctgctgcattgaagcaggctggtgctcgtgtcatcgtgactgagattgaccccattttggcccttaaggttctcatggaaggccttcaggttctgaccttggaggatgttgtttctgaggctgatatctttgtcaccaccacgggtaacaaggacatcatcatggttgaccacatgaagaaaatgaagaccaatgccattgtttgcaacattggtcactttgac

SEQ ID NO: 119546 - DNA, 230 bp, Glycine max
gtgaatgatgcatgctaccatcaaatcattagccattggctaagcactcatgcaattgttgagccatttgtcatagcaacaaacaggcaactgagtgtggttcaccctatttacaaacttctgtttcctcactaccgtgacaccatgaatattaattcacttgcccggaaagccctggtcaatgcagatggtattatagagaaaacattcttgtggggtaggtactctat

SEQ ID NO: 119547 - DNA, 235 bp, Glycine max
ataaaatcctcttaacaagttgttgccgctgcgttgagcatcagtttacagctatcgaagatggctcctcccagaggtcgtggtggttttggtggtggtggtggtggtgggttcaggggtggtggtaggggtgacagaggcagaggaaggggcggtggaggaagaggaggagacagaggtacacccttcaaagctagaggcggtggtagaggtggtggaggccgtggaggaggca

SEQ ID NO: 119548 - DNA, 239 bp, Glycine max
  unsure (1)..(239): unsure at all n locations
caatactaccctggcagggtctctagatggtggctcaagaacagtttggctcaccttgattcctctctcaggaatcttggcactcctctcatcactaagcgatccactgatactctttcttctctatttgaggttgttaagtccactggagccactcaactcttttttaatcatttatatgatcctctgtcacttgtcagggancaccgagcaaaggagngtcntacntcgcagggcat

SEQ ID NO: 119549 - DNA, 241 bp, Glycine max
  unsure (1)..(241): unsure at all n locations
ttggatctcgcactttagaaattagcgaaagagagacgtatgggaatggaagaggagagtagcatcatagaaggtggtgcttcgcttccatcgtcgggttcagacgccaagaagcgaagagtgacctacttctacgagcccaccatcggcgattactactacggtcaggggcacccaatgaagccgcaccgaatccgcgatgcgcacaacctcancgnccacgtcatccgtcaccgccgca

SEQ ID NO: 119550 - DNA, 242 bp, Glycine max
cttcttcgtctcaaacctcttcgttccttcgattcattccatttcttccaaaatggccaaagacccagttcgcgttctcgtcactggagccgcagggcaaattggatatgctcttgtccctatgattgctaggggagtgatgctgggtcctgaccagcccgtgatcctccacatgcttgacattcctccagcagcagagtcgttgaatggggttaaaatggaattggtggatgctgcattcc

SEQ ID NO: 119551 - DNA, 259 bp, Glycine max
gttcgttctcctcatggtgttatgcatggaaaaagctctatggtttactatgatgagaaaggagaagatggattacttgctggactatcaaatcctttcttggctggtagatatcacagccttgtaattgaaaaagagagctttcctcatgatgaacttgaggcaacagcatggacagaagatggtcttataatggctgctcgtcataagaaatataagcatctacagggtgttcagtttcatccagagagcatcataa

SEQ ID NO: 119552 - DNA, 250 bp, Glycine max
gtaagctcccaagcagtgggaggaggctcgggactctgaccgcgtgcctgttgaagaatgagccggcgactcataggcagtggcttggttaagggaaaccaccggagccgtagcgaaagcgagtcttcacagggcaattgtcactgcttatggacccgaacctgggtgatctatccatgaccaggatgaagcttgggtgaaactaagtggaggtccgaaccgactgatgttgaagaatcagcggatgagt

SEQ ID NO: 119553 - DNA, 237 bp, Glycine max
caaaccagggagaataactgtgattacgaggatgggagctgaaaatatgagggtgaagcttccacatctcatcagggcagtgcgcagagcagggcaaattgtcacctgggtcagtgatcctatgcatggaaacaccattaaggctccatgtggtcttaaaactcgccccttcgatttcatcagggctgaagtgagagcattctttgatgtgcacgagcaagaaggaagccacccagg

SEQ ID NO: 119554 - DNA, 239 bp, Glycine max
cttctgctacttcctactccaaccgcacttctgctccgcaattatcatgggcaaggtcaagatcggaatcaacggatttggaagaattggccgtttggtagccagagtggctctgcagagagacgatgttgaactcgttgccgttaacgaccctttcatcaccaccgattacatgacatacatgtttaaatacgacagtgttcatggacactggaagcatcacgatgtcaccgttaagg

SEQ ID NO: 119555 - DNA, 242 bp, Glycine max
tgccattccagaccctaaggcggtgcagtacgtgagaaacgaccgtggcactcccatgattctagacaacaactactacagaaacatattagacagcaagggtctcttgatagtggatcaccaactagccaatgacaagaggaccaagccttatgtgaagaaaatggccaagagccaagactatttcttcaaggagttctctagagccattaccttgctctcagagaacaaccctctcactg

SEQ ID NO: 119556 - DNA, 246 bp, Glycine max
cagaaacaaaagtggcagtattaggtggcatcaccgaagtgcagggagctgccaacagcgtcgagatcaacaatctcgctcgctttgctgtagaggaacaaaacaaaagagagaattcagttctggagtttgtgagggtgattagtgcaaagcagcaagtggttgctggagtgaattactacataacattggaagcaaaagatggtgagattaaaaatgagtataaagcgaaggtttgggagaggg

SEQ ID NO: 119557 - DNA, 213 bp, Glycine max
attggcttggctttggcttgatttgtttcctaagaagaagaagaagaatggaagagaagcagagagtgataatagtgggagcagggccttcggggatatcggcggcagcatgcttcacgaaacagtcgactccgtacataatcctggccagggaagactgttccgcttccctgtggaagaaatattcatacgagcgcctccatctccacctca

SEQ ID NO: 119558 - DNA, 236 bp, Glycine max
gtttgcagtcactgctttgtttagatcagaaccagatcgtgttctcttcttccattggcaaacatggcaactcaaatgagcaagaagagaaagtttgtggcggatggagtgttcttcgccgaactgaacgaggttctgacacgtgagttggcggaggacggttactccggcgtggaggttagggttacgccgatgcgcaccgagattatcatcagagccaccagaacccaagccgt

SEQ ID NO: 119559 - DNA, 236 bp, Glycine max
ggagtgagagagagtgttcttcgtttgctaccttctcccagaaatggttacgttcaggtttcaccagtaccaggtggtcgggagggctctcccaacggaagcagatcagcatccgaagatctaccgaatgaagctctgggccaccaacgaggttcgcgccaagtctaagttctggtattttttgaggaagctgaagaaggtgaagaagagcaatggtcaagttcttgctatcaacg

SEQ ID NO: 119560 - DNA, 237 bp, Glycine max
ccctgccaacatgggtatctccagagattctatgcacaagaggcgtgccactggtggcaagaagaaggcatggaggaagaagagaaagtatgagcttggtcgccagcctgctaacactaagctgtcaagcaacaagacagtcaggaggatccgggttagaggtggaaatgtgaagtggagggcactgagattggatactggaaattactcctggggaagtgaagctgtaactcgcaa

SEQ ID NO: 119561 - DNA, 177 bp, Glycine max
gttgatcgagataactagaaacagtgtgatgaaaatgaaggtccttgttttcttcgttgctacaattttggtagcatggcaatgccatgcgtacgatatgttccctctccgaatgaacactggctatggtgcccgtactccggaggtgaaatgcgcaagttggaggcttgctgtgga

SEQ ID NO: 119562 - DNA, 246 bp, Glycine max
actcgagccgcggctcgaggaaaaatgctgtgattttttgcaaaaagagtcttgagtctgatcgcttaagggatcacttggccaattttgctgaacaattaaataaagcaagacagatgatttatcctcctgataggagatcatcaaaacttggagctttacttccctctttgacagaggttgtggccaaagaacacaagaggcttcttgctcgaaaatcaattattgagaaaaggaaagaagaac

SEQ ID NO: 119563 - DNA, 234 bp, Glycine max
gcagaaatgatatgatgggttgtggcggtgcattctcagtgtggctgccagtgtttgtgtcttgttttacagcaatagcattggctgggactgggtgcgataaggcaccggtggtgttcgtgttcggcgattcgaactcggacacgggtggactcgcttccggtctgggtttccctatcaatcttcccaatggccgcaatttctttcacagatccactggccgcttgtccgatg

SEQ ID NO: 119564 - DNA, 239 bp, Glycine max
cggcgtcgttgtataccagtctttcttcttcttcttctttctgtgttgacggtggcgttgatctgattagaatctgggatccgatcacagccatggcaggggcagcctctgctctgttcctcctcgacatcaaaggccgcgtcctcacatggcgcgactaccgcggcgatgtctccgccctcgacgccgaacgcttcttcaccaaactcatcgaaaaacagctcttttttttttttggt

SEQ ID NO: 119565 - DNA, 238 bp, Glycine max
ctattcttcaagattcaggtactgcggatcggaagcagacacagatggctcgtacgaagcaaaccgctcgtaagtccacaggaggaaaggctcctaggaagcagcttgcaaccaaggctgcacgtaagtctgcaccaactactggtggtgtgaagaagccccaccgttatcgtcctggtaccgttgctcttcgtgagattaggaaatcccagaagagtaccgagcttttgatccggaa

SEQ ID NO: 119566 - DNA, 239 bp, Glycine max
aaatcattgttctacgaagctcccctcggatacagcattggggacgttagaccaatcggtggaatcaagaaattcagatctgctgcttactccaactgcgctcgcaaatacttctgatatccatccagattgatagttcattgcatgcaaccatagttttcttaggttttatcttctttgttttcaattaggtttttgctgctctccttcaaactccgtctttccgaatcctctctttg

SEQ ID NO: 119567 - DNA, 235 bp, Glycine max
cgaccatggtgcacgtctccttttacaggaactatggtaagacgtttaagaagccccgccgtccgtacgagaaggagcgtctagacgcggagctgaagctggtgggggagtacgggctgcggtgcaagagggagctgtggagggtgcagtacgcgctcagccgcatccgcaacaacgcgcggaatctccttaccctcgacgagaagaacccgcgccggatcttcgagggcgaggc

SEQ ID NO: 119568 - DNA, 232 bp, Glycine max
atttggagtttggagcgactaaactaatcattaatttgcactcgctgtttcagcttcatcacccttcttttgcatcatttatatctcttgagatatggcacaagaaacctttctattcacatctgaatctgtaaacgagggtcaccccgacaagctgttcgatcagatctctgatgcagtacttgatgcgtgccttgaacaggaccctgacagcaaggttgcctgtgagaca

SEQ ID NO: 119569 - DNA, 251 bp, Glycine max
attcgcacgcattgcttcgcctcacaacagcagctgaagcagcaatggctcccaaacgaggtggaaaggctccggctcttgccgctaagaagaagcctgagaaggtcacgaatccgttgttcgagaagcgtccgaagcagttcggaatcggaggggcgttgcctccgaagagagacttgactaggttcgtgaagtggccaaagaatgttcaaattcagaggaagaagaggattctgaagcagaggttgaag

SEQ ID NO: 119570 - DNA, 235 bp, Glycine max
caagcattgggtcgaactcttctttgatgtcaaagtaatagctatgaatagtcatcgactcccggtaaagggtagaagagtacgacctattatgggacatacaatgcattacagacgtatgattattacgcttcaaccgggttattctattccacctcttagaaagaaaataacttaaatcataatacttaatagcatggcgatacatttatacaaaacttctaccccaagcaca

SEQ ID NO: 119571 - DNA, 236 bp, Glycine max
atcagaggctccccctaacttctggggccacaccccggaagaagaatactacacctcccaaggcgttcgcaacaccaagtcccacttcgaaacccccaacggcaaaatcttcacccagtccttcctccctctcaacctccaaccccaccaagtcaaagccaccgtctttatgacccacggctacggctccgacaccggctggctcttccagaaaatctgcatcaacttcgccacct

SEQ ID NO: 119572 - DNA, 241 bp, Glycine max
gctgagatgaacaagaggtcattcaagtatgcctgggtgcttgacaagctcaaggctgagcgcgaaagaggaattaccattgatattgctttgtggaagtttgaaaccaccaagtactactgcacagtcatcgatgcccccggacatcgtgactttatcaagaacatgattactggtacctcccaggctgattgtgctgtccttatcattgactccaccactggtggttttgaagctggta

SEQ ID NO: 119573 - DNA, 237 bp, Glycine max
gttatttctcagcgcgtaaagcatggctttgttggtggagaaaaccacgagtggtcgcgagtacaaggtcaaggacctttcccaggccgacttcggccgcctcgagatcgagctggccgaggttgagatgcccggcctcatggcctgtcggaccgagttcggcccctcccagcccttcaagggggcccgcatcaccggctccctccacatgaccatccagtaagccgttctcattga

SEQ ID NO: 119574 - DNA, 235 bp, Glycine max
  unsure (1)..(235): unsure at all n locations
tctgttttggcttcttcgctgcaactctctaccttccctctttttccgaatctgaatagaaatggcttcggagactgagacgttcgcttttcaggccgagatcaaccagctcctcagtctaataatcaacaccttctacagcacctaggagcccantcttcgtgagctcatcagcaatgcctctgacgctttggacaagattcgatttgagagtcttacagacaagagcaagctt

SEQ ID NO: 119575 - DNA, 251 bp, Glycine max
  unsure (1)..(251): unsure at all n locations
aacaagggtttctctgtctgcttcttcactttctctcgtttcaatcgaaaccaaaacaaaaacatgggcagaaaattcttcgtcggtggcaactggaaatgcaatgggaccactgaggaggtaaagaagattgttactactttgaatgaggctaaagtccctggagaagatgtcgtagaagttgttgtgagccctcctttgtgttccttcctgttgtaaaaagtttgctgcgccctgtttncnatgtttcg

SEQ ID NO: 119576 - DNA, 249 bp, Glycine max
gttcaatttgtcgccgttgttcgaggagaagaggaaggaggagatgaggttcgccaccgcggggacgccgagcagcgtcatttcgcgcctggaggaggtggccaaggcggggaagtttgacgtgaagagtagcgagacgaaagtgaggcttcagggacaggagcgtgggaggaaggggaagctagcgattgcggcggatatctacgccgtgacgccgtcgtttatggtggtggaggtcaagaaggacaa

SEQ ID NO: 119577 - DNA, 232 bp, Glycine max
ctccaaccgcacttctgctccgcaattatcatgggcaaggtcaagatcggaatcaacggatttggaagaattggccgtttggtagccagagtggctctgcagagagacgatgttgaactcgttgccgttaacgaccctttcatcaccaccgattacatgacatacatgtttaaatacgacagtgttcatggacactggaagcatcacgatgtcaccgttaaggacgagaaga

SEQ ID NO: 119578 - DNA, 235 bp, Glycine max
agcaaacaaaattcttcgtatttgcttcttgcttttttctttttgaaccacaaaatggccgacgacagcacagctacctgcatcgacatcctccttgccatcatcctccctcctctcggtgtcttcctcaagtatggatgcaaggtagagttctggatctgtttggtgcttactctttttggttacattcctggaattatctatgctgtctatgctatcaccaagtgatcatatt

SEQ ID NO: 119579 - DNA, 233 bp, Glycine max
gccgcccaaaaccatttatagggttttcttttctttgccaagaaaatgagagagtgcatttcaatccacattggtcaggccggtatccaggtcggaaacgcctgctgggaactctattgccttgaacacggcattcagcccgatgggcagatgccgagtgacaagaccgttggaggaggagacgacgccttcaacacattcttcagcgagaccggcgccggaaagcacgtgcc

SEQ ID NO: 119580 - DNA, 234 bp, Glycine max
gtttctgtctctgtgtttgcggctgaggattccgaacgagcgaccttcttcgtttctcgcaaagtttaagtcatcatgggtaaggaaaagactcacatcaacattgtcgtcattggacatgtcgactctgggaagtcaactaccactggtcatttgatctacaagcttggaggtattgacaagcgtgtgattgagaggttcgagaaggaggctgctgagatgaacaagaggtca

SEQ ID NO: 119581 - DNA, 238 bp, Glycine max
ttcagatgatggcgagtgagtcgcaaaactgggtgttcatggtcactgcacagacaccaaccaacattgccgttatcaagtattgggggaaaagagacgaaaccctcatcttaccggttaacgacagtatcagtgtcactctcgatcccagccacctctgcaccaccaccactgctgccgtcagtcccgctttccaccaagatcgcatgtggctcaatggaaaggagatttctctttc

SEQ ID NO: 119582 - DNA, 166 bp, Glycine max
tctattcttaactcaacttctgctacccactctcttcttccaagtccaaccacgcttttctctacagtcatgggcaaggtcaagatcggaatcaacggatttggaagaattggccgtttggttgccagagtcgctctgcaaagagacgatgtggagctcgttgccg

SEQ ID NO: 119583 - DNA, 236 bp, Glycine max
gcgactgcgcttcacgatgggtgcttacaagtatgtttcggagctatggcgcaagaagcagtctgatgttatgagattcttgcagcgggtgaggtgctgggagtaccgccagcaaccttctattgtccgtttgacaaggtctactcgcccagacaaggctcgccgcttgggtttcaaggctaagcagggttatgtgatttaccgtgttcgtgtacgaaggggtggccggaagagac

SEQ ID NO: 119584 - DNA, 235 bp, Glycine max
gggcatattgatgccaacgggtgccataatcgcaaggtacttgaaggtgttcaaatctgcagaccctgcttggttttatcttcacatcacctgccaagcctctgcctacatagttggtgtttctggattcggcaccggtctcaaactcggcagtgactccgagggtgttgagtatgacactcacagagcacttggtattgtcctcgtctgccttggaactcttcaggtgtttgcg

SEQ ID NO: 119585 - DNA, 240 bp, Glycine max
  unsure (1)..(240): unsure at all n locations
ggcaagttgcaagatggaactgttttcgttaagaatgcgtacgttgatctacagccatttgagttcaaaattgatgaagagcaagtaattgatggacttgaccaagctgtgaagaacatgaagaaaggggaaattgcattgctgatcatacagcctgaatatgcttttggtccatctgggtcctctcaggaattggctaatgttcctcctaattccactgtgtactacgaaatngagctg

SEQ ID NO: 119586 - DNA, 246 bp, Glycine max
caccaggcgcacgttagcacaaactatcatggccacggcaacagcagctgccacctcgtcctttatggggacgcgtctcctggaggctcactccggagcggggcgagtgcacgcccgattcggcttcggcaagaaaaaggctcccgccccaaagaaagcctccaggggatcgggccgagacaccgacagacccctttggtatccgggcgccaaagcgcccgaatacctcgatgggagtcttgtcgg

SEQ ID NO: 119587 - DNA, 242 bp, Glycine max
cttcttcgtcccagatcccggtggccttttccctctctttctctggaaaattcccccgattttctcgagaaagtgaaacggaattatgagctttcaggacatcgaggctgggcggcccttcagttcgaggcgcgggttgatgaacgggaagcaagacccgacgcaaacggtggctgccggaatattccagatcaacaccgccgtctccaccttccagagactcgtcaacaccctcggaaccc

SEQ ID NO: 119588 - DNA, 246 bp, Glycine max
caggctgcgcagtgtttgaacgttgaaggagagcgtagaggcagtggttttctttttttgatttctctttgtagaatcgaatcgagttaatttttgatcgtgtgagtgtccgatcttgaaatccacaacaacaatggtgagaggattgctcaacaagctcgtctctcgctccctctcggtcgccggaaaatggcagcacaatcaactccgccgcctcaacatccacgagtaccagggtgctgaatt

SEQ ID NO: 119589 - DNA, 231 bp, Glycine max
  unsure (1)..(231): unsure at all n locations
gttcgcaacacgatcactattctgcgacgatggtggcatcttcgagttcttggggaagggcactcgtcgcgatctcgccctacaccttctccgccatcggcatcgtcgncgctatcggcgtctccgtcctcggcgccgcctgggggatctacatcaccggaagcagcttgatcggcgctgcaatcagggctactcgaatcacttccaaaaatctcattagtgtaatcttct

SEQ ID NO: 119590 - DNA, 233 bp, Glycine max
cgcgtcgctgctccgtaccagtttcactgcataaatttgagagaaaactctgcaaacatgttggtttatcaggacctccttacaggtgatgagcttctctcggactccttccgttacaatgaaattgagaatggaatgctgtgggaagttgaggggaagtgggttgttaagggagcagttgatgttgacattggtgcaaacccttctgctgagggtggagaagatgagggagt

SEQ ID NO: 119591 - DNA, 237 bp, Glycine max
aacacaaagcacaaagcaaagctcatccttgagttaaaaaatggcagcagcttcttccatggctctctcatccccatccttggctggcaaggccgtgaagctgggcccatcagccccagaagtgggaagggtgagcatgaggaagatagtcaccaagcaggtctcctcaggaagcccatggtacggcccagaccgagtcaagtacttgggcccattctctggcgagcccccgtccta

SEQ ID NO: 119592 - DNA, 241 bp, Glycine max
gtcttcataaacgccgcccaaaacttctcatacccttttattcattccattcgtttctagggttttcttttctttgccgagaaaatgagagagtgcatttcgatccacattggccaggccggtatccaggttggaaacgcctgctgggaactctattgccttgaacacggcattcagcccgatggacagatgccgagtgacaagaccgttggcggaggagacgacgccttcaacacatttt

SEQ ID NO: 119593 - DNA, 235 bp, Glycine max
gtggatgttgatgctgcaaacaagtatggtgttgctgttggaaatactcctggagtgctcactgagacaacagcagagttggcagcttcactaactttggcagctgctagaaggatagttgaggcagatgagttcatgagagcaggattatatgatggatggctacctcatctatttgttggaaacttgctcaaggggcaaacagttggtgtaattggagctggtcgaattggat

SEQ ID NO: 119594 - DNA, 247 bp, Glycine max
gaacccttccactgtggtgactctgcgatgggtgcctacaagtatgtttcagagctatggcgcaagaagcagtctgatgtcatgcgcttcttgcagcgggtgaggtgctgggagtataggcagcaaccttccattgttcgtttgacaaggtctacccgccctgacaaggctcgtcgcttgggcttcaaggctaagcagggctatgtgatttaccgtgttcgtgttaggaggggtggcgaaagagaca

SEQ ID NO: 119595 - DNA, 266 bp, Glycine max
cctcgagccgattcggctcgaggcgcagtccaaccctcaaaatgccctcattcggctacagacgccaacgcgttgctaacctatgccgtaaccattctggcgcttatgtgcgctatggcttctgtatccgacaacttcaacacccccactccctctgcacaagtccaggttctgaacatcaactggtttcagaaacaacccaatggcaacgacgaggtcagcatgacgatgaatatttccgcagacttgcagtcccttttcacatg

SEQ ID NO: 119596 - DNA, 263 bp, Glycine max
caacgacaaaatcggaatctactaagaccgtctcaacacctacgtaacttaccggaaccagcaggtcacgtaccgaacctcaatcccaccctcgtaccaaggtcacaaggaagaggatgtgtggtccccgtttgtctacggcactaatgtccccgtcgcaccctacaacttcgttggcctcagtcaagaccagaccaacggcaacgtcctcgtcctcgttaagattgacggtaaggtacgatggaaagttggttccttcgtct

SEQ ID NO: 119597 - DNA, 260 bp, Glycine max
cacaaccttctgcttctgtatttcttgccatgaatgcacttggaattatagccttttctttcagaggccacaatttggccctagaaattcagtcatcaatgccttcaacttttaagcacccggctcgtgtgccaatgtggaaaggagccaaggttgcttatttcttcattgcaatgtgcctcttccctattgctattggtggcttttgggcgtatggcaaccaaatgcctcctggagggattctcactgctttgtatgca

SEQ ID NO: 119598 - DNA, 259 bp, Glycine max
ctctttataccccccctctcttttttgcgttcattctgttttcctgttgaagtctttccctagccaatggccaccgatcgtttgacccgggttcacagtctccgtgagaggcttgatgaaaccctcactgccaacaggaatgaaattttggcccttctgtcaaggatcgaagccaagggcaagggcatcctgcaacaccaccaggtcattgctgagtttgaggaaatccctgaggagaacagacagaagctcactgatg

SEQ ID NO: 119599 - DNA, 257 bp, Glycine max
ctcagatagggcacgtctctcgcggcctcttctctccctcgcgccgcccacactaaaaggttattgctctattattgtttgacgatggctgatgctcatgggactgataagaacattgaggtgtggaaaatcaagaaattgatcaaagctcttgaggctgccagaggaaatgggacaagtatgatttcccttatcatgcctccacgtgatcaaatatctcgtgtcaccaagatgcttggtgatgagtttggaactgc

SEQ ID NO: 119600 - DNA, 258 bp, Glycine max
cacacgacacactcccatacacacacgttgtctcgcacacattccttcattccgcagcagcaaacatctttaccttaaacgacaacaatggccgatgccgaggatattcaacccctcgtttgcgataatggaaccggaatggtcaaggctggttttgccggagatgatgcgccgagggcggtgttccccagcattgtggggcgtccacgtcacacgggagtgatggttgggatggggcagaaggatgcgtatgttggg

SEQ ID NO: 119601 - DNA, 260 bp, Glycine max
cacgaaatttggcattgcagtgcatcatcgcatcgattgcgcaggaagatcggtagcgaaggcaaacgcaaagagcgagaatcaataataacgacggttatggctcacggacgtagatacgtgcaatacaacgtgtacggaaacttgttcgcaggtctcctccaagtaagtccctcccattcgccctgtcggtagacgcgcatacggcatcgattgtgctgctgtcaattgcgatacgcacgatgaagttgccataaaga

SEQ ID NO: 119602 - DNA, 210 bp, Glycine max
ctcgagccgctctcattctccattctcacttctcaaattgaatcgaacgaattcacaaaccctagttttcgaggatgggtcagatccagtactccgagaagtacttcgatgacacttacgaatatagacatgtggttcttcctcctgaagtcgcaaaactgcttcccaagaatcgtcttctctccgaaaatgagtggcgggcaattgggg

SEQ ID NO: 119603 - DNA, 190 bp, Glycine max
  unsure (1)..(190): unsure at all n locations
ctccgttcctctttacgccaacaaagtcggtccctttcacaaccccagtgaaacgtatcggtactttgacctgccattctgtgtaacaggtcatgagaaagataagactgatgccctcggtgaggtgttaaatggcgatcgncttgttagtgctccttatgaacttagtttcaagaaggagaaagactct

SEQ ID NO: 119604 - DNA, 258 bp, Glycine max
ctctcattttgcaaagaggaggcaccatgacaagcactcttctgtcgttgcttttcttgctcttctcccttctcattccatccttcatttcctcttcaccagttcgaaaccctgaagaagtcgtacaagaggtcaacaggaaaataaatgggtctatagcaaggcctaggagaaacttgggctacctctggtgtggcagtggcaaccccattgatgactgttggaggtgcgaccccaactgggagcagaacaggcaga

SEQ ID NO: 119605 - DNA, 261 bp, Glycine max
ttttctctctcgttttttctcaaaaagtttcaagagttaaagcaaaaaccaaagtgagagagaaaatgatgaagccatcgatgctcagatctcttcactctgccgccacccgcggcgcctcccacctctcccgccgtggctacgcctccgagccggtgccggagcgcaaggtggccgttctaggtgccgccggcgggatcgggcaacccctctcccttctcatgaagctcaaccccctcgtttccagcctctccctctacg

SEQ ID NO: 119606 - DNA, 262 bp, Glycine max
ccacattccaacacaacaacaacatcaaagcagaaacacacgcacatattcgtgttcgaagtgaaacccacagagaacacagagcagagagcaggagcgaagcatgacttcgaagcagacatacagcgtgtgcttctgctggcgacggcggttcaagctggcgctggcggaggcgccgtcggagatcaagaccctcttcgaggagtactccgagaatgagttcatgacaccttcgcatctcaaaaggtttctcgtggaagtg

SEQ ID NO: 119607 - DNA, 261 bp, Glycine max
tgtcagaccaaaaaaatctgtgttggttgattttcttgtgggggctggtatcaagccaacatctatagttagttacaaccatctgggaaacaatgatggtatgaatctctcggctccacaaaccttccgctcgaaggaaatctccaagagcaacgttgttgacgatatggtcaacagcaatgccatcctctatgagcctggtgaacatccagaccatgttgttgttattaagtatgtgccttacgtaggggatagcaagag

SEQ ID NO: 119608 - DNA, 180 bp, Glycine max
catagttgggctttcaagaagcaattcgccatccagttagccctttcaagtttcatgtccttcatgctacaaattggtgggaggtccccgaataagattttgtttgcaaagaacactggaaaaatatttcaaactgattttcaccctgggtatgatgcaaatggattgattgggtttaat

SEQ ID NO: 119609 - DNA, 256 bp, Glycine max
ctcgagccgactcggttctgccttcacaaaaaaattatcataatcccctttttctcctaagacaagccatggctaagggtcccggtctctactctgacatcggcaagaaagccagggatctgctgttcaaggactaccacagtgaccagaagttcaccatcaccacctactcacccactggagtagctataacagcatcaggaaccaggaccagtgaactgtttgtggctgatgtcaacacccagtgcaagaacaa

SEQ ID NO: 119610 - DNA, 261 bp, Glycine max
gatgaagcgtcggttcctttaggtactcctggctcatccactcacaagatgagccaagtactctacgccaccacgtagaagccgatggtgggtttgtaaaaacaagaggagtgcagcttatgctgaatgggagtccctactatgctaatggctttaatgcctattggcttatgtaccttgcctctgatcattcccagagagactccatctcatcggtatggccacaggcttcaaatcatggactcaacattgccagaactt

SEQ ID NO: 119611 - DNA, 241 bp, Glycine max
tgaaggtcttggctggtgtgaacacaaacttcactgtgacgtcaaaagcagcagatgatggagaattctcagaactctacatcttcaagtggacatcactcttgatccctccaatgaccctactaatcatgaatattgttggggtggttgttggggtctcagatgccatcaacaatggttatgattcatggggacctctctttggtagattgttctttgcatggtgggtgatcctcaatct

SEQ ID NO: 119612 - DNA, 192 bp, Glycine max
gggatgattctagtaacaatgctgtttgctgtcctgggagtcctttctccttcaaaccgaggcgggctaatgacagccatgctcttgctttttgttttcatggggatttttgctggttatgcctctgcccgcatatataaaatgttcaaaggaacagagtggaagagtattgccctcagaactgcaatcatg

SEQ ID NO: 119613 - DNA, 259 bp, Glycine max
tcctgctcctatatcttcaggaactgctgtggaagggtctgatatctatgggcaggctgcatccaatctggttgctggaagcaacttggagggaacaattcagcaaattcttgatatgggtggagggagctgggacagggataccgttgtccgtgctcttcgagctgcctacaacaaccctgagagagctgttgaatatttgtatacaggtatccccgagcaagctgaagctccacttgtagcccaagtgcctgcaagt

SEQ ID NO: 119614 - DNA, 258 bp, Glycine max
ctcttctacgacgcaagcagcttctagttgtgtaatttctgcgtgggctgcaatggattccggtgtccagggttgcatcttagccactttaattctccacgacgaggaaattccagtcaccgctgagaagatcaacgctctgttgaaggcctctaatgtctccgccgagtcatactggcccagcctcttcgccaagctcgcccagaataagaacatcgaagacctcattttgaacgccggtggtggtggtggtgccgc

SEQ ID NO: 119615 - DNA, 255 bp, Glycine max
ctctctcatggctgcttccaagcttttttctgcttctctcctggtctccatggtcaccctcttggtcctttcgtcggacaagtgcctcgcgttgcaatgcggggtttcctatgagacaatcaccgtcgtcaatgagtttcctcacgatccacaagccttcactcagggccttctttatactggaaatgacaccttatttgagtcaactggactttatggggagtcatctgtccgtaaagttgctctttgtactgg

SEQ ID NO: 119616 - DNA, 258 bp, Glycine max
gaaagaacggaaaaatctacgtggtgacagattccggcgacgacgatccggtaacccccaagccgggaactctccgttatgcagttattcaagacgagcctctctggatcatcttcgcaagagacatggtgatcaagctgaaggaagagctgatcatgaactcattcaaaaccattgatggaagaggtgctagcgtgcacattgcgggtggtccatgcataacgatacagtatgtaacaaacgttataatccatggga

SEQ ID NO: 119617 - DNA, 257 bp, Glycine max
gccatggccacccacgcggctctagcttctacaaggatccccactaacaccaagttcccatccaaggcttcacactctttcccaacccaatgcgcctcaaagagacttgaggtgacagaattctctgggctaagatccacttcatgtgtgacatatgctaacgatgctagagaatcttccttttttgatcttgtagcttcccaactcactcccaagaccaatggatcatcaactcctgtgaggggagagacagtggc

SEQ ID NO: 119618 - DNA, 226 bp, Glycine max
gagaatggctcccaagggtttaacctttctggctgtgttaatatgcgtttcagcactgtcactgagtccttctgttgcgggggaagggcaaaataatggccttgttatgaacttctacaaggaatcatgccctcaggctgaagacatcatcacagaacaagtcaagcttctctacaagcgccacaagaacactgctttctcctggctcaggaactatcttccatga

SEQ ID NO: 119619 - DNA, 259 bp, Glycine max
catgaactcttggggtggtgatggccaagtcattaacacatttaaggaaatgaaaatcgttttcttttgaagttggaatcctcacaatttttggctatctagagccgcgtttgagggaggagctgaagaagaattaccggattgtggacaatggttacaattcctttccaacgtgcatcccgggaacacaataccaaaaggcactattggctagaaggagacttggcaagattataggtgacataatttgtgagaggaa

SEQ ID NO: 119620 - DNA, 258 bp, Glycine max
ctcaagcgctggaggaagctccgcatgcagcacaagaaggcgaaggcggcatcgtccaacaacggtttgaagagaacgaggattggaaacggagagaggaggaaccggttaccggctgttcagaagaaagcgcgcgttctcagccggttggttcccggttgccggaaggtttcgttcccgaaccttctggaagaagccacggactatatctccgccttggagatgcaagtgcgagccatgacggctctggccgaacta

SEQ ID NO: 119621 - DNA, 257 bp, Glycine max
gtttcgggggaagagatccagcagcaatggtgtacgtcaaggctcagaaatcaaaagcctacttcaagagatatcaagtcaagttcaagaagaagagagggaaaaaccgattaccgtgccaggattcggttgattaatcaggacaagaacaaatataacactccgaaataccgatttgtggttcgctttagcaacaaggacattgttgcacaaataatatctgctagcattgccggcgatttagttcttgctacagc

SEQ ID NO: 119622 - DNA, 255 bp, Glycine max
gcaaagctcatccttgagttaaaaaatggcagcagcttcttccatggctctctcatccccatccttggctggcaaggccgtgaagctgggcccatcagccccagaagtgggaagggtgagcatgaggaagaccgtcaccaagcaggtctcctcaggaagcccatggtacggcccagaccgagtcaagtacttgggcccattctctggcgagcccccgtcctacctaaccggtgagttcccaggcgactacggctg

SEQ ID NO: 119623 - DNA, 226 bp, Glycine max
agccattcgcccagcaaagaaccctttttgcgtgaagggtcgtgtcaactgtgacccttgccgtgctggttttgagacctcagctaccacctacattgctggtgctgagattatgttgcaatgcaagagcagggttagcaacgaggttgtctacacgaagaaggggtacaccgactcaaccggagcatacacaatgtacgtggatgaggatcacgcagatcagatc

SEQ ID NO: 119624 - DNA, 254 bp, Glycine max
atttgaaacaaagctcggcatcaagatcacatgttctcaggaaactgaaccattgggaacagcaggtcctctggctcttgccagggataagctgatagatgactctggagaacccttttttgttctcaacagtgatgttatcagggtatccccactcagagatgattggattcctttaaaaccatggaggagaggcttccataatgctaaccaaggttgacgagccatcaaagtacggcgtggttgtgatggaa

SEQ ID NO: 119625 - DNA, 235 bp, Glycine max
gctgacgggtcttgatgctggggattcacttgatattgacaagtcaatttctcagatgctcaatatggccaacttggcagcagaagtgcaaattgcgtatcgaagaaggatcaagtcagtgaagaagggtgatttcgctgatgagaactctgccatgactgagtcagacattgaagagaccttcaacaaccttgtggctcactgaacgaagtcgccccaggaaatctttgatgct

SEQ ID NO: 119626 - DNA, 255 bp, Glycine max
gttattgttggctatgtgtgtgcttccggcgatggttgtggccattcgcccagcaaagaaccctttttgcgtgaagggtcgtgtctactgtgacccttgccgtgctggttttgagacctcagctaccacctacattgctggtgctgagattatgttgcaatgcaagagcagggttagcaacgaggttgtgtacacgaagaaggggtacaccgactcaaccggagcatacacaatgtacgtggatgaggatcacgc

SEQ ID NO: 119627 - DNA, 257 bp, Glycine max
ctcagcacgcagaggagcagaagcctaagccttcaacatggcgagagggttgaagaaacacttgaagaggctcaatgctccaaaacactggatgcttgacaagcttggtggggcctttgcaccgaagccatcatctggaccccacaagtccagggagtgtcttcctttgatcctcatcctacggaacaggctaaagtatgctctaacatatagagaagttattgccatcttgatgcagcgccatgttcttgttgatg

SEQ ID NO: 119628 - DNA, 188 bp, Glycine max
atcctctcagaaccctcgatcactcccacgcgctcctatatcacctccttcaccgtcgctctctccaacgatcacaacaacatcgtcatcccatggcaaacgccgcatctggtatggcagtccatgatgactgcaagttaaggtttttggagctgaagacaaagaggacacaccgtttcatagttttt

SEQ ID NO: 119629 - DNA, 255 bp, Glycine max
cttccttccacttccaattttcaataattcacgactccttccgagatctctctctctcgcccacaatccaaccatggcgaatacgtggaatttagacgcggcgatagagcaattgctgaacgtggagaagcagatgaggctcgccggtgacgtggcgggtaccagaaaagcagccaccgatattttgcagctctgcttcgatgcacgagcctggaaaacactcaatgaccagattgtcgttttgtcaaaacgacg

SEQ ID NO: 119630 - DNA, 251 bp, Glycine max
caaggacttagcaacacttccttcggagattgtgcaaagcctgacccagaagtgagtggagacactgaaaagaattttgctgagctattgacagaagaactcaagcttcaggagagccaagctgtggaaaatcagcaacgtgctgacatggcattgcttgaggcaaaaaagattgcatctcagtatcagaaggaagcagacaagtgtaattcaggaatggaaacgtgcgaggaggctagggagaaggctga

SEQ ID NO: 119631 - DNA, 245 bp, Glycine max
ccaagcgctgcgtgggttctattgaggatatgattgacttttccacctccgtattgggccgtaatgtcgcggtttggaccactgagaatgtaaatgggtccaataagaatgtgatggtgggccgggtcaaagggatgaacggtggaaaggtgacccaatcggtgtcgtgccaccaaagcttgttcccttacatgctttactattgtcactccgttcccaaagttcgggtctaccaagcggatctt

SEQ ID NO: 119632 - DNA, 259 bp, Glycine max
ctttctcctaaaacatctccagtgggttcttcttcttctattacaacaacgtcgacacaagaccatgaccatggccatggccacgatcctgctcctgttcacggtcttcgcggtttcatcggccctagacatgtcgataatctcgtacgacaacgcccacgccgccacgtcgcgcacgcagtggtagctgatgtccatgtacgagcagtggctagtaaagcacggcaaggtgtacaacgcgctcggagataaggagaag

SEQ ID NO: 119633 - DNA, 257 bp, Glycine max
gcaaaaagaaagaatcccaggcgaggagaaagatggaggggaaggagcaggatgtgtcgttgggagcgaacaagttccccgagagacagccgattgggacggcggcgcagagccaagacgacggcaaggactaccaggagccggcgccggcgccgctggttgacccgacggagtttacgtcatggtcgttttacagagcagggatagcagagtttgtggccacttttctgtttctctacatcaccgtcttaaccgtt

SEQ ID NO: 119634 - DNA, 254 bp, Glycine max
gccgcccaaaaccatttatagggttttcttttctttgccaagaaaatgagagagtgcatttcaatccacattggtcaggccggtatccaggtcggaaacgcctgctgggaactctattgccttgaacacggcattcagcccgatgggcagatgccgagtgacaagaccgttggaggaggagacgacgccttcaacacattcttcagcgagaccggcgccggaaagcacgtgcctcgcgccgtcttcgtggatct

SEQ ID NO: 119635 - DNA, 253 bp, Glycine max
agtaaccaaaaggagagtgcaataactcgttgtacattcctagtgtgtgggagagacatggctaagatgtgtgtcttggtgttggttcttgctctggctgtggccacaagtgccagaaacgttcccaaccccaaggatgctggtcttaaggaccagaagaacttcatcagctatggtggagttggtggttattccgggattgggaacaatggactgccttttggaggagctggtgccggaataggaggtggtt

SEQ ID NO: 119636 - DNA, 189 bp, Glycine max
caagcagtgggaggaggctcgggactctgaccgcgtgcctgttgaagaatgagccggcgactcataggcagtggcttggttaagggaaaccaccggagccgtagcgaaagcgagtcttcacagggcaattgtcactgcttatggacccgaacctgggtgatctatcaatgacaaggatgaagcttgggt

SEQ ID NO: 119637 - DNA, 248 bp, Glycine max
cgcgtcgctgctccgtaccagtttcactgcataaatttgagagaaaactctgcaaacatgttggtttatcaggacctccttacaggtgatgagcttctctcggactccttccgttacaatgaaattgagaatggaatgctgtgggaagttgaggggaagtgggttgttaagggagcagttgatgttgacattggtgcaaacccttctgctgagggtggagaagatgagggagtcgatgacgcagctgt

SEQ ID NO: 119638 - DNA, 161 bp, Glycine max
gccgacgaagccaaagccaaaggcaacgcagccttctcctccggggactatcctgccgccatccaccacttctccgatgccatcgccctggctccctcgaaccatgtcctctattccaaccgatccgccgaatacgcctccctcaaaaactacgcagatgc

SEQ ID NO: 119639 - DNA, 156 bp, Glycine max
gaactggaggaaccaagcccaacatctccaccataggagctgatcaatttgatgattttcaccctaaagagaagttacacaagctatccttcttcaattggtggatgttcagcatcttctttgggatcctctttaaaaagagttcgcttgtatacc

SEQ ID NO: 119640 - DNA, 272 bp, Glycine max
cgaatatcttgttgtttggagcgatccgagacaaactctgtaaacatgtcggtttaccaggacctccttacaggtgatgagcttctctctgactccttccgatacacggaaattgagaatggcgatgctgtgggaagttgaagggaagtgggttgttaaaggagcagttcatgtagacattggtgcaaacccttctgctgagggtggacgcgaagatgagggaattgatgatgcagctgctaaggttgttgacattggtgacacattcagac

SEQ ID NO: 119641 - DNA, 278 bp, Glycine max
cttgctccctcaaaatcagtgaagaagccacagagaactagtctcctactcacacccgcaagaaaaaaatggcatctcacatcgttggatacccccgtatgggtcccaagagagagctcaagttcgctctcgagtctttctgggatggcaagagcagcgccgaggatttgcagaaggtgtcttctgatctcagggcatccatctggaagcagatggctgatgctgggatcaagtacatccccagcaacactttctctcactatgaccaggttctcgac

SEQ ID NO: 119642 - DNA, 274 bp, Glycine max
gggcgaggttcaaacgaagaaaggcttatggtggatacctaggcacccagagacgatgaagggcgtagtaagcgacgaaatgcttcggggagttgaaaataagcgtaaatccggggattcccgatataggtcaacctttcgaactgctgctgaatccacgggcaggcaagagacaacctggtgaactgaaacatcttagtagccagaggaaaagaaagcaaaagcgattcccgtagtagcggcgagcgaaatgggagcagcctaaaccgtgaaa

SEQ ID NO: 119643 - DNA, 265 bp, Glycine max
ttcagttccaaacaaaacccatcatagtctttctccctcagtgatcatatattcattcagttctatacaaaatcctcaaaaactcttcctctctgccatgaccatggaatacagaaccttagaactcaacatcatatccgcaaaggacatcaagaatgttaatctcttctccaagatggacgtatacgccgccgtttcgctctccggtgaccctctccaccctcagggcgccaccacccacgtccacaaagacgccggcagcaac

SEQ ID NO: 119644 - DNA, 263 bp, Glycine max
acacaacaacactctctcttctcgctcttggcttttcgctcttcactcactctcattcattcatttccaccgttcatggatcacttaagcgtgtggggtaacacgcccttggcgacggtggatcccgagatccatgacctcatcgagaaggagaagcgccgtcaatgccgcggaatcgagctcatcgcctccgagaacttcacctccttcgccgtcatcgaggccctcggcagcgctctcacgaacaaatactccgagggcat

SEQ ID NO: 119645 - DNA, 269 bp, Glycine max
ggaagaatcaggcggcagacttgggcacggtgttgactctgatgttctccatccaaagcttatagaagctctaagtaatacaaatattgaacttgtagcttgtggggaatatcattcatgtgctgttacactttctggtgatctttatacatggggtaatggaacatacaattatggccttctaggacatggaaatcaagtgagccactgggtaccaaaaagagtaaacggccccttggaaggcatacacgtgtcatatatttcttgtg

SEQ ID NO: 119646 - DNA, 270 bp, Glycine max
cccttctccaacatgccaaacgacagcgttctgagtcttttcttcttcgttaccctcttcacatgccttctctctgctaattcccacgatgaccatattttcctaccgagtcaactccatgacgatgactcagtgagttgcactgctaccgacccaaaccttaactacaagccggtgatcggaatcctgacccaccccggcgacggtgcctctggccggctcagcaacgccaccggggtttcttacatcgccgcctcctacgttaaattc

SEQ ID NO: 119647 - DNA, 274 bp, Glycine max
ggccacctctgctattcagcaatcagcattcgcaggtcaaactgctctgaagcagctcaatgcgttggtccgcaacaccggtggcgccggcaaaggtcgcaccaacatgcgccgtaccgtcaagagtgctcctcagagcatttggtatggccctgatcgtcccaagtacctgggtccattctcagagcagattccgtcatacctgaccggagaattccccggtgactacggatgggccactgctggactatcagctgacccggaaaccttcgcc

SEQ ID NO: 119648 - DNA, 273 bp, Glycine max
attggctcttcaagacttgcttctttaccatttcattcctaaaaccctattcttcttcgctcattcatcagcactgccatcagccccaacctccccacaaggtcacagggactaaagaggtgtacgaccatgtcggacgatgagcgggaggagaaggagttggatctctcttctgcagaagttgtaaccaaatacaaaaccgcggctgagatcgttaacaaggccttgaagctagttatttcagaatgtaaaccaaaggcgaagattgtggat

SEQ ID NO: 119649 - DNA, 275 bp, Glycine max
cacggccatgtttaggaggaaggctttcttgcattggtacactggtgaaggcatgtgacgagatggagttcacggaggcagagagcaacatgaatgaccttgtgtctgagtaccagcagtaccaggacgccactgctgaggacgaatgggagtacgaggatgaggaggaagaggatggtgaatcagacgaccatatgcgaagagactacaatgtgcatatgcctgtgtcttacttatgctatgtgatgcgtacgtgtgtctgctctgcactccaa

SEQ ID NO: 119650 - DNA, 204 bp, Glycine max
gttagttcaagcgagcgcgctcccactcggacgagtcaactcaactcactaccaacactggtccgtttcccagttccgcccaccgtagccggaagcccccgatgatgtcgtcttgaacggtcactgctgtcgccggaacaagcatctatcgtacctgacgagcttctcggtatccgagagagcgcagaaggcgccatggatctt

SEQ ID NO: 119651 - DNA, 268 bp, Glycine max
ccaccttcaacaaaccctgcaactcttcttaaggaagcgatccatgtcatcagctgtggttacgaagacaagacagagtggggaaaagagattggatggatctatggctctgtgacagaagatatcttgactgggttcaagatgcatgctcgtggttggatttccatctattgcatgccacctcgcccagcatttaagggttctgcccctatcaatctttctgatcgtctcaatcaggtgcttcggtgggccttaggttcaattgaga

SEQ ID NO: 119652 - DNA, 266 bp, Glycine max
  unsure (1)..(266): unsure at all n locations
gccagcaccaacagcatcggcggcgacagtcactctccgacaacaacacttccgcggcgaaaaatgtctctggtggcgaacgaggatttccagcacattctgcgtgtgctgaacaccaacgtggatgggaagcagaagataatgttcgctatgacctccatcaagggtattggaaggagattcgccaacatcgcttgcaagaaggccgatgttgacatgaacanaagggctggtgagttgagtgctgcagcgttggatagtgtgat

SEQ ID NO: 119653 - DNA, 279 bp, Glycine max
cattgatgtgggcacaaacaatgagaagctgctgaatgatgaattatatattgggctaaagcaaagacgagcaactgggcaggaatatgctgaacttatgcacgaatttatgacagcagtcaagcaaacttatggggaaaaggtcctaattcagtttgaagactttgcaaaccacaatgcttttaatctgcttgagaaatatagatctacacctctggtccttaatgatgatattcaggggacagcatccgtggttcttgctggactagttgcatctct

SEQ ID NO: 119654 - DNA, 152 bp, Glycine max
ccagatgtgagagaccaaccagcgacacttacatcccgagagacgaaaattttggtcacttgaagtcatcagacttccttacatatgcaataaaatccttaactcaaaacgttttacctcaattcaacactgcatttggttttcgtaatgag

SEQ ID NO: 119655 - DNA, 274 bp, Glycine max
cacactcggttctgccttcacaaaaaaattatcgagatcccctttttctcctaagaaaagccatggctaagggtcccggtctctactctgacatcggcaagaaagccagggatctgctgttcaaggactaccacagtgaccagaagttcaccatcaccacctactcacccactggagttgctataacagcatcaggaaccaggaaaagtgaactgtttgtggctgatgtcaacacccagttgaagaacaaaaacatcactactgatatcaaagt

SEQ ID NO: 119656 - DNA, 274 bp, Glycine max
gtacgccatggcctggaaacaacactagagaccatccaggaatgattcaggttttcttgggccaaagtggaggacttgacactgagggtaatgatcttccacgtttagtctatgtttctcgtgaaaagcgtccagggttccaacatcacaagaaggctggtgccatgaatgcacttgttcgagtgtcagcagtccttactaatggacctttcttattgaatcttgattgtgatcactacataaacaacagtaaagccttgagggaagctatgtg

SEQ ID NO: 119657 - DNA, 266 bp, Glycine max
gtccgctgcgactctctttccttccctctttttccgaatctgaatcgaaatggcttcggagactgagacgtttgcttttcaggccgagatcaaccagctcctcagtctaatcatcaacaccttctacagcaacacggagccctttcttcgtgagctcatcagcaatgcctctgatgctttggacaagattcgatttgagagtcttacagacaagagcaagcttgatgctcgcaaagagttgttcattcacattattcctgacaaga

SEQ ID NO: 119658 - DNA, 263 bp, Glycine max
ggttgctccttttgtggaaccaactactgtagttgatataacaaaggataacagagagttatctccaaatttctcaggctggcttgcagaccacaaactctccagtgatgataggataatgcgcctcaaggaagggtacatcaaagaaggtagcaccgtaagtgtgatgggagttgtccaacgacatgaaaacgtgctcatgattgttcctgcatccgagcctgtctcaacgggctgccagtggatccgctgccttttgccaa

SEQ ID NO: 119659 - DNA, 266 bp, Glycine max
gagtgaaccactgccaggttcaaaagatttgcacttttcaactcgcttcccacaaaatagtttgggacagttcatggcatgcctttggaagcaacacttgtcttattggagaagtcctgagtacaacttaacacgtttcattttcatgattgtttgtgcaatcatatttggagcagtattctggtagaaagggaaaaaaataaacaatcagcaggatttgttcaacgtacttggatcaatgtatattgctgtaatattcttgggtc

SEQ ID NO: 119660 - DNA, 134 bp, Glycine max
ggctccagcacctttgttcactcttcttctcttgcggctagggttttagcgcacttcttctagatttaaggaagatgggtaaggaaaaggttcacatcagtattttggtcattggccatgtcgactcggggaaa

SEQ ID NO: 119661 - DNA, 280 bp, Glycine max
caaaaatcgtagttggaggcgccgcactccactccactccaatcaatcagatactagcgatggggaggaagcgaaaggtagcaccgaaatcttctgtatccgccgagcccccgctgaagcaacaccaaccaaaacccgagaatgccgctcaggaatacgaagaagaggtcgaagaggaagttgaggaagaagaggtagaggaagaggtcgaagaggaagaagaagaagaggaggacgaagaggacgaggaagaagaagaagaagaccaaaaagaccaata

SEQ ID NO: 119662 - DNA, 270 bp, Glycine max
tgatgaaacaacgatcattgctggggcacttgaactcagtgagaagacagcgagtgatgccatgactcctatatctgaaacatttaccgttgatattaattcaaagcttgatagggaactgatgaatgaaatattggagaaagggcacagcagagtcccagtcaattatgacaagcctacaaacattattggccttgtactggtcaagaatttattgacagttcacccagaagatgaagcacccgtgaagagtgtaaccatacgcaggat

SEQ ID NO: 119663 - DNA, 270 bp, Glycine max
ggcaaacactgccatggacacagacaaagtgaagatatatggtgcacgtgttcgtgttgattctatggctagagttgctcagattgaaacagctgagaaagagaaaatgagagataaggtgcagaagataataggtcatggtatcaactgttttgttaacagacagttgatttacaattttccagaggagctctttgctgatgcaggaatattggctattgagcatgctgattttgatggtattgagcgtctggctttggtaactggtgg

SEQ ID NO: 119664 - DNA, 271 bp, Glycine max
accctactcattctccatacctcaacgaagaggttaaagagacggcaacactttgctgtccgccttgaccgagcagagcttcgtcttggccctcgattttgccctaaagtactctcagtcacaacagacaccgtcgtcgtcgtcgtcgtcatcaatggcaccgaagcagaccaaggctgagaagaagatcgcttacgatgcgaactgtgcgacctaatggaggagtacggccagatcctcgttgtgaactccgataacgtgggatcgaacc

SEQ ID NO: 119665 - DNA, 272 bp, Glycine max
attggctcttcaagacttgcttctttaccatttcattcctaaaaccctattcttcttcgctcattcatcagcactgccatcagccccaacctccccacaaggtcacagggactaaagaggtgtaccaccatgtcggacgatgaaagggaggagaaggagttggatctctcttctgcagaagttgtaaccaaatacaaaaccgcggctgagatcgttaacaaggccttgaagctagttatttcagaatgtaaaccaaaggcgaagattgtgga

SEQ ID NO: 119666 - DNA, 270 bp, Glycine max
cacaaacctactttgaagcccaaagtgcaacgtactttgcaaaaaccctaaaccctctctatctctctccgcgactctgtactcatcaatggcgacgcaatcgttagacgaagaaacaactaagaaagtcatacgacaggtcgagttttatttcggcgacagcaaccttctcaccgatggtttcatgaggaagagtatcactgaaagcgaagatggcatgattagtttggcgctgatttgctcgtttaatcgaatgcgaaaacaccttaa

SEQ ID NO: 119667 - DNA, 261 bp, Glycine max
ctctacatctcttgcggctagggttttagcgcacttcttctagatttaaggaagatgggtaaggaaaaggttcacatcagtattgtggacattggccatgtcgactctgggatatcctctaccactggtcacctgttttacaagcttggaggcattgacaagcgtgttattgagaggtttgagaaggaagctgctgagatgaacaagaggtctttcaagtatgcctgggtgctggacaaacttaaggctgagcgtgaaaga

SEQ ID NO: 119668 - DNA, 236 bp, Glycine max
gcgaagagaatggctcccaagggtttaatctttttggctgtgttatgcttctcagcactgtcactgagtcgttgtcttgcggaggataatggacttgtgatgaacttctacaaggaatcatgccctcaggctgaagacatcatcaaagaacaagtcaagcttctctacaagcgccacaagaacactgctttctcctggctcagaaacatcttccatgactgtgctgttcagatttg

SEQ ID NO: 119669 - DNA, 272 bp, Glycine max
attaccctagaagtcgaaagctccgacaccatcgacaacgtcaaggctaagattcaggacaaggagggaatccccccagaccagcagaggctgatcttcgccgggaagcagctcgaggacggacgcacccttgctgactacaacatccagaaggagtcaactctccacttggtgttgcgtcttcgtggtggtatgcagattttcgtgaagactcttacgggtaagactattaccctcgaggtggagagctctgacaccattgacaatgtgaa

SEQ ID NO: 119670 - DNA, 269 bp, Glycine max
gagattctctctgtgtatttccctacctctcccttcaaggttagtcgatttcttctgtttttcttcttcgttctttccatgaattgtgtatgttctttgatcaatacgatgttgatttgattgtgttttgtttggtttcatcgatcttcaattttcataatcagattcagcttttattatctttacaacaacgtccttaatttgatgattctttaatcgtagatttgctctaattagagctttttcatgtcagatccctttacaacaag

SEQ ID NO: 119671 - DNA, 258 bp, Glycine max
acacaacaaaaaaagacaacacagagagaagcgtcttaataaacgctcttctctgaaaaacctgatttcttctcttcttctcttctctttcgtttcgatcttcgatctctgaaaattcgagagtgcatttcagtctccatcggtcaggccggtattcaggtcggaaacgcctgctgggagctctactgcctcgaacacggcattcagcctgatgggcagatgccaagtgataagactgttggtggaggtgatgatgct

SEQ ID NO: 119672 - DNA, 267 bp, Glycine max
gcccaagccctatacaaccaaaccctaacacacacccatttgattcagtttccatggctagcctcaaggttgcatttttggctgcagtgctctgcatggttgtggtgagtgcacccatggcacatgcagctatcacgtgcgggcaggtgacgaatagcctgatcaattgcatcggttacctccagaacggaggaacgccgccgtcgggatgctgcaacggagtgaagagcctcaatgccgccgccaagaccaccgccgaccgccaga

SEQ ID NO: 119673 - DNA, 266 bp, Glycine max
attgctttgtggaagtttgaaaccaccaagtactactgcacggtcattgatgctcctggacatcgtgactttatcaagaacatgattactggtacctcccaggccgactgtgctgtccttattattgactccaccactggtggttttgaagctggtatttctaaggatggacagacccgtgagcatgctcttcttgctttcaccctaggtgtgaagcagatgatctgttgctgtaacaagatggatgccactacccccaagtactc

SEQ ID NO: 119674 - DNA, 263 bp, Glycine max
ctggtatacgcaacgaaactggctggcattatggtgctgctatcggcttgggattacagttagcaaatcacagagtcatagtatctgaaattgctaccaaacttggaagtcctgacttagctcgacaataccttgaaaaatgcttgtattatgtgaacataggcagcaatgattacatgggcaattacttccttcccccgttctacccaacaagcaccatttataccattgaggagtttacacaagttctgattgaagagtta

SEQ ID NO: 119675 - DNA, 265 bp, Glycine max
gtaactagccgcagcacgaggagcagcctcaggaggagaaggatgtctcacaggaagttcgagcacccaaggcacggttcactgggatttcttcccaggaagcgtgctgctcgtcacaggggaaaagtgaaggcattccccaaggatgacccatccaaggcacccaagctcactgcattcttgggttacaaggccggtatgactcacattgttagagaggtcgagaagccaggatcaaagcttcacaagaaggaaacttgtgagc

SEQ ID NO: 119676 - DNA, 266 bp, Glycine max
gttgggagccctgggctgtgttttccctgaactcttggcccgcaacggtgtcaagttcggtgaagccgtgtggttcaaggccgggtctcaaatatttagtgagggtgggcttgactacttgggcaacccaagcctgatccatgcacacagcatccttgccatctgggccactcaagttatcttgatgggtgctgttgagggctaccgtattgctggtgggcctctcggtgaagtgactgacccaatctacccaggtggcagctttg

SEQ ID NO: 119677 - DNA, 265 bp, Glycine max
gcaatccctctccttgtaccacacatgaacctccacgacgcaaagcttgggggctatgatatcccagctgagagcaagatcttggtgaatgcatggtggctggccaacaaccctgcacactggaagaagccagaggagttccggcctgagaggttcttcgaggaggagtcgcttgttgaagccaatggcaatgactttaggtaccttccctttggtgttggcagaagaagctgccctggaatcattcttgcattgccaattcttg

SEQ ID NO: 119678 - DNA, 259 bp, Glycine max
cacaaacctactttgaagcccaaagtgcaacgtactttgcaaaaaccctaaaccctctctttctctctccgcgactctgtactcatcaatggcgacgcaatcgttagacgaagatccaactaagaacatcatacgacaggtcgagttttatttcggcgacagcaaccttctcaccgatggtttcatgaggaagagtatcactgaaagcgaagatggcatgattagtttggcgctgatttgctcgtttaatcgaatgcga

SEQ ID NO: 119679 - DNA, 257 bp, Glycine max
atttttctcactgtcttgtctctccagagaactgtatagagagagatggcagctgcaacatctggtgctgtgttaaatgggttgggatcttccttcttgagtggaggaaacaggagccaaacccttctggccactgctattggaggcaaagttggtgctgctgctgttactgttagtcctagaagactcattgtggtagctgctgctgcaccaaagaagtcatggctccctggtgtcagaggtggtggcaactcgtc

SEQ ID NO: 119680 - DNA, 260 bp, Glycine max
ctagggttttagcgcagtttcttctagatttaaggaagatgggtaaggaaaaggttcacatcagtattgtggtcattggccatgtcgactctgggaaatccactaccactggtcacctgatttacaagcttggaggcattgacaagcgtgttattgagaggtttgagaaggaagctgctgagatgaacaagaggtctttcaagtatgcctgggtgctggacaaacttaaggctgagcgtgaaagaggaatcaccattgat

SEQ ID NO: 119681 - DNA, 195 bp, Glycine max
cacaaacgcacactgaattcaaaaacatcgaaagagagaggcatggccgagcaaaccttcatcatgatcaagccagatggcgttcaaagaggccttattggcgagattattagcagatttgagaggaagggtttttacttgaaagggttgaaactcgttactgtggaccgtccttttgctgagaagcactatgct

SEQ ID NO: 119682 - DNA, 247 bp, Glycine max
gctaaattacggaagacgttatggcttgcttggattaaatggttgtgggaagtctaccctgcttacggcaatacgttgtcgagagctacctattccagaccacatggatatttatcaccttaccagagccattgtagcctctgacatgtctgcattggaggttgtcataagcagtgatgaggccaggttgagtttggcaacagaagctgtagctttgtccgcgcatgatgctcctgctggggaagct

SEQ ID NO: 119683 - DNA, 190 bp, Glycine max
ctttagccgaggtcaggaggagcactagctaagttcacaatttcataatggctatgggactacaggagcatttgaaaaggctcaatgctcctaagcataggatgcttgtcctactgggtggtgcattcgcgcttaaaccctcatctggaccacactaatcgatggagcgcctcctgctcatacctatgct

SEQ ID NO: 119684 - DNA, 190 bp, Glycine max
ttgaggccaggcaagccccactcaaccagcacacctctcctcgttcacgctacccctttctgctcttcttctacctttcaagttttaaaagtataaagatggcagagacattcctatttacctcagagtcggtgaacgagggacaccctgacaagctctgcgaccaaatctccgatgctgtcctcgacgc

SEQ ID NO: 119685 - DNA, 247 bp, Glycine max
cttgcatttgcaggcagccttttgtgccaatgggagtttttggctatattgttcctgttctgaatctaggctcattttctaagagatggatatttcctggatggaggcttggttggtttgtgacaaatgatccatctggcacttgtagaaatccaaaggtatatgagcgctttaaaaagtactttgatcttttgggaggtgcagccaccttcatccaggcagctgtacctcagataattcgcatact

SEQ ID NO: 119686 - DNA, 251 bp, Glycine max
accagaccctctcaaacggaaccgcaaatgaagcccaagagcattcgcatccgtaacttaccaacgcacctgctgctaatcgctgtttgtctgttcacctcttcgtccgcttccaagatcggagaaaattgtgggtcagacaacaaatgcgacgctggactcagctgccaaacatgtcctgccaatggaaatacccgaccaagatgttcgcggacacaacctttgagccccacctccaaggtgaaggctta

SEQ ID NO: 119687 - DNA, 253 bp, Glycine max
acttaacccaggtgtaaaatgtcagcagtgaacatgtccactatgagacttccaagagcttccttgtctggaacaacaccagctaggagatcatgtgctcttacaaagagtccatcatctttgaggtctgtgaagaatgtgtctaaagtgtttggattgaaatcatcttcctttagagtgtcagcaatggcggtatataaagtgaagctgattggaccggacggtgaagagaatgaatttgaagccctgatga

SEQ ID NO: 119688 - DNA, 150 bp, Glycine max
taaattatggcattctctgtaagagagcggaactaacaactctattagatagtagcattaccaacttttgcactaattttcaagtggattagctcggacgatcggactacgttggaaatgggattccacgtgtttatggaatgtacgaga

SEQ ID NO: 119689 - DNA, 186 bp, Glycine max
gcatcactgaactaacaaagcaacctatgtcgaaggtggtttgtgtcaccggagccagcggcgccctcggatcatgggtggtcctactcctcctccagcgtggctacaccgtccatgccaccgtccaagatatcaaggatgaaaatgagacgaaacatttggaggaaatggaaggagcaaagagtc

SEQ ID NO: 119690 - DNA, 257 bp, Glycine max
  unsure (1)..(257): unsure at all n locations
gcatcactgaactaacaaagcaacctatgtcgaaggtggtttgtgtcaccggagccagcggcgccntcggatcatgggtggtcctactcctcctccagcgtggttacaccgtccatgccaccgtccaagatatcaaggatgaaaatgagacgaaacatttggaggaaatggaaggagcaaagagtcatctccatttttttgaaatggatcttcttgacatcgactccattgccgctgccataaagggttttccggcg

SEQ ID NO: 119691 - DNA, 256 bp, Glycine max
gcgacccaaatgagcaagaagagaagttcgtagctgatggagtgttcttcgctgaactgaacgaggttctgacaagagagttggccgaggacggttactccggcgtggaagttagggttacgccgatgcgcaccgaaatcataattagagccaccagaacccaagctgttctcggtgagaagggaaggagaataagggaacttacctctgtggttcagaagaggttcaagtttcccgagaacagtgtgaactttat

SEQ ID NO: 119692 - DNA, 193 bp, Glycine max
gccctgaatgtggatgtgactgaattccagacaacttggtcccataccctagaatccatttcatgctttcctcctatgcaccatttatctctgctgagaaggcctaccatgaacagctctcagtggcagaaattaccaacagtgcttttgagccatcgtccatgatggccaagtgtgatcctcgtcacggaaa

SEQ ID NO: 119693 - DNA, 260 bp, Glycine max
tcttaatcaagaggagtgagttttgttcttccgacatgacgccgctgatcctgcatgctgggacaaccaacaataattcttacaagacactcattgcagccgagtatgctgtcgtccaagttgattttgcccctaattttgagatgggtgactccaataagactcctgaatttctcaagatcaatcctattggcacggttcctgtgctgaaaacccccgatggtccgatatgcgccagctatgccattgctcgctatgta

SEQ ID NO: 119694 - DNA, 285 bp, Glycine max
ccgcatgcagcgcgagggaaaaccctagctagtagtctcagttcgtttgagagagaaaaaatggcagagggtctcgttctccgcggaaccatgcgcgcccacaccgacgtcgtgacggcgattgccactcccatcgacaactccgacatgatcgtgacggcgtcgcgcgacaaatccatcattctctggcacctcaccaaggaggacaagacctacggtgtcccccgccgccgcctcaccggacattctcacttcgtccaggacgtcgtcgtctcatcgacggtc

SEQ ID NO: 119695 - DNA, 267 bp, Glycine max
gactctggaagcatcacgatgtcaccgttaagacgagaagacccttctcttcggtgacaagccagtcactgtttttggacacaggaaccctgaagagatcccatgggggtcaactggagctgatatcattgttgagtccaccggagttttcaccgataaggacaaggcagccgcacatttgaagggtggtgcgaagaaggttattatttctgcccccagtaaggatgcccccatgtttgttgttggtgttaacgagcacagtacaag

SEQ ID NO: 119696 - DNA, 180 bp, Glycine max
cttgcccttctctcttcaatccaaacacaagacatcatcatccatggctgcctccgtctccactgtcggagctgtcaacagagctcttttgaacctgaatgggtctggacctggggtttcagctcccagttcatccttctttgggagcagcttgaagaaggttattggctcaagggtccc

SEQ ID NO: 119697 - DNA, 181 bp, Glycine max
gtttactcgctgatgtatgagcgtcacaagagctggtattcttggattctgtcttcgctcacaagttgtgtatacatgtttggctttattatgatgtgccctcaattgttcatcaactacaagctcaaatctgttgctcatctaccttggaggcaaatgacatacaagtttctcaacacca

SEQ ID NO: 119698 - DNA, 251 bp, Glycine max
aaactgctctgaagcagccaatgagttcgtccgcaagaccggtggcgccggcaaaggtcgcactaacatgcgccgcaccgtcaagagtgctcctcagagcatttggtatggccctgaccgtcccaagtacttgggtccattctcggagcagattccatcatacctgaccggagaattccctggtgactacggatgggacactgctggattatcagctgacccggaaaccttcgccaggaaccggagctgga

SEQ ID NO: 119699 - DNA, 251 bp, Glycine max
agagaagtgagatacactaagttatcctcataaatacactctaattaggtggcaagataagtgtctaaccttagtaacattgccacatattgtgttcattttggaattgtgccactaaaattctattcaattcatctatggctgcctcttcttatgctatgcaatcaatcctggcaaaccctttgatccgcatttccagcgggtctagggtgaaccaatttggcgttcctgctttgcacatgaaaggaatg

SEQ ID NO: 119700 - DNA, 180 bp, Glycine max
gcaataactcgttgtacatcctagtgtgtgggagagacatggctaagatgtgtgttttggtgttggttcttgctctggctgtggccacaagtgccagaaacgttcccaaccccaaggatgctggtcttaaggaccagaagaacttcatcagctatggtggagttggtggttattccggga

SEQ ID NO: 119701 - DNA, 182 bp, Glycine max
ctcgagccgaatcggctcgactttctctagtcctgttatttctcagcgcgtaaagcatgactttgttggtggagaaaacagccgagtggtcgcgagtacaaggtcaaggacctttcccaggccgacttcggccgcctcgagatcgagctggccgaggttgagatgcccggcctcatggcctg

SEQ ID NO: 119702 - DNA, 266 bp, Glycine max
cgcaaccacatcactctttctttcaaatcagggtttcctccttctgcaaccatcaatgtcggcaatcgcggctccccaacacagatcctcgaagacagagtcctacgtggacaataagcgcaaggaggatatccgccatgccaacatcgtggccgcacgctcagtcgccaacgcggttcgcaccagtctgggccctaagggcatggacaagatgatctccacctcctccgacgaggtcatcatcaccaacgacggcgcaccatcct

SEQ ID NO: 119703 - DNA, 176 bp, Glycine max
cgttcttcttcttttgttgttctgtgtttgtgtttgttttttctctcacctgaaaatgtcttgctgcggtggtaactgtggttgcggaagctcctgcaagtgcggcaacggctgcggaggctgcaagatgtacccagacttgagctacactgagtcaaccaccaccgagaccttgg

SEQ ID NO: 119704 - DNA, 251 bp, Glycine max
ctgccaacctgcacactcttcactcgatcaaacagaaaatggcaaagaatgtggggatccttgccattgacatctacttccctcccgcttgcgttcagcaggaagcattggagactcatgatggtgccagtaaagggaagtataccattggtcttggacaagattgcatgtcattctgtaccgaagtagaagatgtcatctcaatgagtttgacagtggttacttctcttcttgagaaatatggattgatc

SEQ ID NO: 119705 - DNA, 179 bp, Glycine max
aagaatggcacttcgtgcttggtgatgtccctttctgttctcttcactcttggtcttgcgagagaaagccatgccagagacgaagatttttggcatgctgtttggccaaacactcccattccaagttcattgcgagatcttctaaagcctggccctgcaagtgttgaaatcgatgatca

SEQ ID NO: 119706 - DNA, 241 bp, Glycine max
ctcaattcagcgtaactttcccaaacccaaataagaatcttccagaaacttcttttctttcaggagccaccatggccgagactcggagatccacgggcaccgttaagtggttcaacgcgcacaaaggtttcggattcataactccccacgatggaaccgatgatctcttcgtgcacttcacttccatccgatccgacggctaccgctctatgtccgacggtcagtcgcgttgagtttctcc

SEQ ID NO: 119707 - DNA, 184 bp, Glycine max
gggtttacagagaagctaagaggccagcgttagcaaaagctcgtggaattgctagcaatggcgaggatcaaggtttacgagctgaggcagaagacgaaggctgatctgctgaatcaactgaaggacctgaaggcggacttgccttgcttcgtgttgctaaggtcaccggtggtgcccctaacaa

SEQ ID NO: 119708 - DNA, 257 bp, Glycine max
gacggctgctgcgagttcatggcgccggagaggacggcacgctggaggccgtcatctgcgctgcctgcaactgccaccggaatttccaccgcaaggagatcgacggcgagattacctccttccactaccgtgcacagcctcccccgccgccgatgcaccaccaccaccaattctccccgtactaccaccaccgcgtcccgcagcaccccgccgccgctggctacctccaccaccacctcacacctccgattcgcagc

SEQ ID NO: 119709 - DNA, 244 bp, Glycine max
gcaccgtaagggatgtgaagcaggcagagaagagccatggtgcacgtttccttcttacgaaactatgggaaaaccttcaagaagcctcgtcgtccgtacgagaaggagcgtttggacgccgagttgaagctggtcggtgagtacggacttcgctgcaagagggagttgtggagggttcagtacgctctcagccgcatccgtaacaacgccagagatcttttgaccctcgacgagaagaacgcgc

SEQ ID NO: 119710 - DNA, 244 bp, Glycine max
attcgctcgcagcacccaagaggcgaatccttaccattgctcgagatgggtgaagaagtgaaggccgtggttccagagtctgttttgaagaagcagaagagagaggaggaatgggcgttggccaagaagcaagacctcgaggctgcgaagaagaagagagccgagagccgcaaactcatctacaacagagctaagcagtacgctaaggagtacgatcaccaggagaaggaattgattcgttgaa

SEQ ID NO: 119711 - DNA, 181 bp, Glycine max
tacctaggcacccagagacaggaagggcgtagtaagcgacgaaatgcttcggggagttgaaaataagcgttacaccggggattcccgatataggtcaacctttcgaactgctgctgaatccacgggcaggcaagagacaacctggtgaactgaaacatcttagtagccagaggaaaagaaa

SEQ ID NO: 119712 - DNA, 167 bp, Glycine max
cgagaatggggatcgaagccggggagcggaggtgcggcgtcggcgcagaacgaagccatagaccggcgagagcgtctccggcgattggctctggagaccatagacctggcgaaggatccctatttcatgcgcaaccacctcggaagctacgaatgcaaactctgtct

SEQ ID NO: 119713 - DNA, 265 bp, Glycine max
ggttctttgtgggatgatttggggaaggcaatggaaggagaagatgaaatagaggttggagaagtcgattgcggcatggacaaagcagtgtgttccaaagttgatattcattcatatcctacctttaaggttttctatgatggcgaggaagtagccagataccaaggtacaagagatgttgaatcaatgaaaacctttgttttggaagaagctgaaaaggcagcagcaaaagcacttgaaagtgacaaagaattataacaacttt

SEQ ID NO: 119714 - DNA, 263 bp, Glycine max
attcaacaggactttccgttcacgacactcccttttatcgtttcacttccgtcgtcgtcgtcttcaattttggatcttcgaatcgaatcgcatcctatgggtagcagcagaggacacacgctcatggaggttggacccgacggggttgccgtcatcaccatcgtcaaccctcccgttaattcactttcctttgatgtattgcgcagtttaaaggagagttttgatcaggcgatacagagagatgatgtcaaggcaattgttgt

SEQ ID NO: 119715 - DNA, 261 bp, Glycine max
  unsure (1)..(261): unsure at all n locations
ctagcctagtgctcatcaccatcgcaaggggagaaagggagaggcgcgaaaatgagcggacgnaggggaagaagaagggagcgagcttcgtgatcgattgcgcgaagcggtggaggataagattatggacattgcttctctggagaagttccttcaggagaggattaaggtcggcggcaaggccggtgcactcggcgattccattaccgtcaccagggacaagagcaagatcaccgtcacctccgacagcaacttctctaa

SEQ ID NO: 119716 - DNA, 262 bp, Glycine max
gaagcggggtatacctcttgggcagttccggttgacggcatgataagtgtgattggacacgagatggctgaactggcaacgaacccgttggcgaatgcttggtatgcgggtcaggacccctctttccccgtcgagattgccgatctctgtgaggggatttacggcaccggtggcggtggatcctacaccggtcaggttttcgacgctcgagatggcgccacctataacatgaatgggatcagacggaaattccttgttcagt

SEQ ID NO: 119717 - DNA, 260 bp, Glycine max
ggagtctgacatgtgtgcgagtcaacgggcgagtaaacccgtaaggcgcaaggaagctgattggtgggatccccctgtgggttgcaccgccgaccgaccctgatcttctgtgaagggttcgagtgagagcatacctgtcgggacccgaaagatggtgaactatgcctgagcggggcgaagccagaggaaactctggtggaggcccgcagcgatactgacgtgcaaatcgttcgtctgacttgggtataggggcgaaagac

SEQ ID NO: 119718 - DNA, 262 bp, Glycine max
cgagaatggggatcgaagccggggagcggaggtgcggcgtcggcgcagaacgaagccatagaccggcgagagcgtctccggcgattggctctggagaccatagacctggcgaaggatccctatttcatgcgcaaccacctcggaagctacgaatgcaaactctgtctcactctccacaacaacgaggggggctacttggctcacactcagggaaagcgccaccaaaccaacttggccaaacgtgcagctcgcgaggccaagg

SEQ ID NO: 119719 - DNA, 265 bp, Glycine max
gcgttgaaatcatcgccaacgaccaagggaacagaaccacgccgtcttacgtcggattcactgacaccgagcgtctcatcggtgatgcggccaagaatcaagtcgccatgaaccccatcaacaccgtcttcgatgccaagaggttgattggtcgtagattcagtgattcctctgttcagggtgatatcaaattgtggcctagagagggtcattgctggtgctgctgacaagccaatgatcgtggttaactacaagggtgaagaga

SEQ ID NO: 119720 - DNA, 244 bp, Glycine max
caagcatatctcatttgaatacattccttgtagtttatactgaaagatgggtttgaagatggcgttactgatcctaggcctttccctcatgctccttttggtctcctctgaggtggcatccacgaatacaaaagaggaggcaaatggagtggatgatgccaaatatcccggtggaagctatggagggggtacccaggtcatggcggtgggttatccggccaggcggtgggttatctggccaggc

SEQ ID NO: 119721 - DNA, 260 bp, Glycine max
tcccattccatggcttccactgaatcatcccctttcaagaaaattcagattcaaagggatgacactacatttgacgcatatgtggttggaaaagaggatgctcctggaattgttgtgattcaggagtggtggggtgtggattacgaaattaagaaccatgccgtgaagatttctcagcttggtagtgggtttaaagctcttattccagatttatacagaggaaaggttggtctggatgttgctgaagctcagcatttgat

SEQ ID NO: 119722 - DNA, 259 bp, Glycine max
tcagtctccggcgccattgctattgtggaaaaacaagaacaaaaatgttcggcttatcgtcttcgtcttcctctgcgtccaacatgagagtgaccaacacgcctgccagcgacctcgccctcaccaacctcgccttctgttccccctccgatctccgcaatttcgccgtccccggtcacaacaacctctacctcgccgccgtcgccgattccttcgtcttatctctctctgctcatgacaacataggcagcggccagat

SEQ ID NO: 119723 - DNA, 257 bp, Glycine max
ctcttcttctcttgcggctagggttttagcgcagttcttctagatttaaggaagatgggtaaggaaaaggttcacatcagtattgtggttattggccatgttgactctgggaagtccactaccactggccacgtgatctacaagcttggaggcattgacaagcgtgttattgagagatttgagaaggaagctgctgagatgaacaagaggtctttcaagtatgcctgggtgcttgataagcttaaggctgagcgtga

SEQ ID NO: 119724 - DNA, 260 bp, Glycine max
cttctcttcttcaattcattctagttctggattccgactcgccgcattgactcggtccgggttggggtcgactcagttcggtttttcattctctcgcgaatctaatctataggaaaagctaagggcacatcacaatgaaggcattgattctggttggggggtttggaacaaggctgaggccactgacactcagttttcctaagcctcttgttgattttgctaacaaacctatgattctgcatcagatagaggcccttaag

SEQ ID NO: 119725 - DNA, 262 bp, Glycine max
gatcattcatgcctactgataaccaaggaacaagaagcaggactggtggaatgtcggtctcgttggctagccctgatggccgtgttgtaggtggcggagttgctggtcttcttgtagctgccagccctgtgcaggtggtggtgggaagctttttaccaagcagccagcaagaacagaaaataaagaagtcaaagtctagcgattatggagtagcaactgttactccaaccattgcagtgtctcctacaccaccacctccaac

SEQ ID NO: 119726 - DNA, 266 bp, Glycine max
  unsure (1)..(266): unsure at all n locations
ctggtttcgaaccctcgttgtggttaggtcttcttcacctttcganttttggaatccatgggtcagggaactccgggcggcatgaaccggcanggcgaccggaagccggacggcggcgacaagaaggagaagaagttcgagccgtcggctccgccggcgcgcgtggggcggaaacagcggaagcagaaaggtccggaggcngcggcgcggttgccgacagtgactccggtgacgaatgcaaactgcggcttctgaagctggagcgg

SEQ ID NO: 119727 - DNA, 193 bp, Glycine max
agaaaccctagcaagcggaacaatggcagacgttgaggtcgatgtggcggctgcagcagcagcagggcagccgaagaagagaacgttcaagaagttcagtttcaggggcgtggatctcgatgcgcttctgggacatgtccaccgatgaactcgtaaatatgttcagtgctcgcaaacgtagagggtcccagag

SEQ ID NO: 119728 - DNA, 142 bp, Glycine max
tgagaagaccggggaactccccgaccctaactccactgacaacgccgaggtccagatcgtgcttaccatcatcagagatgggttgaagaccgatcccaccaggtaccgcaagatgaaggagcgtctcgttggggtttctgag

SEQ ID NO: 119729 - DNA, 258 bp, Glycine max
cacgggatcgcactccttgccgccatggccaggaacatcgctcaggccgatgcgtccgtcaaagccgggaaatggcagagaaataaatatgtgggagtttccttggttgggaaaacacttgccatcttgggatttgggaaggtgggctctgaagttgctcgccgtgccaaggggcttggtatgactgtcattgcgcatgacccgtatgctcctgctgaccgtgcgagggcggtcggtgtggagcttgtgacctttgag

SEQ ID NO: 119730 - DNA, 257 bp, Glycine max
tatttccctacctctcccttcaagatgcagatcttcgtcaagaccctcaccggcaagaccatcacccttgaggtggaaagctctgacaccatcgacaacgtcaaggccaagatccaggacaaggaaggaatccccccggaccagcaacgtctcattttcgccggaaagcaacttgaggacggccgtacccttgctgactacaacattcagaaggagagtactcttcacctcgtcctccgtctccgtggtggcatgca

SEQ ID NO: 119731 - DNA, 256 bp, Glycine max
ctcttcttctcttgcggctagggttttagcgcagttcttctagatttaaggaagatgggtaaggaaaaggttcacatcagtattgtggtcattggccatgtcgactctgggaaatccactaccactggtcacctgatttacaagcttggaggcattgacaagcgtgttattgagaggtttgagaaggaagctgctgagatgaacaagaggtctttcaagtatgcctgggtgctggacaaacttaaggctgagcgtg

SEQ ID NO: 119732 - DNA, 257 bp, Glycine max
ttcacaccacactaaagccaattagtccctctcttctccctttccttttctctatccaataatagagctttagaagaaagaaagaaagccatgcaagcatgttcctcctcagacgctccactctccaagaggttagatggcaaagtagcactcataaccggcggagcagtggcatcggtgaagccaccgccaagcttttccttcgccacggtgccaaggtcgtcatcgccgacatccaagacaacctcggacactcc

SEQ ID NO: 119733 - DNA, 255 bp, Glycine max
cagaaggctgctgctgcattgaagggttcagatcatcgccgtgcaacaaatgtcagtgccagactggatgctcaacaaaagaagctcaaccttccaatccttccaaccaccactattggatccttccctcagactgtagaactgaggagggtacgccgtgagttcaaggctaacaagatctccgaggaagagtatgttaagtcaattaaggaggaaattcgcaaagttgttgaacttcaagaagagcttgatatt

SEQ ID NO: 119734 - DNA, 258 bp, Glycine max
cttccccaccatcacaccactcatacctcactctccctttctccactgaccctctccctgccatggtcatgggagcctttggccacttcgaaccggtctccaaatgcagcaccgagaaccggtctaaccaaaccgtggcctcggacttggacggcaccctcctggtgtcccacagcgcatttccttactacatgctggctgccatcgaagccggcagcttcctccgtggccttgtcctccttgcctccgtccctttcg

SEQ ID NO: 119735 - DNA, 258 bp, Glycine max
gaacacacacatagaaacccaacaacaagaatgaagaagatgattctaaccctcttcttcaatatcattttatctctcctctccctctcccacgcctccgtggtggatttctgcgtacagactacacaggccccaatggccccgcaggtactcatgcaagagcccagcaaaggtcacggtggacgacttcgtctactccggccttagcaccgccggcaacacctcaaacatcatcaaagccgcggtgacgccggcgtt

SEQ ID NO: 119736 - DNA, 260 bp, Glycine max
atgaaaactgggtttggtgggcaatacagcaatgaggtggcatgtgccagttggaggcttggcgtggaagcaaacaacgtagtcaagtggcaaactgttcctgcagcttgcggagagtatatagctgactacgttctaggagaccaatatagatcagattccaaaacagttaaccaacaagcttatttgtatgctaaatccctcaaactcgccaacaaagatgtctttgtcttggacgttgacgacactactctctctaa

SEQ ID NO: 119737 - DNA, 264 bp, Glycine max
aaaaccctaggtagagagctcttcctccctttctcacagcaatggccgccgcagcacgccctctcgtcaccgtgcaggccctcgacggtgacatggcaaccgatgcctccgccaccgttcccatccctgacgtcatgaaggcctctatccgccccgacatcgtcaatttcgtacactcgaacatctccaagaacagccgccagccatacgcattcagtcgtcgcgctggtcaccagacctccgccgaatcctggggtaccggcc

SEQ ID NO: 119738 - DNA, 260 bp, Glycine max
gaaaaatgatgctcggagaacaccatcgcgggaatccgacggtcctcgtgccaccgtggccagcccacgacgatccgacggctgagatgtactccgcgttcttaacaaacgacgtcaatgctggtgagtatcctccgtacaatcttcaggagccataacggcggttcagcggtttctggcgtcaaacgaaacggacgcagactcggactcctcggaagcgggtcagcccgacgcggcggtggacgcgtacacgtgcgacc

SEQ ID NO: 119739 - DNA, 261 bp, Glycine max
ccttgcgtaacgtccccggcgtcgaggtcgccaacgtcgagaggctgaaccttctgaagctggcccccggtgggcacctcgggaggtttgtaatttggaccaagagcgctttcgagaagttggattcaatttacgggtcttttgataagccctctgagaagaagaagggatacctgcttcccaggtccaagatggtgaattcggacctctccaggattattaattctgatgaggtgcaatctgttgtgaggcccattaaga

SEQ ID NO: 119740 - DNA, 253 bp, Glycine max
cggctcgagcggctcgagggcaaatggccttgccagaaggtgcattgtccaagtttcctatgccattggtgtagctgagcccttgtcagtgtttgtggacacttatggaactgggaagattcctgacaaggagattcttcaaattgtgaaggagaatttcgacttcagacctggaatgatcaccattaacttggaccttaagaggggtggccataggttcctcaagacagctgcttatggacactttggaagg

SEQ ID NO: 119741 - DNA, 255 bp, Glycine max
cgcatcttttgcttcactctacgcagatcgcagcaaaccagagattgaactccgacgatgcctcccgtcgctcctcgatccggcgatgccatattcgccaacgtcgaacgcgtcaatgcggagctgtttactttgacgtatggcgcaattgtgcgtcaattgctcacggatctggaagaggttgaggaggttaacgagcagcttgatcaaatgggttacaatattggaatccgattgattgatgagtttttagct

SEQ ID NO: 119742 - DNA, 252 bp, Glycine max
atcgatgaagctactgcgaaagctacgaacttagaaatggagagcaatttgaagaaatgactttaaatctttgtgtactgacccccaatcgaattgtttgggattcggaagtgaaggaaatcattttatctactaatagcggacaaattggagtattaccaaatcatgcgcctattgccacagccgtagatataggtattttgagaatacgtctttcttaaagaccaatggttaaagagggctctaaggggg

SEQ ID NO: 119743 - DNA, 260 bp, Glycine max
caccacattcacctgaggcttccaaagcaatggattcccttgcagcatccactgctgctgcttcccttggcatgtcagaaatgcttggaaaccccatcaacttcagtggtgccacaaggccagctccatctgcttctagtcctgcctccttcaagactgtggctcttttctccaaaaagaaggctacaccaacacctccaaaaaaagctgctgctgctgctcctgccaatgatgagcttgccaagtggtatggtcctgac

SEQ ID NO: 119744 - DNA, 221 bp, Glycine max
ctgggcacgggggtcgcagtcccgaacccgtcggctgtcggtggactgctcgagctgcttccgcggcgagagcgggtcgtcgcgtgccggtcgggggacggattgggaacgggccttcggggctcttcccgggcgcgacagtcactcagactggtaggacaagggatcgactgtgtatagacaacatgcgatgtcctcgatgtgacgcatgtgatctgcag

SEQ ID NO: 119745 - DNA, 124 bp, Glycine max
tgagaagaccggggaactccccgaccctaactccactgacaacgccgagttccagatcgtgcttaccatcatcagagatgggttgaagaccgatcccaccaggtagcggcagaatgaaggagcg

SEQ ID NO: 119746 - DNA, 255 bp, Glycine max
gtagagagctcttcctcactctcattcgccgtggccgcagcagcacgtcctctcgtcaccgtgcaggccctcgacagtgacatggccaccgacgcctccgccaccgtccctatccctgacgtcatgaagtcctccatccgcccggacatcgtcaacttcgtacactccaacatctccaagaacagccgacaaccctatgcagtcagccgccgcgctggccaccagacttccgccgagtcctggggaaccggtcgt

SEQ ID NO: 119747 - DNA, 253 bp, Glycine max
ctcgagccgggtcattgtgcgggaagagaatgctggttctgtttcgtactcacatcgccttgttagaattgaggaacctataatgcgaataccgactttggcaattcacttggacaagactgttaatgatggattcaaatttaacaacgagaatcaccttattcccatcttggcaacatcgctgaagggtgagctcaataaagtgtcctctgaaaatggtcctgttgaaagtggaaatcagaccgatggaaag

SEQ ID NO: 119748 - DNA, 248 bp, Glycine max
acttaacccaggtgtaaaaatgtcagcagtgaacatgtccactatgagacttccaagagcttccttgtctggaacaacaccagctaggagatcatgtgctcttacaaagagtccatcatctttgaggtctgtgaagaatgtgtctaaagtgtttggattgaaatcatcttcctttagagtgtcagcaatggcggtatataaagtgaagctgattggaccggacggtgaagagaatgaatttgaagccc

SEQ ID NO: 119749 - DNA, 251 bp, Glycine max
cacgtttggctcttgcttcaattggtaaactcatgtttgctcaattctctgagcttgtcaatgattattacaacaatggtttgccttcaaatctcactgccagcagaaaccccagcttggattatggattcaagggagctgaaattgccatggcatcttattgttctgaacttcaatatttggcgaatccggtgacaagccacgtgcaaagcgcggagcaacacaaccaagatgtgaactctctggggctg

SEQ ID NO: 119750 - DNA, 253 bp, Glycine max
cacgtttggctcttgcttcaattggtaaactcatgtttgctcaattctctgagcttgtcaatgattattacaacaatggtttgccttcaaatctcactgccagcagaaaccccagcttggattatggattcaagggagctgaaattgccatggcatcttattgttctgaacttcaatatttggcgaatccggtgacaagccacgtgcaaagcgcggagcaacacaaccaagatgtgaactctctggggctgat

SEQ ID NO: 119751 - DNA, 258 bp, Glycine max
gtcaccgttaacggctccttcacgccgcttgctcttctcgccgacggccgtctatggtggtctgagggaatccaacggtgtttgtcgatcgaaaaggacgtcctcgggatcgttgccagtgggccctacataaaaatcaagagcctcgtggagacccgagacggatgctgcatcaccagcgcccctgcaagactcgttagaaacgacgtcgtctttatgccttcctccgaggaatctcacaggctctggtgccataaa

SEQ ID NO: 119752 - DNA, 255 bp, Glycine max
tctggtcctgaggtttctgcgcttgaaaaaaaaaatctgggcgatatgtcccagataattggtccggtactagatgtagcttttcccccaggtaagatgcctcatatttacaacgctctgatagttaagggtcgagatactgttggtataccaatgtatgtgacatgtgaagtccatcaattattaggtaatgatcgaattagagctgtagcagcgaaagcgcttgaaagtgccaatgagttgtatcaaattttt

SEQ ID NO: 119753 - DNA, 249 bp, Glycine max
gacacgttcaccacgtacgctaaatcctcggatggcgaaacaaaagtagggttcacttcctacggcgtaaacaacactttcaaggattacgagaaaaagggtaccactgtctcattcgccaggtacaccaacattagcacgaccctctcagtttcagcttcatcagtcagtggcagtttggtaaataagtgggtggagccgggtaagttttttcgtgagaagatgatgaaggaaggaaccgtgatgccg

SEQ ID NO: 119754 - DNA, 249 bp, Glycine max
aaacggcgacgttggggttgacggcatgataagtgtgattggacacgagatggctgaactggcaacgaacccgttggcgaatgcttggtatgcgggtcaggacccctctttccccgtcgagattgccgatctctgtgaggggatttacggcaccggtggcggtggatcctacaccggtcaggttttcgacgctcgagatggcgccacctataacatgaatgggatcagacggaaattccttgttcagtg

SEQ ID NO: 119755 - DNA, 247 bp, Glycine max
gcactctttgcaacacaacaaaaaacttcaacacagagagaagcgtcttaataaacgctcttctctgaaaaacctgatttcttctcttcttctcttctctttcgtttcgatcttcgatctctgaaaatgagagagtgcatttcaatccacatcggtcaggccgttattcaggtcggaaacgcctgctgggagctctactgcctcgaacacggcattcagcctgatgggcagatgccaagtgataaga

SEQ ID NO: 119756 - DNA, 247 bp, Glycine max; identical to SEQ ID NO: 110283

SEQ ID NO: 119757 - DNA, 221 bp, Glycine max
ctcgagccgtccttgtgcaccgtaagggttgtgaagcaggcagagaagagccatggtgcacgtttccttctaccgaaactatgggaaaaccttcaagaagcctcgtcgtccgtacgagaaggatcgtttggacgccgagttgaagctggtcggtgagtacttccctgaaagagatagttgtgttagggttcagtacgctctcagccgcatccgtaacaacg

SEQ ID NO: 119758 - DNA, 259 bp, Glycine max
gcgtgaaacaagcctctcaccttctcaaatacgattccatcctcggaaccttcgatgctgatgtcaagcctgttggcagcaatgtcatctccgtggatggaaaggacatcaaagttgtttctgaccgcaaccctgccaaccttccttggaaggacttggggatagacttggtgattgaaggaaccggggtgtttgtagacagagaaggtgcagggaaacacattcaagcaggagctaagaaggtgctcatcactgctcc

SEQ ID NO: 119759 - DNA, 255 bp, Glycine max
ctgtgatttacctgatgctgactaatgatgtcattcatgggctgttccctgaggctgttacaattggtgaagatgtgagtggaatgccaacattctgccttcctacgcaagatggtggggttggctttgattatcgcctgcacatggccattgcagacaagtggattgagattctcaagaagaatgatgaagactggaaaatgggtgatattgtccacacattaacaaacagaaggtggctggaaaaatgtgtag

SEQ ID NO: 119760 - DNA, 259 bp, Glycine max
  unsure (1)..(259): unsure at all n locations
gccaatgtatcccccaggtggtccaggtattggtcaacaattattttatagccaaggccctcctgntatcattccttcccagcctggatttggctatcaacaacaacttatgcctggtatgaggccaggtgcagctcctgtgccgaatttttacgtgccaatggttcagcagggacaacagggacagcgtcccggtggaaggcgtccaggtgcagttcagcagtcccagcagccagttcctatgatgccacagcagatg

SEQ ID NO: 119761 - DNA, 264 bp, Glycine max
tttggttctgcagattgaagccacaggtctgctccttttctttggcttcaatttgtaaaggtttgattttgaagaggaagcatacagtggtattatagtggagatctgggacttgttttgcctcttatgccctatgaggactttcttcaccgcagaatcgtgtaaagaagcacaccatagtgctttgaatccacagtcctggctccaagttgaaagagggaagcttcccagattgtcatcacagtcctcttctgcatcaataga

SEQ ID NO: 119762 - DNA, 262 bp, Glycine max
ctcgagccgttcgagggtttgggtttctcttcctcccttggagacaaagaagagccaccgctgcgacgccgttcgtgcatttttgaggtgccgctgtcatgtttgggcgtggtggaccaaggaggagtgataactccaaatattatgatattctcgggatttccaaaaatgccagtgaagatgaaatcaagaaggcctatagaaaggcggctatgaagaaccatccagataagggaggagatcctgaaaagtttaaggagtt

SEQ ID NO: 119763 - DNA, 259 bp, Glycine max
acacgcctatcatgcatacagatcaatgaataatcatggttttcatgtaacagaaatccaagatcatcatctctagggtctagcaaaaacaccccaaatcttaccacggccaagactctccaagagtttcttggacccgggaacatccatttccacaagcttctgcatccatacacaagctccagcagccaccatttgcttcctgcaactcttggaatgaacaagcaaagcgagtaacgaaacagggtacttcttatcc

SEQ ID NO: 119764 - DNA, 268 bp, Glycine max
tggatacctaggcacccagagacgaggaagggcgtagtaagcgacgaaatgcttcggggagttgaaaataagcgtagatccggggattcccgatataggtcaacctttcgaactgctgctgaatccacgggcaggcaagagacaacctggtgaactgaaacatcttagtagccagaggaaaagaaagcaaaagcgattcccgtagtagcggcgagcgaaatgggagcagcctaaaccgtgaaaacggggttgtgggagagctatacaa

SEQ ID NO: 119765 - DNA, 264 bp, Glycine max
cttcatcaagctccgctccaacacaggggaaaatgagggagatccttcacgtgcagggagggcaatgcgggaaccagatcggttccaagttctgggaagtggtgtgcgacgagcacggcatagatccgacggggaagtacgtcggaaactcagatctgcaactcgagcgcgtgaacgtctactacaatgaagcctcgtgcgggcgcttcgtgccacgcgcggtgctgatggacctggagcccggaaccatggacagcgtgcgga

SEQ ID NO: 119766 - DNA, 257 bp, Glycine max
tgtttttctttttttcatttgcattgcaaagcaaaaaccttgcaaattgcaatggcttccaacaaggttattgccaccatcttggttctttctctccttgcctactcaacatcattcaccaatgcatgtggcacatgccacccaaaacctactccttctccccctcctccatcagggaagtgccccaaggacacattgaagctaggggtgtgtgctgatgttctaggacttgttaatgttgttgttggttcccctgt

SEQ ID NO: 119767 - DNA, 263 bp, Glycine max
gcgcggtgagtgagtgagagacggaaagttcaaagccaccgtcttctcttctcagagcttggctttgcttatcgattctctctcctctcatctttctcattcaaggtttgtaaaagatggccgatgctgaggatattcaaccccttgtttgtgccaatggaactggaatggtcaaggctggatttgctggtgatgatgctcccagggctgtctttcccagtattgttggccgacctcgacacactggtgttatggttgggatg

SEQ ID NO: 119768 - DNA, 265 bp, Glycine max
cctaaaccctagtctccatacatcaacttgggaggttaaagagacggcaacgttgtgctgtccgccttgaccgagccagagcttcgtcttggccctcgattttgccctgtaaaactaatcccagtcacaacagaaataatcaatggcaccgaaacagaccaaggctgagaagaagatcgcttacgatgcgaactgtgcgacctaatggaggagtacggccaaatcctcgttgtaaactccgacaacgtgggatcgaaccagctcc

SEQ ID NO: 119769 - DNA, 267 bp, Glycine max
cagacacaaaaatcgccatcggaaaccaacaatgcctcctttgactttgtggctggtgctgccttttctcgtgttgctagcggcggcaacaacgtctccaacacgcgccacgacggtcgcctcgtcgttccacggtcaacgagagtttgactatttcgctttcgcgttgcaatggcccggtacttactgcaaacgcacccgcagttgctgccccaccaacggttgctgcagaggctccaattttccaacagtgttcaccatacatgg

SEQ ID NO: 119770 - DNA, 268 bp, Glycine max
aactgaattgagtctcaacaacccagttgagtaactaagatggcgcaagtgaggaacaagcaagtgcttctaaaggactatgttaccggttttcccaaagaatccgacatgaatattgtcgaaagtaccataacattgaagcttccacaaggttccaatgatgtcttgctcaaaaatttgtacttgtcttgtgatccgtatatgaggaatctcatgaacaagcccgaaggccctcccaatagtcgtgcttacactcctggctctccat

SEQ ID NO: 119771 - DNA, 263 bp, Glycine max
catcagtcgatcagaaagcctccataacccaacaatcgtgagtgcacattctcaacccttacgagtatctgcatccatctgggctgtcttgttctaataataaattattttggttatcgatttttaatctgtgttgcagcctttcaagaggtacgttgagattggaagggttgctcagatcaactatggcaaagagtacgggcggctcgtgatcattgtcgatgtcattgaccagaatagggtatgacctttttcttttttct

SEQ ID NO: 119772 - DNA, 256 bp, Glycine max
cgacgggggcttaaccgtcttttgccccctcgacgacgcgttcaaagcgtttctccccaaattcaaaaacctaaccaaatccggtaaggtcgcgcttctcgaattccacggtgttccggtttaccagtccaaagccactctcaaatccaacaacggacttcagaacactctcgccactgatggcgctaacaagttcgacttcactgttcagaacgacggtgaagatgttactctgaaaacgaagctcaccactgcg

SEQ ID NO: 119773 - DNA, 254 bp, Glycine max
ctgccaggggctaaatggaaccattttctctgctagcatgaacaacataagctttcgaatccccaccattgacatactaaaagcctattactaccatatcaacggggtatacgaacctggatttccaacatttccaccgtttatatttaacttcactggggattttttgcctataacactgaatacaccaaagcaagggactagggttaatgtgctgaactatggtgcaacagttgaaattgttttccaaggga

SEQ ID NO: 119774 - DNA, 255 bp, Glycine max
ctgcaccgcccatagtggccatgctgccatcccctggcatgggacacctaatcccaatgatcgagttcgccaagcgagcggtgcgctaccataacctggccgtcaccttcgtcatccccactgacggcccaccttctaaagcccaaaaggccgtcttccaggccctcccggactccatttcccacaccttcctccctccagtcaatctctccgactttccaccgggcaccaaaatccctaacctgatctcccaca

SEQ ID NO: 119775 - DNA, 252 bp, Glycine max
tatttgtaggccatttatggcacgcgggaagagctcgcgcagctgccgcaggatttgaaaaaggaattgatcgagattttgaaccagttctttccatgactcctcttaattgagacatgagatcctatgaagtagaaatcacttttattttactataaatattactataaatattgggttgaattgagcgggtcgtatttaaataagaatttctgttccttttttcttagtttctatcgaaaaaaaaaagat

SEQ ID NO: 119776 - DNA, 255 bp, Glycine max
tggcgttgtacgtgctctcgcgtcgtttatcagctggatctcaactcaaccacgctcctcgccttgcgttttgtctcctctaccagatcctactcctctgccttcagggaagacagagatacctttggagccattcaagttccctccgggaaattatggggagcacaaactcaaagatcgttgcagaacttcgatatcggtgggccccgcgaacgcatgcacgaatccatcattcgcgcctttggcgtgttgaag

SEQ ID NO: 119777 - DNA, 254 bp, Glycine max
ctcgagccgggtcattgtgcgggaagagaatgctggttctgtttcgtactcacatcgccttgttagaattgaggaacctataatgcgaataccgactttggcaattcacttggacaagactgttaatgatggattcaaatttaacaacgagaatcaccttattcccatcttggcaacatcgctgaagggtgagctcaataaagtgtcctctgaaaatggtcctgttgaaagtggaaatcagaccgatggaaaga

SEQ ID NO: 119778 - DNA, 257 bp, Glycine max
gcaagaatggcacttcgttgcttggtgatgtccctttctgttctcttcactcttggtcttgcgagagaaagccatgccagagacgaagatttttggcatgctgtttggccaaacactcccattccaagttcattgcgagatcttctaaagcctggccctgcaagtgttgaaatcgatgatcaccctatgcaaattgaagaaacacagtacccgaaaaccttctactataaagaagaccttcatccaggcaaaacaat

SEQ ID NO: 119779 - DNA, 262 bp, Glycine max
caaaacactcataacacaaagcacagagctaagctcatccttgagttacaaaatggcagcagcttcttccatggctctctcatccccatccttggctggcaaggccgtgaagctgggcccatcagccccagaagtgggaaaggtgagcatgaggaagaccgtcaccaagcaggtctcctcaggaagcccatggtacggcccagaccgagtcaagtacttgggcccattctctggcgagcccccgtcctacctaaccggtgag

SEQ ID NO: 119780 - DNA, 261 bp, Glycine max
ataacagcaccaacaatggtgaagcattacagacccccggggaagaaaaaggagggaaatgctgccaaatttgttattaggtcacaggcactcaagcagcttcaaatcagtttaccccttttcaggaaactatgtattttgaaaggtgtaactccccgggagcccaagaaaaagttcaagggaactcatcagacttattaccatgtcaaggatgtttccttccttcatcacgagcctttggttgaaatacatagagcgata

SEQ ID NO: 119781 - DNA, 255 bp, Glycine max
cgtgaatgcgtataaaaggaaaataaagaaattagcgtcaaaatgttgggtgtgttcagcagctccatagtgtcgccgccggacgagctcgtggccgccggcaaccgtactccgtcgccgaagatgacggcggcggcgctgcggaagcggttcgaggagaagaacccctccgccgtgtcggtggaggtcggagagcatgtccagctcgcttatacccaccacaacgagtcgccgtttcagcccagatcctttgct

SEQ ID NO: 119782 - DNA, 251 bp, Glycine max
ggctaattccctcgctgctgggtacagcacaggtactggattgggtgctgagattattggaacctttgttttggtctacactgtcttctctgtcactgaccccaagaggaatgccagagattcccatgtgccggttttggctccacttcccattggatttgctgtgttcatggttcacttggccaccatcccagtcactggtactggtatcaaccctgctaggagtcttggagctgctgttatctacaacc

SEQ ID NO: 119783 - DNA, 226 bp, Glycine max
gcgaagagaatggctcccaagggtttaatctttttggctgtgttatgcttctcagcactgtcactgagtcgttgtcttgcggaggataatggacttgttatgaacttctacaaggaatcatgccctcaggctgaagacatcatcaaagagcaagtcaagcttctctacaagcgccacaagaacactgctgtctcctggctcagagacatcttccatgactgtgctg

SEQ ID NO: 119784 - DNA, 258 bp, Glycine max
ggaaaaatggtttcgctgaaactgcagaagcggctcgccgcgagcgtgctcaagtgtggcagaggaaaggtttggcttgaccccaatgaagtcaacgaaatctccatggccaattctcgccaaaacataaggactctggttaaggatgggtttatcatcaggaagcccaccaagattcactctcgctcacgtgctcgtcgaatgaaggaagccaagaggaaaggacgtcactctggatacggtaagcgtaagggtaca

SEQ ID NO: 119785 - DNA, 248 bp, Glycine max
gttggttttgggctgtatgagttagggttccctggggtagctaaatgtgtagagatcggattgcctcagcttatattgctagtatttgtttcacagtatgtgccccatgtgctacattcgggaaaacatatcttcgaccgttttgctgtgttatttacaattgtaattgtgtggatatatgctcatctacttactgttggaggggcctataatgatgctccacataaaactcagatatcatgccgcac

SEQ ID NO: 119786 - DNA, 249 bp, Glycine max
gcaatccctctccttgtaccacacatgaacctccacgacgcaaagcttgggggctatgatatcccagctgagagcaagatcttggtgaatgcatggtggctggccaacaaccctgcacactggaagaagccagaggagttccggcctgagaggttcttcgaggaggagtcgcttgttgaagccaatggcaatgactttaggtaccttccctttggtgttggcagaagaagctgccctggaatcattctt

SEQ ID NO: 119787 - DNA, 251 bp, Glycine max
ccttcactttcccgagaaaaaaaaaacactctttcactttcttgactacggtctcacttcgacatggctcgtactaagcaaactgctcgcaagtccaccggcggcaaggcgccacgtaagcagttggcgaccaaggccgcccggaagtccgctcccgcgaccggaggagtgaagaagccccatcgcttcaggccgggaaccgtggcgctgagggaaatcagaaagtatcagaagagcaccgagcttctcat

SEQ ID NO: 119788 - DNA, 258 bp, Glycine max
cctttgttcactcttcttctcttgcggctagggttttagcgcagttcttctagatttaaggaagatgggtaaggaaaaggttcacatcagtattgtggtcattggccatgtcgactctgggaaatccactaccactggtcacctgatttacaagcttggaggcattgacaagcgtgttattgagaggtttgagaaggaagctgctgagatgaacaagaggtctttcaagtatgcctgggtgctggacaaacttaaggc

SEQ ID NO: 119789 - DNA, 261 bp, Glycine max; identical to SEQ ID NO: 119780

SEQ ID NO: 119790 - DNA, 245 bp, Glycine max
cttgcatttgcgggcaagccttttgtgccaatgggagtttttggctctattgttcctgttctgactcttggctcattttctaagagatggatagttcctggatggaggcttggttggtttgtgacaaatgatccatctggcacttttagaaatccaaaggtagatgagcgctttaaaaagtactttgatcttttgggaggtccagccaccttcatccaggcagctgtacctcagataattgagca

SEQ ID NO: 119791 - DNA, 246 bp, Glycine max
aaacaaagaaaaaaaaaaaacccttagccaacacaaccatcatggccacctctgctattcagcaatcagcattcactggtcaaactgctctgaagcagctcaatgagttcgtccgcaagaccggtggcgccggcaaaggtcgcactaacatgcgccgcaccgtcaagagtgctcctcagagcatttggtatggccctgaccgtcccaagtacttgggtccattctcggagcagattccatcatacc

SEQ ID NO: 119792 - DNA, 249 bp, Glycine max
ctcacgctcacactcactcatttgcaaagaaagagagagaaatggcactgagggcagccgtgctccgccacgttcgtgtgccactccaagccgctccaaaactgcagccatggcgtgccatgtcatcacacggcgacgatcatctctccaaagaggaggtcgtcgaaagagtcctcgccgtcgtcaaagatttccccaaagtcgatccttccagggtgagtccagatgtacatttccagaaggatttgg

SEQ ID NO: 119793 - DNA, 245 bp, Glycine max
gtttgttgttgtaactcgttcttcttcttttgttgttctgtgtttgtgtttgttttttctctcacctgaaaatgtcttgctgcggtggtaactgtggttgcggaagctcctgcaagtgcggcaacggctgcggaggctgcaagatgtacccagacttgagctacactgagtcaaccaccaccgagaccttggtcatgggagtggcacctgttaaggctcaatttgagggtgctgaaatgggtgtg

SEQ ID NO: 119794 - DNA, 252 bp, Glycine max
gtgagcactatagtgccgacgacagtcattcatttatggttacgcttattgcgctcagcaaccagtgtagcgaggtaactgctgagtcttgaagagaggcttctgaaggatgagggactgatgagaatactgttatggtaatattaggtcatagaactgtttatcagaaggagttaatgagaagagtctatggcgctattttccaggaggatgttgtgaaacgcctagggtctgatatcctaggggactttg

SEQ ID NO: 119795 - DNA, 251 bp, Glycine max
ggaagaagaagctcctccagtgccacctgcaccgcccatagtggccatgctgccatcccctggcatgggccacctaatcccaatgatcgagttcgccaagcgagcggtgcgctaccataacctggccgtcaccttcgtcatccccactgacggcccaccttctaaagcccaaaaggccgtcttccaggccctcccggactccatttcccacaccttcctccctccggtcaatctctccgactttccaccgg

SEQ ID NO: 119796 - DNA, 254 bp, Glycine max
gtgaagcgcctagagtctgagatcaaaggagactttgagaaagccgtgtaccgatggatactggaacctgcagatcgtgatgctgttttggccaatgttgccatcaagagtggcaaaaactacaatgtcattgtggaaattgccactatcctctccccggaagagcttttggcggttagacgcgcctatctcaaccgctacaagcagtccttggaagaagatgttgcagctcatacctctggccatctacgcca

SEQ ID NO: 119797 - DNA, 255 bp, Glycine max
ggccctcagacaagccactcaggcttccattgcaggatgtctacaaaattggtggtattggtaccgtgccagtgggacgtgttgagactggtgtcgtgaagcccggtatggtggtgacttttggtcccactgggctgacaactgaggttaagtctgttgagatgcaccatgaggctctcacagaggctcttccaggtgacaatgttggctttaatgtgaagaatgttgcagtcaaggatctcaagcgtggttttg

SEQ ID NO: 119798 - DNA, 264 bp, Glycine max
aaaacagaatgggcgtcgtggtgatcgacggcagcaccgtgcgcgacttcgtgaacgacgaaaccgccttcaccaagagcgtggacgagcagttctcggcgctggacctcaacaacgacggcgtcctctcgcgctcggagctccgcacggccttcgagtccatgcgcctcatcgagacgcacttcggcatcgacgtttccacgccgccggagcagctcgcgaactctacgactccatttcgacaattcgacgggacggagcggc

SEQ ID NO: 119799 - DNA, 260 bp, Glycine max
gatggacagactcgtgaacatgctctgctttcattcacccttggtgtgaaacagatgatttgctgctgtaacaaaatggatgctactacacccaagtattccaaggccaggtatgatgaaattgtgaaggaagtctcttcctacttgaagaaagtaggatacaaccctgacaagattccttttgttcccatctctggtttgaagggagcaacatgattgagaggtccacaaaccttgactggtaaaaagggccaatctgc

SEQ ID NO: 119800 - DNA, 250 bp, Glycine max
gtccaacctacccctttttcttctcccaccaacttcaccgtcttcttcctcgatcatgtctcacttcaagggcaagtaccatgatgagcttattgccaatgctgcttacattggcactcctggaaagggtattcttgctgctgatgagtcaacagggacaattggcaagcgtttggccagcatcagtgtagagaatgttgaatccaacaggcgtgctcttagggagctgcttttcaccgctcccggtgct

SEQ ID NO: 119801 - DNA, 256 bp, Glycine max
attggtagaagtgttgacgagacaaagagaactctccaggccttacagtatgtgcaggagaacccagatgaagtttgccctgctgggtggaagcctggggagaagtccatgaaaccagaccctaaacttagcaaagactactttgcagcggtgtagctaggataatagttaagagtggctatctgcatctgtatcaatcagtgaattgcaaaagggtcttgttttttttaatgttttgtaagtccttaaattttga

SEQ ID NO: 119802 - DNA, 253 bp, Glycine max
gtgagaatgatgaagcgtcggttccttttggttctcttggttctctatgtcacagtggagttctacgtagaagcagatggtagtggtgggtttgtgagaacaagaggagtgcagcttatgctgaatgggagcccctactatgctaatggctttaatgcctattggctaatgtatcttgcctctgatccttctcagagtaacaaagtctcatcagtgtttcaacaggcttcaaatcatggcctcaacattgcca

SEQ ID NO: 119803 - DNA, 126 bp, Glycine max
gtgcaacaaaccccgacttctggaagggatgcatttattagataaaaggtcaacacaggctctgcctgttgctttgatgattcatgataactcgtcggatcgcacggcctttgtgccggcgacgca

SEQ ID NO: 119804 - DNA, 250 bp, Glycine max
agggtttgccgattgagagagaaagagaaatgggagaacgaaaaggaatcccaatggctttggggctcttggcgatgatcctcttcttcattgcttcctcttcctctcacctcgttcgcgcttccgatgacgccgacgacgcgatcttctacgagtcgttcgacgaggattttgatggacggtggattgtatccgacaaggaggattacaatggtgtctggaagcatgccaagagtgatgggcatgatga

SEQ ID NO: 119805 - DNA, 208 bp, Glycine max
gcgacggactcggcgacggaggacgagcggaccggaatcctgcaggacgttgacagggcagcgctgtcgcgtcccttggatgagacgcagcagagctggctccttggccccggcgagcagaagaagaagaagtacgtcgatctcggctgcatcatcgtcagccgcaagatcttcaagtggaccctcggcacaatcctcttcgcggcgt

SEQ ID NO: 119806 - DNA, 251 bp, Glycine max
ctcattaccaacacgaaagcatagccaaaaccttttttcgaagtctctgattttcctaatggctccggcaaaggcagagaagaagccggcggagaagaagccagcggcggagaaggcaccggcggagaagaagccgaaggcgaagaagaagatctcgaaggaaggagggagcgagaagatgaagaagcgcacgaagaagagcgtggagacctacaagatctacatcttcaaggtcctcaagcaggttcacc

SEQ ID NO: 119807 - DNA, 262 bp, Glycine max
agctgctacagttacagcataacttctattctatatttctttctactcgcaagcaaatcagaagaagagaatggcagcagcagaggggctaaacagagagcagtacgtgtacttggcgaactgtcggagcaggcggacggtacgaggagatggtggagttcatgcagaaggtggtggtggggtcgacgccggcgtcggagctcacggtggaggagcgcaacctcctctcggtggcctacaagaacgtcatcggctcgctgcg

SEQ ID NO: 119808 - DNA, 258 bp, Glycine max
aaacaactctttctcttcttccttcgctcgttgttctccctcgcgtagatcgacaatggcggagacagagacgtttgctttccaggctgagatcaaccagctcctcagtctcatcatcaacaccttctactccaacaaggagattttccttcgtgaactcatcagcaacgcctccgatgctttggacaagattcgatttgagagtttgacagataagagcaagctcgatgctcagccagagttgttcattcatattat

SEQ ID NO: 119809 - DNA, 206 bp, Glycine max
ggagagatggcagctgcaacatctagtgctgtgttaaacgggtttggatctcacttcttgtgtggaggaaagaggagccatgcccttcttgctgctagcattggagggaaagttggtgcttctgttagtcctaaaagagttattgtggcagttgctgctgcacagaagtcatcgatccccgctgtaaaaagtggtgggagtttcat

SEQ ID NO: 119810 - DNA, 251 bp, Glycine max
gtcgttttggcctatgagccagtttgggccattggaacaggaaaggttgcaactcctgctcaggctcaagaggttcatgctgatttaaggaaatgggttcatgacaatgtgagtgctgaagttgctgcatctgtaagaattatctatggaggctctgtaaatggaggaaactgcaaagaattggcagcacagcccgatgttgatggatttttggttggtggtgcatccctcaaggcggaatttgtggacat

SEQ ID NO: 119811 - DNA, 210 bp, Glycine max
gcagaacaaaggtgtggttcctctcgacaatgctctcttcaaacccctcactcctaataaggaaatggtcgaccccaacaccttgcttcactacaccaacgtcctcgacgctatggtcgacgccgcttatttctccatgaagaaccttaatatcaccgatgttgttgttcttgtcaccgaaactggctggcctgccaagggtgattctaa

SEQ ID NO: 119812 - DNA, 246 bp, Glycine max
ccactgcaaagtcttatgccacaaggaccatccttttcttgcaagacgatggcacattgaagccattagccattgagttaagtttgccacatcctaggggacatgagtttggagccgatagtagagtagtcttgcccccagccgcagtcaacagcgctgaaggcacaatttggttaattgccaaggcttatgttgctgtcaatgacactggctatcaccaactcataagccactggttaaatactc

SEQ ID NO: 119813 - DNA, 215 bp, Glycine max
ggaaaaggaaaacctacaactcaggtggctctttcagtgatattgactgctgctggagttctcattgctgcccttggagatttttcctttgacctttttgggtatagcatggcctttgtttctgtttttttccagaccatgtaccttgtgctggtggaaaaatctggtcctaagattgggtttcatccttgggaatcatgttctataacagcttt

SEQ ID NO: 119814 - DNA, 252 bp, Glycine max
gacttaacaacagcacaaagcgggttactgtctgttcaagctaccatctctctctctctttcttagtgcctccttgccagaagttaaaatggcccaagaaactttcctattcacatctgaatcagtgaacgaggggcaccctgacaagttctgggacaggtcctccgtgctgggctcgatgcatgctttgagcagggccctgacagcaaggttgcctgtgaaacctgcaccaagaccaacatggtgatggtt

SEQ ID NO: 119815 - DNA, 243 bp, Glycine max
atcaccctcctgtaaggagccactagatgtttcgaagaagtttacttttgatgtcctttctggtattctaacagatatgagaaagatatttccatttgaactatttcacttgggaggtgatgaagtgaatacagattgctggactaatacttccacagtgaataaatggcttcggaatcacaacatgactgctaaagatgcctatcaatattttgtactgaaggctcaaaacatagctcttac

SEQ ID NO: 119816 - DNA, 248 bp, Glycine max
gtttggagactgctggcggtgtgatgactgtcttgatccctaggaacactacaattccaaccaagaaggaacaggttttctcaacatactctgacaaccagcctggtgtgttgatccaggtctttgaaggtgaaagagcaaggactaaagataacaatttgttgggcaaatttgaactttctggcattcctcctgcccccaggggtgttcctcagattactgtgtgctttgacattgatgccaatggt

SEQ ID NO: 119817 - DNA, 240 bp, Glycine max
accggcaagaccataaccctagaggttgaaagctccgacaccatcgataacgtcaaggccaagatccaggacaaggagggtatccccccggaccagcaacgtctcatcttcggcagaaagccgctgacggccggcacctcgccgactacaacatccagaaggaatcaacccttcacctcgtcctccgtctccgtggtggcatgcagatcttcgttaagaccctcaccggcaagactatta

SEQ ID NO: 119818 - DNA, 241 bp, Glycine max
gaacaagtagttgagaactaagaaggagaagcaaatggcttcctcaatgatctcttccccagctgttaccactgtcaaccgtgccggtgccggcatggttgctccattcacaggcctcaagtccatggctggcttccccaccaggaagaccaacaatgacattacctccattgctagcaacggtggaagagtgcaattcatgcaggtgtggccaccagttggcaagaagaagtttgagact

SEQ ID NO: 119819 - DNA, 231 bp, Glycine max
cgaagaagccctaactacgcacgcattcgtgagaaaactcaatattcgtcgctcatggcactctcttctcgtctcttttccaaatccaaattgatctatggcagtcaaatacttctacaaaaggagcatgctattccagttcgtcactttgctaaagagtctgcccctcctgcccttaagggagacgagatgctgaagaacatttttgtggaggtgaagaccaatttgaga

SEQ ID NO: 119820 - DNA, 245 bp, Glycine max
gtccaagcagcctccaattcgtgccactctcttcaaaatggccgttaccttctcaaatctccacacagaatcaggtctcaagtccctcgacgacttcctctctgggaaggtctacgtttctggggatcagttcacaaaggacgacatcaaagtgtatggtgctgttttggagaagccaggtgactcttttcccaatgctgccaagtggtacgaggttgtctcatctcagcttgctgcaagcttcc

SEQ ID NO: 119821 - DNA, 241 bp, Glycine max
gggttgggggatgagaggtggccgtttgtgacacattttgtcgggtgtaaaccgtgtgggagttacggagattatcctgtggagaggtgcctcagtagcatggagagggctttcaattttgctgataatcaggtgctcaagctctatgggttcaggcaccgtggtctcttgagtcctaagatcaagaggatcagaaatgagacagttagtcctttggagtttgtagaccagtttgatattc

SEQ ID NO: 119822 - DNA, 217 bp, Glycine max
gaaaaccacgagtggtcgcgagtacaaggtcaaggacctttcccaggccgacttcggccgcctcgagatcgagctggccgaggttgagatgcccggcctcatggcctgtcggaccgagttcggcccctcccagcccttcaagggggcccgcatcaccggctccctccacatgaccatccagaccgccgatctcattgagaccctcaccgcccttggc

SEQ ID NO: 119823 - DNA, 241 bp, Glycine max
caagtgttgaatgctacctccatttttcgttatagtaactctggtggaggtgttactggcctttttccttgggggccaactattcaagttgattggtctttaaaccaagctcgctctcttaggaggaatttgacagcaagtgggccaagacctaatccacaaggatcataccattatggtttgataaacacaactcgaacaattagacttcaaaattctgctccagttatcaatggcaaac

SEQ ID NO: 119824 - DNA, 247 bp, Glycine max
tggaccctgaggaggcaaccaccattaacgagctgaagaagcctgttgtggagaaagaagctccagggcatgccatatgagggcatgcacgtacggcctcggaggggaaccagaaaattatgttaacaaaataatctggaaccctaatgtatcagtgtcatcatcagtgtgtagtttaagctagctttgctatggttacgttctttgaaatgagagtcttgatgaacagtaccattctgatgtattg

SEQ ID NO: 119825 - DNA, 207 bp, Glycine max
ggacagaagagagcgtcctagtcgcaaccctaataagaagaaccacagcttcaagcgagtgacatccaccagccatgggtcgtatgcacagccgcggtaagggtatatcctcttctgctttgccctacaaaaggacaccccctagctggctcaagatctcttcgcaagatgtggaagaaaatatctgcaagtttgcgaagaagggtt

SEQ ID NO: 119826 - DNA, 244 bp, Glycine max
aagccagcgagtgagtgagcgagccaggtagggttttcggtgttcccctctttgtgttcgttcgcgacgatggggtccatccccgatccaggcgagttgagcgagttgactcagccgagcttcgacgagttccagcgccaaacctctctcatgaccagctgcaccctcctctggaaggagctctccgaccacttctcctccctcgagcaagacctcaaccacaaatccgaagccctcaagcgca

SEQ ID NO: 119827 - DNA, 236 bp, Glycine max
gccgagaagaagaagaccaggcaagagtacgaacgcaaagaacgccaagtcgaaattcgcaagaagattgagtactcaatgcagctgaatgcttctcggatcaaagttcttcaagctcaagatgacgtgatcagttccatgaaagaagctgcatccaaggaactgttgcatgtgagtcatcatcatcatttgactttgactcatcatgatcatgtgtacagaaaccttctgaaaga

SEQ ID NO: 119828 - DNA, 269 bp, Glycine max
tggcgtcattcggatgaggggttcgcacgggtacactgactcagggctacagagatttgcgcggactacgctatgctagaatgcaacagctctgaatatgtgtgggtacagggtttggcgcacagaaaaggtctcccgcacctttaatgaggctcgcgcagctggttttagtgaggagaatggaactttgggtgacatatgggaaactatctcaggcagtgatcttgtgttgctcttgatttctgatgctgcacaggctgataattatg

SEQ ID NO: 119829 - DNA, 264 bp, Glycine max
gggaaggtgagtagtaatggtcatggatgttgcaaatcagggccaggctatgcttccccactggaagccatttctggtcccagagagtctctcatttatgtaacctctgtctacacagggaccggaatagagaagccagaactatttggcgacagtggatgtggatccaaactctccaacttattccaaagtcatccataggcttcctgttccttatttaggtgacgaattgcatcacacaggctggaattcatgcagctcttg

SEQ ID NO: 119830 - DNA, 269 bp, Glycine max
gtctttactccctcgatgctggttctatcatacatgcgctctgcttcagccccaacaggtactggctttgcgccgccactgaacagagcatcaagatctgggatttggagagcaagagtatcgttgaagatttgaaggttgacctaaagactgaggctgatgccaccaccggtggtgggtacccccaacaagaagaaggttatctactgccacaagtttgaactggagttcggatggcagcatttgtttagtggctatcacgatggcgg

SEQ ID NO: 119831 - DNA, 180 bp, Glycine max
acacggaggagatgaaggagcgatgcgtggaacagttcaagcaggggacggtgtgtatggaacagctggcagcggtggaaggattgtgcgagttggcgaggaaggcggttggggcgggggaatcggttcggagatatcacgtgaacctgtctgttttcaggtcggtccagacgcgtgggg

SEQ ID NO: 119832 - DNA, 264 bp, Glycine max
gtggcggctgacggcaacgttagggagtccggagacgtcggcgggggccccggaaagagttatcttttctgtttaacagcctgcccaccctggaaacggctcagccggaggtagggtccagcggctggaagagcaccgcacgtcgcgtggtgtccggtgcgcccccggcggcccttgaaaatccggaggaccgagtgcctcccacgcccggtcgtactcataaccgcatcaggtctccaaggtgaacagcctctggtcgatgga

SEQ ID NO: 119833 - DNA, 264 bp, Glycine max
aattttcaaaatgcgtgagatccttcacatccagggtggccaatgcggcaaccagatcggcgccaagttctgggaggtggtttgcgcggagacgggatcgaccccactggaaggtacggtggggactcagagcttcagctcgagaggatcaatgtctactacaacgaagccagctgcggccggttcgtgccgcgcgcggttctcatggacctcgaaccgggcaccatggacagcgtcggtccgggccgtacgggcagatcttca

SEQ ID NO: 119834 - DNA, 256 bp, Glycine max
ctctctcacacactctcttattgtctctccatcatggctcacattctccctttcctcctcctcaccctcctcgccgccaccgcctccgcccacaatatcaccgacattctcgtcgccaaccccgactacagcgacttcaacggcttcctctcccaaaccggcctcgccggcgaaatcaacacccgccagaccatcaccgtcctcgtcctcaacaacgccgccctctccgccgtggccggaaaaacaccccttttcg

SEQ ID NO: 119835 - DNA, 270 bp, Glycine max
gggagccgtagcagcggaagctctagcttgggtagcgaatcacaatggcgagaggcttaaagaagcatctgaagaggcttaatgccccaaagcattggatgcttgccaaactgggtggggcattgcttctaaacccttctcttggaccacacaaatcgagggattgcctgccactcatactcattttgcgaaaccggctgaagtatgctctaacataccgtgaagtcatgctattctgatgcagcgacatgtccttgttgatagcaaagt

SEQ ID NO: 119836 - DNA, 102 bp, Glycine max
ggaaaaggaaaacctacaactcaggtggctctttcagtgatattgactgctgctggagttctcattgctgcccttggagatttttcctttgacctttttggg

SEQ ID NO: 119837 - DNA, 256 bp, Glycine max
gacttaacaacagcacaaagcgggttactgtctgttcaagctaccatctctctctctctttcttagtgcctccttgccagaagttaaaatggcccaagaaactttcctattcacatctgaatcagtgaacgaggggcaccctgacaagctctgtgcaccagatctccgatgctgtgctcgatgcatgcttggagcaggaccctgacagcaaggttgcctgtgaaacctgcaccaagaccaacatgtgatggttttc

SEQ ID NO: 119838 - DNA, 262 bp, Glycine max
cccgtccccaaaaccctaatcgaggttctctcctcctcactatatattgcttgtgtcgctggagtccatcgcttagaaaccaaaaggctctctcacgcagtcgcagtgagtgaaagggcaccccctatgggcggtattctcagtgccttcgagagaacagaaaaaatggcagataatcttgttctccgtggcaccatgcgcgcccacaccgacgttgtgacggcgattgccactcccatcgacaactccgacatgatcgtca

SEQ ID NO: 119839 - DNA, 261 bp, Glycine max
gtttggtgtttgaatcgtgaaaatgttcagaaaccagtatgacacggacgtgacgacatggagcccggcggggaggctgttccaggtggagtacgcgatggaggcggtgaagcagggctcggctgcgatagggctccgatcccaaaacccacgtggtcctcgcatgcgtcaacaaggctaactccgaactttcatcgcaccagaagaagatcttcaaggtcgacaaccacatcggcgtcgccatcgccggcctcaccgccg

SEQ ID NO: 119840 - DNA, 254 bp, Glycine max
gagcggttcaacaggaaaatctcgcgggcctaaaaagatgtgtcattgagacagaagaagaagaagaaattggagggggtgtgtgatcgggtcctcaggtgaagatctgaggctgttggtgtctcttttcttttctccgagttccaaagatgagcgcttctaggttcatcaagtgcgtcactgttggggatggtgctgtgggcaaaacctgtttgcttatttcctacaccagcaacacttttcccaccgattat

SEQ ID NO: 119841 - DNA, 234 bp, Glycine max
aaacactcataacacaaagcacaaagcaaagctcatccttgagttaaaaaatggcagcagcttcttccatggctctctcatccccatccttggctggcaaggccgtgaagctgggcccatcagccccagaagtgggaagggtgagcatgaggaagaccgtcaccaagcaggtctcctcaggaagcccatggtacggcccagaccgagtcaagtccttgggccctctctggcgaa

SEQ ID NO: 119842 - DNA, 203 bp, Glycine max
gggtttttgtgatctgcaagctacgatgggtaagggaacggggagtttcggtaagagaaggaacaagacccacaccctctgtgtgaggtgtggccgccgcagtttccacctccagaagagtcgttgcgccgcgtgcgctttccccgctgcgcgcaccaggaaatataactggagcgtgaaggccattaggagaaagaccaccg

SEQ ID NO: 119843 - DNA, 260 bp, Glycine max
  unsure (1)..(260): unsure at all n locations
cnagcttcagangangctttanataccgatganagaataccctggttacaatttcattgggcttattattggtcctncgaggtaacacccagaagcggatggagaaagaaactggtgctaaantgngantccggggnaanggatcggtgaaagagggtaggctcagcngaagagggatttgaaacctgncccttcggagantgaagattgncatgtgttagttgaggcagagacaccggagtcgctgaggctgctgcggg

SEQ ID NO: 119844 - DNA, 253 bp, Glycine max
gcggggcactgccctctttttggacccaaggtcggcttcggccggtcgatccgggcggaagacattgtcaggtggggagtttggctggggcggcacatctgttaaaagataacgcaggtgtcctaagatgagctcaacgagaacagaaatctcgtgtggaacaaaagggtaaaagctcgtttgattctgatttccagtacgaatacgaaccgtgaaagcgtggcctatcgatcctttagtccttcggaatttg

SEQ ID NO: 119845 - DNA, 235 bp, Glycine max
ctcgatcaaacacaaaatggaaaagaatgtggggattctcgccattgacatctacttccctcccgcttgcgttcagcaggaagcattggagactcatgatggtgccagtaaagggaagtataccattggacttggccaagactgcatgtcattctgtaccgaagtagaagatggcatctcaatgaagtttgacaatggttacttctcttcttgagaagtatgggattgatcctaa

SEQ ID NO: 119846 - DNA, 255 bp, Glycine max
acattgcttggttggtagggatgactgtgttcattgctgtgttgtctgaatatgtggtggatacaattgaggatgcatcagattcgtggggtttgtctgtgagctttctcagcataatcttgctaccaatagttggaaatgcagctgaacatgcaggagcaatcatatttgctttcaagaacaagctggacatttcattgggtgttgcattgggttcagcaactcagattgccatgtttgtggtcccattatgtg

SEQ ID NO: 119847 - DNA, 143 bp, Glycine max
gtgaccaggcccgggcgactgtttaccaaaaacacaggtctccgcaaagtcgtaagaccatgtatgggggctgacgcctgcccagtgccggaaggtcaaggaatttggtgccctgatcacaggggcgccgaccgaagacccgg

SEQ ID NO: 119848 - DNA, 213 bp, Glycine max
cagtgagtgatcggtgttcacttgatctcatcataatcgtcagcgtcaattgaagaagatgccgatcagaaacatcgccgtcggaaggcctgaagaggcgactcaccccgacacgttgaaggcggctttggctgagttcatctcaaccttcatcttcgtgttcgccggttaaggcccgatcgcctacaacaagctcatcgacaacggcgctgc

SEQ ID NO: 119849 - DNA, 256 bp, Glycine max
cagccgcaccttgattcagagcagagcgaccttgaagagctatggctgtcggaaagaataagaggatttccaagggaaagaagggtggcaagaagaaagccgctgatccctttgccaagaaggactggtacgatatcaaggccccttccgtctttcaggtcaagaatgttggcaaaaccctcgtctctcgtacccagggaaccaagattgcttctgaaggactcaaacatagagtgtttgaggtccattggctgat

SEQ ID NO: 119850 - DNA, 177 bp, Glycine max
accagatcggagcgaagttctgggaggtgatatgcgacgagcacggcatcgaccacaccggaaagtacagcggcgactccgagctccaattggagcgcatcaatgtttattacaatgaagccagcggcggaaggtacgttccacgcgccgtcctcatggatctggagcccggcacca

SEQ ID NO: 119851 - DNA, 259 bp, Glycine max
gttaggagaaagttcaagggatgcactttgatgccaaacatcggttatggttctgacaagaagacccgccactatctccctaatggttttaagaaatttgttgttcacaatgtgaaggacttggaactgctcatgatgcacaacaggacttactgtgctgagattgctcacaatatatccacaagaaagagaaaagatatagttgagagagctgcgcaacttgatgttgttgtgacaaacaaaacagccagattacgcc

SEQ ID NO: 119852 - DNA, 243 bp, Glycine max
gagctatggcgcaagaagcagtctgatgttatgagattcttgcagcgggtgaggtgctgggagtatcgccagcaaccttctattgtccgtttgacaaggtctactcgcccagataaggctcgtcgcttgggtttcaaggctaagcagggttacgtgatttaccgtgttcgcgtacgaaggagtggccgtaagagaccagttccaaagggatttttatggtgaagcccacacaccaagtgttac

SEQ ID NO: 119853 - DNA, 236 bp, Glycine max
atttccctacctctcccttcaagatgcagatcttcgtcaagaccctcaccggcaagaccatcacccttgaggtggaaagctctgacaccatcgacaacgtcaaggccaagatccaggacaaggaaggaatcccccgggaccagcacgtctcattttcgccggacagcaacttgaggacggccgtaaccttgctgactacaacattcagaaggagagtcatcttcacctcgtcctcc

SEQ ID NO: 119854 - DNA, 224 bp, Glycine max
ctcgagccattccaaaccctaacactcctcttcctcttcgatcatcacctctccacaataccgccgaagttcgacccctcccagatagtcgacgtcttcgtccgcgttacggggggggaattcggcgcggcgagttccctggccccgaagatcggtcccctcggtctctcccccaagaagatcggagaagacatcgccaaagaaaccgccaaggactggaaggg

SEQ ID NO: 119855 - DNA, 126 bp, Glycine max
ctcctctatccactggtttggagactgcaggaggagtcatgactgtgttgattcccagaaacacaaccattcccaccaagaaggagcaggtgttctcaacctactctgacaaccagcccggtgtgt

SEQ ID NO: 119856 - DNA, 256 bp, Glycine max
tgccgtttgtgttgttttcgggacgaagaagaagatggtgtcaggttctggaatctgcgcaaagcgggtggtggtggacgcgcgccaccacatgctgggtcgtctagcctccatcgtggcgaaggagcttctgaacggccagaaagtggtggtcgttcgctgtaaaaagatttgcatctcgggcgggctggtgaggcagaagatgaaatacttgaggttccttcgcaaacgcatgaacaccaaaccctcccatggc

SEQ ID NO: 119857 - DNA, 253 bp, Glycine max
caacggggtcaagtttggagaagctgtgtggttcaaggccgggtcccagatcttcagcgagggtgggctggactacttgggcaacccaagccttgtccacgcccagagcatcttggccatcttgggccacccaggtatcctaattggtgctgttgaaggttatcgtattgctggtggggccctcggagaaggtccttgccccattctaccgtgggtggcagctttgacccattgggccttgctgatgacccag

SEQ ID NO: 119858 - DNA, 196 bp, Glycine max
tgcaaagaaggaccaaactgtcatctggcaaaaacctctgacaaatgaatgctatatggagagagaacccggcactcgccctcctctttgccagtctcatgatgacccagatgcagtttttggagtgaatatggaagcctgcataacaccttactctgaccatgacaacagagccaagggtagtggattagcccca

SEQ ID NO: 119859 - DNA, 237 bp, Glycine max
ctacccagagaaaggaacagttgctttttctgctggtttgcatggctggcgttttaccctgactaactttgccaagatgtatgcatccaagtttggagttgtcgaaggaaagatgttggaaaggtccggggggaaaacttttttgatccagccacaaaggaatggaccagccagaattaggggtctgcgaactgcaaacgtgggtttgtgcaattctgttatgagcccatcaagcag

SEQ ID NO: 119860 - DNA, 234 bp, Glycine max
gaagcgagtggcggaaggtacgttccacgcgccgtcctcatggatctagagcccggcaccatggactccgtcagatccggcccctacggccagatcttccgccccgacaacttcgtcttcggccagtccggcgccggaaacaactgggccaaaggtcactacaccgacagcgctgagctcattgaatccgttctcgacgtcgttcgcaaagaagccgagaattgcgactgcttg

SEQ ID NO: 119861 - DNA, 268 bp, Glycine max
aaaaccctctctcatttccaatcccctaaaccctaacctctcctcaatgggtagaaacgaagccgccatttccttcctcaccaacgtcgcccgcactgccttcggcctgggcgcacggccaccgccgtctcctcttccctctacaccgtcgacggcggccagcgcgccgtcctcttcgaccgcttccgcggcatcctggactccaccgtcggcgaagggacccacttcctcatcccctgggtccagaaaccctacatcttcgacatcc

SEQ ID NO: 119862 - DNA, 258 bp, Glycine max
tttttatctcgctctctttcatgcgttcatcatcacttccataaattgcaacaacaaaacacagaacaagcaaatcaaaatgtcagcgaaatgcagccaaatccgacacattgtacgtctccggcagatgctgcggcggtggcgcaacaaggcccgcatgtcggcgaacagagcaccaccgtccgatgtgccagcgggacacgtggcggtgtgcgtgggcagcaacctcaccagattcgtggtgcgcccacgtattta

SEQ ID NO: 119863 - DNA, 238 bp, Glycine max
tgagaagaccggggaactccccgaccctaactccactgacaacgccgagttccagatcgtgcttaccatcatcagagatgggttgaagaccgatcccaccaggtaccgcaagatgaaggagcgtctcgttggggtttctgaggaaaccaccactggtgttaagaggctatatcagatgcaggcgatgtggactctacttcccgctcataataatgacaagtcctctgttaccaagagc

SEQ ID NO: 119864 - DNA, 211 bp, Glycine max
gcgaagagaatggctcccaagggtttaatctttttggctgtgttatgcttctcagcactgtcactgagtcgttgtcttgcggaggataatggacttgttatgaacttctacaaggaatcatgcccccaggtgaagacatcatccaaggacaagtcaagcttctctacaagcgccacaagaacactgctttctcctggctcagaaacatctt

SEQ ID NO: 119865 - DNA, 258 bp, Glycine max
ccattctctgcacttttcagttacaaagcatttcattgttttacaatatacaacactacaatggctgcttcaacaatggctctctcttcatcatcattggctggccaagctatcaagcttgccccctccacccctcagcttggtgttggaaaggttagcatgagaaaaacagcctccaagacgtttcctcaggaagcccatggtacggcccagatcgtgtcaagtacttgggcccattctctggtgagccccatccta

SEQ ID NO: 119866 - DNA, 203 bp, Glycine max
ctcgatcaggaatttaacagacagctcaaggaccaagtgtttcagctaaggagaaagttcccacttgcaaaatttacatatgttgatgtgtacactgccaaatatgaactaatcaacaatacaagagaccaaggttttgtgagtccattggagttctgttgtggcagttactatggttaccacataaattgtgggaagacagc

SEQ ID NO: 119867 - DNA, 203 bp, Glycine max
aacgcctcgaatccacacagttctactctacgctctaaaccctctctctctctctctctcgatctatcatggctttgcccaatcagcaaaccgtggattaccctagtttcaaactcgtcatcgtcggtgacggcggtacaggaaagacaacgttcgtgaaaaggcatcttaccggatgaattgagaaaaaaatcgaaccgacc

SEQ ID NO: 119868 - DNA, 249 bp, Glycine max
  unsure (1)..(249): unsure at all n locations
cgcgtcgctccgcaccagtttcaccgcacgaatatctcgttgtttggagcgatccgagaaaaactctgtaaacatgttggtttaccaggacctccttacaggtgatgagcttctctctgactccttccgttacaaggaaattgagaatggaatgctgtgggaagttgaggggaagtgggttgttaaaggagcagttgatgtagacattggtgcaaacccttctgctgagggntgaggagaagcagaggg

SEQ ID NO: 119869 - DNA, 235 bp, Glycine max
  unsure (1)..(235): unsure at all n locations
ttaaagttacatagtttttcattgttttacttaatctacaatggctgcttcaacaatgactctctcttcatcatcattggctggccaagctatcaagcttgccccctccacccctgagcttggtgttggaagggttagcatgaggaaaacagcctccaagactgatttcatcaggaagcccanggntcggcccagaccgngncaagatcattggcccaatcacatgcgagccccc

SEQ ID NO: 119870 - DNA, 246 bp, Glycine max
  unsure (1)..(246): unsure at all n locations
gtcttcataaacgccgcccaaaacttctcatacccttttattcattccattcgtttctagggttttcttttctttgccgagaaaatgagagagtgcatttcgatccacattggccaggccggtatccaggttggaaacgcctgctgggaactctattgccttgaacacggcacttagcccgactgacagaagccgagngacaagaccgattgcggaggagacgacgccattaacaccaatttctgc

SEQ ID NO: 119871 - DNA, 151 bp, Glycine max
caacaatgtcgaagcgaggtcgcggaggatcggcgggaaacaagttccgcatgtcgctgggtctgccggtggcggcgacggtgacactgcgccgacaacaccggcgcgaaagaacctctaccatcagtatcagtgaaggggggatcaaggg

SEQ ID NO: 119872 - DNA, 206 bp, Glycine max
tggtgccttatcgctgtggttatcatcttcttcttcctctttcttagatctcttctttctctacgccgcacgccgaaaccatggccggaaaaggagagggtcctgctatcggaatcgatctcggaaccacctactcttgcgtcggtgtgtggcaacatgaccgcgttgaaatcatcgctcaacgaccaagggaacagaaccacgcc

SEQ ID NO: 119873 - DNA, 250 bp, Glycine max
aacacaacaacactctctcttctcgctcttggcttttcgctcttcactcactctcattcattcatttccaccgttcatggatccggtaagcgtgtggggtaacacgcccttagcgacggtggatcccgagatccatgacctcatcgagaaggagaagcgccgtcaatgccgcggaatcgagctcatcgcctccgagaacttcacctccttcgccgatcatgaagccctcggcagcgctctcacgaacaaa

SEQ ID NO: 119874 - DNA, 243 bp, Glycine max
ccagaatccgttgagaatggcgttgccggtagtcgtcgatgcagagtacctcaaggaggtcgacaaggctcgccgcgatctccgcgcactcatcgctaacaggaactgcgctcctctcatgctccgattagcctggcacgatgccggaacttacgatgctaagaccaagaccggtggacctaacggttcgatccggaacgaggaagagtattctcaggagccaataatggctgaagaaagcta

SEQ ID NO: 119875 - DNA, 239 bp, Glycine max
cactcataacacaaagcacaaagcaaagctcatccttgagttaaaaaatggcagcagcttcttccatggctctctcatccccatccttggctggcaaggccgtgaagctgggcccatcagccccagaagtgggaagggtgagcatgaggaagaccgtcaccaagcaggatctcctcaggaagcccatggataggcccagaccgagataagctcattggcccaatcacaggcgagccccc

SEQ ID NO: 119876 - DNA, 205 bp, Glycine max
gaggttcttcatggaaaaaaggggggtcatttgcattgggacaccaggtataaaattgcggtggaggctgccaaggggctttgctatctgcaccatgattgttcgccactcattgtccatcgtgatgtgaagtcaaacaacagtccttcttgatcaaaacacgaagcccaagatgcagaatttgggcatgcatagatccagcaag

SEQ ID NO: 119877 - DNA, 239 bp, Glycine max
ggcttatggtggatacctaggcacccagagacgaggaagggcgtagtaagcgacgaaatgcttcggggagttgaaaataagcgtagatccggggattcccgatataggtcaacctttcgaactgctgctgaatccacgggcaggcaagagacaacctggtgaactgaaacatcttagtagccagaggaaaagaaagcaaaagcgaatcccgatgctgcggcgagcgcaactggagcagc

SEQ ID NO: 119878 - DNA, 160 bp, Glycine max
gaattacgagattagataatatagagcggcagctgactagtgagatcgtcgaaatgggaattaattaaggacaggtacatgcaggcgtacaagatttaaatatagtgagtagtattagagattggagtaatcatggtaatagatgtttcatgtgtgaaat

SEQ ID NO: 119879 - DNA, 242 bp, Glycine max
  unsure (1)..(242): unsure at all n locations
agggccggcactctggttatggtaagagaaagggtacaagggaggcgaggcttcccaccaagatactttggatgagaaggatgcgtgtgctcaggcggttgcttcgtaagtacagggaatcaaagaaaattgacaagcacatgtaccatgatatgtacatgaaggtgaaaggtaatgtttcaagaacaagagagtcttgatgagagcattcacaagatcaaggcngagaaggcaagagagaa

SEQ ID NO: 119880 - DNA, 197 bp, Glycine max
gatatgggatgccatcaagtcctgggtgcaagaatatgtgtcattctactacaagtcagatgcagcaattcaacaagaccccgaactccaagcttggtggaaagaacttgtccaagtgggtcatggtgatttgaaagataagccatggcggcaaaagacgcaaacatgcgaagagatgaatgaagccacggccaccc

SEQ ID NO: 119881 - DNA, 209 bp, Glycine max
gctccttggtgtggacactgcaaaaagcttactccagaatatgaaaagcttggtagcagcttcaagaaagccaaatctgttttaatcggcaaggttgactatgatgagcacaagagtttgtgcagcaaatatggagtctctgggtacccaacaattcagctggttccaaaaggaacatctgaacccaaaaaggttgaagggccacgcac

SEQ ID NO: 119882 - DNA, 238 bp, Glycine max
  unsure (1)..(238): unsure at all n locations
aacaaccctaacgcgtgcagagcagagagagacgcagccatggggcgaagacccgcgaggtgttataggcaaattaagaacaaaccataccccaagtcacggttttgccgtggtgttcctgatcccaagatcaggcattacgaggatggatagaagaagaagggagatgaagagattccattctgtgtctaactgganagaagggagaaggaaaacggaacttatgaggcccaggtag

SEQ ID NO: 119883 - DNA, 186 bp, Glycine max
cctgccagtagtcatatgcttgtctcaaagattacgccatgcatgtgtaagtatgaactaattcagactgtgaaactgcgaatggctcattaaatcagttatagtttgtttgatggtatctactactcggataaccgtagtaattctagagtctaatcgagcaacaaaccccgacatcatgaaggg

SEQ ID NO: 119884 - DNA, 132 bp, Glycine max
ggcaacactcagaccacaacgcacaaagcaaagctcatccttgagttagcaactggcagcagcttcttgaatgagtctctaatccccatccttggctggccaggccgcgcagctgggcccatcagccccaca

SEQ ID NO: 119885 - DNA, 225 bp, Glycine max
cggctcgagattttgtttgtttcaccacccacaaaagagtaatggcctttaagtggtgacgaacaagagctcaaatcaaatcgaatcgaaaaaagaaagaaagatcatattcatggcgatggcaagcctggctcgacggaagggttacgccgtcgttttgtcgtcgaggatgtcgttttatcgacaagcctgaggggcatcgcgatcggaacagtagaaaacgac

SEQ ID NO: 119886 - DNA, 250 bp, Glycine max
  unsure (1)..(250): unsure at all n locations
ccaggatcatccacaagattgaggagaccctccatgtgggagggcacaagaaagaggagcacaaaggagaacaccatggtgagcacaaaggtgaacacaaaggagaacaccatggtgagcacaaaggtgcacacaaaggagaacaacaccatggggagcacaaggagggacttgtggcataagataaggacaagagtccaggcgtatgcccagtacaaggngagaaaaagaagaagacggacaagaagaa

SEQ ID NO: 119887 - DNA, 246 bp, Glycine max
ctttctcctaaaacatctccagtgggttcttcttcttctattaccacaacgtcgtccaagaccatgaccatggccatggccacgatcctgctcctgttcacggtcttcgcggtttcatcggccctagacatgtcgataatctcgtacgacaacgcccacgccgccacgtcgcgcacggaagtgagctgatgtccatgtacgagcatgtgcgagctaagcacggcacggctttcaacgcgcacggag

SEQ ID NO: 119888 - DNA, 222 bp, Glycine max
aaaacagaatgggcgtcgtggtgatcgacggcagcaccgtgcgcgacttcgtgaacgacgaaaccgccttcaccaagagcgtggacgagcaattctcggcgctggacctcaacaacgacggcgtcctctcgcgctcggagctccgcacggccttcgagtccatgcgcctcatcgagacgcacttcggcatcgacgtttccacgccgccggagcagctcgcga

SEQ ID NO: 119889 - DNA, 215 bp, Glycine max
aacaaccctaacgcgtgcagagcagagagagacgcagccatggggcgaagacccgcgaggtgttataggcaaattaagaacaaaccataccccaagtcacggttttgccgtggtgttcctgatcccaagatcaggatttacgatgttggatataagaagaagggagatgacgagattccattcagagaccaacatgatagattggagaaggaaaa

SEQ ID NO: 119890 - DNA, 237 bp, Glycine max
cacaaagcgggttactgtctgttcaagctaccatctctctctctctttcttagtgcctccttgccagaagttaaaatggcccaagaaactttcctattcacatctgaatcagtgaacgaggggcaccctgacaagcactgagaccagaatatcgaagcagcgcacgaagcagtcctggagcaggacccagtacagcaaggcagttcgtgtaaccagtaccaagaccaaccaggtgat

SEQ ID NO: 119891 - DNA, 203 bp, Glycine max
  unsure (1)..(203): unsure at all n locations
ctccaatctgcaaatccaactaacatgggaagccagcaagccgccgtgtcgttcctgacgaacctggcccgcgccgctttcgggctgggcgcctccgcgaccctattgagctcctccctctacaccgtcgatggcgggcagcgcgccgatcatattgaccgatttcggggcanctatgacgagaccgactgcgaggggaccca

SEQ ID NO: 119892 - DNA, 203 bp, Glycine max
ctcaagcgctggaggaagctccgcatgcagcacaagaaggcgaaggcggcatcgtccaacaacggtttgaagagaacgaggattggaaacggagagaggaggaaccggttaccggctgttcagaagaaagcgcgcgttctcagccggttggttcccggttgccggaaggtttcgttcccgaaccttctggaagaagccacgga

SEQ ID NO: 119893 - DNA, 239 bp, Glycine max
  unsure (1)..(239): unsure at all n locations
ccgggcttcccatgatacccagctatgttgaaaatcttcccactgggaatgagaaagggttgttttatnccttggatctcggaggaaccaacttccgtgtgctgagggtgcagttgggtggcaaagatgagcgtgtcattgccaccgagtttgatcaagtttccanacctcatcaactcatgtttgctacatctcaggagctatttgatttattgcttggggctgcaaaattncgtnca

SEQ ID NO: 119894 - DNA, 236 bp, Glycine max
  unsure (1)..(236): unsure at all n locations
ggccatgcaaggcaagcctcttccaatccacggggatagttctaatgtgaggagttatttgtattgtgaagatgttgcagaggcttttgaagttatccttcacaagggagaggtcgggcatgtttacaatattggtactaagaaggaaaggagggttattgatgttgccaaagatatatgcaggctttttaaggcggacccagagactagtataaaattgnggagaacagaccatt

SEQ ID NO: 119895 - DNA, 234 bp, Glycine max
  unsure (1)..(234): unsure at all n locations
aaagagagagtgtgtgaaaagtgacacaaaaaacagaacaacaatggcgacacttaaggttcctcagcctcttccccccgttgcagatgattgtgagcagctccgaaaagccttctcaggttggggaactaacgaggagctgattgtatcgatcttggctcataggaatgctgctcagaggaagacttatagagaaanctangcccagaccntaggagaagaacatcacaaggc

SEQ ID NO: 119896 - DNA, 213 bp, Glycine max
  unsure (1)..(213): unsure at all n locations
gggaagtctggtgtggagttcagaagggaaatgcagagacattcagtggcagttcgtcagttatttcattacaagggacagttggatcctttgaaaggtgatgcactaaataaggctgtgagagacactgctcatgaggctatctcagccaagatttcagaagacaantagtcatagtagtagccagcgtccgcagaagatcgataccggcgg

SEQ ID NO: 119897 - DNA, 163 bp, Glycine max
cagcacgaggctgagcttcttgcagctgctagtcagccccttcctgacgacgatgatgatcaatttgagtaggaattgtgggtctgtggatcattttacttagttaatggtatttgtgtatgctacaatgtgtctttgggagtgatattattgacaatttttt

SEQ ID NO: 119898 - DNA, 205 bp, Glycine max
gaaagaccatctttctcttttctgtatcaccgttggaagagactgagatgggttcaaaaaccaagacttttacctttgaagaggtggctaaacacaatcacaggaaggattgttggattatagtcaaagggaaggtgtatgatgacaccccaattttggattaacagtcaggcggagaagtaagttttagagtcagtaacagaga

SEQ ID NO: 119899 - DNA, 198 bp, Glycine max
cgagtcccctcggatacagcattgaagacgttagaccaaacggtggaatcaagaaattcagatctgctgcttactccaactgcgctcgcaaaccttcctgatatccatccagattgatagttcattgcatgcaaccatagttttattagagttttttcttcttgatttcaaattggattttgcagcacatcatcaaac

SEQ ID NO: 119900 - DNA, 248 bp, Glycine max
cttgacaatgaagctttgtatgacatctgcttccgtaccctcaagctaaccacccctagctttggtgacttgaaccatttgatctcagcgacaatgtctggtgtcacttgttgtttgaggttccctggtcagttaaactctgatctgcgaaagcttgcagtgaacctcattcccttcccgcggctccactttttcatggtgggatttgctcctttgacatctcgtggctctcagcaatacagagcctt

SEQ ID NO: 119901 - DNA, 247 bp, Glycine max
ctattcttcaagattcaggtactgcgtttcggaagcagacacagctggctcgtacgaagcaaaccgctcgtaagtccacaggaggaaaggctcctaggaagcagcttgcaaccaaggctgcacgtaagtctgcaccaactactggtggtgtgaagaagccccaccgttatcgtcctggtaccgttgctcttcgtgagattaggaaataccagaagagtaccgagcttttgatccggaagctcccctt

SEQ ID NO: 119902 - DNA, 250 bp, Glycine max
ctattcttcaagattcaggtactgcgtttcggaagcagacacagatggctcgtacgaagcaaaccgctcgtaagtccacaggaggaaaggctcctaggaagcagcttgcaaccaaggctgcacgtaagtctgcaccaactactggtggtgtgaagaagccccaccgttatcgtcctggtaccgttgctcttcgtgagattaggaaataccagaagagtaccgagcttttgatccggaagctccccttcca

SEQ ID NO: 119903 - DNA, 251 bp, Glycine max
gagagcgagacggcagcacgcgcaaaaatggtgaagtttctgaaaccaaacaaagccgtcatcgtccttcagggacgctacgccggcaaaaaagccgtgatagtgcgaaccttcgatgaaggcacgcgcgagcgcccctacgggcactgcttggtggcagggataaagaagtaccctgcgaaggtgatcaagaaggattcggccaagaagacggccaagaagtcgcgtgtgaaggcgttcgtgaagctcgt

SEQ ID NO: 119904 - DNA, 243 bp, Glycine max
atggtcctatgtactacaagggatggtatcactttttctaccaatacaacccgaacggtgcagtttggggtgacatagtttggggacatgcagtttcaagggacatgatccattggcttcaccttccactggcaatggtggctgatcaatggtatgacatgcaaggtgtgtggacaggctcagccacaatcttaccaaatggtgaaatcatcatgttatacacaggttccaccaacgagtcag

SEQ ID NO: 119905 - DNA, 251 bp, Glycine max
ggaagctttgagagagagagagggaggagggagagtgttgacgctccatcaagatgggtatttctagggattccatgcacaagaggcgtgccactggtggcaagaagaaggcatggagaaagaagagaaagtatgagcttgggcgtcaggccgcaaacaccaagttatcaagcaacaaaactatccggaggattcgtgttcgaggtggcaatgttaaatggagggcattgaggttggataccggcaattac

SEQ ID NO: 119906 - DNA, 248 bp, Glycine max
acacggaggagatgaaggagcgatgcgtggaacagttcaagcaggggacggtgtgtatggaacagctggcagcggtggaaggattgtgcgagttggcgaggaaggcggttggggcagaggaatcggttcggagatatcacgtgaacctgtctgttttcacgtccgttccagacgcgtggggaattgaacaggtgtttcccattatcgaaattcaccgtttggacgaaaagccttcggtgaggggtatt

SEQ ID NO: 119907 - DNA, 249 bp, Glycine max
tgagtcttgcaattgaagttgaagtcttgcccttctctcttcaactccaaacacaagacatcatcatccatggctgcctccgtctccactgtcggagctgtcaacagagctcttttgaacctgaatgggtctggacctggggtttcagctcccagttcatccttctttgggagcagcttgaagaaggttattggctcaagggtccccaacacaaagatttcctctggaagcttcaagattgttgctgta

SEQ ID NO: 119908 - DNA, 246 bp, Glycine max
cgaacatttcatctccaaagggatcaacaggtcgaaggagaaatggggctgacattcacgaagcttttcagccggcttttcgcgaagaaggaaatgcgaattctgatggttggtcttgatgctgctggtaagaccactatcctctacaagctcaagctcggagagatcgttactacaattcctaccattgggttcaatgttgagactgtggaatacaagaacattagcttcactgtttgggatgtt

SEQ ID NO: 119909 - DNA, 246 bp, Glycine max
aacagcacaaagcgggttactgtctgttcaagctaccatctctctctctctttcttagtgcctccttgccagaagttaaaatggcccaagaaactttcctattcacatctgaatcagtgaacgaggggcaccctgacaagctctgtgaccagatctccgatgctgtgctcgatgcatgcttggatcaggaccctgacagcaaggttgcctgtgaaacctgcaccaagaccaacatggtgatggttt

SEQ ID NO: 119910 - DNA, 233 bp, Glycine max
ctcgaagacccaccaacgcacgaaagccgggatctttcagaaaatggattcctattcgaagggtgcataaccgcatggataagctcacactaacccgtcaatttgggatccaattcggttccttaggaggtatcgggaaggaattttggaatgtaataatatcgattcatacagatacagaagaaagggttctctattgattcaaacgctctacctacgagatagggatagag

SEQ ID NO: 119911 - DNA, 249 bp, Glycine max
  unsure (1)..(249): unsure at all n locations
ccggcacttgttcgtccctaaaacgcaactccaaaggccaacaacactatgaccctctcactctcagtctcactaactcccttcacttagttaaaactcaaaacactttgttttttcactttcagtncccccacgcgccaccacnaccacccatgggttgcacggcgtcgaagctggaaaacgaggacacggtgcggcggtgcaaggngcggcgccgcctcatgaaggaggcggtctacgcgcgccacc

SEQ ID NO: 119912 - DNA, 246 bp, Glycine max
gccgcagcacgaggagcagcctcaggaggagaaggatgtctcacaggaagttcgagcacccaaggcacggttcactgggatttcttcccaggaagcgtgctgctcgtcacaggggaaaagtgaaggcattccccaaggatgacccatccaaggcacccaagctcactgcattcttgggttacaaggccggtatgactcacattgttagagaggtcgagaagccaggatcaaagcttcacaagaagg

SEQ ID NO: 119913 - DNA, 248 bp, Glycine max
gtgcaacaaaccccgacttctggaagggatgcatttattagataaaaggtcaacacaggctctgcctgttgctttgatgattcatgataactcgtcggatcgcacggcctttgtgccggcgacgcatcattcaaatttctgccctatcaactttcgatggtaggatagtggcctaccatggtggtgacgggtgacggagaattagggttcgattccgcagagggagcctgagaaacggctaccacatc

SEQ ID NO: 119914 - DNA, 247 bp, Glycine max
cgcgtcgctgctccgtaccagtttcactgcataaatttgagagaaaactctgcaaacatgttggtttatcaggacctccttacaggtgatgagcttctctcggactccttccgttacaatgaaattgagaatggaatgctgtgggaagttgaggggaagtgggttgttaagggagcagttgatgttgacattggtgcaaacccttctgctgagggtggagaagatgagggagtcgatgacgcagctg

SEQ ID NO: 119915 - DNA, 247 bp, Glycine max
gcagacttaacaacagcacaaagcgggttactgtctgttcaagctaccatctctctctctctttcttagtgcctccttgccagaagttaaaatggcccaagaaactttcctattcacatctgaatcagtgaacgaggggcaccctgacaagctctgtgaccagatctccgatgctgtgctcgatgcatgcttggagcaggaccctgacagcaaggttgcctgtgaaacctgcaccaagaccaacatg

SEQ ID NO: 119916 - DNA, 246 bp, Glycine max
ggttgaggaaggtggtgagggaggtcggggagttgcttggggcgtttaacttgggggatgttattgggttcatgaggcctttggatctgcaagggtttgggaagaagaacatggaaactcaccacaaggtggatgcgatgatggagaaggtgttgagggagcatgaggaggctagggctaaggaagatgctgactctgataggaagaaggatctttttgatattttgttgaacctcattgaagctg

SEQ ID NO: 119917 - DNA, 247 bp, Glycine max; identical to SEQ ID NO: 114729

SEQ ID NO: 119918 - DNA, 248 bp, Glycine max
ggctcgagccgaatcggctcgagcgcgggtgaggtagaacccttccaccggtggtgactgcgcgatgggtgcctacaagtatgacttcagagctatggcgcaagaagcagtctgatgtcatgcgcttcttgcagcgggtgaggtgctgggagtataggcagcaaccttccattgttcgcttgacaaggtcgacccgccctgacaaggctcgtcgcttgggcttcaaggctaagcagggctatgtgata

SEQ ID NO: 119919 - DNA, 245 bp, Glycine max
ctttaccagttgccacactacaccgagattccccctaaacccgtttgcgttgttgtctgcgaagaaatggcgactaagaggagcgtgggaacgttgaaggagggtgatttgaaagggaagagggtgttcgtgagggtcgatctgaacgtgcctttggatgacaaccttaacatcaccgatgacactagagtccgtgctgctgttcccaccatcaagtacttaactggtcatggagccaaagtgat

SEQ ID NO: 119920 - DNA, 246 bp, Glycine max
ggagaggcatcaatttcacaattctgtcaaaccctgagtttcttgctgagggtacagcaattgcagacctgtttaagtcggatcgagtcctcatcggaggcagggtaaccccagagggtcaaaaggctattcattctctgaagagtgtttatgcccattgggttcctgaggacagaatcctttgcaccaatttgtggtctgctgaactctcaatgcttgcagccaatgctttcctggcccagagga

SEQ ID NO: 119921 - DNA, 240 bp, Glycine max
ctcagaaccttctgaggttaaagcaaaaaacaaagagagagagagagagaaaatgatgaagccatcgatgctcagatctctccactccgccgccacccgcggcgcctctcatctcttccgccgtgggtacgcctccgagccggtgccggagcgcaaggtagccgttctcggcgccgccggctgggatcgggcagcctctctcccttctcatgaagctcaatcccctcgtttcgagcctct

SEQ ID NO: 119922 - DNA, 244 bp, Glycine max
ctcgcatcgcaccttcaacttaacctattccacttgtaatcgtaaatacaatgctagaagaagagacaaagtgtgtctgtgtgtgtgagagagagagcaatggctggctcgtgggcacgccgttctctgattgttctagccatcatttccttcggatgtctatttgcgatttccattgctaaggaggaagccaccaagttagggacggtcatcggcattgatcttggaacaacctattcatgtg

SEQ ID NO: 119923 - DNA, 244 bp, Glycine max
cgaaaatggctcctccaagaggtcgtggtggttttggtggtggcggtgggttcaggggtggtggtaggggtgacagaggcagaggaaggggcggtggaggaagaggaggagacaggggcactcccttcaaagctagaggaggtggcagaggtggtggtggccgtggcggaggcaggggtggtggccgtggtggtggcagaggtggaatgaagggaggtagcaaggttgtggttcagccccatag

SEQ ID NO: 119924 - DNA, 242 bp, Glycine max
tgctggttgccacactacaccgatatttccaccaaacccgtttgcgttgttgtttgcgaataaatggcaactaagaggagcgtgggaacgttgaaggagggtgatttgaaggggaagagggtattcgtgagggtcgatctgaacgtgcctttggatgacaaccttaacatcaccgatgacactagagtccgtgctgctgttcccaccatcaagtacttgactggttatggtgctaccgtgat

SEQ ID NO: 119925 - DNA, 242 bp, Glycine max
tttttatctcgctctctttcatgcgttcatcatcacttccataaattgcaacaacaaaacacagaacaagcaaatcaaaatgtcagcgaaatgcagccaaatccgacacattgtacgtctccggcagatgctgcggcggtggcgcaacaaggcccgcatgtcggcgaacagagcaccaccgtccgatgtgccagcgggacacgtggcggtgtgcgtgggcagcaacctcaccagattcgtgg

SEQ ID NO: 119926 - DNA, 242 bp, Glycine max
ctaatgctttgcttcaggcccatttctctaggcaatttgttggtgggaaccttgcattggaccagaaggaggtgcttctttctgcaaatagactgcttcaggcaatggtagatgtgatatcgagcaacggttggctgagcctggccttacttgctatggaagtcagtcaaatggtgacacagggaatgtgggaacgcgactccatgctgcttcaacttcctcatttcacaaaggatctggct

SEQ ID NO: 119927 - DNA, 244 bp, Glycine max
caacaatgatggctggtgttagtggcagtagcactactcccttattgtgctctttgttctttatttcttccttactttttgcttcctgcacccatgcctcctcccaggcacctcctccaattgtggatggactttcatgggatttctataggacgagctgtcccatgcttgaagggatagtgagcaagcatctccagaaggtgttcaagaaggacaatggtcaagctcctgccttactcaggat

SEQ ID NO: 119928 - DNA, 245 bp, Glycine max
cagctttgaacgccgaagaaggttcatccaatccccgaagcccttcaccgcattgcaaccatgtcgaggagaaaggtcagagagccaaaggaagaaaacgtgactctgggcccagctgttagagatggtgaacatgtctttggcgtcgctcgcatctttgcctccttcaatgataccttcattcatgtcactgatttgtctgggagggaaacgcttgtccgcatcactggtggaatgaaggttaa

SEQ ID NO: 119929 - DNA, 243 bp, Glycine max
gcgactaagagttgctgcttcttccgccactcagcacttcgctccctctgtgcttcaccaaccatggccgaaatcgaagctaccgttccagatccctctcaaatcgacgtcaaacttttcaaccgctggagcttcgacgacgttgaggttactgatatgtctctggctgattacattggagtgtccccgtcaaagcatgctacatatgttcctcacactgctggtaggtactcagtgaagagg

SEQ ID NO: 119930 - DNA, 244 bp, Glycine max
gtcgagtgagaacgaagacggtgaagaaatcctctcggcaggtgatagagcgtcactactcgcgcatgaccctggacttccacacgaacaagaagcctctggaggaagtggcgataatcccgtcgaagaggctaaggaacaagatcgcggggttctcgacgcacctgatgaagcgcatccagaagggccctgtgcgcggcatctccctcaagctccaggaggaggagcgcgagcgccgcatgga

SEQ ID NO: 119931 - DNA, 233 bp, Glycine max
ataacagaatgggcgtcgtggtgatcgacggcagcaccgtgcgcgacttcgtgaacgacgaaaccgccttcaccaagagcgtggacgagcagttctcggcgctggacctcaacaacgacggcgtcctctcgcgctcggagctccgcacggccttcgagtccatgcgcctcatcgagacgcacttcggcatcgacgtgtccacgccgccggagcagctcgcgaactctacgact

SEQ ID NO: 119932 - DNA, 240 bp, Glycine max
ccgctcgccgctttgtgggccacaccaaggacgtgctctccgtggccttttccattgacaaccgtcagatcgtgtctgcctctcgtgaccgcacgatcaagctgtggaacaccctgggagagtgtaagtacacaatccaagacggcgatgcgcattctgattgggtaagctgcgtcatattcagccctagcacccttcagcccactattgtttctgcctcgtgggaccgcaccgttaagg

SEQ ID NO: 119933 - DNA, 241 bp, Glycine max
tgtttggggtcaccccaacattcttggtaaatgctgatcagtgagaaatcaatattgcacaaggtgcaaaacctggtgaaggtggacaattgccttgaaaaaaagttagcatgtatagtgctaggttgagaaattctaaaccaggagttcctcttatatctccacctcctcatcatgacatttattctagcgaggaccttgctcagttgatctttgatcttcatcaggtgaaccctaaggc

SEQ ID NO: 119934 - DNA, 241 bp, Glycine max
gtcgtggtcgtgtcgcagcaaaaccaagccacccactaacttgtttggtccaagacatggctctgatcctgcatgctaccaaaacaaacaagaatgccttcaagactctgattgcggcagagtacagtggcgtccaagtggaattggcccctaatttcgagatgggtgtctctaacaaaactcctgaatttctcaagatgaatcctattggaaaggttcctgttttggaaacgcccgatgg

SEQ ID NO: 119935 - DNA, 239 bp, Glycine max
cgctcctccagtgccatctgcaccgcccatagtggccatgctgccatcccctggcatgggccacctaatcccaatgatcgagttcgccaagcgagcggtgcgctaccataacctggccgtcaccttcgtcatccccactgacggcccaccttctaaagcccaaaaggccgtcttccaggccctcccggactccatttcccacaccttcctccctccggtcaatctctccgactttccac

SEQ ID NO: 119936 - DNA, 242 bp, Glycine max
tcctgctcctatatcttcaggaactgctgtggaagggtctgatatctatgggcaggctgcatccaatctggttgctggaagcaacttggagggaacaattcagcaaattcttgatatgggtggagggagctgggacagggataccgttgtccgtgctcttcgagctgcctacaacaaccctgagagagctgttgaatatttgtatacaggtatccccgagcaagctgaagctccacttgtag

SEQ ID NO: 119937 - DNA, 240 bp, Glycine max
gagatggctcttgtgaaaccaatttccaatgtcactcccaaatttggcagcagccccagaatgggatcacactccaaattcagcaccataataagaatgtctgccactgccaccccaccaccaccaccctccacctccacaaagccagctgcaagcaacaagaagggcaacatcaaggagaccctcttgactccaaggttctacaccactgactttgatgagatggagaccctcttcaac

SEQ ID NO: 119938 - DNA, 241 bp, Glycine max
gaggaaccctagctagggtttggaagaagctgatccgagaagatggtgcagcgtctcacctaccgcagacgccacagctatgctaccaaatccaaccagcacagagtcgtcaagactcccggtggcaagcttgtttatcagaccacgaagaagagggccagcggacccaagtgccctgtcactggaaagaggattcaagggattccacatttaaggccagcagagtataatagatcaaggt

SEQ ID NO: 119939 - DNA, 239 bp, Glycine max
ctgcactcttcatcaagctccgctccaacacaggggaaaatgagggagatccttcacgtgcagggagggcaatgcgggaaccagatcggttccaagttctgggaagtggtgtgcgacgagcacggcatagatccgacggggaagtacgtcggaaactcagatctgcaactcgagcgcgtgaacgtctactacaatgaagcctcgtgcgggcgcttcgtgccacgcgcggtgctgatgga

SEQ ID NO: 119940 - DNA, 238 bp, Glycine max
gctccctcagaagcgaagaagaagccacagagaaccagtctcctactctctctcacccacaagaaaaatggcatctcacatcgttggatacccccgcatgggtcccaagagagagctcaagttcgctctcgagtctttctgggatggcaagagcagcgccgaggatttgcagaaggtggctgctgatctcaggtcatccatctggaagcagatggctggtgctgggatcaagtacatc

SEQ ID NO: 119941 - DNA, 236 bp, Glycine max
gttgtgttgtgttgtgtcggtggcatttttgttggttcgagtgagcgagggaagatgtactctagagattcatggggtggtccgttggagataaacgcgacggactcggcaacggaggacgagcggagcggaacctgcaggacgtggacagggcggcgctgtcgcgtcccttgtacgagacgcagcagagctggctcctaggccccggcgagcagaagaagaagaagtacgtcgat

SEQ ID NO: 119942 - DNA, 238 bp, Glycine max
tcttcgcgtatgagtccaacgctgacgtcatctctttagactacgctctgttccgtgataaccccggagtggtggatcccggtaacgggttgagatattataacctatttgacgcccaaattgacgccgttttctccgcgctaagtgctttgaaatacgacgacgttaagatcgtggttaccgaaacaggttggccttctaagggagatagtaatgaggtgggtgcgagtgtagacaa

SEQ ID NO: 119943 - DNA, 239 bp, Glycine max
gagccaatacctttgcatcgggcgcttttcagctgtttccttccaggttttaggccacatgaaaacagtatgtgttttgacgttgggatggctgctatttgattcagagctaactttcaagaatatcatgggaatgattatcgcagttgttggcatggtaatttacagttgggctgtagagcttgaaaagcagtcaaatgcaaagaccttacctcacgtgaaaaacagcatgacggaag

SEQ ID NO: 119944 - DNA, 268 bp, Glycine max
gaaacacaaagaagacaaaatgggttcctctttgtggacttgtctgattttgttatcacttgcttctgcttccttcgccgccaacccaagaacaccaattgatgtgccatttggcagaaactatgtgcctacttgggcctttgatcacatcaaatacctcaatggtggttctgagattcagcttcatcttgataagtacactggtactggcttccaatccaaaggatcctacctgtttggtcacttcagcatgtacataaaattggtt

SEQ ID NO: 119945 - DNA, 261 bp, Glycine max
tccgaacgagcgaccttcttcgtttctcgcaaagtttaagtcatcatgggtaaggaaaagactcacatcaacattgtcgtcattggacatgtcgactctgggaagtcaactaccactggtcatttgatctacaagcttggaggtattgacaagcgtgtgattgagaggttcgagaaggaggctgctgagatgaacaagaggtcattcaagtatgcctgggtgcttgacaagctcaaggctgagcgcgaaagaggaattacc

SEQ ID NO: 119946 - DNA, 150 bp, Glycine max
ctcgagcgaatcggctcgacggctcgagcaaagagccaaccagacctagcaatacttagcagtgaatacatttgtgaaggactcacaagatccaaatcctttaatccgtgccttagctgtacggacaatgggctgcattcgtgtagataa

SEQ ID NO: 119947 - DNA, 269 bp, Glycine max
caccatttgagttcatatcattcgtcttcttcttccaacgtgaagcaatctctgtgttcgaaatggctcgtacgaagcaaaccgcaaggaagtccaccggaggaaaagctccgaggaagcaactcgccacgaaagcagcacgcaagtccgctccggcgaccggcggcgtgaagaagccacaccgtttcaggccgggtacggtggcgctgagggagatccgaaaataccagaagagcaccgagcttctcataaggaagcttcctttccag

SEQ ID NO: 119948 - DNA, 268 bp, Glycine max
ggcaactggaaatgcaatgggaccactgaggaggtaaagaagattgttactactttgaatgaggctaaagtccctggagaagatgtcgtagaagttgttgtgagccctccttttgtgttccttcctgttgtaaaaagtttgctgcgccctgatttccatgtttcggcacaaaactgttgggttcgcaaaggtggtgcttataccggtgaggttagtgctgaaatgcttgttaatttgggaattccttgggttattattggtcactctg

SEQ ID NO: 119949 - DNA, 194 bp, Glycine max
cggaatcggctcgagtcgagcgaatcggctcgaggagacgaggaagggcgtagtaagcgacgaaatgcttcggcgagttgaaaataagcgtagatccggggattcccgatataggtcaacctttcgaactgctgctgaatccacgggcaggcaagaggcaacctggtgaactgaaacatcttagtagccagagg

SEQ ID NO: 119950 - DNA, 94 bp, Glycine max
ggtgccctgaatgtggatgttactgagttccagactaacctggtaccatatccgaggattcacttcatgctttcatcctatgctcccgtgattt

SEQ ID NO: 119951 - DNA, 269 bp, Glycine max
gctttttgatccttcgatgtcggctcttcctatcattgtgaagcagaattcaccaagtgttggattgttcacccaccaatagggaacgtgagctgggtttagaccgtcgtgagacaggttagttttaccctactgatgacagtgtcgcaatagtaattcaacctagtacgagaggaaccgttgattcgcacaattggtcatcgcgcttggttgaaaagccagtggcgcgaagtaccgtgcgttggattatgactgaacgcctctaagtc

SEQ ID NO: 119952 - DNA, 239 bp, Glycine max
tccaaaaggagagtgcaataactcgttgtacattcctagtgtgtgggagagacatggctaagatgtgtgttttggtgttggttcttgctctggctgtggccacaagtgccagaaacgttcccaaccccaaggatgctggtcttaaggaccagaagaacttcatcagctatggtggagttggtggttattccgggattgggaacaatggactgccttttggaggagctggtgccggaata

SEQ ID NO: 119953 - DNA, 263 bp, Glycine max
ggcgccaaagccttctacaaaggctacgaatcctatctcgaaagaccaatcgacgagtctcaggaatcgaagtcaccacgcgacaccgaaggccacggcacgcacaccgcctccaccgccgcgggcgccgtcgtctccaacgcaagcctcttccactatgcccggggcgcagcagaggaatggctacgaaggcaagaatcgcagcctacaagatctgctggaagctcggttgcttcgactccgacatcctcgccgccatggac

SEQ ID NO: 119954 - DNA, 262 bp, Glycine max
ctcttctctctctgtccggggatggcttcacgcaggttcgtatcttctctgattcgatcctcccttcgtagatctcaatcgaaaccctcgatttccgcatccgcatcgagatacacgtcatccaaccgtgcctctccgcacggttacttgctgaaccgcgtcgccgaatacgctaccgcggcggcggctgctaccgctcctccctctgctccgcctccgggcaagaaggaggttagcggcggcgggaagatcaccgatgagt

SEQ ID NO: 119955 - DNA, 263 bp, Glycine max
agtgaagagtgaagagtgagagagagagagagagagaggcacttggaatccaaaaatgagagaaatcatcagcattcacataggtcaggccgggatccaggttggcaactcctgctgggaactctactgcctggaacatggcatccagcccgatggcatgatgccaagtgactcctccttcggtgtagcccacgacgccttcaacaccttcttcagcgaaaccggatccggcaagcacgtccctcgcgccgtcttcgtcgatc

SEQ ID NO: 119956 - DNA, 261 bp, Glycine max
tgggacttttgatgtctctcttctcaccatcgaggagggtattttcgaggtgaaggccactgctggtgatactcacttgggaggtgaagattttgataacagaatggtgaaccattttgttcaggaattcaagaggaagaacaagaaggatattagtggaaatgccagagctctgaggaggttgagaacagcatgtgagcgggcaaagaggactctctcttccactgctcaaaccaccatagagattgattccttgtacga

SEQ ID NO: 119957 - DNA, 260 bp, Glycine max
acgccgcccaaaaccatttatagggttttcttttctttgccaagaaaatgagagagtgcatttcaatccacattggtcaggccggtatccaggtcgagaaacgcctgctgggaactctattgccttgaacacggcattcagcccgatgggcagatgccgagtgacaagaccgttggaggaggagacgacgccttcaacacattcttcagcgagaccggcgccggaaagcacgtgcctcgcgccgtcttcgtggatcttga

SEQ ID NO: 119958 - DNA, 262 bp, Glycine max
caaaacaaaatgaagagcctcctcttctctctcttcctcttcctcttcttagcctcctccgccgtcgccaccgtccccgcccacaacatcacccgcatgctggccgcacaccccggcttctccaccttcaaccactacctctccgtcacccacctggccgaagagatcaaccgccgccagaccatcaccgtcctggccctcgacaatgccgccatgtcctccctcctcgacaagcacctctccctccccaccatcaaaaacg

SEQ ID NO: 119959 - DNA, 260 bp, Glycine max
gtgaaagagaatccgaggcgaagagaagagaaaaattaagatggaggggaaggagcaggatgtgtcgctgggagcgaacaagttcccggagagacagccgattgggacggcggcgcagagccaagacgacggcaaggactaccaggagccggcgccggcgccactggttgacccgacggagtttacgtcatggtccttttacagagcagggatagcagagtttgtggccacttttctgtttctatacatcactgtcttaa

SEQ ID NO: 119960 - DNA, 254 bp, Glycine max
agcatttaccacaccaaaatcaatctgcggagtcagaaagccatggatccctacaagaatcggccatcaagcgccttcaattctcccttctggactacaaattccggtgctcccatctggaacaataactcatcgctgactgttggatctagaggtccaattctgctggaggattaccatctggtggagaagcttggcaactttgacagggaaccgatccccgaacgtgttgtccacgctcgtggagctagcgc

SEQ ID NO: 119961 - DNA, 263 bp, Glycine max
atccgaggcgaagagaagagaaaaattaagatggaggggaaggagcaggatgtgtcgctgggagcgaacaagttcccggagagacagccgattgggacggcggcgcagagccaagacgacggcaaggactaccaggagccggcgccggcgccactggttgacccgacggagtttacgtcatggtccttttacagagcagggatagcagagtttgtggccacttttctgtttctatacatcactgtcttaaccgtcatgggagt

SEQ ID NO: 119962 - DNA, 263 bp, Glycine max
accaaagccgccactaatttgcgcctcacacactctctccgcttctctcctaaacccaacaacctacgctttgccaccaagcctggtaatacgctgttatgcgcaagggttaaggcccaattagatgaggttgcccttgatagttcctcaaatgctactcctcctatcaaagccaaatcaaaggaggaaccacccgcaaaacctttagctgaaccatcttcttcagtcttggcaactcaagaatcggtctctcagtttattac

SEQ ID NO: 119963 - DNA, 201 bp, Glycine max
agataaaggagcatgttgattatatagaaagtaaagggcaacaatcatttttgtttaccatgggtaaggacaccatcgctgacataataacctatataagaaatgctgacatgaataaaaaaggaatggttcaaataccatttactaacataacagaaaacattgtaaaaatacttttacgcgagggttttgttgaaaacg

SEQ ID NO: 119964 - DNA, 260 bp, Glycine max
aactaccccatcctacgtggctttcaccgacacagaacggttgatcggcgatgcggcgaagaaccaggtcgctatgaacccaaccaacaccgtttttgatgctaagcgtttgattggaaggcgtttttccgatgcatcagtacaaggtgacatgaaattgtggccgttcaaggtgattcctggccctgctgagaaacctatgattgtggtgaactacaagggggaggagaaacagttttccgcggaagagatatcctcca

SEQ ID NO: 119965 - DNA, 181 bp, Glycine max
gtacaattggaagaatacatcatcaaaatgtagtacaactaattggatattgtgttgaaggctcaaaacgtgcccttgtttatgaattcatgcccaatggatctcttgacaaatttatttttcccaaagatggaaatatacatttaacatatgacgaaatatataatatagcaattggagt

SEQ ID NO: 119966 - DNA, 259 bp, Glycine max
gacacaagggcaccaccgtgtcaacaagtagaagcagaagctgtttttgttcttcgccgctgacactaatcgtttcttcaatgccttacgagaaggaattcgccgctccaaaaaaagcagccactctcgctgctcctctctgcaagaaagtacagaaggctcttctgcaatccgatgtgcactcaaagtcagacaaaagtcgcgtcacagtggctgattatggttcacaagcattggtcagctttatacttgagagaga

SEQ ID NO: 119967 - DNA, 254 bp, Glycine max
ggaggaagagagaaaaaccatggcaataacactcaacaatggcttcaagatgcctatcattggattgggcgtgtggcgcatggaaggaaacgaaatcagggacctaattctcaattccatcaaaattggttatcgccattttgattgtgctgctgactacaaaaacgaagcagaagttggagatgcgcttaaggaggcttttgatagtggccttgtgaagagagaggatctcttcattaccaccaagctttgga

SEQ ID NO: 119968 - DNA, 264 bp, Glycine max
gattgaacacacacatagaaacccaacaacaagaatgaagaagatgattctaaccctcttcttcaatatcattttatctctcctctccctctcccacgcctccgtggtggatttctgcgtagcagactacacaggccccaatggccccgcagggtactcatgcaagagcccagcaaaggtcacggtggacgacttcgtctactccggccttggcaccgccggcaacacctcaaacatcatcaaagccgcggtgacgccggcgtt

SEQ ID NO: 119969 - DNA, 262 bp, Glycine max
tctgtctgcttcttcactttctctcgtttcaatcgaaaccaaaacaaaaacatgggcagaaaattcttcgtcggtggcaactggaaatgcaatgggaccactgaggaggtaaagaagattgttactactttgaatgaggctaaagtccctggagaatgtcgtagaagttgttgtgagccctccttttgtgttccttcctgttgtaaaaagtttgctgcgccctgatttccatgtttcggcacaaaactgttgggttcgcaaa

SEQ ID NO: 119970 - DNA, 264 bp, Glycine max
acctcttctttctcttcttcttcctcttcttagcctccgccgccgccagcgtccccgcccacaacatcacccgcatgcttgccaaacaccccggcttctccaccttcaaccactatctctccctcacccacctcgccgaagagatcaaccgccgccagaccatcaccgtcctggccctcgacaatgccgccatgtcctccctcctcgacaagcacctctccctccccaccatcaaaaacgtcctctccctccacgtcctcgtcg

SEQ ID NO: 119971 - DNA, 148 bp, Glycine max
ctcttcttctcttgcggcgtgggttttagcgcacttcttctagatttaaggaagatgggtaaggaaaaggttcacatcagtattgtggttattggccatgttgactctgggaagtccactaccactggccacctgatctacaagcttg

SEQ ID NO: 119972 - DNA, 269 bp, Glycine max
cattattccgcatccagggctctggaccagacaatatgcaagccatacaagttgaaccagttgcatcttccttgaattcctcttactgttacatacttcacaatgggcctgctgtctttacttggtctggaaactctacaagtgcagaaaaccaggaacttgttgagaggatgctggatttgataaagccaaatttacaatccaaaccacaaagggaagtctccgaatctgaacagttttgggatttgttaggaggaaaatcagaatat

SEQ ID NO: 119973 - DNA, 263 bp, Glycine max
gctgtggcctatgctgcaaaagcttggggtcaccatgaaatctgaggagaaggacctcatgggtaaagcattgatgaagcgtgtcatgcaaacctggcttccagcaagtagtgctctattggaaatgatgatatttcatctaccctctccatcaacagcccagaagtatcgtgtggagaacttgtatgagggtcctcttgatgatcaatatgcttctgctatcagaaattgtgatcctgaaggtcctctgatgctctatgtct

SEQ ID NO: 119974 - DNA, 255 bp, Glycine max
caccagctcccaccccgacctcgcccgccagatcttctccgcagcacgctccctcgacgcctggtccgtcgacgcccccgtctccggcggcgacatcggcgcgcgcgacggcaagctcgccatcctagccgccggagaaaaagccgtagtcgaatggctgagccctctgttctcgatcctcgggagagccacttacatgggccccgcggggtgcgggcagagctgcaagatcgcgaaccagatcacgattggggc

SEQ ID NO: 119975 - DNA, 257 bp, Glycine max
ctcacacaacaaacatatctcttcctcttctgtccctcaatggaaggatcaggatccggtgtggttacagtctacggcaacggcgccatcaccgagaccaagaagtcccccttctccgtcaaagtcggcctagcccagatgctccgcggcggcgtcatcatggacgtcgtcgacgccgagcaggcccgcatcgcggaggaggccggtgcctgcgcggtgatggccctggagcgtgtccccgccgacatccgggccca

SEQ ID NO: 119976 - DNA, 260 bp, Glycine max
ggaagaagcctaacaacatcaaactgtatgtccgccgtgtcttcatcatggacaactgtgaggagttgatgcctgaatatcttagctttgttaagggtattgtggattctgaggatcttcctctcaacatttctagagaaatgctgcagcagaacaagatcctgaaagtcatcaggaagaacttggtcaagaagtgcattgagatgttctttgaaattgctgaaaacaaggaagactataacaagttttatgaagccttc

SEQ ID NO: 119977 - DNA, 247 bp, Glycine max
aaaggcgtcttcataaacgccgcccaaaacttctcatacccttttattcattccattcgtttctagggttttcttttctttgccgagaaaatgagagagtgcatttcgatccacattggccaggccggtatccaggttggaaacgcctgctgggaactctattgccttgaacacggcattcagcccgatggacagatgccgagtgacaagaccgttggcggaggagacgacgccttcaacacatttt

SEQ ID NO: 119978 - DNA, 179 bp, Glycine max
agcgcctggatacaagttatgccttggaatggaagagaattccgaatcagctttgtctacgaacaaggaagctataagtaatgcaactaggaatctcatggagagttcgatcctggctcaggatgaacgctggcggcatgccttacacatgcacgtcggacgggaagtggtgtttccag

SEQ ID NO: 119979 - DNA, 255 bp, Glycine max
gtggtgccttatcgctgtggttttcatcgtcttccttctcttatatttctttttttttttttgtcttcgccgcacgccgaaacaatggccggaaaaggagagggtcctgctatcggaatcgatctcggaaccacctactcttgtgtcggtgtgtggcaacatgaccgagttgaaatcatcgccaacgaccaagggaacagaacgacgccgtcttacgtcggcttcactgataccgagcgtctcatcggtgatgcg

SEQ ID NO: 119980 - DNA, 255 bp, Glycine max
ctctactaagaacaaagagaacagaaaaaatggctcccctttcatgcatcattgttctttttgctctttctcttctgacaccctgttttgtttcctcctccgcagtgagagaccctgagttagtagtacaagaagtacaaagaagcatcaatgcctctagaagaaacttgggttatttatcatgcggaacaggcaaccctattgacgattgctggcgttgtgaatccaactgggagaacaaccggcaaagactag

SEQ ID NO: 119981 - DNA, 152 bp, Glycine max
  unsure (1)..(152): unsure at all n locations
gnaattgctacatagcacacactccctcttctcttctacggttatggcgtccacgttgggcacttcttcaattgcggttcttccttcgcgctgcatctcttctttttcttccaagccttccattcacacactctctctaacttcagggcaga

SEQ ID NO: 119982 - DNA, 258 bp, Glycine max
tttcacttttcccaatccgccatggccgccgccactgcattgctccgctctctccgccgccgcgaccttccctcttcttctctctccgccttccgatcgttgacgagtggcacaaagacatcatatgtaggtaacaagtgggcaagtttgtcacgaccgttcagttcaaagcctgctggtaatgatgtcattggaattgatctgggtactaccaattcgtgtgtctctgttatggagggaaagaatcctaaagttatt

SEQ ID NO: 119983 - DNA, 260 bp, Glycine max
aaggctgctgagtgttgcagaggcatgtctgagtcggacacgaagaagaagaagcagcagcagcgcacgggcggaaagcatgaaggagaagaagggttgatgatcaagccccagagcttcacgccccccatcgacacctcccaatggcccattctcctcaaaaactacgagcgcctcaacgtccgcaccggccactacacccccattccctccggctactcccccctgaagcgccccctctccgagtacctcaaatacgg

SEQ ID NO: 119984 - DNA, 264 bp, Glycine max
cacttggaatccaaaaatgagagagatcatcagcattcacataggtcaggccgggatccaggttggcaactcctgctgggaactctactgcctggaacatggcatccagcccgatggcatgatgccaagtgactcctccttcggtgtagcccacgacgccttcaacaccttcttcagcgaaaccggatccggcaagcacgtccctcgcgccgtcttcgtcgatctcgagcccaccgtcatcgacgaagtccgttgtggcactta

SEQ ID NO: 119985 - DNA, 260 bp, Glycine max
aaaaaaaatctcaaaataaaacaaccaaaccacacacttcacaccctcttcaacatcctcagcaagtacaagaacaagaagaaacaatgtcttgctccaatctcacaatgttggtgtcctcaaaaccttccctttccgatccctccaatctctccttccgctctgtcctcaacccttttcagctcccttcacaaaacccaacttcatgcactccttcacgctcctcaaccacccaaattcagtgtggtctgagagaactc

SEQ ID NO: 119986 - DNA, 255 bp, Glycine max
caccgatagatagagagcgcggcataacctaaacctatctttcttctctctctgtgtgtgcgcttcaacggcaaccagaagcagccatggccactgcaaggactgtgaaggatgtttcacctcatgagttcgttaaggcgtactcctctcacctcaagcgatccggcaagatggagctgccagagtggactgatattgtgaaaactgcaagatttaaggagttggctccttatgatcctgactggtactatgtca

SEQ ID NO: 119987 - DNA, 257 bp, Glycine max
gttcgtttcactctcacaatggactccctctctctcttctgcaccggagcccttctcgccggcggcctctactggttcgtctgtgttctgggccccgccgagcagaagggcaaacgcgccaccgatctatccggcggctccatctccgccgagaaagtccaagacaactacaagcagtactggtccttcttccgccgccccaaggagatcgagaccgccgacaaagttcccgacttcgtcgacaccttctacaatct

SEQ ID NO: 119988 - DNA, 253 bp, Glycine max
gcactctggctcctcagatttcctgcagctggggaaatgagactgagagcatatgctgctgcacaaggggtacagccggatcaaattattttcacagatgttgcaatgaagaatgaacacatcagacggagttctttagcagacttattccttgactcgcctttatgcaatgcacatacaacaggaacagatatactatgggcaggtttgccaatggttactctgcctcttgagaaaatggctactagggttg

SEQ ID NO: 119989 - DNA, 253 bp, Glycine max
ataccttgtgtttgtatagcatatattcctagttgatattatctatagatggagccaattgaacaaggaagccaacctgaaaaggaaaaatggaagggcaaggccacaacagaagtaaaaggagccaaagcagaacaagtttggcctcttttggaggatttctttggccttgacaagtggttccccaccctctctacatgcattccagttgaaggtatctctggccaacctgggtgtgttcgcttctgcgctg

SEQ ID NO: 119990 - DNA, 254 bp, Glycine max
agagaaatggcttgcaggcaattgtgggcttcaagagctgcctcttacctgaggatctctgtgtttcacagaggcttttctaatgttattaaagatttcaagtatgttgattctcatgagtgggtgaaagttgatggaaattacgcaaccatcggcataactgatcatgcccaagatcatttgggtgatgttgtatatgttgaattgccagaagtgggagcagctgtgacacaaggaggtagttttggtgcagt

SEQ ID NO: 119991 - DNA, 224 bp, Glycine max
  unsure (1)..(224): unsure at all n locations
ctctttgcgcagttccctacctctcctttcaagatgcagatcttcgtcaagaccctcaccggaaagaccatcacccttgaggtggaaagctctgacaccatcgacaacgtcaaggccaagatccaggacaaggaaggaattcccccggatcagcaacgtctcatcttcgccggaaagcagctcgaggacggccgnacccacgccgacntcaacantcagaagga

SEQ ID NO: 119992 - DNA, 255 bp, Glycine max
acatgcgcggtgagtgagtgagagacggaaagtgcaaagccaccgtcttctcttctcagagcttggctttgcttatcgattctctctcctctcatctttctcattcaaggtttgtaaaagatggccgatgctgaggatattcaaccccttgtttgtgacaatggaactggaatggtcaaggctggatttgctggtgatgatgctcccagggctgtctttcccagtattgttggccgacctcgacacactggtgtt

SEQ ID NO: 119993 - DNA, 251 bp, Glycine max
cgaacttggtggattattttccagtgttgagggtgtttgatccacaagggatcaggaggcacaccaccaactacattgacaagttgttcgatgtgttcgatcccatgattgatgaacgcatgaggaggaggggagagaagggttatgccactagccatgacatgttggatatcttgctggatatttctgaccagagtagcgagaagattcataggaagcagatcaagcatttgttccttgacctattcgtt

SEQ ID NO: 119994 - DNA, 252 bp, Glycine max
ctcacttgggaggtgaagattttgataacagaatggtgaaccattttgttcaggaattcaagaggaagaacaagaaggatattagtggaaatgccagagctctgaggaggttgagaacagcatgtgagcgggcaaagaggactctctcttccactgctcaaaccaccatagagattgattccttgtacgagggtattgacttctacacaaccattaccccggcccgttttgaagagctaaacatggatttat

SEQ ID NO: 119995 - DNA, 250 bp, Glycine max
acgcaagcaattcagaacaaccagttattcctcctggacctcaggttcaaccagctcaccgggcccattgacccgaaactcttcgagagggacctggacgtgatttttgtgaacaacaacaagttcacggggtacctcccggagaatttcgggtccacgccggcccggtacctcacgtttgcccacaacagcctctcgggctcgctccctaagagcgtgggctacgcgccgaacctcaccgaggttctct

SEQ ID NO: 119996 - DNA, 258 bp, Glycine max
actgtccctgtctactatccagcgaaaccacagccaagggaacgggcttggcggaatcagcggggaaagaagaccctgttgagcttgactctagtccgactttgtgaaatgacttgagaggtgtaggataagtgggagctggaaacagcgaaagtaaaataccaccggttcattaaaaaaaaaaaaaaaaaaaataaaaaaaaaaaaaaagggcggccgccgatttgaggccccgaggcccggggaattaattcgggg

SEQ ID NO: 119997 - DNA, 108 bp, Glycine max
ctctctctctctctctctctgaagatggcttcacgcaggctcgtatcttctctgattcgatcctcccttcgtagatctcaatcgaagccctcaatttccacacaacat

SEQ ID NO: 119998 - DNA, 202 bp, Glycine max
atccctagctctgtcgttccgtcgttgacgatggcgtttcgggtgcgaagcctgacctccgctctctctttcttctctctctcttgtccatcgcttccgccaatgtcttcttcgaagagcgtttcgatgacgggtgggaaaatcgatgggttaaatcagattggaaaaaagatgagaacgtggctggggacgtgaaccacac

SEQ ID NO: 119999 - DNA, 258 bp, Glycine max
tgccctccagttttcgacaggaaagaatgcttggttcctcccccagagggttacaagcctccaatcagatggccaaagagtagagatgaatgttggtacaggaatgtgccatatgactggatcaataagcagaagtctaaccagcattggttgagaaaggaaggggagaaattcctgtttccaggtgggggtactatgttccccaacggtgttggtgaatatgctgatttgatgcaagatctgatcccaagaatgaag

SEQ ID NO: 120000 - DNA, 249 bp, Glycine max
ctaaaccctactcattctccatacctcaacgaagacgttaaagagacggcaacactttgctgtccgccttgaccgagcagagcttcgtcttggccctcgattttgccctaaagtactctcagtcacaacagacaccgtcgtcgtcgtcgtcgtcatcaatggcaccgaagcagaccaaggctgagaagaagatcgcttacgatgcgaactgtgcgacctaatggaggagtacggccagatcctcgttgt

SEQ ID NO: 120001 - DNA, 253 bp, Glycine max
gcggttgaagaatggtataagcagatgcctgtcatcacgcgctcttatctcaccgctgctgttgtcaccaccatcggatgttcccttgatataatttctccgtatcatttgtacttgaaccctagattggtggtgaagcaatatcagttttggcgtctggttactaatttcttgtactttcgtaaaatggacttggatttcctgtatcatatgttttttcttgcccgttactgcaagcttcttgaggagaact

SEQ ID NO: 120002 - DNA, 231 bp, Glycine max
  unsure (1)..(231): unsure at all n locations
ccttgtgtcaaggcaactaaagcttctctcgctttgcaagagagggaggagtgagtgagatggaaggagtgatacacagaacagtggaagtgaatggcataaaaatgcacatagcagagaaaggagagggtccagtggtgttgttcctccacggcttccctgagctctggtactcatggcgccaccagattctctctctcagctccctcggcaaccgcgccgncgcatccg

SEQ ID NO: 120003 - DNA, 244 bp, Glycine max
gctaaaggatacaaatcacgtggcatagcacgagcaatgcttggtcaatgggaagaagctgcaaaggatcttcatgtggcttcaaagttagactatgacgaggaaataaatgctgtactaaaaaaggtggaaccaaatgctcacaagatagaggaacaccgtcggaaatatgaaaggctgcacaaagaaagagaggacaaaaaaaaggagcgatagaggcagcggcgccgagcataagcacagg

SEQ ID NO: 120004 - DNA, 244 bp, Glycine max
  unsure (1)..(244): unsure at all n locations
cgccgggaagctcaggatacttggatttgtatccagagcggaagatgtcctttttcaaaaatccttacattctcggactggctgctgtcgccggcatcggtggtctcctcttcggctacgacactggtgtgatatcaggggctcttttatacattaaggatgattttgaggaggttagaaacagcaatcttctccaggaaacaatagncagcactggctattccggggcaancgntggagcagc

SEQ ID NO: 120005 - DNA, 241 bp, Glycine max
  unsure (1)..(241): unsure at all n locations
gtgaaccctctctataaaacctcttccttctttcattcggtgcctattcccattttcttcctctagaccctaaacaccntcttctcttcttccttcgctcgttgttctccctcgcgtagatcgacaatggcggagacagagacgtttgcttccaggctgagatcaaccagctcctcagtctcatcantcaacacctcgacgtcaacaaggagactttccatcgngaacncantagcaacgc

SEQ ID NO: 120006 - DNA, 249 bp, Glycine max
cagagagtggtttcagtgagtgatcggtgttcacttgatccttcataagtcgtcatcatcatcatcatcatcaccgttgattgaagaagatgccgatcagaaacatcgccatcggaaggcctgaagaggctactcaccccgacacgttgaaggcggggttggctgagttcatctccaccttgatcttcgtgttcgccggttcaggttccggcatcgctacaacaagctcaccgacaacggcgccgccac

SEQ ID NO: 120007 - DNA, 250 bp, Glycine max
gtgcacacttgctccaggacccaaacagagctcaacaaatgcttacaagagtggcagagtctgggctttcaggtaactgggtcggtgtgtgacgtgtcctcaccatcccagagagagaagctcattgaggaagtcacttccatcttgaatggcaagcttaacatctatgtgaacaatgttggaacaaactttagaaagccaaccattgagtacactgctgaagaatattcacagcttatgacagttaatt

SEQ ID NO: 120008 - DNA, 248 bp, Glycine max
  unsure (1)..(248): unsure at all n locations
cacctctcctcgttcacgctacccctttctgctcttcttctacctttcaagttttaaaagtataaagatggcagagacattcctatttacctcagagtcggtgaacgaggtacaccctgacaagctctgcgaccaaatctccgatgctgtcctcgacgcttgcctcgagcaggacccagacagcaaagnttgcctcgaaacantcaccaaaaccaacattgncantgncntcggagaaantacgacca

SEQ ID NO: 120009 - DNA, 223 bp, Glycine max
  unsure (1)..(223): unsure at all n locations
ggcagaaagcaagctcatcctagagttttaaaaatggcagcagcctcctccatggctctctcttccccatccttggctggcaaggccgtgaagctgggcccatcagcccccgaagtcgggagggtcagcatgaggaagaccgtcaccaagcaggcctcctccggaagcccatggtacggcccagaccgcgncaagntacttgggccantcgtntgcgagcccc

SEQ ID NO: 120010 - DNA, 195 bp, Glycine max
gcgactaagagttgctgcttcttccgccactcagcacttcgctccctctgtgcttcaccaaccatggccgaaatcgaagctaccgttccagatccctctcaaatcgacgtcaaacttttcaaccgctggagcttcgacgacgttgaggttactgatatgtctctggctgattacattggagtgtccccgtcaaag

SEQ ID NO: 120011 - DNA, 251 bp, Glycine max
tcaagaaagaaactgcaacttcctctgttttgctcccctgtttaggccttttcataagcttataatgacacacaaggaattttccattgctctagtgactctcattgctgttctctttgtcaacatgaacatccaaggtgccactgctgactatggtagttggcagagtgctcatgccactttttatggcgggggtgatgcttctggcacaatgggtggagcatgtgggtatggaaatttgtatagccagg

SEQ ID NO: 120012 - DNA, 250 bp, Glycine max
ctggaatttcaaaggatggacagactcgtgaacatgctctgctttcattcacccttggtgtgaaacagatgatttgttgctgtaacaagatggatgctactacaccaaagtactccaaggccaggtatgatgaaattgtgaaggaagtttcttcctatttgaagaaagtaggatacaaccctgacaagattccttttgttcctatatctggttttgagggagacaacatgattgagaggtccacaaacct

SEQ ID NO: 120013 - DNA, 244 bp, Glycine max
  unsure (1)..(244): unsure at all n locations
aaagcattcactgtgtcggaaaaagaagaagagaaaaaagatgagcgacggaggaaaacgacaaggtggaagagcgttgccgccgccgccaagaggccctccgcctcctcccccctctcgccctcgcctcgaacccgtcgatcgcgaaaagacatgtccgttactgctgcgagtgttcactaagattgggagtcaccattccatggaagactttgccgncagaggcaaagagcccaaagacgag

SEQ ID NO: 120014 - DNA, 226 bp, Glycine max
  unsure (1)..(226): unsure at all n locations
tatggcaggaggtggtggagctccagcacctaagatcgatgagccacagccacatccaccgaaggatcagctaccgaatgtttcttactgcattacgagtcctcctctttggcctgaggccatacttcttggttttcaacattatcttgtgatgctgggtacaactgtgctaattcccacgtgctctgntccccagantggaggctgcaactaggagaaggcaaaa

SEQ ID NO: 120015 - DNA, 240 bp, Glycine max
  unsure (1)..(240): unsure at all n locations
ggcccctattgggcagcctccctggcctcatccaacacgccaaccgcatgcacgactggatcgctgacaacctccgcgcgtgcggcggcacgtaccagacctgcatctgcgccctccccttcctcgcccgaaaacagtgcctggtgactgtcacgtgcgaccccaaaaacctcgagcacatcctgtggcgtggcttcgacaacgacccaaaaggccccacgntgcagntcgccntccacg

SEQ ID NO: 120016 - DNA, 223 bp, Glycine max
  unsure (1)..(223): unsure at all n locations
gggagagacccttcaatttgggacaaccctaatgagttccaaccagagaggtttcttaataaggagattgatgtgaaggggcatgactatgagctattgccatttggtgctgggagaaggatgtgccctgggtaccctcttggccttaaggtcattcaagcaagtttggccaatttgttgcatggacttaactggagcattcctgactatgntaggaaggagg

SEQ ID NO: 120017 - DNA, 225 bp, Glycine max
  unsure (1)..(225): unsure at all n locations
cactcatctcactcgcgccatcttagggtttctccttttgtttcgcaacatggttgccgctaagaaaactaagaagacccatgagagcatcaacaacaggctcgctcttgtcatgaagagtggcaaattcaccctcggttacaagaccgttctcaaatctcttaggaactccaaaggaaaattgattatcattgctaacaactgcccccgcttgagaaagncaga

SEQ ID NO: 120018 - DNA, 228 bp, Glycine max
  unsure (1)..(228): unsure at all n locations
ctttgttgcaatatcacaaacacctcgtccgtcacaatgcagctagctgtggcggccaacgctgtcgtttcaccgtcgccgttccgacctcatccccttctccggtcatccttctccggcgtctccgttaagctcactccccaatccataacgttttcacgcttgaagcccctcaccgtctacgccgccaccaagaaggccggcgcatnccataaggggaccatcgcc

SEQ ID NO: 120019 - DNA, 183 bp, Glycine max
gccgattgggacggcggcgcagagccaagacgacggcaaggactaccaggagccggcgccggcgccactggttgacccgacggagtttacgtcatggtccttttacagagcagggatagcagagtttgtggccacttttctgtttctatacatcactgtcttaaccgtcatgggagtcgccgg

SEQ ID NO: 120020 - DNA, 249 bp, Glycine max
tctcgagccgaatcggctcgagcaaacactcttctctgcagcttttgcctacaactcgcttcaccatggctgaacaaaccgagaaagcttttctgaagcaaccaaaagtgtttctcagcacaaagaagactgggaagggaaagagacctggaaaaggtgggatacgcttttggaagtccattgggcttggatttaagactcccagggaagccatcgaaggaacctatattgacaagaagtgccccttca

SEQ ID NO: 120021 - DNA, 245 bp, Glycine max
cttcctggcacactttgataagttttttgtgcagctccaatggcaacctctcaaatcacttcatcattgaggaacttgcctgcatttgaaaggtttcaaccttcaacgcttcgatttccttctgctgggcacgtcagaattgggacactgacacaaacctcgtttccctctttcgttgtcaaagccgccactgttgtcgcccccaagcacaccactgttaagcctctgggtgatagagtactggt

SEQ ID NO: 120022 - DNA, 245 bp, Glycine max
ggctttctctaagaacttaaagcttggtatccatgaggattcccagaacaagggaaagattgctgaattgctcaggtaccactccaccaagagtggtgatgagctgacaagcctcaaggattatgtgaccaggatgaaggaaggtcagagtgacatctactacatcaccggtgaaagcaagaaggctgttgagaactccccattcttggagaagttgaagaagaaagggtatgaggttcttttca

SEQ ID NO: 120023 - DNA, 240 bp, Glycine max
ttttatccccagaaaatggacgtgcgccggcgagtcctccgtcccgctcccgccggcgaacccttgaagcccaaacaggacccacacccacactcccagcagcaatcgtacctcaccaacgccgtgttcttcgggctgttcttctcgctggcgtacttcctcctccaccgatggcgcgagaagatccgcacctccactcccctccacgtcgtcacgctctccgagatggctgccatcgtc

SEQ ID NO: 120024 - DNA, 239 bp, Glycine max
attggctaaggcattgtctggcaacaaggatgtggccttcttctctgctaatgctgcagctcaggcttcaaggaagtcctctccaagagtgaccaacgaggctgttcagaaggctgctgctgcattgaagggttcagatcatcgccgtgcaacaaatgtcagtgccagactggatgctcaacaaaagaagctcaaccttccaatccttccaaccaccactattggatccttccctcaga

SEQ ID NO: 120025 - DNA, 221 bp, Glycine max
gttcttcttcgtcgttatcttcttcttttgttgtttgtgtgtttgttttttctctcacctgaaaatgtcttgctgcggtggtaactgtggttgcggaagcgcctgcaagtgcggcaacggctgcggaggctgcaagatgtacccagacttgagctacaccgagtcaaccaccaccgagaccttggccatgggagatgcaccagataaggcacaagtcgaga

SEQ ID NO: 120026 - DNA, 180 bp, Glycine max
gtgctctgctcgtgcctctagggttatcatatctccatttccatttcctctctctcagtttccaagaatcttaagctatgggaaagtcttacccaaccgtgagcgctgattaccagaaggccgttgagaaggcgaagaagaagctcagaggcttcatcgctgagaagagatgcgctcctc

SEQ ID NO: 120027 - DNA, 239 bp, Glycine max
tataagctagtttatcgtgaggagaatatgaagttgtttgttttctttgttgctgcagtagttttggtagcatggccatgccatggcgcaggctaccaaaggttccctctccgaatgaaaactggctatggtgagcgttcttcggaggtaaaatgcgcaagttttaggcttgctgtggaagcacacaacatccgagcgcttaaaaccaatccataagagctcgattacccaacaaagga

SEQ ID NO: 120028 - DNA, 166 bp, Glycine max
acttgggctttcccatggttttcttcttgggcatttacaatcattgggacttgactttccatagaacattagtgtaattgctgtgtgcccaaagggaatgggtccatctgtaaggaggctctatgtccaaggcaaagagataaatggtgctggaattaatgcaagt

SEQ ID NO: 120029 - DNA, 254 bp, Glycine max
ctctctacgctttctcgttcgagatccctcaagggatccactaactgaaggagaaatggggttgacattcaccaagcttttcagccggcttttcgccaagaaggaaatgcgaattctgatggtgggtctcgatgcagctggtaagaccaccatcctgtacaagctcaaacttggagagatcgttaccacaattcccaccattgggttcaatgtggagactgtggaatacaagaacattagtttcactatctggg

SEQ ID NO: 120030 - DNA, 267 bp, Glycine max
tgcgactcgagtgtttctccgagaatcacatccaacgcttatgtcatggaggtcgttaacgttgtggacactaaggatggaactgtctcagtagctgctgcgtttgctggtcatcaggaagccgtgcaggatagagaccacaaatttttaagaaaagctgttgaagaagcatataaaggggtagattgcaaagatagaggcccttttagtgctgttatagttcataatgatgaaatagttgctagttgtcacaacatggttctgtgt

SEQ ID NO: 120031 - DNA, 253 bp, Glycine max
cgctcgagcggctcgagccgctcgagccgctcgagccgttcgtgtctccaatacacttggagtgtcgcaacgaagagcagccatctactctagctgcgtgacaatgtttcagtctctcctccttggcattgttttcatgattgccattttcttgagtaaagatgcgtttgccaagatctttaccgacagtgaggatatgatacgagctgttgctgatttagcataccttcttggtgtatcgatggttatcaat

SEQ ID NO: 120032 - DNA, 247 bp, Glycine max
ggcggagaaaaacccgttcaccccaaaagccttcgcgattcggtattgggacaaagagatccgcagcgggttaccgaagccaccgtttcttgtatcaaaggcgtcgccgctgagcgcggcggaggcggcggcgttcttaaagctcgtctccgggaactcgctctccacgcggctgccggaattctgcgccgccgcgaagctcctctgcttcccggagtggggccccgccacgagaaacacgacaaag

SEQ ID NO: 120033 - DNA, 240 bp, Glycine max
tcctggtatgaggccacgtgcacttcccgtgccaaatttcttagtgccaatggttcagcagggacaacagggacagcgtcctggtggacggcgtacaggtgcagtccagcagtcccagcagcccgttccactgatgccacagcagatgctacctagggggcgtgtctatcgttatcctcctggtaggggtatgccagatgtttctatgcccggggttgctggaggtatgttttctgttcc

SEQ ID NO: 120034 - DNA, 200 bp, Glycine max
gaatggctcccacgggtttaatctttttggctgtgttatgcttctcagcactgtcactgagtcgttgtcttgcggaggataatggacttgttatgaacttctacaaggcatcatgccctcaggctgaagacatcatcaaagaacaagtcaagcttctctacaagcgccacaagaacactgctttctcctggctcagaaac

SEQ ID NO: 120035 - DNA, 240 bp, Glycine max
gtcgtctcttgcgctgacctcgttgttctagccgcacgcgatgctgtttctctgtcaggggggccaatatttcccgtgccactgggaagaaaagatggtctaactttcagcatagacggcacaggaaaccttccgggaccgtcttcccgaaccggccagctcctcgacagatttgccggcagaaacttcgacgccaccgacgaggctgcgctctcggcgctcacaccttcggagggccca

SEQ ID NO: 120036 - DNA, 222 bp, Glycine max
cagaaagcaagctcatcctagagttttaaaaatggcagcagcctcctccatggctctctcttccccatccttggctggcacggccgtgaagctgggcccatcagcccccgaagtcgggagggtcagcatgcggaagaccgtcaccaagcaggcctcctccggaagcccatagtacggcccagaccgcgtcaagctacttggccccatcacatgcgagccccc

SEQ ID NO: 120037 - DNA, 243 bp, Glycine max
cttacccatcaaatgaaaatgaacacctgaaaagcccaaggaatgatggagatggcaaccaaaaaggctcaaaggtgtcagctcctgtcaaacctgaaacacaaaaggcacctccacctattgaagctccagccttgtctttagatgagctgaaggagaagactgacaactttggttcaaaggcattaataggtgaaggatcgtatggacgggtgtattatgcaaccttaaacaatgggaaag

SEQ ID NO: 120038 - DNA, 238 bp, Glycine max
cttcttctcttgcggctatggttttagcgcagttcttctagatttaaggaagatgggtaaggataaggttcacatcagtattgtggttattggccatgttgactctgggaagtccactaccactggccacctgatcgacaagcttagaggcattgacacgcgtgttattgagagatttgagaaggaagctgctgagatgaagaagaggtcttcatgtatgcctgggtgcttgataagc

SEQ ID NO: 120039 - DNA, 241 bp, Glycine max
gtgagctctgatgatgaagcgtcggttcctttgtagttctcttgactctctatgtcacagtggagcagagtaagctactccaccacgtagacgccgatggtgggtttgtaaaaacaagaggagtgcagcttatgctgaatgggagtccctactatgctaatggctttaatgcctattggcttagttaccttgcctctgatccttcccagagaaacaaaatctcatcggtatttaacaggct

SEQ ID NO: 120040 - DNA, 238 bp, Glycine max
gcgataactagaaacagtgtgatgaaaatgaaggtccttgttttcttcgttgctacaattttggtagcatggcaatgccatgcgtacgatatattccctctccgaatgaacactggctatggtgcccgtactccggaggtgaaatgcgcaagttggaggcttgctgtggaagctcacaacatctttggctttgagaccattcctgaagagtgcgttgaagcaacaaaggaatacatcc

SEQ ID NO: 120041 - DNA, 253 bp, Glycine max
cggaatcggtcgaggtgagaaatgatgatgaagcgtcggttccttttggttctcttggttctctatgtcacagtggcgcagagtaagctactccaccacgtagaagccgatggtgggtttgtaaaaacaagaggagtgcagcttatgctgaatgggagtccctactatgctaatggctttaatgcctattggcttatgtaccttgcctctgatccttcccagagaaacaaaatcgcatcggtatttcaacagg

SEQ ID NO: 120042 - DNA, 240 bp, Glycine max
  unsure (1)..(240): unsure at all n locations
gatggatctcatgacattcacaagtgtgctgccgtcaccgagcgtgtccttgcagcatgctacaaggctttgaatgatcaccacgtccttcttgagggtaccctattgaagccaaacatggtcacccccggatccaattctgctaaggtttcccctcaggtggttgcggagacactgttagagcccttcagagaaccgtgcctgctgcagttcctgctatgtttctnnncggnnggcaga

SEQ ID NO: 120043 - DNA, 217 bp, Glycine max
ctttagccgaggtcaggaggagcactagctaagttcacaatttcaaaatggctaggggactaaagaagcatttgaaaaggctcaatgctcctaagcattggatgcttgacaaactgggtggtgcatttgcgcctaaaccctcatctggaccacacaaatcgagggagtgcctccccctcattcttattctgcgaaaccggctgaagtatgctcgaca

SEQ ID NO: 120044 - DNA, 231 bp, Glycine max
attcgcacgcattgcttcgcctcacaacagcagctgcagcagcaatggctcccaaacgaggtggaaaggctccggctcttgccgctaagaagaagcctgagaaggtcacgaatccgttgttcgagaagcgtccgaagcagttcggaatcggaggggcgttgcctccgaagagagacttgactaggttcgtgaagtggccaaagaactgtcaacattagaggacgaagagga

SEQ ID NO: 120045 - DNA, 253 bp, Glycine max
ctcttcttctcttgcggctagggttttagcgcagttcttctagatttaaggaagatgggtaaggcaaaggttcacatcagtattgtggttattggccatgttgactctgggaagtccactaccactggccacctgatctacaagcttggaggcattgacaagcgtgttattgagagatttgagaaggcagctgctgagatgaacaagaggtctttcaagtatgcctgggtgcttgataagcttaaggctgagc

SEQ ID NO: 120046 - DNA, 251 bp, Glycine max
ttaaagttacatagtttttcattgttttacttaatctacaatggctgcttcaacaatgactctctcttcatcatcattggctggccaagctatcaagcttgccccctccacccctgagcttggtgttggaagggttagcatgaggaaaacagcctccaagactgtttcctcaggaagcccatggtacggcccagaccgtgtcaagtacttgggcccattctctggtgagcccccatcctatctcactggtg

SEQ ID NO: 120047 - DNA, 229 bp, Glycine max
cggagctcgaccaagaagaatcgcagagagaagagggtcagagtgagaaagagagagagagagagagaaactgagagacattcgcaaaccctaatttcggaaagatcggcgatggctgcctccaaggatcgcgagaacttcgtctacatcgccaagctcgccgaacaggccgagcgatacgaagagatggtggaatcaatgaagaacgttgcgaaagctcgacgtgaac

SEQ ID NO: 120048 - DNA, 225 bp, Glycine max
cgcgtcgctccgcaccagtttcaccgcacgaatatcttactgtttggagcgatccgagaaaaactctgtaaacatgttggtttaccaggacctccttacaggtgatgagcttctctctgactccttccgttacaaggaaattgagaatggaatgctgtgggcaattgaggggcagtgggttgttaaaggagcaattgatgtagacattggtgcaaacccttctgc

SEQ ID NO: 120049 - DNA, 206 bp, Glycine max
gtctgttcaagttgcttctgaagtacaggcccgaggacaaagctgaaaagaaggagaggctcttgaaaagggctcaggcagaggctgaaggcaaaactgttgaagctaagaagcctattgttgtgaagtatggtctcaaccatgttacctacctcatcgagcagaacaaagcacagctcgttgtgattgctcacgatgtggacccc

SEQ ID NO: 120050 - DNA, 202 bp, Glycine max
ctgtatggggataatgtggaggtagactatcgtggctatgaagtgacagtggaaaattttttacgggtacttaccggacgtcatgagacatctgttccaaggtccaagcgacttcttagtgatgacggaagtcatattcttctgtatatgacagggcatggaggtgatgagttttgaagtttcagattcgaagagcttcaag

SEQ ID NO: 120051 - DNA, 246 bp, Glycine max
ggacacccacgaagcacaagttcagtttgctcttgaaagaggagttcctgcattaattggggtcctagcatcaaagaggttgcctttcccttctagagcttttgacatggcacactgctctcgatgcctcattccttgggctgaatatgatgggctttatctgaatgaaattgatcgaattctacgccctggtgggtattggattctatctgggccaccaatccggtggaagacacattggaaagg

SEQ ID NO: 120052 - DNA, 237 bp, Glycine max
gcattgatcaggaaggacgctttcagaggcgaaaggccatggggagataccgtctgtgatccatggatctccgatcgggaaaccgtatccaagctccgcggctagtctgcgctctttggacttttaaaacttagcgaactgaaacatcttcttagctaaaggaagggaaatcaaccgagaccccgttagtagcggcgagcgagagcgtattgggagtttaagaaaaacaaacacgaa

SEQ ID NO: 120053 - DNA, 221 bp, Glycine max
cgacgctcacgattcggctcggcggctcgagcggctcgagcggctcgagcttcccttcactagcagttctgccacatattagcattccggcgcaaaatgaaggtcatcgccgcctacttactcgccgttttgggaggcaacgcagccccttccgccgatgacttgagggacatccttggctccgttggagctgacgcgaacgatgacaacatcagcaactt

SEQ ID NO: 120054 - DNA, 120 bp, Glycine max
tggcgaacatagacatcgaagggatcttgccgcagcagcagccttatgataagcgcgttccgatgacaatgatagtgtgtacttagggccccgcttctcattccgactaaataaccgacc

SEQ ID NO: 120055 - DNA, 238 bp, Glycine max
tcttccaggggcatagaactcacaaagttagacggtggaggaaaaccagtgggtggcagtgtggggagagtgttatactcttctccagtgcacctttgggaaagctctacagtggtcgcaagctttgaaaccgacttcaccttttccatctcatcagactctactactccaggtgatggccttgccttcttcattgcaccatttgacactaaaatccctccaaactctggcgggagca

SEQ ID NO: 120056 - DNA, 214 bp, Glycine max
ggaaaaaattgcataacactatcctggagctaaaaggaaatattcgcgtgttctgccgtgtccgacctttgctaccggatgatggtcctggaacagatatggttgtttcatatcccacgtcaaccgaagctcttagccggggtattaaattactacagagcgggcagaagtacccttttacatttgacaaggtatttaatcagaggcttacagc

SEQ ID NO: 120057 - DNA, 239 bp, Glycine max
ctaccctcttcttccccagcatcacaccacgcaaacctcactctccctgccatggtcatgggagcctttcgccacttcgaaccggtttccaaatgcagcaccgaaaaccggtttaaccataccgtggcctcggacttggacggcaccctcctggtgtcccctagcgcctttccttactacatgctcgtcgccatcgtagccggcagcttcctccgaggccttatcctccttggatccgt

SEQ ID NO: 120058 - DNA, 218 bp, Glycine max
gcgaggtgtagacatgatgtgatgtgatgaattgaggggaatccattgaagaggcgaggcgagttaatcagaaatcagaatgcacttgagcgagcacgaagggatagaggggaaggccttcgtggtcaccggtggactgggattcgtaggatctactctctgcttggagctcatccgcagaggtgctatagaggtgcgagcctatgaccgccgcctct

SEQ ID NO: 120059 - DNA, 230 bp, Glycine max
ctgtctctgtgtttgcggctgaggattccgaacgagcgaccttcttcgtttctcgcaaagtttaagtcatcatgggtaaggaaaagactcacatcaacattgtcgtcattggacatgtcgactctgggaagtcaactaccactggtcatttgatctacaagcttggaggtattgacaagcgtgtgattgagaggttcgagaaggaggctgctgagatgaacaagaggtca

SEQ ID NO: 120060 - DNA, 223 bp, Glycine max
gggaaacccatcaactctcgtggtgccacaaaggccgatccatctgcctctagtcctgcctccttcaagactgtggctcttttctacccaaagaaggctacaccaacacctccaaaaaaagctgctgctgctgctcctgccaatgatgagcttgccaagtggtatggtcctgacagaaggatcttcttgcctaagggcctcttgaccgaatcgaaaacccaga

SEQ ID NO: 120061 - DNA, 216 bp, Glycine max
ttatcccttacctggatgtatttctcactggttttcttggaaagagatatcaatcctaccaattcaatggcattctttatgtctaggcttgtttgcttcaattattgcaccttttggaggcttctttgcaagtggctttaaaagggcttttaaaataaaggactttggtgatagtattccgggacatggtggaattccgacagaactggatgccag

SEQ ID NO: 120062 - DNA, 232 bp, Glycine max
gttcactgcagctacacttgagcatggaatgcatcctcctgtgtcaccgaaaccagaatggcgcgccctcatggacgagatggctgtcattgcaacaaaggagtatcgctctgttgttttcaaagagcctcgttttgttgaatatttcagatgtgcaactcctgagttggagtatggaagaatgaacattggcagtcgtccatcaaagcgaaagccaagtggaggaattgaa

SEQ ID NO: 120063 - DNA, 226 bp, Glycine max
cacctttgttcactcttacttctcttagcggctagaggttttacgcgcagcttcttctagctttacggcagataggtaaggacaaggttcacatcagtattgtggtcattggccatgtcgactctgggaaatccactaccactggtcacctgatttacaagcttggaggcacggacaagcgcgctaatgagaggcttgagcaggccgcagccgtgacgtacaagag

SEQ ID NO: 120064 - DNA, 232 bp, Glycine max
  unsure (1)..(232): unsure at all n locations
cggcaattaatttacaatggccgtcacgaaaagcctctcaatcttcctcttcatcgcaatgagctgcgtcgccgcagctcaggcagcgaacttcaacatcacaaataactgcacctacacggtgtgggccgctgccgtgcccggcggcggcgcaaggcttaaccctggcgaatcgtggaacatcagcgngacgaacggcacaacaggaggacgcaacctgggacgaacaaac

SEQ ID NO: 120065 - DNA, 227 bp, Glycine max
ctcctctctctcttttgctcatttcctttgactcctcattatcaaagaaaatggctctcattgggttgctcttgatgggttttctcacaatgttctcctctgctcatgcctatggtggagggtggactaatgctcatgccaccttctatggagggagtgatgcatctgggacaatgggtggggcatgtgggtatgggaatctctcagccaagggtatgatcaaacac

SEQ ID NO: 120066 - DNA, 234 bp, Glycine max
gtggtgccttatcgctgtggttacgatcttcttcttcctctttcttagatctcttctttctctacgccgcacgccgaaaccatggccggaaaaggagagggtcctgctatcggcatcgatctcggaaccacctactcttgcgtcggtgtgtggcaacatgaccgcgttgaaatcatcgccaacgaccaagggaacagaaccacgccgatctacggcggaatcacagacaccgag

SEQ ID NO: 120067 - DNA, 236 bp, Glycine max
  unsure (1)..(236): unsure at all n locations
gctgtgtgagagaaagagaaatggcaacaagcgaagaagtggttgcggcggcgcggaggcagccgcgccggaggagggttgaagcacaaactggagagaaaatggacgttttggtgcgacaaccaatccaaacccaagcaaggcgctgcttggggaacctctcttcgcaaggatctacaccgcgacaccggtgaagagatcaggcgattgaangaacaggatatcaagcccagcaa

SEQ ID NO: 120068 - DNA, 276 bp, Glycine max
cacccatgttgctgctggagaaccacccaattcacctgaaccctgctcactacattagtgagattattagagaaggcactaaaaatggcactgctttctttaagtgccatggccatgagcaatttgagatgacaggtttggaccctgagtataatagattgttcaatgagggcatggtgtgcactgctagggttgtgtccaaggctgtgatcactgggtacaaagatgggttcaaccagattaagtccttggttgagtttggaggtggcattggag

SEQ ID NO: 120069 - DNA, 276 bp, Glycine max
ggcgaagagatggccaccgttccagggcagctcgtgtgggagatcgtcaagaaaaacaattccttcttggtcaagcagtttggaaggggcacccagagcgtcgaattcagcagagagagcaacaatctctacaacctcaattcgttcaagtactctggtttggcaaacaagaaaactgttactgttcagcctgagggcaaagatcaggctgtgttgttggctacaaccaagacaaagaagcaaaacaagcccgctgcattgctccacaaatctgtg

SEQ ID NO: 120070 - DNA, 271 bp, Glycine max
ctttttctaccaatacaacccgaacggtgcagtttggggtgacatagtttggggacatgcagtttcaagggacatgatccattggcttcacctcccactggcaatggtggctgatcaatggtatgacatgcaaggtgtgtggacaggctcagccacaatcttaccaaatggtgaaatcatcatgttatacacaggttccaccaacgagtcagtgcaggttcaaaaccttgcataccctgcaaacccctctgaccctctccttgtggattgg

SEQ ID NO: 120071 - DNA, 279 bp, Glycine max
attcaacaagatcccgagctccaagcttggtggaaagaacttgtccaagtgggtcatggtgatttgaaagataagccatggtggcaaaagatgcaaactcgtgaagagttgattgaagcctcggctaccctcgtatggatcgcttcagcccttcatgcagctgttaactttggacagtatccatatggaggtttaatcctaaacaggccaaccattagcaggagattcatgcctgagaaagggtctgctgagtatgcagctttggctaagaaccctgag

SEQ ID NO: 120072 - DNA, 279 bp, Glycine max
gagaattcgtaaaccctaatttcggaaagatcggcgatgactgcctccaaggatcgcgagaacttcgtctacatcgccaaactcgccgagcaggccgagcgttacgaagagatggtggaatcaatgaagaacgttgcgaatctcgacgttgaactgacggtggaggagcggaatttgctttctgttgggtacaagaatgtgattggtgctcgcagagcgtcctggaggatcctgtcttccattgagcagaaggaagaaacaaaagggaacgagttgaat

SEQ ID NO: 120073 - DNA, 279 bp, Glycine max
gcgttgggaagcccgaggcggtgctggtggagctcgccaaggccgtcggggccgacgccgtgtacgcgcaccgagaggtctcgcacgacgaggcgaaggcggaggagagggtggaggcggccatgaaggaggagaatgtggaggtgaagtacttctggggaagcacgttgtatcacgtggacgatttgccttttcaattggaggacatgccttccaattacggagggtttagggatagggttcagaaattggaggtaaggaagacaattgaggcattag

SEQ ID NO: 120074 - DNA, 281 bp, Glycine max
gcagtttcctcgctctcttttctgcaattttcttttttgttccttctctgcggttatctttttgagcttcaatggcggacgctgaaaccttcgctttccaggctgagatcaaccagcttctcagcctcatcatcaacaccttctacagcaacaaggagcgtttgttgcgtgaactcatcagcaacgcttctgatgctttggataagattcgatttgagagtttaaccgacaagagcaagctcgatgctcagccagagctcttcattcgtcttgtgcccgag

SEQ ID NO: 120075 - DNA, 276 bp, Glycine max
gaaaaacacacacggttggttcattctctctcttttctttttcctcaaaaagttgaaaaagaataaagggggaacaatcgagtgaagttgttgctcttcaatagtaaacttacctatggaagagggaagggttgtgagtgagtacacaaaagatggaactgtggatcttaaagggaaacccattctcaaatccaaaagtggtggttggaaagcatgctcctttgttgttgtgtacgagatatttgaaagaatggcttattatggaatatcatcaaa

SEQ ID NO: 120076 - DNA, 273 bp, Glycine max
ggttcctctttccttctctagcacaatttacaatctcaatggctggaatttgctgtggtgttgttggagaaggtgacactccggctccactcgagcccactcctcgcccctccaggcgccggagtttggacatcttacctttaaaatatatcgccgacatgcccatgccgccgccggagggtttacggaagcgtcccaagctcaacctcagggactgcgataacgcaattgagaattgcgacgaatccactggacacaaggtgacgaagaagg

SEQ ID NO: 120077 - DNA, 272 bp, Glycine max
aacaacagcacaaagcgggttactgtctgttcaagctaccatctctctctctctttcttagtgcctccttgccagaagttaaaatggcccaagaaactttcctattcacatctgaatcagtgaacgaggggcaccctgacaagctctgtgaccagatctccgatgctgtgctcgatgcatgcttggagcaggaccctgacagcaaggttgcctgtgaaacctgcaccaagaccaacatggtgatggttttcggagagatcacaaccaaggcg

SEQ ID NO: 120078 - DNA, 276 bp, Glycine max
ccgacgagaacatccgcgacgaggcccgccgcatcaatgctccccacgaccaccacctcttctcggccaaatacgtccctttcaatgccgacccttcctcctccacgacggagtcctactcgctcgacgagatcgtctaccgctcccaatccggtggcctcctcgacgtccagcacgacatggacgccctcaagcgcttcgacggcgagtactggcgcaacctcttcgactctcgcgtcggcaagaccacctggccctacggctccggcgtctgga

SEQ ID NO: 120079 - DNA, 275 bp, Glycine max
cggtgttcacttgatctcatcataatcgtcagcgtcaattgaagaagatgccgatcagaaacatcgccgtcggaaggcctgaagaggcgactcaccccgacacgttgaaggcggctttggctgagttcatctcaaccttcatcttcgtgttcgccggctcaggctccggcatcgcctacaacaagctcaccgacaacggcgctgccacccctgccggcctcatctccgcctccatcgcccatgcattcgccctcttcgtcgccgtctccgtcggc

SEQ ID NO: 120080 - DNA, 275 bp, Glycine max
tcttcgagttgtaacctctctcttcaaccctaacttagggtttatgttctaaaacccttttcaggttgattggaggagataaaaatgctcgtgttgtttgaaacccctgcgggttttgccctgtttaaagtgctggatgaaggcaagctttctaaagttgaggacttgtggaagaacttttccagtgcagatactgctagacaggtggtcaagttgaaagcattttctaaatttgagaacacttcagaagctctagaggcagctactttacttat

SEQ ID NO: 120081 - DNA, 278 bp, Glycine max
caaaaacccaacacaccacactcttgcaatcaatcaatggcggaaccttcctcctcgaagcccgccgtccctctcctgaaggacgagctggacatcgtgatcccgacgatccgcaacctcgacttcctcgagatgtggcggcccttcttcgagccctatcacctcatcatcgtgcaggacggagaccccaacaggaccatcaaagttcccgatgggttcgattacgaactctacaaccgcaacgacatcaacaggatcttgggtcccaaggcctcctg

SEQ ID NO: 120082 - DNA, 106 bp, Glycine max
agcaggtctcctcaggaagcccatggtacggcccagaccgagtcaagtacttgggcccattctctggcgagcccccgtcctacctaaccggtgagttcccaggcga

SEQ ID NO: 120083 - DNA, 285 bp, Glycine max
caagtaactgttgagtactacaatgacaatggtgccatggttccagttcgtgtccacactgtcctaatttccacccaacatgatgaagatgtgagcaatgaccaaattgctgctgaccttaaagagcatgttatcaagcctgtcattcctgagaagtacctggatgagaagaccatcttccaccttaacccttctggccgttttgtcattggtggccctcatggtgatgctggtctcactggaagaaagatcatcattgatacctatggtgggtggggtgctcat

SEQ ID NO: 120084 - DNA, 267 bp, Glycine max
caacaatttcgggaatccgctggctatgactgcagttgtggtcgtcccattgggccttctcttcttcgcttccggtctcatcgttaacctcattcaggcaatatgctacgtggttgtgcggccggtgtcaaagaatttgtaccggcggatgaacagggtggtggctgaactgctgtggctggagctcgtttggattattgattggtgggctggtgttaaggtccaagtattcacagatcctgaaacctttcattcaatgggtaaaga

SEQ ID NO: 120085 - DNA, 272 bp, Glycine max
gccgcagcttgaaacagagcagagcgaccttgaagagctatggctgtcggaaagaataagaggatttccaagggaaagaagggtggcaagaagaaagccgctgatccctttgccaagaaagactggtacgatatcaaggccccttccctcttccaggtcaagaatattggcaaaaccctcgtctctcgtacccagggaaccaagattgcatccgaaggactcaaacatcgggtttttgaggtctcattggctgatctccaaggggatgaaga

SEQ ID NO: 120086 - DNA, 273 bp, Glycine max
ctctttttcttctctctcaacaacttcaccttcttcctcctcgatcatgtctcacttcaagggcaagtaccatgatgagcttatcgccaatgctgcgtacattggcactcctggaaagggtattcttgctgctgatgagtcaacagggacaattggcaagcgtttggccagcatcagtgtagagaacattgaatccaacaggcgagctcttagggagctgcttttcactgctcctggtgttcttcaatatctcagtggtgtcatcctctttga

SEQ ID NO: 120087 - DNA, 275 bp, Glycine max
cgagggccaatttccaaaaaccttttgtctcgcaacctcacctcttcctccttcaatctctttcggaatttcccaaaatccttagtgggaggaagagatggttctgactcagaagattcacgaagctttcaaaggcaccgtcgagaggatcactggcccccgaaccgtttccgccttcaaagaaaaaggagttctcagtgtctccgagttcgtcaccgccggcgataatctcgttgccaaatgccccacctggtcctgggaatcgggtgatccag

SEQ ID NO: 120088 - DNA, 275 bp, Glycine max
attagttcattctctttgcgcagttccctacctctcctttcaagatgcagatcttcgtcaagaccctcaccggaaagaccatcacccttgaggtggaaagctctgacaccatcgacaacgtcaaggccaagatccaggacaaggaaggaattcccccggatcagcaacgtctcatcttcgccggaaagcagctcgaggacggccgtaccctcgccgactacaacatccagaaggagtcaacccttcaccttgtccttcgtctccgtggtggcatg

SEQ ID NO: 120089 - DNA, 274 bp, Glycine max
cggtgttcacttgatctcatcataatcgtcagcgtcaattgaagaagatgccgatcagaaacatcgccgtcggaaggcctgaagaggcgactcaccccgacacgttgaaggcggctttggctgagttcatctcaaccttcatcttcgtgttcgccggctcaggctccggcatcgcctacaacaagctcaccgacaacggcgctgccacccctgccggcctcatctccgcctccatcgcccatgcattcgccctcttcgtcgccgtctccgtcgg

SEQ ID NO: 120090 - DNA, 274 bp, Glycine max
cggggaatgaaggaaccaacaatgagaagacatccaatctgactcaaacaaagttggagaagaggtttggacagtctccagtatttgtagcctccacacttttggatgatggtggagttccacatggcgtgagtcctgcatcacttttaaaagaagccatccaggtcatcagttgtggttatgaagacaaaacagaatggggaaaagaagttgggtggatatatggttctgtgacagaggatatcttgactggatttaaaatgcattgccatgg

SEQ ID NO: 120091 - DNA, 277 bp, Glycine max
gtggttgcgcctctgcctgtaagagtgaaaaaaccttctcttttccttctctcaagtctcaagagatttcatcatggctccaaagaaggacaaggctccaccaccttcctccaagcccgccaaatctggcggtggcaagcagaagaagaagaagtggagcaagggaaagcaaaaggagaaggtgaataacatggtgctgtttgatcagggcacctatgataagctcctttctgaagctcccaaattcaagctcatcactccttccattctttctgat

SEQ ID NO: 120092 - DNA, 281 bp, Glycine max
atatagcccaagccctatacaaccaaaccctaacacacacccatttgattcagtttccatggctagcctcaaggttgcatttttggctgcagtgctctgcatggttgtggtgagtgcacccatggcacatgcagctatcacgtgcgggcaggtgacgaatagcctgatcaattgcatcggttacctccagaacggaggaacgccgccgtcgggatgctgcaacggagtgaagagcctcaatgccgccgccaagaccaccgccgaccgccagacggcgtgca

SEQ ID NO: 120093 - DNA, 268 bp, Glycine max
actcagggtagggcagagagagagagagagagagagagagagagagagaatgggagggtgggctatcgcggtgcatggtggcactggtgtcgaccctaatctcccactcgagcgccaagaagaagcgaaacaacttctcacgcgctgtctcaatcttggaatctcagctctaaattctaatcttcccgccatagatgtcgtcgaacttgtggtgagggaattggaaacggatccgctgttcaattcgggccgtggatctgccctgaca

SEQ ID NO: 120094 - DNA, 265 bp, Glycine max
atcaagtccaagaaccaacctaccttttgcaatctcaattcaatggcgtcctctctcattgcgaacgcttcctctcctcttccctcctctccaggtccctccttcgccccgccgcttccgcttcccaccgctctttcaacaccaacgccatgcgccagtatgacaaccgcgccgacgaccacagcaccgacatcgatcgtcactccgaacgctctttccctagcactgcgcgccgcgacgatatcttctcagatgtgttggatcc

SEQ ID NO: 120095 - DNA, 265 bp, Glycine max
gttcagggcagtttacaaagccaaattttgttccttagttgtttccttgttctctgtaactgatggctgattattcagcaggaactgaatcccaggaggtggtcgtaaatgtaaccaagaacacctccgaaacaatccaacgctcagactcccttgtctctgttcctttcttgcagaagttggtagctgaggcggtgggaacatatttcctgatatttgcagggtgtgcttcattggtggtgaacgagaactactacaacatgat

SEQ ID NO: 120096 - DNA, 263 bp, Glycine max
ctgcgaggcgaacagagagacccgaagccagatttcaagatgaagttcaacattgcgaatcccaccactggttgtcagaagaagctggagatcgatgatgacctgaagctacgagcattttgggacaagaggatctcacaagaggttgttggtgatgctctgggtgaggaattcaaaggctatgtcttcaaaattactggaggttgcgacaagcaaggatttccaatgaagcaaggagtgttgacccctggtcgtgttcgcct

SEQ ID NO: 120097 - DNA, 270 bp, Glycine max
gtggcctaccatggtggtgacgggtgacggagaattagggttcgattccggagagggagcctgagaaacggctaccacatccaaggaaggcagcaggcgcgcaaattacccaatcctgacacggggaggtagtgacaataaataacaataccgggctcattgagtctggtaattggaatgagtacaatctaaatcccttaacgaggatccattggagggcaagtctggtgccagcagccgcggtaattccagctccaatagcgtatattt

SEQ ID NO: 120098 - DNA, 268 bp, Glycine max
cctcgctctatttctcagtctctgtgtttgcggctgaggattccgaacgagtgaccttcttcgtttctcgcaaagtttaagtaatcatgggtaaggaaaaggttcacatcaacattgtcgtcattggacatgtcgactctgggaagtcaactaccactggtcacttgatctacaagcttggaggtattgacaagcgtgtgattgagaggttcgagaaggaggctgccgagatgaacaagaggtcattcaagtatgcctgggtgctcga

SEQ ID NO: 120099 - DNA, 271 bp, Glycine max
gaaccgtgttcatctactctgagccgcatcacttcccggaatcgtgcatccctacgttcaatatgtcgctggtggtcaacgaggatttccagcacatacttcgtgttttgaacacgaacgtagatgggaagcagaagataatgttcgctcttacctcaatcaaaggtattgggaggcgatttgctaacatttgctgcaagaaggctgatgttgacatgaacaaaagagctggtgaactgagtgctgctgagttggatagtgtgatgactgt

SEQ ID NO: 120100 - DNA, 132 bp, Glycine max
ggcacttggaatccaaaaatgagagaaatcatcagcattcacataggtcaggccgggatccaggttggcaactcctgctgggaactctactgcctggaacatggcatccagcccgatggcatgatgccaagt

SEQ ID NO: 120101 - DNA, 279 bp, Glycine max
ccgcactccgtcttcatcaatcagcatcaccaccgctccaacacaggggaaaatgagggagatccttcacgttcagggagggcaatgcgggaaccagatcggttcgaagttctgggaagtggtgtgcgacgagcacggcatagatccgacggggaagtacgtcggaaactcagatctacaactcgagcgcgtgaacgtgtactacaacgaagcttcctgcgggcggtttgtcccacgcgcagtgctgatggacctggagcccggaaccatggacagcgt

SEQ ID NO: 120102 - DNA, 280 bp, Glycine max
attcggctcgagctcgagccgaatcggctcgaggcggaatctgctagaattttctaagcctggcgaaagacgtaccgcaggtcacagagcaagacgaatactccgcgaaggactaccatgaccctcctccggcaccgttgatcgacccagatgagctcacaaagtggtccttgtacagagccgccatagctgagttcatagcaacactcctttttctttacatcaccgtgttgaccattattggctacaagagacagagtgacaccagaatccccggtaa

SEQ ID NO: 120103 - DNA, 263 bp, Glycine max
ctctcacgcagtcgcagtgagtgaaaaggaaaaccctaattgcggtattctcagtgccttcgagagaaagaaaaaatggcagataatcttgttctccgtggcaccatgcgcgcccacaccgacgttgtgacggcgattgccactcccatcgacaactccgacatgatcgtcaccgcctcacgcgacaaatccatcatcctctggcatcttaccaaggaggacaagacttacggtgtcccccgccgccgcctcaccggccattc

SEQ ID NO: 120104 - DNA, 265 bp, Glycine max
  unsure (1)..(265): unsure at all n locations
ctcaagtccaacctacccctttttcttctcccaccaacttcaccgtcntcttcctcgatcatgtctcacttcaagggcaagtaccatgatgagcttattgccaatgcggcttacattggcactcctggaaagggtattcttgctgctgatgagtcaacagggacaattggcaagcgtttggccagcatcagtgtagagaatgttgaatccaacaggcgtgctcttagggagctgcttttcaccgctcccggtgctcttaaatatc

SEQ ID NO: 120105 - DNA, 259 bp, Glycine max
ctccccggaatctatgacccggatttcattgctgccaaccaaggagcccgtgccactaacgtaatcaggggcacaaagaaagaacaagttcaacaaatcatcaaagacattaaggagttcaaagaaagcactaaggttgacaaggtggttgtcctgtggacagccaacacagagaggtacagcaacgtagttgtgggactaaacgacaccatggaaaacctctttgcttccttggacaggaatgaggctgagatttccc

SEQ ID NO: 120106 - DNA, 266 bp, Glycine max
ccacatcctcctcaaacccaacagcaagcatgcttttctctgctaccatgcccagttgggtgaagaagttggcgagaaaatatttgaacaatccactcacaattgatttggttggtgatgaagaggaaaagcttgctgaagggataaaactttatgctatagcagccactgccacttcaaagcggacaattctttctgatcttgtaactgtttatgcaaagggtgggaagactatagtttttacacagacaaaaagagatgctgat

SEQ ID NO: 120107 - DNA, 269 bp, Glycine max
gtctgcgacaacacaaaacgacatcactctgattgtctcattaacgtcgtcaaaaatgctgcaaacccgtcccggcggctccggtggccgcacggtgctggtgggggtgaagatggactcccccagcaaggaattgctcacatgggctttggtcaaagttgcacaccctggtgataccgtggttgctctgcatgttcttgggaacaatgaaaccgtgaatggagacgggaaatcgtcgctgctttcgcttgtcaaggcgtttgactctg

SEQ ID NO: 120108 - DNA, 270 bp, Glycine max
cttcaaaaacttgttcctcccttgcccttttcctcacactcaacctcgttttcttctcacttgtctctgcatgcggttatacaccatgccctggtccaaacccaaagccaaggcccaaccccaaccctaaccctaaccccagcccaagtggctcgtgcccccgtgacgcactcaaactaggtgtatgcgccaatgtgctaaacttggtgaacgccactttgggtcaaccaccagttaccccttgttgctcccttctcgatggtctcgttg

SEQ ID NO: 120109 - DNA, 270 bp, Glycine max
cttgcggctagggttttagcgcagttcttctagatttaaggaagatgggtaaggaaaaggttcacatcagtattgtggtcattggccatgtcgactctgggaaatccactaccactggtcacctgatttacaagcttggaggcattgacaagcgtgttattgagaggtttgagaaggaagctgctgagatgaacaagaggtctttcaagtatgcctgggtgctggacaaacttaaggctgagcgtgaaagaggaatcaccattgatattg

SEQ ID NO: 120110 - DNA, 262 bp, Glycine max
atcaggatcgccgagggttacgaaatggcgtccaggatcgccgtcgagcatctcgagcgcgtcgccaacaagttcgagttcgacgagtccaatttggagcccctcattcaaacttgcatgaccaccctctcctccaaaattgtgaatcggtgtaagcgtacttggctgagattgctgttaaggctgttcttgctgttgctgatctggcgaggaaggatgttaatttggatctaattaaagtggaagggaaagttgggggtaa

SEQ ID NO: 120111 - DNA, 263 bp, Glycine max
ctctccgccgccacctacttctggcccggctccgaggtacccaaaggcccctggacttgccctaaagccttttgccagccctacaacgaatccgtcccctttcaggacagagtagacactgttctcagctatttcgatttaccctctcatcaagttccttcctttattacgctctattttgaagaccctgatcatcagggtcaccaggttggccctgatgattctcaaatcactcaagccgttgcggaaattgatgccattgt

SEQ ID NO: 120112 - DNA, 258 bp, Glycine max; identical to SEQ ID NO: 118139

SEQ ID NO: 120113 - DNA, 263 bp, Glycine max
attcggcgacgatgatgggggaaggaccgagcaatggagggatgctgtaccacgaggtgcaggagtcgaagctctgcgcggtgcattgcgtgaacacggtgctgcagggcccgttcttctcggagttcgatttggccgcgctcgcctccgatctcgaccgcaaggagcgccaggtcatgctccccgcgctctcctcggcggatttcgaatcgcacaatgtctcgctcgacggcgatttcagcatccaggttttacaaaaggct

SEQ ID NO: 120114 - DNA, 266 bp, Glycine max
gagcgagcgacgtagggttttcgttgttcccccggctttgaattcagttcgcgacgatggggtccatccccgatccaggcgagttgagcgagttgactcagccgagcttcgtcgagttccagcgccaaacttccctcatgaccagctgctccctcctctggaaggagctctccgaccacttctcctccctcgagcaagtcctcaaccacaaatccgaagtcctcatacgcaagattcgcaccctcgacaacactacttccgactcc

SEQ ID NO: 120115 - DNA, 265 bp, Glycine max
cgagataactagaaacagtgtgatgaaaatgaaggtccttgttttcttcgttgctacaattttggtagcatggcaatgccatgcgtacgatatgttccctctccgaatgaacactggctatggtgcccgtactccggaggtgaaatgcgcaagttggaggcttgctgtggaagcacacaacatctttggctttgagaccattcctgaagagtgcgttgaagcaacaaaggaatacatccatggcgaacaatatagatcagactcc

SEQ ID NO: 120116 - DNA, 267 bp, Glycine max
gcagaaagcaagctcatcctagagttttaaaaatggcagcagcctcctccatggctctctcttccccatccttggctggcaaggccgtgaagctgggcccatcagcccccgaagtcgggagggtcagcatgaggaagaccgtcaccaagcaggcctcctccggaagcccatggtacggcccagaccgcgtcaagtacttgggcccattctctggcgagcccccgtcctacctcactggcgagttcccaggtgactacggctgggaca

SEQ ID NO: 120117 - DNA, 238 bp, Glycine max
ggcttcgtcgcgagtagatctggatgggaaccccataaagcccatcaccatttgcatgattggcgccggtggcttcattgggtcccacctctgcgagaagctcatgtcggagacccctcacagtgtcctcgccttggatgtctacaatgacaagatcaaacacctcttggaaccccacacgctcccttgggcctctcgcatccagttccatcgcctcaacatcaagcacgattcccgt

SEQ ID NO: 120118 - DNA, 269 bp, Glycine max
gtagaacccttccacggtggtgactgcgcgatgggtgcctacaagtatgtttcagagctatggcgcaagaagcagtctgatgtcatgcgcttcttgcagcgggtgaggtgctgggagtataggcagcaaccttccgatgttcgcttgacaaggtcgacccgccctgacaaggctcgtcgcttgggcttcaaggctaagcagggctatgtgatataccgtgttcgtgttaggaggggtggccgaaagaggccagttcccaaaggtattgt

SEQ ID NO: 120119 - DNA, 274 bp, Glycine max
cttatggtggatacctaggcacccagagacgaggaagggcgtagtaagcgacgaaatgcttcggggagttgaaaataagcgtagatccggggattcccgatataggtcaacctttcgaactgctgctgaatccacgggcaggcaagagacaacctggtgaactgaaacatcttagtagccagaggaaaagaaagcaaaagcgattcccgtagtagcggcgagcgaaatgggagcagcctaaaccgtgaaaacggggttgtgggagagctataca

SEQ ID NO: 120120 - DNA, 234 bp, Glycine max
atcgtcttctagggtaaccacggcgccactcgaacaagtgcggcaattcccaacgcttctcttctcagggggagttcgaatcctgtgagctttcaatatgacgtcgttcttgaagcctgagaatgctctgaaaagggcggaagaattaatcaatgttgggcagaagcaggatgctttgcagactcttcatgacctcatcacctcaaaacgatacagagcatggctttagacact

SEQ ID NO: 120121 - DNA, 230 bp, Glycine max
cgacacgttcaccacgtacgctaaatcctcggatggcgaaacaaaagtagggttcacttcctacggcgtaaacaacactttcaaggattacgagaaaaagggtaccactgtctcattcgccaggtacaccaacattagcacgaccctctcagtttcagcttcatcagtcagtggcagtttggtaaataagtgggtggagccgggtaagttttttcgtgagaagatgatga

SEQ ID NO: 120122 - DNA, 231 bp, Glycine max
gcagcactcacattcacaacgaaggtttcctattcatcagacatggtgaaggcaatcagagttcacgaactcggtggccctcaagttctgaagtgggaggatgtggaaattggagatccaaaagaaggcgaggtccgtgtgaggaacaaagccattggggttaatttcattgatgtctactttcgcaaaggagtttacaaagccccttcttttcccttcactccaggtatg

SEQ ID NO: 120123 - DNA, 231 bp, Glycine max
caaaaagaaagaatcccaggcgaggagaaagatggaggggaaggagcaggatgtgtcgttgggagcgaacaagttccccgagagacagccgattgggacggcggcgcagagccaagacgacggcaaggactaccaggagccggcgccggcgccgctggttgacccgacggagtttacgtcatggtcgttttacagagcagggatagcagagtttgtggccacttttctgtt

SEQ ID NO: 120124 - DNA, 229 bp, Glycine max
ggctgcttcgccggcgcgcaccgtactccgcctcgcgaaggacctacacgagaacaacaagggtgcgagggtgctcgttgtctgctccgagataaccgccgtgacgttcctcggcccctcggacacgcacctcgactcgctcgtgggacaggcactgttcggagatggcgccgcagcgttgatcatcggatcagaccccgacccagcagtggagcggccgatattcgag

SEQ ID NO: 120125 - DNA, 231 bp, Glycine max
tctgcagcgccttcgatctagaaaacatgactaagagaacaaagaaggctggcattgttggaaaatacggtacccgttatggtgccagtctgcgaaagcagattaagaagatggaagttagtcagcacagcaaattgttctgtgaattttgtgggaagtatgctgtgaagaggaaagctgtaggaatatggggatgcaaggactgtggtaaagtgaaagcaggcggtgctt

SEQ ID NO: 120126 - DNA, 235 bp, Glycine max
aaaccctcttttttctctctcttgcaaaacctaattttcatttcttccctcaaatttcaaaatgcgtgagatccttcacatccagggtggccaatgcggcaaccagatcggcgccaagttctgggaggtggtttgcgcggagcacgggatcgaccctaccggaaggtacggtggggactcggagttgcagctcgagaggatcaatgtctactacaacgaggccagttgcggtcgg

SEQ ID NO: 120127 - DNA, 232 bp, Glycine max
ccaatatagcccaagccctatacaaccaaaccctaacacacacccatttgattcagtttccatggctagcctcaaggttgcatttttggctgcagtgctctgcatggttgtggtgagtgcacccatggcacatgcagctatcacgtgcgggcaggtgacgaatagcctgatcaattgcatcggttacctccagaacggaggaacgccgccgtcgggatgctgcaacggagtg

SEQ ID NO: 120128 - DNA, 219 bp, Glycine max
gaataacctcggtactattgcaaggtctgggaccaaggaattcatggaagccctggctgctggtgctgatgtgagcatgattggacagtttggtgttggtttctactcggcttatcttgtagctgacaaggttattgttaccacaaagcacaatgatgatgagcagtatgtctgggagtcccatgctggtggctcatttactgtgacaagggatacatc

SEQ ID NO: 120129 - DNA, 231 bp, Glycine max
cccgtgagcatgctcttcttgctttcaccctaggtgtgaagcagatgatctgttgctgtaacaagatggatgccactacccccaagtactctaaggctaggtatgttgaaatcgtgaaggaagtctcttcttacttgaagaaggttggttacaacccagacaagattccctttgttcccatctctggttttgagggtgacaacatgattgagaggtccaccaaccttgact

SEQ ID NO: 120130 - DNA, 228 bp, Glycine max
ctgggtgggacactcctattcatgttgatgcagccagcggtgggttcatagccccatttatttacccagagcttgagtgggacttccggttacaactagtgaagagcatcaatgttagtgggcacaagtatggtttggtctatgctggaatcggttgggttatctggagaagcaagcaggacttgcctgaggaactcatctttcacatcaactatcttggggctgatc

SEQ ID NO: 120131 - DNA, 225 bp, Glycine max
gcttctcctggctcagcagttgcagctgacactgcagcagccatggcctcagcatctgtggtccttaaaaagactgatcctacatattcaagcactctaatcaagcatgcaacacagttggttacttttgctgaccagaatagagggtcctatagtgaggatataaccggagttcagacataatataactccactgggatatggtgatgagctttatgggcaact

SEQ ID NO: 120132 - DNA, 227 bp, Glycine max
ggcaattcaagcctttaagaagtttggaaacaagctgaaggaaattgaggacaaaatctcagggaggaacaagaattcaagccttaggaaccgtaatggaccggcgcagatgccctacactgtgcttcttcctaccagtggggaaggccttactttcagaggaattcccaacagcatctctatctaatgagagtgtgtggtctgtggtgtgtggttttctttccttc

SEQ ID NO: 120133 - DNA, 141 bp, Glycine max
cgtcttgcctgccattctgatcatatgtctcgaggtatgatagcggaattacaatctcctcccctgaaggaggtcttaaccaagtggaatatgctatggaggccattgggaatgctggtactgcaatagggatcttgtcaa

SEQ ID NO: 120134 - DNA, 226 bp, Glycine max
caaaacactcataacacaaagcacaaagcaaagctcatccttgagttaaaaaatggcagcagcttcttccatggctctctcatccccatccttggctggcaaggccgtgaagctgggcccatcagccccagaagtgggaagggtgagcatgaggaagaccgtcaccaagcaggtctcctcaggaatcccatggtacggcccagaccgagtcaagtacttgggccca

SEQ ID NO: 120135 - DNA, 229 bp, Glycine max
tagcacaaattctcaaacccaaatcccaagtctcctaaaaccctaattcgcagtgaaaatgagagagatcttgcacatccagggagggcactgcggtaaccagatcggagcgaagttctgggaggtgatatgcgatgtgcacggcatcgaccacaccggaaagtacagcggcgactccgagctccaattggagcgcatcaatgtttattacaatgaagccagcggcgga

SEQ ID NO: 120136 - DNA, 224 bp, Glycine max
cgcagagctgccccgcccctgaccccaacctctactacaagccagtcatcggaatcgtacaccatcccggcgacggcgcctccggccgcctcagcaacgccaccggcgcctcctacatcgccgcctcctatgtcaaattcgttgaggccgccggcgcccgtgtcgttcccctcatctataccgagcctccggagaagcttctcaagaagctcgaattggtaaat

SEQ ID NO: 120137 - DNA, 225 bp, Glycine max
tgcagcaatggcgcgagtggatctggacgggaaccccatgaaggcacttacgatctgcatgatcggcgctggacggttcataggctcgcatctctgcgagaagctcatgtccgaaacccctcacaccgtcctcgccctcgacgtctacaacgacaagatcaaacacctcctcgaaccctccgattccccctgggccggccgcatcaccttccaccgcctcaacat

SEQ ID NO: 120138 - DNA, 228 bp, Glycine max
cttgtcctggatcagacgttgcagctgaaactgcagcagcaatggcctcagcatctttggtctttaaaaagactgatcctacatagtcgagcactcgactcaagcatgcagaacagttgtttacatgggctgacgagaatagaggttcctatagtgagagtatacccgaagtccagacatattatagctcaactggatatggtgatgagcttttatgggcagctagtt

SEQ ID NO: 120139 - DNA, 224 bp, Glycine max
ctcattctgtgactctgtgcttagttaacgttaacagtgacttaagtaggcggattctgcagatgtcacccacgatgttgtgtccctcctctcttctcctcaaagggactttcttcttcgaaacaacggcgatcaggttaaaattgacagcttgaagggtaagaaacttggtttgtatttttcggcatcctggtgtggtccatgtcaaacatttacgccaactt

SEQ ID NO: 120140 - DNA, 208 bp, Glycine max
ggctcgagaaccatggcttccaagctctgcgactcatgcaaatcagcacctgctaccttgtactgccgccccgacgcggccttcctctgcggcgcctgtgactctaaggttcatgccgccaacaagctcgcatcgcgccacccgcgcgtcgtgctctgcgaggtgtgcgagcaggcgcccgcgcatgtgacctgtaaagccgacgccg

SEQ ID NO: 120141 - DNA, 221 bp, Glycine max
gtgaagtgagggctgggaaacaaaacatgtctagggcattgtttcatttgttgggtgttttgtggctgtgttggtgcttgacatcaattggagaagctcaattagagtacctaagatacaaagatccaaagcaatcggttcaaactcgggttagggacttgatgagtcgaatgactttagacgagaagattggtcaaatggttcaaattgataggagtgtt

SEQ ID NO: 120142 - DNA, 228 bp, Glycine max
gaggcagcatgttagggtttcgaaaagccaatttcagagagcagcttgaaaccctagattccacaaatccatgccagcttgatctcgcggtgcttccgtcaatggcgatcatcggcgatgcgcttcgccaggcgttcatgccgaagcgcgagtacgagagcctcagagaagaagacaaggcgtggggtaagcttcagagacccgtaacggtggcttccgtggccgtca

SEQ ID NO: 120143 - DNA, 222 bp, Glycine max
gttgtaactttttgattcctaaattctctaaaattcgaaattctaatttcgttaggggaaagagattgtttgtgtgtgagtgagtatggctggaaaaggcgagggtcctgctatcggaatcgatttgggaacgacgtactcttgcgtcggcgtgtggcaacacgatcgtgtcgggatcatagccaacgatcagggtaacagaactaccccatcctacgtggc

SEQ ID NO: 120144 - DNA, 226 bp, Glycine max
gtctgctgcaccttgcaatggtttcgctatcaacatggtttcgctacattgcccacaagctcgaatactccttctccctcagctggaagaactacaaaggaggtcaaattacagacagagaggtacgtgatgttgtttggaaaaacttctttcaaggaaagctgacgtacttgcactggaataaaggagaggagatggcccctactattgatggaaaagcagtaac

SEQ ID NO: 120145 - DNA, 226 bp, Glycine max
cacaaattctcaaacccaaatcccaagtctcctaaaaccctaattcgcagtgaaaatgagagagatcttgcacatccagggagggcaatgcggtaaccagatcggagcgaagttctgggaggtgatatgcgacgagcacggcatcgaccacaccggaaagtacagcggcgactccgagctccaattggagcgcatcaatgtttattacaatgaagccagcggcgga

SEQ ID NO: 120146 - DNA, 178 bp, Glycine max
agaacactctcttgaacattcatggatccagtgagcgtgtggggtaacacgcccttggcgacggtggatcccgagatccatgacctcatcgagaaggagaagcaccgccaatgccgcggcatcgagctcatcgactccgagaacttcacctccttcgcactcatcaaggccctcggca

SEQ ID NO: 120147 - DNA, 221 bp, Glycine max
cacaatggctctctcttcatcatcattggctggccaagctatcaagcttgccccctccacccctgagcttggtgttggaagggttagcatgaggaaaacagcctccaaaactgtttcctcaggaagcccatggtacggcccagaccgtgtcaagtacttgggcccattctcaggtgagcccccatcctatctcagtggtgaattcccaggtgactatggtt

SEQ ID NO: 120148 - DNA, 222 bp, Glycine max
ctaacctaaaccctactcattctccatacctcaacgaagaggttaaagagacggcaacactttgctgtccgccttgaccgagcagagcttcgtcttggccctcgattttgccctaaagtactctcagtcacaacagacaccgtcgtcgtcgtcgtcgtcatcaatggcaccgaagcagaccaaggctgagaagaagatcgcttacgatgcgaactgtgcgac

SEQ ID NO: 120149 - DNA, 224 bp, Glycine max
gggtattcttgctgctgatgagtcaacagggacaattggcaagcgtttggccagcatcagtgtagagaatgttgaatccaacaggcgtgctcttagggagctgcttttcaccgctcccggtgctcttaaatatctcagtggtgtcatcctctttgaggaaactctctaccagagcacagctgcaggcaagccctttctggaagtcttgaaggaggctggtgtgt

SEQ ID NO: 120150 - DNA, 222 bp, Glycine max
ctgctatcacttgcgatatgtcggattttcgaaaggattggctatcacttttattgatagtcacgtcttcacgttcatctataaacattaggcacttggagaaagctacagtttccactggcaaagaaggactattatcagtagggaatgctgcttacaattggtccagatgtgtagatgaattggaatctgtgctttcaaagcatggcagtcttaggaggc

SEQ ID NO: 120151 - DNA, 185 bp, Glycine max
tggagtcttcgacacgggcgtctggcccgaacgccgcagcttctccgatttgaacctcggccccattccccgccgctggaaaggcgcgtgcgaaaccggcgtcagattctcccccaaaaactgcaaccgcaagctatcggcgccagattcttctccaaaggccacgaggcaggtgcgggttcggg

SEQ ID NO: 120152 - DNA, 220 bp, Glycine max
  unsure (1)..(220): unsure at all n locations
tggagctcctcgggtacctgaatcagggtcacccttctagaggaacaacacttgttattactctttcatttgtgctttcgacacttgtgtccttctccactttcacacatgccttctcttctnctgcgtttccgaactgaatcctataaaacctaggcactcacgtcttctcaggagtgccgtgcaacatgaaactcctacatcacagctttctgaaata

SEQ ID NO: 120153 - DNA, 225 bp, Glycine max
gcaccaccatgccctcaccactccaaccagagcttcatcacagcgcttagttgtgagcaccaaaccaaaccacattgtttgcaaggcacaaaagcaggttgtccaagagggtgaggacactactaacattgctctcgcaggttggccctcactgttctcattggtgctgctgctgttggctctaaggttgcacctgctgatgctgcctatggagaagctgccaat

SEQ ID NO: 120154 - DNA, 226 bp, Glycine max
caaatcaaagccatggccacctccaacttctctattgttctctccgtctccctagccttctttttggtgctacttaccaaggcacactcgaccgataccgtttctttcaccttcaacaagttcaacccagtcaaccaaacattatgctccaaaaagatgctagtatttcatcctctggggtgttacaactcaccaaagttggcagcaacggcgtgcccacctcggg

SEQ ID NO: 120155 - DNA, 234 bp, Glycine max
gagtgatcggtgttcacttgatctcatcataatcgtcagcgtcaattgaagaagatgccgatcagaaacatcgccgtcggaaggcctgaagaggcgactcaccccgacacgttgaaggcggctttggctgagttcattcaaccttcatcttcgtgttcgccggctcaggctccggcatcgcctacaacaagctcaccgacaacggcgctgccacccctgccggcctcatctccg

SEQ ID NO: 120156 - DNA, 224 bp, Glycine max
catggctttgcccaatcagcaaaccgtcgattaccctagtttcaaactcgtcatcgtcggtgacggtggtacaggaaagacaacgttcgtgaaaaggcatcttaccggtgaatttgagaagaaatacgaaccaccattggagtggaggttcacccattggatttcttcacaaactgtggaaagattcgcttctactgttgggatactgccggacaagagaagtt

SEQ ID NO: 120157 - DNA, 226 bp, Glycine max
gccgccgccgccccggtgttgcggatgtatctgatctctcggccaaccccgtcatccgctggcagcaccgcttctacctccccctcatcttcggcatgggcttcgccttccctaccctcgttgctggcctgctcggggcgactggagaggcggtttcttcttcgccggtgccgcccgactcctgttcgtccaccactctaccttctgcgtcaactcgctcgcccac

SEQ ID NO: 120158 - DNA, 230 bp, Glycine max
ctcagggtggtttggttggtgctgccaccggcatcttcggtgctgccaccggtattgttggtggagttgtcgatggtgctactgccatcttcagtcgcaacattgccatccagttgatcagtgccaccaagactatggacttggaaatgggaaagttggaaagcaaacctatttggagaaacatcttccttcgttaccaaccttgggagacaggcaagatgcattcagcg

SEQ ID NO: 120159 - DNA, 224 bp, Glycine max
gagaagaagtcgtcgtcgtcgaagaagcggtctctggggaacaaagaggccgtccggaagtaccgcgagaagaagaaggcgcgtgcggcgtcgctggaggacgaggttgtgaagttgagggctctgaaccacagttgatgaagaagctgaaggggcaggcggctctcgaggccgaaatcgcgaggctcaagtgtttgttggttgacataagggggaggattgaa

SEQ ID NO: 120160 - DNA, 223 bp, Glycine max
aaccccaccaatgtgcagcttcctggtatgtacaacaaggaagagaacccccgtgtgcccatcatcgtcaccggtaacgatttctcaacactgtatgctcctctcatccgtgatgggagtatggagaagttctctgggcacctacaagggacgatcgtgttggcgtctgcaatggaattttccgcactgacaatgttcctaaggatgacattgtcaagcttgt

SEQ ID NO: 120161 - DNA, 231 bp, Glycine max
ctcataacacaaagcacaaagcaaagctcatccttgagttaaaaaatggcagcagcttcttccatggctctctcatccccatccttggctggcaaggccgtgaagctgggcccatcagccccagaagtgggaaggggagcatgaggaagaccgtcaccaagcaggtctcctcaggaagcccatggtacggcgcagaccgagtcaagtacttgggcgcattctctggcgagc

SEQ ID NO: 120162 - DNA, 206 bp, Glycine max
gagaagtatcagatctggagcaggagaatagcgttggcagcgtttgcgtttgctctgctgttccaatcggcctcagcagacgacgtcgttgtgctctctgaagataacttcgagaaggaagttggtcagacagaggagctctcgttgagttctatgctccttggtgtggacactgcaaaaagctagctccagaatatgaaaagctt

SEQ ID NO: 120163 - DNA, 217 bp, Glycine max
cattttcagaggaacaatggcgggtagggtttcgacgtgcttcttcttcgtgtttgctctttctctccttcttccttttcagatctccgctgaggaatcatcggagaaagagttcgtactcacattggtcactctaactttcacgacactgtcagcaagcacgatttcatcgacgtcgaggcctacgctccatcgtgtggccactgtaagcagcctg

SEQ ID NO: 120164 - DNA, 221 bp, Glycine max
aaacactcataacacaaagcacaaagcaaagctcatccttgagttaaaaaatggcagcagcttcttccatggctctctcatccccatccttggctggcaaggccgtgaagctgggcccatcagccccagagtgggaagggtgagcatgaggaagaccgtcaccaagcaggtctcctcaggaagcccatggtacggcccagaccgagtcaagtacttgggcc

SEQ ID NO: 120165 - DNA, 218 bp, Glycine max
aaaccctcttttttctctctcttgcaaaacctaattttcatttcttccctcaaatttcaaaatgcgtgagatccttcacatccagggtggccaatgcggcaaccagatcggcgccaagttctgggggtggtttgcgcggacacgggatcgaccctaccggaaggtacggtggggactcggagttgcagctcgagaggatcaatgtctactacaacgag

SEQ ID NO: 120166 - DNA, 217 bp, Glycine max
gagtgagcgagccaggtagggttttcggtgttcccctctttgtgttcgttcgcgacgatggggtccatccccgatccaggcgagttgagcgagttgactcagccgagcttcgacgagttccagcgccaacctctacaatgaccagctgcaccctcctctggaaggagctctccgaccacttctcctccctcgagcaagaaaacaaccacaaatccga

SEQ ID NO: 120167 - DNA, 228 bp, Glycine max
acaatggccgataccagacttacctacaggcgccgccagccgtacaacacggtctccaacaaggtccgcgttatcaggacccccggtggcgagcacaggtaccttcacatcaagaagaggggtacctcccccaatgcggtgactgcggtgtcaagctccctggtattcctgccctccgtccccgcgagtacgcccagatctcccgccccaagaagaccgtccagcgtg

SEQ ID NO: 120168 - DNA, 217 bp, Glycine max
caaaccctaacacacacccatttgattcagtttccatggctagcctcaaggttgcatttttggctgcagtgctctgcatggttgtggtgagtgcacccatggcacatgcagctatcacgtgcgggaggtgacgaatagcctgatcaattgcatcggttacctccagaacggaggaacgccgccgtcgggatgctgcaacggagtgaagagcctcaat

SEQ ID NO: 120169 - DNA, 219 bp, Glycine max
gcccaagccctatacaaccaaacccttacacacacccatttgattcagtttccatggctagcctcaaggttgcatttttggctgcagtgctctgcatggttgtggtgagtgcacccatggcacatgagctatcacgtgcgggcaggtgacgaatagcctgatcaattgcatcggttacctccagaacggaggaacgccgccgtcgggatgctgcaacgg

SEQ ID NO: 120170 - DNA, 223 bp, Glycine max
tataaatttttttgtcaataaagggatcaaggggttgggggatcaaatggtaaagttcttttgttggtaaattggaggattagaaacatgactattgctttccaattagctgtttttgcattaattgcatttcatttattttattgattagtgtacctgttgtatttgcttctcctgaaggttggtcgaataacaaaaatgttgtattttccggtacatcatt

SEQ ID NO: 120171 - DNA, 164 bp, Glycine max
ggaggccaaggcgcttggagtggataccgttccggtcctcgttggccctgttacatacctgttgctctccaagcctgccaagggagttgagaaatccttttctctcctctctctccttcccaaggtcttgctgtctacaaggaagttattgctgaccttaaggc

SEQ ID NO: 120172 - DNA, 218 bp, Glycine max
gccagggccaaggtgtttgatatcgacctgcagaaacagttgaggccttacatggaatctatggttccactccccggaatctatgaccccgatttcattgctgccaaccaaggagaccgtgccacaacgtgatcaagggcacaaagaaagaacaagttcaacaaatcatcaaagacattaaggagtttaaggaaagcactaaggttgacaaggtggtt

SEQ ID NO: 120173 - DNA, 229 bp, Glycine max
gtattgagacctggaggtttttttgtatggtctgctactccaatttatcagaagcttcctgaagatgttgaaatatggaaggccatgaagacactaacaaaagccatgtgctgggaagttgtgtcgatcagcaagatcaagtaaatggagtaggtgtagctgtatacaagaagccaacttctaatgagtgttacgagcaacgttcaaagaatgagccaccgctgtgtcc

SEQ ID NO: 120174 - DNA, 230 bp, Glycine max
tcgcgttggtgcaaagcatccttcgtttcaatttctcactctcagcgctttctgcaatcgaacctttcatctccaaagggatccacaggccgaaggagaaatggggctgacattcacaaagcttttcagtcggctttcgcgaagaaggaaatgcgaattctgatggttggtcttgatgctgctggtaagaccactatcctgtacaagctcaagctcggagagatcgttac

SEQ ID NO: 120175 - DNA, 222 bp, Glycine max
tttagaacagaaagccaaagccagtggggcctgtcaattagtggtaaaagatttgaaggaggaatttgttaaagattatatatttccttgcctgcgtgctggtgcaatttatgagaggaagtatttcttgggacctcaatggcccgccctgtaattgcgaaggccatggttgatgttgccaaagaagttggagctgatgctgtttcccatgggtgtacaggg

SEQ ID NO: 120176 - DNA, 218 bp, Glycine max
tggaaaacagaggcttaggcaactaagaaagaaagatgaagctgaaggtatatgcggaccgcatgtcccagccatcccgtgcggttctcatattttgcaaagtgaatggaatagattttgaggagataaagtcgatttatccaaacgtcagcagttatctcccgaattccgagcggttaaccctttaaggaaagtccctgctattgatgatggaaggt

SEQ ID NO: 120177 - DNA, 225 bp, Glycine max
ggttaaagcaaaaaacaaagagagagagagagagaaaatgatgaagccatcgatgctcagatctctccactccgccgccacccgcggcgcctctcatctcttccgccgtgggtacgcctccgagccggtgccggagcgcaaggtaaccgttctcggcgccgccggcgcggatcgggcagcctctctcccttctcatgaagctcaatcccctcgtttcgagcctct

SEQ ID NO: 120178 - DNA, 237 bp, Glycine max
  unsure (1)..(237): unsure at all n locations
gtctccgccatccganctcctcaagnttcttctaagtcagtnggancctttagccgngcaacaattgatgggcatctacaacttgcagcaatcatcccagcagactgaagangctctttcccaagggatggatgcattgcagcaatcactatctgagacattggctaatggttcgcccagctcatcaggctcctcgggaaatgtggcaaattacatggggcaaatggctatngccat

SEQ ID NO: 120179 - DNA, 246 bp, Glycine max
cacagcaccatcacgacaaaatggttcgctacggagcaaccagcatcgacggcgcaaagtctgctcgcgcgcgcggcagctacctccgcgtctccttcaagaacacccgcgagactgcccaggccatcaacggctggaagctcgagcgcgccctcacctacctcggaaatgtcctcgagcacaaggaggccattcccatgaggcggtatgccggcagcactggtcgcactgcacagggcaaggctt

SEQ ID NO: 120180 - DNA, 247 bp, Glycine max
ctccactcggctcggggggatatagctcagttggtagagctccactcttgcaattgggtcgttgcgattacgggttggatgtctaattgtccaggcggtaatgatagtatcttgtacctgaaccggtggctcacttattataagtaatgggaaagaggaccgaaacatgccactgaaagactctactgagacaaagacgggctgtcaagaacgtagaggaggtaggatgggcagttggtcagatcta

SEQ ID NO: 120181 - DNA, 256 bp, Glycine max
cacaaacgcacactgaattcaaaaacatcgaaagagagaggcatggccgagcaaaccttcatcatgatcaagccagatggcgttcaaagaggccttattggcgagattattagcagatttgagaggaagggtttttacttgaaagggttgaaactcgttactgtggaccgtccttttgctgagaagcactatgctgatttgtctgcaaagcctttctttagtggtttggtggattacattgtctctggccctgttg

SEQ ID NO: 120182 - DNA, 229 bp, Glycine max
ttcttcttcaaaatcaaaattcatttcacgcgcaccgcaacgtcctgtttcggattgtggctggctccatcatggccgaactcttcaggctcagttccgtcgagtggagcccttcgccggtcatcgctttagccaccagcttcgacggctcgcgtgtcgccgccgcccgcaaagacggctccctcgaaatctggctcgtctctcccggctccatcggctggcactgtca

SEQ ID NO: 120183 - DNA, 248 bp, Glycine max
tacactaactaaagccgagcagcgagagagagaaaccctagcaaaaatgccggctggtcacggtttgagatcccgcaccagagattccttctctcgtcccttcaggaagaagggtaccatcgccctcaccacatacctcagaacctaccacgtcggcgattatgtcgacgtcaaggttaacggcgccgtccacaagggaatgctcacaggttctaccatggccgcacggtcgcgtctggaatgtcaca

SEQ ID NO: 120184 - DNA, 245 bp, Glycine max
caagtggttcgacaccaactaccactttattgtccctgaattgggccctgatgtgaacttcacctatgcttctcacaaggctgttgatgaatacaaggaggccaaggcgcttggagtggataccattcccgtactcgttggccctgttacatacttgttgctctccaagcctgccaagggagtcgagaaatccttttctctcctctctctccttcccaaggttcttgctgtctacaaggaagtta

SEQ ID NO: 120185 - DNA, 247 bp, Glycine max
  unsure (1)..(247): unsure at all n locations
gaatccaacaggcgagctcttagggagctgcttttcactgctcctggtgttcttcaatatctcagtggtgtcatcctctttgaggaaaccctctaccagagcncagctgcaggcaagccctttgtgaatgtcttgaaggaagctggtgtgcttcctggcatcaaggttgacaagggcacagtcgagcttgctggaactaatggagaaaccannactcagggtctagatggccttggtcagcgttgtg

SEQ ID NO: 120186 - DNA, 248 bp, Glycine max
ggtacattatttttttgtgaaatagattaattaatctattttatctaacatatatcccttttgtagtaattattagaatttgtagtaattattataagtattagaagcagcaattcttatttatttcagattaatacttgataacctaaacaatatatctatatatagaatatagatagatatatatataatagaacgtaaaaaaaaaaaagaataataaatagaaaaaggagcatgttgattatata

SEQ ID NO: 120187 - DNA, 252 bp, Glycine max
gtcaaaaccaaaagggtggttgcaaattgcaatggctaagcatgatgttgagggtggttccttcgctgcaaaggactaccatgatcctcctccagcaccattgattgatgctgaggaactcacacagtggtccttctacagggctttgattgctgagttcattgccacaatgctcttcctttacatcacagtgctcactgtgattggttacaagagccagagtgatgtaaaggctgggggtgatgtgtgtgg

SEQ ID NO: 120188 - DNA, 117 bp, Glycine max
tgatttcagtgagtgatcggtgttcacttgatctcatcataatcgtcagcgtcaattgaagaagatgccgatcagaaacatcgccgtcggaaggcctgaagaggcgactcaccccga

SEQ ID NO: 120189 - DNA, 227 bp, Glycine max
atatgactgggataaacttaagaattcaattattgaaattgaataagtaaacaatttaattggattggtcgaatggtatcaaaaaaatggagtactaactcccatttcttatttattattgaattaaccgatcaacttgctttgttatcgaacatttctttttgatttcaaaaattttccggaaaaaatttgaatctatttttatatgcgaatcaatctactacttc

SEQ ID NO: 120190 - DNA, 245 bp, Glycine max
gtcaattaaggaggaaattcgcaaagttgttgaacttcaagaagagcttgatattgatgttcttgttcatggagaaccagagagaaatgatatggttgagtacttcggtgagcaattgtcaggctttgccttcactgttaatgggtgggtgcacatcctatggttcccgttgtgtgaagccaccaatcatctatggtgatgtgagccgcccaaagccaatgactgtcttctggtcatctctggct

SEQ ID NO: 120191 - DNA, 244 bp, Glycine max
atcgctgtggttttcatcgtcttccttctcttatatttctttttttttttgtcttcgccgcacgccgaaacaatggccggaaaaggagagggtcctgctatcggaatcgatctcggaaccacctactcttgtgtcggtgtgtggcaacatgaccgagttgaaatcatcgccaacgaccaagggaacagaacgacgccgtcttacgtcggcttcactgataccgagcgtctcatcggtgatgcgg

SEQ ID NO: 120192 - DNA, 244 bp, Glycine max
gtggaggcttgcgagaattggggtatattccaggttgttgatcacggtgtggatcaacaactcgtggccgagatgacccgtctcgccaaagagttctttgctttgccaccggacgagaagcttcgttttgatatgtccggcgccaaaaagggtggattcattgtctccagccatctccaaggggaatcggtgcaggactggagagaaatagtgacatacttttcgtacccaaaaagagagaggg

SEQ ID NO: 120193 - DNA, 243 bp, Glycine max
gttttcagataataagtttaaggttgagattatcaatgatttgcctgccgacaaaactattacagtatacagatgtggccccttggttgatttgtgtcgtggaccccatatacctaatacatcctttgtcaaagcaattgcgtgcttaaaggcttcatcagcatattggaggggggacaaagatcgggaaagtttacaaagagtttatggcatatcttatcctgatcagaaaagtctaaagga

SEQ ID NO: 120194 - DNA, 251 bp, Glycine max
gaaattgtagtgaaagcgataattctagtactagtataataactagtacgaatgatacaaatgatagtgattccactataggagaaagttctaataatctcgatgaaagtcaaaaatataagcatttgtggcttgaatgcgaaaattgttatggattaaattataaaaaattttttaaatcaaaaatgaatatttgtgaatactgtggatatcatttgaaaatgggcagttcagatagaatcgaacttttg

SEQ ID NO: 120195 - DNA, 227 bp, Glycine max
ggtgaatatgatgagtctggtccatccattgtccacaggaagtgcttctaagtccaaaagaaatgctttaatggtgagttatgtttttgctatggcttttttggtgtctgtgtcatgtcgtgcgaactatgttgtcatggataagaggtgggataggattggagggtatattcggagagcttgatgtatcatatattgtgtggcatccctctggatgtggcgggcac

SEQ ID NO: 120196 - DNA, 239 bp, Glycine max
tgtgaagaagcctcatcgttatcgccctggaactgttgctcttcgtgagattaggaaataccagaagagcactgagctcctaatcaggaagcttcctttccagaggttggttcgtgaaattgcccaggatttcaagactgatctgcgtttccagagccatgctgagcttgcattgcaagaggctgctgaggcataccttgttgggctctttgaggacactaagttgtgtgccattcacg

SEQ ID NO: 120197 - DNA, 238 bp, Glycine max
ctttctctagtcctgttatttctcagcgcgtaaagcatggctttgttggtggagaaaaccacgagtggtcgcgagtacaaggtcaaggacctttcccaggccgacttcggccgcctcgagatcgagctggccgaggttgagatgcccggcctcatggcctgtcggaccgagttcggcccctcccagcccttcaagggggcccgcatcaccggctccctccacatgaccatccagaccg

SEQ ID NO: 120198 - DNA, 237 bp, Glycine max
gttgaaagacccccggtttggctcatgaggcaagcagggaggtacatgaagagttaccaaaccatctgtgagaaatatccttcattccgtgaaagatctgaaaatgttgatctcgtggtggaaatttctctgcaaccatggcatgtttttaagcccgatggagtgattttattctcagacattcttaccccactttctggaatgaatataccctttgatattgtgaagggtaagggt

SEQ ID NO: 120199 - DNA, 241 bp, Glycine max
gtagccgtcgcactttgcgttttctgcgtcatctccgattccccgacaatggccacccaaatgagcaagaagagaaagttcgtagctgatggagtgttcttcgctgaactgaacgaggttctgacaagggagttagccgaggacggatactccggcgtggaagttagggttacgccgatgcgcaccgaaatcatcatcagagccaccagaacccaagccgttctcggtgagaagggaagga

SEQ ID NO: 120200 - DNA, 241 bp, Glycine max
gttgcaggcagtgtcatctctcctttgacgacaagatgagcatcccaattccccatcggcagttattcatagacggagactggaaagtccccgtcctcaagaatcggattcccatcatcaacccttccacccaacacatcatctgggatatcccagcagctactaaggaagacgttgatctcgctgtcgctgccgccaaagctgccctctcccgcaacaagggcgccgattgggcctccgc

SEQ ID NO: 120201 - DNA, 247 bp, Glycine max
tgactgcctctgttccgccgaacccagcattttcccaccgttcgggccaccggcggagttagttttccggcaaggatgggtgctgctctgctgtctgagcttgcgacggagatagttgtgccggcctgcgccgtcatcgggatcgtgttctcgttggtgcagtggttcctcgtgtcgcgcgtcaagctcactcccgaccgaaacggaacgacgtcgtcgccgcgcaacaacaagaacggctacggcg

SEQ ID NO: 120202 - DNA, 222 bp, Glycine max
gtggtgccttatcgctgtggttatcatcttcttcttcctctttcttagatctcttctttctctacgccgcacgccgaaaccatggccggaaaaggagagggtcctgctatcggaatcgatctcggaaccacctactcttgcgtcggtgtgtggcaacatgaccgcgttgaaatcatcgccaacgaccaagggaacagaaccacgccgtcttacgtcggattc

SEQ ID NO: 120203 - DNA, 215 bp, Glycine max
tgaagcaggtttgatcccagttcctggctatactactgccagttctttcacattggagtgggttaacaatcaaggctatgatgagttcaagcagttctgtaatgttggtgcgaaaaggggtgcatccacgaggccaactgagcaggaaaggaagaaaggagtgccatggactgaagaggagcacaggcatttctgctgggtctcaagaagtatgg

SEQ ID NO: 120204 - DNA, 192 bp, Glycine max
ggcaagccccactcaaccaccacacctctcctcgttcacgctaaccctttctgcttctcttctacctttcaagttttaaaagtataaagatggcagagacattcctatttacctcagagtcggtgaacgagggacaccctgacaagctctgcgaccaaatctccgatgctgtcctcgacgcttgcctcgagc

SEQ ID NO: 120205 - DNA, 239 bp, Glycine max
  unsure (1)..(239): unsure at all n locations
ctttcggtcatccgaactcctcaagcttcttctaagtcagttggagcctttagccgagcaacaattgatgggcatctacaacttgcagcaatcatcccagcagactgaagatgctctttcccaagggatggatgcattgcagcaatcactatctgagacattggctaatggttcgcccagctcatcaggctcctcgggaaatgtgggcaaatacatgggggcaaatgggctngggccag

SEQ ID NO: 120206 - DNA, 231 bp, Glycine max
  unsure (1)..(231): unsure at all n locations
cttgcggctagggttttagcgcacntcttctagatttaaggaagatgggtaaggaaaaggttcacatcagtattgtggtcattggccatgtcgactctgggaaatccactaccactggtcacctgatttacaagcttggaggcattgacaagcgtgttattgagaggtttgagaaggaagctgctgagatgaacaagaggtctttcaagtatgcctgggtgctggacaaac

SEQ ID NO: 120207 - DNA, 237 bp, Glycine max
cagagcaacacaacgaaccaacaatggcgcactcagccgcagtcgcagccgcagcacgggcaagcagcgctggagcaggtgcagtgcttcggtcgcaagaagaccgccgtggccgtgacctactgcaagcgcgggcgcggtctcatcaagatcaacggctgccccattgagctcgtggagccggagatcctccgcttcaaggccttcgagcctatcctcctgttgggtaagagccgc

SEQ ID NO: 120208 - DNA, 179 bp, Glycine max
gtttccctacctctcccttcaagatgcagatcttcgtcaagaccctcaccggcaagaccatcacccttgaggtggaaagctctgacaccatcgacaacgtcaaggccaagatccaggacaaggaaggaatccccccggaccagcaacgtctcattttcgccggaaagcaacttgaggac

SEQ ID NO: 120209 - DNA, 245 bp, Glycine max
ctcgagccgcagcacaaagcgggttactgtctgttcaagctaccatctctctctctctttcttagtgcctccttgccagaagttaaaatggcccaagaaactttcctattcacatctgaatcagtgaacgaggggcaccctgacaagctctgtgaccagatctccgatgctgtgctcgatgcatgcttggagcaggaccctgacagcaaggttgcctgtgaacctgcaccaagaccaacatggtg

SEQ ID NO: 120210 - DNA, 240 bp, Glycine max
cccgtgagcatgctcttcttgctttcacccgaggtgtgaagcagatgatctgttgctgtaacaagatggatgccactacccccaagtactctaaggctaggtatgatgaaatcgtgaagacagtctcttcttacttgaagaaggttggttacaacccagacaagattccctttgttcccatctctggttttgagggtgacaacatgattgagaggtcaccaaccttgactggtacaaggg

SEQ ID NO: 120211 - DNA, 237 bp, Glycine max
gctagaggcggtggccgtggaggaggcagaggcggcggtggccgtggaggaggcaggggcggcggccgaggtggaatgaagggaggtagcaaggttgtggtgcagcctcatagacatgatggtattttcattgccaagggtaaagaagacgctcttgttaccaagaatcttgttcctggtgaagctgtttacaatgagaaaaggattaccgttcaaacgaagacggttccaaagatg

SEQ ID NO: 120212 - DNA, 242 bp, Glycine max
cttcaacattgcggaacagaagaagcgccgcagctatggtgaagtactccagagaacccgacaatcccaccaagtcctgcaaggccagaggcgctgacctcagagttcattttaagaacactagggagactgcctttgccatcaggaagttgccccttgttaaagctaaacgatacttagaggatgttttggcccacaaacaggctattcctttccgagcttttgtggtggtgttgggagga

SEQ ID NO: 120213 - DNA, 242 bp, Glycine max
tgcagagcacagaagattccaagactgggccaaaccaggctctatgggcaaacaatacttcctaggactagagaagggtcttggaggttctggtgagccagcttacccaggaggacctttcttcaacccacttggctttggtaaggatgagaagtccttgaaggatttgaagctcaaggaagtgaagaatggaaggttggctatgttggcaatcttggttactttgttcaagctcttgtcac

SEQ ID NO: 120214 - DNA, 240 bp, Glycine max
cgaaaaatgacaaaaaagaaaacattcattccccttctatatcttacatctatagtctttttgccctggtgtatctctttcacatttaagaaaagtctcgaatcttggtttattgattggtggaatactaggcaatccgaaattttcttgaatgatattaaagaaaagagtattctaaaaaaattcatagaatttgaagaactgtttttcttagatacatgttaaaggaatgtccggaaa

SEQ ID NO: 120215 - DNA, 240 bp, Glycine max
cttctcgctcttggcttttcgctcttcactcactctcattcatgcatttccaccgttcatggatcccgtaagcgtgtggggtaacacgcccttggcgacggtggatcccgagatccatgacctcatcgagaaggagaagcgccgtcaatgccgcggaatcgagctcatcgcctccgagaacttcacctccttcgccgtcatcgaggccctaggcaggctctcacgaacaaatactccgag

SEQ ID NO: 120216 - DNA, 243 bp, Glycine max
cctccacccacccagcatatctctctattcctatttattagcacccctcacattaccttgtgtcaccaactactttgactcctttaccataccattacaataattatcaaacctaaccagtaaaaatggtgaccgtggaggaaatccgcaacgctcagcgttcccatggacccgccaccatcttggccttcggcaccgccacgccgtccaactgcgtctccaagccgattaccctgactacta

SEQ ID NO: 120217 - DNA, 245 bp, Glycine max
tcgtcccttctccaacatgccaaacgacagcgttctgagtctttacttcttcgttaccctcttcacatgccttctctctgctaattcccacgatgaccatattttcctaccgagtcaactccatgacgatgactcagtgagttgcactgctaccgacccaaaccttaactacaagccggtgatcggaatcctgacccaccccggcgacggtgcctctggcggctcagcaacgccaccggggtttc

SEQ ID NO: 120218 - DNA, 239 bp, Glycine max
atggccaccgtcacaacccaagcctccgccgcgattttctggccatatgcctcgaaatcgaggtttctgaccggctcttccggtaaactcaaccgggaagtgactatgaggccaatggggtggcctccttctgcctctttcaaggttgacgccaagaagggagagtggttacctggcttggcctcccccaattacctcaatggcactcttcctgaggacaatggatttgaccctctggg

SEQ ID NO: 120219 - DNA, 240 bp, Glycine max
ctccactcctcaccaagccccaccatggcctcaaccaacgccctctcttcagcttccattctaacctctcccaaccgccagtctctgaccagaagagcgaaccacaacggaagagtaaattaccgtcaaccgaatagccgtttctccgtcaaagcctccgccaaagagattgcctttgaccagcattcccgctctgctatgcaggccggcattgacagctcgccgacgccgtcgggctca

SEQ ID NO: 120220 - DNA, 236 bp, Glycine max
cttcaagatgaagatgattcgcattcttttcatctttgctcttctatccttcacttcccatgcttctaatgtcaatgacttctgtgtggcagacctgaagggtccagatagccctactggctatcactgcaagccacctaaaacagtaacatcacatgactttgtgttccatttaggccctggaaacacttcaaacgtgttcaagtccgcaatacctctgcatttgtcaaagattt

SEQ ID NO: 120221 - DNA, 237 bp, Glycine max
gcggaagaagaagacgccgcagccatggtgaagtactccagagaacccgacaatcccaccaagtcctgcaaggccagaggcgctgaccttagagtgcatttcaagaacactagggagactgcctttgccatcaggaagttgcccctggttaaagctaaaagatacctggaggatgttttggcccacaaacaggccatccctttccgacgcttctgtgtggtgttgggaggacagccc

SEQ ID NO: 120222 - DNA, 233 bp, Glycine max
ctggtttttgttggcgattcgctcaataggaacatgtgggagtagttgatttgcatattgagaaatgctgtgaaaaataaacacaatgtttatgaagtaaatggaagagttaatttcagaggcgaagccgcttattcattagttttcgaagattatcacttctccgtggagctttttgtgtctccattcttggttcaagaaggggaaatgactataagaatgggacaaagaag

SEQ ID NO: 120223 - DNA, 87 bp, Glycine max
gggagctctcgttgtttcggagttagggaccttacgcagccatggccactgctacgaatgccgccgccgtcccaccacgccagctct

SEQ ID NO: 120224 - DNA, 238 bp, Glycine max
tgcaagagaatccgaggcgaagagaagagaaaaattaagatggaggggaaggagcaggatgtgtcgctgggagcgaacaagttcccggagagacagccgattgggacggcggcgcagagccaagacgacggcaaggactaccaggagccggcgccggcgccactggttgacccgacggagtttacgtcatggtccttttacagagcagggatagcaagtttgtggccattttctgttt

SEQ ID NO: 120225 - DNA, 199 bp, Glycine max
ctgcatcggaagaaaccctagccactctcccggcgtcacgatgcagatcttcgtgaaagccctaacgggtaaaacgatcacgttggaggtggagtcttcggacaccatcgacaacgtgaaggccaagatccaggacaaggaaggcatccctccggaccagcagcgcctcatcttcgccgggaagcagctggaggacggc

SEQ ID NO: 120226 - DNA, 232 bp, Glycine max
gtttgctacctaaaccctagtctccatacatcaacttgggaggttaaagagacggcaacgttgtgctgtccgccttgaccgagccagagcttcgtcttggccctcgattttgccctgtaaaactaatcccagtcacaacagaaataatcaatggcaccgaaacagaccaaggctgagaagaagatcgcttacgatgcgaactgtgcgacctatggaggagtacggccaaatc

SEQ ID NO: 120227 - DNA, 236 bp, Glycine max
gtcgcctcgtgtttctttttccgtttcaatttcctctcacaggctttaaccttaccagctcgagataagacatggaccggatcaaaggcccatggagtccggaggaggacgaggctctgcagaagctggtggagaaacacgggcccaggaactggtctctgatcagcaagtccatcccgggccggtccggcaagtcctgcaggctccggtgggcaaccagctgtccccccaggtgg

SEQ ID NO: 120228 - DNA, 233 bp, Glycine max
gttctggattccgactcgccgcattgactcggtccgggttggggtcgactcagttcggtacttcattctcttgcgaatctaatctataggaaaagctaagggcacatcacaatgaaggcattgattctggttggggggtttggaacaaggctgaggccactgacactcagttttcctaagcctcttgttgattttgctaacaaacctatgatctgcatcagatagaggccctt

SEQ ID NO: 120229 - DNA, 239 bp, Glycine max
ggctcgagccgattcggctcgagcgagaatggagttttcactagtgaggcttgtggtagcactggccaggatgtgaaccatgaggttcttgctgttggatatggagttgaaaatggtgtcccatattggctcataaaaaattcatggagagaaagctggggtgaaaatggctacttcaagatggaattggggaagaacatgtgtggtgttgcaactgtgcatcttatccaattgtggca

SEQ ID NO: 120230 - DNA, 209 bp, Glycine max
cgtgaagggttgtatatggctgttcgaacaagcgcaggcattcggattcagcagtgtttccacaaacatcagaatgccagttatcaaactaaaatctgggggcttatggatccatgcacccagagctccaactgatgagtgtattcagcttattaaggaattgcgggctccagttgactatcctgttctccctactctcgcttctgagc

SEQ ID NO: 120231 - DNA, 237 bp, Glycine max
ctccgaattagggttttccaattcgcagagcaactcaacacaacgaaccagctccacaatgtcgcagccgcagcctcagtcgcagccgcaacacgggcctgcggcgctggagcaggtgcagtgcttcggtcgcaagaagacggcggtggccgtgacctactgcaagcgcgggcgcggcctcatcaagatcaacggctgccccatcgagctcgcgagccggagatcctccgctttaag

SEQ ID NO: 120232 - DNA, 235 bp, Glycine max
cagggcaagcaaaaagcaagaatcccaggcgaggagaaagatggcggggcaggagcaggatgtgtcgttgggcgcgaacaagttccccgagagacagccgattgggacggcggcgcagagccaagacgacggcaaggactaccaggagccggcgccggcgccgctggttgacccgacggagtttacgtcatggtcgtttttacagagcagcgaagcagagtttgtggccattttc

SEQ ID NO: 120233 - DNA, 233 bp, Glycine max
gaaattgtagtgaaagcgataattctagtactagtataataactagtacgaatgatacaaatgatagtgattccactataggagaaagttctaataatctcgatgaaagtcaaaaatataagcatttgtggcttgaatgcgaaaattgttatggattaaattataaaaaattttttaaatcaaaaatgaatatttgtgaatactgtggaatcatttgaaaatgggcagttcag

SEQ ID NO: 120234 - DNA, 235 bp, Glycine max
ctctctctctccttctcgctctttcagctttgacttttgttggaaactaaggcctaatcaaaatggtgaagttcacagctgaagagctacgtcgtattatggactataagcataatatccgtaatatgtctgtcattgctcatgttgatcacggaaaatcaaccctcactgattctcttgtggctgctgctggtattattgctcaagaagtgccggtgatgtccgtatgactgat

SEQ ID NO: 120235 - DNA, 234 bp, Glycine max
cagttcaccagttgaatgctaaccctgacgtacatggtatattggttcagctcccgttgcctaagcacatacatgaagaggaagttctgactgaaatcagccttgagaaggatgtagatggttttcatcctttgaacattggcaagcttgcaatgaaaggcagagaccccctgttccgtccctgcactcccaaggcatgtattgaactattcaacgaagtggtgtaagtattaa

SEQ ID NO: 120236 - DNA, 218 bp, Glycine max
gttttctcttcttcgttcgtttcgttgaaaagcgactttttctctctgcaactctcccttttcttccttcgtagatcgaaagggaatcttcttccatggcctccaagcggattctgaaggagcttaaggacctccagaaagaccctcgaacctcttgcagcgccggtcctgtagcggcagatatgtgtccattggcacgcgatagaatgggccccctg

SEQ ID NO: 120237 - DNA, 237 bp, Glycine max
gtacgagggccaatttccaaaaaccttttgtctcgcaacctcacctcttcctccttcaatctctttcggaatttcccaaaatccttagtgggaggaagagatggttctgactcagaagattcacgaagctttcaaaggcaccgtcgagaggatcactggcccccgaaccgtttccgccttcatagaaaaaggagttctcagtgtctccgagtcgtcaccgccggcgataatctcgtt

SEQ ID NO: 120238 - DNA, 229 bp, Glycine max
ggcttatggtggatacctaggcacccagagacgaggaagggcgtagtaagcgacgaaatgcttcggggagttgaaaataagcgtagatccggggattcccgatataggtcaacctttcgaactgctgctgaatccacgggcaggcaagagacaacctggtgaactgaaacatcttagtagccagaggaaaagacagcaaaagcgattccgtagtagcggcgagcgaaat

SEQ ID NO: 120239 - DNA, 232 bp, Glycine max
caggaacgttgaaggagggtgatttgaaggggaagagggtattcgtgagggtcgatctgaacgtgcctttggatgacaaccttaacatcaccgatgacactagagtccgtgctgctgttcccaccatcaagtacttgactggttatggtgctaaagtgatcctttctagccatttgggacgtccaaaaggtgtaacacctaaatacagttgacgcctcttgtgccacggctg

SEQ ID NO: 120240 - DNA, 233 bp, Glycine max
ggctcgagccgattcggctcgagcttcattgaaactgccagaggttgacgcttctcccacacaaggcagtgaacgactcagaacagctttccaaggatttgggacagatgagaaagcggtgatattggtattgggacacaggaatgctcaacaaaggaagaaaattggagaaacttatcagcagctttacaatgaatcgcttgtcgatcgcttcattctgaattgtctggtga

SEQ ID NO: 120241 - DNA, 231 bp, Glycine max
cgggttcttcaattcattctagttctggattccgactagccgcgttgactcggttccgtttttcattctcgcggatctaatattaaggcatagcttaagggcacattacaatgaaggcattgattctggttgggggatttggaacaaggctgaggccactgacactcagtttccctaagcctcttgttgattttgctaacaagcctatattttgcatcagatagaagccct

SEQ ID NO: 120242 - DNA, 231 bp, Glycine max
ctctcactcacaaacacacactgaactaaaaaacatcaaaagagacgtggctgagcaaaccttcatcatgatcaagcctgatggcgtccaaagaggccttattggcgagatcattagcagatttgagaagaaaggtttctacttgaaaggtttgaaacttgttactgtggaccgtccttttgctgagaagcactatgctgatttgtcgccaagcctttctttagtggtttg

SEQ ID NO: 120243 - DNA, 236 bp, Glycine max
aaagtccgtagtggcgagtagcaccgtattaagacatctcgcgcaggcgcaggatgtgccgcagggcgcgaacaagttcccggagagacagccgattaagacggcggcgcagagccaagacgacggcaaggactaccaggagccggcgccggcgccactggttgacccgacggagtttacgtcatggtccttttacagagcagggatagcaagtttgtggccacttttctgtttct

SEQ ID NO: 120244 - DNA, 235 bp, Glycine max
ctcaaagccatggccacctccaacttctctattgttctctccgtctccctagccttctttttggtgctacttaccaaggcacactcgaccgataccgtttctttcaccttcaacaagttcaacccagtccaaccaaacattatgctccaaaaagatgctagtatttcatcctctggggtgttacaactcaccaaagttggcagcaacggctgcccacctcgggatctctcggtcg

SEQ ID NO: 120245 - DNA, 231 bp, Glycine max
gtgttgagactggtgtcgtgaagcccggtatggtggtgacttttggtgccactgggctgacaactgaggttaagtctgttgagatgcaccatgaggctctcacagaggctcttccaggtgacaatgttggctttaatgtgaagactgttgcagtcaaggatctcaagcgtggttttgttgcatccaactccaaggatgaccctgccaggaagctgccaacttcacatctca

SEQ ID NO: 120246 - DNA, 228 bp, Glycine max
ctctctctctctctctccgacctagcgagaccgagcgatccgaccctaatctcgcgatgctccgccgcgcaacctcctccctcctcaccggcgcctcccgccgccgcctctcctccgacgtgccggcgacccccgccgcggattccgccttcgcggaggcgtggaagaaagtgagccccaacatcgacccgtcgaagacgccgctgcgtacatgaagccccgaccatc

SEQ ID NO: 120247 - DNA, 225 bp, Glycine max
ctccactcacctgcctcttcctcacccctttctccagctaacgagtaaggcaaaatggcgcgtaagaagatcagagagtatgactcaaagaggttgttgaaggagcactttaagagactttctggcaaggagttgccgatcaagtctgcacaaattactgcatcaactgatttcactgagctacaagagaagggaccctggcgttcatcttctaaattgggtgtg

SEQ ID NO: 120248 - DNA, 230 bp, Glycine max
tcataacacaaagcacaaagcaaagctcatccttgagttaaaaaatggcagcagcttcttccatggctctctcatccccatccttggctggcaaggccgtgaagctgggcccatcagccccagaagtgggaagggtgagcatgaggaagaccgtcaccaagcaggtctcctcaggaagcccatggtacggcccagaccgagtcaatacttgggcccattctctggcgagc

SEQ ID NO: 120249 - DNA, 231 bp, Glycine max
cagtgcctatggcacagcgaagagtggcgtgggcgtggcttccatggaggtaatgagacctgagctggtgctgaaatcgattgttcctgttgtcatggctggagttttgggcatttatggccttattattgctgttattatcagtaccggtattaatccaaaggccaaatcctattacctctttgatggttatgcacatctctcttcggtcttgcctgtggcttggctggc

SEQ ID NO: 120250 - DNA, 232 bp, Glycine max
cgcggaatcctgacccaccccggcgacggtgcctctggccggctcagcaacgccaccggggtttctgacatcgccgcctcctacgttaaattcgtggagtccggtggtgctagagttattccccttatctacaatgagtcacctgagaaccttaacaagaagctcgatttggtcaatggagtgctcttcactggtgggtgggctgttctggtccatatttggatactcttgg

SEQ ID NO: 120251 - DNA, 227 bp, Glycine max
gcagaaagcaagctcatcctagagttttaaaaatggcagcagcctcctccatggctctctcttccccatccttggctggcaaggccgtgaagctgggcccatcagcccccgaagtcgggagggtcagcatgaggaagaccgtcaccaagcaggcctcctccggaagcccatggtacggcccagaccgcgtcaagtacttgggcccatttctggcgagcccccgtcct

SEQ ID NO: 120252 - DNA, 234 bp, Glycine max
gcagaaagcaagctcatcctagagttttaaaaatggcagcagcctcctccatggctctctcttccccatccttggctggcaaggccgtgaagctgggcccatcagcccccgaagtcgggagggtcagcatgaggaagaccgtcaccaagcaggcctcctccggaagcccatggtacggcccagaccgcgtcaagtacttgggcccattctctggcgagccccgtcctaactcat

SEQ ID NO: 120253 - DNA, 282 bp, Glycine max
atcagtggatcttcaagacctcttgcttcggctcacttttgacaacatatgcggcttggctttcggccaagacccgcaaaccctagccgtggggctcccagataacgctttcgctctctccttcgatcgagccaccgaggccactctacaacgctttattttacccgagatcttgtggaagctgaagcgatggctcaggctcggaatggaagtgagcctgagccggagcctgaaacacatcgacaattacctctcccacatcatcaagaaccgcaagctgga

SEQ ID NO: 120254 - DNA, 277 bp, Glycine max
aaatgatatggttgagtacttcggtgagcaattgtcaggctttgccttcactgttaatgggtgggtgcaatcctatggttcccgttgtgtgaagccaccaatcatctatggtgatgtgagccgcccaaagccaatgactgtcttctggtcatctctggctcagagctttaccaagcgcccaatgaagggaatgcttaccggtcctgttaccattctcaactggtcctttgttagaaatgaccaacctagatctgagaccacctaccagattgctttg

SEQ ID NO: 120255 - DNA, 277 bp, Glycine max
ttgaaatacactccatcggcggcggaaggttcttcggcggcggcggcgaccggaggctgaggccgcaccaccagaaccaccaccagcagccgccgataaaatgcccccgctgcgactcactcaacaccaagttctgctactacaacaactacaacctctcccagccgcgccatttctgcaagaactgccgtcgctactggaccaaaggcggcgtcctccgcaacgtccccgttggcggcggttgccggaaatcaaaacgctccaacaagcccaaaac

SEQ ID NO: 120256 - DNA, 185 bp, Glycine max
caaagaaggcgtcttcataaacgcctttcttctccgtttccgtttcctcgttcgaattcgctttttgatctgcgaaaatgagagagtgcatctcgatccacattggtcaggctggtatccaggtcggaaatgcttgctgggagctctactgcctcgagcacggcatcgggcccgatgggcaaatg

SEQ ID NO: 120257 - DNA, 178 bp, Glycine max
acaatattgatgttaccatggtctacccggagccttggtgtatgccacgactttttacggctggtatagctgaattctatgaggagtattacaaaaataagggtgtcaatatcattaaaggaactgttgctgttggattcacttctaattctgatggagaggtaaaagaagtcaaact

SEQ ID NO: 120258 - DNA, 276 bp, Glycine max
cggcaattaatttacaatggccgtcacgaaaagcctctcaatcttcctcttcatcgcaatgagctgcgtcgccgcagctcaggcagcgaacttcaacatcacaaataactgcacctacacggtgtgggccgctgccgtgcccggcggcggcgcaaggcttaaccctggcgaatcgtggaacatcagcgtgacgaacggcacaacaggaggacgcatctggggtcgaacaaactgcaccttcgacaacgcgggacgcgggaagtgcctcaccggcga

SEQ ID NO: 120259 - DNA, 276 bp, Glycine max
gtgtgtttcaggactcagagagagagagagagagcattgcattggcgagaccaccgcggtggagcgagcgagcgagcaagcgacgacgaaaattgaattgctcgtgcgcgtgcgtgcgtgatcgtttgattgtttggatcttgtggtcgatcgaggacgatgtcggagatggcgagcccagatcccgagggactcgacggagtccggcatgacgtggaacgtgtggccgcggacgaaggtggaatcaagcaagtgcgtgatccctctggcggcgac

SEQ ID NO: 120260 - DNA, 271 bp, Glycine max
gtgaaacgatgccgtgcctcaacctctccaccaacgttaacctagacggcgtcgacacctcttccattctctccgaagccacctcaactgtcgccagcatcatcggcaaacccgaggcctatgtgatgattgtattgaaaggatcagtgcctatatctcatggtgggagtgagcagccagcagcttacggtgaattggtgtccattggtggtcttagccctgacgtgaacgagaaactcagtgctggcattgcttcaattctcgaaaacaa

SEQ ID NO: 120261 - DNA, 182 bp, Glycine max
aaaaaatgaaagttgtgtacttccttgttgctatcttggctttggcatcctctcttgtctctgcccatgaccctagtcctctgcaagatttttgtgtggcaaccaaagaacgcgatggtgtatatgtgaatggaaaattctgcaaagagcctaaagatgtgaaagccgaagatttctacaaa

SEQ ID NO: 120262 - DNA, 273 bp, Glycine max
cattcacctgagctttttgtgaggattccaaagcatggcttcccttgcagcatccactgctgctgcttcccttggcatgtcagaaatgcttggaaaccccatcaacctcagtggtgccacaaggccagctccatctgcctctagccctgcctccttcaagactgtggctcttttctccaaaaagaaggctgcacctccaaaaaaagctgcagctgctgctcctgccaatgatgagcttgccaagtggtatggtcctgacagaaggatcttctt

SEQ ID NO: 120263 - DNA, 265 bp, Glycine max
atctgttcaaagctacaatggagatctgttgtatgagccatgggaagtaaatagtgagagtggacgtgcttttactaccttcaatgctttttggaagaaatgcttgcacatgcaaatggatattgtttcagttgttcctccatggcaattaattccagctgaaggaaaaattgaggaatgttcattggaggaacttggtcttgaaaatgaatcagaaaaaccaagtaatgcattgctaggacgggcatggtcaccgggttggaga

SEQ ID NO: 120264 - DNA, 275 bp, Glycine max
tctgcagctccaattcaatcttctacagcaagcgtaagcccctcccactccctcccaacaacgccttagacgtcaccaccttcatctcctcccgcgcccaccgcgccaccacagccttcgtcgacgccgccaccgcccgccgcctcacctacacccagctatggcgttccgtggagggcgtggcagcctctctctccgtggacatggggatccgaaagggcaacgtggtcctcatcctctcccccaactccatccacttccccgttgtgtgcctg

SEQ ID NO: 120265 - DNA, 267 bp, Glycine max
aagatgttcaatgaacgtacaagttacacagaacttaatcagatggctgaagaggctagaagacgagcagaaattgcaaggctgagagaactgcatacacttaagggtcgtgttgagtctgtggttagactgaagggtcttaacattgacacaatacagcaagcatacactgtctagaatgttgagtttcatgcatgaatcgtgtatgtataatgtgtgtataatgccgttagaagagtgtgatcatagagcagcaaaaaatatata

SEQ ID NO: 120266 - DNA, 273 bp, Glycine max
ccgtggattaccctagtttcaaactcgttatcgtcggcgatggtggcacaggaaagacaacctttgtgaaaaggcatctcaccggagaattcgagaagaaatatgagccaaccatcggtgtggaggttcacccattggattttttcacaaactgtggaaagattcgattttactgctgggatactgctggacaggagaaatttggtggcctcagagatggatactatatccatggacaatgtgctattatcatgtttgatgttactgcccggc

SEQ ID NO: 120267 - DNA, 271 bp, Glycine max
cttcctcagtagtgtcatttacgcttctcttctctgcagcaactatgcctaaccctaaggtcttcttcgacatgaccatcggcggtcaatctgctggccgcatcgtgatggagctctacgccgacgtcactccccgcaccgccgagaacttccgcgcgctttgcaccggcgagaagggcgtagggcggagcggcaagcccctccactacaagggctcgtccttccaccgcgtgatcccgagtttcatgtgtcagggtggcgacttcaccgc

SEQ ID NO: 120268 - DNA, 137 bp, Glycine max
ctctatgaaggtggagttacactacctacaaactttcttagcaagatcgcccctataccagtgatcaaggaaatttttcgaactgatggcgaacagttcctcaagtatccaccacctaaagtgatgcaggtggataa

SEQ ID NO: 120269 - DNA, 184 bp, Glycine max
tcgccaccgtccccgcccacaacatcacccgcatgctggccgcacaccccggcttctccaccttcaaccactacctctccgtcacccacctggccgaagagatcaaccgccgccagaccatcaccgtcctggccctcgacaatgccgccatgtcctccctcctcgacaagcacctctccctccc

SEQ ID NO: 120270 - DNA, 268 bp, Glycine max
ggtaccttcagcactatggtgttgagattggtaggaagaagaagacagctgccaagaaggaaactgcagaggagggtgctgctgctgttgctgtggaagaagccaaaaagagtaatcatctgcagagaaaattggagaagcgccagaaagatcgtaagcttgatgctcacattgaggagcagtttggtggtgggcgtttgcttgcttgcatttcctctcggcctggtcaatgtggcagagctgacggctacattttggaaggtaagga

SEQ ID NO: 120271 - DNA, 267 bp, Glycine max
gcgaacacacgatcatccaccgcgacgtgaaaactaccaacattttgttggatgataagtgggtggccaaggtttcggacttcgggctttcgagaatcgggcccacgggcaacgccaaggcccacgtcagcaccgttgtgaaaggcagcattgggtatttggacccggagtattataaacgacagcgtttaactgagaaatctgacgtgtattcctttggagtggtgctgtttgagttactctgcgctcgtccgcctctgatcagaa

SEQ ID NO: 120272 - DNA, 270 bp, Glycine max
caatttccaataatttcacgactccttcggagatctctctctcgcccataatccaaccatggcaaatacgggaaatttagacgcggcgatagagcaattgctgaacgtggagaagcagatgaggctcgccggtgacgtggcaggtaccagaaaggcggctaccgatattttgcagctctgcttcgatgcacgagcctggaaaaccctcaatgaccagattgtcgttttgtcaaaacgacgtggccagctcaaacaggccgtaacagctat

SEQ ID NO: 120273 - DNA, 272 bp, Glycine max
tggtcgtgtcgcagcaaaaccaagccacccactaacttgtttggtccaagacatggctctgatcctgcatgctaccaaaacaaacaagaatgccttcaagactctgattgcggcagagtacagtggcgtccaagtggaattggcccctaatttcgagatgggtgtctctaacaaaactcctgaatttctcaagatgaatcctattggaaaggttcctgttttggaaacgcccgatggtccagtctttgagagcaatgcaatcgctcgttacg

SEQ ID NO: 120274 - DNA, 272 bp, Glycine max
ctaacctaaaccctactcattctccatacctcaacgaagaggttaaagagacggcaacactttgctgtccgccttgaccgagcagagcttcgtcttggccctcgattttgccctaaagtactctcagtcacaacagacaccgtcgtcgtcgtcgtcgtcatcaatggcaccgaagcagaccaaggctgagaagaagatcgcttacgatgcgaagctgtgcgacctaatggaggagtacggccagatcctcgttgtgaactccgataacgtgg

SEQ ID NO: 120275 - DNA, 271 bp, Glycine max
ctcatttcttcatcgttcgattcttctcctcctaaagatgcagatcttcgtgaaaactttgaccggtaagaccatcacccttgaggtggagtcctccgacaccatcgataacgtgaaagctaagattcaagacaaggaagggatcccacctgaccagcagagacttatctttgcgggtaaacagcttgaggatggtcgaacccttgccgactacaacatccaaaaggaatccactctccacctcgtgcttcgcctcaggggtggcatgcaa

SEQ ID NO: 120276 - DNA, 271 bp, Glycine max
taaatttctctcgcgtcttcattcctctcattccctctgaattcttctcactcttcagatctctctcccttccttccatcccaaccacaaggtctgctgagaagacataaaaaatggtgaagatttgctgcattggagctggctatgttggtggcccaaccatggctgtaattgccttgaagtgtcctgagatcgaggtggtcgtggtggacattgctgcaccgcgaatcaacgcgtggaacagcgaccacctcccgatatatgagcctgg

SEQ ID NO: 120277 - DNA, 161 bp, Glycine max
cgaagagaatggctcccaagggtttaatctttttggctgtgttatgcttctcagcactgtcactgagtcgttgtcttgcggaggataatggacttgttatgaacttctacaaggaatcatgccctcaggctgaagacatcatcaaagaacaagtcaagctt

SEQ ID NO: 120278 - DNA, 267 bp, Glycine max
ctttaccagttgccacactacaccgagattccccctaaacccgtttgcgttgttgtttgcgaagaaatggcgactaagaggagcgtgggaacgttgaaggagggtgatttgaaagggaagagggtgttcgtgagggtcgatctgaacgtgcctttggatgacaaccttaacatcaccgatgacactagagtccgtgctgctgttcccaccatcaagtacttaactggtcatggagccaaagtgatcctttctagccacttgggacgt

SEQ ID NO: 120279 - DNA, 264 bp, Glycine max
ggggtcacatggggtggttcctcttctgttgttgtttttctctacttttttttcattcttctgggtcacccagaagaaacttgcccatcatagcctttgaggatggctacacccccttgtttggggaccataatttggccatccatagagatggcaaatcagttcacctttcacttgatgaaagaacaggttctggatttgtgtctcatgacctttaccttcacgggtatttcagtgcctcgatcaagctgcctgctgattaca

SEQ ID NO: 120280 - DNA, 267 bp, Glycine max
ggagtcagagaaaccctaggtaagaagaaaagatgccggctggtcatggtttgagatcccgcaccagagattccttctctcgtcctttcaggaagaagggaaccatcgccctcaccacatacctgagaacctaccacgtcggcgactatgttgacgtcaaggttaacggtgccgttcacaagggaatgccccacaaattctaccatggccgcaccggacgcgtctggaatgtcaccaaacgtgctgttggcgtcgaagtcaacaagc

SEQ ID NO: 120281 - DNA, 268 bp, Glycine max
accgaggtttgaaatggctgtgtcactgtggagaagtcgcactgcttcatctgcactgaacttgttcaccaatgctcttcgccatttctcttccgaggcaacaaactccagtcctcatagtacacgagagagtatgatgtattctgatataaactcacgaattgggagttgcatgccattgtctgcaatgcgcattggaacaatcattcacaacattgagttgaatccagggcaaggtggcaagctcgtccgagctgctggaactagt

SEQ ID NO: 120282 - DNA, 266 bp, Glycine max
aacaaatcaaagccatggccacctccaacttctctattgttctctccgtctccctagccttctttttggtgctacttaccaaggcacactcgaccgataccgtttctttcaccttcaacaagttcaacccagtccaaccaaacattatgctccaaaaagatgctagtatttcatcctctggggtgttacaactcaccaaagttggcagcaacggcgtgcccacctcgggatctctcggtcgtgccctttacgctgccccaatccag

SEQ ID NO: 120283 - DNA, 243 bp, Glycine max
atttcaagggctgaaacatctatctttaattgtatcctccctttgtttcctcacaaggttgcaagcatggcttttccaaacccatccatgtcagtttctccacagaagaagatgggaagggggaagattgagatcaagaggattgagaacaccaccaatcgccaagtcaccttctgcaagcgcagaaacggcttgctcaagaaagcatatgaattatctgtgctttgtgatgcagaggttgct

SEQ ID NO: 120284 - DNA, 266 bp, Glycine max
gaagaagtgagggcaagaactttgcagcataccagcatgagcatgaagctcttccagctcttctccctactcccattcttcctctacttctacacaatagaagcagacagttggcccattgcaactgacacacccactggaccccttaactcagcaagaaatcaccctcgtcaaaaccatagtcctaaaaaagtaccccaagccagccaaccgcgtcttcttccactacgtcggcctcgacgatcctgacaaggccgccgtcctca

SEQ ID NO: 120285 - DNA, 262 bp, Glycine max
catcaagatgcgtgagattgctgaggcttacctaggctccacagtgaagaatgctgttgtcaccgtccctgcctacttcaatgattctcagcgtcaagctaccaaagacgctggtgtcattgctggtctaaatgtgatgcgaattatcaatgagcctactgcagctgccattgcatatggtcttgataagaaggccacgagtgttggtgagaagaatgtgttgatttttgaccttggtggtgggacatttgatgtgtcttta

SEQ ID NO: 120286 - DNA, 267 bp, Glycine max
tcacaaccgaaacagtttccatctctctcacaaaatgacaacaatatcaaattgctcccttctcttcctcttcctcttcctctccaccctccacatagcttccaccctctcaacccccaccaacttcatcaagtcctcctgcagcaccacccagtacccagccctctgcatccagtccctctccgtctacgcctccaccatccagcaagacccccacgagctcgtccagacagccctctccctctccctcaaccacaccgaggccac

SEQ ID NO: 120287 - DNA, 265 bp, Glycine max
ttgtggggtaggtactctttggaaatgtctgctgttatttacaaggactgggttttcactgatcaagcattgcctaatgatcttgtcaagagaggagttgcggttaaggatccatctgctccccatggagttcggcttttgattgaggactatccttatgcttctgatgggctagagatatgggatgccatcaagtcctgggtgcatgaatatgtctcattctactacaagtcagatgcagcaattcaacaagatcccgagctcc

SEQ ID NO: 120288 - DNA, 256 bp, Glycine max
gtttcacaatcactttttgcgcttctctcactcactcactcttcttcttcctcttcgtgtggttttctttctcgaactcgaacgaagatgcgtgagattcttcacatccagggagggcaatgcgggaaccagatcggagccaagttctgggaggtggtgtgcgcggagcaacgggatcgattcaacggggaggtaccaaggggacaacgagttgcaactcgagcgagtcaacgtctactacaatgaagcgagttgc

SEQ ID NO: 120289 - DNA, 186 bp, Glycine max
ttttccccttcaccccttcctttttttgcgttcattctgttttcatagtgacgaacttctgaagaaatggcaaatcatcctttgacacactctcactctttccgcgagaggtttgatgaaactctcactggtcacaggaacgaaattttggcccttctgtcaaggcttgaagccaagggcaaggga

SEQ ID NO: 120290 - DNA, 265 bp, Glycine max
gcaccaccatgccctcaccactccaaccagagcttcatcacagcgcttagttgtgagcaccaaaccaaaccacattgtttgcaaggcacaaaagcaggttgtccaagagggtgaggacactactaacattgtctctcgcaggttggccctcactgttctcattggtgctgctgctgttggctctaaggttgcacctgctgatgctgcctatggagaagctgccaatgtgtttggaaagccaaagacaaacactgacttccttcca

SEQ ID NO: 120291 - DNA, 262 bp, Glycine max
ctcagggtggtttggttggtgctgccaccggcatcttcggtgctgccaccggtattgttggtggagttgtcgatggtgctactgccatcttcagtcgcaacattgccatccagttgatcagtgccaccaagactgatggacttggaaatgggaaagttggaaagcaaacctatttggagaaacatcttccttcgttaccaaccttgggagacaggcaagatgcattcagcgtttattttgaatgggataatgattttggaat

SEQ ID NO: 120292 - DNA, 253 bp, Glycine max
aatgggttcacaaaattgtatggataggaagcactatgttctggtgcatggggcatgccatggagcttggtgttggtataagctcaagccacgcttggaatctgcaggccataaggtcacagtacttgaccttgcagcttctggaaccaacatgaagaaaattgaagatgttgatactttctcagagtattctgcgcctttgttgcagctaatggccacaattccctcaaatgagaagttagttctagttggt

SEQ ID NO: 120293 - DNA, 272 bp, Glycine max
taagtgagatacacagtagttaggtagcaagcataagtgtctaaccttagaaacatatctgctacatatcgtgtgcattttggaattgtgccactaaaattctattcatctatggctgcctcatcttatgctatgcaatcaatccttgcaaaccctatgatccgcatttccagcgggtctagggagaaccattttggtgttcctgcttatcacatgagaaggaatgttggcctgagagttaggtccatggctgaggaagagcaaccaagtca

SEQ ID NO: 120294 - DNA, 259 bp, Glycine max
gcaagcaatccagtggttagacagcaaccagcttgcagaagcagatgagtttgaggacaaaatgaaggaattggaaagcatctgcaatccaatcattgccaagatgtaccaaggtggtgctggtccagacgtgggtggtgctggtgcagcagaggatgagtatgctgctcctccttctggtggaagtggtgctggccccaagattgaggaagtggactaaatgtagttgctttcctccagatacctgttttaaaaactt

SEQ ID NO: 120295 - DNA, 260 bp, Glycine max
gctattatccccagacgccaccgccgcagcaccagaagaagaagaagagtgatggctgagtacgacctaactccgcggatggcgccgaatctcgacaggcaccttgtgttccctctcctggagttcctgcaggagcggcagctctacgacgacgaccacatcctgaaggcgaagatcgaccttctcaacaacaccaacatggttgactacgctatggacatccacaagagcctctaccacaccgaggacgtcccgaacga

SEQ ID NO: 120296 - DNA, 266 bp, Glycine max
cgtccgattctctcaccgatctcgcgccaaatacaaattcgtgtcaacccaacccagggttccggcgagcatggccgacggtccggctagcccaggcggcggcagccacgagagcggcgaccacagccctcgctctaacgtgcgcgagcaggacaggtacctccctatcgctaacataagccgcatcatgaagaaggcacttcctgccaacggtaaaatcgcaaaggacgccaaagagaccgttcaggaatgcgtctccgagttca

SEQ ID NO: 120297 - DNA, 211 bp, Glycine max
ctaacattttgttgggtggggccttctctggagcggccatgaaccccgctgtgacatttgggcctgctgtcgtgagctggacctggaccaaccactggatctactgggccgggcctctcatcggtggtggaatcgctggccttgtttacgaggttgtctttatcagccacacccacgagcagcttcccaccactgactactagaggggggg

SEQ ID NO: 120298 - DNA, 241 bp, Glycine max
cagaaagcaagctcatcctagagttttaaaaatggcagcagcctcctccatggctctctcttccccatccttggctggcaaggccgtgaagctgggcccatcagcccccgaagtcgggagggtcagcatgaggaagaccgtcaccaagcaggcctcctccggaagcccatggtacggcccagaccgcgtcaagtacttgggcccattctctggcgagcccccgtcctacctcactggcgag

SEQ ID NO: 120299 - DNA, 292 bp, Glycine max
gcgatggcaaacttttttatggtcttcatgttgataatggtcgtattggtggaaacatgaaaaagacattgagggaggttatcgagaagtataatttgaatgtaagaatcactccaaatcagaatatcatcttgactgatgttcgtgctgcatggaagcgtcccattacaaccacgcttgctcaagctggtttgctgcaacctagatttgtagatcccctcaacataacagcaatggcatgccctgctttcccattatgtcctctggcaattactgaagctgaacgtgggat

SEQ ID NO: 120300 - DNA, 295 bp, Glycine max
cacaaactcagggtagggcagagagagagagagagagagagagagagagagagaatgggagggtgggctatcgcggtgcatggtggcgctggtgtcgaccctaatctcacactcgagcgccaagaagaagcgaaacaacttctcacgcgctgtctcaatcttggaatctctgctctaaattctaatcttcccgccatagatgtcgtcgaacttgtggtgagggaattggaaacggatccgctgttcaattcgggccgtggatctgccctgacagaaaaaggaacggtggagatgg

SEQ ID NO: 120301 - DNA, 301 bp, Glycine max
ggaatttcgatgctcagtcatctcttttaccattctcttctctcttgctcttgcaggagagagccatgtccatgcatcgctacctgaggaagattattgggaagctgtttggccaaacactcccattcccactgcactgcgagagcttctaaagccactccctgcaggtgttgaaatcgatgaactccctaagcaaattgatgatacacagtacccaaaaacattcttctataaagaagaccttcatccaggcaaatcaatgaaagtacaattcaccaagcgtccctatgcacaaccttat

SEQ ID NO: 120302 - DNA, 299 bp, Glycine max
attgatattgttaagctagctctaagccatggataatgaacgtgatctgttctcggcggagattgtgacccgtggaattgaatcgtcaggaccaaacgctgggtcgttgacgttttcggtgagggtgagaaggcgcttaccggattttcttcaatcggtgaaccttaagtacgtgaaattgggttaccattatctgataaaccatggcatatacttgttcaccataccggttcttctcgtggtgtttagtgctgaggttggaagcctcagcaaagaggacctatggaagaagctttggg

SEQ ID NO: 120303 - DNA, 238 bp, Glycine max
ggtacttcagcactatggtgttgagattggtaggcagacgaagacagctgccaagaaggaaactgcagaggaagcgtgtgctgctgtagctgtggaagaagccaaaacgagtcatcatctgcagacaaaattggagaagcgaccacaagatcgtaagcttgatgctcacattgaggagcagtttggtggtgggcagctcgtaggttgcatatcctctcggcctggtcaatgtggcaga

SEQ ID NO: 120304 - DNA, 295 bp, Glycine max
gtaacctcagagaatttactgtatctggactggcaacagccaaaaagggttttagtcgctcagtcatgcttggagaaggtgggtttgggtgtgtctacaaggggttgatcaagagtgtagatgatccttccacaaaaattgacgttgcagttagacaacttggcagaagaggaattcacgggcataaggaatgggtgacagaagtgaatgttctgggtattgtggagcatcccaatctggtgaaactagtgggatactgcgctgatgatgatgacagaggaatccagcggcttct

SEQ ID NO: 120305 - DNA, 298 bp, Glycine max
tacacacacacacacacacaacacaacacaatcatggcaattcatggtaggtttctgaacactggcctcctccttgtggccacaatccttgtagccaaactcatctcagctttcatagtgcacaagtccagaaagagggtaaccccaattgtgaaggggtggcacttaattggagggctaatccgtttccttaaaggtccaatctttatgctccgtgaggagtaccgtaagcttgggagtgtcttcaccctcaagctcttccacaagaacatcacattcctcgttggccgtgaggtct

SEQ ID NO: 120306 - DNA, 290 bp, Glycine max
caagagcagacggtggctggggaaatgtgaagatttgatcaggttcatccagttggtgtcacttcgggtgtcaatgggcgccatcgatggcacccggagcccttgtcggtgcagggttgcttgatccagtacagaagctgtgctctggtggttgtgataatactgtgaaggtatggaagctaaacaatggactctggaagatggactgcttccctgctcttcagatgcacacggattgggttcgagatgttgcttgggcacccaatttaggctccctaaatctacatgct

SEQ ID NO: 120307 - DNA, 298 bp, Glycine max
tccagacatgggttaaggactacgtctccttgtactatgccacggatgatgcagttaagaaagactcagaactccaagcttggtggaaggaagctgttgagaagggtcacggtgacttgaaagacaagccatggtggcctaagttgaacactcttcaagatctgattcacatttgctgcattattatatggactgcttcagcactccatgcagctgtgaatttcggacaatgaccttatggcggtttcatcctaaatcgtgcaactctaaccagaagattgctcccagagccaggaac

SEQ ID NO: 120308 - DNA, 294 bp, Glycine max
tgggcaaggtcaagatcggaatcaacggatttggaagaattggccgtttggtggccagggtggctctgcagagagacgatgttgaactcgttgccgttaacgatcctttcattaccaccgattacatgacctacatgtttaaatacgacagtgttcacgggcactggaagcatcacgatgtcaccgttaaggatgagaagacccttctcttcggtgacaagccagtcactgtttttggacacaggaaccctgaagagatcccatggaagtcgactggagctgacatcattgttg

SEQ ID NO: 120309 - DNA, 292 bp, Glycine max
attaatattgttaagctagctctaagccatggctaatgaacgtgatctgttctcggcggagattgtgaaccgtggaattgaatcgtcaggaccaaacgctgggtcgttgacgttttcggtgagggtgagaaggcgcttaccggattttcttcaatcggtgaaccttaagtacgtgaaattgggttaccattatctgataaaccatggcatatacttgttcaccataccggttcttctcgtggtgtttagtgctgaggttggaagcctcagcaaagaggacctatggaagaag

SEQ ID NO: 120310 - DNA, 255 bp, Glycine max
ctggtgaaggagggaagaatccgaagccttgaacagatctacctccactcgctcccgatcaaggagcaccagatcatcgacacgctcgtgggtcccaccctcaaggacgaggtgatgaagatcacgccggtccagaagcagacccgggccgggcagaggacccggttcaaggccttcgtcgtcgtcggagacaacaacggccacgtcgggctgggcgtgaagtgcagcaaggaagtggcgacagtattcgtggcg

SEQ ID NO: 120311 - DNA, 213 bp, Glycine max
gtcagtctctgtgtttgcggctgaggattccgaaagagtgaactacttcgtttctcgcatactttgagtgatcatgggtacggaaaaggttcacatcaacattgtcgtcattggacatgtcgaatctgggaagtcacctaagctggtcgattgatctacaagcttggcggtattgacaagcgtgtgattgaagaggttcgacgaagacgctgc

SEQ ID NO: 120312 - DNA, 298 bp, Glycine max
tgtgaaattccaggcaaaattatagaaacatttttatctctccgtccaaacggcagatccgatccgccctacaatcccctctcagtttttctctcgaggatccggtgaaacgacatggcgatggtggaccagcctctgtatccgattgccgttttgatcgacgagttgaagaacgaggacattcagctgcgcctgaactcgatccggaggctctccacgatcgcgcgcgcgctcggcgaggaccgcacgcggaaggagctgattccgttcctcagcgagaacaacgacgatgacgacg

SEQ ID NO: 120313 - DNA, 299 bp, Glycine max
atttgaggccaggcaagccccactcaaccaccacacctctcctcgttcacgctacacctttctgctcttcttctacctttcaagttttaaaagtataaagatggcagagacattcctatttacctcagagtcggtgaacgagggacaccctgacaagctctgcgaccaaatctccgatgctgtcctcgacgcttgcctcgagcaggacccagacagcaaagttgcctgcgaaacatgcaccaaaaccaacttggtcatggtcttcggagaaatcacgaccaaggccaacgttgactacg

SEQ ID NO: 120314 - DNA, 208 bp, Glycine max
ttctgtttctgtctctgtgtttgcggctgaggattccgaacgagagaccttcttcgtttctcgcaaagtttaagtcatcatgggtaaggacaagactcacatcaacattgtagtcactgagacatgtcgactctgggaactcaactaacactggtcatttgatctacaagcttggaggtattgcaaaccgtgtgattgagaggttcaa

SEQ ID NO: 120315 - DNA, 270 bp, Glycine max
tacgcagtcgcagtgagtgaaaaggaaaaccctaattgcggtattctcagtgccttcgagagaacgaaacaatggcagctaatcttgttctacgtggacacatgcgcgacctcaccgacgttgtgacggcgaatggaactcccgatcgacaatccgacatgatcattaacgactcacgcgacacatccctcatcctctggcatcctaccaaggaagacaagacttaaggtgtccaccgcagccggctcaccggccattctcattttgtcc

SEQ ID NO: 120316 - DNA, 292 bp, Glycine max
cttagccgttgctctgcttcaacattgcggaagcagaagaagcgccgcagctatggtgaagtactccagagaacccgacaatcccaccaagtcctgcaaggccagaggcgctgacctcagagttcattttaagaacactagggagactgcctttgccatcaggaagttgccccttgttaaagctaaacgatacttagaggatgttttggcccacaaacaggctattcctttccgacgcttttgtggtggtgttgggaggacggcccaggctaagaacagacactccaatggg

SEQ ID NO: 120317 - DNA, 286 bp, Glycine max
cgtccgtctctttgtagttgttgtttcagatctgatctgaatgtgattgatgatgggtgctattccagaggccaacggaaatgtcgccgacgaagaaaacgggagcagcgttggtggatccatcgatttcggcacggcggaggccgttcaatacgtccgttccctcaccgacgttggcgccatgacgcgcctccttcacgaatgcatcgctcaccagagagcggtggacgttgaactcgacgagcttctgtcgcagcgcaccgacctcgaccgccatctcctccag

SEQ ID NO: 120318 - DNA, 280 bp, Glycine max
ggcaagcgcttctcctctttgtgttctggctatgcttcttggcacgagttagatcggacgaggattgcgtgtacacggtgtacgttcggacgggttcgatcatcaagggaggcaccgattcagtaattggtctgaagctatacgacaagtccggctacggcatatacatcaccaacctcgaggcatggggcgggttaatggatccgggtcacaactactacgagcggggcaacctcgacatattcagtggtagacgcacttgcttggtaagcacccgttt

SEQ ID NO: 120319 - DNA, 276 bp, Glycine max
  unsure (1)..(276): unsure at all n locations
tgtgaaggtgcagaactgatcccggttgtcaagcaggggtcatctgagaagcccggatacatggttgttgggtttgaggtgattccttgtagtattatgcataatgctgattctgcgaaaaccttgaagatgtatgagaagtatccatcgtctatcagatgcgatccagccactgtggcaatgctatcaaggagggtcagctgttgntttcacttatgaggtcacctatgaggagagtgacatcagtaggcatctagatgngatgctagcttgaga

SEQ ID NO: 120320 - DNA, 292 bp, Glycine max
gcaaagctcatccttgagttaaaaaatggcagcagcttcttccatggctctctcatccccatccttggctggcaaggccgtgaagctgggcccatcagccccagaagtgggaagggtgagcatgaggaagaccgtcaccaagcaggtctcctcaggaagcccatggtacggcccagaccgagtcaagtacttgggcccattctctggcgagcccccgtcctacctaaccggtgagttcccaggcgactacggctgggacactgctgggctttccgcagacccagaaaccttc

SEQ ID NO: 120321 - DNA, 295 bp, Glycine max
gcacatttgcaaagtgttatttttctttttttctcatttgcactgcaaattgcaatggcttccaacaaggttattgccaccatcatggtgctttctctccttgcctactcaacatcattcaccaatgcatgtggcacatgccacccaaaacctaccccttctcctcctcctccatcaggaaagtgccctaaggacacattgaagctaggggtgtgtgcagatattctaggtcttgttactgttgttgttggctcccctgtctccagcaagtgttgtgcattgcttgaaggtttgg

SEQ ID NO: 120322 - DNA, 293 bp, Glycine max
gctgtttttctacatgatacttggtgttgctgctggttatgttgcagttcggctgtggaggacaattggctgcggtgatcagaagggatggatttccgttgcttggaaggctgcttgtttcttccctggtatcgcctttttgatcctcacaaccttgaacttcctattgtggggaagccacagcacgggagccattccattttcactctttgttatactaattttgctttggttctgcatctctgtgcaccttagccttattggtgggctctttggagcaagggcacctcaca

SEQ ID NO: 120323 - DNA, 294 bp, Glycine max
ttctcagctcgttgaaatagcacgtgcgcttgaagattcggggcatgattttatctgggtggtgaggaaaaacgatgggggtgaaggagataactttttggaggagtttgagaagagaatgaaggaaagtaacaaaggatatttaatatggggttgggccccacagttgttgatactggagaatcctgcgattggagggttggttactcactgtggttggaacacggtggtggaaagcgtgaacgcggggttgccgatggcgacgtggcctctgtttgcggagattttttcaac

SEQ ID NO: 120324 - DNA, 290 bp, Glycine max
gtgaaggtgcaggactgatcccggttgtcaagcaggggtcttctgagaagcccggatacatggttgttgggtttgaggtgattccttgtagtattatgcataatgctgattctgcgaaaaccttgaagatgtatgagaagtatccatcgtctatcagatgcgatccagccactgtggcaatggctatcaaggagggtcagcctgttgttttcacttatgaggtcacctttgaggagagtgacatgcagtggccatctagatgggatgcttacttgaagatggagggagct

SEQ ID NO: 120325 - DNA, 280 bp, Glycine max
agctcatccttgagttaaaaaatggcagcagcttcttccatggctctctaatcgccatccttggctggcaaggccgtgaagctgggcccatcagcgccagaagtgggaagggtgagcatgaggaagaccgtcaccaagcaggtctcctcaggaagcccatggtacggcccagaccgagtcaagtacttgggcccattctctggcgagcacccgtcctacctaaccggtgagttcccaggcgactacggctgggacactggtgggctttccgcagacccag

SEQ ID NO: 120326 - DNA, 291 bp, Glycine max
gcacatttgcaaagtgttatttatcttcacatctcatttgcactgcacattgcagtggcttccaacaaggttattgccaccatcatggtgctttctctccttgcctactcaacatcattcaccaatgcaatgtggcacatgccacccaaaacctaccccttctcctcctcctacatcaggaaagtgccctaaggacacattgaagctaggggtgtgtgcagatattctaggtcttgttactgttgttgttggctcccctgtctccagcaagtgttgtgcattgcttgaagg

SEQ ID NO: 120327 - DNA, 286 bp, Glycine max
atcctctttgaggaaaccctctaccagagcacagctgcaggcaagccctttgtgaatgtcttgaaggaagctggtgtgcttcctggcatcaaggttgacaagggcacagtcgagcttgctggaactaatggagaaaccaccactcagggtctagatggccttggtcagcgttgtgccaagtactacgaagctggtgcacgttttgccaaatggcgtgcagtgctgaagattggtcccaacgagccatctgagctgtctatccatgagaacgcctaggcttggctag

SEQ ID NO: 120328 - DNA, 283 bp, Glycine max
ttcaagtctttaattctcgaagacattccaaaccatggaaccattcacttcatatgtaactcctgggtttacaattcaaaacactacaagactgatcgcattttctttgccaacaatacatatcttccaagcgagacaccggctccacttgtcaagtacagagaagaagaattgaagaatgtaagaggggatggaactggtgagcgcaaggactgggatacgatctatgattatgatgtctacaatgacttgggcgatccagataagggtgaaagtatgcacg

SEQ ID NO: 120329 - DNA, 288 bp, Glycine max
ctcttttcttcctcagaaacacatcctaatggcagagcgcggaggtggcgatcgtggcggcgaccgtggcggtttcggacgtggattcggcgggcgaggacgcggaggtgacaggggccgaggccggcgccgagcgccccgccgcgaggacgaggagaagtgggtcccagtgaccaaactgggccgcctggtgaaggagggaagaatccgaagccttgcaacagatctaactacactcgctcccgatcaaggacgcccagatcatcgacacgctcgtgggtcccacct

SEQ ID NO: 120330 - DNA, 84 bp, Glycine max
gtcccgcaacagatctggtgcagggtgagacggttgggttcattacttttgtatcactcttccttctgagcggtaagcgtgggg

SEQ ID NO: 120331 - DNA, 285 bp, Glycine max
gggaaggtgggagaaaccgggtcacaacccactatttgggtatgacttttggtaccaaccacgtcacaataccatgattagcacatcatggggtgctcctagtgcttttacaaaaggttttaacttacagcatctctctgatggattatacgggaggcatctccatgtatatagctggactgggggcgaactgagacaaacaatggaccttggtgattcacggcttatacccttagagataacgtttttgcatgatcctgctacagatacaggttttgtcggcag

SEQ ID NO: 120332 - DNA, 287 bp, Glycine max
atcgctgtggttatcatcttcttcttcctctttcttagatctcttctttctctacgccgcacgccgaaaccatggccggaaaaggagacggtcctgctatcggaatcgatctcggaaccacctactcttgcgtcggtgtgtggcaacatgaccgcgttgaaatcatcgccaacgaccaagggaacagaaccacgtccgtcttacgtcggattcactgacaccgagcgtctcatcggtgatgcggccaagaatcaagtcgccatgaccaccatcaacaccgtcttcga

SEQ ID NO: 120333 - DNA, 278 bp, Glycine max
cggctcgaggttttcacgcttgaagcccctcaccgtcttcgccgccaccaagaaggccgtcgctgtcctcaaggggacctccgccgtcgaaggcgtcgccactctcatccaagaagacgatggcccgacgacagtttctgttagcatcactggccttactccggggcttcatggttttcacctacatgagtatggtgataccacaaatgggtgtatatcaacaggagcacatttaatcctaataacttgacacatggtgctctgaggatgaatccgtc

SEQ ID NO: 120334 - DNA, 287 bp, Glycine max
  unsure (1)..(287): unsure at all n locations
aaaacatctctcagcaaatgaatattctcggacaatcactccaccaatcaaacaacggcagctactcttgttcgtccgccggagactgcaaactcctctaaccttccgaccactccgaaagccgttcactccgacgaggaagtgaacacattagcatcggctcatcctaagaaacgtgcggggcgtcgaatttttaaggagacaaggcatcccgtgtacagaggagtgcggcggaggaacaacaacaagtgggtctgcgaggttcgtgttcncaacgacaagtccac

SEQ ID NO: 120335 - DNA, 274 bp, Glycine max
ctgctctcggggttctgcaactacgctgagaccgccaacgccgccaacgacaccttcaaaggctacggcatagacatgaacaaccccaccaacacgttctccaactacgctgccggcggcaacggcgccgtcgagagattctccagcaccgcgacaaggccaacgtcggcgccgactccttcacctcgtacgccaaagccgccaacgccgcagacatcggattctcgaactacggcaagtccttcaacgcagggaacgacacgttcaccacgta

SEQ ID NO: 120336 - DNA, 256 bp, Glycine max
agtttgacaacttttctgccttagcagagaagttgcgttctgattatgactttggtcacactctgaatgccaaactccttccaagaggagagtcatcagtctctgggcccgtagttaggctgttcaagccattcgagaactttttgttgacttccaggatttcaatgtggaagctctagagaagtttgttgaggaatctagtacccctgttgttactgtctttaacaatgaaccgagcaatcaccctttcgttgtc

SEQ ID NO: 120337 - DNA, 257 bp, Glycine max
aagatgtcgaagcgtggtcgtggtggttcggcggggaacaagttccgcatgtcgctgggtcttccagtggcggcgacggtgaactgcgccgacaacacgggggcgaagaacctctacatcatttcggtgaaaggatcaaaggccgtttgaaccgtcttccctcggcctgcgatggcgacatggtgatggccaccgttcccatccctgacgtcatgaaggcctctatccgccccgacatcgtcaatttcgtacactcg

SEQ ID NO: 120338 - DNA, 257 bp, Glycine max
caaccactctcaccggcatctcgctggtggcgctgcaattcaaggccttgctgaagaaaaatctcttgctgtcatggcggaacaagagagccagcctcttacagttactctcccctctcatattcattttcctcatcttcgcaatcgacaaggccatcaaggcacagacctcgacctcctcctcctacaagagcgtcactgaccctcccatggaaccttctccccccatcactccctgcgaggacaattcttcatca

SEQ ID NO: 120339 - DNA, 257 bp, Glycine max
ggtcgctcagacacgcacagatctgatctgatctgatctatctgaagccgaaaacgccgacggtgatgatgaagatggggtgttcacgttgctccttcttcctcttcctcatcctcttagtggcgctcttccctcgtcgctctccgagatccgcttctccgagatccgaaacgacgatcgccgcatcatccccttcgatcagtttggattcacccacaagggtcgccttgagctcagcgtttccaaaatctcactct

SEQ ID NO: 120340 - DNA, 271 bp, Glycine max
attcggctcgaggcagaaagcaagctcatcctagagttttaaaaatggcagcagcctcctccatggctctctcttccccatccttggctggcaaggccgtgaagctgggcccatcagcccccgaagtcgggagggtcagcatgaggaaaccgtcaccaagcaggcctcctccggaagcccatggtacggcccagaccgcgtcaagtacttgggcccattctctggcgagcccccgtcctacctcactggcgagttcccaggatgatacggc

SEQ ID NO: 120341 - DNA, 260 bp, Glycine max
cctcgctctatttctcagtctctgtgtttgcggctgaggattccgaacgagtgaccttcttcgtttctcgcaaagtttaagtaatcatgggtacggaaaaggctcacatcaacattgtcgtcattggacatgtgactctgggaagtcaactaccactggtcacttgatctacaagcttggacgtattgacaagcgtgtgattgagaggttcgcgaaggaggctgccgagatgaacaagaggtcattcaagtatgcctggg

SEQ ID NO: 120342 - DNA, 256 bp, Glycine max
gttcggtgaagtgagtagtgagtgctgaatcgaatcgaatcgattctccgaacatggcggcgagcgatcgcacagtgttgcaattctcttcatcatcttcttcttcttcgcagatcttgtccgcgaaggtcaccctctggtcatcttcaacatctgcgattgctatgttcgacgccctgaccaagccgaccgcgtcatcggaaccctactcggctccgtccttcccgacggaaccgtcgatatccgaaattcctat

SEQ ID NO: 120343 - DNA, 250 bp, Glycine max
tgcccccggacatcgtgactttatcaagaacatgattactggtacctcccaggctgattgtgctgtccttatcattgactccaccactggtggttttgaagctggtatttctaaggatggacagactcgtggcatgctcttcttgctttcacccttggtgtgaagcagatgatctgctgctgtaacaagatggatgccactaccccgaagtactctaaggctaggtatgatgaaattgtgaaggaagtct

SEQ ID NO: 120344 - DNA, 254 bp, Glycine max
aaaggcgtcttcataaacgccgcccaaaacttctcatacccttttattcattccattcgtttctagggttttcttttctttgccgagaaaatgagagagtgcatttcgatccacattggccaggccggtatcaggttggaaacgcctgctgggaactctattgccttgaacacggcattcagcccgatggacagatgccgagtgacaagaccgttggcggaggagacgacgccttcaacactttttcagcgaga

SEQ ID NO: 120345 - DNA, 254 bp, Glycine max
cacaacttccagaaggtggtgttttgcttctagagaatgtgaggttctacaaggaggaagagaagaatgatcctgaatttgcaaagacgttggcttctctagctgatctctatgtgaatgatgcatttggactgcccacagagctcatgcttctacagaaggagttgccaaatacttgaagccctctgttgcaggattcctaatgcagaaggagcttgattatctagttggggctgtgtcaaaccccaagagac

SEQ ID NO: 120346 - DNA, 254 bp, Glycine max
tctttgcgcagttccctacctctcctttcaagatgcagatcttcgtcaagaccctcaccggaaagaccatcacccttgaggtggaaagctctgacaccatcgacaacgtcaaggccaagatccaggacaaggaggaattcccccggatcagcaacgtctcatcttcgccggaaagcagctcgaggacggccgtaccctcgccgactacaacatccagaaggagtcaaccttcacttgtccttcgtctccgtggt

SEQ ID NO: 120347 - DNA, 241 bp, Glycine max
ctttgagacgattacttactgcatatgctcgacataacccctcagttggctactgcgcggccatgaatttttttgctggcttattgctacttttgatgcctgaagaaaatgccttttggaccttaatgggcttttagatgattattttgatggctattattcagaggaaatgatagaatctcaggtggatcaacttgtttttgaggagttggtgagggagaggtttcccaaattggccaat

SEQ ID NO: 120348 - DNA, 267 bp, Glycine max
  unsure (1)..(267): unsure at all n locations
ccaacgctcttcctcccaccggcaacngnctcatcgtgagcttcggcganatgctcatcgatttcgtccccaccgtctccggcgtgtcccttgcggaggntccgggcttcctcaaggcccccgncggcgcncccgcaacgtcgccatcgccgtcgcgaggctcggcggaaaggcggcgttcgtcggaaagctcggcgacgacgagttcggnacacatgctngctngaatcctnaaggagaacgacgtgcganacgacgggatacaat

SEQ ID NO: 120349 - DNA, 250 bp, Glycine max
attcaatactacaacttctgaatcacttagttgaattgaattatcttcaaaatgagagaaatccttcatgttcaagctggtcaatgtggcaaccaaattggaggcaagttttgggaggtgatgtgtgatgaactgggattgatgccactggaaattacgtaggcaattcccatcttcaacttgagagggttaacgtgtactacaatgaagcaagtggaggacgctatgttcctcgagctgtgcttatgga

SEQ ID NO: 120350 - DNA, 257 bp, Glycine max
gtcctgcttaccattttcacttctctctctctctttagggttttggctctctctctctctctccctccttattcctttctacctctcacacccttctcaatgaccaacaacaacgacaacatcgccgtgaagatctcacttccgccctcaatgaagagaatcgcgccgacctagtcaatgctctcaagagcaagattcagagctctggctggggctcattctgatgttctggagactctatcccccaatgtcaggaa

SEQ ID NO: 120351 - DNA, 255 bp, Glycine max
gcgactgcgcttcagcacaatgggtgcctacaagtatgtttcggagctatggcgcaagaagcagtctgatgttatgagattcttgcagcgggtgaggtgctgggagtatcgccagcaaccttctattgtactttgacaaggtctactcgcccagataaggctcgtcgcttgggtttcaaggctaagcagggttacgtgatttaccgtgttcgcgtacgaaggggtggccgtaagagaccagttccaaagggtatt

SEQ ID NO: 120352 - DNA, 257 bp, Glycine max
caactcacaagctcacagagcaagaacactgttccaatacggaatctaaggcaaagcaaatgaaacatcttgaatcatgggttcaacaggtgagactcagattaccccaacccacgtatctgatgaagaacaaaccttttcgccatgcaactagccagtgcttctgtccttccaatgatcctcaaatcagcacttgagcttgatctgttggaaatcatagccaaggctggccctggtgttcatctttcccccactga

SEQ ID NO: 120353 - DNA, 216 bp, Glycine max
atagcccaagccctatacaaccaaaccctaacacacacccatttgattcagtttccatggctagcctcaaggttgcatttttggctgcagtgctctgcatggttgtggtgagtgcacccatggcacatgcactatcacgtgcgggcaggtgacgaatagcctgatcaattgcatcggttacctccagaacggaggaacgccgccgtcgggatgctg

SEQ ID NO: 120354 - DNA, 175 bp, Glycine max
ctcgttttgacaatggtgagggttagtgtgttgaatgatgctctgaagagcatgtacaacgccgagaagcgcgggaagcgccaggtcatgattaggccatcctccaaggtcatcataaaattcctattgtcatgcagaagcacgggtacattggtgaattcgagtatgttgatga

SEQ ID NO: 120355 - DNA, 248 bp, Glycine max
ggctctctcacgcagtcgcagtgagtgaaaaggaaaaccctaattgcggtattctcagtgccttcgagagaaagaaaaaatggcagataatcttgttctccgtggcaccatgcgcgcccacaccgacgtgtgacggcgattgccactcccatcgacaactccgacatgatcgtcaccgcctcacgcgacaaatccatcatcctctggcatcttaccaaggaggacaagacttacggtgtcccccgccg

SEQ ID NO: 120356 - DNA, 255 bp, Glycine max
ctaacctaaaccctactcattctccatacctcaacgaagaggttaaagagacggcaacactttgctgtccgccttgaccgagcagagcttcgtcttggccctcgattttgccctaaagtactctcagtcaaacagacaccgtcgtcgtcgtcgtcgtcatcaatggcaccgaagcagaccaaggctgagaagaagatcgcttacgatgcgaactgtgcgacctaatggaggagtacggccagatcctcgttgtga

SEQ ID NO: 120357 - DNA, 249 bp, Glycine max
cgcttcaaagggcttcattagtggagaagtcgaggcagaagccacaagagaggatgaaaattttgtctgatgcactgagaacaagcaactatggtgctgaacctatgctccggaattgtggaatttcttaagcactggcttcactgaagtggagggccgggtgttgcctgcaccaaggttgaagtttggcaatggtgaggatctcaatcctaggaatgggagatggaatgtcagcagagtgaaatttgt

SEQ ID NO: 120358 - DNA, 254 bp, Glycine max
agcgagtgagtgagcgagccaggtagggttttcggtgttcccctctttgtgttcgttcgcgacgatggggtccatccccgatccaggcgagttgagcgagttgactcagccgagcttcgacgagttccgcgccaaacctctctcatgaccagctgcaccctcctctggacggagctctccgaccacttctcctccctcgagcaagacctcaaccacaaatccgaagccctcaagcgcaagattcacaccctcga

SEQ ID NO: 120359 - DNA, 250 bp, Glycine max
ctctctcttctcgctcttggcttttcgctcttcactcactctcattcattcatttccaccgttcatggatcacgtaagcgtgtggggtaacacgcccttggcgacggtggatcccgagatccatgactcatcgagaaggagaagcgccgtcaatgccgcggaatcgagctcatcgcctccgagaacttcacctccttcgccgtcatcgaggccctcggcagcgctctcacgaacaaatactccgagggca

SEQ ID NO: 120360 - DNA, 253 bp, Glycine max
catgagggtaggtttgctcaaaggccaactcctctagctgccctcttgaccttcctatggctgccaattggcatcatactctccatcttaagggtctaccttaacatccctttgcctgaaagaattgttggtacaactacaagctcttaggaatcagagttattgtgaagggtacccctccaccgcccccaaagaagggtcaaagtggtgtcctatttgtttgtaaccaccgcacagtattagaccctgttgt

SEQ ID NO: 120361 - DNA, 252 bp, Glycine max
agatagaccccagaagtggtttctgcagctccaattcaatcttctacagcaagcgtaactcctcccactccctcccaacaacgccttcgacgtcaccaccttcatctcctcccgcgcccaccgcgcaccacagccttcgtcgacgccgccaccgcccgccgcctcacctacacccagctatggcgttccgtggagggcgtggcagcctctctctccgtggacatggggatccgaaagggcaacgtggtcctc

SEQ ID NO: 120362 - DNA, 250 bp, Glycine max
cgatggcacattgaagccattagccattgagttaagtttgccacatcctaggggacatgagtttggagccgatagtagagtagtcttgcccccagccgcagtcaacagcgctgaaggcacaatttgttaattgccaaggcttatgttgctgtcaatgacactggctatcaccaactcataagccactggttaaatactcatgccacaattgagccatttgtcatagcaacaaacaggcatcttagtgtgc

SEQ ID NO: 120363 - DNA, 249 bp, Glycine max
gaggcccaggagctgaagcgcgtgttccagatgttcgaccgcaacggcgacgggagaataacgaagaaggagctgaacgactcgctggagaacctgggcatcttcatctctgacaaggacctgagcaaatgatccagaggatcgacgtcaacggcgacggttgcgtggacatggacgagtttggggagctgtatcagaccataatggacgagcgcgacaatgaggaggacatgagggaggccttcaacg

SEQ ID NO: 120364 - DNA, 244 bp, Glycine max
tcgtctcaaatctcttcgttccttcgattcgttccatttcttccaaaatggccaaagacccagttcgcgttctcgtcactggagctgcagggcaaattgggtatgctcttgtccctatgattgcaggggcgtgatgttgggtcctgatgagcccgtgatcctccacatgcttgacattcctccggcagcagagtcattgaatggggttacaatggaattggtggatgctgcattccctcttctt

SEQ ID NO: 120365 - DNA, 249 bp, Glycine max
tgctgatggcgcaaattctgctccatgggactcttcatgccactatctatgaagtcgataagctcaaaattggtggaggcaactttttaaccaagatcgtacaaaacatcgaggagactgttggtttggcaaaggtgtcactaaactatatgcaaccattgatctagagaaggcacgagtggggaggaccagaattattgaaaaagagattaaaaatccaagatggtacgagtcctttcatatttattg

SEQ ID NO: 120366 - DNA, 249 bp, Glycine max
gtggatgcttcaagcaccaggtgccacaagttatataggttgcataggaaaggacaaatttggagaggagatgaagaagaaatgtacactagatggtgtaaaggttaactattatgaaatcgacatacacctacaggaacttgtgctgtttgtgtggttggtggtgaaaggtcccttgttgccaacttatcagctgcaaattgctacaagtctgagcatttgacgagaccggaaaattgggcattagtt

SEQ ID NO: 120367 - DNA, 251 bp, Glycine max
  unsure (1)..(251): unsure at all n locations
caaccaaaaaggtaaacttctgcaacaaccatggttgcaatggcagcagcaacagcatcctacccagttgattttctcaaagcctcgttcaccctcgcgtctctgccccttccaactatgtntcttgacaccaaacaagtgctgtcaagttcaagtggcaggagaaggcatgtggggggttctggagttaggtgcatggcggtgggagaagctgcaaccactgagactaagaagagaagtggatatgagct

SEQ ID NO: 120368 - DNA, 232 bp, Glycine max
cttggatatgtacccaaactagttgctgctgttgcatttgaggggaggcgagagacaatgtcatcgggtgaggttaacaatgggagacgtgcagagcaagcatatgagccggataatggatcagagaggacgcacaaactcctcaagaacgtgtgcgtctgagttgtctgcgtgtcttgcatcaacttgcagctagtatcacatgtgctgaagccatggcagccatcagtgt

SEQ ID NO: 120369 - DNA, 249 bp, Glycine max
ggttatttgattggtgtgcatccatgttaagctagtggcgatcggatctagctacagcctacaacctacagatcaaggaaggaagatgttgggtgttataaggcacaagagtattcgccccgcctctccgcaatcagacacttctcttctgcagctaaagagattactgtcagggatgctctcaactccgcactcgatgaggaaatgtcagctgatcctaaagtcttcttgatgggtgaagagttgggg

SEQ ID NO: 120370 - DNA, 255 bp, Glycine max
gcaagaggtcagttgctgaggagcgagctggacggaagctgggtggacttagggtcctcaattcttactgggtgaatgaggactctacttataaatactttgaggtgattctggtggatgtggctctgctgctattagaaatgatcccagaatcaattggctcgccaatccagtgcacaagcacagagagcagcgtgggctcacctactgctgggaaaagcaacaggggtttacgtggcataggacatctgtacc

SEQ ID NO: 120371 - DNA, 247 bp, Glycine max
gcctcgctctgtttctgtctctgtgtttgcggctgaggattccgaacgagcgaccttcttcgtttctcgcaaagtttaagtcatcatgggtaaggaaaagactcacatcaacattgtcgtcattgacatgtcgactctgggaagtcaactaccactggtcatttgatctacaagcttggatgtattcgacaagcgtgtgattgagaggttcgagaaggcagctgctgagcatgtagaagaggtcatt

SEQ ID NO: 120372 - DNA, 234 bp, Glycine max
ctcgagccgctccaatctgcaaatccaactaacatgggaagccagcaagccgccgtgtcgttgctgacgaacctggcccgcgccgctttcgggctgggcgcctccgcgaccctattgagctcctcctctacgccgtcgatggcgggcagcgcgctgtcctcttcgaccgtttccggggcatcctccactagctcgtaggttacgtgatgcacttcgtcatccagtgtgtgcagt

SEQ ID NO: 120373 - DNA, 248 bp, Glycine max
tgcttagacctgcttctcccggtactggggttattgcaggtgggtctgtgagaattgttctggaaatggcaggagttgataatgctttgggaaagcaactagggagtaataatgcactcaacatgccagagcgactgttgctgctgtgcagaaaatgaagcagtttcgtgaggttgctgaggagcgtgggattccaatggaagaattgtggaagtaatgaaatttgtgaagggactgtaatttttaga

SEQ ID NO: 120374 - DNA, 246 bp, Glycine max
aaccactgagaagagggactggggcatcatccccattcagactatgtatggtagcaatggctgggagtctttcacttgtggcttccgagcagatttccgagaagctcaaattgtcatccataacctggcaaagaagaggatccagcttgtggtcccctcattgattccgttgccctcaaggttttgtacccacccaaaagaacaagagccagtttgctgaaaaatggcaagttcgaagaaggtcca

SEQ ID NO: 120375 - DNA, 246 bp, Glycine max
tctcgagccgattcggctcgagggcttgtgccgtttgtgttgttttagggacgaagaagaagattgtgtcaggttctggaatctgcgcaaagcgggtggtggtggacgcgcgccaccacatgcgggtcgtctagcctccatcgtggcgaaggagcttctgaacggccagaaagtggtggtcgttcgctgtgaagagatttgcatctcgggcgggctggtgaggcagaagatgaaatacttgaggtt

SEQ ID NO: 120376 - DNA, 247 bp, Glycine max
atttttcttcctcagtagtgtcatttacgcttctcttctctgcagcaactatgcctaaccctaaggtcttcttcgacatgaccatcggcggtcaatctgctggccgcatcgtgatggagctcacgccgacgtcactccccgcaccgccgagaacttccgcgcgctttgcaccggcgagaagggcgtagggcggagcggcaagcccctccactacaagggctcgtccttccaccgcgtgatcccgagt

SEQ ID NO: 120377 - DNA, 236 bp, Glycine max
caacactctctcttctcgctcttggcttttcgctcttcactcactctcattcattcatttccaccgttcatggatccagtaagcgtgtggggtaacacgcccttggcgacggtggatcccgaatccatgacctcatcgagaaggagaagcgccgtcaatgccgcggaatcgagctcatcgcctccgagaacttcacctccttcgccgtcatcgaggccctcggcagcgctctcacg

SEQ ID NO: 120378 - DNA, 250 bp, Glycine max
cacagttggaaaaaaaaaaaaaagttgttcaagttggcccttacaaagcaaactggtcgtaattccacaggaggaaaggcacctaggaagcttttcgcaaccagggttgcccttaagtctgcaccactactggtggtgtgaaaaagccaaatcgttatcgtcctggtaccgttgctcttcgtgagtttaggaaatcccagaaggttaccgagcttttaatcaggaagctccccttccagaggctggttcg

SEQ ID NO: 120379 - DNA, 247 bp, Glycine max
cgcaaacccaacacccctcttctctcccataccctctcttcccctcctccttaaccctctccccacgcgcccttctccctccctcacgccccttctctctccctcacgcgcccttctcactctcccgctccttcgttgtcaaagcctcctccagcgagcttccgctggttggtaacaccgcaccggatttcgaagcagaggctgtgtttgaccaggagtttatcaacgtgaaactatctgattacat

SEQ ID NO: 120380 - DNA, 213 bp, Glycine max
gcccaagccctatacaaccaaaccctaacacacacccatttgattcagtttccatggctagcctcaaggttgcatttttggctgcagtgctctgcatggttgtggtgagtgcacccatggcacatgagctatcacgtgcgggcaggtgacgaatagcccgatcaattgcatcggttacctccagaacggaggaacgccgccgtcgggatgctg

SEQ ID NO: 120381 - DNA, 259 bp, Glycine max
aaacgcattgtgtttctctctttccgcggcgtagatctgagcagtttgggaaaccctaactgctctcaccactcactttgctttttttcctctccgatcaacgacctctttcgtcgccctaagtcatggcaggacttgcacccgagggatcacagttacgatgctcgtcaatatgataccaagatgaatgagttgcttacatctgatggacaggattttttcacatcttatgatgaggtttatgacagttttgatgcta

SEQ ID NO: 120382 - DNA, 257 bp, Glycine max
tgcatccagtgcatctattttcggatggctgataactggatcatttggactaatggctgtgatatatgctgttctcaagtggcagcgaaggtcctcattaaattggattaaagctgcagcaagagaaaagaagaaagtttggaaaaagtttaaagttccgctatcggagcatttgtgggtggaagattttacttatagggaacagccatccacttgttgtttctgcttgacttccctttggccttctcaaaatttag

SEQ ID NO: 120383 - DNA, 251 bp, Glycine max
caagtccaacctacccctttttcttctcccaccaacttcaccgtcttcttcctcgatcatgtctcacttcaagggcaagtaccatgatgagcttattgccaatgctgcttacattggcactcctggaaagggtattcttgctgctgatgagtcaacagggacaattggcaagcgtttggccagcatcagtgtagagaatgttgaatccaacaggcgtgctcttagggagctgcttttcaccgctcccggtg

SEQ ID NO: 120384 - DNA, 251 bp, Glycine max
attgaacacacacatagaaacccaacaacaagaatgaagaagatgattctaaccctcttcttcaatatcattttatctctcctctccctctcccacgcctccgtggtggatttctgcgtagcagactacacaggccccaatggccccgcagggtactcatgcaagagcccagcaaaggtcacggtggacgacttcgtctactccggccttggcaccgccggcaacacctcaaacatcatcaaagccgcggt

SEQ ID NO: 120385 - DNA, 247 bp, Glycine max
gaaggatgaccccaacgcgatttccaacttcaggatttcggaaccattgagggagaaattgaaggagaagggtatcgaatcgctgtttcccattcaggccatgaccttcgacaccgttctcgatgtttctgatttggttggccgtgctcgcactggtcagggtaaaactctggcatttgtgttgcccatattagagtctttaataaatgctccagcaaaatctgcgagaaagactggctacgggagg

SEQ ID NO: 120386 - DNA, 246 bp, Glycine max
gttgtgttgaagtatcaaagatgttgattggttctctcttaaacaggcgtcctaagatcaaggggactgtggtgttgatgaccaagaatgtgttcgacgtcaacgacttcatggcgactactaggggcggaccagccgctgttgccggcggcatcttcggtgccgcccaggacattgttggtggaatagttgatggtgctacggccatcttcagccgtaacattgccatacagttgatcagtgcca

SEQ ID NO: 120387 - DNA, 250 bp, Glycine max; identical to SEQ ID NO: 119486

SEQ ID NO: 120388 - DNA, 251 bp, Glycine max
tttgggagttaggttctgcacgctctgcttccagcgagtgttctttcttcgtttcaacaccttaatttgcacacgctgcttcttcagcttgagaaatggcacaagaaacctttctattcacatctgaatctgtaaacgagggtcaccccgacaagctgtgcgaccagatctctgatgcagtgctcgatgcgtgccttgaacaggaccctgacagcaaggttgcctgtgagacatgcaccaagaccaacatg

SEQ ID NO: 120389 - DNA, 250 bp, Glycine max
tgtagaaagagccgctaaacgatcggaccagacaggtgcaggtagcttgaccgccttacccgtcattgaaacacaagcgggagacgtatcggcctatattccaactaatgtgatctccattactgatggacaaatatgtttggaaacagagctcttttatcgcggaattagacctgctattaacgtcggcttatctgtcagtcgcgtcgggtctgccgctcagttgaaagctatgaaacaagtctgcggt

SEQ ID NO: 120390 - DNA, 247 bp, Glycine max
caagagcagacggtggctgggacactgtgagaattgatcaggctcatccagttggtgtcacttcggtgtcatgggcgccatcgatggcacccggagcccttgtcggtgcagggttgcttgatccagtacagaagctgtgctctggtggttgtgataatactgtgaaggtatggaagctaaacaatggactctggaagatggactgcttccctgctcttcagatgcacacggattgggttcgagatgt

SEQ ID NO: 120391 - DNA, 244 bp, Glycine max
gcctgagaaacggctaccacatccaaggaaggcagcaggcgcgcaaattacccaatcctgacacggggaggtagtgacaataaataacaataccgggctcattgagtctggtaattggaatgagtacaatctaaatcccttaacgaggatccattggagggcaagtctggtgccagcagccgcggtaattccagctccaatagcgtatatttaagttgttgcagttaaaaagctcgtagttgga

SEQ ID NO: 120392 - DNA, 244 bp, Glycine max
ggtggccaatgctggcgactgccgagcagttctctgtcgcaaaggagaggccattgacatgtctgaagatcacaggcctatttatctatcagagcggaggcgagttgaagaattgggtggctacatagaagatggttatctgaatggggttttatcagttactcgagcactaggggactgggacatgaagttacctaagggtgctccctcacctttgattgcagagcctgagtttcggcaagtg

SEQ ID NO: 120393 - DNA, 247 bp, Glycine max
acttcaccttcttcctcctcgatcatgtctcacttcaagggcaagtaccatgatgagcttatgcgccaatgctgcgtacattggcactcctggaaagggtattcttgctgctgatgagtcaacagggacaattggcaagcgtttggccagcatcagtgtagagaacattgaatccaacaggcgagctcttagggagctgcttttcactgctcctggtgttctacaatatctcagtggtgtcatcctc

SEQ ID NO: 120394 - DNA, 243 bp, Glycine max
cattttcagaggaaaatggcgggtacggtttcgacttgtttcttcttcgtgtttcttctttctctccttcttccttttcagatctccgctgaggaatcctcggagaaggagttcgtactcacattggatcactctaactttcacgacactgtcagcaagcacgatttcatcgtcgtcgagttctacgccccatggtgtggtcactgtaagaagcttgctccggagtatgagaaagctgctcta

SEQ ID NO: 120395 - DNA, 251 bp, Glycine max
ctctctcactcacaaacgcacactgaattcaaaaacatcgaaagagagaggcatggccgagcaaaccttcatcatgatcaagccagatggcgttcaaagaggccttattggcgagattattagcagatttgagaggaagggtttttacttgaaagggttgaaactcgttactgtggaccgtccttttgctgagaagcactatgctgatttgtctgcaaagccttctttagtggtttggtggattacattgt

SEQ ID NO: 120396 - DNA, 250 bp, Glycine max
agtggaaaatactgtctccagtgagaaaaagagaggaaaacctagtggtttcatctttatgtgcagtgcgaagacaaaacctgactgtttccgttatcgtgtcatgggtgtttcagctactaaaaaagacattgttttaagtatcaatcccgggactaagctttttctttatgattttgatctgaggctgttgtatgggatttacaaagcttcatcttctggtggcatgaaacttgaaccccgagctttt

SEQ ID NO: 120397 - DNA, 251 bp, Glycine max
gcatggcttccgaaacaaaccagtccaagaatgtgtgtgtaattggagctggaccctcggggctattggcagcgagggagctgagaaaagaaggtcacaaggtggttgtgttggagcagaaccatgatattggaggtcaatggctatatgacccaaatgtacaagaggaggatcccttaggaagagacccttggctaaaggtgcatagcagcatctatgagtctttaaggttcatgtctcccagagagatc

SEQ ID NO: 120398 - DNA, 247 bp, Glycine max
ctctttctctagtcctgttatttctcagcgcgtaaagcatggctttgttggtggagaaaaccacgagtggtcgcgagtacaaggtcaaggacctttcccaggccgacttcggccgcctcgagatcgagctggccgaggttgagatgcccggcctcatggcctgtcggaccgagttcggcccctcccagcccttcaagggggcccgcatcaccggctccctccacatgaccatccagaccgccgttct

SEQ ID NO: 120399 - DNA, 247 bp, Glycine max
gtgaaccagaaccagaatggatcttcaacaacgaccactgaaacttcactttattccttacctgtcaccggggcatgtgatccctctctgcggcattgcaacactcttcgcctcacgcgggcagcacgtgacggtgatcaccactccctactacgcccaaatcctccgcaagtcaagcccctccctccaactccacgtcgttgactttcccgccaaagatgtgggccttcccgacggcgtcgaaatc

SEQ ID NO: 120400 - DNA, 245 bp, Glycine max
gggagtcagagaaaccctaggtaagaagaaaagatgccggctggtcatggtttgagatcccgcaccagagattccttctctcgtcctttcaggaagaagggaaccatcgccctcaccacatacctgagaacctaccacgtcggcgactatgttgacgtcaaggttaacggtgccgttcacaagggaatgccccacaaattctaccatggccgcaccggacgcgtctggaatgtcaccaaacgtgc

SEQ ID NO: 120401 - DNA, 243 bp, Glycine max
ctcttgtttcaatttcaacaacggttactcctttttcgttttgagtttcaatcaagccatcatcatgtctaccgcatcgcaacccaaggccaagaaaacggcgtcgtccaagaagcccctctcccaccctcccttcgccgtgatgatagcagaggcgattgcgcagtctgaaagagagaaccggttcgagccaatacgcgataaccaaatacatcgaagggaagcacaaggagttgcctgcaa

SEQ ID NO: 120402 - DNA, 243 bp, Glycine max
gtttaatccttctggatttgattggcaaaaaacagtggatgattggacagattggaagcgatggatgggaaatcgtggtggtattggtatttcatctgataaaagctgggaatcttggtgggatgaagaaaatgaacacctgaaatactcaaatctcagggggaaaataattgagatagttcttgcatttcgcttctttatgtaccaatatggaattgtctaccacatggatattactcatca

SEQ ID NO: 120403 - DNA, 248 bp, Glycine max
aatttctcacactcattccgtgctctaaatctcaaattctagggttagggttcccaatttctccgccaatcagaagatgagttccaccggtggttctaccaagggcggaaggggcaagcccaaagcctccaaatccgtttcaagatcgcagaaagctggtctccaattccccgttggaagaatcgctcgattccttaaggctgggaaatacgctgagcgtgttggtgctggtgctcctgtgtacctct

SEQ ID NO: 120404 - DNA, 249 bp, Glycine max
ttcgagccgatttgggattgggaaggcgagggattgcgctgcgtctcttcctcttctcttacgattcatccctcattcataatcttccaatccaacaacctcagcctcacactcacacatacacacatctgaacgcgtatcgtccctcccatggcttcaaagcgcatcctcaaggtgctcaaggacttgcagaaagacccaccaacttcttgcagcgctggtccagtagctgaggacatgttccattgg

SEQ ID NO: 120405 - DNA, 244 bp, Glycine max
gaaagtacatcgaaggtcaaaattttcagcaaaaatttccaggaaaagaagagtatccgaccaactttttcagctgaacgaatatttggtggcactgtattggcaatgtgctcaaatgatttcatctgcttttatgattgggctgaatgcaggttgattcgtcgtattgatgttaatgttaaaaacctctactaggctgatagtggtgatctagtgacgattgctagtgatacatcattctata

SEQ ID NO: 120406 - DNA, 241 bp, Glycine max
caacctactccaaggaagtcccctaatcagaaccagagatggacaccaaacccaccgagatcagcagcggcaagatgttcggaggttacaagaagagattcaagcatttcagccttaccctgggatgctccatgagattccacatctacttcgctccatctccttctccctctcacaaattccctgtgctgtactttctctctggcctcacttgcaccgacgagaacttcatattcaagtc

SEQ ID NO: 120407 - DNA, 149 bp, Glycine max
tagaagaaaaagaagcgaaactaaagtcagcattcgacaaagatgagtagcatcggtacaggttacgatctatcggtcaccactttctcccctgatggccgcgttttccagatcgagtatgccgctaaagccgtcgacaaaagcgggac

SEQ ID NO: 120408 - DNA, 239 bp, Glycine max
tctgttgttgatcaggatgtatttgttgcgccaagcgcctccgtcattggagacgttcaacttggaagaggatcatccatttggtatggagttgtcttgagaggtgatgttaacatcatcagagttggaaatggaactaacattcaggacaactctctggtgcatgttgcaaagtcaaatttaagtgggaaggtgttgcctacaattattggggataatgttactgtcggccacagtgc

SEQ ID NO: 120409 - DNA, 245 bp, Glycine max
caacaatttcgggaatccgctggctatgactgcagttgtggtcgtcccattgggccttctcttcttcgcttccggcctcatcgttaacctcattcaggcaatatgctacgtggttgtgcggccggtgtcaaagaatttgtaccggcggatgaacagggtggtggctgaactgctgtggctggagctcgtttggattattgattggtgggctggtgttaaggtccaagtattcacagatcctgaaa

SEQ ID NO: 120410 - DNA, 251 bp, Glycine max
ggcaacctcaacatcactggcttctcaactctacattggcctgcgccgcccctgcctcaagctcgattctttcaattctcaatctttctctctcttcgaccctaatcttcgcctatccctctctccacccaaaccctcacgcgccgtcatcgccatggccggcaccgggaagttctttgttggtggcaactggaagtgtaacgggaacaaaagactcaatcagcaagcttgttgctgacttgaacaatgca

SEQ ID NO: 120411 - DNA, 245 bp, Glycine max
aaatgaaggtccttgttttcttcgttgctacaattttggtagcatggcaatgccatgcgtacgatatgttccctctccgaatgaacactggctatggtgcccgtactccggaggtgaaatgcgcaagttggaggcttgctgtggaagcacacaacatctttggctttgagaccattcctgaagagtgcgttgaagcaacaaaggaatacatccatggcgaacaatatagatcagactccaaaaca

SEQ ID NO: 120412 - DNA, 106 bp, Glycine max
gcccagtgattttgtttaccttccgcgagatgcagcatttagtcacttgaagtcatcagattttctcgtgtatggaatctaatcagtggctcaagacgtcttgccc

SEQ ID NO: 120413 - DNA, 234 bp, Glycine max
gcagcacctttaaacgccgaaggttcatccaatctccgaaggccttcaccggattgcaaccatgtcgaggagaaaggttagagagccaaaggaggaaaacgtgactctgggctcagctgttagagatggtgaacatgtttttggagtcgctcgcatctttgcctccttcaatgacaccttcattcatgtcactgatctgtctgggaggtaaaccttgtccgcatcatggcggga

SEQ ID NO: 120414 - DNA, 236 bp, Glycine max
ctcgagccggtttctgtctctgtgtttgcggctgaggattccgaacgagcgaccttcttcgattctcgcaaagtttaagtcatcatgggtaaggaaaagactcacatcaacattgtcgtcattggacatgtcgactctgggaagtcaactaccactggtcatttgatctacaagcttggaggtattgacaagcgtgtgattgagaggttcgagaaggaggctgctgagatgaacaa

SEQ ID NO: 120415 - DNA, 257 bp, Glycine max; identical to SEQ ID NO: 120382

SEQ ID NO: 120416 - DNA, 246 bp, Glycine max
gcgtttactgttgggagaaatacctgagcggactgtcttcatgcagaaaggaatggagaaagctttaaggccttactttgagcttacaaatgctgtgcggattggagacttggaactgtttaggaatattgcagacaagtttgccactacctttaatgcagacagaacccataatttgattgttcgtttgcggcataatgtcatcaggactggtttacgcaacatcagcatctcctattctcgcat

SEQ ID NO: 120417 - DNA, 241 bp, Glycine max
tgctcactcgctcttctccgccacttctgaatctattgaatcaacaatcatgtcggacgaagagcaccatttcgagtccaaggccgacgccggagcctccaaaacctaccctcagcaagccggtaccatccgcaagaacggctacatcgtcatcaaaggccgcccctgcaaggttgtggaagtttcgacttccaaaactggaaagcacggtcacgctaagtgtcactttgttggaattgat

SEQ ID NO: 120418 - DNA, 239 bp, Glycine max
gatccatcgatcaattaatttccaatggccgatcagctcaccgacgaacagatctctgagttcaaggaagcctttagcctcttcgacaaggacggcgatggttgtattaccaccaaggaacttgggactgtgatgcggtcgcttgggcagaacccaactgaggctgagctgcaggacatgataaatgaggttgatgctgatgggaatggtaccattgatttcccagaattcctcaatct

SEQ ID NO: 120419 - DNA, 243 bp, Glycine max
gttggacatgctagcatgcaagtatgcattgctggatttaaaaaggggcagctgaaagtgttgtcccaatcatatgataggtccctaggtgggagggactttgacgaggttctgttcaatcattttgctgcaaagtttaaggaggagtacaagattgatgtattccaaaatgccagggcttgtctgaggttgagggctgcttgcgagaagctgaagaaggtgcttagtgctaatcccgaggca

SEQ ID NO: 120420 - DNA, 237 bp, Glycine max
ctctgacccgagtagcatggggcacgtggaatcccgtgtgaatcagcaaggaccaccttgcaaggctaaatactcctgggtgaccgatagtgaagtagtaccgtgagggaagggtgaaaagaacccccatcggggagtgaaatagaacatgaaaccgtaagctcccaagcagtgggaggaggctccggaatctgaccgcgtgcctgttgaagaatgagccggcgactcataggcagt

SEQ ID NO: 120421 - DNA, 238 bp, Glycine max
ctaggcacccagagacgaggaagggcgtagtaagcgacgaaatgcttcggggagttgaaaataagcgtagatccggggattcccgatataggtcaacctttcgaactgctgctgaatccacgggcaggcaagagacaacctggtgaactgaaacatcttagtagccagaggaaaagaaagcaaaagcgattcccgtagtagcggcgagcgaaatgggagcagctaaaccgtgaaaacg

SEQ ID NO: 120422 - DNA, 188 bp, Glycine max
ttctattacaacatcgcccgcaaccatgaccatggctgcgatcgtgctcctgttcacggtctttgccgtttcctccgccctagacatgtcgataatctcgtacgacagcgcccacgcggacaaggccgccacgttgcgcaccgaggaggagctgatgtccatgtacgagcagtggctccgtgaagcac

SEQ ID NO: 120423 - DNA, 272 bp, Glycine max
aggttatggtggatacctaggcacccagagacgaggaagggcgtagtaagcgacgaaatgcgtcgtggagttgaaaataagcgtagatccggggattcccgatataggtcaacctttcgaactgctgctgaatccacgggcaggcaagagacaacctggtgaactgaaacatcttagtagccagaggaaaagaaagcaaaagcgattcccgtagtagcggcgagcgaaatgggggcagcctaaaccgtaaagacggggttgttggagagcta

SEQ ID NO: 120424 - DNA, 258 bp, Glycine max
gctccctcagaagcgaagaaggagccacatagtatcagtctcctactctctctcatccacgatagaaatggcatctcacatcgtttcataccccgtcatgtgtcccaagagagagctcaagttcgctctctagtctttctgggattgcaagatcatcgccgatgatttgcagaaggtgtctgctgatctcagttcatccagctgggtgcatattggcgcgtgctgggatcaagtgcatccccaggaacactttctcgt

SEQ ID NO: 120425 - DNA, 256 bp, Glycine max
  unsure (1)..(256): unsure at all n locations
gattatttgtttgtttcagtcttctcgccatagctgaggagaccctggcagagttcctttccaaggctactggaactgctgtcgactgggtccagatgattgggatgaagcctggtccggattctattggaatcgttgctgtttcccgcaactgtagtggcgtggcagcacgagcctgcggccttgtgagcctagagcccactaaggttgctgagntactaaaagatcgacagtcgtggtatcgtgactgtcgatg

SEQ ID NO: 120426 - DNA, 267 bp, Glycine max
gtttcttcttcaacgtcctcttacgagcagatcccaattctccttcccagtttcaaaccctaattccctcattcccatggcctcagaagagcccactgtcgcggtggaacccgctcccgaacctgccaccgccgagcctcccccggaggagaaggaggagcccaaacctgaagccaaggctaagaaaaccaaggaacccaaacctaaaaaggtttccagaccacgcaaccctcccactcatccttcctacgaggagatgattaaaga

SEQ ID NO: 120427 - DNA, 261 bp, Glycine max
cgcacgaatatcttgttgtttggagcgatccgagaaaaactctgtaaacatgttggtttaccaggacctccttacaggtgatgagcttctctctgactccttccgttacaaggaaattgagaatggaatgctgtgggaagttgaggggaagtgggttgttaaaggagcagttgatgtagacattggtgcaaacccttctgctgagggtggaggagaagatgagggagttgatgatgcagctgttaaggttgttgacattgt

SEQ ID NO: 120428 - DNA, 266 bp, Glycine max
tttcatttctacatccctggctctgttccgtcgatgacgatggcgtttagggtgcgaaaccctgacctccgctttctcattcttctctctctcttgtccatcacttccgccaaggtcttcttcgaggagcgtttcgatgacggatggggaaatcgttgggttaaatcagattggaaaaaagatgagaacctggctggggagtggaaccagacctctggccaatggaatggagacgctagcgacaaaggtatgcaaaccagtggggt

SEQ ID NO: 120429 - DNA, 258 bp, Glycine max
atcgtgtgggagatcgtcaagaaaaacaattccttcttggtcaagcagtttggaaggggcacccagagcgtcgaattcagcagagagagcaacaatctctacaacctcaattcgttcaagtactctggtttggcaaacaagaaaactgttactgttcagcctgagggcaaagatcaggctgtgttgttggctacaaccaagacaaagaagcaaaacaagcccgctgcattgctccacaaatctgtgatgaagaaggag

SEQ ID NO: 120430 - DNA, 258 bp, Glycine max
atggttctcaaaactgaactatgccgattcagtggtgccaagatctaccccggaaagggcatcagatttgttcgtggtgattctcaggttttcctgtttgccaactcaaaatgtaagcggtatttccacaaccgcctgaagccctcaaagctcacctggactgctatgtacagaaagcaacacaaaaaggacattgctcaagaagctgtgaagaagaggagacgcgctgccaaaaagccttactctaggtccattgtt

SEQ ID NO: 120431 - DNA, 259 bp, Glycine max
ctagtcctgttatttctcagcgcgtaaagcatggctttgttggtggagaaaaccacgagtggtcgcgagtacaaggtcaaggacctttcccaggccgacttcggccgcctcgagatcgagctggccgaggttgagatgcccggcctcatggcctgtcggaccgagttcggcccctcccagcccttcaagggggcccgcatcaccggctccctccacatgaccatccagaccgccgttctcattgagaccctcaccgccc

SEQ ID NO: 120432 - DNA, 265 bp, Glycine max
aaaggcttatggtggatacctaggcacccagagacgaggaagggcgtagtaagcgacgaaatgcttcggggagttgaaaataagcgtagatccggggattcccgatataggtcaacctttcgaactgctgctgaatccacgggcaggcaagagacaacctggtgaactgaaacatcttagtagccagaggaaaagaaagcaaaagcgattcccgtagtagcggcgagcgaaatgggagcagcctaaaccgtgaaaacggggttgt

SEQ ID NO: 120433 - DNA, 266 bp, Glycine max
gtttcttcttcaacgtcctcttacgagcagatcccaattctccttcccagtttcaaaccctaattccctcattcccatggcctcagaagagcccactgtcgcggtggaacccgctcccgaacctgccaccgccgagcctcccccggaggagaaggaggagcccaaacctgaagccaaggctaagaaaaccaaggaacccaaacctaaaaaggtttccagaccacgcaaccctcccactcatccttcctacgaggagatgattaaag

SEQ ID NO: 120434 - DNA, 262 bp, Glycine max
tctcaatctctctctctccaatggccaaagacctcgaaacggagattcaaagtgggttgcctcacaaggactaccacgacccaccccccgccccattctacgaccccgccgagctccgaaagtggtccttcttccgagccctcatcgccgagttcgtcgccaccctcctcttcctctacgtcaccatcctcaccgtcatcggctacaaccaccagacagccaccgccgccgagccctgcagcggcgtcggcgtcctcggcat

SEQ ID NO: 120435 - DNA, 260 bp, Glycine max
aaatcaaagccatggccacctccaacttctctattgttctctccgtctccctagccttctttttggtgctacttaccaaggcacactcgaccgataccgtttctttcaccttcaacaagttcaacccagtccaaccaaacattatgctccaaaaagatgctagtatttcatcctctggggtgttacaactcaccaaagttggcagcaacggcgtgcccacctcgggatctctcggtcgtgccctttacgctgccccaatc

SEQ ID NO: 120436 - DNA, 260 bp, Glycine max
cactccctcctcttcacacattttcttagctctctccaacaatccctctcgttcacactttcagattgtgtgaagatgggggctggtggccgaactgctgttcctcctgccaacaggaagtcagaggctgaccctttgaagcgggtaccatttgaaaaacctcagtttagtctcagccagattaagaaggccattccacctcactgtttccagcgctctgttctccgctcattctcctatgttgtttatgacctcaccat

SEQ ID NO: 120437 - DNA, 260 bp, Glycine max
  unsure (1)..(260): unsure at all n locations
cgcaactcacactgtntnnnttctctagggtttttagctcctccanattcttcgcccaacatggttcttcaaaatganattgattngctaaatcncccggctgancttgannngagggtacacaagctcangcgtnttgnnnanncagtaaantntttcttcatggatgttaagtgccagggttgcttcancataaccactgtctttagccactctcagactgttgttgtatgcggnaattgncagaccgtcttgtgcca

SEQ ID NO: 120438 - DNA, 264 bp, Glycine max
accctccctcacaaattccgttgatttatttttcccggtaaagttcaaaaaccctaaccccgattcactctctccgactcttacattcggattcgtaaccgaaaatcggatggagagaagtgttgattacagttcagaggaggaatgcacggaggattatcggcgtggaggataccacgcggttcgagtcggcgacgctttcaacaatggccgttacatcgtgcagtccaaactcggttggggccatttttccaccgtctggct

SEQ ID NO: 120439 - DNA, 250 bp, Glycine max
gtgctgcgagatgccgatagggttcgtgcagatccccgtgggagtagcggggccattattgttggatggaaaagaattcaccgtgcccatggccaccactgaagggtgtctggttgcgagcaccaacagaggttgcaaagctatatacgtctccggtggggcctcctcggtgttgcttagggatggtatgaccagagcacccgttgttcggtttccctccgcacagcgcgccgcgcagttgaaattcttc

SEQ ID NO: 120440 - DNA, 252 bp, Glycine max
ttcataaacgccgcccaaaaccatttatagggttttcttttctttgccaagaaaatgagagagtgcatttcaatccacattggtcaggccggtatccaggtcggaaacgcctgctgggaactctattgccttgaacacggcattcagcccgatgggcagatgccgagtgacaagaccgttggaggaggagacgacgccttcaacacattcttcagcgagaccggcgccggaaagcacgtgcctcgcgccgtc

SEQ ID NO: 120441 - DNA, 271 bp, Glycine max
ctttttcccaattttcgaatctctctcctccatggacccaacttcggtccctccccctccggccaccaccgtccccttcactgtcgaacccagcaatcacgtgacccccgccgacaacaccaacaccaaccaccctccttacgatgagatgatatacacagcaatcggggctctgaaggagaaagatggttcgagcaagcgagccataggaaagtacatggaacaagtgtacaaggaccttccacccacccactctgctttgttgactcac

SEQ ID NO: 120442 - DNA, 264 bp, Glycine max
ggcagcgagcgctcccactccacgcgaagagttcgtgtacatggcgaactgtgcggagcaggccgagcgctacgaggagatggtggagttcatggagaaggtctccgcctccgccgagagcgaggagctgaccgtggaggagcgcaacctcctctccgtcgcctacaagaacgtaatcggcgctcgccgcgcctcctggcgcatcatctcctccattgagcagaaggaggagagccgcggcaacgaggaccacgtcgccgtcat

SEQ ID NO: 120443 - DNA, 261 bp, Glycine max
ctcgagccgctcaaacctcttcgttccttcgattcattccatttcttccaaaatggccaaagacccagttcgcgttctcgtcactggagccgcagggcaaattggatatgctcttgtccctatgattgctaggggagtgatgctgggtcctgaccagcccgtgatcctccacatgcttgacattcctccagcagcagagtcgttgaatggggttaaaatggaattggtggatgctgcattccctcttcttaaaggtgttgt

SEQ ID NO: 120444 - DNA, 259 bp, Glycine max
ctcgagccgttcaaagaaggcgtcttcataaacgcctttcttctccgtttccgtttcctcgatcgaattcgctttttgatctgcgaaaatgagagagtgcatctcgatccacattggtcaggctggtatccaggtcggaaatgcttgctgggagctctactgcctcgagcacggcatcgggcccgatgggcaaatgccaagtgacaagacagttggcggtggtgatgatgctttcaatactttcttcagcgagactggt

SEQ ID NO: 120445 - DNA, 256 bp, Glycine max
ggtttgtgccgaggtatctctagttctgacttacatgcacctgtgtgtggaggattggaaatggtggtggaaatcgttctttgcctctggttctgtcgccatatacatctttttgtactctgttaactatcttgtgtttgatctcaagagtttgagtggtcccgtgtctgcaactctttacttaggatactcactcttcatggttctagcaatcatgctttctacaggtacaattgggttcctctcttcattctgg

SEQ ID NO: 120446 - DNA, 266 bp, Glycine max
gcttgaacccaccgcgtttcggagagagagacgtcgcaatggggaggaggcctgcaaggtgttaccggcagataaaaaacaagccataccccaaatcacgtttctgccgtggtgttcctgatcctaagatcagaatttatgatgttggtatgaagaagaaaggtgttgatgagtttcccttctgcgttcatctggttagctgggaaaaagaaaatgtttcaagtgaagcattggaagctgctagaattgcatgcaacaaatatatg

SEQ ID NO: 120447 - DNA, 268 bp, Glycine max
aagcaacaaacgttgatggagtttttgatgaggacccaaagcgtaatccacaagcacgtcttcatgagacactaacctatcaggaggtaacttccaaagatctgtcagtgatggacatgactgccataactttatgccaagaaaataatattccagttattgtctttaatcttaacaaacctggtaacattgagaaagctattaaaggagaaagagttggcactttgattggggccacctggaattctaccgtatcaagagcatgaaa

SEQ ID NO: 120448 - DNA, 265 bp, Glycine max
caggctcgtatcttctctgattcgatcctcccttcgtagatctcaatcgaagccctcaatttccgcatcgacatcgagcttcacgtcatccaaccgtgcctcaccgcacggatacttgctgaaccgcgtcgccgagtacgccaccgccgcggctgctgctaccactcctccctctcctcctcctccggggaagaaggagctcggcggcggcgggaagatcaccgatgaattcaccgggaagggcgcgatcgggcaggtctgccag

SEQ ID NO: 120449 - DNA, 260 bp, Glycine max
caaagcaaagctcatccttgagttaaaaaatggcagcagcttcttccatggctctctcatccccatccttggctggcaaggccgtgaagctgggcccatcagccccagaagtgggaagggtgagcatgaggaagaccgtcaccaagcaggtctcctcaggaagcccatggtacggcccagaccgagtcaagtacttgggcccattctctggcgagcccccgtcctacctaaccggtgagttcccaggcgactacggctgg

SEQ ID NO: 120450 - DNA, 258 bp, Glycine max
cccaggcgaggagaaagatggaggggaaggagcaggatgtgtcgttgggagcgaacaagttccccgagagacagccgattgggacggcggcgcagagccaagacgacggcaaggactaccaggagccggcgccggcgccgctggttgacccgacggagtttacgtcatggtcgttttacagagcagggatagcagagtttgtggccacttttctgtttctctacatcaccgtcttaaccgttatgggagtcgccgggg

SEQ ID NO: 120451 - DNA, 255 bp, Glycine max
gtaaattttaggcacacaattgatgactgcagagcgccgaaaagctatttgggcaatttatggtatgtgtgattagattagattacacactcactgctatttcagcttctccagtgagacttgttttggaattgacaattattcattgtgcattgcagtgtggtgcagaagaactgatgagctagtggatggcccaaatgcttcgcacatcacccccggggccttggacaggtgggagcaacgactgagtgatgt

SEQ ID NO: 120452 - DNA, 255 bp, Glycine max
gtaagctctgaagcattaccagcaacatcgcaaacgaacgcagcgtaaaatttctttcttcagcattcgtatatcaggcttctgattgtgttctaagaggatggggagcgttactgaagggaagttgaggttttgtattgatagagggggcacgtttactgatgtgtatgcagaaatccctggtcagactgatgggcaagttttgaagcttctgtcggttgaccctttgaactatgatgatgcaccggtggaagg

SEQ ID NO: 120453 - DNA, 253 bp, Glycine max
tctctgcgttccttctccttctgtccgctgcgactctctttccttccctctttttccgaatctgaatcgaaatggcttcggagactgagacgtttgcttttcaggccgagatcaaccagctcctcagtctaatcatcaacaccttctacagcaacaaggagatctttcttcgtgagctcatcagcaatgcctctgatgctttggacaagattcgatttgagagtcttacagacaagagcaagcttgatgctca

SEQ ID NO: 120454 - DNA, 238 bp, Glycine max
ggcatggctaatgaagaggaacagagaaaccacctcttcggcatcaaagatctcggtcacaagactctccttcagagtgatgcactctatcagtatatacttcaaaccagtgtctatccaagagagcacgagtgcttgaaagagatacgcaagatgactgctaaagagggactctcacaggattggcttagggatggtatgaccacacttcccgggttcggtttccctccgcccagct

SEQ ID NO: 120455 - DNA, 261 bp, Glycine max
tttcatttctacatccctggctctgttccgtcgatgacgatggcgtttagggtgcgaaaccctgacctccgctttctcattcttctctctctcttgtccatcacttccgccaaggtcttcttcgaggagcgtttcgatgacggatggggaaatcgttgggttaaatcagattggaaaaaagatgagaacctggctggggagtggaaccacacctctggccaatggaatggagacgctaacgacaaaggtattcaaaccagt

SEQ ID NO: 120456 - DNA, 267 bp, Glycine max
actcgagccgattcggctcgagcgagctgagaataccagttgctccactagccggcactaaacaacatggcggacaaggcagtgaccatccgaaccaggaagtttatgacaaacaggcttctctccagaaagcagttcgtcgttgatgtccttcatccagggagggctaatgtttccaaggctgaactgaaggagaagctgggaagaatgtatgacgtgaaagacaccaacactgtatttgtcttcaagttccgaactcattttggt

SEQ ID NO: 120457 - DNA, 264 bp, Glycine max
tcaccattgtacaacccaattcccttcgtcggtttcgattaagagagcaatggcgcgtaccaagcaaaccgttcgcaagtcgaccggaggaaaggctccgatgaagcaattggcaaccaaagccggtcgcaagtcagccccggcgaccggcggagtgaagaagccccaccgcttcaggccaggaacggtggctctgagggagattcgaaagtaccagaagatcaccgaacttctgatccgaaaactcccattccagaggctcgt

SEQ ID NO: 120458 - DNA, 263 bp, Glycine max
actccatttccattttctctctcacttttcaagaatcgtaagctatgggaaagtcttacccaactgtgagtgctgattaccagaaggccgttgagaaggcgaagaagaagctcagaggcttcatcgctgagaagagatgcgctcctctaatgctccgtttggcatggcactctgctggaacctttgacaagggcacgaagaccggtggacccttcggaaccatcaagcaccctgccgaactggctcacagcgctaacaacggt

SEQ ID NO: 120459 - DNA, 258 bp, Glycine max
aagacgtcttgcccgtgttgactgatgcgtttgatggcaatcttttgagccttgagttctgataactttgctgaagtgcgcaaactctatgaaggtggagttacactacctacaaactttcttagcaagatcgcccctataccagtggtcaaggaaatttttcgaactgatggcgaacagttcctcaagtatccaccacctaaagtgatgcaggtggataagtctgcatggatgactgatgaagaatttgctagagaa

SEQ ID NO: 120460 - DNA, 252 bp, Glycine max
ccgcactccgtcttcatcaatcagcatcaccaccgctccaacacaggggaaaatgagggagatccttcacgttcagggagggcaatgcgggaaccagatcggttcgaagttctgggaagtggtgtgcgacgagcacggcatagatccgacggggaagtacgtcggaaactcagatctacaactcgagcgcgtgaacgtgtactacaacgaagcttcctgcgggcggtttgtcccacgcgcagtgctgatgga

SEQ ID NO: 120461 - DNA, 250 bp, Glycine max
agatgcttctgggacaatgggtggggcttgtggttatggaaacttgtatagtcaaggatatgggactaacacagcagtacttagcactgccttgttcaacaatggcttgagttgtggctcatgctaccaaatcaaatgtgcaaatgacccacaatggtgcctccgtggcaccattgtagtcactgccactaatttctgcccccctggtggatggtgtgaccctcccaatcaccattttgatctttctcaa

SEQ ID NO: 120462 - DNA, 251 bp, Glycine max
aagaagtgcagttcccaaatggcaataatctttctttcaagctccgcaattcttcttccaagtcttgctttctttctcacattatttaaccttgcaagttccgaatcattcatcggcgtgaactacggacaagtcgctgacaacctgccgccgccgtcggcacggcgaactgctccagtcgacggccatcggaaaggtgcgtttgtacggaaccgacccggccataataaaagctctggcgaacacgggga

SEQ ID NO: 120463 - DNA, 253 bp, Glycine max
agagactttgagaaagccgtgtaccgatggatactagaacctgcagatcgtgatgctgttttggccaatgttgccatcaagaatggcaaaaactacaatgtcattgtggaaatcgccactatcctctccccggaagagcttttggccgtgagacgtgcttatctcaaccgctacaagcactccttggaagaagatgttgcagctcatacctctggccatctacgccagcttttagtggggttggtgacctcat

SEQ ID NO: 120464 - DNA, 253 bp, Glycine max
aatcccagttcaaaggtaaggtaggttaacactcttcttcatcgtcgtcgcaatgggacgtgtgatccgtgcgcacgtaagggagcaggctcggtcttcaagtcccacacgcaccaccgcaagggccctgcacgcttccggagcctggacttcggggagcgcaacggctacctcaagggcgtggtcaccgacgtcatccatgaccctggccgcggcgcgccgctcgccaaggtcgccttccgccaccctttca

SEQ ID NO: 120465 - DNA, 264 bp, Glycine max
gcggaagaagaagacgccgcagccatggtgaagtactccagagaacccgacaatcccaccaagtcatgcaaggccatatgccctgacctaagagtgcatatcgagaacactatagagactgcatttgccaccatgaagttgccccaggctaaagctaaaagagacctggaggatatattagcacatatacaggcaataccttacggacgctactgagatggtgataggaggacaacccaggctaagagcagacactcaaatggt

SEQ ID NO: 120466 - DNA, 262 bp, Glycine max
ggcaagccccactcaaccaccacacctctcctcgttcacgctacccctttctgctcttcttctacctttcaagttttaaaagtataaagatggcagagacattcctatttacctcagagtcggtgaacgagggacaccctgacaagctctgcgaccaaatctccgatgctgtcctcgacgcttgcctcgagcaggacccagacagcaaagttgcctgcgaaacatgcgccaaaaccaacttggtcatggtcttcggagaaat

SEQ ID NO: 120467 - DNA, 255 bp, Glycine max
cacctttgttcactcttcttctcttgcggctagggttttagcgcacttcttctagatttaaggaagatgggtaaggaaaaggttcacatcagtattgtggtcattggccatgtcgactctgggaaatccactaccactggtcacctgatttacaagcttgggaggcattgacaagcgtgttattgagaggtttgagaaggaagctgctgagatgaacaagaggtctttcaagtatgcctgggtgctggacaaact

SEQ ID NO: 120468 - DNA, 252 bp, Glycine max
cttccgcctcccttcccttcgactccacggcgcagatccgaggagtttgggaaaccctaattcattcctctttgcttctatctctattaccctaacaccagtgatggcaggtttggctccagaaggatcgcagtttgatgctcggcaatatgactctaagatgaatgaattgctttccgcttatggacaagaatttttcacttcatatgatgaagtctatgatagttttgatgcaatgggccttcaagaaaa

SEQ ID NO: 120469 - DNA, 248 bp, Glycine max
gcgccctcgactggggccccggtggtggacccgacctcatcgtcgacgacggtggtgacgctacccttctcatccacgaaggcgtcaaggccgaggagctctatgagaagaccggcgaactccccgaccccaactccaccgacaacgccgagtttcagatcgtgcttaccatcatcagagatgggttgaagaccgatcccaccaggtaccgcaagatgaaggagcgtctcgttggggtttctgaggaa

SEQ ID NO: 120470 - DNA, 247 bp, Glycine max
actttctcctaaaacatctcaatgggttcttcttctattacaacatcgccctcaaccatgaccatggctgcgatcgtgctcctgttcacggtctttgccgtttcctccgccctagacatgtcgataatctcgtacgacagcgcccacgcggacaaggccgccacgttgcgcaccgaggaggacctgatgtccatgtacgagcagtggctcgtgaaccacgggaaggtgtacaacgcgctccgcgaga

SEQ ID NO: 120471 - DNA, 238 bp, Glycine max
atttcaccgcacgaatatcttgttgtttggagcgatccgagaaaaactctgtaaacatgttggtttaccaggacctccttacaggtgatgagcttctctctgactccttccgttacaaggaaattgagaatggaatgctgtgggaagttgaggggaagtgggttgttaaaggagcagtagatgtagacattggtgcaaacccttctgctgagggtggaggagaagatgagggagttga

SEQ ID NO: 120472 - DNA, 231 bp, Glycine max
tcgagcttcagcaatggtgtacgtcaaggctcagaaatcaaaagcctacttcaagagatatcaagtcaagttcaagagaagaagagagggaaaaaccgattaccgtgccacgattcggttgattaatcaggacaagaacaaatataacactccgaaataccgatttgtggttcgctttagcaacaaggacattgttgcacaaataatatctgctagcattgccggcgattt

SEQ ID NO: 120473 - DNA, 126 bp, Glycine max
caggctcgtatcttctctgattcgatcctcccttcgtagatctcaatcgaagccctcaatttccgcatcgacatcgaggggcacgtcatccaaccgtgcctcaccgcacggatacttgctgaaccg

SEQ ID NO: 120474 - DNA, 225 bp, Glycine max
tggatccagtgagcgtgtggggtaacacgcccttggcgacggtggatcccgagatccatgacctcatcgagaaggagaagcaccgccaatgccgcggcatcgagctcatcgcctccgagaacttcacctccttcgcagtcatcgaggccctcggcagcgccctcaccaacaaatactccgagggcatgcccggcaaccgctactacggcggcaacgaattcatcg

SEQ ID NO: 120475 - DNA, 219 bp, Glycine max
acaacttctgctacttcctactccaaccgcacttctgctccgcaattatcatgggcaaggtcaagatcggaatcaacggatttggaagaattggccgtttggtagccagagtggctctgcagagagacgatgttgaactcgttgccgttaacgaccctttcatcaccaccgattacatgacatacatgtttaaatacgacagtgttcatggacactgga

SEQ ID NO: 120476 - DNA, 144 bp, Glycine max
ctcgagccgaatcggctcgagccgctcgagccgggaaaatgttcctttcatcaatggaagcgctcagaacacctttgtcccagggctgattgatctggccatcaagaggaacagtttgattggaggagatgactttaagagtgg

SEQ ID NO: 120477 - DNA, 216 bp, Glycine max
atgtgacggcgttggcattttgggcatcgcttgggccttcggtggcatgatcttcatccttgtttactgcactgccggaatctctgggggacacatcaaccctgcggtgacattcgggttgttccttggacgcaaggtgtctttggtgagggcgttgttgtacatgatagcacagtgtgccggtgcaatctgcggtgctgggttggccaaagggtt

SEQ ID NO: 120478 - DNA, 226 bp, Glycine max
attcggttggcagagtcgtggaaggggaatgatccgtgtgatggttggaactatgttgtgtgtgctgccggaaagattattactgtcaatttcgagaaacagggtttgcagggtaccatctcccctgcatttgccaatttgactgacttgaggactttgtttctcaatggcaataatttgatcggttctatacctgatagtttgatcactttgcctcagcttcaga

SEQ ID NO: 120479 - DNA, 225 bp, Glycine max
tctctccgcagcagccacacttcttcgccgtttcagctgaagagccatccgcaggtaagcaatggttaagcataataatgttatccccaatgggcacttccggaaacactggcaaaactatgtgaagacttggtttaatcaaccagcccgaaagaccagaagacggttggctcggcagaagaagggctgtcaagattttccccaggcctactgctggatctctca

SEQ ID NO: 120480 - DNA, 126 bp, Glycine max
atcatggccacctctgctattcagcaatcagcattcgcaggtcaaactgctctgaagcagctcaatgagttggtccgcaagaccggtggcgccggcaaaggtcgcaccaacatgcgccgtaccgtc

SEQ ID NO: 120481 - DNA, 230 bp, Glycine max
cctcgagccgaatcggctcgagaccaaaagcaatggctaatacaacttcgaattcttcaaatgctctctccctttttctattggccatcgccctctccctcgctgagtcccaatctttcatcggagtaaactacggccaggtcgccgacaaccttccggcgccggaggacacggccagcctcctcaaatccaccaccatcggaaaagtccgtctctacggcgccgatccc

SEQ ID NO: 120482 - DNA, 223 bp, Glycine max
gtcagggtttatcctctaagaaaataaacatactatagcaatgagtgcgtccaggttcatcaagtgtgtcactgtgggtgacggtgccgttggcaagacttgcatgctcatctcctacaccagcaacacttttcctacggactacgtgccaactgtctttgacaatttcagtgcaaatgtcgttgtggatggaagcactgtgaatcttgggttgtgggatact

SEQ ID NO: 120483 - DNA, 224 bp, Glycine max
ctaagatgagctcaacgagaacagaaatctcgtgtggaacaaaagggtaaaagctcgtttgattctgatttccagtacgaatacgaaccgtgaaagcgtggcctatcgatcctttagtccttcggaatttgaagctagaggtgtcagaaaagttaccacagggataactggcttgtggcagccaagcgttcatagcgacgttgctttttgatccttcgatgtcg

SEQ ID NO: 120484 - DNA, 223 bp, Glycine max
ggcttatggtggatacctaggcacccagagacgaggaagggcgtagtaagcgacgaaatgcttcggggagttgaaaataagcgtagatccggggattcccgatataggtcaacctttcgaactgctgctgaatccacgggcaggcaagagacaacctggtgaactgaaacatcttagtagccagaggaaaagacagcaaaagcgattcccgtagtagcggcga

SEQ ID NO: 120485 - DNA, 225 bp, Glycine max
tgaccatcggcggtcaatctgctggccgcatcgtgatggagctctacgccgacgtcactccccgcaccgccgagaacttccgcgcgctttgcaccggcgagaagggcgtagggcggagcggcaagcccctccactacaagggctcgtccttccaccgcgtgatcccgagtttcatgtgtcagggtggcgacttcaccgccggaaacggaaccggcggcgagtcga

SEQ ID NO: 120486 - DNA, 142 bp, Glycine max
gctctgcattaagaacccgcatgtggaggaaaagatcctccacgagctctgcagtgtcctcaagtttacacgtggagatgatatctccacgtggctcgaggagcctctggtgttcgaggaggtagaccgcctggtctatctc

SEQ ID NO: 120487 - DNA, 221 bp, Glycine max
gtcagggtttatcctctaagaaaataaacatactatagcaatgagtgcgtccaggttcatcaagtgtgtcactgtgggtgacggtgccgttggcaagacttgcatgctcatctcctacaccagcaacacttttcctacggactacgtgccaactgtctttgacaatttcagtgcaaatgtcgttgtggatggaagcactgtgaatcttgggttgtgggata

SEQ ID NO: 120488 - DNA, 224 bp, Glycine max
attctctctgtgtatttccctacctctcccttcaagatgcagatcttcgtcaagaccctcaccggcaagaccatcacccttgaggtggaaagctctgacaccatcgacaacgtcaaggccaagatccaggacaaggaaggaatccccccggaccagcaacgtctcattttcgccggaaagcaacttgaggacggccgtacccttgctgactacaacattcagaa

SEQ ID NO: 120489 - DNA, 224 bp, Glycine max
aattattcctagctttatgctccaaggaggtgattttacacatggcaatggtatgggtggagaatcaatttatggagagaagtttgctgatgagaacttcaagttaaagcatactggaccaggacttctatcaatggcaaatgctggtcctgacaccaatggctcacaatttttcattacaaccgtgacaactagctggttggacggaaggcatgttgtttttg

SEQ ID NO: 120490 - DNA, 220 bp, Glycine max
gtggtttcagtgagtgatcggtgttcacttgatccttcataagtcgtcatcatcatcatcatcatcaccgttgattgaagaagatgccgatcagaaacatcgccatcggaaggcctgaagaggctactcaccccgacacgttgaaggcggggttggctgagttcatctccaccttgatcttcgtgttcgccggttcaggttccggcatcgcctacaacaa

SEQ ID NO: 120491 - DNA, 223 bp, Glycine max
ctacagcacaggtctatcccggaacatggacagcaattttggttacccttgacaacgtaggagtttggaatctcagaacagaaaaccttgattcatggtatcttggtcaagaaacatatgtcagggttgtcaacccagaggtcaataacaagactgagttgcccattccagacaatgcccttttctgtggtgcccttagcaaattgcagaagcctcaaaaggt

SEQ ID NO: 120492 - DNA, 222 bp, Glycine max
gaagagaatggctcccaagggtttaatctttttggctgtgttatgcttctcagcactgtcactgagtcgttgtcttgcggaggataatggacttgttatgaacttctacaaggaatcatgccctcaggctgaagacatcatcaaagaacaagtcaagcttctctacaagcgccacaagaacactgctttctcctggctcagaaacatcttccatgactgtgc

SEQ ID NO: 120493 - DNA, 220 bp, Glycine max
atcattctcatattattgtcgccacttcgacctcaatcaccctcgcgccctcgctcttcccttcctggtggcgacaatgtcgactcctgctaggaagaggctgatgagagacttcaagaggctgcaacaagacccgcctgcagggatcagcggtgccccccaggataacaacataatgctgtggaatgctgtcatatttggtcctgatgatactccatgg

SEQ ID NO: 120494 - DNA, 207 bp, Glycine max
ctttatttaggtgacaaaactactcacagagaaagacactcggagaccttgcaagacttcatcaatggctgtcaaagtttatattgtgtactactccatgtatgggcatgttgagaaactagcagaagaaataaagaaaggggcttcctctgtggaaggtgttgaggccaaattatggcaggtacctgagacgctgcaggatgaggt

SEQ ID NO: 120495 - DNA, 160 bp, Glycine max
tttcttttttcccgcagtcatgggcaaggtcaagatcggaatcaacggatttggaagaattggccgtttggtggccagggtggctctgcagagagacgatgttgaactcgttgccgttaacgatcctttcattaccaccgattacatgacatacatgttt

SEQ ID NO: 120496 - DNA, 214 bp, Glycine max
atccgattcaatttggctttggagagtggcaacattcaaattgcagttgcatcagcaacagcaatcgatgaaaaagatcactggtatcgattaggggttgaagctcttcgtcaaggtaactctggtatagtagagtatgcgtaccagaggactaaaaattttgagaggttgtcattcctttatctcattactggtaacgtggagaaactttcaa

SEQ ID NO: 120497 - DNA, 219 bp, Glycine max
ggccacctctgctattcagcaatcagcattcgcaggtcaaactgctctgaagcagctcaatgagttggtccgcaagaccggtggcgccggcaaaggtcgcaccaacatgcgccgtaccgtcaagagtgctccttagagcatttggtatggccctgatcgtcccaagtacctgggtccattctcagagcagattccgtcatacctgaccggagaattccc

SEQ ID NO: 120498 - DNA, 194 bp, Glycine max
catttctccatttccattttctctctcacttttcaagaatcgtaagctatgggaaagtcttacccaactgtgagtgctgattaccagaaggccgttgagaaggcgaagaagaagctcagaggcttcatcgctgagaagagatgcgctcctctaatgctccgtttggcatggcactctgctggaacctttgacaa

SEQ ID NO: 120499 - DNA, 126 bp, Glycine max
gtttgcggctgaggattccgaacgagcgaccttcttcgtttctcgcaaagttttcgtcatcatgggtaaggcaaagattcacatcagcattgtcgtcattggacatatcgactctgggaaatcaac

SEQ ID NO: 120500 - DNA, 211 bp, Glycine max
caccaatctccaaccttcttctccactgttccgtttctctctccaacggagagtcttttgttttttgtggcgagtttgttgcacgtttaagaagcaatggcacgcaagaagatcagagagtatgactccaagaggttgttgaaggagcactttaagagaatctctggccaggagttgcccatcaagtctgcacaggttacagaatccacca

SEQ ID NO: 120501 - DNA, 156 bp, Glycine max
ctccgcaccagtttcaccgcacgaatatcttgttgtttggagcgatccgagaaaaactctgtaaacatgttggtttaccaggacctccttacaggtgatgagcttctctctgactccttccgttacaaggaaattgagaatgaaatgctgtgggaa

SEQ ID NO: 120502 - DNA, 114 bp, Glycine max
tttccatccacattggccaggccggcattcaggtcggaaatgcttgctgggagctttattgcctcgagcatgccattcaggctgatgggcagatgccgagtgataagaccatag

SEQ ID NO: 120503 - DNA, 219 bp, Glycine max
agagaatccgaggcgaagagaagagaaaaattaagatggaggggaaggagcaggatgtgtcgctgggagcgaacaagttcccggagagacagccgattgggacggcggcgcagagccaagacgacggcaaggactaccaggagccggcgccggcgccactggttgacccgacggagtttacgtcatggtccttttacagagcagggatagcagagtttg

SEQ ID NO: 120504 - DNA, 219 bp, Glycine max
tttccatccacattggccaggccggcattcaggtcggaaatgcttgctgggagctttattgcctcgagcatgccattcaggctgatgggcagatgccgagtgataagaccataggtggtggtgacgatgctttcaacactttttacagcaagaccggtgccggaaagcacgtgcctcgtgcagttttcgtggatctccgagcccacggtcattgatgaa

SEQ ID NO: 120505 - DNA, 218 bp, Glycine max
cagagccagcgagagcaaaaccctagttcatccatcaccagtcgaggaagaagatggtgaagttccttaagcccaacaaggctgtcatcgtcctgcagggccgctacgccgggcgcaaagcggtgatcgtgaggaccttcgacgaggaacccagggagcgcccctacggccactgcctcgtcgccggaatcaagaagtaccccagcaaggtcatcaag

SEQ ID NO: 120506 - DNA, 267 bp, Glycine max
ttttgtgaggattccaaagcatggcttcccttgcagcatccactgctgctgcttcccttggcatgtcagaagcttggaaaccccatcaacctcagtggtgccacaaggccagctccatctgcctctagccctgcctccttcaagactgtggctcttttctccaaaaagaaggctgcacctccaaaaaaagctgcagctgctgctcctgccaatgatgagcttgccaagtggtatggtcctgacagaaggatcttcttgcctgagggt

SEQ ID NO: 120507 - DNA, 267 bp, Glycine max
aacgactctatctctcttcgttttgttcttccttgcgctcctcctcgttcgttcgttctccctcgcgtagtcggcaatggcggagaccgagacgtttgctttccaggctgagatcaaccagctcctcagtctcatcatcaacaccttctactccaacaaggaaatcttccttcgtgaactcatcagcaacgcctctgatgctttggacaagattagatttgagagtctgacggacaagagcaagctcgatgctcagccagagttgtt

SEQ ID NO: 120508 - DNA, 264 bp, Glycine max
ctccgccccttttttgttgttccttcttctcgttcgtcgctttgtgatctctctctgcaaccatgtccgcgagaaagagagagagacccaggtttacttggccaagcttgccgagcaggccgagagatacgaagaaatggttgagtgtatgaagaaagtagcaaaacttgatcttgatctgactgtggaagaaaggaaccttctctcagtgggatacaaaaatgtgattggtgcacgaagggcctcttggcgcataatgtcctc

SEQ ID NO: 120509 - DNA, 264 bp, Glycine max
cgccgatgcgcaccgaaatcataattagagccaccagaacccaagctgttctcggtgagaagggaaggaaataagggaacttacctctgtggttcagaagaggttcaagtttcccgagaacagtgttgaactttatgctgaaaaggtcaacaataggggtctttgcgctattgctcaggctgagtctcttcgctacaagctccttggtggactcgctgtgcgcagggcctgctatggtgttttgaggtttgttatggagagtgg

SEQ ID NO: 120510 - DNA, 265 bp, Glycine max
tctgaatctattgaatcaacaatcatgtcggacgaagagcaccatttcgagtccaaggccgacgccggacctccaaaacctaccctcagcaagccggtaccatccgcaagaacggctacatcgtcatcaaaggccgcccctgcaaggttgtggaagtttcgacttccaaaactggaaagcacggtcacgctaagtgtcactttgttggaattgatattttcactgccaagaaacttgaggatattgtgccctcttctcacaactg

SEQ ID NO: 120511 - DNA, 264 bp, Glycine max
cctaggtagagagctcttcctcactctcattcgcaatggccgcagcagcacgtcctctcgtcaccgtgaggccctcgacagtgacatggccaccgacgcctccgccaccgtccctatccctgacgtcatgaagtcctccatccgcccggacatcgtcaacttcgtacactccaacatctccaagaacagccgacaaccctatgcagtcagccgccgcgctggccaccagacttccgccgagtcctggggaaccggtcgtgccgt

SEQ ID NO: 120512 - DNA, 258 bp, Glycine max
cttgcggctagggttttagcgcagttcttctagatttaaggaagatgggtaaggaaaaggttcacatagtattgtggttattggccatgttgactctgggaagtccactaccactggccacctgatctacaagcttggaggcattgacaagcgtgttattgagagatttgagaaggaagctgctgagatgaacaagaggtctttcaagtatgcctgggtgcttgataagcttaaggctgagcgtgaaagaggaatcac

SEQ ID NO: 120513 - DNA, 259 bp, Glycine max
ggctaaccaaccctgacactccttcttctccgcttcctcttcgatcatcgcttcagaatgccgccgaattcgacccctcccagatcgtcgacgtcttcgtacgcgtcaccggcggtgaggtcggcgcggcgagttccctcgccccgaagatcggtcccctcggtctctcccccaagaagatcggagaagatatcgccaaggaaaccgccaaggacttgaagggcctccgcgtcaccgtcaagctcaccgtgcagaaccg

SEQ ID NO: 120514 - DNA, 258 bp, Glycine max
agtgagactacctggccagcacgagccgttgtggtttattgtggttcagtttgtaaatcgtggaggggttacgaaagagattgttaagactcctgaacaatgtggaaggctcacatttcccatttcattgaagcagcctggtcctcgtgattctccaatacagtgttttatcaggaggaacagagaaacttcaacatatctgttgtacattggcctggtaccatcggagaacgagactgataagttgttattagctgc

SEQ ID NO: 120515 - DNA, 263 bp, Glycine max
ctcactttccggctcttgcgggaaggttagagacagattctcatggttatgttaatattgtctgtatacgctggcgtggattttatccatgctaaagcaaaacacctgactctgaacgccgtcgtttcaccgtctctcgttgatgttcacccttgctttaaggaggagtttttcgcttacgacatgacaatctcctacgccggtcacaacacacccctcgttgccgtccaggtgacggatatcgccgacggcgtcttcgtcgg

SEQ ID NO: 120516 - DNA, 261 bp, Glycine max
gcgagatcttcattcgccgattttaaaagatgagtaagcttcagagtgatgctttgcgtgaagcattcaggaatcatggccgattccaaggagaagaatcgcaaatttgtggagaccatcgaactccaaatcgggttgaaaaactacgatccacagaaggacaagcgtttcagtggctctgtcaagctgccccacatccctcgccccaagatgaaaatttgcatgcttggtgatgctcagcatgttgaagaggcggagaag

SEQ ID NO: 120517 - DNA, 260 bp, Glycine max
ggcttatggtggatacctaggcacccagagacgaggaagggcgtagtaagcgacgaaatgcttcgggagttgaaaataagcgtagatccggggattcccgatataggtcaacctttcgaactgctgctgaatccacgggcaggcaagagacaacctggtgaactgaaacatcttagtagccagaggaaaagaaagcaaaagcgattcccgtagtagcggcgagcgaaatgggagcagcctaaaccgtgaaaacggggttg

SEQ ID NO: 120518 - DNA, 259 bp, Glycine max
aacactcataacacaaagcacaaagcaaagctcatccttgagttaaaaaatggcagcagcttcttcatggctctctcatccccatccttggctggcaaggccgtgaagctgggcccatcagccccagaagtgggaagggtgagcatgaggaagaccgtcaccaagcaggtctcctcaggaagcccatggtacggcccagaccgagtcaagtacttgggcccattctctggcgagcccccgtcctacctaaccggtgagt

SEQ ID NO: 120519 - DNA, 260 bp, Glycine max
accacatgccatggcaacagcgtcaatgtgtatgagcttcaacctggcaacagcattcaagggtcctctttatcttcttcttcatcgttcttcggtggaagtagtggttctctccgcgcgggtcctgcctcggtggtgtcgctgccccggcgctgcccgctgaccatagagaacgcgcacaagaagggggcgggcagcaccaagaacggccgcgactcgcagggcaagctcctcggagtcaagatttacggcgaccaggt

SEQ ID NO: 120520 - DNA, 253 bp, Glycine max
cttgatcagtgtcaaaagggtagttgcaaattgcaatggctaagcatgatgttgagggtggttctctcagcaaaggactaccatgatcctcctccagcacctttgattgatgctgaggaactcacacagtggtccttctacagggctttgattgctgaattcattgccacattacttttcctttacatcacagtgctcactgtgattggttacaagagccagagtgatgtcaaggccgggggtgatgtgtgtg

SEQ ID NO: 120521 - DNA, 245 bp, Glycine max
gttatgggagtcgccggggctaagtctaagtgtagtaccgttgggattcaaggaatcgcttgggcttcggtggcatgatcttcgccctcgtttactgcaccgctggcatctcagggggacacataaacccggcggtgacatttgggctgtttttggcgaggaagttgtcgttgcccagggcgattttctacatcgtgatgcaatgcttgggtgctatttgtggcgctggcgtggtgaatggtttc

SEQ ID NO: 120522 - DNA, 257 bp, Glycine max
gcgaagagaagagaaaaattaagatggaggggaaggagcaggatgtgtcgctgggagcgaacaattcccggagagacagccgattgggacggcggcgcagagccaagacgacggcaaggactaccaggagccggcgccggcgccactggttgacccgacggagtttacgtcatggtccttttacagagcagggatagcagagtttgtggccacttttctgtttctatacatcactgtcttaaccgtcatgggagtcg

SEQ ID NO: 120523 - DNA, 256 bp, Glycine max
gcctatgcttgtttatcattttcttactttcctctcacgctctgccacaaaactccgtctccgaataacggaataaaaaaacaagtttaattactattatggcgccgagggatcataagacaagcaacgctaaggctaacggtaacggtaacagcggggtgaaggaggtgcattttcgtggagtgagaaagaggccgtgggggagatacgccgcggagatcagagatcccggcaagaagagccgcgtctggctcgg

SEQ ID NO: 120524 - DNA, 256 bp, Glycine max
gctagcaccacattcacctgaggcttccaaagcaatggcttcccttgcagcatccactgctgcgcttcccttggcatgtcagaaatgcttggaaaccccatcaacttcagtggtgccacaaggccagctccatctgcttctagtcctgcctccttcaagactgtggctcttttctccaaaaagaaggctacaccaacacctccaaaaaaagctgctgctgctgctcctgccaatgatgagcttgccaagtggtatg

SEQ ID NO: 120525 - DNA, 259 bp, Glycine max
cgataatcccgtcgaagaggctaaggaacaagatcgcggggttctcgacgcacctgatgaagcgatccagaagggccctgtgcgcggcatctccctcaagctccaggaggaggagcgcgagcgccgcatggacttcgtccccgacgtctccgccatcaacaccgaccacatcgaggtcgacaaggaaaccctcgacatgctccactccctcggtatcaacgacatccccggcatcacccaggttgatcctgtccctgtt

SEQ ID NO: 120526 - DNA, 260 bp, Glycine max
ctcaagtccaacctacccctttttcttctcccaccaacttcaccgtcttcttcctcgatcatgctcacttcaagggcaagtaccatgatgagcttattgccaatgctgcttacattggcactcctggaaagggtattcttgctgctgatgagtcaacagggacaattggcaagcgtttggccagcatcagtgtagagaatgttgaatccaacaggcgtgctcttagggagctgcttttcaccgctcccggtgctcttaaa

SEQ ID NO: 120527 - DNA, 250 bp, Glycine max
gtaattaagaaagagaggaaaaatgccgctcaagttggcgggaggagccattgtcggttcctctcctatgtgttgctatttctctctttcacatcgctggggccgaagatccctacaggttcttcaactggaatgttacttatggtgacatttaccctcttggtgttcgccaaacgggaatattgatcaacgggcaattcccaggtccagatattcattctgttaccaacgacaacctcatcatcaatgt

SEQ ID NO: 120528 - DNA, 259 bp, Glycine max
caattcggagaccgaagaaccaaaacagactgagtaattggtctctcttcctccgctgcttctcacacaatgaaggtcaaagttatatcacgctccgtggatgagttcacccgagagcgaagtcaagaccttcagagggtgttccggaattacgatcccagccttcgtcctcaagagaaggcggtggagtatgtgcgtgctgttaatgcggtgaagttggacaagatatttgcaagaccatttattggagcattggatg

SEQ ID NO: 120529 - DNA, 256 bp, Glycine max
caagtcggtcgctcagacacgcacagatctgatctgatctgatctatctgaagccgaaaatccgacggtgatgatgaagatggggtgttcacgttgctccttgcttcctcttcctcatcctcttagtggcgctcttcccctcgtcgctctccgagatccgcttctccgagatccgaaacgacgatcgccgcatcatccccttagatcagtttggattcacccacaagggtcgccttgagctcagcgtttccaaaat

SEQ ID NO: 120530 - DNA, 256 bp, Glycine max
cttcacccaccacaatgaggtgattctgctgggccatagtgactcttacacaagagacagcagatgcaagtgaccattgcatacaaccattttggagagggacttatccagagaatgccacgttgtagacatggatatttccacgtggtgaacaatgactacactcactgggagatgtatgctattggtggaagtgctaaccccaccatcaacagccagggcaacagatacaatgctcctactaaccgttttgcca

SEQ ID NO: 120531 - DNA, 258 bp, Glycine max
aaaaaaaaaccattactttacttcactttacatgtcgaactccgacgccaccactaacgggtcagtaacggcgccatcattgatgcgcagagacagcaggccttagccgttaagaagccgccgtctaaggaccgtcacagcaaggtggacggccgagggcgccgcataaggatgccaatcatatgcgccgcacgtgtgttccagctcacgcgcgagcttggccacaagtccgacggtcaaaccatcgagtggctcctc

SEQ ID NO: 120532 - DNA, 248 bp, Glycine max
gagcaatcaccgtgttctcccctgacggccatctcttccaggtcgagtacgccctcgaaccgtccgcaaggcaacgcgccgtcgggtccgcggcaccgacaatgttgtcctcggcgtcgagaagaaatccaccgccaaactccaagactccaggtcggtgaggaagatagtgaatctggacgaccacattgcgctggcctgcgcggggctgaaggccgacgcacgcgtgctcataaacagggcacgtg

SEQ ID NO: 120533 - DNA, 255 bp, Glycine max
gaagagggcggcgcacgtgtcccctcctcgccggcgttcaagctggccattctccgggccacgcgtcggaggcgcaggcccagcaagtggagcccaaggcccgcgaaaccccgaccctcaaaaccttccaaatctaccgctggaaccccgaaaacccctcaaagcccgagctcaaggactaccagatcaacctaaaggagtgtgggcccatggtcctcgacgcgctcatcaagatcaagaacgagatcgacccga

SEQ ID NO: 120534 - DNA, 254 bp, Glycine max
ctcaaccctagtaagccgcaatggtgaagtactcaagggagcctgacaatccaactaagcttgcaaggctagaggcgccgaccttagggttcattttaagaacacaagggaaactgcctttgcaatcaggaagttgcccttggtcaaggctaaaaggtacttggaagatgttcttgcccacaagcaggcaattccattcagacgtttttgtcgaggtgttggaaggacagcccaggctaagaatagacactcta

SEQ ID NO: 120535 - DNA, 252 bp, Glycine max
ggcaactcttagtgcaggtgagaggcgtcacgatgatagcccagatcacaccatatttttggagacctggctgccgatgttacggattatcttcttcaagagacatttcgggcacgatatccctcaattaagggggccaaagttgtaattgataggctaactggacggacaaagggttatggttttgttaggtttggagatgagagtgaacaggttagagctatgactgaaatgcagtgggttctttgttca

SEQ ID NO: 120536 - DNA, 252 bp, Glycine max
aggagagagccatgtccatgcatcgctacctgaggaagattattgggaagctgtttggcaaacactcccattcccactgcactgcgagagcttctaaagcctctccctgcaggtgttgaaatcgatgaactccctaagcaaattgatgatacacagtacccaaaaacattcttctataaagaagaccttcatccaggcaaaacaatgaaagtacaattcaccaagcgtccctatgcacaaccttatggtgta

SEQ ID NO: 120537 - DNA, 249 bp, Glycine max
ctactaaggaagacgttgatctcgctgtcgctgccgccaaagctgccctctcccgcacaagggcgccgattgggcctccgcttccggctccgttcgggctcgctacctccgcgccatcgctgccaagatcaccgagaaaaagcctgaactagcaaaactcgaagctattgactgtggaaaaccgctcgatgaagccgcctgggacatcgacgatgttgctggttgctttgagttctatgctgaccttgc

SEQ ID NO: 120538 - DNA, 244 bp, Glycine max
atgttgccagtccagaggcatgtgcagcaatcttgtggaagacagctaacttctccaaaggctgctgagaaattgaagattacagccactgaactgtgcaaattacaaattgcagatggtgttatacctgagccacttggtggtgcacatgcagatccagagtggacctctcaacagataaaaaaggctatcaaagaaaccatggatgagctcatgaagatgaacaccagaagactgttaaaac

SEQ ID NO: 120539 - DNA, 244 bp, Glycine max
cccattgtgactccaccaaaccctccaagtgaaacaccatgtccaccaccaccaccacacagtggtgccatatccaccaccagcacaaccaacatgccccattgacagcctaaaactgggggcatgtgtggatgtgctcggtggcctcatacacattggcataggcagcagtgccaagcagacatgttgtccagtgcttgcagggcttgtggacttggatgctgcagtgtgtctctgcacaacc

SEQ ID NO: 120540 - DNA, 250 bp, Glycine max
gagggaggtcgatgaagtgaaagaattgattatcatagtgagagagtatgtcttgggctgcagatggagctcaaaagaagggaaattaaggacaatccagcacgccagcaagagcttgcagcttatttcacccactgcaatcttcaaacacctcacttgaggctagctttgctgaatgccatgactgtctgctacaaggcaaagaacctttccacggctgcaaactttgccaggaggctacttgagacca

SEQ ID NO: 120541 - DNA, 253 bp, Glycine max
agagacgcagccatggggcggagacctgcgaggtgttataggcaaattaagaacaagcataccccaagtcacgtttctgccgtggtgttcctgatcccaagatcaggatttatgatgttggtatgaagaagaagggtgttgatgagtttcctttctgtgtccatctggttagttgggagaaggaaaatgtttcaagtgaggccctggaagctgctcgcattgcttgcaacaagtacatggccaaatttgctgg

SEQ ID NO: 120542 - DNA, 252 bp, Glycine max
cgttgctctgcttcaacattgcggaagcagaagaagcgccgcagctatggtgaagtaccagagaacccgacaatcccaccaagtcctgcaaggccagaggcgctgacctcagagttcattttaagaacactagggagactgcctttgccatcaggaagttgccccttgttaaagctaaacgatacttagaggatgttttggcccacaaacaggctattcctttccgacgcttttgtggtggtgttgggagga

SEQ ID NO: 120543 - DNA, 252 bp, Glycine max
cgacaaactcctatgttcctttcattacagtatttctgaacaagttcctggataacagcctaagggttttcttattgatgatagtgacgatattgatgatagttacgatagtgacgatatcgaccgtgaccttgatatggagctggagcttctaactatgatgaatacgctaactatggatatgatgccagaaatagaccgattttatatcacctttcaattcgaattagcaaaagcaatgtctccttgcat

SEQ ID NO: 120544 - DNA, 250 bp, Glycine max
ttctgcgttgaggtctttgatggtttctcactctccgccgctggatgccttagtgggccctctgaagattatcacctgagcgaatatgtgtctgcacgagacaagcgccgcgaattcgtttccggcttcactggaagtgccggcttggcacttataacaaagaaagaagcactgcattggacggatggacggtattttttgcaggctgagaaagaacttagtgctgggtggaagctaatgcgaattggtg

SEQ ID NO: 120545 - DNA, 247 bp, Glycine max
gtttgaggaaactgagctaaggcttggactgcctggaaacgtaggaggcactggactgaagaagtgctcatcaggaagagaggtttctctgagactgaaactgaaactgaggaggatgagtctgctaccactgtggatttgatgcttaatctttcttctaaggaagctgctgctgctgcagatccaactgataagcacaagactttgcctaaggagaagactcttctgcctgcagatcctgctaagc

SEQ ID NO: 120546 - DNA, 252 bp, Glycine max
ggcggggctacccgctgagtttaagcatatcaataagcggagggactgcacggtgggtgcaggatgtacggcgagggttgctacggcggagaaccgttcttcgtggcgagggaagaagggggcgaggaagatgatgggtacttggtgagttacgtgcacgatgagaggaagggggagtcgaggtttttggtgatggacgcgaagtcgccggagctagatgttgtggcggcggtgaggcttccgcggcgggtg

SEQ ID NO: 120547 - DNA, 266 bp, Glycine max
tggagtcggctcgagcgtcaagattttgggctagtagatgaaaccagcgtcgtgtagggaggtactaagatgggcgagatcatgaatctcgctcgctttgctgtagaggcacaaaacaaaagagagaattcagttctggagtttgtgagggtgattagtgcaaagcagccagtggttgctggagtgaatgactacataacattggaagcaaaagtatggtgagattccacatgagtataaagcgaaggtttaggagacggatccca

SEQ ID NO: 120548 - DNA, 248 bp, Glycine max
cgagattcccactgtccctgtctactatccagcgaaaccacagccaagggaacgggcttggcggaatcagcggggaaagaagaccctgttgagcttgactctagtccgactttgtgaaatgacttgagaggtgtaggataagtgggagctggaaacagcgaaagtgaaataccactacttttaacgttattttacttattccgtgaatcggaagcggggcactgcccctctttttggacccaaggtcg

SEQ ID NO: 120549 - DNA, 247 bp, Glycine max
ccgtaagctcccaagcagtgggaggcggctcgggactctgaccgcgtgcctgttgaagaatgagccggcgactcataggcagtggcttggttaagggaaaccaccggagccgtagcgaaagcgagtcttcacagggcaattgtcactgcttatggacccgaacctgggtgatctatccatgaccaggatgaagcttgggtgaaactaagtggaggtccgaaccgactgatgttgaagaatcagcgga

SEQ ID NO: 120550 - DNA, 247 bp, Glycine max
caaccacaaggttgctgagaagacataaaaaatggtgaagatttgctgcattggagctggctatgttggtggcccaaccatggctgtaattgccttgaagtgtcctgagatcgatgtggtcgtggtggacattgctgcaccgcgaatcaacgcgtggaacagcgaccacctcccgatatatgagcctggccttgatgatgtggtgaagcagtacagggggaagaatctcttcttcagcactgatgta

SEQ ID NO: 120551 - DNA, 247 bp, Glycine max
gtgccttatcgctgtggttatcatcttcttcttcctctttcttagatctcttctttctctacgccgcacgccgaaaccatggccggaaaaggagagggtcctgctatcggaatcgatctcggaaccacctactcttgcgtcggtgtgtggcaacatgaccgcgttgaaatcatcgccaacgaccaagggcacagaaccacgccgtcttacgtcggattcactgacaccgagcgtctcatcggtgatg

SEQ ID NO: 120552 - DNA, 245 bp, Glycine max
ggaacaatggcgggtagggtttcgacgtgcttcttcttcgtgtttgctctttctctccttcttccttttcagatctccgctgaggaatcatcggagaaagagttcgtactcacattggatcactctaactttcacgacactgtcagcaagcacgatttcatcgtcgtcgagttctacgctccatggtgtggccactgtaagaagcttgctcccgagtatgagaaagctgcttctatcttgagtag

SEQ ID NO: 120553 - DNA, 247 bp, Glycine max
gtcaaacttgaattgaaggtgaagaaggagatggcagcaacttcttccttgtgttcatcgaccctccaatcccaaatcaatggattctgccttcacaaaacctctctttcccatcctcgttccctcactttctccaggaagaaaatttcaaccacagtgaaggctacatctcgtgttgacaagttttcaaaaagcgatatcattgtttctccatccattctttctgcaaactttgcaaaattgggag

SEQ ID NO: 120554 - DNA, 251 bp, Glycine max
  unsure (1)..(251): unsure at all n locations
tgaagtgtgtgatgcactctanccttcttnctctngaacccataattccatgactcggcgttgctcccactgcagcaacaacggccacaattcccggacatgcccttcgcgtgggggcggaggtgtgaagcttttcggggtcaggctgacgganggatcaatcannaagaagagcgccagcatgggcaacctaaacctctcctccgccgccgcacatcaccaatnccattcanctcctncttcntccaacc

SEQ ID NO: 120555 - DNA, 251 bp, Glycine max
caaaaagaaagaatcccaggcgaggagaaagatggaggggaaggagcaggatgtgtcgttgggagcgaacaagttccccgagagacagccgattgggacggcggcgcagagccaagacgacggcaaggactaccaggagccggcgccggcgccgctggttgacccgacggagtttacgtcatggtcgttttacagagcagggatagcagagtttgtggccacttttctgtttctctacatcaccgtcttaa

SEQ ID NO: 120556 - DNA, 249 bp, Glycine max
atcgagataactagaaacagtgtgatgaaaatgaaggtccttgttttcttcgttgcgacaattttggtagcatggcaatgccatgcgtacgatatgttccctctccgaatgaacactggctatggtgcccgtactccggaggtgaaatgcgcaagttggaggcttgctgtggaagcacacaacatcggtggctttgagaccattcctgaagagtgcgttgaagcaacaacggcatacatccatggcgaa

SEQ ID NO: 120557 - DNA, 251 bp, Glycine max
cgagacggcgtcttcataaacgcctttcttctccgtttccgtttcctcgttcgaattcgctttttgatctgcgaaaatgagagagtgcatctcgatccacattggtcaggctggtatccaggtcggaaatgcttgctgggagctctactgcctcgagcacggcatcgggcccgatgggcaaatgccaagtgacaagacagttggcggtggtgatgatgctttcaatacttgcttcagcgagactggtgctg

SEQ ID NO: 120558 - DNA, 252 bp, Glycine max
caaacaccgagaatagtggaaattttaaggcagctttcatgaagcaagttcaaaatctaatcacgccattattattggggatggggctatttcttacatccttttcgtttggtcatcgtgaacaagaggagatcagctttcaggagtgtaaaaacaagcttttggaaccaggattagtagaccatattgttgtctcagataaatcagttgccaaagtatatgtaaggcacactccccgcaaccaaatagata

SEQ ID NO: 120559 - DNA, 243 bp, Glycine max
gtgcgctagttctgagtattctgatcgctccctgagagagctcgtcgcggcggttgcagaagaagattgcaagatgaagttcaacatcgcgaatcccaccactggatgccagaagaagctcgagatcgacgacgatctgaaactgcgagcattttgggacaagaggatctcacaggaggtcatcggagatgcactcggtgaggaatttaagggctatgtcttcaaaattaccggaggttgtga

SEQ ID NO: 120560 - DNA, 247 bp, Glycine max
atcaatgctggcattgttaagacgctgtgtactgctattgctaagtattgcccccatgcccttgttaacatgataagcaatcctgtgaactccactgttcctattgctgctgaagttttcaagaaggcaggaacttatgatgagaagagattgtttggtgttaccacccttgatgttgttagggcaaaaactttctatgctgggaaagccaatgttccagttgctggtgttaatgtacctgttgtgg

SEQ ID NO: 120561 - DNA, 246 bp, Glycine max
gtccctcttgcttgggactttgctaaccgatgagatcagtgacttcaaatctcatgaatacctgcgtcttgcaggagccactcaaatggcactcgatgttctcaggcttggtttcttgattgactttttgtcccatgcttccattgtgggattcatggatagagctgccattactattgcactacaacaacttaagggttttcttggcataaaaacattcaccaagaaaactgatattgtttctgt

SEQ ID NO: 120562 - DNA, 248 bp, Glycine max
gaaaaatggggtgtttccatctcacagtgactagtctgtgctttgtagtggttgtggttggagtgcttccactctccttagatgcacaactagatccctcgttttacagagacacgtgtcccaaggttcactccattgttcgcgaagtggtgaggaacgtttccaagaaagatccccgcatgcttgccagtctcattagacttcactttcatgactgttttgttcaaggatgtgacgcatcagttttg

SEQ ID NO: 120563 - DNA, 249 bp, Glycine max
accacggccgagttcaaagagccttgctccgctgcgatgcacgcgtcgtgaaaaccgtcgatgcctacctctctgagatcgccgcatacggcgatctcagcatctcgaagttcaacggcatcgctactcttattcctaaaagcgcgcgtaagatcgacgacgatctttaccgcgccgttgatatctatctcaaggcgcatccacagttggatgagatacagagagagaaggtgtgcagcgtgatggatc

SEQ ID NO: 120564 - DNA, 247 bp, Glycine max
cctaaggaaaaggctcagatcaacattgtggtggttggtcatgtggaccctgaggaggcaaccaccattaacgagctgaagaagcctgttgtggagaaagaagctccagggcatgccatatgagggcatgcacgtacggcctcggaggggcaccagaaaattatgttaacaaaataatctggaaccctaatgtatcagtgtcatcatcagtgtgtagtttaagctagctttgctatggttacgttct

SEQ ID NO: 120565 - DNA, 247 bp, Glycine max
gtgctctgctcgttcactcctctctcatacagcctctggctcctcctccggtgaaagagggtgagaagaggagttagcaagcaatttttgtttcttttgggagttgggacccctcactcacatggacgcatcaacggctttaatgatcctatccgcaatagcggcctatttaatatggttcaccttcgtcactcgctccctaaaaggtccacgtgtctggcccctattcggcagcctccctggcctc

SEQ ID NO: 120566 - DNA, 249 bp, Glycine max
aacaaaagtggcagtattaggtggcatcaccgaagtgcagggagctgccaacagcgtcgagatcaacaatctcgctcgctttgctgtagaggaacaaaacaaaagagagaattcagttctggagtttgtgagggtgattagtgcaaagcagcaagtggttgctggagtgaattactacataacattggaagcaaaagatggtgagattaaaaatgagtataaagcgaaggtttgggagagggaatccca

SEQ ID NO: 120567 - DNA, 247 bp, Glycine max
  unsure (1)..(247): unsure at all n locations
ctgtgctgtgagggccgaaacagtggctacagcctctccagcagttaccaagtctacaccagaagggaagaaaacattgaggaagggcagtgttgtgataactggggcttcatctggactaggcctggccactgctaaggctttggctgagacgggaaaatggcatgtaataatggcctgcagggattacctcaaagctgcaagagctgcaaaatccgctggcatggctaaggaaaacnacactgtc

SEQ ID NO: 120568 - DNA, 246 bp, Glycine max
gaggagaagaacccctccgccgtgtcggtggaggtcggagagcatgtccagctcgcttatacccaccacaacgagtcgccgtttcagcccagatcctttgctgtacaaggatgaggtgttctgcttgtttgagggagcccttgacaatttgggaaacttgagacaacaatatggactggccaagtcagtcaatgaagtattgttggtcattgaggcttacaaagctttgcgtgaccgagcacccta

SEQ ID NO: 120569 - DNA, 242 bp, Glycine max
ctcttcagatctctctcccttccttccatcccaaccacaaggttgctgagaagacataaaaaatggtgaagatttgctgcattggagctggctatgttggtggcccaaccatggctgtaattgccttgaagtgtcctgagatcgaggtggtcgtggtggacattgctgcaccgcgaatcaacgcgtggaacagcgaccacctcccgatatatgagcctggccttgatgatgtggtgaagcag

SEQ ID NO: 120570 - DNA, 246 bp, Glycine max
ggaacatcttccatgactgtgctgttcagagttgtgatgcttcactgttgctggactccacaagaaggagcttgtctgagaaggaaacagatagaagctttgggttgagaaatttcaggtacattgagaccatcaaagaagctttggaaagagaatgccctggagttgtttcatgtgctgatatcctcgttctctctgccagagatggcattgtttcgctaggaggtccccatatccctcttaaga

SEQ ID NO: 120571 - DNA, 248 bp, Glycine max
cagacaacacagagagaagcgtcttaataaacgctcttctctgaaaaacctgatttcttctcttcttctcttctctttcgtttcgatcttcgatctctgaaaatgagagagtgcatttcaatccacatcggtcaggccggtattcaggtcggaaacgcctgctgggagctctactgcctcgaacacggcattcagcctgatgggcagatgccaagtgataagactgttggtggaggtgatgatgcttt

SEQ ID NO: 120572 - DNA, 248 bp, Glycine max
ctcactcactgcagatctcaattgcatcgctgtccatggctaccatcgttagcatcaaggcccgccagatcttcgacagtcgtggcaatccaactgtcgaggtggatttgacttgctccgatggtacttttgccagagctgctgttccaagtggtgcatccactgggatttatgaggcccttgaattgagagatggaggatctgactaccttggaaagggcgtatcaaaggctgttgacaatgtgaac

SEQ ID NO: 120573 - DNA, 245 bp, Glycine max
ccgtggtgtcgtcaatgttcaacacagtctcagggaagaagattgctattttgggatttgctttcaagaaggacactggtgacactagggagaccccagccattgatgtgtgcaagggccttttgggagacaaggccaagttgagcatatatgatcctcaggtcaccgaggatcaaatcatgagggatttggcaatgaagaagtttgattgggaccaccctgctcatcttcaaccactgagtcca

SEQ ID NO: 120574 - DNA, 245 bp, Glycine max
tctttttctgtgagcctttctttcaggttcttaacttgatcagtgtgcagtgtccaaatcataagggtagttgcaaattgcaatggctaagcatgatgctgagggtggttccttctctgcaaaggactaccatgatcctcctccagcaccgttgattgatgctgaggaactcacacagtggtccttctacagggctttgattgctgagttcattgccacaatgctcttcctttacatcacagtgc

SEQ ID NO: 120575 - DNA, 246 bp, Glycine max
tctgaatccgcgcaattaggttttgtgattaattcattgattaatcagagagagaagggggaataatgggagatcaagtggagggaacggtgcagaacgttctggaacaggagactctgaagtgggtcttcgttggtggcaaaggcggcgtcggcaaaacgacatgcagttcaatcctatccattctcctcgccaccgttcgctcctccgtcctcatcatctccaccgaccccgcccacaacctca

SEQ ID NO: 120576 - DNA, 250 bp, Glycine max
cccaaacatccttcaaatcttccatgttttcgaggacgaccaatatctctccatagtaatggatctctgccaaccccacacgcttttcgaccgcatggtcgatggtcccatccaggagtcccaagccgccgccctcatgaagaaccttctggaagctgtcgcgcactgccaccgcctcggcgtggcccaccgcgacattaaacccgacaatattctgttcgattcggcggacaatcttaaactggcggac

SEQ ID NO: 120577 - DNA, 247 bp, Glycine max
cgagaatttcaacatctctgttggtggtcgtgatctcattgtggatggttgtgtgacactttcatttggaaggcattatggtttggtaggaaggaatgggacggggaaaaccactttccttaggcacatggctatgcatgccattgatggtgttccaaggaattgccagatactgcatgtggagcaagaggtgacaggtgatgctacgactgctttgcagtgtgtcctcaatgctgacattgagagg

SEQ ID NO: 120578 - DNA, 246 bp, Glycine max
tcctcagtagtgtcatttacgcttctcttctctgcagcaactatgcctaaccctaaggtcttcttcgacatgaccatcggcggtcaatctgctggccgcatcgtgatggagctctacgccgacgtcactccccgcaccgccgagaacttccgcgcgctttgcaccggcgagaagggcgtagggcggagcggcaagcccctccactacaagggctcgtccttccaccgcgtgatcccgagtttcatg

SEQ ID NO: 120579 - DNA, 248 bp, Glycine max
gaagagcggaagagaaaatgacgaccaggttcaagaagaacaggaagaagagaggtcacgtcagcgccggacacggccgtatcggaaagcaccgcaagcatcccggaggtcgcggtaacgccggtggcatgcatcaccaccgtatcctcttcgacaagtaccatcctggtttcttcgggaaggtaggcatgcgctacttccacaaacttcgcaacaaattctacaatccgatcatcaacatcgacaag

SEQ ID NO: 120580 - DNA, 247 bp, Glycine max
acacaaagcacaaagcaaagctcatccttgagttaaaaaatggcagcagcttcttccatggctctctcatccccatccttggctggcaaggccgtgaagctgggcccatcagccccagaagtgggaagggtgagcatgaggaagaccgtcaccaagcaggtctcctcaggaagcccatggtacggcccagaccgagtcaagtacttgggcccattctctggcgagcccccgtcctacctaaccggtg

SEQ ID NO: 120581 - DNA, 248 bp, Glycine max
tggacatcatgttgcaatggtaggtgatgggataaatgatgcaccctctttggctgtggctgatgttgggattgctctgcagaatgaagctcaagagaatgctgcctcggatgcagcatctatcatacttctggggaacaaaatttcacaagttgtcgatgcgctagacctagcacaggcaacaatgggaaaagtgtaccaaaatttgtgttgggcggtcgcatataatgttgttgccattcccattg

SEQ ID NO: 120582 - DNA, 253 bp, Glycine max
actccgcaccagtttcaccgcacgaatatcttgttgtttggagcgatccgagaaaaactctgtaaacatgttggtttaccaggacctccttacaggtgatgagcttctctctgactccttccgttacaaggaaattgagaatggaatgctgtgggaagttgaggggaagtgggttgttaaaggagcagttgatgtagacattggtgcaaacccttctgctgagggtggaggagaagatgagggagttgatgat

SEQ ID NO: 120583 - DNA, 243 bp, Glycine max
gtatagtagatgaaaagactgatgtctatgcttatggtgtgctattattggagctcattactggtcgacaagctttggatagctcacagaaaagtctggtgatgtgggcaaaacctttgctaactgcaaataacatcaaagagcttgtggatccagttttggctgatgcttatgatgaagagcagatgaaacttgtaaccttaacagcttctctgtgtgtagaccagtcctcaattcaacgac

SEQ ID NO: 120584 - DNA, 242 bp, Glycine max
cgctccctcagaagcgaagaagaagccacagagaaccagtctcctactctctctcacccacaagaaaaatggcatctcacatcgttggatacccccgcatgggtcccaagagagagctcaagttcgctctcgagtctttctgggatggcaagagcagcgccgaggatttgcagaaggtggctgctgatctcaggtcatccatctggaagcagatggctggtgctgggatcaagtacatcccc

SEQ ID NO: 120585 - DNA, 244 bp, Glycine max
aataaaaccgccacaaatttctccatagttatgggcacttccattctcgacgccctgaacgttcgcgtggaaggttccggcgacaagtaccttgtcctggcccacggcttcggcacggaccaatccgcgtggcagcgcgtgctcccttacttcacccgcaactacagcgtcattctctacgacctcgtctgcgccggcagcgtcaaccccgaccacttcgactaccgccgttataccaccctcg

SEQ ID NO: 120586 - DNA, 246 bp, Glycine max
caattctgtccaatttccaaaaccaaaacaagccacacaagttcatggcaactcccaataacagactctctcttgccatggagagaactgggcaatgggttttctctcaagacataccaactgatgttatagtggaagttggagaaacaactttctctctgcacaagttcatgctagtggcaaaaagcaactacataagaaaactgatattggaatcagatgagagcgaactcaccagaatcgacc

SEQ ID NO: 120587 - DNA, 247 bp, Glycine max
gttacaggaaaactgctgaggctgtaatgtgtggtcttcttccggattctccaacagccacaaaaagcagaacagatgatggtcttatatgggtgagccaatggaactctttgcaacatcctgttgcatccgcattcttagctgctgtttacagtgactatatgctaacatcgcagacaccaaaactaaaatgtggttcagattcctttaccccatcagatcttcgagactttgccaaatctcaggc

SEQ ID NO: 120588 - DNA, 258 bp, Glycine max
cttcccttctccaacatgccaaacgacagcgttctgagtcttttcttcttcgttaccctcttcacatgccttctctctgctaattcccacgatgaccatattttcctaccgagtcaactccatgacgatgactcagtgagttgcactgctaccgacccaaaccttaactacaagccggtgatcggaatcctgacccaccccggcgacggtgcctctggccggctcagcaacgccaccggggtttcttacatcgccgcc

SEQ ID NO: 120589 - DNA, 245 bp, Glycine max
gcgcctggatacaagttatgccttggaatggaagagaattccgaatcagctttgtctacgaacaaggaagctataagtaatgcaactaggaatctcatggagagttcgatcctggctcaggatgaacgctggcggcatgccttacacatgcaagtcggacgggaagtggtgtttccagtcgcggacgggtgcgtaacgcgtaagagcctacccttgggaggggaacaacagctggaaacggctgc

SEQ ID NO: 120590 - DNA, 249 bp, Glycine max
atctgttctaccgattagtgtctcagaaatttgaggatccagcagaaggggaagctgctttggttgctaaatttcagaagttacacgaggacctgactaatggtttccgcaaccttgaggacgaaacccgatgattgaagatttggtatggtagtttgctcaaataatgtgttatttccaattgtaagaggcagtctagcatcgcagggttacaccgtcccgagtgttcttatatttgactgtttgatt

SEQ ID NO: 120591 - DNA, 244 bp, Glycine max
gtttttggtgctgcatggaaatccgttttcacagctgatgagaaagagcgtgagaagaatgttgaggaagcaattgaggctctgcagtttcttgagaatgagataaaggacaagaagttctttggaggagaggagattgggttggtagatattgctgctgtctacatagcattttgggtccctatggttcaagaaattgcagggttggagttattcacaagtgagaaatgtcctaagctccaca

SEQ ID NO: 120592 - DNA, 243 bp, Glycine max
  unsure (1)..(243): unsure at all n locations
ggaaggcttcagtactaagagccagccctgcacatatgntnagagcaagctatgcaagccagccctngcgactgcattgtttagcactgtatctttcttgcttggtgctataacttcagtcctatctggtttccttgggatgaaaatngcaacctatgccaatgcaaggacaaccttggaagccaganagggagttggaaaggctttcattactgcatttaggtctggtgcagtgatgggttt

SEQ ID NO: 120593 - DNA, 244 bp, Glycine max
gtcagaaggatgcttacgtgggtgatgaagctcaatcaaaaaggggtatactcaccttgaagtatcctatagagcatggcatagtcagcaactgggatgatatggagaagatttggcatcacacattttacaatgagcttcgtgttgcccctgaagaacaccctgtacttcttaccgaggcacccctcaatcccaaggccaacagagagaagatgacccaaattatgtttgagactttcaatgt

SEQ ID NO: 120594 - DNA, 244 bp, Glycine max
cccaaaaccctaggtagagagctcttcctcactctcattcgcactggccgcagcagcacgtcctctcgtcaccgtgcaggccctcgacagtgacatggccaccgacgcctccgccaccgtccctatccctgacgtcatgaagtcctccatccgcccggacatcgtcaacttcgtacactccaacatctccaagaacagccgacaaccctatgcagtcagccgccgcgctggccaccagacttcc

SEQ ID NO: 120595 - DNA, 244 bp, Glycine max
ctcaatatccgccattgaattcttcttccatttctcttttttctgcatacccatttcgtttttcttcccaaatggccctttcttgctccaaagttttaagcttttatctctcgcccgttgtgggtggtggtgatgttccgaaaaagctcactttttcttcttttttgggtctttctaagggtgttggtggaagcaggagctcgagggtgtgtgctgcttcaaatgcacccgcaccactcgctgg

SEQ ID NO: 120596 - DNA, 246 bp, Glycine max
cgtagggtttctgggaaggtgaagtggttcaatgatcagaaggggtttggattcataagccctgacgatggcagcgacgatctcttcgttcaccaatctcagatcaaatctgacggtttccgaagcctcgccgaaggagagtccgttgagttcgccattgaatctgaatctgacggacgcgcgaaggctgttgatgtcactggccccgacggcgccaggatccagggaaccagacgaggcggtgat

SEQ ID NO: 120597 - DNA, 243 bp, Glycine max
atagcccaagccctatacaaccaaaccctaacacacacccatttgattcagtttccatggctagcctcaaggttgcatttttggctgcagtgctctgcatggttgtggtgagtgcacccatggcacatgcagctatcacgtgcgggcaggtgacgaatagcctgatcaattgcatcggttacctccagaacggaggaacgccgccgtcgggatgctgcaacggagtgaagagcctcaatgccg

SEQ ID NO: 120598 - DNA, 234 bp, Glycine max
tgggaagagtctgggcaggtgtcaaacgcttcctacgactatagaggcactgattctccatgcgatgtgcaggacgacggcattcgatattactcggctgagtaagactatgagggaggtcgctatcgaagctgcaatgaagcccgtatgagcctggagttggtccagcacgggctcatggcagtggcttatgaaatatatgatgatgtccgcgactacaacgaggggatctac

SEQ ID NO: 120599 - DNA, 249 bp, Glycine max
ctggcagcagcctcctccatggctctctcttccccatccttggctggcaaggccgtgaagctgggcccatcagcccccgaagtcgggagggtcagcatgaggaagaccgtcaccaagcaggcctcctccggaagcccatggtacggcccagaccgcgtcaagtacttgggcccattctctggcgagcccccgtcctacctcactggcgagttcccaggtgactacggctgggacactgctgggctttcg

SEQ ID NO: 120600 - DNA, 246 bp, Glycine max
ctcacccccaaatgtgacacccaagaccatggctcaacccttgacgttttccatgtgttcagcccctgttccccatttcggccaccaaagccactttcatgggcagagagtgtccttcagctgcaggccaaggaccaagccaggctgcagttccttgccagcatggtggctgggaggtcagttgtgcccattgcctcaggcaggcaaattattcaaagcccaacttacattgtgagggccaaaatt

SEQ ID NO: 120601 - DNA, 253 bp, Glycine max
caaaattcaacattgtctcccctggagctgatcaaaccatttacttcccccacactgaaaccagccgtaggttgacatccttccaccctgaaatcgaagaactcctttacagctcagtggagaatgaagaacacatatgtgtgctgaaggaccgcagcaagccaattatcttcaccatggcaaggttggatcgagtgaagaacatcacaggacttgtggagtggtacggtaagaacgcgaactgagggagctg

SEQ ID NO: 120602 - DNA, 245 bp, Glycine max
gtcagatataagtgaagtgcgggttgaaggattagagacattggattatcttgacaacttgcagaaaagggaacgctttactgaacagggggatgctttaacatttgaatcagaatttgacaggatatatctcagcactcctacaaagattgcaattcttgatcatgagaaaaagagaacaattgtattgcgtaaagatggtcttcctgatgctgtggtgtggaatccttgggataagaaagcaa

SEQ ID NO: 120603 - DNA, 245 bp, Glycine max
ggcgaagagaagagaaaaattaagatggaggggaaggagcaggatgtgtcgctgggagcgaacaagttcccggagagacagccgattgggacggcggcgcagagccaagacgacggcaaggactaccaggagccggcgccggcgccactggttgacccgacggagtttacgtcatggtccttttacagagcagggatagcagagtttgtggccacttttctgtttctatacatcactgtcttaac

SEQ ID NO: 120604 - DNA, 244 bp, Glycine max
cactctccaaaccctagcggcactacacacgttatctctctctctctctctctctctccctctctccttccccaagatgtcgagcgccgatcccgagcaccgagaagaggaggaggcacccgccgtcggcgacgacgaggacaccggagcacacgtcgctcccatcgtcaagctcgaggaggttgctgtcaccaccggcgaggaggacgaagatgcaatcctagatctcaaatcgaagctttac

SEQ ID NO: 120605 - DNA, 245 bp, Glycine max
atagcagcagcggaagctctagcttgggcagcgaatcacaatggcgagaggattgaagaagcatttgaagaggcttaatgccccaaagcattggatgcttgacaaactgggtggtgcatttgctcctaagccctcatctggaccacacaaatccagggaatgcctgccactcatactcattttgcgaaaccggctgaagtatgctctgacataccgtgaagtcattgctattctgatgcagcgac

SEQ ID NO: 120606 - DNA, 242 bp, Glycine max
ccatggctgtgattgccttgaagtgtcctgagatcgaggtggtcgtggtggacattgctgctccacgaatcaacgcgtgcaacagtgaccacctcccgatatacgagcccggccttgatgatgtggtgaagcagtgtagggggaagaatctcttcttcagcactgatgtggttaagcatgttgctgtggctgacattgtctttgtctcggtgaacacaccgacaaagactcagggtcttgga

SEQ ID NO: 120607 - DNA, 246 bp, Glycine max
gcgaaatgtgtgcagtgaaggaggttaccctgttttcagatgatcccacgtcttcggaaagtgcgaagaatttatgcaggaaattcatttattaagccgcttacagcatccaaatattgtccagtattatggttctgaaacagtcgataacaagctttacatataccttgagtatgtatctggaggctccatacataaacttcttcttgaatatgggcaatttggtgaactagttattcgtagtta

SEQ ID NO: 120608 - DNA, 247 bp, Glycine max
caaggcagaaagcaagctcatcctagagttttaaaaatggcagcagcctcctccatggctctctcttccccatccttggctggcaaggccgtgaagctgggcccatcagcccccgaagtcgggagggtcagcatgaggaagaccgtcaccaagcaggcctcctccggaagcccatggtacggcccagaccgcgtcaagtacttgggcccattctctggcgagcccccgtcctacctcactggcgagt

SEQ ID NO: 120609 - DNA, 247 bp, Glycine max
caacgctgtcactgagaaaggatctctatctacgaaggagcggaataaaacccttctctctgtgattaagagaatggcttcagatcggaaacttcacacttttgaggaggtggcaaagcacaaccagaccaaggattgctggctcatcatttctggcaaggtgtatgatgtcacccctttcatggaggatcatcccggaggtgatgaggttttgttatctgcaacagggaaagatgcaaccaatgac

SEQ ID NO: 120610 - DNA, 249 bp, Glycine max
aaggcagaaagcaagctcatcctagagttttaaaaatggcagcagcctcctccatggctctctcttccccatccttggctggcaaggccgtgaagctgggcccatcagcccccgaagtcgggagggtcagcatgaggaagaccgtcaccaagcaggcctcctccggaagcccatggtacggcccagaccgcgtcaagtacttgggcccattctctggcgagcccccgtcctacctcactggcgagttcc

SEQ ID NO: 120611 - DNA, 253 bp, Glycine max
gagaaattgagtttccgagataaccagttttctctttgattcatcaatggcaactgcgaggaccgtgaaggatgtttcgcctcacgatttcgtgaaggcttatgcttcccacctcaagcgttccggcaagatggagcttcctgagtggaccgatattgtaaaaacagcaaaatttaaggagttggctccatatgatcctgactggtactacattagggctgcctcaatggcaagaaagatctatttgagaggt

SEQ ID NO: 120612 - DNA, 260 bp, Glycine max
tcggctcgcagtgaggttggagccaatgtacagattgttggtgatgatctcttggttaccaaccccaagagggttcagaaggcaattgatactaaagcatgcaatgctcttctcctcaaggtcaaccaaattggttctgtgactgagagtattgaagctgaccaggatgtccaaaaaagctggatggggtgtcatggccagtcacagaagtggagagactgaggataccttcattgctgacctttctgttggtttggcta

SEQ ID NO: 120613 - DNA, 245 bp, Glycine max
gacagatttttctggtttagggatgaggaatttgctagacagactgttgctggtctcaacccatatagcatacgattggtcacagactggccattgaaaagtaaacttgacccagaaaaatatggtccaccagaatcagcaatcacctcagaaattatcaacaaagagattggaggcataatgtctgtagaaaaggcgattgaagaaaagaagctgttcatgttagactaccatgacgtactttt

SEQ ID NO: 120614 - DNA, 245 bp, Glycine max
gtcgaagcgtggtcgtggtggttcggcggggaacaagttccgcatgtcgctgggtcttccagtggcggcgacggtgaactgcgccgacaacacggcggcgaagaacctctacatcatttcggtgaaagggatcaaaggccgtttgaaccgtcttccctcggcctgcgttggcgacatggtgatggccaccgtgaagaagggaaaacccgatctgaggaagaaggtcttgccagctgtcatcgttc

SEQ ID NO: 120615 - DNA, 246 bp, Glycine max
tctctctctctctctctctctctgaagatggcttcacgcaggctcgtatcttctctgattcgatcctcccttcgtagatctcaatcgaagccctcaatttccgcatcgacatcgatgctcacgtcatccaaccgtgcctcaccgcacttatacttgctgaaccgcgtcgctgagtacgccaccgccgcggctggtgctaacactcctcctggtcctcctcctccggggaagaaggagctagcggcg

SEQ ID NO: 120616 - DNA, 246 bp, Glycine max
ctgaaattgaggagatgtgcaagacccactacgaggaattcatccttgcagttgatgagcttcgtggagtgttagttgatgctgaggagctgaagagtgagctccaaagtgacaattttaagttgcagcaggttggcagcgcccttcttgccaagcttgaagagcttcttgagtcttattctgttaggaagaatatgactgaagctatagaaatgttgaagaactgtatacaggtgttggagcttt

SEQ ID NO: 120617 - DNA, 236 bp, Glycine max
ggctcgaggccaaagatggtgtttgactactacgcatctggtgcacgaggaccagtggactctgcacgagaacagaaatgccttttccagaattttgtttcggccacgtattcttattgatgtgagcaagatagacatcacaactactgtcctgggcttcaaaatatccatgccaatcatgcttgccccaacagccatgcagaaaatggctcatcctgagggagaatatgcaacag

SEQ ID NO: 120618 - DNA, 252 bp, Glycine max
ctttcaccacttttctgctcccccttgagaaagaatttgaatcatcagaattaaaaactcgcaccaacaatggccccaagagacagccgagccaccgcgttcgccggaccaggcccaggcccatcaccggcccacaaagagatccgctaccgaggcgtccggaaacgcccctggggccgctacgccgccgagatccgcgaccccggcaagaaaacgcgcgtctggctcggcaccttcgacacagccgaggaa

SEQ ID NO: 120619 - DNA, 253 bp, Glycine max
cttgcagtcatccaatttaaagagctttaccttgtcagaacttaagacggccactagaaatttccgtccagatagcgtgttaggagaaggtggttttggatcagtttttaaggggtggattgatgagaattcattgaccgctaccaaacctggcactggcattgttattgctgttaaaagacttaatcaagatggcatccagggtcacagggagtggttggctgaagtcaactatcttggacagctttctcat

SEQ ID NO: 120620 - DNA, 252 bp, Glycine max
atcaccaagcacaactacctcatcctcgacgtcgacgacattccccgcatcgtcgccgaagccttcttcgtcgccacctccggccgccccggcccggtcctcatcgacatccccaaagacgtccaacagcaactcgccgtgcctaattgggacgagcccatcaacctccccgggtacctcgccaggcttcccaggccccccaccgaggcccaattagagcacattgtcagactcatgaccgaggcccaaaag

SEQ ID NO: 120621 - DNA, 247 bp, Glycine max
ggatgctggaactcactatgctgtcatgagctcctacgagtaccttagcactggacttcgccagtacttggacaacaacatggatggattttacattgctccagcttttatggacaaacttgttgttcacattaccaagaacttcatgaccctgcccaacatcaaggttcctctcattcttggtatctggggaggcaagggacaaggaaatactttccaatgtgagcttgcctttgccaagatggga

SEQ ID NO: 120622 - DNA, 244 bp, Glycine max
ttggaatccaaaaattagagaaatcatcagcattcacataggtcaggccgggatccaggttggcaactcctgctgggaactctactgcctggaacatggcatccagcccgatggcatgatgccaagtgactcctccttcggtgtagcccacgacgccttcaacaccttcttcagcgaaaccggatccggcaagcacgtccctcgcgccgtcttcgtcgatctcgagcccaccgtcatcgacgaa

SEQ ID NO: 120623 - DNA, 244 bp, Glycine max
gtagaacgctgctgccgaaacccttcccgatccctaaggtaagtgagtaatcggtggttgagaatggtggagaaggcgaagggtaggaaggaggaggtggttaccagagagtacaccattaacctccacaagcgcctccatggctgcacatttaagaagaaagctcctaaagctattaaggagataaggaaatttgcccaaaaggccatggggaccaatgatgtgagggtggatgtgaagttga

SEQ ID NO: 120624 - DNA, 243 bp, Glycine max
gctacttcctactccaaccgcacttctgctccgcaattatcatgggcaaggtcaagatcggaatcaacggatttggaagaattggccgtttggtagccagagtggctctgcagagagacgatgttgaactcgttgccgttaacgaccctttcatcaccaccgattacatgacatacatgtttaaatacgacagtgttcatggacactggaagcatcacgatgtcaccgttaaggacgagaaga

SEQ ID NO: 120625 - DNA, 243 bp, Glycine max
gtgctatatttttttttagaaaacaaaaaatgaaaaattactcgatttttatttctccaaaatgatcaattttataagattgaatcgactaaaaaatgaaatgaatcatttcatattgatagtattgctatgcttagtgtgcgactcgttagttttttagaacggttccaatttaacaaatttataaaccggttcatcgtataaatgaattaaaaaagaactaataaccaacgcatcgcttcg

SEQ ID NO: 120626 - DNA, 242 bp, Glycine max
ggagggtgaggatgcagggaattaaattagggtttacaataatgttggtggttgctggcattgtagcagtgccacgcatctcgggtcaagtatgcaatggtaatttgggtactattcaagaggaatgcgaggagtactataaacccggagggccaactattccgccatctacagaatgctgcaacgctctgagaaatgttgatgtgccctgcatgtgccgacttgctaacaattttcagtca

SEQ ID NO: 120627 - DNA, 236 bp, Glycine max
agaacccttccacggtggtgactgcgcgatgggtgcctacaagtatgtttcagagctatggcgcaagaagcagtctgatgtcatgcgcttcttgcagcgggtgaggtgctgggagtataggcagctaccttccattgttcgcttgacaaggtcgacccgccctgacaaggctcgtcgcttgggcttcaaggctaatcagggctatgtgatataccgtgttcgtgttaggaggggtg

SEQ ID NO: 120628 - DNA, 246 bp, Glycine max
gttcctcaagtgtccaccacctaaagtgatgcaggtggataagtctgcatggatgactgatgaagaatttgctagagacacgattgctggtgtaaatccaaacgtcattgggattcttgaggagttcccaccacgtagcgagctagatacacaagcctgcggaggtcatacctgtataatgacaagacaacatttgggacctaacttgggtgggctcactgtcgagcaggctatccagagcaagaa

SEQ ID NO: 120629 - DNA, 249 bp, Glycine max
cagaaagcaagctcatcctagagttttaaaaatggcagcagcctcctccatggctctctcttccccatccttggctggcaaggccgtgaagctgggcccatcagcccccgaagtcgggagggtcagcatgaggaagaccgtcaccaagcaggcctcctccggaagcccatggtacggcccagaccgcgtcaagtacttgggcccattctctggcgagcccccgtcctacctcactggcgagttcccagg

SEQ ID NO: 120630 - DNA, 246 bp, Glycine max
gcttcctggcatcaaggttgacaagggcacagtcgagcttgctggaactaatggagaaaccaccactcagggtctagatggccttggtcagcgttgtgccaagtactacgaagctggtgcacgttttgccaaatggcgtgcagtgctgaagattggtcccaacgagccatctgagctgtctatccatgagaacgcctatggcttggctagatacgctgtcatatgccaggagaatggcctggttcc

SEQ ID NO: 120631 - DNA, 246 bp, Glycine max
ctcatctttcaatttcaatcaacggttatacccttttctatttcgagcatcatcatgtccaccgcagcgcagcccaaaggcctagaaaacggcgtcgtccaagaagcccctctcccatcctaccttcgccgcgatgatagcggaggcgatagcgagtctgaaggagagatccggttcgagccaatactcgataaccaaattcatcgaaggcaagcacaaggagttgcctccaacctacaagaagct

SEQ ID NO: 120632 - DNA, 243 bp, Glycine max
acagaaccgaaaatggttgcgactttgagtcttccgatcatagacctctcttctccccatcgtctttccacagccaattccatttgtcaggcatgcgtggaatatggtttcttttaccttgtgaaccatggggtggacaccgattttgtgagcaaagtcttcgaccaaagttgcaagttcttctcgcttccggtccaacgcaaaatggacctggcccgcaaggaatatagaggctacactcct

SEQ ID NO: 120633 - DNA, 197 bp, Glycine max
ggagaggcacggtgcccataatatttctctcataaattctatggtcatggtttctaatgcgccactgtgggttcctcaaatttttagatagcttttgaatgtattttgctggacgtggtgatgatgattggagttgggttgtttttatttgtggtcgatccttttgttaaataacattgttcagcgattgcgatatt

SEQ ID NO: 120634 - DNA, 246 bp, Glycine max
tctcgctcaatacctactctccgctcccaagagcacgcaccaccactattgcacttcttcctcgttctccctctttttcttcttctacgctaaaccctttttgctatctcactaacacaacaatgggagacgagaagaatggcaagcctgctgcttccggcgtgtggtccaccatcatgcctttcgtcaatggtggagtctccggcatgctcgccagctgcgtcattctacccatcgatatgatca

SEQ ID NO: 120635 - DNA, 241 bp, Glycine max
tgaggccaggcaagccccactcaaccaccacacctctcctcgttcacgctacccctttctgctcttcttctacctttcaagttttaaaagtataaagatggcagagacattcctatttacctcagagtcggtgaacgagggacaccctgacaagctctgcgaccaaatctccgatgctgtcctcgacgcttgcctcgagcaggacccagacagcaaagttgcctgcgaaacatgcaccaaa

SEQ ID NO: 120636 - DNA, 247 bp, Glycine max
ctagccgcagcacgaggagcagcctcaggaggagaaggatgtctcacaggaagttcgagcacccaaggcacggttcactgggatttcttcccaggaagcgtgctgctcgtcacaggggaaaagtgaaggcattccccaaggatgacccatccaaggcacccaagctcactgcattcttgggttacaaggccggtatgactcacattgttagagaggtcgagaagccaggatcaaagcttcacaagaa

SEQ ID NO: 120637 - DNA, 249 bp, Glycine max
atcctggtctggaaggaccccaaagagggtaactggtggatgcagtttggtaatgatcatgttatgggatactggccggctcctctattctcgtacctctccgacagtgcgtcaatgattgagtgggggggagaggtcgtgaactccgagtccgacggccaacacacctcgactcaaatggggagtggccatttccctgaggaaggttttggcaaggctagttacttcaagaacattcagattgttgat

SEQ ID NO: 120638 - DNA, 252 bp, Glycine max
tctctccgcagcagccacacttcttcgccgtttcagctgaagagccatccgcaggtaagcaatggttaagcataataatgttatccccaatgggcacttccggaaacactggcaaaactatgtgaagacttggtttaatcaaccagcccgaaagaccagaagacggttggctcggcagaagaaggctgtcaagattttccccaggcctactgctggatctctcaggcctattgttcatggccagactctgaa

SEQ ID NO: 120639 - DNA, 243 bp, Glycine max
gttgctgcttcttccgccactcagcacttcgctccctctgtgcttcaccaaccatggccgaaatcgaagctaccgttccagatccctctcaaatcgacgtcaaacttttcaaccgctggagcttcgacgacgttgaggttactgatatgtctctggctgattacattggagtgtccccgtcaaagcatgctacatatgttcctcacactgctggtaggtactcagtgaagaggttcaggaagg

SEQ ID NO: 120640 - DNA, 243 bp, Glycine max
agcaactatgcctaaccctaaggtcttcttcgacatgaccatcggcggtcaatctgctggccgcatcgtgatggagctctacgccgacgtcactccccgcaccgccgagaacttccgcgcgctttgcaccggcgagaagggcgtagggcggagcggcaagcccctccactacaagggctcgtccttccaccgcgtgatcccgagtttcatgtgtcagggtggcgacttcaccgccggaaacgg

SEQ ID NO: 120641 - DNA, 241 bp, Glycine max
aatctctctcctttttataaacccatatatttagggcgcgctttttcccggcctcccctcgccaccgcatctccatccatctccgccacgtcgcctcctctctctctcgcttttcgtagttatacttcttctctcgttcctagaaatgagcttctcaacatgcgcagagctgtcgcgttgtttcgccgcagcatcggcgaaacctaattccggtcagtcaaacggcacttccacaacaagc

SEQ ID NO: 120642 - DNA, 239 bp, Glycine max
agccatttgggagttaggttctgcacgctctgcttccagcgagtgttctttcttcgtttcaacaccttaatttgcacacgctgcttcttcagcttgagaaatggcacaagatacctgtctattcacatctgaatctgtaaacgagggtcaccccgacaagctgtgcgaccagatctctgatgcagtgctcgatgcgtgccttgaacaggaccctgacagttaggttgcctgtgagacat

SEQ ID NO: 120643 - DNA, 241 bp, Glycine max
gtgggcacaaacaatgagaagctgctgaatgatgaattatatattgggctaaagcaaagacgagcaactgggcaggaatatgctgaacttatgcacgaatttatgacagcagtcaagcaaacttatggggaaaaggtcctaattcagtttgaagactttgcaaaccacaatgcttttaatctgcttgagaaatatagatctacacatctggtctttaatgatgatattcagggaacagcat

SEQ ID NO: 120644 - DNA, 240 bp, Glycine max
ggcggccatgaaggaggagaatgtggaggtgaagtacttctggggaagcacgttgtatcacgtggacgatttgccttttcaattggaggacatgccttccaattacggaggggttagggatagggttcagaaattggaggtagggaagacaattgaggcattagatcagcttaagggaatgccttctcgcggtgatgttgagcctggggagattccttctttaatggacctaggccttaa

SEQ ID NO: 120645 - DNA, 241 bp, Glycine max
ctttggatcaggtggaagtagtcgaggtaggaggcagaggctccgagaagatgtggttcaccctctcaaggtctctctggaggacctttatctcgggacttctaagaagctctccctctccagaaatgtcatatgctccaagtgcactggtaagggttctaagtctggtgcttcgatgaagtgtgctggttgtcaaggaactggtatgaaggtttctataagacatcttggcccgtccatg

SEQ ID NO: 120646 - DNA, 242 bp, Glycine max
cttgcggaaaggcggcctcgtgtgaggggtcagtttgtcagaaacttgaagggtgctaatgcggatcttaatgggcagcctgcatcgattgactatgacgaagatgacgaagaggatgaagatgaccagggagcaagagattcttctcccgaggatgcttgagcatgtcaaattgctattttgacataaggatgaagggccaaccaatttatgagctaatattggcctgtcaggaggactgc

SEQ ID NO: 120647 - DNA, 243 bp, Glycine max
ctgatgtggctgtcctgctcgacaacgaagccatttatgacatctgcagacgttcacttgacattgagaggccaacctacaccaaccttaatcgtttagtttctcaggtgatttcctcactgaccgcttccctgaggtttgatggtgccttgaacgttgatgttaatgaattccagaccaaccttgtgacataccccaggattcacttcatgctttcatcttatgctcccgtgatttcagctg

SEQ ID NO: 120648 - DNA, 249 bp, Glycine max
gctgaatccgagcgaactctgtacccatacgtgactggatcctctgtagtcgctatcaaatacaaagatgggattctcatggccgctgacatgggaggttcgtatggatctaccctgcggtacaagagtgttgagcgtatcaagcctattggaaagcattctcttcttggtgctagcggggagataagtgactttcaggagattctgcgttaccttgatgagcttatcctatatgacaacatgtgggat

SEQ ID NO: 120649 - DNA, 243 bp, Glycine max
gttatttctcagcgcgtaaagcatggctttgttggtggagaaaaccacgagtggtcgcgagtacaaggtcaaggacctttcccaggccgacttcggccgcctcgagatcgagctggccgaggttgagatgcccggcctcatggcctgtcggaccgagttcggcccctcccagcccttcaagggggcccgcatcaccggctccctccatctgaccattcagaccgccgtcctcattgagaccct

SEQ ID NO: 120650 - DNA, 242 bp, Glycine max
ctctcatctataagtcaacatggctcatcatgaagattcaagtgcatggaattcgagtaaacctcaccctaagctcaatgaaagaattctgtcttctctgtcacggagaactgttgctgctcacccctggcacgacttagagattgggccaggagctccagcagttttcaactgtgtggttgaaattggcaaaggaagtaaggttaagtatgagctggacaagacaagtggacttataaagg

SEQ ID NO: 120651 - DNA, 241 bp, Glycine max
gtcgtgccaaagaacccatggcactatctgttgatcataaaccaaatcgagatgatgaatatgcaagaattcgaggctgctggaggcaaggtgatacaatggaatggccaccgagtatttggtgttctagcaatgtcaaggtctattggtgataggtatttgaaaccatggattattccggaccccgaggtgacgtttcttcctcgtgcaaaagatgatgagtgcctcattctggccagtg

SEQ ID NO: 120652 - DNA, 244 bp, Glycine max
aaagcttcccacaaaacattctcagtcaaggccaaaaactggtgcgactctcttcaccgtttcctcaaacattgtgccgacgccggaaacattgaagcctgttacactctcggcctgattcggttttattgtttgcaaaacagagggcgcggcgcggcgctgatggcgaaggcagcgatgaactctcacgcgccggcgctgtactcgctcgcggtgatacagttcaacggaagcggcggcacga

SEQ ID NO: 120653 - DNA, 249 bp, Glycine max
aatcaaccaaccccttcactctctctctctctctcttgcaatggctgccattgttttcatccacattgcatcattggtctctctatttgttgcaacaagtgcaagaatccctggagtttacaccggtggcccctggcagagtgctcatgccaccttctacggtggcagtgatgcttctggaacaatgggtggtgcttgtgggtacggaaacctgtacagccagggctacggagttaacaccgcggcgct

SEQ ID NO: 120654 - DNA, 281 bp, Glycine max
cgcacgtaggcgttcggatcgagcattgttgttggagtgagcgaagaatatgtattctagagattcatggggtggaccgttggagataaacgcgacggactcggcgacggaggacgagcggaccggaacctgcaggacgttgacagggcagcgctgtcgcgtcccttggatgagacgcagcagagctggctccttggccccggcgagcagaagaagaagaagtacgtcgatctcggctcatcatcgtcagccgcatgatcttcaagtggaccctcggcaca

SEQ ID NO: 120655 - DNA, 259 bp, Glycine max
gcagcgttaaagaagagagaagaaaaatgcgaaagttcgatccatggcccgttttcttcaagcgcgagtggaaacgcaactggcccttcctcgttggattcgcagtcaccggagctctaatcaccaaactttcccttggccttaccgaggaagatgctaagaattccaaattcgttaaggcgcacaaaaggtgatttctgaatcgtgacatctgctggctttgcactttatgttaggtttgtcaagattactttgcttg

SEQ ID NO: 120656 - DNA, 250 bp, Glycine max
gcattgtgtttctctctttccgcggcgtagatctgagcagtttgggaaaccctaactgctctcaccactctctttgctttttttcctctccgatcaacgacctctttcgtcgccctaagtcatggcaggacttgcacccgagggatcacagtttgatgctcgtcaatatgataccaagatgaatgagttgcttacatctgatggacaggatttttcacatcttatgatgaggtttatgacagttttgatg

SEQ ID NO: 120657 - DNA, 250 bp, Glycine max
aaagaatcccaggcgaggagaaagatggaggggaaggagcaggatgtgtcgttgggagcgaacaagttccccgagagacagccgattgggacggcggcgcagagccaagacgacggcaaggactaccaggagccggcgccggcgccgctggttgacccgacggagtttacgtcatggtcgttttacagagcagggatagcagagtttgtgccacttttctgtttctctacatcaccgtcttaaccgttat

SEQ ID NO: 120658 - DNA, 249 bp, Glycine max
gtgccgttgaaggttaccgtattgctggtggccccctcggtgaggtcactgacccaatctacccaggtggcagcttcgacccattgggccttgctgatgacccagaggcttttgctgagcttaaggtgaaggaactcaagaacggacgattggccatgttctctatgtttggcttctttgttcaggccattgtcaccggaaagggtcattggagaacctcgccgatcaccttgctgaccctgtcaacaa

SEQ ID NO: 120659 - DNA, 243 bp, Glycine max
acggcgactccggccaccgttggatttcaattggttcttgtttttgaccggtggagtaaagaggcatggctgacaaagaggaagagtcggcaatgccaagggacgcgaagattgtgaagtctttgctgaaatcaatgggcgtagaagactacgaacctcgcgtcattcacaagtttctagagctatggtatcgctacgttgtcgatgtttaaccgatgcacaagtctattcagagcatgctgg

SEQ ID NO: 120660 - DNA, 232 bp, Glycine max
  unsure (1)..(232): unsure at all n locations
cgaagtctctgattttcctaatggctccggcaaaggcagagaagaagccggcggagaagaagccagcggcggagaaggcaccggcggagaagaagccgaagggntagacgaagatctcgaaggaaggagggagcgagaagaagaagaagcgcacgaagaagagcgtggagacctacaagatctacatcttcaaggtcctcaagaggttcaccccgacattggtatttccagc

SEQ ID NO: 120661 - DNA, 253 bp, Glycine max
cattccagagccaaggtaggttaaacactcttcttcatcgtcgtcgcaatgggacgtgtgatccgtgcgcagcgtaagggagcaggctcggtcttcaagtcccacacgcaccaccgcaagggccctgcccgcttccggagcctggatttcggagagcgcaacggctacctgaagggtgtcgtcactgacgtcatccacgatcctggccgtgggcgcctctcgctaaggtcgccttccgccacccgttccgcta

SEQ ID NO: 120662 - DNA, 253 bp, Glycine max
gtgcttctctcctctgtctttttctctctcttgctatccttttggctagtggcactgctgcaagtgcaactccaagaagcgcagtgccaagccaccatgtttcaacattcaacagaagcctttttccttccacttttctctttggaattggttcttctgcttaccaggcagaaggagcagcaagtgtagatgggagaggaccaagcatatggacacctacactagacagcatactgaaaagatttgggatcat

SEQ ID NO: 120663 - DNA, 249 bp, Glycine max
ccaagattgacaggcgatccggcaaagagcttgagaaggagcccaagtttttgaagaacggtgatgctggttttgttaagatgattccaaccaaacccatggttgttgaaactttctccgagtatcctccacttggtaggtttgctgttagggacatgcgtcaaactgttgctgtgggagtcatcaagaacgttgagaagaaggatctaccggagccaaggtcaccaaggctgcccagaagaagaagtg

SEQ ID NO: 120664 - DNA, 250 bp, Glycine max
accgcgcgctgtaaatctgagtatcaaacaacttcccctcaccaccacataacctcaaacaacacaacaccgccaatctgggtaaggagaagatgcacatcaactcggtcgttatcggccacgtcgattccggaaagtccaccaccaccggccacttgatctacaagtgcggtggtattgacaagcgtaccatcgagaagttcgagaagaagccgccgaactcggtaagggttccttcaagtacgcatgg

SEQ ID NO: 120665 - DNA, 248 bp, Glycine max
ctctctctctctctctctgaagatggcttcacgcaggctcgtatcttctctgattcgatcctcccttcgtagatctcaatcgaagccctcaatttccgcatcgacatcgaccctcacgtcatccaaccgtgcctcaccgcacggatacttgctgaaccgcgtcgccgagtacgccaccgccgcggctgctgctaccactctcctggtcctcctcctccggggaagaaggagctcggcggcggcgggaa

SEQ ID NO: 120666 - DNA, 250 bp, Glycine max
cactcgcaagcaaaaagaaagaatcccaggcgaggagaaagatggaggggaaggagcaggatgtgtcgttgggagcgaacaagttccccgagagacagccgattgggacggcggcgcagagccaagacgacggcaaggactaccaggagccggcgccggcgccgctggttgacccgacggagtttacgtcatggtcgttttacagagagggatagcagagtttgtggccacttttctgtttctctacatc

SEQ ID NO: 120667 - DNA, 248 bp, Glycine max
ccttcgtaggacccttatctctctctctctctatctctcccgaattattgttcgttcgacccttttacttagtattccctgtttccggtattcgctcccttttttctgcattctggttttacttagatctctgtcccgcaccagatctggtgcagggtgagagggttgggttcattaattttgtatcaatcttccttctgagcggtagcgtggggataccagagtcttttcgggaagcaagagagggt

SEQ ID NO: 120668 - DNA, 249 bp, Glycine max
aatgtacagtggcactcgttgatgaatctctgttggttgaatgtcaagtattctctggtggccatctgacccttttccaccagcctgttctactatgaagctcataggagcacattcatacaggagcctgagtttcccattcttacttttcttgtccctggggtacccataaatgccaccatatagcagtgtcctgtggaagtctctaccaagctaccaatgtaccttgcagaataaggcttgccgcta

SEQ ID NO: 120669 - DNA, 246 bp, Glycine max
cgaagtttcacatcagccttatccagtttagggtttcggttccttaccctacctttgacgtatcgaaaccttaaatttgggattaggtctgagcaatctggttggtagaacctttggtcttagagagtcaagttttatgtctggattagacgatcaaattcctactgccttcgatccttttgctgatgcaaatgctgatgactcggtgctgggtcaaaggagtatgtgcatattcgcgttcagcag

SEQ ID NO: 120670 - DNA, 244 bp, Glycine max
aagaagaccttcatccaggcaaaacaatgaaagtacaattcagcaagcctccctttcaacaaccatggggtgttggtacatggttaaaggaaattaaagacactactaaagaaggatatagttttgaagagctatgcatcaagaaagaagccattgagggagaagagaagttttgtgcaaaatccttgggaacagtaattggtttgccatttcaaagctgggaaagaacattcaagtactttca

SEQ ID NO: 120671 - DNA, 243 bp, Glycine max
gtgcctacattgtgaggcaagctgcaaagagcattgttgcaaatggacttgctaggagggcaattgtgcaagtttcctatgccattggtgtgcctgagcccttgtctgtgtttgttgacacttatggcactgggaagatccctgacaaggaaatcctcagcattgtgaaggagagttttgacttcaggcctggcatgatctcatcaaccttgatctcaagaggggtggaaatggcaggttctt

SEQ ID NO: 120672 - DNA, 242 bp, Glycine max
gagataacaatttgttgggcaaatttgagctatctggcattcctcctgcacccaggggtgttcctcgagattacagtgtgctttgacattgctgccaatggtatcttgaatgtctctgccgaagataaaaccactggccagaaaaataagatcactatcaccaatgacaagggtagattgtcaaaggaagatattgagaagatgttcaagaggctgagaagtacaagtctgaggatgaagag

SEQ ID NO: 120673 - DNA, 242 bp, Glycine max
tgccgtgctggttttgagacctcagcaaccacctacattgccggtgctgagattatgttgcaatgcaagagcagggttagcaacgaggttgtgtacaccaagaaggggtacactgactcaactggagcatacacaatgtacgtggacgaggatcacgcagatcaaatatgcagtgccaagcttgtaagcagccctcaccctcatgcaaggaagtcaccccgggccgcgacgcagccgtcgtt

SEQ ID NO: 120674 - DNA, 245 bp, Glycine max
ctgctattcagcaatcagcattcgcaggtcaaactgctctgaagcagctcaatgagttggtccgcaagaccggtggcgccggcaaaggtcgcaccaacatgcgccgtaccgtcaagagtgctcctcagagcatttggtatggccctgatcgtcccaagtacctgggtccattctcagagcagattccgtcatacctgaccggaaattccccggtgactacggatgggacactgctggactatcag

SEQ ID NO: 120675 - DNA, 249 bp, Glycine max
ctgaatatttggcttatgaatgtggcaagcatgttcttgtgatactcacagatatgagttcttatgctgatgctcttcgtgaggtatctgctgcccgagaagaagtgccaggaagacgtggttatcctggatatatgtatacagatcttgcaacaatttatgaacgagctgggagaattgaggggcgtaaaggctctattacacaaatccaattctaaccatgcccaatgatgatattacgcacccaac

SEQ ID NO: 120676 - DNA, 247 bp, Glycine max
cccgaccccatctccaccgtcaacgccgagtttcagatcgtgcttaccatcatcagagatgggttgaagaccgatcccaccaggtaccgcaagatgccggagcgtctcgttggggtttctgaggacaccaccactggcgttacgaggctctatcagatgcatgcgaatgggactcttctcttgcctgctattcatgtcaatgactcgtcaccacgagcaagtttgacaacttgtataggtgccgtca

SEQ ID NO: 120677 - DNA, 244 bp, Glycine max
ccaatatagcccaagccctatacaaccaaaccctaacacacacccatttgattcagtttccatggctagcctcaaggttgcatttttggctgcagtgctctgcatggttgtggtgagtgcacccatggcacatgcagctatcacgtgcgggcaggtgacgaatagcctgatcaattgcatcggttacctccagaacggaggacgccgccgtcgggatgctgcaacggagtgaagagcctcaatg

SEQ ID NO: 120678 - DNA, 244 bp, Glycine max
cacaactccactcttagctgccattggtttttcttcttccatttctcttcctttctaagcttctttcgattacccatttggagattctgtcctaatggctcttgctccttccaaagtttcctccttttccgggttttctcccaaacccagtgttggggatgctctgaaaaacccaacttgctctgtttctctgagctttgcgatgtgaaacttggaagcagaaaccttagggtttgtgcctcaa

SEQ ID NO: 120679 - DNA, 244 bp, Glycine max
ctctctctctctctctgaagatggcttcacgcaggctcgtatcttctctgattcgatcctcccttcgtagatctcaatcgaagccctcaatttccgcatcgacatcgaccctcacgtcatccaaccgtgcctcaccgcacggatacttgctgaaccgcgtcgccgagtacgccaccgccgcggctgctgctaccatcccacagaatcatcctcctccggggaagaaggagctcggcggcggcgg

SEQ ID NO: 120680 - DNA, 242 bp, Glycine max
acgaaatcgaaacagctaacaacatcaacaagcgtctcaagccatctccagttgaatcagcagactccgcgtctgagcccacgcgcacggtgctgctcgttgaccatcaggaagccggcgtgcgtctggtccacactctcctggcgtgcgcggaggccgtccagcaggagaatctgaagctggccgacgcgctcgtcaagacgtgggcatactcgcggcttctcaagccggcgccatgagga

SEQ ID NO: 120681 - DNA, 243 bp, Glycine max
gcgagcagtttcagacacagagagaggggtttgggattggagggattgacgctgcgtctcttcctcttctctttcgatccatccctcattcctaatcctccaatccaaccacctcagcctcacactcacatatacacatatctgaacgcgtatcgtccctcctatggcttcaaagcgcatcctcaaggagctcaaggacttcagaaagacccaccaacttcttgcagcgctggtccagtagct

SEQ ID NO: 120682 - DNA, 241 bp, Glycine max
cttcaattcattctagttctggattccgactccccgcgttgactcggttccgtatttcattctcgcggatctaatattaaggaatagcttaagggcacattacaatgaaggcattgattctggttgggggatttggaacaaggctgaggccactgacactcagtttccctaagcctcttgttgattttgctaacaagcctagattttgcatcagatagaagcccttaaggccattggagtg

SEQ ID NO: 120683 - DNA, 242 bp, Glycine max
ctaagatgagctcaacgagaacagaaatctcgtgtggaacaaaagggtaaaagctcgtttgattctgatttccagtacgaatacgaaccgtgaaagcgtggcctatcgatcctttagtccttcggaatttgaagctagaggtgtcagaaaagttaccacagggataactggcttgtggcagccaagcgttcatagcgacgtgctttttgatccttcgatgtcggctcttcctatcattgtga

SEQ ID NO: 120684 - DNA, 248 bp, Glycine max
atgaaaatgaaggtccttgttttcttcgttgctacaattttggtagcatggcaatgccatgcgtacgatatgttccctctccgaatgaacactggctatggtgcccgtactccggaggtgaaatgcgcaagttcgaggcttgctgtggaagcacacaacatctttggctttgagaccattcctgaagagtgcgttgaagcaacaaggaatacatccatggcgaacaatatagatcagactccaaaaca

SEQ ID NO: 120685 - DNA, 239 bp, Glycine max
ttctctttctctcttcaatggccggaatccgcttgcagccggaggactctgacgtctcccaacaatcccgcgcggtggctctctccgccaccgatctggtctccgacgacgaccgctccgtcgccgccgactcttggtccatcaagagcgagtacggaagcactctggacgacgaccagcgccatgctgacgccgccgaactctctccaacgccaacctccgacctccctccgattaca

SEQ ID NO: 120686 - DNA, 164 bp, Glycine max
atttgggtcgaaacgtcgccgttcggactacccagaacgtgaaagggtccaagaagattgtggtggtggggcccgtcaggggaatcaacggtggtaaagtcacccaatcagtgtcgtgccaccagagcctgttcccttaccggctcaataattgccacggggtt

SEQ ID NO: 120687 - DNA, 239 bp, Glycine max
gggaagaatagcaaggctgaatttcaagctcctgttcggacaactaaatatccaagggagattccacctctgccttggtatcgtggaacaattcctcagatggcgatggcaggatttttgcctttcagtgctatatacattgaactttactatatatttgccagtgtttggggccacagaatttacaccatctacagcacctgttcattgtcttcatcattctcttgattgttactgct

SEQ ID NO: 120688 - DNA, 239 bp, Glycine max
cttctctctctgtgtgtgcgcttcaacggcaaccagaagcagccatggccactgcaaggactgtgaaggatgtttcacctcatgagttcgttaaggcgtactcctctcacctcaaagcatccggcaagatggagctgccagagtggactgatattgtgaaaactgcaagatttaaggagttggctccttatgatcctgctggtactatgtcagagctgcttccatggcaagaaagatct

SEQ ID NO: 120689 - DNA, 226 bp, Glycine max
ggcggccatgaaggaggagaatgtggaggtgaagtacttctggggaagcacgttgtatcacgtggacgatttgccttttcaattggaggacatgccttccaattatggagggtttagggatagggttcagaaattggaggtcaggaagacaattgaggcattagatcagcttaagggcatgccttctcgcggtgatgtgagcctggggagattccttctttaatgg

SEQ ID NO: 120690 - DNA, 241 bp, Glycine max
gtgaaagagaatccgaggcgaagagaagagaaaaattaagatggaggggaaggagcaggatgtgtcgctgggagcgaacaagttcccggagagacagccgattgggacggcggcgcagagccaagacgacggcaaggactaccaggagccggcgccggcgccactggttgacccgacggagtttacgtcatggtcctttacagagcagggatagcagagtttgtggccacttttctgtttc

SEQ ID NO: 120691 - DNA, 242 bp, Glycine max
tggaaaggtcttgcctatgatgtgtcagacgaccatcaagacatcacaagaaggaagggcgtggttgattccctcttccaagctgcacaggatacttgagcccactatgcaatcatgagctcttatcagtaccttatcactggacttaaacagtacaacttggataacaacatggacggatttcacattgctcctgcgttatggacaagcttgttattcacatcagcaagaacttcatgacc

SEQ ID NO: 120692 - DNA, 246 bp, Glycine max
cactccctcctcttcacacattttcttagctctctccaacaatccctctcgttcacactttcagattgtgtgaagatgggggctggtggccgaactgctgttcctcctgccaacaggaagtcagaggctgaccctttgaagcgggtaccatttgaaaaacctcagtttagtctcagccagattaagaaggccattccacctcactgttccagcgctctgttctccgctcattctcctatgttgttt

SEQ ID NO: 120693 - DNA, 243 bp, Glycine max
gtggaggtccgaaccgactgatgttgaagaatcagcggatgagttgtggttaggggtgaaatgccactcgaacccagagctagctggttctccccgaaatgcgttgaggcgcacagttgactagacatctaggggtaaagcactgtttcggtgcgggccgcgagagcggtaccaaatcgaggcaaactctgaatactagatatacctcaaaataacaagggtcaaggtcggccagtgagacga

SEQ ID NO: 120694 - DNA, 243 bp, Glycine max
gcaatgagaaggttcaggatcttctcctcctggatgtcacccctctgtctcttggtttggagactgccggtggtgtgatgactgtcctgatccctaggaacactacaattccaacaaagaaggaacaagttttctcaacatactctgacaaccagcctggtgtgcttatccaggtctttgagggtgaaagagcaaggaccagaataacaatttgttgggcaaatttgagctatctggcattcc

SEQ ID NO: 120695 - DNA, 241 bp, Glycine max
gttgaaatcgagtagcaggttctttctcggctctaacaaagtaatgcaagttgctttaggtcgctctgcttcggatgacatcagtcccggccttcataaggttccaaagctattgcgtggagattctgggatggttttcaccaatttgtcaaaggaagaagttgaaaggctgtttaaagactttgaggagtatgactttcaagaacaggaagcaatgccactgaaaaggtggatctcaaag

SEQ ID NO: 120696 - DNA, 240 bp, Glycine max
tgcaattgacgttgaagtcttgcccttctctcttcaactccaaacacaagacatcatcatccatggctgcctccgtctccactgtcggagctgtcaacagagctcttttgaacctgaatgggtctggacctggggtttcagctcccagttcatccttctttgggagcagcttgaagaaggttattggctcaagggtcccaacacaaagatttcctctggaagcttcaagattgttgctgt

SEQ ID NO: 120697 - DNA, 238 bp, Glycine max
ctttatttaggtgacaaaactactcacagagaaagacactcggagaccttgcaagacttcatcaatggctgtcaaagtttatattgtgtactactccatgtatgggcatgttgagaaactagcagaagaaataaagaaaggggcttcctctgtggaaggtgttgaggccaaattatggcaggtacctgagacgctgaggatgaggtgctcggtaagatgagtgcaccacccaagagcg

SEQ ID NO: 120698 - DNA, 238 bp, Glycine max
gccatggccacctccaacttctctattgttctctccgtctccctagccttctttttggtgctacttaccaaggcacactcgaccgataccgtttctttccccttcaacaagttcaacccagtccaaccaaacattatgctccaaaaagatgctagtatttcatcctctggggtgttacaactcaccaaagttggcacaacggcgtgcccacctcgggatctctcggtcgtgcccttta

SEQ ID NO: 120699 - DNA, 233 bp, Glycine max
aaacactcggcattgggtcctttggcaaggtgaaaattgctgagcatgtacggactggtcataaagttgctataaagatccttaaccgccacaagattaaaaacatggaaatggaagaaaaagttagaagagaaatcaaaattttaagattgtttatgcatcatcacattataagactatatgaggttgtagaaacccaacagacatatatgttgttatggagtatgtgaaat

SEQ ID NO: 120700 - DNA, 241 bp, Glycine max
catcaaaacaaccttctttctttcaggttcttgatcagtgtcaaaaccaaaagggtggttgcaaattgcaatggctaagcatgatgttgagggtggttccttcgctgcaaaggactaccatgatcctcctccagcaccattgattgatgctgaggaactcccacagtggtccttctacaagggcttgattgcttgattcatgccaaaatgctcttcccttaaatcacagtgctcactgtga

SEQ ID NO: 120701 - DNA, 238 bp, Glycine max
ggtaccctctttgccgatgttatctttaccgccggagcaataatcatggcttctgctccagatccttatgttctcattttgggacgccttctggttggtttgggtgtgggcatagcttctgtcactgctcccgtttatattgcagaagcatcaccttccgaaataaggggttcattagtcagcacaaatgtcctcatgataaccggtggacagtttctttcctatcttgttaacctcg

SEQ ID NO: 120702 - DNA, 239 bp, Glycine max
gtaagctcccaagcagtgggaggaggctcgggactctgaccgcgtgcctgttgaagaatgagccggcgactcataggcagtggcttggttaagggaaaccaccggagccgtagcgaaagcgaagtcttcacagggcaattgtcactgcttatggacccgaacctgggtgatctatccatgaccaggatgaagcttgggtgaaactaagtggaggtccgaaccgactgatgttgaagaat

SEQ ID NO: 120703 - DNA, 235 bp, Glycine max
ggtggatacctaggcacccagagacgaggaagggcgtagtaagcgacgaaatgcttcggggagttgaaaataagcgtagatccggggattcccgatataggtcaacctttcgaactgctgctgaatccacgggcaggcaagagacaacctggtgaactgaaacatcttagtagccagaggaaaagaaagcaaaagcgattcccgtagtagcggcgagcgaaatgggagcagccta

SEQ ID NO: 120704 - DNA, 233 bp, Glycine max
ggaacttggtaatgagttgagtggtaagggcattggtgcaagtgttggtgttgcacaatatgggaaagacttgataaagcttaaacaaattctaagcacgttatacgagagctccaagttcaagccttcacttgtcgcacctgggggattttatgaaaaacattggtatgacaggcttcttcaggtttcgggttcaggcataatcaatgttctgactcatcatttatataatt

SEQ ID NO: 120705 - DNA, 238 bp, Glycine max
cgagggatccggatctgcgacgaacggggtgctggctccgccgcgcaaggtggcattgataaccggaattaccggacaagacggttcgtacctgacggaattcctcctggacaaggggtacgaggtgcacggcctgatccgccgctcgtcgaacttcaacacgcagcgcatcgaccacatatacgtggatccccacaacgcccacaaggcccgcatgaagctccactacgccgatctc

SEQ ID NO: 120706 - DNA, 242 bp, Glycine max
cgccgccagatctcagacacacactctcactctctctccctcaccttccataatgcagctcctccggccactgctcgcggcggcgctgctcctcctcgccaccctctccgacgcgcacaacatcaccagcatcctcgcaaagcaccccgtactctccaccttcaaccactacctcaccctcacccacctcgcccccgaaatcaacggcaaaaccaccatcaccgtctgcgccgtcgacaacg

SEQ ID NO: 120707 - DNA, 247 bp, Glycine max
  unsure (1)..(247): unsure at all n locations
ggctctctctctttctctcataaaaacactccgagtacaaagaccctctctcctactcctctttgcattacgagtgnaagaagcgaaganaaagaaacatgtcagacgcgttctgcagcgactgcaagaggcagacggaggtggtgttcgaccactccgccggcgacacggtgtgctcggagtgcggcctcgtcctcgaatcccactccatcgacgagacctccgagtggcgcaccttcgccaacga

SEQ ID NO: 120708 - DNA, 236 bp, Glycine max
gaaactgcaacttcctctgttttgctcccctgtttaggccttttcataagcttagaatgacacacaaggaattttccattgctctagtgactctcattgctgttctctttgtcaacatgaacatccaaggtgccactgctgactatggtagttggcagagtgctcatgccactttttatggcgggggtgatgcttctggcacaatgggtggagcatgtgggtatggaaatttgtat

SEQ ID NO: 120709 - DNA, 206 bp, Glycine max
gtaagctcccaagcagtgggatgaggctcaggactctgaccgcgtgcctgctgcagaatgagccggcgactcataggcagtggcttggttacgggacatcaccggagtcgtagcgaaagcgggtcttcacacgggcaattgtcactgcttatggactcgaacctgggtgatctatccatgaccaggatgtagctttggtgacacta

SEQ ID NO: 120710 - DNA, 231 bp, Glycine max
tggatctggacctaaatcatttcactggcccaatcccagattcattgggcaagttgtcaaaattgcgcttccttcggcttaacaataacagcttgtcaagtcctatccccatgtcactgactaatattacagctctccaagttctggatttgtctaataatcatctatcaggagtggttcctgataatggctccttctcattattcactcctatcagttttgcaaacaact

SEQ ID NO: 120711 - DNA, 233 bp, Glycine max
gtttgggattttttgggtgccattgttgttgctattatcatccgcagctgcttttattcgcaccgcaaacagtgagccatggccgtcggaaagaacaagcgcatctccaaggggaagaagggtggcaagaagaaggcagctgatccctttgccaagaaggattggtatgacattaaggctccttctgtttttcaagtgaaaaatgttggcaaaaccctcgtctctcgtactca

SEQ ID NO: 120712 - DNA, 234 bp, Glycine max
ctcgaagatcgagatatctatttagatctcagaaaaacagtgtttcatttcaattcattcagtcttattattattagggtttggcgattcagagagaaagagaaatgggagaacgaaaaggaatcccaattgctctggggctcttggcgatgctcctcttcttcattgcttcttcctcttcctctcacctcgttcgtgcttccgatgacgccgacgacgcgatcttctacgagt

SEQ ID NO: 120713 - DNA, 233 bp, Glycine max
ctgcctcactacaagctgcagctaccttcatgcaacccaccaaggttggcatagcctctcgcaacctcaaatctacacaatgcatttctaaggcttttggcttggaacctgctgcagctaaactctcttgctcccttcagcctgatctcaaagaatttgctcaaaaatgtgtcgacgctaccaaaattgcaggattcgcccttgccacctctgctctcgttgtttcggagcaa

SEQ ID NO: 120714 - DNA, 237 bp, Glycine max
attaaattttccgagaggccaaaatatccattgcacctttctctttctccgatggctaatccctcactcccgctcttcagtctcctcctattatccgccaccgtagccgccgccgaacggatcgacgatgaagacgaccttctgatccgtcaagtggtgccggatgcggaggaccaccacctgctcaacgcggagcaccacttctccgccttcaagacaaagttcggcaagacctac

SEQ ID NO: 120715 - DNA, 240 bp, Glycine max
ctttaccagttgccacactacaccgagatgccccctaaacccgtttgcgttgttgtttgcgaagaagtggcgactaagaggagcgtgggaacgttgaaggagggtgatttgaaagggaagagggtgttcgtgagggtcgatctgaacgtgcctttggatgacaaccttaacatcaccgatgacactagagtccgtgctgctgttcccaccatcaagtacttaactggtcatggagccaaa

SEQ ID NO: 120716 - DNA, 233 bp, Glycine max
gatcttgtagcttcccaactcactcccaagaccaatggatcaactcctgtgaggggagagacagtggccaagttgaaggtggcaatcaatggtttcggacgcattggtagaaacttccttcgctgctggcacggccgaaaagactcaccccttgaagtcgttcttgtcaacgacagtggtggtgtcaagaatgcttcgcacctgctgaaatatgattctatgctgggaacctt

SEQ ID NO: 120717 - DNA, 238 bp, Glycine max
  unsure (1)..(238): unsure at all n locations
gttggtttcnaanngtgaagnttcgagggaaactgctgttgttatcatgaaccatgttaaccttgttgagatcctcatggacgtgaatcaatggtccacggtgttctctggcattgtctcaagagcaatgactttggaagtgctatcaacaggggtggcggggaattacaacggtgcattgcaagtgatgacagcagangtgccaagtaccttcacctctggngccaactcgagagag

SEQ ID NO: 120718 - DNA, 232 bp, Glycine max
gtgaaacactagctagggtattgggagctctcgttgtttcggagttagggaccttacgcagccatggccactgctacgaatgccgccgccgccccaccacgccagctctcccagaaggaagctgacatccagatgatgttggccgccgacgtccacctcggcaccaagaactgcgacttccaaatggaacgttacatcttcaagcgccgcaacgacgggatttacattatta

SEQ ID NO: 120719 - DNA, 227 bp, Glycine max
gtaactcgttcttcttcttttgttgttctgtgtttgtgtttgttttttctctcacctgaaaatgtcttgctgcggtggtaactgtggttgcggaagctcctgcaagtgcggcaacggctgcggaggctgcaagatgtacccagacttgagctacactgagtcaaccaccaccgagaccttggtcatgggagtggcacctgttaaggctcaatttgagggtgctgaaa

SEQ ID NO: 120720 - DNA, 231 bp, Glycine max
gcgaaacgctcttcgttatcttttctcagactccgcggcgtagatccgaggcgttcgggaaatcctaactcatcatctcaactcaagtcatggctggacttgcacctgagggatcacagttcgatgctcgtcaatatgacgctaaaatgagtgacttactttcatctgatggacaggacttcttcacatcctatgacgaggtttatgatagttttgacgctatgggtttgc

SEQ ID NO: 120721 - DNA, 231 bp, Glycine max
gcttcctggcatcaaggttgacaagggcacagtcgagcttgctggaactaatggagaaaccaccactcagggtctagatggccttggtcagcgttgtgccaagtactacgaagctggtgcacgttttgccaaatggcgtgcagtgctgaagattggtcccaacgagccatctgagctgtctatccatgagaacgcctatggcttggctagatacgctgtcatatgccagga

SEQ ID NO: 120722 - DNA, 235 bp, Glycine max
atctgcgtgtgtttgtgaattgttgttgagatctgaatcaaaatcagaaacgataatggctacaccggaccacctcttcaacctccgcaacaacttctacctccggcgcttaccaagccgccatcaacagcagcgacgttgccaacctctcccaagaagataccctcgagcgcgacaccctcgtccaccgctgctacatcgccctcggccagctccagttcgtcatctccgagat

SEQ ID NO: 120723 - DNA, 228 bp, Glycine max
gaatggctcccaagggtttaacctttctggctgtgttaatatgcgtttcagcactgtcactgagtccttctgttgcgggggaagggcaaaataatggccttgttatgaacttctacaaggaatcatgccctcaggctgaagacatcatcacagaacaagtcaagcttctctacaagcgccacaagaacactgctttctcctggctcaggaacatcttccatgactgtg

SEQ ID NO: 120724 - DNA, 225 bp, Glycine max
atagcccaagccctatacaaccaaaccctaacacacacccatttgattcagtttccatggctagcctcaaggttgcatttttggctgcagtgctctgcatggttgtggtgagtgcacccatggcacatgcagctatcacgtgcgggcaggtgacgaatagcctgatcaattgcatcggttacctccagaacggaggaacgccgccgtcgggatgctgcaacggag

SEQ ID NO: 120725 - DNA, 227 bp, Glycine max
ctcgagccgaatcggctcgagcattggagcatggtgaaggtgctaatcatgaaggagaggccaaggagaagaaaggtataagagaaaagataaaagagaagcttcctggttatcactccaagacagaggaggaaaaggaaaaggaaaaggagagtggtgctcattgatatttaagattgagacaaggcttttttgttggttggagatgcatgattgtggtgtgcttt

SEQ ID NO: 120726 - DNA, 228 bp, Glycine max
cacaactccactcttagctgccattggtttttcttcttccatttctcttcctttctaagcttttttcgattacccatttggagattctgtcctaatggctcttgctccttccaaagtttcctccttttccgggttttctcccaaacccagtgttggggatgctctgaaaaacccaacttgctctgtttctctgagctttgcgaatgtgaaacttggaagcagaaacct

SEQ ID NO: 120727 - DNA, 229 bp, Glycine max
aaaggctacaaatttaagaggacaagtgtcgttaccaaccttgggagctggcgaagatgcatacgatgttcattttgaatgggacagtgacttcggaattcccggtgcattttacattaagaacttcatgcaagttgagttctatctcaagtctctaactctcgaagacattccaaaccacggaaccatccacttcgtatgcaactcctgggtttacaactcaaaatcc

SEQ ID NO: 120728 - DNA, 229 bp, Glycine max
ggaacagttgctttttctgctggtttgcatggctgggcttttaccctgactaactttgccaagatgtatgcatccaagtttggagttgatgaaggaaagatgatggaaaggctctggggtgaaaacttttttgatccagccacaaagaaatggaccagcaagaatagtggttctgctacctgcaagcgtgggtttgttcagttctgttatgagcccatcaagcagatta

SEQ ID NO: 120729 - DNA, 229 bp, Glycine max
ggcaccaaaggcagagaagaagccagcggagaagaagcccgcagaggagaagaagtccacggtgggagacaaggctccggcggagaagaagccaaaggccggaaagaagcttccgaagagggaggcgccggcgggaagggaagaagaagaagagaaacaagaagagcgtggagacatacaagatctacatcttcaaggttctgaagcaggttcaccctgacattggtat

SEQ ID NO: 120730 - DNA, 235 bp, Glycine max
aattcaggttctgcaccttcgagtgcttgttgccagaagctgaaggagcaaaagccatgcttctgtggctacctcaaaaaccctagcttgaagcagtatgttaactctcctaatgccaaaaaaaccgttagttcttgtggtattgcctatccaacttgttaagcacctcttatatatatatataacatgtgtgaacaatatatatatattgattaaaaaatatagtttaatttat

SEQ ID NO: 120731 - DNA, 229 bp, Glycine max
tggagagatcatgccgcactgtgatgagcaaatcacccaacaagcacaatcgtctgtacatggaagcaagaccattggaggaaggtcttgccgaggccattgacgatggcaagattggaccaagggatgaccccaagattcgctccaagatcttgtcagaagagtttggttgggacaaggatctcgccaagaaaatctggtgctttggccctgagacccttggacccaa

SEQ ID NO: 120732 - DNA, 227 bp, Glycine max
ctcttcttccccaccatcggaccaaccaaacctcactctccctttctcccctgaccctctccctgccatggtcatgggagcctttggccacttcgaaccggtctccaaatgcagcaccgagaaccggtctaaccaaaccgtggcctcggacttggacggcaccctcctggtgtcccccagcgcatttccttactacatgctggtcgccatcgaagccggcagcttcc

SEQ ID NO: 120733 - DNA, 228 bp, Glycine max
ggcaaatgactctattggggaggaagttgagaagttggctgcacaacttccagaaggtggtgttttgcttctagagaatgtgaggttctataaggaggaagagaagaatgaccctgagtttgcaaagaagtaggcttctcttgctgatctctacgtgaatgatgctttcggcactgcccacagagctcatgcttctacagaaggagtggccaaatacttgaagccctc

SEQ ID NO: 120734 - DNA, 224 bp, Glycine max
gtggctttgacatgatttgcagtgggagggacaagattgagcctgcagagcagtttaagcaagcggaagaaacagctaagaagctagacttggatgggctcgttgttattggtggtgatgactcaaacaccaatgcatgcctccttgctgagaacttcaggagcaaaaatttaaaaacaagtgtcattggatgccctaaaaccattgatggtgatttaaaatgc

SEQ ID NO: 120735 - DNA, 225 bp, Glycine max
tggagattatcaaggtgtgaaggttcatgcttgtgtgggaggtaccagtgtgcgtgaggaccagcgcattctatctagtggtgttcatgttgtggttggtacccctggtcgtgtgtttgatatgctgcgccgacagtcacttcagccagaccacatcaagatgtttgtattggatgaggctgatgaaatgctttcccgaggtttcaaggatcagatctacgatat

SEQ ID NO: 120736 - DNA, 227 bp, Glycine max
gttgacggcggcttaacggttttctgccccaccgacagcgccgtcagcggtttcgcgccaaagtacaagaacctgaccgaagctcagaaggtttcacttctgttgtaccacgcgactcccgtgtacgagtcactgcagatgctcaagtccagcaacggaataatgaacactctggccacagagggagccaacaagtacgacttcacggtgcagagtgaaggggaaga

SEQ ID NO: 120737 - DNA, 227 bp, Glycine max
gacaagctcaaggctgagcgcgaaagaggaattaccattgatattgctttgtggaagtttgaaaccaccaagtactactgcacagtcatcgatgcccccggacatcgtgactttatcaagaacatgattactggtacctcccaggctgattgtgctgtccttatcattgactccaccactggtggttttgaagctggtatttctaaggatggacagactcgtgagca

SEQ ID NO: 120738 - DNA, 228 bp, Glycine max
tggggaacacggagaagctgatgaaccagatcatggaattgaaattcacttcgaaatcgctgcagcgtcaatcgcgtaagtgcgagaaggaggagaaatcggagaagctgaaggtgaagaaggcgatcgagaaaggcaacatggacggcgctcgaatctacgcggagaacgcgatccgtaagcgcacggagcagatgaactacctccgcctggcctcgcgcctcgacg

SEQ ID NO: 120739 - DNA, 229 bp, Glycine max
ctgcactcttcatcaagctccgctccaacacaggggaaaatgagggagatccttcacgtgcagggcgggcaatgcgggaaccagatcggttccaagttctgggaagtggtgtgcgacgagcacggcatagatccgacggggcagtacgtcggaaactcagatctgcaactcgagcgcgtgaacgtctactacaatgaagcctcgtgcgggcgcttcgtgccacgcgcgg

SEQ ID NO: 120740 - DNA, 230 bp, Glycine max
ctttctctagtcctgttatttctcagcgcgtaaagcatggctttgttggtggagaaaaccacgagtggtcgcgagtacaaggtcaaggacctttcccaggccgacttcggccgcctcgagatcgagctggccgaggttgagatgcccggcctcatggcctgtcggaccgagttcggcccctcccagcccttcaagggggcccgcatcaccggctccctccacatgaccat

SEQ ID NO: 120741 - DNA, 228 bp, Glycine max
tattctattccatcatcaatggagaacaccgagggatccggatctgcgacgaacggggtgctggctccgccgcgcaaggtggcattgataaccggaattaccggacaagacggttcgtacctgacggaattcctcctggacaaggggtacgaggtgcacggcctgatccgccgctcgtcgaacttcaacacgcagcgcatcgaccacatatacgtggatccccacaac

SEQ ID NO: 120742 - DNA, 221 bp, Glycine max
ctcacacacactttctctctctctctctctcatccagatcgtgtagcaatcgcgagcgctcccactccacgcgccgcgttcgtgtacatggcgaagctagcggagcaggccgcgcgctacgaggagatggtggacttcatggaaaaggtcaccgcctccgccgagcgcgacgagctgaccgtcgaggagcgtaacctcctctccgtcgcctacaagaacgt

SEQ ID NO: 120743 - DNA, 224 bp, Glycine max
gtcctgttatttctcagcgcgtaaagcatggctttgttggtggagaaaaccacgagtggtcgcgagtacaaggtcaaggacctttcccaggccgacttcggccgcctcgagatcgagctggccgaggttgagatgcccggcctcatggcctgtcggaccgagttcggcccctcccagcccttcaagggggcccgcatcaccggctccctccacatgaccatcca

SEQ ID NO: 120744 - DNA, 225 bp, Glycine max
cttcctttctctgctctttgccttctctgacacatttggtgccttgtagagcgtgttttggcaggcaggtggtatggcgaaggacgttgaggttgctgagcgtggctccttctctgggaaggactaccaggaccctccaccagcaccactcattgatgctgaggagctcacgcagtggtccttttacagggctctcattgctgaattcattgccactttgctctt

SEQ ID NO: 120745 - DNA, 225 bp, Glycine max
ctcacacacaccactttatatacccacgcaatagaagggagtgctactctcttcgccgctctctctctccttctcgctctttcagctttgacttttgttggaaactaaggcctaatcaaaatggtgaagttcacagctgaagagctacgtcgtattatggactataagcataatatccgtaatatgtctgtcattgctcatgttgatcacggaaaatcaaccctc

SEQ ID NO: 120746 - DNA, 157 bp, Glycine max
ggctcagtttgctcaaatgcgacctgttggaatgccaccatctgttggtcctcgtgtgccaatgtatcccccaggtggtcgcggtattggtcaacaattattttatagccaaggccctcctgctatcattccttcccagcctggatttggctatcaa

SEQ ID NO: 120747 - DNA, 232 bp, Glycine max
actgaagaaaaatgcgaaagttcgatccatggcccgttttcttcaagcgcgagtggaaacgcaactggcccttcctcgttggattcgcagtcaccggagctctaatcaccaaactttcccttggccttaccgaggaagatgctaagaattccaaattcgttaaggcgcacaaaaggtgatttctgaatcgtgacatctgcctggctttgcactttatgttaggtttgtcaag

SEQ ID NO: 120748 - DNA, 243 bp, Glycine max
ttctatcagcatgggcaatgcaattagatttctcaaaagtcgcattgccaagctacctttgacgctgtctgagtcagaatcaaaaacctctcttcaatcagatattgagcgttttatatatgagaaaattatacttgccaacaaggtgatagtcaagcatgctgttacaaaactaagagatggtgatgttcttcttacttatgggtcttcatcggcggttgaaatgatactgttacatgcaca

SEQ ID NO: 120749 - DNA, 258 bp, Glycine max
gcttgctctctctctctcgctctttcagcttatgactttggtggaaactaaagactagtcaaaatggtgaagttcacagctgaagagctgcgtcgcattatggactataagcataatatccgtaatatgtctgtcattgctcatgttgatcacggaaaatcaaccctgactgattctcttgtggctgctgctggtattattgctcaagaagttgcaggtgatgtccgtatgactgatacccgtgcagatgaagctgag

SEQ ID NO: 120750 - DNA, 243 bp, Glycine max
caaatcaaagccatggccacctccaacttctctattgttctctccgtctccctagccttctttttggtgctacttaccaaggcacactcgaccgataccgtttctttcaccttcaacaagttcaacccagtccaaccaaacattatgctccaaaaagatgctagtatttcatcctctggggtgttacaactcaccaaagttggcagcaacggcgtgcccacctcgggatctctcggtcgtgcc

SEQ ID NO: 120751 - DNA, 233 bp, Glycine max
tctctctctctctctctgaagatggcttcacgcaggctcgtatcttctctgattcgatcctcccttcgtagatctcaatcgaagccctcaatttccgcatcgacatcgatcttcacgtcatccaaccgtgcctcaccgcacggatatttgctgaaccgcgtcgccgagtacgccaccgccgcggctgctgctaccactcctcctgttcctcctcctccggggaagaaggagct

SEQ ID NO: 120752 - DNA, 239 bp, Glycine max
caaaaccatccaactctcatgttcgaagaaaacatacacaatctcttcaaactctaattttcttttcctttcatttaatttcctcaatggcggcttccctcgaccagcgtccgtaccccggcctccattatggcgtcgttcggcccctcaaaccaggcccggatatcccgcgtcccaagaagctaccccagccgccgccgccactctcggattcctcaagcgacgaagaagaagacacc

SEQ ID NO: 120753 - DNA, 218 bp, Glycine max
ggcttatggtggatacctaggcacccagagacgaggaagggcgtagtaagcgacgaaatgcttcggggagttgaaaataagcgtagatccggggattcccgatataggtcaacctttcgaactgctgctgaatccacgggcaggcaagagacaacctggtgtactgaaacatcttagtagccagaggaaaagaaagcaaaagcgattcccgtagtagc

SEQ ID NO: 120754 - DNA, 241 bp, Glycine max
ctcagtctctgtgtttgcggctgaggattccgaacgagtgaccttcttcgtttctcgcaaagtttaagtaatcatgggtaaggaaaaggttcacatcaacattgtcgtcattggacatgtcgactctgggaagtcaactaccactggtcacttgatctacaagcttggaggtattgacaagcgtgtgattgagaggttcgagaaggaggctgccgagatgaacaagaggtcattcaagtat

SEQ ID NO: 120755 - DNA, 243 bp, Glycine max
cagaaagagaggaaaaatgccgctcaagttggcgggaggagccattgtcggttcccttctcctatgtgttgctatttctctctttcacatcgctggggccgaagatccctacaggttcttcaactggaatgttacttatggtgacatttaccctcttggtgttcgccaaacgggaatattgatcaacgggcaattcccaggtccagatattcattctgttaccaacgacaacctcatcatcaa

SEQ ID NO: 120756 - DNA, 246 bp, Glycine max
ggccactctgctattcagcaatcagcattcgcaggtcaaactgctctgaagcagctcaatgagttggtccgcaagaccggtggcgccggcaaaggtcgcaccaacatgcgccgtaccgtcaagagtcgctcctcagagcatttggtatggccctgatcgtcccaagtacctgggtccattctcagagcagattccgtcatacctgaccggagaattccccggtgactacggatgggacactgctgg

SEQ ID NO: 120757 - DNA, 241 bp, Glycine max
cgcgggtgaggtagaacccttccacggtggtgactgcgcgatgggtgcctacaagtatgtttcagagctatggcgcaagaagcagtctgatgtcatgcgcttcttgcagcgggtgaggtgctgggagtataggcagcaaccttccattgttcgcttgacaaggtcgacccgccctgacaaggctcgtcgcttgggcttcaaggctaagcagggctatgtgatataccgtgttcgtgttagg

SEQ ID NO: 120758 - DNA, 240 bp, Glycine max
atttctcagcgcgtaaagcatggctttgttggtggagaaaaccacgagtggtcgcgagtacaaggtcaaggacctttcccaggccgacttcggccgcctcgagatcgagctggccgaggttgagatgcacggcctcatggcctgtcggaccgagttcggcgcctcccagcccttcaagggggcccgcatcagcggctccctccacatgaccatccagaccgccgttctcattgagaccct

SEQ ID NO: 120759 - DNA, 238 bp, Glycine max
acaaaatccgagtggttttgaacaaggcagaccaagttgatacccaacaattgatgagggtttatggagccttaatgtggtcacttgggaaggtgctgaagacacctgaagtaatgcgagtgtatattggctccttcaatgacaagcctgtaaatgatgctgccactggtccacttgggaaggaactctttgaaaaggaacaggatgatctactctcggatctgaaagatgtaccaaa

SEQ ID NO: 120760 - DNA, 241 bp, Glycine max
ccatgctcaaggaaggccataagcacctttctggcctcgatgaagcggttctcaagaacatcgacgcctgcaaacaactttccactatcactcgaactctcctcggtcccaatgggatgaataagatggttataaatcacttggacaagctttttgtcacgaacgatgctgggacgattgtgaatgaactgatagttcagcatcctgctgccaaggttttggttttggctgggaaggctca

SEQ ID NO: 120761 - DNA, 236 bp, Glycine max
ccctagtctccatacatcaacttgggaggttaaagagacggcaacgttgtgctgtccgccttgaccgagccagagcttcgtcttggccctcgattttgccctgtaaaactaatcccagtcacaacagaaataatcaatggcaccgaaacagaccaaggctgagaagaagatcgcttacgatgcgaactgtgcgacctaatggaggagtacggccaaatcctcgttgtaaactccga

SEQ ID NO: 120762 - DNA, 238 bp, Glycine max
gggcagagttgattgcagttgagagagttgtaatgagtaacgaatacgattatctgttcaagcttctcctaatcggcgactcttccgttggaaaatcctgcttgcttctcagattcgctgatgactcctacgtcgacagctacataagtaccattggagttgatttcaaaatcagaaccgtggagctggaaggaaaaaccgtcaagctgcagatttgggatacagctggacaggagcg

SEQ ID NO: 120763 - DNA, 239 bp, Glycine max
ccaaaagcaatggctaatacaccttcgaattcttcaattctcctctccctttttctattggccatcgccctctccctcgctgagtcccaatctttcatcggagtaaactacggccaggtcgccgacaaccttccggcgccggaggacacggccagcctcctcaaatccaccaccatcggaaaagtccgtctctacggcgccgatcccgccatcatcaaggccctcgccaactccggcat

SEQ ID NO: 120764 - DNA, 240 bp, Glycine max
ggcttatggtggatacctaggcacccagagacgaggaagggcgtagtaagcgacgaaatgcttcggggagttgaaaataagcgtagatccggggattcccgatataggtcaacctttcgaactgctgctgaatccacgggcaggcaagagacaacctggtgaactgaaacatcttagtagccagaggaaaagaaagcaaaagcgattcccgtagtagcggcgagcgacatgggagcagct

SEQ ID NO: 120765 - DNA, 238 bp, Glycine max
cacctttgttcactcttcttctcttgcggctagggttttagcgcacttcttctagatttaaggaagatgggtaaggaaaaggttcacatcagtattgtggtcattggccatgtcgactctgggaaatccactaccactggtcacctgatttacaagcttggaggcattgacaagcgtgttattgagaggtttgagaaggaagctgctgagatgaacaagaggtctttcaagtatgcct

SEQ ID NO: 120766 - DNA, 237 bp, Glycine max
ctcgagccgctatctctctctgtctctatatctgtatttctgaattttgggaatagaaaaaccctaagcaaagcaaagcggtaaggatggggaacacggagaagctgatgaaccagatcatggaattgaaattcacttcgaaatcgctgcagcgtcaatcgcgtaagtgcgagaaggaggagaaatcggagaagctgaaggtgaagaaggcgatcgagaaaggcaacatggacggcg

SEQ ID NO: 120767 - DNA, 236 bp, Glycine max
ctcttgtttgctaatattctcattcttctgtctctgcttcttctccttctgaactaagagatggggttgtctttcaccaagctttttagccggctctttgctaagaaagagatgcgtattctcatggtaggtcttgatgctgctggtaagactaccatcttgtacaagctcaagctgggagaaattgtcacaaccattcccacaattggattcaatgtggagactgtggaatataa

SEQ ID NO: 120768 - DNA, 238 bp, Glycine max
agcggggcgagtgcacgcccgattcggcttcggcaagaaaaaggctcccgccccaaagaaagcctccaggggatcgggccgagacaccgacagacccctttggtatccgggcgccaaagcgcccgaatacctcgatgggagtcttgtcggagactacgggttcgatccgtttgggctagggaagcccgcggagtacctgcagttcgagctggactcgctggaccagaaccttgcgaag

SEQ ID NO: 120769 - DNA, 239 bp, Glycine max
  unsure (1)..(239): unsure at all n locations
ccaacctctcaagtccaacctacccctttttcttctcccaccaacttcaccgtnctcttcctcgatcatgtctcacttcaagggcaagtaccatgatgagcttattgccaatgctgcttacattggcactcctggaaagggtattcttgctgctgatgagtcaacagggacaattggcaagcgtttggccagcatcagtgtagagaatgttgaatccaacaggcgtgctcttagggagc

SEQ ID NO: 120770 - DNA, 237 bp, Glycine max
aggacgcggagtacatttctcttgccctggttgccaacaaacttgccctcaacaccgtgattgttgtggagcaggaggaggaggttgatttgatcgttgaattgagcaagaagctctgtattaagcccgtgattgggcttcgtgcgaagcttcggaccaagcattccggccatttcggtgggacttcaggagagaaggggaagtttgggctgaccaccgctcagattcttagggttg

SEQ ID NO: 120771 - DNA, 234 bp, Glycine max
gttcctcaagtatccaccacctaaagtgatgcaggtggataagtctgcatggatgactgatgaagaatttgctagagaaacgattgctggtgtaaatccaaacgtcattaagattcttgaggagttcccaccacgtagcaagctagatacacaagtctacggtgatcatacctgtataataacaaaacaacatttggaacctaacttgggtgggctcactgttgagcaggctat

SEQ ID NO: 120772 - DNA, 238 bp, Glycine max
tccatggagaagatgatgaaggactcgttggaggagtgcgagcgtgcaccgagtagcggcgagacaaaacgctgcgttgggtcgctcgaggacatgatcgattttgcaacctctgttttgggtcgaaacgtcgccgttcggactacccagaacgtgaacgggtccaagaagagtgtggtggtggggcccgtcaggggaatcaacggtggtaaagtcacccaatcagtgtcgtgccacc

SEQ ID NO: 120773 - DNA, 236 bp, Glycine max
cttagacgtgaaaatggggaccttcgtgttggtgtccgacgtgcaatgagacagcagggtaatgttccatcctcagttatctctagccacagcatgcatctcggtgtccttgcaactgcttggcctgccatcttgaccgggaccatcttcactgtttattacaaacctaggaccagtcccgccgaatttattgttccgtatgatcaatatatggagtctttaaaaaatagttatag

SEQ ID NO: 120774 - DNA, 239 bp, Glycine max
tcctttggatcaggtggaagtagtcgaggtaggaggcagaggcgcggagaagacgtggttcaccctctcaaggtctctttggaggacctttatcttggaacttccaagaagctctccctctccagaaatgttatatgctccaagtgcagtggcaagggttctaagtctggtgcttcgatgaagtgtgctggttgtcaaggaactggtatgaaggtttctataagacatcttggcccatc

SEQ ID NO: 120775 - DNA, 236 bp, Glycine max
caggaagtgagccagcagaggaaggactacgtagaccctccgccagcccccctcatcgacttggccgagattaagctctggtccttctacagagccctcatcgccgagtttatcgccacactcctcttcctctacgtcaccgtcgccaccgtcattggccacaaaaaacagaccggaccatgtgacggcgttggccttctcggcatcgcatgggccttcggtggcatgatctttgt

SEQ ID NO: 120776 - DNA, 238 bp, Glycine max
tactacacccaagtattccaaggccaggtatgatgaaattgtgaaggaagtctcttcctacttgaagaaagtaggatacaaccctgacaagattccttttgttcctatctctggttttgagggagacaacatgattgagaggtccacaaaccttgactggtacaagggtccaactctgcttgatgcacatgaccagattagtgagcccaagaggccctctgacaagcccctcaggctt

SEQ ID NO: 120777 - DNA, 233 bp, Glycine max
caattttcaaactcaattaccattccataacctaaatctcctctttgtttccgagtcagagagcaatggcacgtaccaagcaaaccgctcgcaagtccaccggcggaaaggcgccgaggaagcaattggcgactaaagccgctcgcaagtcagctccggccaccggcggagtgaagaagccccaccgcttcaggcccggaacggtggctctgagggagatcagaaagtaccag

SEQ ID NO: 120778 - DNA, 234 bp, Glycine max
caaattagttcattctctttgcgcagttccctacctctcctttcaagatgcagatcttcgtcaagaccctcaccggaaagaccatcacccttgaggtggaaagctctgacaccatcgacaacgtcaaggccaagatccaggacaaggcaggaattcccccggatcagcaacgtctcatcttcgccggaaagcagctcgaggacggccgtaccctcgccgactacaacatccaga

SEQ ID NO: 120779 - DNA, 234 bp, Glycine max
ctttatacgcgatgtggcgaatcagactgatttaacgacgacgagatatgcgatttaaaacttgtcgtctacttttaggaaatgtttggaacagagaacttacaataatacaacgccgcgttctccgaagattgaggaacaagaagagatctattaagagaaagatttcttcgagaaaaaatatgaacagttacatccaattacaaactacacgaaagttgtcccttttttatg

SEQ ID NO: 120780 - DNA, 232 bp, Glycine max
ggaaggagccgtagcagcagcggaagctctagcttgggcagcgaatcacaatggcgagaggattgaagaagcatttgaagaggcttaatgccccaaagcattggatgcttgacaaactgggtggtgcatttgctcctaagccctcatctggacctcacaaatccagggaatgcctgccactcatactcattttgcgaaaccggctgaagtatgctctgacataccgtgaagt

SEQ ID NO: 120781 - DNA, 234 bp, Glycine max
gtttctgtctctgtgtttgcggctgaggattccgaacgagcgaccttcttcgtttctcgcaaagtttaagtcatcatgggtaaggaaaagactcacatcgtcattgtcgtcattggacttgtcgactctgggaagtcaactaccactggtcatttgatctacaagcttggaggtattgacaagcgcgtgattgagaggttcgagaaggaggctgctgagatgaacaagaggtca

SEQ ID NO: 120782 - DNA, 245 bp, Glycine max
ccgtcacaacccaagcctccgccgcgattttccggccatgtgcctcgaaatcgaggtttctgaccggctcttccggtaaactcaaccgggaagtgactatgaggccaatggggtgccctccttctgcctctttcaaggttgaagccacgaagggagagtggttacctggcttgggctccccaacttacctcaatggcactcttactggtgacagatggattagaccctctgggactagctgagga

SEQ ID NO: 120783 - DNA, 239 bp, Glycine max
ggtttacagagaagctaagaggcgcaccgtagcaaaagctcgtggaattgctagcaatggcgaagatcaaggtttacgagctgaggcagaagacgaaggctgatctgctgaatcaactgaaggacctgaaggcggagcttgccttgcttcgtgttgctaaggtcaccggtggtgcccctaacaagctttccaagataaaggtggtgaggttgaacattgcccaagttttgacggtgatt

SEQ ID NO: 120784 - DNA, 233 bp, Glycine max
ggaaaatcatgccaactgcattggagcgggttatctggggattcggggatggatctaccattccagtgtttgaaactcccgttggaaaaataggtgctgccatttgttgggagaacagaatgccactgttaaggacagcaatgtatgccaaaggtgtggagatatattgtgctccaacagctgattccagggatgtttggcaagcatcaatgacccatattgcacttgaaggt

SEQ ID NO: 120785 - DNA, 230 bp, Glycine max
gccaaggcgcgatacgataaggccacgttcagagtagtcgatatggatgattatgctgccgatgacgatgaatacgaggaaaggttcaaaaaggagactcacgctcttttctttttagctacatatggtgatggtgagccaactgataatgcagcgagattttataaatggtttacggaggggggtgagataggagaaggatggcttgagaatcttcactatggtgtgtt

SEQ ID NO: 120786 - DNA, 234 bp, Glycine max
gtcctatttattgattttcctcctgtccttcaacttcagctaataagttttgaatatgactttatgcgggatactatggttaagattaattcccgttatgagtttcccttacaacttgatctttatcgtgaggatgggaaatatctatcacctgatgctgataggagtgtccgcaatctttacacacttcacagtgttctggttcacagtggaggtgtgcatggtggacattat

SEQ ID NO: 120787 - DNA, 252 bp, Glycine max
tattctcctcattcggcactctccataactctctctttctctctcttccaaaacctaattttcatcttttctcttcaaacaaattttcaaaatgcgcgagatccttcacatccagggtggccaatgcggcaaccagatcggcgccaagttctgggaggtggtttgcgcggagacgggatcgaccccactggaaggtacggtggggactcagagcttcagctcgagaggatcaatgtctactacaacgaagcc

SEQ ID NO: 120788 - DNA, 231 bp, Glycine max
gctaattcgattctcatctccatggcgctgcagaggttgttgaagaggaaaggaggcgtcgatgaactcaacgacgatgtccctctcgcttcgccagccaccaagattcgccgtctcgacgctgagttgccgccaattgtggaagaggacaaaccattactgttacctaacgaggagagagctctcgtgctcttcaagcctctcgttcattcccattcctctttctctctc

SEQ ID NO: 120789 - DNA, 233 bp, Glycine max
ctttctccgatggctaatccctcactcttgttcttcagtctcctcctattatccgccaccgtagccgccgccgaacggatcgacgatgaagacgaccttctgatccgtcaagtggtgccggatgcggaggaccaccacctgctcaacgcggagcaccacttctccgccttcaagacaaagttcggcaagacctacgccacgcaggaggagcacgaccaccgcttccgtatctt

SEQ ID NO: 120790 - DNA, 235 bp, Glycine max
aaaacactcataacacaaagcacaaagcaaagctcatccttgagttaaaaaatggcagcagcttcttccatggctctctcatccccatccttggctggtcaggccgtgaagctgggcccatcagccccagaagtgggaagggtgagcatgaggaagaccgtcaccaagcaggtctcctcaggaagcccatggtacggcccagaccgagtcaagtacttgggcccattctctggcg

SEQ ID NO: 120791 - DNA, 236 bp, Glycine max
gctgctccaacatctggagagtttcaggaagttgaaggggaaactgaagaaaggcgacgagccaggttggagcgccaccagaggactaaggagcgtgctgcaaaagcattggctgagaagaatcagcgggacttacaaacccaaagagaacaagctgagagacataggcttgccgaaacactggattttgaaattaagcgctgggctgcaggaaaagaggggaatttacgagcttt

SEQ ID NO: 120792 - DNA, 268 bp, Glycine max
ctcggaatgcagctcaactcggatatcggctcgagctcacacacactttctctctctctctctctcacccagatcttgtagcaatggcgagcgctcccactccacgcgaagagttcgtgtacatggcgaagctggcggagcaggccgagcgctacgaggagatggtggagttcatggagaaggtctccgcctccgccgagagcgaggagctgaccgtggaggagcgtaacctcctctccgtcgcctacaagaacgtgatcggcgctcg

SEQ ID NO: 120793 - DNA, 231 bp, Glycine max
agatcaagtgaacaccgccgtcggaaggcctgaagaggcgactcaccccgacacgttgaaggcggctttggctgagttcatctcaaccttcatcttcgtgttcgccggctcaggctccggcatcgcctacaacaagctcaccgacaacggcgctgccacccctgccggcctcatctccgcctccatcgcccatgcattcgccctcttcgtcgccgtctccgtcggcgccaa

SEQ ID NO: 120794 - DNA, 230 bp, Glycine max
ctctcaccaacttccgctacttcctactccaaccactttcttttttcccgcagtcatgggcaaggtcaagatcggaatcaacggatttggaagaattggccgtttggtggccagggtggctctgcagagagacgatgttgaactcgttgccgttaacgatcctttcattaccaccgattacatgacatacatgtttaaatacgacagtgttcacgggcactggaagcatc

SEQ ID NO: 120795 - DNA, 232 bp, Glycine max
atcggaagaaaccctagccactctcccggcgtcacgatgcagatcttcgtgaaaaccctaacgggtaaaacgatcacgtttgaggtggagtcttcggacaccatcgacaacgtgaaggccaagatccaggacaaggaaggcatccctccggaccagcagcgcctcatcttcgccgggaagcagctggaggacggccgcaccctcgccgactacaacatccagaaggagtcca

SEQ ID NO: 120796 - DNA, 229 bp, Glycine max
ctcttttttctctctcttgcaaaacctaattttcatttcttccctcaaatttcaaaatgcgtgagatccttcacatccagggtggccaatgcggcaaccagatcggcgccaagttctgggaggtggtttgcgcggagcacgggatcgaccctaccggaaggtacggtggggactcggagttgcagctcgagaggatcaatgtctactacaacgaggccagttgcggtcg

SEQ ID NO: 120797 - DNA, 229 bp, Glycine max
ctgaggcttccaaagcaatggcttcccttgcagcatccactgctgctgcttcccttggcatgtcagaaatgcttggaaaccccatcaacttcagtggtgccacaaggccagctccatctgcttctagtcctgcctccttcaagactgtggctcttttctccaaaaagaaggctacaccaacacctccaaaaaaagctgctgctgctgctcctgccaatgatgagcttgc

SEQ ID NO: 120798 - DNA, 251 bp, Glycine max
cggctcgagctcttgaaaattttcaattgtctattgacacgaacaatacacaaaagcacagccacaaaggcagcatcatcagagagcaacaatggaagaagaaaaagaagaccaaaagctcctgacatacccccactactggggcttcaccccagaagaggactactacaaacaacaaggaatcacatccacaagctccttcttcaccactccccaaggcctcaaactcttcacaagatcctggctcccaa

SEQ ID NO: 120799 - DNA, 257 bp, Glycine max
tggggatcgaagccggggagcggaggtgcggcgtcggcgcagaacgaagccatagaccggcgagagcgtctccggcgactggctctggagaccatagacttggcgaaggatccctatttcatgcgcaaccacctcggaagctacgaatgcaaactctgtctcactctccacaacaacgagggtatatacttggcccacactcagggcaagcgccaccaaaccaacttggccaaacgtgccgctcgcgaggccaagga

SEQ ID NO: 120800 - DNA, 255 bp, Glycine max
aaggatgctgttattcgcaccgcaaacaaacagtgagccatggccgtcggaaagaacaagcgcatctccaaagggaaaaagggtggcaagaagaaggcagctgatccctttgccaagaaggattggtatgacattaaggccccttctctttttcaagtgaacaatgttggcaaaaccctcgtctctcgtacgcagggtaccaagattgcttctgaaggacttaaacatagagtgtttgaggtctcttggctgatc

SEQ ID NO: 120801 - DNA, 255 bp, Glycine max
gtcgaacctgcgaaaaagatggaacctttggaagaagaacaacaatgtcggacacccctcgccaaggttgtctcagattgctccaagcgctggttccaggacaccctcaaggaggctaaggctggggacactaccatgcaggttttggttggtcaaatgtattactctggatatggtgttgcgagggatccccaaaaggggcatgcttggattagtaaagcatcaaggaaccgaaattcagtttggaaattgtgc

SEQ ID NO: 120802 - DNA, 255 bp, Glycine max
aaaaccgccacaaatttctccatagttatgggcacttccattctcgacgccctgaacgttcgcgtggaaggttccggcgacaagtaccttgtcctggcccacggcttcggcacggaccaatccgcgtggcagcgcgtgctcccttacttcacccgcaactacagcgtcattctctacgacctcgtctgcgccggcagcgtcaaccccgaccacttcgactaccgccgttataccaccctcgacgcctacgtcgac

SEQ ID NO: 120803 - DNA, 247 bp, Glycine max
aggaattgttgtaactttttgattcctaaattctctaaaattcgaaattctaatttcgttaggggaaagagattgtttgtgtgtgagtgagtatggctggaaaaggcgagggtcctgctatcggaatcgatttgggaacgacgtactcttgcgtcggcgtgtggcaacacgatcgtgttgaaatcatagccaacgatcagggtaacagaactaccccatcctacgtggctttcaccgacacagaacg

SEQ ID NO: 120804 - DNA, 248 bp, Glycine max
ggaaatgtctgctgttatttacaaggactgggttttcactgatcaagcattgcctaatgatcttgtcaagagaggagttgcggttaaggatccatctgctccccatggagttcggcttttgattgaggactatccttatgcttctgatgggctagagatatgggatgccatcaagtcctgggtggctgaatatgtctcattctactacaagtcagatgcagcaattcaacaagatcccgagctccaag

SEQ ID NO: 120805 - DNA, 248 bp, Glycine max
ggagtggctggtttacagaatttggcggcccaattcaccagcgaccagttgaggatctatcctttgcagttgctcgtttcatacaaaagggtggctcatatgtgaattattacatgtaccatggaggaactaactttggacgatcagctggaggcccattcataactacaagctatcactatgatgctccaattgatgaatatggtttgatcaggcaaccaaaatatagtcatttgaaggagcttcat

SEQ ID NO: 120806 - DNA, 249 bp, Glycine max
aaaaggaggaatccgcccgaggaggggctcgcgtctgattagctagttggtgaggcaatagcttaccaaggcgatgatcagtagctggtccgagaggatgatcagccacactgggactgagacacggcccagactcctacgggaggcagcagtggggaattttccgcaatgggcgaaagcctgacggagcaatgccgcgtgaaggtagaaggcctacgggtcatgaacttcttttcccggagaagaagc

SEQ ID NO: 120807 - DNA, 249 bp, Glycine max
catagaggcagaggtttttcttctctcaccgtagaatcgaatcgagttcactttgatcgtgtgtgtctccgatcttcaaatccgcaacaaccatggtgaggggattgctcaacaagctcgtctctcgctccctctccgtcgccggaaaatggcagcacaaccaactccgccgcctcaacatccacgagtaccagggcgctgaattgatgagcaaacacggagttaatgttccgagaggcgtggctgttt

SEQ ID NO: 120808 - DNA, 252 bp, Glycine max
aaacatcgccgtcggaaggcctgaagaggcgactcaccccgacacgttgaaggcggctttggctgagttcatctcaaccttcatcttcgtgttcgccggctcaggctccggcatcgcctacaacaagctcaccgacaacggcgctgccacccctgccggcctcatctccgcctccatcgcccatgcattcgccctcttcgtcgccgtctccgtcggcgccaacatctccggcggccacgtcaaccccgccgt

SEQ ID NO: 120809 - DNA, 250 bp, Glycine max
ctttcatttctacatccctggctctgttccgtcgatgacgatggcgtttagggtgcgaaaccctgacctccggcttctcattcttctctctctcttgtccatcacttccgccaaggtcttcttcgaggagcgtttcgatgacggatggggaaatcgttgggttaaatcagattggaaaaaagatgagaacctggctggggagtggaaccacacctctggccaatggaatggagacgctaacgacaaaggt

SEQ ID NO: 120810 - DNA, 251 bp, Glycine max
tctgaatctgcgtgtgtttgtgaattgttgttgagatctgaatcaaaatcagaaacgataatggctacaccggaccacctcttcaacctccgcaacaacttctacctcggcgcttaccaagccgccatcaacagcagcgacgttgccaacctctcccaagaagataccctcgagcgcgacaccctcgtccaccgctgctacatcgccctcggccagctccagttcgtcatctccgagatccacgacgatgc

SEQ ID NO: 120811 - DNA, 247 bp, Glycine max
acttgtttgcatactttgacagggacaacgtggctctcaagggatttgccaagttcttcaaggaatctagtgaggaagaaagagagcacgctgaaaagctcatgaaatatcagaacactcgcgggggaagagttgtacttcaccccatcaagaatgtcccctcagaatttgagcatgtggaaaagggggatgcattgtatgcaatggaattagctttgtctttggagaagttagtgaatgagaaact

SEQ ID NO: 120812 - DNA, 247 bp, Glycine max
atccactcacctgcctcttcctcacccctttctccatctaacgagtaaggaaaaatggcgcgtaagaagatcagagagtatgactcaaagaggttgttgaaggagcactttaagagactttctggcaaggagttgccgatcaagtctgcacaaattactgcatcaactgatttcactgagctacaagagaaggaaccctggctttcatcttctaaattggttgtgaaacctgacatgttatttggaa

SEQ ID NO: 120813 - DNA, 246 bp, Glycine max
cattctctggcgagcccccgtcctacctcactggcgagttcccaggtgactacggctgggacactgctgggctttcggccgacccagaaaccttcgccagaaaccgtgagctcgaagtgatccactccaggtgggccatgctcggggccttgggctgcgtcttccccgaactgttgtcccgcaacggggtcaagtttggagaagctgtgtggttcaaggccgggtcccagatcttcagcgagggtg

SEQ ID NO: 120814 - DNA, 251 bp, Glycine max
cgcagagctgccccgcccctgaccccaacctctactacaagccagtcatcggaatcgtcagccatcccggcgacggcgcctccggccgcctcagcaacgccaccggcgcctcctacatcgccgcctcctatgtcaaattcgttgaggccgccggcgcccgtgtcgttcccctcatctataccgagcctccggagaagcttctcaagaagctcgaattggtaaatggggttctcttcactggtggatgggct

SEQ ID NO: 120815 - DNA, 251 bp, Glycine max
caacctctcaagtccaacctacccctttttcttctcccaccaacttcaccgtcttcttcctcgatcatgtctcacttcaagggcaagtaccatgatgagcttattgccaatgctgcttacattggcactcctggaaagggtattcttgctgctgatgagtcaacagggacaattggcaagcgtttggccagcatcagtgtagagaatgttgaatccaacaggcgtgctcttagggagctgcttttcaccgc

SEQ ID NO: 120816 - DNA, 248 bp, Glycine max
ccgcactccgtcttcatcaatcagcatcaccaccgctccaacacaggggaaaaatagggagatccttcacgttcagggagggcaatgcgggaaccagatcggttcgaagttctgggaagtggtgtgcgacgagcacggcatagatccgacggggaagtacgtcggaaactcagatctacaactcgagcgcgtgaacgtgtactacaacgaagcttcctgcgggcggtttgtcccacgcgcagtgctga

SEQ ID NO: 120817 - DNA, 248 bp, Glycine max
cctttgtgagccgagctgctattacaactgttgatgtgttgactccaaaggttttcattggattgattgtgggtgcaatgcttccttactggttttctgccatgaccatgaagagtgtgggaagtgctgctctgaagatggttgaggaagtacgcaggcaattcaacaccattccaggattgatggagggaactgctaagcctgactacgccacttgtgttaagatctccactgatgcttccattaaa

SEQ ID NO: 120818 - DNA, 245 bp, Glycine max
agccacccttttgagatactgttttgaaaatagggaagaaatcattacctacccagatataggagaagccgcatttgggagatatggtcgaattgctgtctcgatcattttgtacactgaactatattcatattgtgtggaattcatcaccttggaaggagataatctcactagtctgtttcctggtacatccttagatttgggtggtttccagttagactcgatgcatttgtttggagttttga

SEQ ID NO: 120819 - DNA, 243 bp, Glycine max
cagagagtggtttcagtgagtgatcggtgttcacttgatccttcataagtcgtcatcatcatcatcatcatcaccgttgattgaagaagatgccgatcagaaacatcgccatcggaaggcctgaagaggctactcaccccgacacgttgaaggcggggttggctgagttcatctccaccttgatcttcgtgttcgccggttcaggttccggcatcgcctacaacaagctcaccgacaacggcg

SEQ ID NO: 120820 - DNA, 247 bp, Glycine max
cttatggtggatacctaggcacccagagacgaggaagggcgtagtaagcgacgaaatgcttcggggagttgaaaataagcgtagatccggggattcccgatataggtcaacctttcgaactgctgctgaatccacgggcaggcaagagacaacctggtgaactgaaacatcttagtagccagaggaaaagaaagcaaaagcgattcccgtagtagcggcgagcgaaatgggagcagcctaaaccgtg

SEQ ID NO: 120821 - DNA, 246 bp, Glycine max
ctcacacactctcttattctctctccatcatggctcacattctccctttcctcctcctcaccctcctcgccgccaccgcctccgcccacaatatcaccgacattctcgccgccaaccccgactacagcgacttcaacggcttcctctcccaaaccggcctcgccggcgaaatcaacacccgccagaccatcaccgtcctcgtcctcaacaacgccgccctctccgccgtggccgcaaaacaccccc

SEQ ID NO: 120822 - DNA, 244 bp, Glycine max
ctgccgaaacccttcccgatccctaaggtaagtgagtaatcggtggttgagaatggtggagaaggcgaagggtaggaaggaggaggtggttaccagagagtacaccattaacctccacaagcgcctccatggctgcacatttaagaagaaagctcctaaagctattaaggagataaggaaatttgcccaaaaggccatggggaccaatgatgtgagggtggatgtgaagttgaacaagtttgtc

SEQ ID NO: 120823 - DNA, 237 bp, Glycine max
cttgaatcttcgttatccttctttttttcatcttgaactcgaatattcactatggcagatgaggtggttctgctagatttctggccaagtccatttgggatgagggtcaggattgcacttgctgaaaagggtatcaaatatgagtccaaagaagaggacttgcagaacaagagccctttgctcctcaaaatgaacccggttcacaagaaaatcccggttctcatccacaatggcaaa

SEQ ID NO: 120824 - DNA, 248 bp, Glycine max
ccaagttgagcaggagcaacactttgcagcaaaagtctactcagtccatttccaaggcttttggtttggaacctgttggagctaaaaaggtcacatgctcccttcaggctgatcttaaggacttggctcacaagtgtgttgatgctaccaaaattgcaggattcgcccttgccacctctgccctcgttgtctctggggcaagtgctgaaggtgttccaaagaggctaaccttcgacgaaatccagagc

SEQ ID NO: 120825 - DNA, 247 bp, Glycine max
cggctcgagggcggtatgttaacgaattggtatactacagaaacacgacttcaaaagttcagggacttgagaatgcaacaaaagacggggagactcaatagttttccaaaaagagatgccgctatattgaagagacatttagctcatttggaagcatatcttggcggcattaaatatatgacggggttacctgatattgtaataatcgtcgatcaacaagaagaatatacggctcttcgagaatgta

SEQ ID NO: 120826 - DNA, 247 bp, Glycine max
ctcccaagggtttaacctttctggctgtgttaatatgcgtttcagcactgtcactgagtccttctgttgcgggggaagggcaaaataatggccttgttatgaacttctacaaggaatcatgccctcaggctgaagacatcatcacagaacaagtcaagcttctctacaagcgccacaagaacactgctttctcctggctcaggaacatcttccatgactgtgctgttcagagttgtgatgcttcact

SEQ ID NO: 120827 - DNA, 245 bp, Glycine max
cttcctcaggcacacagttgaccggagttgatttagatgtctcagaaattcagaatgtcaacatctacacttacagagaattgcgaattgccactgaagctcttagcaatgcaaacaagatagggcagggaggttttggagtagtctataagggaaagctgagaaacggttctttggcagctataaaggttttatcggctgaatcaagacaaggggtccgggagttcttgacagaaatcaaggtg

SEQ ID NO: 120828 - DNA, 244 bp, Glycine max
cgatggcttcctttgtatccttcctagtgctgcttcttgcagcccttatcctcatgcctcaagggcttgctacttactacaaaccaattaagaagccaccagtgtacaagcctccagtgtacaagccaccagtgtacaaaccaccggtttataagccaaaaccaccggtttacaagccgaaaccaccggtttacaagccaccatataagaagccaccatacaagaaaccaccttatggaaagta

SEQ ID NO: 120829 - DNA, 243 bp, Glycine max
gaaacagacaaaaatggcgccaaacgctctctttctcttctctgtcctcgccattcccctcctccttctgccctgcccaaccgccgccggccacgactaccgcgacgccctccgcaaaagcattctcttcttcgaaggccagcgctccggcaaactccccgccgaccagcgcctccgctggcgccacgactctgcattgcacgacggcgccaccgccggagtggacttgagcggagggtacta

SEQ ID NO: 120830 - DNA, 236 bp, Glycine max
ctgagatcttatttcggttcgatacgtccacctgcgagactaacctttggctttcgtctcggtaggtgtattcttatacattttcccaaaagaacattcattcatttctttcttccccgtcgaccacgacgactgaaacgacgcaaaaaatccagacccggaaaggagaagggccggtggtgggcatttgggaaagtcgggccgatcgggtgtcttcattccagcgacaatacaga

SEQ ID NO: 120831 - DNA, 241 bp, Glycine max
gagaactaagaaggagaagcaaatggcttcctcaatgatctcttccccagctgttaccactgtcaaccgtgccggtgccggcatggttgctccattcactggcctcaagtccatggctggcttccccaccagaaagaccaacaatgacattacctccattgctagcaacggtggaagagtgcaatgcatgcaggtgtggccaccagttggcaagaagaagtttgagactctttcctacctg

SEQ ID NO: 120832 - DNA, 245 bp, Glycine max
gtttgagaccttcaatgtgcctgccatgtatgtggccatccaagctgtcctctccctatatgcaagtggtcgcacaactggtattgttttggactctggcgatggtgttagtcacactgtgccaatctatgagggctatgcactccctcatgccattcttcgtttggatcttgctggccgtgatctgactgactctttgatgaagatcctcactgagagagggtacatgttcaccacctctgccg

SEQ ID NO: 120833 - DNA, 245 bp, Glycine max
attgaatcgactaaaaaatgaaatgaatcatttcatattgatagtattgctatgcttagtgtgcgactcgttagttttttagaacggttccaatttaacaaatttataaaccggttcatcgtataaatgaattaaaaaagaactaataaccaacgcatcgcttcggattatctagatctaaagaactagtcaaaacaaaaaaaaatataaaaaaagatatattatagcaactgaactattgtgaa

SEQ ID NO: 120834 - DNA, 246 bp, Glycine max
ctctgacaaccccaacacttccgaaccttgcattgtatctacccacttctcaaccaacaatggcaatggcaacccaagcctctctcttcaccccacccctctccggtctcaaacccagcgaccgagccaccgcgccatggaaacaatcctccaccctctccttctccacctcgaagcccctcaagttctcgcgaacaatcagagcagcagccaccgaccagaccacagaggcaccggttgggttca

SEQ ID NO: 120835 - DNA, 243 bp, Glycine max
ggcattgctgttgacaaaccaatctgcaaccatgtcactggtctcttggatccccctgagctcattaaaccccccaaaatcttagtcattgaaggtttgcacccaatgtttgattcccgtgtcagagatctcttggactttagcatctacctagacattagcaatgaggtcaaattcgcttggaaaattcagagagacatggcagagcgtggacacagtcttgagagcatcaaggctagcatt

SEQ ID NO: 120836 - DNA, 242 bp, Glycine max
atctgatctgaatgcgaagaacgaacgagagtgcagcgccacggcaatgggaaggagcactttggctttggttctcgcgattctgatctctttgcagggaaccccccacgttagatccgatgcctccgatcatcgttacaaggacggagactccgttcctctttacgccaacaaagtcggtccctttcacaaccccagtgaaacgtatcggtactttgacctgccattctgtgtaacaggtc

SEQ ID NO: 120837 - DNA, 239 bp, Glycine max
gagaaatgatatggttgagtacttcggtgaacaattgtcaggctttgccttcaccgttaatgggtgggtgcaatcctatggttcccgttgcgtgaagccaccgatcatctatggtgatgtgagccgcccaaagccaatgaccgtcttctggtcatctctggctcagagctttaccaagcgcccaatgaagggaatgcttaccggtcctgttaccattctcaactggtcctttgttagaa

SEQ ID NO: 120838 - DNA, 240 bp, Glycine max
ggcctccgccacgagcttcgcccttccctcaacaaaagcccaagcccaagcccaactcctgacccggcccaccaatccattcaccattccctcccgcagcccagcccaccgccccccgccgcgcctccccaccatccgcgccgcaattccccgcacaaagaaagaggcaacggtggagactgtgcgggagcagctcgagaactgttacctcctcgccggcatcaactacaagggcttcac

SEQ ID NO: 120839 - DNA, 238 bp, Glycine max
ctcgagccgccaaggctgagaagaagatcgcttacgatgcgaacggtgcgacctaatagaggagtacggccagatcctcgttgtgaactccgataacgtgggatcgaaccagctccagaacattcgcaagggtctccgtggcgactccgtcgtcctcatggggaagaacaccatgatgaagcgctcagtcaggatgcacgctgagaaaaccggaaacaacgcctatctcaaccttatc

SEQ ID NO: 120840 - DNA, 272 bp, Glycine max
gtccaagcagcctccaattcgtgccactctcttcaaaatggccgttaccttctcaaatctccacacagaatcaggtctcaagtccctcgacgacttcctctctgggaaggtctacgtttctggggatcagttcacaaaggacgacatcaaagtgtatggtgctgttttggagaagccaggtgactcttttcccaatgctgccaagtggtacgaggttgtctcatctcagcttgctgcaagcttccccggcaatgctcaaggggtgagattca

SEQ ID NO: 120841 - DNA, 239 bp, Glycine max
ctcacccttattgcagtattttgacctcaatggcaccaagttcggcagtgccagatgaacaggttgttgttggagaggagatagagcatgtaagagtgatcactttgaacaggccaaggcaattgaatgccatctcaccagaattggtttctctgctagcaacatatttggaaaagtgggagaaggatgaggaagcagagctagttatcataaagggatctggtagggctttttgcgct

SEQ ID NO: 120842 - DNA, 269 bp, Glycine max
ctcaaccctagtaagccgcaatggtgaagtactcaagggagcctgacaatccaactaagtcttgcaaggctagaggcgccgaccttagggttcattttaagaacacaagggaaactgcctttgcaatcaggaagttgcccttggtcaaggctaaaaggtacttggaagatgttcttgcccacaagcaggcaattccattcagacgtttttgtcgaggtgttggaaggacagcccaggctaagaatagacactctaatggccaaggacgg

SEQ ID NO: 120843 - DNA, 269 bp, Glycine max
ccacaacactattcttcttcgcagcaatggcgcgagtggatctggacgggaaccccatgaaggcacttacggcctgcatgatcggcgctggcggcttcataggctcgcatctctgcgagaagctcatgtccgagacccctcacaccgtcctcgccctcgacgtctacaacgacaagatcaaacacctcctcgaaccctccgattccccctgggccggccgcatcaccttccaccgcctcaacatcaaacacgactctcgcctcgaaggc

SEQ ID NO: 120844 - DNA, 270 bp, Glycine max
ctcacgcagtcgcagtgagtgaaaaggaaaaccctaattgcggtattctcagtgccttcgagagaaagaaaaaatggcagataatcttgttctccgtggcaccatgcgcgcccacaccgacgttgtgacggcgattgccactcccatcgacaactccgacatgatcgtcaccgcctcacgcgagaaatccatcatcctctggcatcttaccaaggaggacaagacttacggtgtcccccgccgccgcctcaccggccattctcattttgt

SEQ ID NO: 120845 - DNA, 268 bp, Glycine max
gtgatgttgtgctgcacgctgatgctatccacagaggaggtggtcaaatcattcctactgccaggagagtcttctatgcttcccagattactgccaaacccaggcttcttgagcctgtctacctggttgaaatacaggctcctgaacaagctcttggtggaatctacagtgttcttaaccagaagcgtggacacgtgttcgaggaaatgcagaggccaggtaccccactatacaacatcaaggcatacctccctgtcatcgagtcctt

SEQ ID NO: 120846 - DNA, 265 bp, Glycine max
tcgagcgaatcggctcgagctcccaatttcagagcctattactattattcttattcaccttttcgtcaattcaggacgcgcccacaattaccaggaggcattgtccaaggcaatcctattcttcgagggccaacgttcgggtttcttgccgcaagaccagagacagaactggcgcgccaattcgggcctcggcgacggctggacctacaacgtcgacctcaccggcggctactacgacgccggcgacaacatcaaattcgggttt

SEQ ID NO: 120847 - DNA, 273 bp, Glycine max
tgcggatgttgacgcaatgtgatttctgcccagtgctctgaatgtcaaagtgaagaaattcaaccaagcgcgggtaaacggcgggagtaactatgactctcttaaggtagccaaatgcctcgtcatctaattagtgacgcgcatgaatggattaacgagattcccactgtccctgtctactatccagcgaaaccacagccaagggaacgggcttggcggaatcagcggggaaagaagaccctgttgagcttgactctagtccgactttgtgaa

SEQ ID NO: 120848 - DNA, 270 bp, Glycine max
ctccactcggctcggggggatatagctcagttggtagagctccgctcttgcaattgggtcgttgcgatgacgggttcgatgtctaattgtccaagcggtaatgatagtatcttgtacctgaaccggtggctcacttttcctaagtaatgggaaagaggaccgagacatgccactgaaagactctactgagacaccgacgggctgtcaagaacgtagaggaggtaggatgggcagttcgtcagatctagtatcgatcgtacatggacggta

SEQ ID NO: 120849 - DNA, 270 bp, Glycine max
aaaagcatagacaaagccaaaaacttgtttgaggaaggtggtgattgggaaaggaagaataggctgaaagtgtatgaaggcctgtactgcatgtccactcgaaatttcaagaaggctgccaagttatttttggattctatttcaaccttcaccacctatgaactttttccctatgacacctttatattttatactgttttgaccagcattatatcattggatagagtttccctaaagcaaaaggtagtagatgctccagagatcttgaca

SEQ ID NO: 120850 - DNA, 269 bp, Glycine max
  unsure (1)..(269): unsure at all n locations
cttcttctcttgcggctagggttttagcgcacntcttctagatttaaggaagatgggtaaggaaaaggttcacatcagtattgtggtcattggccatgtcgactctgggaaatccactaccactggtcacctgatttacaagcttggaggcattgacaagcgtgttattgagaggtttgagaaggaagctgctgagatgaacaagaggtctttcaagtatgcctgggtgctggacaaacttaaggctgagcgtgaaagaggaatcacca

SEQ ID NO: 120851 - DNA, 270 bp, Glycine max
cgccacttctgaatctattgaatcaacaatcatgtcggacgaagagcaccatttcgagtccaaggccgacgccggagcctccaaaacctaccctcagcaagccggtaccatccgcaagaacggctacatcgtcatcaaaggccgcccctgcaaggttgtggaagtttcgacttccaaaactggaaagcacggtcacgctaagtgtcactttgttggaattgatattttcactgccaagaaacttgaggatattgtgccctcttctcacaa

SEQ ID NO: 120852 - DNA, 269 bp, Glycine max
gacacatcatctggttcaccttctcccaccaacggaaaatttaacatcttttgggacaaccaaaacctcacccctacccaagtttcttccattaaggccaaaaatccaaacgttaaggtagcccttagtctcggaggagacactgtttcaagtgcttttgcttactttgatccaacttcagttgattcatgggtttccaacgcggtttcttcactcaccaacataatcaaagagtacaacttggacggaatcgacattgactatgagca

SEQ ID NO: 120853 - DNA, 267 bp, Glycine max
ccatcatcaaagtttcttcctttctctgctctttgccttctctgacacatttggtgccttgtagagcgtgttttggcaggaaggtggtatggcgaaggacgttgaggttgctgagcgtggctccttctctgggaaggactaccaggaccctccaccagcaccactcattgatgctgaggagctcacaaagtggtccttttacagggctctcattgctgaattcattgccactttgctcttcctctacattactgtgctcacagtcat

SEQ ID NO: 120854 - DNA, 269 bp, Glycine max
gtcagtttcgggggaagagatccagcagcaatggtcgtacgtcaaggctcagaaatcaaaagcctacttcaagagatatcaagtcaagttcaagagaagaagagagggaaaaaccgattaccgtgccaggattcggttgattaatcaggacaagaacaaatataacactccgaaataccgatttgtggttcgctttagcaacaaggacattgttgcacaaataatatctgctagcattgccggcgatttagttcttgctacagcatatt

SEQ ID NO: 120855 - DNA, 273 bp, Glycine max
caacttccaagttaggtcactcttccagatggcgcgtacaaagcaaactgctcgcaagtccaccggcggcaaggctccccggaagcagctggcgacgaaggccgctcggaagtctgctccggcgaccggcggagtgaagaagccgcacaggttcaggcctggaacagtggccctgagggagatcagaaagtaccagaagagcacggagcttctgatccgaaagcttccgtttcagcgtttggttcgtgaaatcgctcaggatttcaaaacgga

SEQ ID NO: 120856 - DNA, 269 bp, Glycine max
cgctgagttcatagcaacccttctcttcctttatgtcactgtgctcaccattattggctacaaaaggcagactgatacaacggtaggtggcaccgactgtgatggggttggcattttgggcatcgcttgggcctttggtggcatgatcttcatccttgtttactgcaccgccggtatttcaggaggacacataaacccggcggtgacattcgggttgttcctaggacgcaaggtgtcgttgataagggcgttgttgtacatggtggcac

SEQ ID NO: 120857 - DNA, 269 bp, Glycine max
cggagcagtgttattgttggctatgtgtgtgcttccggcgatggttgtggccattcgcccagcaaagaaccctttttgcgtgaagggtcgtgtctactgtgagccttgccgtgctggttttgagacctcagctacgacctacattgctggtgctgagattatgttgcgatgcaagagcagggttagcaacgaggttgtgtacacgaagaaggggtacaccgactcatccggagcatgacacaatgtacgtggatgaggatcacgcagat

SEQ ID NO: 120858 - DNA, 266 bp, Glycine max
atcattttatctactaatagcggacaaattggagtattaccaaatcatgcgcctattgccacagccgtagatataggtattttgagaatacgtcttcttaaagaccaatggttaacgatggctctgatgggcggttttgctagaataaacaataatgagatcactgttttagtaaatgatgcggaaaagggtagtgacattgatccacaagaagcacagcaaactcttgaaatagcagaagctaatttgaataaggcggaaggcaa

SEQ ID NO: 120859 - DNA, 272 bp, Glycine max
cagagggtctgtgacacacagactcacttccaagttccaagctttggccatttattcccactgtttattgagaacaactgcagaacatggcacagattttggctccctctacgcaatggcagatgcgaatctcaaaatcctctcccaatgcaagtcccattacatcaaacatgtggagttctttattgtggaaacaaaataagaaagtttcacccacaagttctgctaaatttagagtgatggcaattaagtctgacaatagcatcatcaac

SEQ ID NO: 120860 - DNA, 269 bp, Glycine max
aaacattctcatcattcacccaacaaaatagacaagcttctgatagtacccatttcactggtaaccctctggctcggttacaccctataccagcggctacgcttcaagctccctcctggcccacggccctggccggtagtcggtaacctctacgacataaaacccgtccggttccggtgcttcgctgagtgggcgcagtcttacggccctatcatatcggtctggttcggttcgaccctaaacgtcatcgtttcaaactcggagttggc

SEQ ID NO: 120861 - DNA, 265 bp, Glycine max
acaatgcctcctttgactttgtggctggtgctgccttttctcgtgttgctagcggcggcaacaacgtctccaacacgcgccacgacggtcgcctcgtcgttccacggtcaacgagagtttgactatttcgctttcgcgttgcaatggcccggtacttactgcaaacgcacccgcagttgctgccccaccaacggttgctgcagaggctccaattttccaacagtgttcaccatacatggactctggcctgactataatgatggaa

SEQ ID NO: 120862 - DNA, 264 bp, Glycine max
ctcgcaagggaaaagaaagaatcccaggcgaggagaaagatggaggggaaggagcaggatgtgtcggtgggagcgaacaagttccccgagagacagccgattgggacggcggcgcagagccaagacgacggcaaggactaccaggagccggcgccggcgccgctggttgacccgacggagtttacgtcatggtcgttttacagagcagggatagcagagtttgtggccacttttctgtttctctacatcaccgtcttaaccgtt

SEQ ID NO: 120863 - DNA, 266 bp, Glycine max
ggaaatcacccgaagacagggggatctccaggaggaactctgatgtcggacaatggactaacagattttgatgtctacatcatggaaacatccaaccatcaaatgaagtctgagctggaccagtatctcgaagaatcgctgttgccacgtgttccagactttgatgtattgggttggtggaagctaaacaaactcaagtaccctactctttccaagatggctcgggatatactgtctgttccggtttcaagtcttcctcctgaatc

SEQ ID NO: 120864 - DNA, 266 bp, Glycine max
gtgctcaaccctagtaagccgcaatggtgaagtactcaagggagcctgacaatccaactaagtcttgcaaggctagaggcgccgaccttagggttcattttaagaacacaagggaaactgcctttgcaatcaggaagttgcccttggtcaaggctaaaaggtacttggaagatgttcttgcccacaagcaggcaattccattcagacgtttttgtcgaggtgttggaaggacagcccaggctaagaatagacactctaatggccaa

SEQ ID NO: 120865 - DNA, 267 bp, Glycine max
ccatcatcaaagtttcttcctttctctgctctttgccttctctgacacatttggtgccttgtagagcgtgttttggcaggaaggtggtatggcgaaggacgttgaggttgctgagcgtggctccttctctgggaaggactaccaggaccctccaccagcaccactcattgatgctgaggagctcacaaagtggtccttttacagggctctcattgctgaattcattgccactttgctcttcctctaccttactgtgctcacagtcat

SEQ ID NO: 120866 - DNA, 268 bp, Glycine max
ctctctcagtgctctcgatctccatctgcaacttccttgtctgacagatcctgtgttccggagaaaggaaaggaaaggaaagctgtcggggcaaacgcagcgtctgaacgtggtccccaccgtgacgatgctgggagtggtgaaggcccgattggtcggcgccacgcgcggccacgcgctcctgaagaagaagagcgacgcgctcacggtgcagttccgccagatcctgaagaagatcgtctccacaaaagaatccatgggcgacatc

SEQ ID NO: 120867 - DNA, 267 bp, Glycine max
ctcctcttcctatccctgctaatcggtctatgcaattgcagggtaacaacaacaaatgaagaggtgcaaaccctaaacacaatcactcacttcaacccacaggtcccacccctccgaaccctctcttcctcgaagcggttcgagggttcctcggagttcgtgaagctcaaataccacatgggacctgtgctatcgtctccgatcaacatctacctcatctggtacggcaagtggccccaatcccagaagctcctcatcaaggacttc

SEQ ID NO: 120868 - DNA, 268 bp, Glycine max
cttcctcaggcacacagttgaccggagttgatctagatgcttcagaaattcagaatgtcaacatctacacttacagagaattgcgaattgccactgaaggttttagcaatgcatacaagatatggcagggaggttttggagtagtctataagggaaagctgcgaaacggttcgctagcggctataacggttttatcggctgaatcaagacaaggggtccgggagttcttgacagaaatcaaggtgatctctagtatagagcatgagaa

SEQ ID NO: 120869 - DNA, 267 bp, Glycine max
cccattttgagctctgacccatcaatttccgttcatgaaattcaacagcatgatcaatttctcatatttgcttctgatggtctttgggaacaccttagcaatcaggatgctgttgatatagttcaaaacaacccacacaatgtaagataaatgtactatatggttgtttctattttgttttatattttgcattttttattgcttggttactgtagttttgtccagtcataatttacatgcccccaatcatttcattaaatttcaaat

SEQ ID NO: 120870 - DNA, 262 bp, Glycine max
gaggaacttaatttgaacgtttccctctgactctgaggttacaagaatcctccacccaacctctgttgtgtttccggagattaggatctggttgggaaactgctatagaagtgtacggatctcatccatcggggcatagcttgtttttgcgatgggttggagatacaacgctggattgttcctcatagtcactgttgttattatttgggtcacctccgccgaagttacccaggatatttttacagattataagcagccattt

SEQ ID NO: 120871 - DNA, 266 bp, Glycine max
ggcaccctgacaagctctgtgaccagatctccgatgctgtgctcgatgcatgcttggagcaggaccctgacagcaaggttgcctgtgaaacctgcaccaagaccaacatggtgatggttttcggagagatcacaaccaaggccaacgtggactatgagaagattgtgcgtgacacatgcaggaacattggttttgtctctgatgatgttggtcttgatgctgacaactgcaaggtcctcgtcaacattgagcaacagagtcctgat

SEQ ID NO: 120872 - DNA, 268 bp, Glycine max
tctgaatctgcgtgtgtttgtgaattgttgttgagatctgaatcaaaatcagaaacgataatggctacaccggaccacctcttcaacctccgcaacaacttctacctcggcgctctaccaagccgccatcaacagcagcgacgttgccaacctctcccaagaagataccctcgagcgcgacaccctcgtccaccgctgctacatcgccctcggccagctccagttcgtcatctccgagatccacgacgatgctcccacaccactccaa

SEQ ID NO: 120873 - DNA, 265 bp, Glycine max
ccctaattcacacccaaagagaaaagaaaaaaaaaacaacagtggtacgtgatgccaccgaagttcgatccctcgcaggtggtggacgtgttcgtccgagtcaccggcggcgaggtcggcgcggcgagttctctcgccccgaagatcggtcccttgggactctccccaaagaagatcggagaggatattgcgaaggaaaccgcgaaggactggaagggcctccgcgtgacggtgaagctaaccgtgcagaaccggcaggcgaaag

SEQ ID NO: 120874 - DNA, 265 bp, Glycine max
ctcaaatgacctatacaattactgcccttcgtgggctctttcctgggccatatcgcaggcaaaatctgttacgagaaatagttggttaccgtgcagatattatttgtcttcaggaggttcaaagtgatcattatgaagaatttttttctcctgaactggacaaacatggttattatggtctttacaaaaagaaaacaaatgaggtatacaatggaaacattaatacaattgatgggtgtgcaacatttttccgtagagacagatt

SEQ ID NO: 120875 - DNA, 264 bp, Glycine max
cttcgttgcttggtgatgtccctttctgttctcttcactcttggtcttgcgagagaaagccatgccagagacgaagatttttggcatgctgtttggccaaacactcccattccaagttcattgcgagatcttctaaagcctggccctgcaagtgttgaaatcgatgatcaccctatgcaaattgaagaaacacagtacccgaaaaccttcttctataaagaagaccttcatccaggcaaaacaatgaaagtacaattcagcaag

SEQ ID NO: 120876 - DNA, 255 bp, Glycine max
aacaacactctctcttctcgctcttggcttttcgctcttcactcactctcattcattcatttccaccgttcatggatcccgtaagcgtgtggggtaacacgcccttggcgacggtggatcccgagatccatgacctcatcgagaaggagaagcgccgtcaatgccgcggaatcgagctcatcgcctccgagaacttcacctccttcgccgtcatcgaggccctcggcagcgctctcacgaacaaatactccgagg

SEQ ID NO: 120877 - DNA, 241 bp, Glycine max
tcggagtcgaagactccgtgagttgcaataatgaagacgattctttccaccgagaccatgaacatcccggacggcgtgagcatcaaagttcatgccaaggtcatcgaagttgagggcccccgcggaaaattggtgcgagacttcaagcatttgaatctcgattttcagctcattactgacgaaaacggtaaaagaaagctgaaaatcgacgcgtggtttggttctcggaaaacatccgccg

SEQ ID NO: 120878 - DNA, 245 bp, Glycine max
gcgtcgctctccgaaccgccaatttcgcctcctccgataaccggaaaatcggtcagatccggcaatggtctccaattctcactaatctccgtcctgtttccggtcttcgccaccgatcaaatactccgtttagctcctccggtgtaagagcacaggttgctactctggaggaagcaggaaccggagcaactcaaaaagtggaatcgccggttgtagtggtgaccggagcttccagaggcattgga

SEQ ID NO: 120879 - DNA, 247 bp, Glycine max
gcagcattagggtttttcatctgcttcaatggggaagggaacagggagttttggtaagagaaggaacaagactcacactctctgtgtgaggtgtggccgccgcagcttccatctccagaagagtcgttgcgccgcttgtgctttccccgccgcacgcactaggaaatataactggagcgtcaaggcaatccgcagaaagaccaccggaactggcaggatgaggtacttgcgtaacgtgcctcgccga

SEQ ID NO: 120880 - DNA, 235 bp, Glycine max
ttgcagttgagcttctgcagcgcgaatgccatgtcaagcatccactaagagttgtgccattgtttgagaagctagctgatctagaagcagcaccggccgcgttggcgcgattgttctctgtagactggtacagaaacaggatcaatgggaagcaggaagtgatgataggctattctgattctggcaaagatgctggaaggttttcagctgcatggcagctgtataaggctcagga

SEQ ID NO: 120881 - DNA, 236 bp, Glycine max
ctagtcctgttatttctcagcgcgtaaagcatggctttgttggtggagaaaaccaccagtggtcgcgagtacaaggtcaaggacctttcccaggccgacttcggccgcctcgagatcgagctggccgaggttgagatgcccggcctcatggcctgtcggaccgagttcggcccctcccagcccttcaagggggcccgcatcaccggctccctccacatgaccatccagaccgccgt

SEQ ID NO: 120882 - DNA, 233 bp, Glycine max
ctgccaacatccttcaatattatcaactttggcgctcagcaggcagtaaagagctggcagctgtgcctctgtgtgggtgttggtctatgggctggacttattattggttttgttacagcgtattatacaagcaatgcttacagccctgtaccagatgttactgattcctgctggactggagctggaaccaatgtcacctgtggccttgctctgggatacaagtctgtgattat

SEQ ID NO: 120883 - DNA, 242 bp, Glycine max
  unsure (1)..(242): unsure at all n locations
ctcgcaagccaaaagaaagaatcccaggcgaggagaaaagangaagggaangagcaggatgtgtcgttgggagcgaacaagttccccgagagacagccgattgggacggcggcgcagagccaagacgacggcaaggactaccaggagccggcgccggcgccgctggttgacccgacggagtttacgtcatggtcgttttacagagcagggatagcagagtttgtggccacttttctgtttct

SEQ ID NO: 120884 - DNA, 260 bp, Glycine max
ttccgctctagcttcgagcaatcttgccatactgccctcaggattctctattattcctgatggtcttgagtcaaggccattggtgattagttcaaggcaggaagaaaaaaataccgagggaggatctttgtttacaatggcattccagattcttaccaatgcttctcccgctgccaagttaacaatggagtctgtggactcggtcaacactcttgtatcttgtacattgagaaatatccgaacgagtctacaatgtgaag

SEQ ID NO: 120885 - DNA, 248 bp, Glycine max
ccaccatgccaccagccgcaggagccgtagccttacactcctccctctgcaacatctcttccgacaaaccctcttctccactaagatcaccccccatccacgtctccccaaagcccaagagcctcttccaaaaccaccccttatacaccccaacccacacaaaactctcccttgaattcaaagagaaaatcctctgccttgaggtaatgggcgttgatgcaggcaaagcactgtctcaaaaccctgac

SEQ ID NO: 120886 - DNA, 247 bp, Glycine max
aggcagaaagcaagctcatcctagagttttaaaaatggcagcagcctcctccatggctctctcttccccatccttggctggcaaggccgtgaagctgggcccatcagcccccgaagtcgggagggtcagcatgaggaagaccgtcaccaagcaggcctcctccggaagcccatggtacggcccagaccgcgtcaagtacttgggcccattctctggcgagcccccgtcctacctcactggcgagttc

SEQ ID NO: 120887 - DNA, 239 bp, Glycine max
tatagcccaagccctatacaaccaaaccctaacacacacccatttgattcagtttccatggctagcctcaaggttgcatttttggctgcagtgctctgcatggttgtggtgagtgcacccatggcacatgcagctatcacgtgcgggcaggtgacgaatagcctgatcaattgcatcggttacctccagaacggaggaacgccgccgtcgggatgctgcaacggagtgaagagcctcaa

SEQ ID NO: 120888 - DNA, 234 bp, Glycine max
ctgcagttgagcttctgtagcgcgaatgccatgtcacgcatccactaagagttgtgccattgtatgagaagctagctgatctagaagcagtaccggccgcgttggcgcgattgttctctgtaaactggtacagaaacaggatcaatgggtagcaggctgtgatgataggctagtctgattctggcacagatgctagaaggttttcagctgcatggcagctgtataaggctcagg

SEQ ID NO: 120889 - DNA, 236 bp, Glycine max
aattttatgaccatggctacaacgcctgacgtaatgcattgatgcaggatccgtctatgtctgccatgcttgaaagcttttctaatccatcaaataaagaccagcttgaagaaagaatggcacgcatcaaagaggatccatctctgaaacatattttggaggagatagagactggcggtcctgctgctatgatgaggtataggaataatgaggaggttttgcagaagttgggacaa

SEQ ID NO: 120890 - DNA, 244 bp, Glycine max
gctcctcttggagggctgtacctttggaaatgtctggtgttgtttacaaggactgggttttcactgatcaagcactgcccaatgatcttgtcaagagaggagttgccgttaaggatccatctgctccccatggagttcggcttttgattgaggactatccttatgcttctgatgggctagagatatgggatgccatcaagtcctgggtgcaagaatatgtgtcattctactacaagtcagatga

SEQ ID NO: 120891 - DNA, 251 bp, Glycine max
tcgagggtgaaacctgtcagtctgatgatggtcctccacagaagatgggagacccctctgtcgaggtcactgaagagaatcgcgacgcttcgcagatggccaaaattaaagccatggatgctatttctgaaggtaagttggaggaggcgattgagaacttaacagaagctattttactcaatcctacctctgccataatgtatggaactagagccagtgtttacatcaaaatgaagaaacccaatgctgcg

SEQ ID NO: 120892 - DNA, 247 bp, Glycine max
caaacacgctgttcctacaatcattccaaatgtgcccttccggtcgcaccctcctcccttcctccgtctccgatttccgaccggcattcgacgtcctcgatgccgaccgcgacggcaaaatcagccgcgacgacctccgcgccttctacgccggagtcggcggcggaggagatgacgtgatcggggcaatgatgacagtggctgacaccaataaggacgggttcgtggagtacgaggagttcgagcg

SEQ ID NO: 120893 - DNA, 257 bp, Glycine max
tgaacttgctgggcatgcaagcaaggatctgaaggtgaaaaggataacaccaaggcatttgcagcttgctatcagaggagatgaggagttggacacccttattaaagggaccattgctggtggtggtgtcattcctcacatccacaagtccttgatcaacaaaacagccaaggattgagctcgctctttggccttctgatttcatgttgctgtttactgagaactaagtttgtgtttattgtgaattgatcacagta

SEQ ID NO: 120894 - DNA, 241 bp, Glycine max
ggctcgaggagagctgaaccaatattggtcaccacagatgttttccagatggcgaatatcatatggaagcaattcaacattgatacatccaatgcttcctcctcacctccaaaaccattgttaatctttacaccaaccgtgcctggctcataccctgtaatattgttctgccatggattttcccttcgcaatagctactactctgagctcctaggccacatagcttcacatggattcataa

SEQ ID NO: 120895 - DNA, 246 bp, Glycine max
acgcttctgaacgcaatggctcgtcctagtttccctcttgctctctgtttctctttcatcttcgttgctcttcctctttccctcgccaccactgacccttctgatgttcaagctcttgaggtcatgtacaatgtgttgaatagtccaactcagctaacgggttggaaaatcggtggtggtgatccatgtggagagtcatggaaaggggtaacgtgtgagggatcagccgttgtttccattaaactc

SEQ ID NO: 120896 - DNA, 245 bp, Glycine max
tagggctttacagtgtttctcttccttcttcttcttcttcttcttcttcttcgttgaatcgcgattgttctgtgcgagagacagaagagagagatcgaaaatggcgttggctttcgacgagttcggaaggccgttcataatcctgaaggagcaggagcagaagagcagactccgaggattggacgctcagaaagccaacatctccgccggcaaagccgtggctcgcatcctccgaacctccctcg

SEQ ID NO: 120897 - DNA, 243 bp, Glycine max
gaaatggctccatacaaatatagagacacattgaacattggctttcaattgtcaatcacagttggtatcctcgtggccaatgtgttgaactacttctttgctaaaatccatggtggctggggatggagattgagtttgggaggtgctatggtccctgcccttataatcacaataggatcactagtccttccggacactcccaattccatgattgaaaggggtgatcgtgaaaaggccaaggct

SEQ ID NO: 120898 - DNA, 242 bp, Glycine max
cggaaattccttcagctacaaatgcgttacggtactatgcaggtgctgctgataaaattcacggtgacgtattaaaaatgaacggggatttccatgcttatacacttttggaaccaattggtgttgtgggacacataattccatggaatgcccccagcctctcatttttcatcaaggttagcccttccttagctgcaggctgtactatggtcctcaaacctgctgaacaaacacccctctct

SEQ ID NO: 120899 - DNA, 243 bp, Glycine max
gccaccatgtttcaacattcaacagaagcctttttccttccacttttctctttggacatggttcttctgcttaccaggcagaaggagcagcaagtgtagatgggagaggaccaagcatatgggacacctacactagacagcatactgaaaagatttgggatcatagcaccggtgacatgggagctgatttttatcatcgatacaagggtgacataaaaatagcgaaagaaattgggctggact

SEQ ID NO: 120900 - DNA, 241 bp, Glycine max
accacggccgagttcaaagagccttgctccgctgcgatgcacgcgtcgtgaaaaccgtcgatgcctacctctctgagctcgccgcatacggcgatctcagcatctcgaagttcaacggcatcgctactcttattcctaaaagcgcgcgtaagatcgacgacgatctttaccgcgccgttgatatctatctcaaggcgcatccacagttggatgagatagagagagagaaggtgtgcagcgt

SEQ ID NO: 120901 - DNA, 244 bp, Glycine max
cactcactcactcactcactcgcaagcaaaaagaaagaatcccaggcgaggagaaagatggaggggaaggagcaggatgtgtcgttgggagcgaacaagttccccgagagacagccgattgggacggcggcgcagagccaagacgacggcaaggactaccaggagccggcgccggcgccgctggttgacccgacggagtttacgtcatggtcgttttacagagcagggatagcagagtttgtgg

SEQ ID NO: 120902 - DNA, 243 bp, Glycine max
tgctgctagcacattagacagagactttagcagtaattttaccatcaacaataggcaaattacgggagccagtcttttcgtaaatttgccacccaataaagccttttctctgatccttgcgactgatgctaagcttgctaatgcgacatttcgagatgctgaactttgtaggcctggaacacttgatcctgaaaaagtaaaacggaaaatagtgcgttgtattagagatggaaaaataaaatc

SEQ ID NO: 120903 - DNA, 244 bp, Glycine max
attctctctgctgtagttcactacctctcccttcaagatgcagatcttcgtcaagaccctcaccggcaagactatcacccttgaggtggaaagctctgacaccatcgacaacgtcaaggccaagatccaggacaaggaaggaatccccccggaccagcaacgtctcattttcgccggaaagcaacttgaggacggccgtacccttgctgactacaacattcagaaggagagtactcttcacctc

SEQ ID NO: 120904 - DNA, 239 bp, Glycine max
ctcagtgaaagagaatccgaggcgaagagaagagaaaaattaagatggaggggaaggagcaggatgtgtcgctgggagcgaacaatttcccggagagacagccgattgggacggcggcgcagagccaagacgacggcaaggactaccaggagccggcgccggcgccactggttgacccgacggagtttacgtcatggtccttttacagagcagggatagcagagtttgtggccactttt

SEQ ID NO: 120905 - DNA, 242 bp, Glycine max
ccacacacacagttcgtcggaatgggaagggtgattcgcgctcagcgtaacggtgctgggccggtgttcaagtctcacactcaccaccgcaagggtccggcgaggttccgcagcctcgacttcggcgagcgcaacggctacctcaagggcgtcgtcaccgacatcatccacgaccgcggtcgcggcgcccctctcgccaaggtggcattccgccaccccttccgctacaagaagcaaacgga

SEQ ID NO: 120906 - DNA, 241 bp, Glycine max
tgaagctactgctttcattggtgaaaataaagttgctattgttggagttttcccgaaattttctggagaggagtttgacaacttttctgccttagcagagaagttgcgttctgactatgacttcggtcacactctgaatgccaaacaccttccaagaggagagtcatcagtttctggtcccgtagttaggttgttcaagccattcgatgaactttttgttgacttccaggatttcaatgtg

SEQ ID NO: 120907 - DNA, 240 bp, Glycine max
cccaagccctatacaaccaaaccctaacacacacccatttgattcagtttccatggctagcctcaaggttgcatttttggctgcagtgctctgcatggttgtggtgagtgcacccatggcacatgcagctatcacgtgcgggcaggtgacgaatagcctgatcaattgcatcggttacctccagaacggaggaacgccgccgtcgggatgctgcaacggagtgaagagcctcaatgccgc

SEQ ID NO: 120908 - DNA, 239 bp, Glycine max
attctctgcaattcactctgtacaattcttcgttcgttctctgcagttatatcctttttgagcttcaatggcggacgctgaaaccttcgctttccaggctgagatcaaccagcttctaagtctcatcatcaacacattctacagcagaaaggaacgaaacttgcgtgaactcatcagcaatgcttctgatgctttggataagattcgattcgagagcttaaccgacaagagcaagctcg

SEQ ID NO: 120909 - DNA, 237 bp, Glycine max
tgtaactcgttcttcttcttttgttgttctgtgtttgtgtttgttttttctctcacctgaaaatgtcttgctgcggtggtaactgtggttgcggaagctcctgcaagtgcggcaacggctgcggaggctgcaagatgtacccagacttgagctacactgagtcaaccaccaccgagaccttggtcatgggagtggcacctgttaaggctcaatttgagggtgctgaaatgggtgtgc

SEQ ID NO: 120910 - DNA, 255 bp, Glycine max
ttcgtgagatgggcactagctgaaagtccgtgagttgcagtagtgatgatgattcataaccctggcaaagaggaggatcccgcgtgtggcccgcttgttgactcggttgctctcaggactctctaccctcctagagctactaaccagaacatactaaagaatggtggatttgaagaaggaccctatgtgttccccaactcatcttggggagtgatcatccccccaaacattgaggatgaccactctcccctccca

SEQ ID NO: 120911 - DNA, 240 bp, Glycine max
ctccgtttggcatggcactctgctggaacttacgacgtgagctcgaagaccggtggtcccttcggaaccataaagcacccctccgaactcgctcacggcgctaacaacggtcttgacatcgctgttaggcttttggagccactcaaagcggagtttcctattttgagctacgccgatttctaccagttggctggcgttgttgccgttgaggtcaccggtggacctgaagttcccttccat

SEQ ID NO: 120912 - DNA, 239 bp, Glycine max
attgactccaccactggtggttttgaagctggtatttctaaggatggacagacccgtgagcatgctcttcttgctttcaccctaggtgtgaagcagatgatctgttgctgtaacaagatggatgccactacccccaagtactctaaggctaggtatgatgaaatcgtgaaggaagtctcttcttacttgaagaaggttggttacaacccagacaagattccctttgttcccatctctgg

SEQ ID NO: 120913 - DNA, 240 bp, Glycine max
taaaatcagcattgaaattggggtgcatgcaagcgctgcaaagtggttcaacctctttgcaacgcaactccatcatgttcaaaaccttaccgaaagagtgcatgaaaccaagctacatcatggtgatgactggcatcacaacgaatcgatcaaacactggacttgtaccatagatggtaaggttacaacatatcacgagagtattgaatccgttgatgaacctaacaaaacaatcactta

SEQ ID NO: 120914 - DNA, 240 bp, Glycine max
ctctgtgtttgcggctgaggattccgaacgagcgaccttcttcgtttctcgcaaagtttaagtcatcatgggtaatgaatagactcacatcaacattgtcgtcattggacatgtcgactctgggaagtcaactaccactggtcatttgatctacaagcttggaggtattgacaagcgcgtgattgagaggttcgagaaggaggctgctgagatgaacaagaggtcattcaagtatgcctg

SEQ ID NO: 120915 - DNA, 228 bp, Glycine max
acgcgctcgaatccaaaaatgagagatatcatcagcattcacataggtcaaggcgggatccaggttggaaactcctgcctgggaatctactggctggaacatggcatccagcccgatggcatgatgccaagtgactcctacttaggtgtagaccacgacgccttcaacaccttcttcagcggaaacggatccggcaagcacgtccctcgcgccgtattcgtcgatctc

SEQ ID NO: 120916 - DNA, 231 bp, Glycine max
tgggaattggggatggaactgttagagggagcaaaaatgacgctgacgacatatacatgcaatcttggactgggcctatcattgggccccctggtactgttcatgaagggcgtatccaccagttgaaattgttttgtggcaaggattatccagacaatcctccatctgttagatttcaaacaaggattaacatgacatgtgtcaatcaagaaactggagcggttgagccac

SEQ ID NO: 120917 - DNA, 232 bp, Glycine max
ctttctgtcacacactcacattcgggtgcaaaatgaaggtcatcgccgcctacttgctcgccgtattgggaggcaatgcagccccttccgctgatgacttaaggaccatccttggctccgttggagctgacgcgaatgatgacaacatcagcaacttcttgtctgaagttaagggcaaagacattgcggagcttatcgccgccggtagggaaaagttggcctccgtgccttc

SEQ ID NO: 120918 - DNA, 255 bp, Glycine max
gcgcgcaattcggctcgagcaactttgacagactaggacacggaagatatcttggcctagggaattccgaataaaattgccatgattgctctttcttttgttcgaaaaggttctgacctggtggaagtcaggaaagttctgggaaaacatgctaagaacattatgctcatgtctaaggttgaaaaccaagaaggggttgcaaattttgatgaaatccttgcaaattcagatgcatttatggtggcacgtggtgac

SEQ ID NO: 120919 - DNA, 181 bp, Glycine max
cttgggagaagaggtcgagttgtcacagcagcaatggtgtacgtcaaggctcagaaatcaaaagcctacttcaagagatgccaagtcagttccagagaagaagagagggaaaaaccgattaccgtgccaggattcggttgattaatcaggacaagaacaaatataacactccgaaataccg

SEQ ID NO: 120920 - DNA, 238 bp, Glycine max
  unsure (1)..(238): unsure at all n locations
gctcaggaagcccttttggtaagagccaaggccaactcagaggcaactctgggaanctacaagggtaactcaaagcttgctgatggtgcctcagagagcctccatgttgaggactacaagtactgatcaatctaagtgcgggtaggaatcggtattttatgggtacaaccgaattttcttgttaatgagtattgtgcttcgactctcccagaataataatcgtttggaatttgctttt

SEQ ID NO: 120921 - DNA, 246 bp, Glycine max
cttttctttctgcgcgcttttcccaattaagtagttcttccttatctcaaagcaaaaaaaatgttcatcgagagtttcaaggttgagagtcctaacgtgaagtacacagagactgagattcagtccgtgtacaactatgaaaccactgaacttgttcacgagaacaataatggcacttatcagtgggttgtcaagcccaaaactgtcaaatatgaatttaaaaccaacacccatgtccctaaacta

SEQ ID NO: 120922 - DNA, 251 bp, Glycine max
gaaatagaaaaagcaaaactggtttctcgcatttcctccgaaacaaaccgtttcgctcgtttctcggatctgcaatggaagccccacccaaaggcgctgctggaagaagaggtgacaggaagaagtccgtttccaaatccatcaaagctggcctccaattccccgtcagccgcgtcgccaggtacttgaagaaaggccgttactctcgccgccttggcaccggcgctcccatttatctcgccgccgttctc

SEQ ID NO: 120923 - DNA, 253 bp, Glycine max
ataccatactcattaaagtccacacacacagagcaacactgcactgtgtggaaacgaaacatggcaagagtggtggcactccaacagaaccaactatctttctctaccttagcttcctctctttctgactacagtggaaccagacttcaaactcaacttcagttcaagagaaagcaatgccatccaaaagggtctttctacgtctccgcatcgagcaccaagaaaatcctaataatgggaggcaccaggttta

SEQ ID NO: 120924 - DNA, 256 bp, Glycine max
gctgaaattgcttggcctaaaaggaagaagtgagccatatgtaactgaagatgagctaaaattgatgctaagaggtgcagaattaagtggggcaatagaggaggaagaacaggatatgattgaaaatgtgttagagataaaagacacacatgtcagagaagttatgacgcctcttgttgatgttgttgcaattgatgcaagttcaagcctggtagactttcatcacttgtgggtcacacatcagtactcaagagta

SEQ ID NO: 120925 - DNA, 176 bp, Glycine max
  unsure (1)..(176): unsure at all n locations
gctttcacgacatcgaggctgagcggaccttcacttcgaggcgcggattgatgaacgggaagcaagacccgacgcaagcggtggctgccggaatattacaaccggaanacgacgtctccaccttccagagactcgtcaacaccctcggaaccctcagagacacccccgacctccgc

SEQ ID NO: 120926 - DNA, 229 bp, Glycine max
caattccacctgcttctgttcgagtgatatcatgatgcaactcttcgagagtcccaacttatgagagagaagttggaggagcaaaatcgagctttgcaacaggcaaaaaggaatgctttgatggcaagccaggcaagaaatgcatttcagaaagtcatgagcgatggaatgaggaggccaatgcactcaattttgggactgcttcaatgatccagacgataattaaaga

SEQ ID NO: 120927 - DNA, 229 bp, Glycine max
aaatcatcacacacacatactaagaagcaacaattcttctacaatggatctcctccttctggaaaagaccctcataggtctcttcctcgctgcggtggtcgccatcgccgtctccaccctccgcggccggaaattcaagctcccaccgggcccactccccgtcccaatcttcggcaactggctccaagtcggcgacgacctcaaccaccgcaacctcaccgatttggcc

SEQ ID NO: 120928 - DNA, 238 bp, Glycine max
ggacaacattatttgacgacttaaccccaaacaaaggctctgcaattgcaaattcagaggatgtcgatacacgagtacaacggaagcgccgtggtggctatggtcggcaagaactacttcgccattgccagcgaccgaaggctcggcgttcagctccaaactatagccacggattttcaacggatttccaagattcacgacaagctcttcatcgctctctctggcctcgccaccgatg

SEQ ID NO: 120929 - DNA, 239 bp, Glycine max
tgaggttggagccaatgtacaaattgttggtgatgatctcttggttaccaaccccaagagggttcagaaggcaattgatactaaagcatgcaatgctcttctcctcaaggtcaaccaaattggttctgtgactgagagtattgaagctgacaggatgtccaaaaaagctggatggggtgtcatggccagtcacagaagtggagagactgaggataccttcattgctgacctttctgttg

SEQ ID NO: 120930 - DNA, 247 bp, Glycine max
tctgtctctgtgtttgcggctgaggattccgaacgagcgaccttcttcgtttctcgtaaagtttaagtcatcatgggtaaggaaaagactcacatcaacattgtcgtcattggacatgtcgactctgggaagtcaactaccactggtcatttgatctacaagcttggaggtattgacaagcgtgtgattgagaggttcgagaaggaggctgctgagatgaacaagaggtcattcaagtatgcctggg

SEQ ID NO: 120931 - DNA, 249 bp, Glycine max
cctttgccttctccttcttcttcaaccctttttctttctctttctttcgcactttcattctctaaaaaaatctaagtccctttggtcttcatcttctgttctgatccaggtatggcttctaatctcatcttgaaggttctcaaggatttgcagaaggatcctcctacctcatgcagtgcaggccctgtggctgaggacatgtttcactggcaagccacaatcatgggacctgctgatagcccatatgca

SEQ ID NO: 120932 - DNA, 252 bp, Glycine max
  unsure (1)..(252): unsure at all n locations
cagaaccgagcttgcagcagcgatttctcatttcattttccacacaacatacgacagacaaacctncaaatacatcatcctcggtggaggagtatccgctggaaatgcggcgagggagtttgccaaacagggcgttaagccaggggagtgggctatcatttcgaaagaagcggtagcaccttatgaacgtcctgctctgagcaaggcttacctttttccagagtcccctgctagacttcctgggttccatgt

SEQ ID NO: 120933 - DNA, 255 bp, Glycine max
gctgcataatcgccaggctcaagacccaacctttatggttcgcgctgctcttcgttgtcggattgttaacgattctcaaattggctttcgttgttttcagatgggtctacgtcaatttcctccgaccaccgaagaatctcaaaaagtacggatcttgggcagtggttactggacccactgacggcattggaaagagcttcgctttcgagctcgctcgcaagggcctgaacctcgtccttgtcggaaggaaccccg

SEQ ID NO: 120934 - DNA, 241 bp, Glycine max
gccagtagtcatatgcttgtctcaaagattaagccatgcatgtgtaagtatgaactaattcagactgtgaaactgcgaatggctcattaaatcagtatagtttgtttgatggtatctactactcggataaccgtagtaattctagagctaatacgtgcaacaaaccccgacttctggaagggatgcatttattagataaaaggtcaacacaggctctgcctgttgctttgatgattcatga

SEQ ID NO: 120935 - DNA, 239 bp, Glycine max
gcttcctctcctcttcgctcctctccagggccctccttcgccccgccgcttccgcttcccaccgctctttcaacaccaacgccatgcgccagtatgacaaccgcgccgacgaccacagcaccgacatcgatcgtcactccgaacgctctttccctagcactgcgcgccgcgacgatatcttctcagatgtgttggatccattttttccgactcggagtttgagccaggttctgaacatg

SEQ ID NO: 120936 - DNA, 235 bp, Glycine max
ccggaatcagaggctccccctaacttctggggccacaccccggaagaagaacactacacctcccaaggcgttcgcaacaccaagtcccacttcgaaacccccaacggcaaaatcttcacccagtccttcctccctctcaacctccaaccccaccaagtcaaagccaccgtctttatgacccacggctacggctccgacaccggctggctcttccagaaaatctgcatcaacttcg

SEQ ID NO: 120937 - DNA, 235 bp, Glycine max
ccaagatccaggacaaggagggtatccccccggaccagcaacgtctcatcttcgccggaaagcagctcgaggacggccgcaccctcgccgactacaacatccagaaggaatcaacccttcacctcgtcctccgtctccgtggtggcatgcagatctccgttaagaccctcaccggcaagactattaccctagaagtcgaaagctccgacaccatcgacaacgtcaaggctaagat

SEQ ID NO: 120938 - DNA, 245 bp, Glycine max
gttagggtcgtcttcggatcggtggaacttgactgcgccggcgtgaattccgacgctgcgagtggcaccgaattgcgatagccgtgacgaatatgaagttttcgttaagactctcaaaggcactcacttcgaaatcgaagtgacgccgcaagacacggtttctgaagtgaagaaaaatatagaaactgttcagggtgcagatgtctatcctgctgcacagcaaatgctaattcatcaagggaaag

SEQ ID NO: 120939 - DNA, 252 bp, Glycine max
tccaaagtttgtatagtgtaggatttgttggtattcgtgataaatacacctcatactattcattttgccatgacgggcgaactccagataaaggttttgaaagtaatgagaaattattaattcatccatgttactggtttcgtttgaatctaaatcgtaatgcacttgctccagaggaagcagaggagatagatgacgaatatgatattaatattatttcagataattcagccattaggaataaaacaatag

SEQ ID NO: 120940 - DNA, 233 bp, Glycine max
gaacaatggcgggtagggtttcgacgtgcttcttcttcgtgtttgctctttctctccttcttccttttcagatctccgctgaggaatcatcggagaaagagttcgtactcacattggatcactctaactttcacgacactgtcagcaagcacgatttcatcgtcgtcgagttctacgctccatggtgtggccactgtaagaagcttgctctcgagtatgagaaagctgcttct

SEQ ID NO: 120941 - DNA, 230 bp, Glycine max
ctcaccgattgctagaatggaatttcgatgctcagtcatctcttttaccattctcttctctcttgctcttgcaggagagagccatgtcctgcatcgctacctgaggaagattattgggaagctgtttggccaaacactcccattcccactgcactgcgagagcttctaaagcctctccctgcaggtgttgaaatcgatgaactccctaagcaaattgatgatacacagta

SEQ ID NO: 120942 - DNA, 239 bp, Glycine max
cgctctgtttctgtctctgtgtttgcggctgaggattccgaacgagcgatcttcttcgtttctcgcaaagtttaagtcatcatgggtaaggaaaagactcacatcaacattgtcgtcattggacatgtcgactctgggaagtcaactaccactggtcatttgatctacaagcttggaggtattgacaagcgtgtgattgagaggttcgagaaggaggctgctgagatgaacaagaggtc

SEQ ID NO: 120943 - DNA, 243 bp, Glycine max
ataccgtaccagcagaggaaagagagaaaatttcagaacaaaaaagaagcagaggaaaagagagatagagagagaagaaaagctgtgaagagaagagtctgaaatctgaatcataaataattggtttttgagatgaagaactgcgagttgtgcaagcttccggctcggactttctgcgagtcggaccaggctagcttatgctgggactgcgacgccaaggttcatggagccaacttcctcgtg

SEQ ID NO: 120944 - DNA, 243 bp, Glycine max
cttccgaattcgaagttaatttgcaagatggctaaggaaaaggctcagatcaacattgaggtggttggtcatgtggaccctgaggaggcaaccacattaacgagctgaagaagcctgttgtggagaaagaagctccagggcatgccatatgagggcatgcacgtacggcctcggaggggaaccagaaaattatgttaacaaaataatctgcgaacctaatgtatcagtgtcatcatcagtgtg

SEQ ID NO: 120945 - DNA, 245 bp, Glycine max
ctctgtgtttgcggctgaggattccgaacgagcgaccttcttcgtttctcgcaaagtttaagtcatcatgggtaaggaaaagactcacatcaacattgtcgtcattggacatgtcgactctgggaagtcaactaccactggtcatttgatctacaagcttggaggtattgacaagcgtgtgattgagaggttcgagaaggaggctgctgagatgaacaagaggtcattcaagtatgcctgggtgc

SEQ ID NO: 120946 - DNA, 244 bp, Glycine max
gccggccacaacacccccctcgccgccgtccaggtgacggaactcgccgacggcgtcttcgtcggctgcaccgtcaaccactccgtcaccgacggcactcgttctggcacttcttcaacacgttcgccgacacaaacaaaggcgggtccgccaagaaactcctcagtgcgccggacttcacgagggaaaccgtcttcaactccgccgccgtcctccccgtgcctctgtgcggccccacggtcac

SEQ ID NO: 120947 - DNA, 247 bp, Glycine max
ctctctctctgctcaactgaataaagcagataagaataagaaaatgggtgtgttcagtacagtgctgctgtgccttatgtccctaatgtggatggtgcatgctcgaattccaggcgtatactctggcggcgcttggcaaaatgctcacgctacgttctacggaggatccgatgcttccggcaccatgggtggagcatgtgggtacgggaacctgtacagccaagggtacggagtgaacactgcagcg

SEQ ID NO: 120948 - DNA, 238 bp, Glycine max
gcttcctctcctcttccctcctctccaggtccctccttcgccccgccgcttccgcttcccaccgctctttcaacaccaacgccatgcgccagtatgacaaccgcgccgacgaccacagcaccgacatcgatcgtcactccgaacgctctttccctagcactgcgcgccgcgacgatatcttctcagatgtgttggatccattttttccgactcggagtttgagccaggttctgaacat

SEQ ID NO: 120949 - DNA, 228 bp, Glycine max
ggataggtcaaacatcatcatgtcggacgaagagcaccatttcgagtccaaggcagacgccggtgcctccaaaacctaccctcagcaagccggtaccattcgcaagaacggctacatcgtcatcaaaggacgcccctgcaaggttgtggaagtttcgacttccaaaactggaaagcacggtcacgccaagtgccactttgttggaattgatattttcactgccaagaa

SEQ ID NO: 120950 - DNA, 236 bp, Glycine max
ctggactccagatggctatgttgctgttgtcacaatgtacaactttcaacaatatcgccacattcaggcccccggatggtcattagggtggacatgggctaaaaaggaagtgatttggaacatgatgggagcccaaaccacagagcaaggggactgttcaaagttcaaagcaggcattccacattgttgtaacatcgaccctacagttgtggatttactgccagggactccttaca

SEQ ID NO: 120951 - DNA, 243 bp, Glycine max
caaggcagaaagcaagctcatcctagagttttaaaaatggcagcagcctcctccatggctctctcttccccatccttggctggcaaggccgtgaagctgggcccatcagcccccgaagtcgggagggtcagcatgaggaagaccgtcaccaagcaggcctcctccggaagcccatggtacggcccagaccgcgtcaagtacttgggcccattctctggcgagcccccgtcctacctcactggc

SEQ ID NO: 120952 - DNA, 229 bp, Glycine max
gattagagggtcgccacgtttagcaataaccaaaccctctctactcttttttcttctccttctcttcgctagggttttagcttcttcctcttcacttcgttctttttcgcctctacaatgagcaacgacaaggacacattcaacgtcgccgatctcacttctgctctcaacgaggacaatagagcagaccttgtcaatgctcttaagagcaagatacagagtttggctg

SEQ ID NO: 120953 - DNA, 237 bp, Glycine max
tctgaatctgcgtgtgtttgtgaattgttgttgagatctgaatcaaaatcagaaacgataatggctacaccggaccacctcttcaacctccgcaacaacttctacctcggcgcttaccaagccgccatcaacagcagcgacgttgccaacctctcccaagaagataccctcgagcgcgacaccctcgtccaccgctgctacatcgccctcggccagctccagttcgtcatctccgag

SEQ ID NO: 120954 - DNA, 239 bp, Glycine max
gtttatctccgcactccgtcttcatgaatcagcatcaccaccgctccaacacaggggaaaatgagggagatccttcacgttcagggagggaatgcgggaaccagatcggttcgaagttctgggaagtggtgtgcgacgagcacggcatagatccgacggggaagtacgtcggaaactcagatctacaactcgagcgcgtgaacgtgtactacaacgaagcttcctgcgggcggtttgtc

SEQ ID NO: 120955 - DNA, 230 bp, Glycine max
gtctttggagtaaccaaaagcaatggctactacagctccgaattcgtcaattctcctgtcccttctgctattggccatcgccctctccctcgctgagtcccaatctctcatcggagtacactacggccaggtcgccgacaaccttccggcgccggtggacacggacagcctcctcaaatccaccaccatcggaacagtccgtctctacggcgccgatcacgccatcatca

SEQ ID NO: 120956 - DNA, 258 bp, Glycine max
cggaagaaaccctagccactctcccggcgtcacgatgcagatcttcgtgaaaaccctaacgggtaaaacgatcacgttggaggtggagtcttcggacaccatcgacaacgtgaaggccaagatccaggacaaggaaggcatccctccggaccagcagcgcctcatcttcgccgggaagcagctggaggacggccgcaccctggcggactacaacatccagagggagtccacgcttcacctcgtcctccgcctccgtgg

SEQ ID NO: 120957 - DNA, 88 bp, Glycine max
gcagaaagcaagctcatcctagagttttaaaaatggcagcagcctcctccatggctctctcttccccatccttggctggcaaggccgt

SEQ ID NO: 120958 - DNA, 253 bp, Glycine max
gagagctcttcctccctttctcatagcaatggccgccgcagcacgccctctcgtcaccgtgcaggccctcgacggtgacatggcaaccgatgcctccgccaccgttcccatccctgacgtcatgaaggcctctatccgccccgacatcgtcaatttcgtacactcgaacatctccaagaacagatgccagccatacgccgtcagtcgtcgcgctggtcaccagacctccgccgaatcctggggtaccggccga

SEQ ID NO: 120959 - DNA, 93 bp, Glycine max
cgtggtttacaatgcctcaaacaatgagcttgtgcgtactcagactcttgtcaaaagtgctatcgttcaggttgatgctgctccattcaaaca

SEQ ID NO: 120960 - DNA, 255 bp, Glycine max
gtagagagaagagaagggctacacaaacacaatctctaatggcactcaggatgtgggcttcttccactgccaatgcactcaaactctcttctgtctccagacctcatctcttgcctcctttttctttctccagatgcttatcttccgtcttggatggacttaagtacgctgattcacatgaatgggtcaagcacgaaggctcagtcgccaccattggtatcactgaccatgcccaggaccatcttggagaggttg

SEQ ID NO: 120961 - DNA, 251 bp, Glycine max
ggagataactagaaacagtgtgatgaaaatgaaggtccttgttttcttcgttgctacaattttggtagcatggcaatgccatgcgtacgatatgttccctctccgaatgaacactggctatggtgcccgtactccggaggtgaaatgcgcaagttggaggcttgctgtggaagcagacaacatctttggctttgagaccattagtgaagagtgcgttgaagcaacaaaggaatacatccatggcgaacaat

SEQ ID NO: 120962 - DNA, 175 bp, Glycine max
tgagcggagacttttgggggagagtgagtgagagtaaaaagatgtttctgcgtgcggtggcgcggccgttgatggcgaaggtgaaggcttcgacggggatcgtggggctggacgtggtgccgaacgcgagggaggtgctgattgggctgtacagcaagacgctgagagagatcca

SEQ ID NO: 120963 - DNA, 216 bp, Glycine max
  unsure (1)..(216): unsure at all n locations
ctgcctttccttttccagggagctcattgacaatggctgaaaccagagtggngtcatgaaaggacaaaagatggtctctccatggaatgacagctctagtcacaggaggcacccgaggcatagggcatgccattgttgaagagttagctgagtttggagcaactgttcatatatgtgcacgtaatcaagatgatattgataaatgtttagaagagt

SEQ ID NO: 120964 - DNA, 91 bp, Glycine max
tatggtggatacctaggcacccagagacgaggaagggcgtagtaagcgacgaaatgcttcggggagttgaaaataagcgtagatccgggga

SEQ ID NO: 120965 - DNA, 248 bp, Glycine max
gttactggcatgcttctggagatggaccagcctgaagttttacatctgattgagtcaccagatgctctgaaggcaaaagttgctgaagccatggatgtgttaagaaatgttgctcaacagcaaactaacccagctgatcaactagcttcactctctctcaatgacaatcttgtgtcttagattcctttagtcttttgactggaatctgctttccagttattcctattccgtatgcttccccccagttt

SEQ ID NO: 120966 - DNA, 103 bp, Glycine max
cggctcgaggggttgtgctgctgcattgaagcaggctggtgctcgtgtcatcgtgactgagattgaccccatttgtgcccttcaggctctcatggaaggcctt

SEQ ID NO: 120967 - DNA, 236 bp, Glycine max
tgggagatttcatccactttttcaatttttctactttgactctgtggaatcactccctacagaaccgcttgatgctaatgatttaaaaccattgaatagtcgttatgatgcacagatttcagtttttggacaaaagttacagaagaagttagaggacgctgaagtttttgttgttggatctggtgcattgggatgtgaatttttgaaaacctttccccaaatgggattttcttggg

SEQ ID NO: 120968 - DNA, 245 bp, Glycine max
gtaaatcatggttttgttggtggagcaaacgatgataggtcgcgagtacaacgtaaaggacctgtccaacgctgacgtgcgatgggtcgagatcgagttggacgacgttgagatgtacggcgtcatggcatgtgcggaccgatttcggaccgtgacagaccttgaagggggctcgcatcaccggttcaatggacatgactatccacggcgctgttctcgttgagacgctcactgcgcttggcgca

SEQ ID NO: 120969 - DNA, 244 bp, Glycine max
ttatatagcccaagccctatacaaccaaaccctaacacacacccatttgattcagtttccatggctagcctcaaggttgcatttttggctgcagtgctctgcatggttgtggtgagtgcacccatggcacatgcagctatcacgtgcgggcaggtgacgaatagcctgatcaattgcatcggttacctccagaacggaggaacgccgccgtcgggatgctgcaacggagtgaagagcctcaatg

SEQ ID NO: 120970 - DNA, 249 bp, Glycine max
cttaaaagagcctttgctttttctttaggcctttccgaattaagtacttgtttcattttctctcgaagcaagaaaaatgttcatcgagagtttcaaggttgagagtcctaacgtgaagtacacagagactgagattcagtccgtgtacaactatgaaaccactgagcttgttcacgagaacaagaatggcacttatcagtgggttgtcaagcccaaaactgtcaaatatgaatttaaaaccaacaccca

SEQ ID NO: 120971 - DNA, 246 bp, Glycine max
cctttctcctaaaacatctcaatgggttcttcttctattacaacatcgcctctaaccatgaccatggctgcgatcgtgctcctgttcacggtctttgccgtttcctccgccctagacatgtcgataatctcgtacgacagcgcccacgcggacaaggccgccacgttgcgcaccgaggaggagctgatgtccatgtacgagcagtggctcgtgaagcacgggaaggtgtacaacgcgctcggcgag

SEQ ID NO: 120972 - DNA, 212 bp, Glycine max
tgacatttgcttccgtaccctcaagctaaccaccccaagctttggtgacttgaaccatctgatctcagctacaatgtctggtgtcacttgttgtttgaggttccctggtcaacttaactctgatctgcgaaagcttgcagtgaaccttattcccttccctcgcctccacttcttcatggttggatttgctcctttgacatctcgtggctctc

SEQ ID NO: 120973 - DNA, 169 bp, Glycine max
ctctcttccccatccttggctggcaaggccgtgaagctgggcccatcagcccccgaagtcgggagggtcagcatgaggaagaccgtcaccaagcaggcctcctccggaagcccatggtacggcccagaccgcgtcaagtacttgggcccattctctggcgagctcccgt

SEQ ID NO: 120974 - DNA, 240 bp, Glycine max
caaggcagaaagcaagctcatcctagagttttaaaaatggcagcagcctcctccatggctctctcttccccatccttggctggcaaggccgtgaagctgggcccatcagcccccgaagtcgggagggtcagcatgaggaagaccgtcaccaagcaggcctcctccggaagcccatggtacggcccagaccgcgtcaagtacttgggtccattctctggcgagccccggtcctacctcact

SEQ ID NO: 120975 - DNA, 244 bp, Glycine max
ctaaaccctactcattctccatacctcaacgaagaggttaaagagacggcgacactttgctgtccgccttgatcgagcagagcttcgtcttggccctcgattttgccctaaagtactctcagtcacaacagacaccgtcgtcgtcgtcgtcgtcatcagtggcaccgaagcagaccaaggctgagaagaagatcgcttacgatgcgaagtgtgcgacctaatggaggagtacggccagatcctc

SEQ ID NO: 120976 - DNA, 247 bp, Glycine max
ctccgcctccggccgctcccacatccgctactaccaagccggctcctccgagatgttcggcgccacccctccgccgcaatcggaaaccacccccttccacccccgctccccctacgccgcctccaaatgcgccgcccactggtacaccgtgaactaccgcgaggcctactccctcttcgcctgcaacggcatcctcttcaaccacgagtccccccgccgcggcgagaatttcgtgacccgcaagatc

SEQ ID NO: 120977 - DNA, 251 bp, Glycine max
cgatcagagagccatgtccatgcatcgctacctgatgaacattattccggaagctgtttggccaaacactcccattcccactgcactgcgacagcttctgaagcctctccctgcaggtgtggaaatcgatgacctcccgaagcaaattgatgatacacagtacccatgagcattctgctataaagaagaccttcatccaggcagagcagtgaaagtacaattcaccaggcgtccctatgcacaaccttatg

SEQ ID NO: 120978 - DNA, 250 bp, Glycine max
ttaaactcggtgctcgtctcaccgaggttcgcaagaacggtacctgcccttggctgaggcctgatgggaagacccaagtgattgtttcgcattacaatgacaatggtgccagggttcctattcgagtacacaccgtgctaatctccacccaacacgacgagcctgtcaccaatgacgatattgctgctgtcctcaaagagcatgtgatcaagcctgtgacgccagataagtaccttgatgaggagaccat

SEQ ID NO: 120979 - DNA, 255 bp, Glycine max
ctcatttatagtttactattgaaagatgggtttgaaaatggcaatactgatcctaggcctgctggccatgttccttttggtctcctcagaggtggcatccacgaattcaaaagaggtgacaaatggagttgaagatgccaaatatcctggtggaggctatggtgggggttacccaggcaatggcggtggtggctatcctggccgtggtggtggctaacccggtcgtggtggtggctatccaagtcgcggtggtgg

SEQ ID NO: 120980 - DNA, 259 bp, Glycine max
ctctggatcaggtttagggaatggctgcaatcttagctcgaaaatcactccttgctcttcgtgcgcgccaattggctgtaagcggtcaagggctgcacagctcccaatactatggccttcggttaagtgcacactccttctctaccaaaagagaggatgaggaaagggagcaactcgcaaaggacatttcaaaggattggagttctgtctttgaacgtagcattaacactctctttctcactgaaatggttcgaggact

SEQ ID NO: 120981 - DNA, 257 bp, Glycine max
attggacagcattttgtggttcagacaccacagcaacagagctctctgtgattgagagtgttttcaagctgagagaagcccaacccagcgccattgtcgatgagatgaggaaatcactcattgatacttatgtctaaatattgctcatgttctactgcttgttgctaagatattccagttttgtgtcagtttttcccggtgaacagtttgtgatagtatcatcatctaaaatatgaatgtttatttcaatcaagaat

SEQ ID NO: 120982 - DNA, 259 bp, Glycine max
gtaagctcccaagcagtgggaggaggctcgggagtctgaccgcgtgcctgttgtagaatgagccggcgactcataggcagtggcttggttaagggaaaccaccggagccgtagcgaaagcgagtgttcacagggcaattgtcactgcttatggacccgaacctgggtgatctatccatgaccaggatgaagcttgggtgaaactaagtggaggtccgaaccgactgatgttgcaagaatcagcggatgagttgtggtta

SEQ ID NO: 120983 - DNA, 260 bp, Glycine max
tgtcgagccgaatcggctcgagatttggttggccgtgctcgcacaggtcagggtaaaactatggcatttgtgttgcccatattagagtctttaataaatgctccagcaaaatctgcgagaaagactggctacgggaggactccgagtgttctcgtgcttctacctactagggaattggcttgccatgtgcatgctgattttgaagtgtatggtggggcgatgggcattgagctcatgttgtttatacggtgtagctccat

SEQ ID NO: 120984 - DNA, 259 bp, Glycine max
ttggggcagtagccgagattccgtgagttgcaaaaatgaagacgattctttccaccgagaccatgaacatcccggacggcgtgagcatcaaagttcatgccaaggtcatcgaagttgagggcccccgcggaaaattctctgcgagacttcaagcatttgaatctcgattttcagctcattactgacgaaaacggtaaaagaaagctgaaaatcgacgcgtggtttggttctcggaaaacatccgccgccattcgcaccg

SEQ ID NO: 120985 - DNA, 255 bp, Glycine max
tatatgtcaaaagaggttgaagatagtgagttggcagatgtggcagcagtcagtgcagggaacaattatgaagtaggaaatatgattgctgaagcattgagcagagttggtagaaagggtgtcgtgacccttgaggagggaaagagtgctgataacagtctgtatgttgttgaggggatgcaattcgaccgtggttatatttctccatacttcgttactgacagtgagaaaatggctgttgagtatgagaatgta

SEQ ID NO: 120986 - DNA, 249 bp, Glycine max
gtggtggtcaatttacctcaaagatggaaggaatggttacagatttgacattggcaaaggagaaccaaacaagctttgaggagtatttaaccaataatcctaatgcagaccctggaatagacttgacggttacagttttgactactggcttctggcctagttacaaatcttttgatctcaatcttccagcagaaatggttagatgtgttgaagttttcaaggaattttatcatacaaaaactaagcaca

SEQ ID NO: 120987 - DNA, 260 bp, Glycine max
gcgacggccattctcgccgttgtgtgctccgccgtgagcggttgctcgccatcggatagggcggcgctgctggccttccggaaggcgctgagcgagccctaccttggcctcttcaactcgtggacgggctccaactgctgcctcgactggtacggcatcagctgcgacgccaccaccggccgcgtcaccgacatcaacctccgcggggagtccgaagaccccatcttcgagaaagccggtcgctccggctacatgaccgg

SEQ ID NO: 120988 - DNA, 259 bp, Glycine max
cgctctgtttctgtctctgtgtttgcggctgaggattccgaacgagcgaccttcttcgtttctcgcaaagtttaagtcatcatgggtaaggaaaagactcacatcaacattgtcgtcattggacatgtcgactctgggaagtcaactaccactggtcatttgatctacaagcttggaggtattgacaagcgtgtgattgagaggttcgagaaggaggctgctgagatgaacaagaggtcattcaagtatgcctgggtgc

SEQ ID NO: 120989 - DNA, 255 bp, Glycine max
gaagctcctccagtgccacctgcaccgcccatagtggccatgctgccatcccctggcatgggccacctaatcccaatgatcgagttcgccaagcgagcggtgcgctaccataacctggccgtcaccttcgtcatccccactgacggcccaccttctaaagcccaaaaggccgtcttccaggccctcccggactccatttcccacaccttcctgcctccggtcaatctctccgactttccaccgggcagcaaaatt

SEQ ID NO: 120990 - DNA, 259 bp, Glycine max
ttatggctcccaagggtttaccctttctggctgtgataatatgcgtttcagcactgtcactgagtttctctgttgcgggggacgggcaaaataatggccttgttatgaacttccacaaggaatcatgccaccaggctgaagacatcatcacagaacaagtcaagcttctctacaagcgccacaagaacactgctttctcctggctcaggaacatcttccatgactgtgctgttcagagttgtgatgcttcactgttgct

SEQ ID NO: 120991 - DNA, 258 bp, Glycine max
cttaactagtaatatttattagaatttgccagagaattagaagagtaaacataataccccagatggcttcaaaaacttgttcctcccttgcccttttcctcacactcaacctcgttttcttctcacttgtctctgcatgcggttatacaccatgccctggtccaaacccaaagccaaggcccaaccccaaccctaaccctaaccccagcccaagtggctcgtgcccccgtgacgcactcaaactaggtgtatgcgcca

SEQ ID NO: 120992 - DNA, 259 bp, Glycine max
aagcaagctcatcctagagttttaaaaatggcagcagcctcctccatggctctctcttccccatccttggctggcaaggccgtgaagctgggcccatcagcccccgaagtcgggagggtcagcatgaggaagaccgtcaccaagcaggcctcctccggaagcccatggtacggcccagaccgcgtcaagtacttgggcccattctctggcgagcccccgtcctacctcactggcgagttcccaggtgactacggctggg

SEQ ID NO: 120993 - DNA, 251 bp, Glycine max
gtattcctttcgtcccccagtggttttcttgttattcttcattgtcttttccgttgtttcctgtgatgaagcttccaagaccttcatctttcgcgtggattcccaatccaagcccaccatcttccccacccattatcacttgtacacctccgagttcgcccaagataccagcatcctccacgtatacgacaccgttttccacggcttctccgcgtcgctcacgcatcaacaagtcgcgtccataagccagc

SEQ ID NO: 120994 - DNA, 257 bp, Glycine max
gtcttcttcgtctttactcttttcttcaccgaagcgaaaaagaaaaggcttgacttgagagaaatagagcttcgaatcgaaactcagaattagaaaaaaacacaaatcacaatcacaatggcaaggtacgaccgagcaatcaccgttttctcccccgacggccacctcttccaggtcgagtatgccctcgaagccgtccgcaagggcaacgccgccgtcggcgtccgcggcaccgacaactcgtcctcggcgtcgag

SEQ ID NO: 120995 - DNA, 235 bp, Glycine max
gtggcttcaagaagagaatctcaatggaggcccaggagctgaagcgcgtgttccagatgttcgaccgcaacggcgacgggagaataacgaagaaggagctgaacgactcgctggagaacctgggcatcttcatctctgacaaggacctgagccaaatgatccagaggatcgacgtcaacggcgacggttgcgtggacatggacgagtttggggagctgtatcagaccataatgga

SEQ ID NO: 120996 - DNA, 256 bp, Glycine max
ttgagaatgagtcagcctaagattaaacgccgagttggtaaatacgaggtggggaggaccattggtgaaggtacatttgcaaaggtgaaatttgcaaggaactctgagacaggagagcccgtggctcttaaaattcttgacaaggagaaggtgctaaagcacaagatggctgagcagatcaggagagaagtagctacaatgaaactaatcaagcatccaaatgttgtccgattgtatgaggtcatgggaagcaaga

SEQ ID NO: 120997 - DNA, 255 bp, Glycine max
ctaagattgaaaacatagaggggttgacacattttgatgagatattgcgagaagcggatggtatcatcctctcacgtggaaatttggggatagatcttccacccgagaaggtgtttttatttcaaaaagcagctatttacaaatgtaacatggctgggaaacctgctgttgtcacacgtgttgtggatactatgaccgataacctaagacctactcgtgctgaagcaactgatgttgccaatgcagtgttggatg

SEQ ID NO: 120998 - DNA, 253 bp, Glycine max
attgactccaccactggtggttttgaagctggtatttctaaggatggacagacccgtgagcatgctcttcttgctttcaccctaggtgtgaagcagatgatctgttgctgtaacaagatggatgccactacccccaagtactctaaggctaggtatgatgaaatcgtgaaggaagtctcttcttacttgacgaaggttggttacaacccagacaagcattccctttgttcccatctctggtattgagggtgac

SEQ ID NO: 120999 - DNA, 252 bp, Glycine max
acgaaatcgaaacagctaacaacatcaacaagcgtctcaagccatctccagttgaatcagcagactccgcgtctgagcccacgcgcacggtgctgctcgttgaccatcaggaagccggcgtgcgtctggtccacactctcctggcgtgcgcggaggccgtccagcaggagaatctgaagctggccgacgcgctcgtcaagcacgtgggcatactcgcggcttctcaagccggcgccatgaggaaggtggctt

SEQ ID NO: 121000 - DNA, 253 bp, Glycine max
ttcagtggaatttggacttcacggatcacagcgaacagggagataggtaccgagagcttgctaaccgagttgatgaggcccttggattcatggctgctgctgggctcacggtggaccatcccataatgagaacaactgaattctggacatctcatgagtgcttattgttgccttatgaacaatccctcacaaggttggattcaacttctggtctctactatgactgttcagcccatatgatctgggttggaga

SEQ ID NO: 121001 - DNA, 257 bp, Glycine max
ttcatgcatggcctcttccgcattcctttccgtttatctcattatctccgtcatcgtccttttgtcgaacaggtgctgcgcgtttcaatgcggggtttcctacgacacgatcaccgtcctcaacgcgttccctcacgacccacaagccttcactgagggtcttctttatcatggaaatgacaccttatttgagtcaactggcctttatggggagtcatccgtccgtaaagttgctcttcgtactgggaaggttgaga

SEQ ID NO: 121002 - DNA, 256 bp, Glycine max
tctcgagccgaatcggctcgaggtttgttgttgtaactcgttcttactcttttgttgttctatgtttgtgtttgttttttcgctcacctgaaaatgtcttgctgcggtggtaactgtggttgcggaagctcctgcaagtgcggcaacggctgcggaggctgcaagatgtacccagacttgagctacactgagtcaaccaccaccgagaccttggtcatgggagtggcacctgttaaggctcaatttgagggtgctg

SEQ ID NO: 121003 - DNA, 255 bp, Glycine max
tcgagatcaaccttggatcaggtttagggaatggctgcaatcttagctcgaaaatcactccttgctcttcgtgcgcgccaattggctgtaagcggtcaagggctgcacagctcccaatactatggccttcggttaagtgcacactccttctctaccaaaagagaggatgaggaaagggagcaactcgcaaaggacatttcaaaggattggagttctgtctttgaacgtagcattaacactctctttctcactgaa

SEQ ID NO: 121004 - DNA, 256 bp, Glycine max
gagaattccaaagacagagatgactctgattaaggaattagagcaacaaccaaaccaaattgctggccacaaagaactcgctcacaaaagtctccttcagagcgatgcactctatcagtatatacttgaaaccagtgtgtacccaagagagcatgagagcttgaaggagctaagagagttgacggaaaaacacccttggaacctgatggctacaccacctgacgaaggacaacttctaggcatgctacttaagctt

SEQ ID NO: 121005 - DNA, 254 bp, Glycine max
tggaaccttgacgccattggccattgagttaagtaagccgcatcctcagggtgaaggatatggtcctgttagcgaagtctacgtgccttcgagcgagggagttgaagcttacatttggttactggcaaaggcttatgttgttgtgaatgattcgtgctaccatcaactcgtcagccactggctaaacactcatgcggttgttgagccattcgtcatagcaacaaacaggcatctgagcgtggttcaccctattt

SEQ ID NO: 121006 - DNA, 249 bp, Glycine max
tctcttgcggctatggttttagcgcagtgtcttctagatttaaggtagatgggtaatgtgcatgttcacatcagtattgtggatattggccatgttgactctgggaagtccaatagcactggccacctgatctacaagcttggatgcattgagaagcgtgttattgagagatttgagaaggatgctgctgagatgtacaagatgtctttcaagtatgcctgggtgcttgatgagcgtaaggctgagcgt

SEQ ID NO: 121007 - DNA, 269 bp, Glycine max
tctcgaattcggcatcgaaaaaccccagcagagtcctcacattgcactctcactctcgcaacttctgcctcactctctcactcgctcaggagtatataatctgagccatgtcagatctcgaagctcgcttgctcagcaagaggaagattgttaggtgaggatagtgtgctgaaataccatgagatcgtgcatatagtcgcagtccttcccatcccctctacgatttatccccgtacataccttggggatggaagatccgagtggaagtc

SEQ ID NO: 121008 - DNA, 251 bp, Glycine max
cggagcttgggctgcgtcttcccggagttgctgtcccgcaacggggtgaagttcggagaagccgtgtggttcaaggccgggtcccagatcttcagcgagggtgggctcgactacttggggaacccaagcctgatccacgcccagagcatcctcgccatctgggccacacaagttatcctaatgggtgccgttgaaggttaccgtattgctggtggatccctcggtgaggtcactgacccaatctaaccagg

SEQ ID NO: 121009 - DNA, 250 bp, Glycine max
cgcaacaaaaagaaagaatcccaggcgaggaacaagatggaggggaaggagcaggatgtgtcgttgggagcgaacaagttccccgagagacagccgattgggacggcggcgcagagccaagacgacggcaaggactaccaggagccggcgccggcgccgctggttgacccgacggagtttacgtcatggtcgttttacagagcagggatagcagagtttgtggccacttttctgtttctctacatcaccg

SEQ ID NO: 121010 - DNA, 261 bp, Glycine max
tcgactctatctctcttcgttttgttcttccttgcgctcctcctcgttcgttcgttctcgctcgcgtagatcggcaatggcgtcgaccgagacgtttgctttccaggctgagatcaaccagctcctcagtctcatcatcaacaccttctactccaacaaggaaatcttccttcgtgaactcatcagcaacgcctctgatgtaagtttcttcgttcttctctcttttccttcctttttctctcgttgacttgttgcgtctgc

SEQ ID NO: 121011 - DNA, 250 bp, Glycine max
gaaagcgtgtgcgtgggagggtccgaagttggagatagtgattctggttctgttctgttcttctttctactcacaacaacatcagaatcagaaacaacaatggccaacactaacttggaagatgttccctctctggatctcatgactgagctccttcgtcgtctcaagtgctcttccaaacctgacaagcgtcttattctcattggcccacctggatctggaaaaggcacccagtcaccaatcataaaag

SEQ ID NO: 121012 - DNA, 246 bp, Glycine max
gtgagtgagcgagccaggtagggtcatcggtgttcccctctttgtgttcgttcgcgacgatggggtccatccccgatccaggcgagttgagcgagttgactcagccgagcttcgacgagttccagcgccaaacctctctcatgaccagctgcaccctcctctggaaggagctctccgaccacttctcctccctcgagcaagacctcaaccacaaatccgaagccctcaagcgcaagattcacaccc

SEQ ID NO: 121013 - DNA, 248 bp, Glycine max
gtcaaattcggcgaggccgtgtggttcaaggccggtgcacagatcttctcagagggaggccttgactacttgggcaacccaaacctgatccatgctcagagcatccttgctatctgggctgttcaggttgtgctcatggggtttgttgaaggttacagagttggtggaggaccacttggtgaaggacttgacccaatctaccctggtggtgcttttgaccctcttggtctggctgatgaccctgatgc

SEQ ID NO: 121014 - DNA, 253 bp, Glycine max
gttcacctcggcaccaaaaactgcgactttcagatggaacgctacgtcttcaagcgcagaaccgatggtatttacataattaaccttggcaagacatgggagaagctccagctcgctgctaggattatttttgccattgagaacccacaggatatcattgttcagtctgccaggccttatggtcagagggcagttcttaagtttgctcaatacactggtgctcatgcaattgccggaaggcacactcctggaa

SEQ ID NO: 121015 - DNA, 252 bp, Glycine max
atcgaatgatagcatcaaactcttcttcttcgatttccattgcgaacgttactttttcttcttctttctcttcattttcttcgctcttcgatcttcgtccggggactgctccgaataccatcaccaccactcgccgatggccacgatcggaggcttacacgactcccaaggctctcaaaacagcgtcgaaaccgaagccctcgctcgattcgccgtagacgaacacaacacgaagcagcattcgcttctgga

SEQ ID NO: 121016 - DNA, 254 bp, Glycine max
ggacacacagcacaaccaacacctccacagcctctcctacctcccggagccatggccgccgccgactcctccgccgctccatcgcaccagttgtcgcagagggagacggacatccagatgatgctcgccgccgacgttcacctcggcaccaaaaactgcgactttcagatggaacgctacgtcttcaagcgcagaaccgatggtatttacataattaaccttggcaagacatgggagaagctccagctcgctgc

SEQ ID NO: 121017 - DNA, 232 bp, Glycine max
ttgacagtgagaaatgatgatgaagcgtcggttccttttggttctcttggttctctatgtcacagtggagcagagtaagctactccaccacgtagaagccgatggtgggtttgtaaaaacaagaggagtgcagcttatgctgaatgggagtccctactatgctaatggctttaatgcctattggcttatgtaccttgcctctgatccttcccagagaaacaaaatctcatcg

SEQ ID NO: 121018 - DNA, 253 bp, Glycine max
cgttggtgcaaagcatccttcgcttcaatttctctctctcagcgctttctgcaatcgaacctttcatctccaaagggatccacaggccgaaggagaaatggggctgacattcacaaagcttttcagtcggcttttcgcgaagaaggaaatgcgaattctgatggttggtcttgatgctgctggtaagaccactatcctgtacaagctcaagctcggagagatcgttaccacaattcctaccatcgggttcaat

SEQ ID NO: 121019 - DNA, 252 bp, Glycine max
  unsure (1)..(252): unsure at all n locations
tgggactctaccgtgttgtgcacggcattgatgtctttgatccaaaattcaacattgtctcccctggagctgntcaaaccatttacttcccccccaccgaaactagccgtaggttgacctccttccaccccgaaatcgaagaacttctttacagctctgtggagaatgaagaacacatatgcgtgctgaaggaccgcagcaagccgattatcttcaccatggcaaggttggaccgtgtgaagaacatcacag

SEQ ID NO: 121020 - DNA, 249 bp, Glycine max
gtgttgttgaggttttttgtagcagaattcagtgcggtgtgttgtagcagcgattagaaggaaggaggaaagatgaacacagacatcactgcatcgacgaagccagagtacccagtcattgatcgcaagcctcctttcaccaaagtcgtcggcaacttcaacaccctcgactatctccgattcgtcacaatcaccggcgtttccgtcaccgtcggctacctctccgggattaagcctggaattaggggt

SEQ ID NO: 121021 - DNA, 252 bp, Glycine max
ggaaagttgggggtaaattggaggataccgagttgatctatggaattgttgtggacaaggatatgagtcatcctcaaatgcctaagcaaattgaggatgctaaaattgctatcctcacttgcccctttgagcctcccaagccaaagaccaagcataaggttgatattgatacagtggagaagtttcagacgttgaggttgcaggaacagaagtattttgatgacatggttcagaaatgcaaggatgtgggtg

SEQ ID NO: 121022 - DNA, 266 bp, Glycine max
acccaacaacaagaatgaagaagatgattctaaccctcttcttcaatatcattttatctctcctctccctctcccacgcctccgtggtggatttctgcgtacagactacacaggccccaatggccccgcaggttactcatgcaagagcccagcaaaggtcacggtggacgacttcgtctactccggccttggcaccgccggcaacacctcaaacatcatcaaagccgcggtgacgccggcgttcgacgcgcaattccccggcgtca

SEQ ID NO: 121023 - DNA, 268 bp, Glycine max
aattggctcacggcatactttctggtaaatattctgttccggcatttgagaatgatgaaaaagaaaatgttgctacttcaactacaactgctaaacaagaagggatacgtccacatatgtttaaatctttaatagctgccagccatcctgaattttcatctccgaggcaacaggatgctttagaatttttcctacattttcttgatcaagttgagcgagctaatgctgggaaagttgaactggatccatcgacgagtttcaaatttgg

SEQ ID NO: 121024 - DNA, 268 bp, Glycine max
tatgagaagattgtccgtgacacatgccgcgaaattggattcatctctgatgatgttggtcttgatgctgacaaatgcaaggtgttggtcaacattgagcagcagagccctgatatcgcccagggtgtgcacggtcacttcaccaagcgcccagaggaggttggtgctggtgaccagggtcacatgtttggctatgccactgatgaaacccctgagtacatgcccctcagccatgtccttgcaaccaaactcggtgctcgcctcaccg

SEQ ID NO: 121025 - DNA, 280 bp, Glycine max
ctcgagctccgcactccgtcttcatcaatcagcatcaccaccgctccaacacaggggaaaatgagggagatccttcacgttcagggagggcaatgcgggaaccagatcggttcgaagttctgggaagtggtgtgcgacgagcacggcatagatccgacggggaagtacgtcggaaactcagatctacaactcgagcgcgcgaacgtgtactacaacgacgcttcctgcgggcggtttgtcccacgcgcagtgctgatggacctagagcccggaaccatgg

SEQ ID NO: 121026 - DNA, 272 bp, Glycine max
ctccgcaccagtttcaccgcacgaatatcttgttgtttggagcgatccgagaaaaactctgtaaacatgttggtttaccaggacctccttacaggtgatgagcttctctctgactccttccgttacaaggaaattgagaatggaatgctgtgggaagttgaggggaagtgggttgttaaaggagcagttgatgtagacattggtgcaaacccttctgctgagggtggaggagaagatgagggagttgatgatgcagctgttaaggttgttga

SEQ ID NO: 121027 - DNA, 269 bp, Glycine max
cgtttgctacctaaaccctagtctccatacatcaacttgggaggttaaagagacggcaacgttacgctgtccgccttgaccgagccagagcttcgtcttggccctcgattttgccctgtaaaactaatcccagtcacaacagaaataatcaatggcaccgaaacagaccaaggctgagaagaagatcgcttacgatgcgaactgtgcgacctaatggaggagtacggccaaattctcgttgtaaactccgacaacgtgggatcgaacca

SEQ ID NO: 121028 - DNA, 270 bp, Glycine max
cttctccaacatgccaaacgacagcgttctgagtctttgcttcttcgttaccctcttcacatgccttctctctgctaattcccacgatgaccatattttcctaccgagtcaactccatgacgatgactcagtgagttgcactgctaccgacccaaaccttaactacaagccggtgatcggaatcctgacccaccccggcgacggtgcctctggccggctcagcaacgccaccggggtttcttacatcgccgcctcctacgttaaattcgt

SEQ ID NO: 121029 - DNA, 277 bp, Glycine max
aaggaagtcccctaatcagaaccagagatggacaccaaacccaccgagatcagcagcggcaagatgttcggaggttacaacaagagattcaagcatttcagccttaccctgggatgctccatgaacttccacatctacttccctcgcatctccttctccctctcacaaattccctgtgctgtactttctctctggcctcacttgcaccgacgagaacttcatattcaagtcgggtgctcagcgtgccgcttccgccgagggtgttgccttggttgcc

SEQ ID NO: 121030 - DNA, 156 bp, Glycine max
cgcatgcacgcgtcagtattcggctcgagaattgatgtcgttgttcctcctggcaacacagggctcgatccctctcagacctctttcttccaggtgcttaacattcctaccaagattaacaagggtactgtggaaatcattacacctgtggaactc

SEQ ID NO: 121031 - DNA, 241 bp, Glycine max
ttctattacaacatcgcccgcaaccatgaccatggctgcgatcgtgctcctgttcacggtctttgccgtttcctccgccctagacatgtcgataatctcgtacgacagcgcccacgcggacaaggccgccacgttgcgcaccgaggaggagctgatgtccatgtacgagcagtggctcgtgaagcacgggaaggtgtacaacgcgctcggcgagaaggagaagcgcttccagatcttcaag

SEQ ID NO: 121032 - DNA, 264 bp, Glycine max
ctcctcctccctctctcttccaaacacacatcctcacaccatggaggcaccatcttcagagacaaagtcaccatcatcctcactcacgcagcttccgctgaaaccaatcccaggcagctacggaatgccgttttttggagcaataagcgaccgacacaactacttctaccaccaaggacgcgacaagttcttcgcgacgaggattgaaaaacacaactccaccgtgatccgaaccaacatgcctccggggcccttcatctcctc

SEQ ID NO: 121033 - DNA, 267 bp, Glycine max
ctcctcacttgcagaattcaaagaaggcgtcttcataaacgcctttattctccgtttccgtttccttcccggaattcgatttttcatctctgaaaatgagagagtgcatctcgatccacattggtcaggccggtatccaggtcggaaatgcttgctgggagctctactgtcttgagcacggcatcgggcccgatgggcaaatgccaagtgacaaaacagttggcggaggtgatgatgctttcaacactttcttcagtgagactggtg

SEQ ID NO: 121034 - DNA, 269 bp, Glycine max
ctctctctcactcaatggcttggcactcgttgctcgtattagcgacggccattctcgccgttgtgtgctccgccgtgagcggttgctcgccatcggatagggcggcgctgctggcctgacggaaggcgctgcgcgagccctaccttggcctcttcaactcgtggacgggctccaactgctgcctcgactggtacggcatcagctgcgacgccaccaccggccgcgtcaccgacatcaacctccgcggggagtccgaagaccccatcttc

SEQ ID NO: 121035 - DNA, 273 bp, Glycine max
  unsure (1)..(273): unsure at all n locations
cacaagcacaagcacttctctaattccctttcacactctattacagatttcacaagtgcttacacttcaaatggctttggaagctcttcaatcacccaccagagccactccatcgtttagtccctttganganaccagtctcagttacttagagacaccgtggacgaaaggaaagcgttctaagcgtagccgcacggagcaacaactgcaacacccttcatgcaccgaggacgagtacctcgctctttgtctcatcatgctcgctcgcggcgg

SEQ ID NO: 121036 - DNA, 269 bp, Glycine max
agcgaagaggcgcacgttagcagtaactcgtggaattgctagcaatggcgaggatcaaggtttacgagctgaggcagaagacgaaggctgatctgttgaatcagctgaaggacctcaaggccgagcttgccttgcttcgtgttgctaaggtcaccggcggtgcacctaacaagctctctaagatcaaggtggtgaggttgaacattgcccaggttttgacggtgatttctcagaagcagaaggccgcgttgagggatgcctacaagaac

SEQ ID NO: 121037 - DNA, 260 bp, Glycine max
  unsure (1)..(260): unsure at all n locations
gattatttgtttgtttcagtcttctcgccatagctgaggagaccntggcaganntcctttccaaggctactggaactgctgtcgactgggtccagatgattgggatgaagcctggtccggattctattggaatcgttgctgtttcccgcaactgtagtggcgtggcagcacgagcctgcggncttgtgagcctagagcccactaaggttgctgagatactaanagatcgacagtgcgtggtatcgtgatgtcgatgcgtg

SEQ ID NO: 121038 - DNA, 272 bp, Glycine max
gaaccttctgaggttaaagcaaaaaacaaagagagagagagagagaaaatgatgaagccatcgatgctcagatctctccactccgccgccacccgcggcgcctctcatctcttccgccgtgggtacgctgccgagccggtgccggagcgcaaggtagccgttctcggcgccgccggcgggatcgggcagcctctctcccttctcatgaagctcaatcccctcgtttcgagcctctccctttacgatatcgccggaactcccggcgtcgccgc

SEQ ID NO: 121039 - DNA, 274 bp, Glycine max
ataaaagacaacccagagagcgcgtcttaataaacgctcttctctgaaaacccccatttcttttcttctttcttcttctctttcgcttcttcgatcttcgatcttcgtcgctgaaaatgagagagtgcatttcaatccacatcggccaggccgggattcaggttggaaacgcctgctgggagctttactgcctcgaacacggcattcagcctgatgggcagatgccaagtgacaagaccgttggtggaggtgatgatgctttcaacaccttctt

SEQ ID NO: 121040 - DNA, 260 bp, Glycine max
taaaaatggcagcagcctcctccatggctctctcttccccatccttggctggcaaggccgtgaagctgggcccatcagcccccgaagtcgggagggtcagcatgaggaagaccgtcaccaagcaggcctcctccggaagcccatggtacggcccagaccgcgtcaagtacttgggcccattctcatctgagcccccgtcctacctcactggcgagttcccaggtgactacggctgggacactgctgggctttcggccgac

SEQ ID NO: 121041 - DNA, 264 bp, Glycine max
tctgagtattctgatcgctccctgagagagctcgtcgcggcggttgcagaagaagattgcaagatgaagatcaacatcgcgaatcccaccactggatgccagaagaagctcgagatcgacgacgatctgaaactgcgagcattttgggacaagaggatctcacaggaggtcatcggagatgcactcggtgaggaatttaagggctatgtcttcaaaattaccggaggttgtgacaaacaaggatttccaatgaagcagggagtg

SEQ ID NO: 121042 - DNA, 262 bp, Glycine max
cgatcggtccgcctccggtgtgcaccggtcggctcgtcccttctgccggcgatgcgctcctgtccttaactggccgggtcgtgcctccggagctgttacagttgaagaaattagagtgctcaaagcaagcctacgctctgtatacattagcatgggataacaccacaggattctgatcctattgtgttggccttcgggatcggagtaatgattaacagggacagtcgggggcattcgtatttcatagtcagaggtgaaattc

SEQ ID NO: 121043 - DNA, 270 bp, Glycine max
gggagtcagagaaaccctaggtaagaagaaaagatgccggctggtcatggtttgagatcccgcaccagagattccttctctcgtcctttcaggaagaagggaaccatcgccctcaccacatacctgagaacctaccacgtcggcgactatgttgacgtcaaggttaacggtgccgttcacaagggaatgccccacaaattctaccatggccgcaccggacgcgtctggaatgtcaccaaacgtgctgttggcgtcgaagtcaacaagcag

SEQ ID NO: 121044 - DNA, 269 bp, Glycine max
caaaatgaagagcctcctcttctctctcttcctcttcctcttcttagcctcctccgccgtcgccaccgtccccgcccacaacatcacccgcatgctggccgcacaccccggcttctccaccttcaaccactacctctccgtcacccacctggccgaagagatcaaccgccgccagaccatcaccgtcctggccctcgacaatgccgccatgtcctccctcctcgacaagcacctctccctccccaccatcaaaaacgtcctctccctcc

SEQ ID NO: 121045 - DNA, 256 bp, Glycine max
tggtgccagcagccgcggtaattccagctccaatagcgtatatttaagttgttgcagttaaaaagctcgtagttggaccttgggttgggtcgatcggtccgcctccggtgtgcaccggtcggctcgtcccttctgccggcgatgcgctcctgtccttaactggccgggtcgtgcctccggtgctgttactttgaagaaattagagtgctcaaagcaagcctacgctctgtatacattagcatgggataacaccaca

SEQ ID NO: 121046 - DNA, 268 bp, Glycine max
cacactctcatagctgtagcggcgacactaagatcggagaaagaatggcgaaaacgacgtcgttgctgctctttacactgctcctcttcggaaccctagctctcatccaggcgaagaaatcgaaggaggatttgaaggaggtgacccacaaggtttactttgatgttgagattaatggaaaagaagcaggtcgtattgtaatgggtctttatgggaaggctgttccaaaaactgcagaaaacttccgagcactttgcacaggggaaaa

SEQ ID NO: 121047 - DNA, 159 bp, Glycine max
cctcgctctatttctcagtctctgtgtttgcggctgaggattccgaacgagtgaccttcttcgtttctcgcaaagtttaagtaatcatgggtaaggaaaaggttcacatcaacattgtcgtcattggacatgtcgactctgggaagtcacctacactgg

SEQ ID NO: 121048 - DNA, 261 bp, Glycine max
gtaaattttaggcacacaattgatgactgcagagcgccgaaaagctatttgggcaatttatggtatgtctgattagattagattacacactcactgctatttcagcttctccagtgagacttgttttggaattgacaattattcattgtgcattgcagtgtggtgcagaagaactgatgagctagtggatggcccaaatgcttcgcacatcacccccggggccttggacaggtgggagcaacgactgagtgatgtttttga

SEQ ID NO: 121049 - DNA, 257 bp, Glycine max
ctcgagccgaatcggctcgagagcgtaggttggaagcagagagccggaaggttgggacccacgtacgaagtcgacgctgacacagatccctctgctgacgacgaaggcgggtccacgagacggagcggcatggacgcagaggcttaaggaagagtacaaggctctgatagcgtacacgcagatgaacaagtccaacgacaacgattggttccgtatctccgccgccaatccggaaggcactcgctggaccggtaaat

SEQ ID NO: 121050 - DNA, 266 bp, Glycine max
gttattcatttggagggaggaggatggtgtaataccatcagaaactgtgtctatagaaaaaatactcgtcgtggatcctcaaaatacatggaaaatcaaataccattcacgggaatattgagcaacaaacctgaagaaaaccctgatttctttaactggaatagagttaaattacggtactgtgatggagcatctttcagtggagatagtgaagatgagtctgcacagctccagtttcgaggacaaaaaatatggctagctgcaat

SEQ ID NO: 121051 - DNA, 260 bp, Glycine max
caacagcacaaagcgggttactgtctgttcaagctaccatctctctctctctttcttagtgcctccttgccagaagttaaaatggcccaagaaactttcctattcacatctgaatcagtgaacgaggggcaccctgacaagctctgtgaccagatctccgatgctgtgctcgatgcatgcttggagcaggaccctgacagcaaggttgcctgtgaaacctgcaccaagaccaacatggtgatggttttcggagagatcac

SEQ ID NO: 121052 - DNA, 263 bp, Glycine max
ggaagttattgctgaccttaaggcagctggtgcttcatggattcaatttgatgagcctacccttgtcttggaccttgaatctcacaagttgcaagctttcactgacgcatatgcagaacttgcacctgctttgtctgatctgaatgttcttgttgagacctactttgctgacatccctgctgaggcgtacaagaccctcacatctctgaatggcgtcactgcatatgggtttgatttggtccgtggaacccatactcttgatt

SEQ ID NO: 121053 - DNA, 265 bp, Glycine max
gtttcttcctttctctgctctttgccttctctgacacatttggtgccttgtagagcgtgttttggcaggaaggtggtatggcgaaggacgttgaggttgctgagcgtggctccttctctgggaaggactaccaggaccctccaccagcaccactcattgatgctgaggagctcacaaagtggtccttttacagggctctcattgctgaattcattgccactttgctcttcctctacattactgtgctcacagtcatagggtacaa

SEQ ID NO: 121054 - DNA, 266 bp, Glycine max
gattatcctaagtctttgggaatagtgctgcaatggcttcaagtcaggaggaggtgacccttttgggagctactggaagcccatttgtgtgcagggttcatattgccctcaagttgaagggagttcaatacaaatatgtcgaagaaaatttgaggaacaagagtgaactgcttctcaaatccaacccagttcacaagaaggttccattgtttattcacaatgagaagcccatagcagagtctcttgtgattgttgaatacattgat

SEQ ID NO: 121055 - DNA, 258 bp, Glycine max
ggcttatggtggatacctaggcacccagagacgaggaagggcgtagtaagcgacgaaatgcttcggggagttgaaaataagcgtagatccggggattcccgatataggtcaacctttcgaactgctgctgaatccacgggcaggcaagagacaacctggtgaactgaaacatcttagtagccagaggaaaagaaagcaaaagcgattcccgtagtagcggcgagcgaaatgggagcagcctaaaccgtgaaaacgggg

SEQ ID NO: 121056 - DNA, 255 bp, Glycine max
caaatttgaactttctggcattcctcctgcccccaggggtgttcctcagattactgtgtgctttgacattgatgccaatggtattttgaacgtctctgccgaagataagaccactggccagaaaaataagatcactatcaccaatgacaagggtagactgtcaaaggaagatatcgagaagatggttcaagaggctgagaagtacaaatctgaggatgaagagcacaaaaagaaggttgaggccaagaatgcttt

SEQ ID NO: 121057 - DNA, 264 bp, Glycine max
cggtgagtgagtgagagacggaaagtgcaaagccaccgtcttctcttctcagagcttggctttgcttatcgattctctctcctctcatctttctcattcaaggtttgtaaaagatggccgatgctgaggatattcaaccccttgtttgtgacaatggaactggaatggtcaaggctggatttgctggtgatgatgctcccagggctgtctttcccagtattgttggccgacctcgacacactggtgttatggttgggatgggtc

SEQ ID NO: 121058 - DNA, 264 bp, Glycine max
ctctgtcaacctttacactcctcatctactacacgtcgcagctttttacacactccaccgctgcttccccttcacatccgatttcgttaatcagagatcaaaatgtctcgaagatatgacagccgtacaacaatcttctccccggaaggacgtctttaccaagtggaatatacaatggaggctattgggaatgctggtaccgcaatagggatcttatcaaaagatggggtagtgctggttggtgaaaagaaggtcacatccaag

SEQ ID NO: 121059 - DNA, 261 bp, Glycine max
ccgcgatgaggtttggtacaataatgttcctcaccctcgtcttgagaaagatatagggggtcaaaactggattaccagaggcaaggataagtttaggtttcctgggggtggtacgcaatttatacatggagcagatcaatacttggaccatatttctgagatggttcctgatattaagtttgggcaaaatataagagttgctcttgatgttggctgtggtgtagctagttttggcgcatacttgttgtctcgaaatgtcat

SEQ ID NO: 121060 - DNA, 264 bp, Glycine max
  unsure (1)..(264): unsure at all n locations
gnaaaaaatcatgggcagaaaattcttcgtcggtggcaactggaaatgcaatgggaccactgaggaggtgaagaagattgttactactttaaatgaagctaaagtccctggagaagatgttgtagaagttgttgtgagccctccttttgtgttccttccttttgtaaaaagtttgctgcgccctgatttccatgtctcggcccaaaattgttgggttcgcaaaggtggtgctatactggagaggttagtgctgaaatgcttgtt

SEQ ID NO: 121061 - DNA, 214 bp, Glycine max
ggtttttgatgacctgttgcttacctcctctggcgcttgatgggcgttttatacgtaaatgcaagcaagggtgcttgcagtttgtgattttgaagcccattttagttgttgttacacttatactttatgcaaagggaaaatataaggatggaaatttcagtccaaagcaatcatacttgtatcttacaatcatcgatacattctcatacacaat

SEQ ID NO: 121062 - DNA, 251 bp, Glycine max
cctttctctcgttttttctcagaaccttctgaggttaaagcaaaaaacaaagagagagagagagagaaaatgatgaagccatcgatgctcagatctctccactccgccgccacccgcggcgcctctgctctcttccgccgtgggtacgcctccgagccggtgccggagcgcaaggtagccgttctcggcgccgccggcgggatcgggcagcctctctcccttctcatgaagctcaatcccctcgtttcgag

SEQ ID NO: 121063 - DNA, 249 bp, Glycine max
ctcgagccgaatcggctcgagcaaccctaacgcgtgcagagcagaagtagacgcagccatgagtcgaagacccgcgaggtgactataggcaaattaagaacaaaccataccccaagtcacggttttgccgtggtgttcctgatcccaagctcaggatttacgatgttggtatgaagaagaagggtgttgatgagtttcctttctgtgtccatctggttagttgggagaaggaaaacgtttctagtgagg

SEQ ID NO: 121064 - DNA, 252 bp, Glycine max
atttggtttatctcaccgcggattcggagactgtacttgaggagcttgatttgaacaaggtttatgttattggcgggttggtggataggaaccggtggaaggggataacgttgaagaaagcagaggagcaaggtatcccgacggctaaactccccataggaaatttcatgaagatgtctagttctcaggttctcactgtgaatcaagtggtagaaatactactcaagtatttggagacaagggattggagaa

SEQ ID NO: 121065 - DNA, 262 bp, Glycine max
cttcttcaacgtcctcttacgagcagatcccaattcaccttcccagtttcaaaccctaattccctcattcccatggcctcagaagagcccactgtcgcggtggaacccgctcccgaacctgccaccgccgagcctcccccggaggagaaggaggagcccaaacctgaagccaaggctaagaaaaccaaggaacccaaacctaaaaaggtttccagaccacgcaaccctcccactcatccttcctacgaggagatgattaaag

SEQ ID NO: 121066 - DNA, 259 bp, Glycine max
ggcatctgcagtgcccgcgacggggcgagagttgtcgaatcctccatcggacggcatcaccaatcttcgattctccaatcacagcgatcatctgttggtgtcctcatgggacaagagtgtccggttgtatgatgcgagtgcaaatgtgttgagaggagagtttatgcacgctggtcccgtcctcgattgttgcttccacgatgattcctccggcttcagtgtcgccgccgacaacactgttagaaggttgtcttcagct

SEQ ID NO: 121067 - DNA, 259 bp, Glycine max
caaggcagaaagcaagctcatcctagagttttaaaaatggcagcagcctcctccatggctctctcttccccatccttggctggcaaggccgtgaagctgggcccatcagcccccgaagtcgggagggtcagcatgaggaagaccgtcaccaagcaggcctcctccggaagcccatggtacggcccagaccgcgtcaagtacttgggcccattctctggcgagcccccgtcctacctcactggcgagttcccaggtgact

SEQ ID NO: 121068 - DNA, 261 bp, Glycine max
aagcaacaaaaccaagacgaagaagagagggttccattcgtgggcgtgaacatcggcaccgacgtctcgaaccttccagcagcctcggacctggtcgcgttccttcaactgcagaagataacacacgttcgcgtctacgatgcgaaccaggacatcctcaaagccctgtcggggaccaagattcgcgtcatcatcagcgtcccaaacaaccagctcctggcgattggttcctccaactccaccgcggcctcctggatcgac

SEQ ID NO: 121069 - DNA, 274 bp, Glycine max
accagctcaccgacgaccagatcgccgagttcaaggaggccttcagcctcttcgacaaggacggcgatggttgtattactactaaggaacttgggactgtgatgcggtcactagggcaaaacccaactgaggcagaactgcaggatatgattaatgaggttgatgctgatggcaatggaaccatcgacttcccaaagttcctcaacctgatggctcgcaagatgaaagacaccgactccgaggaggagcttaaggaggctttccgtgtgtacga

SEQ ID NO: 121070 - DNA, 266 bp, Glycine max
gcagacacaacgaatcgtgaatggtgcactgttcctgatgactctgggtggtaacgacttcgttaacaactattttctcactcctgtctctgccaggtctcgccaattcactgtcccccagtattgtcgttacctcatcaccgagtatcgtaaaattctcatgaggttgtatgagttgggtgctagaagggttcttgtgaccggaactggtccattgggctgtgttcctgctcagcttgctacaaggagtagtaacggagagtgcg

SEQ ID NO: 121071 - DNA, 267 bp, Glycine max
ctcatgcttctctttcactcttgtcacattccacaaaaacgaagtactggtacaagggaagaaaaacttagctactaaggaaggatcaaagagaatggctcaagcaatggcatcaatggctggcttgcgtggttcctctcaggctgtgttggaaggtagccttcaggtgagtggctccacacgcttgaatgtggggagtggaagcagggtggcctcagtcacacgtgcagggttcacagttagagcacaacaacaacaagtgagtgg

SEQ ID NO: 121072 - DNA, 269 bp, Glycine max
ctccgccgtaacctccaggctcgcggctccgatctcgtcgttcgagttgggaagcccgaggcggtgctggtggagctcgccaaggccgtcggggccgacgccgtgtacgcgcaccgagaggtctcgcacgacgaggcgaaggcggaggagagggtggaggcggccatgaaggaggagaatgtggaggtgaagtacttctggggaagcacgttgtatcacgtggacgatttgccttttcaattggaggacatgccttccaattacggagg

SEQ ID NO: 121073 - DNA, 271 bp, Glycine max
tcaggggcagtagccgagattccgtgagttgcaaaaatgaagacgattctttccaccgagaccatgaacatcccggacggcgtgagcatcaaagttcatgccaaggtcatcgaagttgagggcccccgcggaaaattggtgcgagacttcaagcatttgaatctcgattttcagctcattactgacgaaaacggtaaaagaaagctgaaaatcgacgcgtggtttggttctcggaaaacatccgccgccattcgcaccgccttgagccacg

SEQ ID NO: 121074 - DNA, 163 bp, Glycine max
cgcaaacatgttggtttatcaggacctccttacaggtgatgagcttctctcggactccttccgttacaatgaaattgagaatggaatgctgtgggaagttgaggggaagtgggttgttaagggagcagttgatgttgacattggtgcaaacccttctgctgag

SEQ ID NO: 121075 - DNA, 265 bp, Glycine max
caggaggttgttttcttagtggaaggaaattgagggtgaaaaaggagagagcagcaattggaggacgatcgatgggcactacagtgtgcgcagttgctgagcctgacagacctctatggttcccaggcagcacccctcctccatggcttgatggcactctacctggagacttcggctttgaccctcttggtcttggatctgacccggagagtctgagatggaatgttcaggcagagctagtgcactgcagatgggcaatgttggg

SEQ ID NO: 121076 - DNA, 268 bp, Glycine max
catttgctcccagtacagagcttaaccgagcttcacaaagatgaatcgggaaaagttgatgaagatggccggttcggttagaactgggggaaagggtaccatgagaagaaagaagaaggctgtccacaagacaacaaccacagatgacaaaaggcttcagagcaccctgaagagaataggggtgaatgccatcccggctattgaggaggtcaatatctttaaggatgacgtagttatccagtttctaaatcccaaagttcaagcatcc

SEQ ID NO: 121077 - DNA, 263 bp, Glycine max
  unsure (1)..(263): unsure at all n locations
cgacgctgaggacccttctcagctcatcgccgccgagcaactcaaggcggcggctgctgtggcggctgccaccgccgctccnaagaaggcgccggctcagcagatcaagccggctcagctccctagcaagcctcttcctccggctcaggctgtgagggatgccagaaatgagtctnttcgtggaggccgtggaggtggacgaggtgggggacgtggatttggacgtggtcgtgggtttagtcgtgactcttccaatgacgaga

SEQ ID NO: 121078 - DNA, 261 bp, Glycine max
aatggctcccaagggtttaacctttctggctgtgttaatatgcgtttcagcactgtcactgagtccttctgttgcgggggaagggcaaaataatggccttgttatgaacttctacaaggaatcatgccctcaggctgaagacatcatcacagaacaagtcaagcttctctacaagcgccacaagaacactgctttctcctggctcaggaacatcttccatgactgtgctgttcagagttgtgatgcttcactgttgctgga

SEQ ID NO: 121079 - DNA, 264 bp, Glycine max
gagacgaggaagggcgtagtaagcgacgaaatgcttcggggagtcgaaaataagcgtagatccggggattcccgatataggtcaacctttcgaactgctgctgaatccacgggcaggcaagagacaacctggtgaactgaaacatcttagtagccagaggaaaagaaagcaaaagcgattcccgtagtagcggcgagcgaaatgggagcagcctaaaccgtgaaaacggggttgtgggagagctatacaagtgtcgtgctgcta

SEQ ID NO: 121080 - DNA, 200 bp, Glycine max
cggagctctcgttgtttcggagttagggaccttacgcagccatggccactgctacgaatgccgccgccgccccaccacgccagctctcccagaaggaagctgacatccagatgatgttggccgccgacgtccacctcggcaccaagaactgcgacttccaaatggaacgttacatcttcaagcgccgcaacgacgggatt

SEQ ID NO: 121081 - DNA, 190 bp, Glycine max
cgggcaatgccgcttgtaaagctctttcgtcgagtgcgcgatcatgacaggactcgaggaagaagccccggctaactccgtgccagcagccgcggtaagacggggggggcaagtgttcttcggcatgcctgggcgtaaagggcacgtaggcggtgaatcgggttgaaagtgaaagtcgccaaacactggt

SEQ ID NO: 121082 - DNA, 265 bp, Glycine max
ggctgaacaagtctcaaaacaagctaccacggtgggaatgctgtggactggagagaagccagatgccaaagcagttgaggaaaatatggcatcatatttcaacaccctgcaaggtttccttttactgtcccatggcagtacagtaggtgcagggcccaccttgtcttctgctgttcatgcatccgtcaagcaagtcgttgattccagcttcagattgatgaaggaaactgtctctttatacgggtaccattctaaagacctgaaa

SEQ ID NO: 121083 - DNA, 262 bp, Glycine max
cggtaggggcactggaaggccaaaaactgctccaccagatctgccttctttgctcttggatgctcgaatatgctatctgggtatgccgattcgtaccagctgtgacagaacttattgttgctcaatttatgtggttggattatgataaccctagcaaacctatttacctgtatattaattcatctggaactctgaatgagaagaatgagaccgtgggatcagaaactgaggcatattccatagctgatatgatgtcttatgt

SEQ ID NO: 121084 - DNA, 265 bp, Glycine max
tctctcccgaattattgttcgttcgacccttttacttagtattccctgtttccggtattcgctcccttttttctgcattctggttttccttagatctctgtcccgcaccagatctggtgcagggtgagagggttgggttcattacttttgtatcaatctgccttctgagcggtaggcgtggggataccagagtcttttcgggaagcaagagagggttctctccgttttcaatagatctctcactgtcttctttttgagggggaag

SEQ ID NO: 121085 - DNA, 264 bp, Glycine max
ggcaagcgcttctcctctttgtgttctggctatgcttcttggcaagagttagatcggacgaggattgcgtgtacacggtgtacgttcggacgggttcgatcatcaagggaggcaccgattcagtaattggtctgaagctatacgacaagtccggctacggcatatacatcaccaacctcgaggcatggggcgggttaatggatccgggtcacaactactacgagcggggcaacctcgacatattcagtggtagaggcccttgct

SEQ ID NO: 121086 - DNA, 180 bp, Glycine max
gccgtccaaaaccatttatagggttctcttgtctttgccacgaaaatgagagagtgcatgtcaatccacattggtcagaccggtatccaggtcggaaacgcctgctgagaactctattgccttgaacacggcattcagcccgaagggcagatgccgagtgacaagaccgttggaggtgga

SEQ ID NO: 121087 - DNA, 267 bp, Glycine max
gcggaataacgaagcctcctcgttcttcttcttccgccctttctctctctagaaccgtacggtcgtttctttctctctcctcaaccggagacagcgtcgccttcttttctgaatctcgcggtgttgttagttctgcggcggttgtagttccggcggcgatgggacagcaatcgtggatctacagcttcgtcgctcgcggcaccgtgatcctagcggagtacaccgagttcacgggaaatttcaccagcgtggcggcgcagtgcctcc

SEQ ID NO: 121088 - DNA, 187 bp, Glycine max
cctcgagccgattcggctcgaggccgagactcggagatccacgggatccgttaagtggttcaccgcgcacaaaggtttcggcactcataactccccaagatggaaccgatgatctcttcgtgcacttcacttccatccgatccgacggctaccgttctttgtccgacggtcagtccgttgagtttct

SEQ ID NO: 121089 - DNA, 249 bp, Glycine max
ctcttaaggaaggaatgggtggtggtggcggtggccatgatccatttgatatcttcagttctttctttggtggaagtccgtttgggtcaggtggtagcagtagaggacggaggcagagacggggagaagatgtggttcatcccctgaaggtctctctggaggatctttacctcggaacatctaagaaactctctctttcacgaaacgtgctgtgttcaaaatgcattggaaaggctccaagtctggggc

SEQ ID NO: 121090 - DNA, 264 bp, Glycine max
ctccgcactccgtcttcatcaatcagcatcaccaccgctccaacacaggggaaaatgagggagatccttcacgttcagggagggcaatgcgggaaccagatcggttcgaagttctgggaagtggtgtgcgacgagcagtgcatagatccgacggcgaagtacgtcggaaactcagatctacaactcgagcgcgtgaacgtgtactacaacgaagcttcctgcgggcggtttgtcccacgcgcagtgctgatggacctggagccc

SEQ ID NO: 121091 - DNA, 259 bp, Glycine max
ccgaaaatgtatcagggctcaagtgattcaccgaagcgacgagaccttgaaagttgctttttcaagtgtcagtagcgggacgttctgtcaatcggggaaggtttttggtgacaacacctggagatatcagaagtgagaatgctgacatgagtaacgataaatcctgtgaaaaacacgatcgcctgccagtggaaggctttctgcgttcagtcaatctacgcagagtgaatcggtccctaaggaagccccgaccccgaaa

SEQ ID NO: 121092 - DNA, 245 bp, Glycine max
cttgcagtcatccaatttaaagagctttaccttgtcagaactgaagacggccactagaaatttccgtccagatagcgtgttaggagaaggtggttttggatcagtttttaaggggtggattgatgagaattcattgaccgctaccaaacctggcactggcattgttattgctgttaaaagactgaatcaagatggcatccagggtcacagggagtggttagctgacagtaactatgctggacagc

SEQ ID NO: 121093 - DNA, 150 bp, Glycine max
cgagttggggtcatgctcaatgatgggcagagtcggttctcgattaatgggaagcctatttatcatttcatgggaacatccacttttagtcaatacactgttgttcatgatgttagtgtagctaagattgacccgaaggcacctctggag

SEQ ID NO: 121094 - DNA, 173 bp, Glycine max
ctcatggccacctctgctattcagcaatcagcattcgcaggtcaaactgctctgaagcagctcaatgagttggtccgcaagaccggtggcgccggcaaaggtcgcaccaacatgcgccgtaccgtcaagagtgctcctcagagcatttggtatggccctgatcgtcccaagta

SEQ ID NO: 121095 - DNA, 257 bp, Glycine max
tgactgtgaagcaagaatagcaaaatttttaggaacccctgaatcaattctgtactcttatggactttccaccatgttcagtgcaattcccgctttctctaaaaaaggagatgtaattgtggcggatgagggagtccactggggaatacagaatggcctttatctttctagaagcacagtggtgtattttaagcacaatgacatggattctttaagagaaactttagagaacattactgccaaatataagaaggcca

SEQ ID NO: 121096 - DNA, 257 bp, Glycine max
ggagttcgggtcatgctcaatgatgggaagaatcggttctcgattactaggaagcctatttatcatatcatgggaacctccactgttagtcaatacactgtagttcatgatgttagtgtagctaagattgacccgaaggcatctctggagacagtttgtcttcttggatgtggtatttcaactggccttggagctgtctggaacactgcaaacggggagtcagggtccatagtggctatttcaggcctgggaactgt

SEQ ID NO: 121097 - DNA, 259 bp, Glycine max
atggggtttgaggaaactgagctaaggcttggactgcctggaaacgtaggaggcactggcactgaagaagtgctcatcaggaagagcggtttctctgagactgaaactgaaactgaggaggatgagtctgctaccactgtggatttgatgcttaatctttcttctaaggaagctgctgctgctgcagatccaactgataagcacaagactttgcctaaggagaagactcttctgcctgcagatcctgctaagcctccag

SEQ ID NO: 121098 - DNA, 165 bp, Glycine max
tgcaattgaagttgaagtcttgcccttctctcttcaactccaaacacaagacatcatcatccatggctgcctccgtctccactgtcggagctgtcaacagagctcttttgaacctgaatgggtctggacctggggtttcagctcccagttcatccttctttggga

SEQ ID NO: 121099 - DNA, 199 bp, Glycine max
cgaagctactggaattcatgaaacgacatacaattccatcatgaaatgtgatgttgatattaggaaggatctgtatggaaacatcgtgcttagtggagggtctactatgtttccgggaattgctgatcgcatgagcaaggaaattagtgctcttgcacccagtagcatgaaaatcaaggtggttgcacctcctgagaga

SEQ ID NO: 121100 - DNA, 208 bp, Glycine max
ctagtttcacaatttccaaatggctaggggattgaagaagcatctcaagaggctcaatgctcctaagcattggatgcttgacaaactgggtggtgcatttgcgcccaaaccctcatctggaccacacaaatctagggagtgccttcccctcatactcatcctacgaaaccggctaaagtatgctctgacttaccgtgaagtcatcgct

SEQ ID NO: 121101 - DNA, 258 bp, Glycine max
cttcttcgtctcaaacctcttcgttccttcgattcattccatttcttccaaaatggccaaagacccagttcgcgttctcgtcactggagccgcagggcaaattggatatgctcttgtccctatgattgctaggggagtgatgctgggtcctgaccagcccgtgatcctccacatgcttgacattcctccagcagcagagtcgttgaatggggttaaaatggaattggtggatgctgcattccctcttcttaaaggtgt

SEQ ID NO: 121102 - DNA, 260 bp, Glycine max
tccatgcgcccaccggttattctcaaaactaccacctctcttttggattcttcttcttcttcaccaccctgtgatcgcagactcaacactctcgctagacacttccttccgcaaatcgcttctcacgacagcatctccgcttctccaacctccgcttctgattccgtcttcaatcacctcgttcgtcctcccgaagatcctatcctcggggtaactatcgcttataacaaagatccaagtccagttaagctcaacttggg

SEQ ID NO: 121103 - DNA, 250 bp, Glycine max
ctctttcaaccttaacactcctcacttcgtttccgtcgcagctttttacacactccaccgctgcttccccttcacctccgatttcgttaatcagagatcaaaatgtctcgaagatatgacagccgtacaacaatcttctccccggaaggacgtctttaccaagtggaatatgcaatggaggctattgggaatgctggtaccgcaatagggatcttatcaaaagatggggtagtgctggttggtgaaaaga

SEQ ID NO: 121104 - DNA, 249 bp, Glycine max
cccttcccaacaacaacaagaacatgccttctgcagaagcttcctccgaaaccatttgtgtcaccggcgctggtggcttcatcgcctcttggatggtcaaactcctcttggaaaaaggctacactgtccgaggaaccctcagaaatccagatgatcccaagaacgggcacttgaaggagtttgaaggagcctccgagaggttaactctgcataaggttgacctccttcatcttgactccgttagatcag

SEQ ID NO: 121105 - DNA, 258 bp, Glycine max
ctagtctgcatggccatctttcggcatttaaggttgttatttggtggccttccctccgacccagctgcagcagaaactataagtaaccttgcgagggttgtttcgaggtgcattcgtgaaatggatctaggtgcagtaagtgcttgtctagcagcagttgtttatacttccgagccgcctcccctacgtccccttggaagttctgctggagatggggcttcccttattctagtgtctgtgcttgagagggcaactgaa

SEQ ID NO: 121106 - DNA, 259 bp, Glycine max
acaccacctcgcactcgcagggacagagagtggggaaggacaaacacagactaaatggcgccaaatgctctctttctcttctctttcctcgccatgctcctccttctgctccgctcaaccgccgccggccacaactaccgcgacgccctccgcaaaagcattctcttcttcgaaggccagcgctccggcaaactccccgccgaccagcgcctccgctggcgccacgactctgcattgcacgacggcgccaccgccggag

SEQ ID NO: 121107 - DNA, 253 bp, Glycine max
gaatttgccaaagctctacgcaagttgaaaggctttacaagggctggtttggtagctgagttagatctagaagatgttgaacttactgagaagtatcaatctgatacactagccgacggggtgcgcttgtccaattgggtgattcaagatggcagcccatcacttcatggaatcgttcacgagaggctccttgctatgtatatttgtgccggtcatggaattgaggctgagaggcagttgtgggagatgaagc

SEQ ID NO: 121108 - DNA, 255 bp, Glycine max
ccggcgactgagtcgcggtctcttcccaactcggaactcagtccattccgcatttctcttcaaaccaaatttcttctgaagaaggagatttgaattcagaattgagtgagaagaagagaatagaaatgggctccgaattgattttcagaggccacgaggctcagcccgtggacgactcgtactcgccgaagccccacaagccctggttcaccgtgactcgccggattcactacatgctccgcgagcagcgactcg

SEQ ID NO: 121109 - DNA, 214 bp, Glycine max
cgcatctgcagtgcccgcgacggggcgagagttgtcgaatcctccatcggacggcatcaccaatcttcgagtctccaatcacagcgatcatctgttggtgtcctcatgggacaagagtgtccggttgtatgatgcgagtgcaaatgtgttgagcggagagtttatgcacgctggtctcgtcctcgattggtgcttccacgatgattcctccggc

SEQ ID NO: 121110 - DNA, 205 bp, Glycine max
ctttttgatgttgccagtccagaggcatgtgcagcaatcttgtggaagacagcgaaagcttctccaaaggctgctgagaaattgaagattacagccactgaactgtgcaaattacaaattgcagatggtgttatacctgagccacttggtggtgcacatgcagatccagagtggacctctcaacagataaaaaaggctatcaaag

SEQ ID NO: 121111 - DNA, 149 bp, Glycine max
ggaaagttgggggtaaattggaggataccgagttgatctatggaattgttgtggacaaggatatgagtcatcctcaaatgcctaagcaaattgaggatgctaaaattgctatcctcacttgcccctttgagcctcccaagccaaagacc

SEQ ID NO: 121112 - DNA, 265 bp, Glycine max
ggcttatggtggatacctaggcacccagagacgaggaagggcgtagtaagcgacgaaatgcttcggggagttgaaaataagcgtagatccggggattcccgatataggtcaacctttcgaactgctgctgaatccacgggcaggcaagagacaacctggtgaactgaaacatcttagtagccagaggaaaagaaagcaaaagcgattcccgtagtagcggcgagcgaaatgggagcagcctaaaccgtgaaaacggtggttgttt

SEQ ID NO: 121113 - DNA, 262 bp, Glycine max
ctttccttttcactgagtataagtacgtgggaatcttcatggtggctttcgccattttgatattcctcttccttggctctgtggaaggattcagcacaagctaccagcgttgcacctatgaccacactagaatgtgtaagccagctcttgccactgctgttttcaggaccatatctttcctgcttggaggtgtcacatcgcttatttctggattccttggaatgaaaattgcaacttatgccaatgcaagaaccaccctgga

SEQ ID NO: 121114 - DNA, 262 bp, Glycine max
cggctcgaggtttgcggctgaggattccgaacgagcgaccttcttcgtttctcgcaaagtttaagtcatcatgggtaaggaaaagactcacatcaacattgtcgtcattggacatgtcgactctgggaagtcaactaccactggtcatttgatctacaagcttggaggtattgacaagcgtgtgattgagaggttcgagaaggaggctgctgagatgaacaagaggtcattcaagtatgcctgggtgcttgacaagctcaag

SEQ ID NO: 121115 - DNA, 262 bp, Glycine max
ggacgccgatgaaggtcgccggcgccgagaggataccatggtggagatccgaaagaaccgtagggaagagagtttgctgaagaagagacgcgagggtctccaatcccagcagattccttcgtcacttcactctactgtaattgagaagaagttggaacaccttccagccatggttactggtgttttcaccgatgacaataacatgcagtttgaggccacaactcagtttcggaagttgctttcgattgaacgtagcccacct

SEQ ID NO: 121116 - DNA, 260 bp, Glycine max
cccgcctagccattgatttggaaaagtccaagcttcaaagatgagtaagcttcagagtgatgctcttagagaagctatctcaggaatcatgactgattccaaggaaaagaacaggaaatttgtggagaccattgaactccaaattgggctgaaaaactatgatccccagaaggacaagcgttttagtggctctgttaagttgcctcacattcctcgccccaagatgaagatttgtatgcttggagatgcccaacacgttg

SEQ ID NO: 121117 - DNA, 257 bp, Glycine max
gaaatcccatattttccccccacattaactcacccaacccctctttctaaaaggcctcaaggatacactccggacttaattacgttattttgttagggtcaccgtttcgagatattctaaacttgtactgaaaaatatggagggaaaagaagaggacgtaagagttggagccaacaggtacggagagaggcagccaatagggaccgctgctcaggctaaagactacagagagccaccgtcggcgcctctcttcgaac

SEQ ID NO: 121118 - DNA, 254 bp, Glycine max
cagctccattatttgatcaagagtcacaaactctaaagcctcgatgcgtgcgagccttgaagtcaatttttatcctttgtgatcatgacagagatggtgccctcagtgatgctgagctgaatgattttcaggttaaatgtttcaatgctcctttgcaaccatctgaaattgtgggtgtaaagaaggttgtacaagaaaaattgtctgaaggggtgaatgaacgtggacttactttgactggattcctatttctt

SEQ ID NO: 121119 - DNA, 252 bp, Glycine max
cgaagactctgacggcggcgtcacccaccactccccaacccaagtcctcaagaacttcaacgagattcgccttctccggatcgagctccccagcggcgagctaggcatcgaagacggtgtgctcctcaaatggcgcgccgatttcggatcgaccctagacaattgcgtcatcctcggcgcctcctccgttttccaccctaaagacctaaccgaccccaccaccaccaattgcaacgcaaacgacgacaatgg

SEQ ID NO: 121120 - DNA, 254 bp, Glycine max
aacaaaatgaacaacctcttctttctcttcttcttcctcatcttagcctccgccgccgccagcgtccccgctcacaacatcacccgcatgcttgctaaacaccccggcttctccaccttcaaccactatctctccctcacccagctcgccgcagagatcaaccgccgccagaccatcaccgtcctggccctcgacaatgccgccatgtcgtccctcctcgacgagcatctctcccctctgatcatcagaaacgt

SEQ ID NO: 121121 - DNA, 254 bp, Glycine max
ggaggatgagtctccttgtatttttggttcaattgaaaagcagagatggtcctatgcctgtgctaagcagttgattgagaggcttgtttatgctgagggtgctgaaaatggcttggaattcacaattgtgaggccttttaattggattggaccacgaatggatttcattcccggcattgatggcccaagtgagggtgttcctcgggttctggcatgctttagcaataatctcctccgtggagagcccctcaagc

SEQ ID NO: 121122 - DNA, 261 bp, Glycine max
gtttgggagggcaccgaagaagagcgataatacgaggtactacgaaatcctcggcgtctcgaagaacgcttcgcaggatgatctgaagaaggcttacaagaaagccgccatcaagaatcaccctgacaagggcggtgatcccgagaagtttaaagagctggcacaagcatatgaggttctgagtgaccctgagaagcgtgagatatatgatcagtatggtgaagatgcgcttaaggaaggaatgggtggtggcggtggcat

SEQ ID NO: 121123 - DNA, 261 bp, Glycine max
cgcctcaggccggcgaggtccgtgtccaaatcctcttcaccgctctctgccacaccgatgcttacacttggggcggcaaggatcccgaaggtctcttcccctgtattcttggccatgaagctgcagggattgtggagagtgttggagaaggtgttactaatgttcagcctggggatcatgtcattccctgttatcaggctgagtgtggggagtgcaagacttgcaaatcagggaagacaaacctatgcggcaaggttcgtt

SEQ ID NO: 121124 - DNA, 259 bp, Glycine max
cttgccatggcagcaatgtccgattcggttcgttccctcgcacttctctcccttgcagtgatgtgtagcgtcgcgaattcgatgcggttcgaccttcaatcgggtcaaaccaagtgcatttcagaggacattaagactaacgcgatgagcgtgggaaagtacagtgtcgttaatccccaagaaggttacccacttcccgattcccacaggatcattgtcaaggtgacgtcgcctcatgcgcacacatatcactttggag

SEQ ID NO: 121125 - DNA, 256 bp, Glycine max
caaccctcttcttccccaccatcacaccaatcaaacctcactctccctttctcccctgaccctctccctgccatggtcatgggagcctttggccacttcgaaccggtctccaaatgcagcaccgagaaccggtctaaccaaaccgtggcctcggacttggacggcaccctcctggtgtcccccagcgcatatccttactacatgctggtcgccatcgaagccggcagcttcctccgtggccttgtcctccttgcct

SEQ ID NO: 121126 - DNA, 255 bp, Glycine max
caaaaacaatggcgacatcgctctccgtttcgccatctctctctctcaacactctcttcttcgccaaagcgcttcctctatctcgtccctcccttctctctctccctctccccaaatccctcctctctctctccacgcgccgccgcaccttcgccgtccgcgccgaatcccaaaacggcgccgatgccgtccccgcacactacgacttcgacctcttcaccatcggcgccggcagcggcggcgtccgagccgctc

SEQ ID NO: 121127 - DNA, 251 bp, Glycine max
gaaaaaaaaccttaaggcgaaaggcccttgccaagtggctgaaggaaaacattctgagattaggtcctacattcatcaaaattggccagcagttctccactagagtggacagacttcctcaagaatatgttgaccagttgtccgaacttcaggatcaagttcctccatttccctcagagacctctgtagctattgttgaagaagagctgggagctcctttaggtgatatctttgatcagtttgactatgaa

SEQ ID NO: 121128 - DNA, 250 bp, Glycine max
atgaaacccctgaattgatgccattgagccatgttcttgcaacaaaactcggtgctcgtctcaccgaggttcgcaagaacggtacctgcccttggctgaggcctgatgggaagacccaagtgaccgttgagtattacaatgacaatggtgccagggttccggttcgtgtccacaccgtgctaatctccacccaacacgacgagactgtcaccaatgacgaaattgctgctgacctcaaagagcatgtgat

SEQ ID NO: 121129 - DNA, 251 bp, Glycine max
ctctgctagagcctagaagccagaaaactgctgtttctcgacccacacttttgaacttgaaaacttaaaccctagttctctctcttgtctttcttctgcatcttcaaccatgtcagcgatgctgcaacctcagatcattctgttgaaggaaggcacggacacttcgcaagggaagccgcaggtggtgagcaacatcaatgcctgcaccgccgtcggcgacgtcgtccgcaccaccctcggccctcgcggca

SEQ ID NO: 121130 - DNA, 260 bp, Glycine max
cacaaggcagaaagcaagctcatcctagagttttaaaaatggcagcagcctcctccatggctctctcttccccatccttggctggcaaggccgtgaagctgggcccatcagcccccgaagtcgggagggtcagcatgaggaagaccgtcaccaagcaggcctcctccggaagcccatggtacggcccagaccgcgtcaagtacttgggcccattctctggcgagcccccgtcctacctcactggcgtgttcccaggtgac

SEQ ID NO: 121131 - DNA, 230 bp, Glycine max
gtgattgctgtgactcgttcttcttcgtcgtcatcttcttctgtcggtgtgtgggtgactgtgagcgctctcacctgaaaatgtcttgctgcggtgggaactgtgggtgcggaagcggctgcaagtgcggcaacggctgcggatgctgcgagatgtacccagacttgagctagaccgagtcaaccaccaccgagacctttgtcatgggagtggcaccagttaaggctcaa

SEQ ID NO: 121132 - DNA, 257 bp, Glycine max
ggagaacaccgagggatccggatctgcgacgaacggggtgctggctccgccgcgcaaggtggcattgataaccggaattaccggacaagacggttcgtacctgacggaattcctcctggacaaggggtacgaggtgcacggcctgatccgccgctcgtcgaacttcaacacgcagcgcatcgaccacatatacgtggatccccacaacgcccacaaggcccgcatgaagctccactacgccgatctctccgacgcct

SEQ ID NO: 121133 - DNA, 255 bp, Glycine max
caaagtttcttcctttctctgctctttgccttctctgacacatttggtgccttgtagagcgtgttttggcaggaaggtggtatggcgaaggacgttgaggttgctgagcgtggctccttctctgggaaggactaccaggaccctccaccagcaccactcattgatgctgaggagctcacaaagtggtccttttacagggctctcattgctgaattcattgccactttgctcttcctctacattactgtgctcaca

SEQ ID NO: 121134 - DNA, 254 bp, Glycine max
agctagggtattgggagctctcgttgtttcggagttagggaccctacgcagccatggccactgctacgaatgccgccgcagccccaccacgccagctctcccagaaggaagctgacatccagatgatgttggccgccgacgtccacctcggcaccaagaactgcgacttccaaatggaacgttacatcttcaagcgccgcaacgacgggatttacattattaaccttgggaagacgtgggagaagcttcagcta

SEQ ID NO: 121135 - DNA, 249 bp, Glycine max
cacaaagcacaaagcaaagctcatccttgagttaaaaaatggcagcagcttcttccatggctctctcatccccatccttggctggcaaggccgtgaagctgggcccatcagccccagaagtgggaagggtgagcatgaggaagaccgtcaccaagcaggtctcctcaggaagcccatggtacggcccagaccgagtcaagtacttgggcccattctctggcgagcccccgtcctacctaaccggtgagt

SEQ ID NO: 121136 - DNA, 249 bp, Glycine max
caatctcatctccgatctcaaaatgcccgctgtttatggagctcgcttgaccaccttcgaagactccgagaaggagagtgaatacggttacgttcgcaaggtttcaggacccgtcgtcgttgcggatggcatggctggtgctgcatagtatgaactcgtgcgtgttggtcatgttaatctcattggtgaaattattcgtctcgaaggggattctgctaccatctaagtttatgagaactggctggtttg

SEQ ID NO: 121137 - DNA, 253 bp, Glycine max
ccctaggtctccttacacgatacacatcttcatcaagaccctcaccagagagaccatgactcttcaggtggaaagctctgataccatcgacaacgtcaaggcccagatacatgaaaaccgaagcgaattcccccggatcatcaacgtctcatcgtcgccggaaagaagttcgaggaaggtcgtagcctcggcgactacaacatctagaaggagttaacgcatcacctggtgcttcgtctccgtggtggcatgc

SEQ ID NO: 121138 - DNA, 254 bp, Glycine max
ggagattgagtctcgcctgcttccttgtgggctccatgtcattggtgagccaccctcagccttggaagcagttgcaacactagtgaacatagctgcacttgatcgtcccgaagatggtatttcctctctcccatcaatactagctgagactgttggaagaagcattgaggaagtttatagagggagtgacaaaggagtactaaaggatgtagagcttcttcggcagataactgaagcttcgcgtggagcaatta

SEQ ID NO: 121139 - DNA, 258 bp, Glycine max
atttttctcacaccaggcgcacgttagcacaaactatcatggccacggcaacagcagctgccacctcgtcctttatggggacgcgtctcctggaggctcactccggagcggggcgagtgcacgcccgattcggcttcggcaagaaaaaggctcccgccccaaagaaagcctccaggggatcgggccgagacaccgacagacccctttggtatccgggcgccaaagcgcccgaatacctcgatgggagtcttgtcggag

SEQ ID NO: 121140 - DNA, 254 bp, Glycine max
tttaattggcagcttctggaactttgatgccttgttccagccccaacaacacccagcccgtgattcacatgatacattctttttggaaactccttcaacaacaaagatattgccagaggactatgttcagagagtgaagcatgttcatgaatctggtggttatgggtctagagggtatgcatatgactggaagagagaggtagcaaataaaaaccttctgcgaacccatacaactgctgtttcctccaggatgc

SEQ ID NO: 121141 - DNA, 238 bp, Glycine max
ggcgtcttcataaacgcctttcttctccgtttccgtttcctcgttcgaattcgctttttgatctgcgaaaatgagagagtgcatctcgatccacattggtcaggctggtatccaggtcggaaatgcttgctgggagctctactgcctcgagcacggcatcgggcccgatgggcaaatgccaagtgacaagacagttggcggtggtgatgatgctttcaatactttcttcagcgagggg

SEQ ID NO: 121142 - DNA, 255 bp, Glycine max
gtcgctccgcaccagtttcaccgcacgaatatcttgttgtttggagcgatccgagaaaaactctgtaaacatgttggtttaccaggacctccttacaggtgatgagcttctctctgactccttccgttacaaggaaattgagaatggaatgctgtgggaagttgaggggaagtgggttgttaaaggagcagttgatgtagacattggtgcaaacccttctgctgagggtggaggagaagatgagggagttgatga

SEQ ID NO: 121143 - DNA, 253 bp, Glycine max
ctcgaaacggagattcaaagtgggttgcctcacaaggactaccacgacccaccccccgccccattctacgaccccgccgagctccgaaagtggtccttcttccgagccctcatcgccgagttcgtcgccaccctcctcttcctctacgtcaccatcctcaccgtcatcggctacaaccaccagacagccaccgccgccgagccctgcagcggcgtcggcgtcctcggcatcgcttgggcctttggaggcatga

SEQ ID NO: 121144 - DNA, 255 bp, Glycine max
cttggctggcaaggccgtgaagctgggcccatcagccccagaagtgggaagggtgagcatgaggaagaccgtcaccaagcaggtctcctcaggaagcccatggtacggcccagaccgagtcaagtacttgggcccattctctggcgagcccccgtcctacctaaccggtgagttcccaggcgactacggctgggacactgctgggctttccgcagacccagaaaccttcgccaagaaccgtgaactcgaagtgat

SEQ ID NO: 121145 - DNA, 252 bp, Glycine max
gtgaagctaatggctcgcacaggtttaatcttgctggctgtgttatggttctcagcactgtcactgagtcgttgacttgcagacgataatggacttgttatgaacttctacaaggaatgatgcccgcaggctgaagacatcatcatagaacaaggcaagcttctctacaagcgccacaagaacactgctttctcctggctcagaaacatcttccatgagtgagatgttcagagttgtgatgcttcactgttg

SEQ ID NO: 121146 - DNA, 249 bp, Glycine max
gcattcgcggaccttttaagaggctccaaagcgcttccggctttcaaggaaaacgttgacgggggcttaacggttttctgccccaccgacagcgccatcagcggtttcgcgccaaagtacaagaacctcacagaagctcagaaggtttcgcttctgttgtaccacgcgactcccgtatacgagtccctgcagatgctgaaatcgatcaacggaatcatgaacactctggccacagagggagcgttcaag

SEQ ID NO: 121147 - DNA, 249 bp, Glycine max
aaaacactcataacacaaagcacaaagcaaagctcatccttgagttaaaaaatggcagcagcttcttccatggctctctcatccccatccttggctggcaaggccgtgaagctgggcccatcagccccagaagtgggaagggtgagcatgaggaagaccgtcaccaagcaggtctcctcaggaagcccatggtacggcccagaccgagtcaagtacttgggcccattctctggcgagcccccgtcctac

SEQ ID NO: 121148 - DNA, 246 bp, Glycine max
gttctagatctgcactgcaacttccttgtctgacagatcccgtgttccggagaaaggaaaaggcaagaaagatgtcggggcaaacgcagcgtctgaacgtggtccccaccgtgacgatgctgggagtggtcaaggcgcgtctagtcggcgccacgcgcggtcacgcggtcctgaagaagaagagcgacgcgctcacggtgcagttccgccagatcctgaagaagatcgtgtccacgaaagaatcta

SEQ ID NO: 121149 - DNA, 245 bp, Glycine max
catgtggcgtcatacagaagttggaatcccagatgaagtgattactgaggttagatctgatgtaagcctagtggtgagaatggtttcaactgtggccaactacgactatgtcatagattgggaatttaagccaagtggcagcatcaaatctgtggttggacttactgggatattagggcttaaggcagggacttacaccaacgcagaccaaataaaagaggatatttacggcacactaatagcag

SEQ ID NO: 121150 - DNA, 253 bp, Glycine max
gtgtctgattcacaggccagagggcaaagattttgagcacaatggcctcgacacaatgctttttgcaccaccacgccctcaccactccagctagagcttcaacacagcgcctagttgtgagcaccaaaccaaaccacattgtttgcaaggcagcacagaagcaggttactgtccaagagggtgaggacactactactggccttgtctctcgcaggttggccctcactgtgctcattggtgctgctgctgttgg

SEQ ID NO: 121151 - DNA, 246 bp, Glycine max
ggcagaaagcaagctcatcctagagttttaaaaatggcagcagcctcctccatggctctctcttccccatccttggctggcaaggccgtgaagctgggcccatcagcccccgaagtcgggagggtcagcatgaggaagaccgttaccaagcaggcctcctccggaagcccatggtacggcccagaccgcgtcaagtacttgggcccattctctggcgagcccccgtcctacctcactggcgagttc

SEQ ID NO: 121152 - DNA, 246 bp, Glycine max
tctgtggttgctggattccagtgggcatcaaaagaaggtgctttggccgaagaaaacatgagagccatttgctttgaagtatgtgatgttgttctgcacgctgaacctatccacagaggaggtggtcaaatcatccctactgccaggagagtcttctatgcttcccagattactgccaaacccaggcttcttgagcctgtctacctggttgaaatccaggctcctgagcaagctcttggtggaatc

SEQ ID NO: 121153 - DNA, 245 bp, Glycine max
taaacatgtatttccccactgtgtatggcataaagcacctcatgaagttctgcaacagcctccatggaggcttgaacaagctcgctgagttgttggaggtcgagagggttgggattagccatcaggccggctccgatagcttgctcacttcctgtacattcaggaaattgaaggataatttctttagtggctccttggagaagtatgcaggtgtcttgtatgggtttgctgttgagaatggacaa

SEQ ID NO: 121154 - DNA, 246 bp, Glycine max
gcattcgcggaccttttaagaggctccaaagcgcttccggctttcaaggaaaacgttgacgggggcttaacggttttctgccccaccgacagcgccatcagcggtttcgcgccaaagtacaagaacctcacagaagctcagaaggtttcgcttctgttgtaccacgcgactcccgtatacgagtccctgcagatgctgaaatcgagcaacggaatcatgaacactctggccacagaaggagcgaac

SEQ ID NO: 121155 - DNA, 242 bp, Glycine max
ggttgaatagttacgaggataattacaagtttaggagctataaggaagggaaggggttgaaggggtttgtgagagaattgaaggaggagtttgggtcggtggagtacgtgtacgtgtggcacgcgctgtgcgggtattggggaggggtgaggccgggggtggcggggatggcggaagcggcggtggagaagccaaagctgacggaggggttcaacggaacgatggaggatctggcggtggac

SEQ ID NO: 121156 - DNA, 250 bp, Glycine max
caaacccactaagatggcttcctttgtatccttcctagtgctgcttcttgcagcccttatcctcatgcctcaagggcttgctacttactacaaaccaattaacaagccaccagtgtacaagcctccagtgtacaagccaccagtgtacaaaccaccggtttataagccaaaaccaccggtttacaagccgaaaccaccggtttacaagccaccatataagaagccaccatacaagataccaccttatggt

SEQ ID NO: 121157 - DNA, 251 bp, Glycine max
aacaaacccactaagatggcttcctttgtatccttcctagtgctgcttcttgcagcccttatcctcatgcctcaagggcttgctacttactacaaaccaattaagaagccaccagtgtacaagcctccagtgtacaagccaccagtgtacaaaccaccggtttataagccaaaaccaccggtttacaagccgaaaccaccggtttacaagccaccatataagaagccaccatacaagaaaccaccttatgg

SEQ ID NO: 121158 - DNA, 246 bp, Glycine max
tgggaacaagtttgttgccgggggagaagatatgtgggttcacgtgtttgatttccatacagggaatgagattgcatgcaacaaggggcaccatggtcctgtccactgtgttcgtttttctcctggtggagaatcctatgcctcaggatctgaggatggaaccatcagaatatggcagactggccccttgaccctggatggctcggagactgtgtctgcaaatggttcagttgataaggtgaaggt

SEQ ID NO: 121159 - DNA, 245 bp, Glycine max
cttcattgcttcctgtgttgccaagaggaattcaaggccattctccacagccacagggctcaggtgttgagacccccattggatcgcatggtgtctgaatactttgagcgcagtgtgaaggctttagatgtttgcaatgccattcgtgacggtattgagcagattcgccaatggcagaagctgttggagattgtgctctatgcattggggcatcagaggagcattggtgagggccaatttcgtag

SEQ ID NO: 121160 - DNA, 241 bp, Glycine max
cgcaccctctaagatggcttcctttgtatccttcctactgctgcttcttgctgcccttatcctcatgcctcaagggcttgctacttgctacaaaccacttacgaagccaatcttgtacaagcctccaatgtacatgccaccagtgtacataccaccggtttataagccagaaccaccggtttaccagccggaaccaccggtttacaagccagcatataagaatccaccatacgaggaacca

SEQ ID NO: 121161 - DNA, 244 bp, Glycine max
aaaaaagacaacccagagagcgcgtcttaataaacgctcttctctgataacccccatttcttttcttctttcttcttctctttcgcttcttcgatcttcgatcttcgtcgctgaaaatgagagagtgcatttcaatccacatcggccaggccgggattcaggttggaaacgcctgctgggagctttactgcctcgaacacggcattcagcctgatgggcagatgccaagtgacaagaccgttgg

SEQ ID NO: 121162 - DNA, 260 bp, Glycine max
ccttcggaaccataaagcacccctccgaactcgctcacggcgctaacaacggtcttgacatcgctgttaggcttttggagccactcaaagcggagtttcctattttgagctacgccgatttctaccagttggctggcgttgttgccgttgaggtcaccggtggacctgaagttcccttccatcctggaagagaggacaaacctgagccaccaccagagggtcgcttcccgagtccacgtagggttctgacactttagaga

SEQ ID NO: 121163 - DNA, 183 bp, Glycine max
aagcaagctcatcctagagttttaaaaatggcagcagcctcctccatggctctctcttccccatccttggctggcaaggccgtgaagctgggcccatcagcccccgaagtcgggagggtcagcatgaggaagaccgtcaccaagcaggcctcctccggaagcccatggtacggcccagaaccg

SEQ ID NO: 121164 - DNA, 259 bp, Glycine max
tttgttcactcttcttctcttgcggctagggttttagcgcacttcttctagatttaaggaagatgggtaaggaaaaggttcacatcagtattgtggtcattggccatgtcgactctgggaaatccactaccactggtcacctgatttacaagcttggaggcattgacaagcgtgttattgagaggtttgagaaggaagatgctgagatgaacaagaggtctttcaagtatgcctgggtgctggacaaacttaaggctga

SEQ ID NO: 121165 - DNA, 200 bp, Glycine max
cttgctccctcagaagcgaagaagaagccacagagaaccagtctcctactctctctcacccacaagaaaaatggcatctcacatcgttggagacccccgtatgggtcccaagaatgagctcaagttcgctctcgagtctttctgggagtgcaagagcagcgccgaatgatttgcagaagcgtggcatgctgatctcaggt

SEQ ID NO: 121166 - DNA, 197 bp, Glycine max
ggcatccacacaatgcttcttgcaccaccatgctctcaccactccaaccagagcttcatcacagcgcttagttgtgagcaccaaaccagaccacactgtttgcaaggcacaaaagcaggttgtccaagcgtgtgaggatactactatcatctgtctctcgcaggttggccctcactgttctcattggtgctgctgct

SEQ ID NO: 121167 - DNA, 212 bp, Glycine max
ttcatgtcaaaaatggttcatcttggcttcttccttctggggtgtctctccatgatctcatatgctaatggttatgtcagcaatgcgggttggaccaatgcccatgctacattctatggtggaagtgatgcttctgcggacaatggtcggggcttgtggatatggtaccttgtctagtcgaggagtattggacgaacacagcagcacatagc

SEQ ID NO: 121168 - DNA, 257 bp, Glycine max
  unsure (1)..(257): unsure at all n locations
ctttgttcactcttcttctcttgcggctagggttttagcgcagattcttctagatttaaggaagatgggtaaggaaaaggttcacatcagtattgtggtcattggccatgtcgactctgggaaatccactaccactggtcacctgatttacaagcttggaggcattgacaagcgtgttattgagaggctttagaaggaagcatgctagantaacaagagggtcttcaaggagtccntgggtcatgacaaacgttagg

SEQ ID NO: 121169 - DNA, 256 bp, Glycine max
  unsure (1)..(256): unsure at all n locations
caaggctttgttgtcagctcttgtgcctggtttcccaactcaaaacagttcgtgtgtggcagttctgaccctgaaaagggcgtttgcatgtgggattgtgatggaaatgtgataaaatcatggagaggaatgaggatgcccaaggtcgtagatcttgctgttactccagatggtgagtatcttatcagcatattcatggataaagaaagtcggagttctcacatgggaacctantcntagcgaggcagttcagagg

SEQ ID NO: 121170 - DNA, 253 bp, Glycine max
  unsure (1)..(253): unsure at all n locations
ctcgagccggtagctatttctacttcccttctcttggaatgcacaaagctgccggagcaattggtggcatcagaatttggagccgccctctcattcctgttccttttcctcctcctgccggggactttaccatacttgctggagacttgttcaagctcgaccaccgaaggctgagacgacgtcctgagagatgacagaagtgtcccgttccataatgccgtcttantaattgacgcggcttgaagtgaaacac

SEQ ID NO: 121171 - DNA, 257 bp, Glycine max
tgaaggtccttgttttcttcgttgctacaattttggtagcatggcaatgccatgcgtacgatatgttccctctccgaatgaacactggctatggtgcccgtactccggaggtgaaatgcgcaagttggaggcttgctgtggaagcacacaacatctttggctttgagaccattcctgaagagtgcgttgaagcaacaaaggaatccatccatggcgaacaatatagatcagactccaaaacagtgaaccaacaagct

SEQ ID NO: 121172 - DNA, 222 bp, Glycine max
gcaaaaagaaagaatcccaggcgaggagaaagatggaggggaaggagcaggatgtgtcgttgggagcgaacaagttccccgagagacagccgattgggacggcggcgcagagccaagacgacggcaaggactaccaggagccggcgccggcgccgctggttgacccgacggagtttacgtcatggtcgtttacagagcacggatagcagagtttctgccact

SEQ ID NO: 121173 - DNA, 257 bp, Glycine max
  unsure (1)..(257): unsure at all n locations
agacactgcaccaaacaccaacaacgctttagctctctctcttctctccataaccgccaccgggatctggcactaacagatcgccgctgctacatctgaacccgatccagccaacagatctctccaattcaaatggagaatctaatctctttggtcaacaaaatccagagagcttgcaccgccgtaggctaccacggcgataacagctcacgtcccacacgtgtggacgcgcgtcccgccaacgccgncgncggagg

SEQ ID NO: 121174 - DNA, 252 bp, Glycine max
  unsure (1)..(252): unsure at all n locations
cttctccaccttcaaccactatctctccctcacccacctcgccgcagagatcaaccgccgccagaccatcaccgtcctggccctcgacaatgccgccatgtcctccctcctcgacaagcacctctccctccccaccatcaaaaacgtcctctccctccacgtcctcgtcgactacttcggcgccaaaaagcgccaccagagtaacaacagcaccacccncgtcatcgtcangattcaggccaccggcgcagc

SEQ ID NO: 121175 - DNA, 257 bp, Glycine max
catttctactctccaaacactcgaattcgcattctcttcactctttccccaatccatggccaagggagagaagaaaccggcggagaagaagcctccggagaaggctccggcggagaaaacaaaagccgagaagaagatcccaaaggaacccgcctcgggcgagaagaagaagaagaagagaaacaagaagagcgtggagacgtacaagatctacatattcaaggtgctgaagcaagtgcaccctgacatcgggatct

SEQ ID NO: 121176 - DNA, 260 bp, Glycine max
catcagtcagcatcaccaccgctccaacacaggggaaaatgagggagatccttcacgttcagggagggcaatgcgggaaccagatcggttcgaagttctgggaagtggtgtgcgacgagcacggcatagatccgacggggaagtacgtcggaaactcagatctacaactcgagcgcgtgaacgtgtactacaacgaagcttcctgcgggcggtttgtcccacgcgcagtgctgatggacctggagcccggaaccatggac

SEQ ID NO: 121177 - DNA, 250 bp, Glycine max
ccgatggctaatccctcactcttgttcttcagtctcctcctattatccgccaccgtagccgccgccgaacggatcgacgatgaagacgaccttctgatccgtcaagtggtgccggatgcggaggaccaccacctgctcaacgcggacaccacttctccgccttcaagacaaagttcggcaagacctacgccacgcatgaggagcacgaccaccagcttccgtatctcaagaacaacgttcatcgcgccaa

SEQ ID NO: 121178 - DNA, 249 bp, Glycine max
caacactacagacaaagacaacccagagagcgcgtcttaataaacgctcttctctgaaaacccccatttctttgcttctttcttcttctctttcgcttcgtcgatcttcgatcttcggcgctgaaaatgagagagtgcatttcaatccacatcggccatgccgggattcaggttggaaacgcctgctgggagctttactgcctcgaacacggcattcagcctgagtggcagagtccaagttacaagacc

SEQ ID NO: 121179 - DNA, 254 bp, Glycine max
cggcactcgatgcaaaacatgcctgaacctggcaatttcacgcattaagctgctacggaacaagagagatatggaagtgaaacaaatgtgcaaggagattagccagttcttgcaggctggccaagaggcaattgctagaatcagggtggagcatatgatacgggaacaaagtacatgggctgcatatgaaattttggagttgttctgtgaatttgttcttgcacgtgtacctataattgagaatcagagggagt

SEQ ID NO: 121180 - DNA, 255 bp, Glycine max
  unsure (1)..(255): unsure at all n locations
gttggatgaggcgaaactcgagagtgtaaggttttgcatttcatttgacgaagagtgagagagtcttatctgtcgtctctgatctctgatngcatcttcattccgaaaatgggtgantnggctatcantggancgncgntaactctaggggngtctccngcccngtggaggcgancangaannaggcgnaatggccgtatctancgancccaagaccgataacaaactcantcntancaagtccgaggaagcttt

SEQ ID NO: 121181 - DNA, 257 bp, Glycine max
agctccaatagcgtatatttaagttgttgcagttaaaaagctcgtagttggaccttgggttgggtcgatcggtccgcctccggtgtgcaccggtcggctcgtcccttctgccggcgatgcgctcctgtccttaactggccgggtcgtgcctccggtgctgttactttgaagacattagagtgctcaaagcaagcctacgctctgtatacattagcatgggataacaccacaggattctgatcctattgtgttggcct

SEQ ID NO: 121182 - DNA, 249 bp, Glycine max
tgagaattggtggtggagtttttcctgtgataaaggagcctgattaccttgtcaatggagagtatcgtgtagataaaggagcagctccaaagatgttgaactgtcttatgtacaagctgtcctattatcggtttggggagctgacaacagaatatggcaaaccacctgggtatgatcgtgctagagggtgttgaaatggaacataggacattaagccttagcacgttgaagaggcggtcacgacacaga

SEQ ID NO: 121183 - DNA, 222 bp, Glycine max
  unsure (1)..(222): unsure at all n locations
gcagaaagcaagctcatcctagagttttaaaaatggcagcagcctcctccatggctctctcttccccatccttggctggcaaggccgtgaagctgggcccatcagcccccgaagtcgggagggtcagcatgaggaagaccgtcaccaagcaggcctcctccggaagcccantggacggcccagaccgcggcaaggacgttggcccagtcacgtgcgagcccc

SEQ ID NO: 121184 - DNA, 225 bp, Glycine max
atgaaaatgaaggtccttgttgtcttcgttgctacaattttggtatcatggcaatgccatgcgtacgatatgttccctctccgaatggacactggctatggtgcccgtactccggaggtgaaattcgcaatttggaggcttgctgtggaagcacacaacatctatggctttgagaccattcctgaagagatcgattaagcaacacaggaatacaaccattgcgaa

SEQ ID NO: 121185 - DNA, 257 bp, Glycine max
ctcatctctcttcccagccctcacctcaacgctgcatcttcacgtcgtctcacgaggtgcatatagtagagagggaaaatgagtcgaggaggcgcagtagcagcagcgaagggaaagaagaagggtgctacattcaccattgactgtgcaaagccagtggaagataagatcatggacattgcttctctcgaaaagtttcttcaagagaggatcaaggttggtggcaaagctggtgctcttggtgacagtatcactgt

SEQ ID NO: 121186 - DNA, 246 bp, Glycine max
cttcttctcttgcggctagggttttagcgcagttcttctagatataaggaagatgggtaaggaaaaggttcacatcagtattgtggttattggccatgttgactctgggaagtccactaccactggccacctgatctacaagcttggaggcattgacaagcgtgttattgagagatttgagaaggaagctgctgagatgaacaagaggtctttcaagtatgcctgggtgcttgataagcttaaggc

SEQ ID NO: 121187 - DNA, 235 bp, Glycine max
ccataacaacaacaaaaacggactcaagaaggcgaagtccgcgcgagtcagcccggtgagtcggagaaaaccgagtttctccaacggcgaacgatccaactcgttcgtcggcacggaagaatacgtctccccggaggtcgtccgcggcgacggacacgagttcgccgtcgattggtgggcgcttggaatactaatctacgaaatgctatacggtacgacgccgtttacaggaaag

SEQ ID NO: 121188 - DNA, 232 bp, Glycine max
gcatcatggcctcgagagcagtgctattgttggctatgtgtgtgcttccggccatggttgtggccattcggccagcaaagaaccctttttgcgtgaagggtcgcgtctactgtgacccttgccgtgctggttttgagacctcagcaaccacctacattgccggtgctgagattatgttgcaatgcaagagcagggttagcaacgaggttttgcacaccaagaaggggtacac

SEQ ID NO: 121189 - DNA, 163 bp, Glycine max
ggaaaggctctggggtgaaaacttttttgatccagccacaaagaaatggaccagcaagaatagtggttctgctacctgcaagcgtgggtttgttcagttctgttatgagcccatcaagcagattattaacacttgtatgaatgatcagaaggataagctgttg

SEQ ID NO: 121190 - DNA, 246 bp, Glycine max
ctctttgcggagatccaactccgaggatgttgggtctctgggagaaaagcccactatcctggtctccgagaaacttggagaggcagggcagcaggtgttacgtggcgttgggcacgtggaatgcgcgtatgagctctcacaggaggagctatgcacgaagatctcgtgctgtgacgctctgatagtcaggagcgggacgaaggtgacgagggaagtgtttgaagctgggaaagggaggttgaaggt

SEQ ID NO: 121191 - DNA, 249 bp, Glycine max
  unsure (1)..(249): unsure at all n locations
tgtccatagatagcatccgagaaagttcgggagcacccacttttgtgaactgtaggaggcttccttctggttgcgtggtgcaagatatgcccaatggttactccaaggtgacatgggtggagcatgcagaatacgatgaaagtcaagttcaccagctctatagacctttgttgagctcngncatggggtttggtgcccaacgttgggccgnaacccttcaacgccaatgcgagtgccttgccatntaat

SEQ ID NO: 121192 - DNA, 268 bp, Glycine max
aagagaatggctcccaagggtttaatctttttggctgtgttatgcttctcagcactgtcactgagtcgttgtcttgcggaggataatggacttgttatgaacttctacaaggaatcatgccctcaggctgaagacatcatcaaagaacaagtcaagcttctctacaagcgccacaagaacactgctttctcctggctcagaaacatcttccatgactgtgctgttcagagttgtgatgcttcactgttgctggactccacaagaagga

SEQ ID NO: 121193 - DNA, 264 bp, Glycine max
ctcatcattcccacttcccaatatggaatgctgcataatctccaggctcaagacccaacccatatggttcgcgcttctctttattgtgggattgttaacgattctcaaattggcattcgttgttctcagatgggtctacgtcaatttcctcagaccaccgaagaatctcaaaaagtacggatcttgggccgtggttactggacccaccgacggcattggaaagagcttcgccttcgagctcgctcgcataggcttgaacctcgt

SEQ ID NO: 121194 - DNA, 262 bp, Glycine max
tggatttcttctgggacttttcttaatggtcactcatgtcaaggggtatggttttggaggttggaccaatgcacatgccaccttctatggaggtggtgatgcttctgggacaatgggtggggcttgtggttatggaaatctgtatagccaaggttatggaactgatacaacagcactgagcactgctctgttcaacaatggcttgagctgtggtgcatgctatcaaattaaatgtgtgaatgatccacagtggtgccttcct

SEQ ID NO: 121195 - DNA, 263 bp, Glycine max
taaaaccgccacaaatttctccatagttatgggcacttccattctcgacgccctgaacgttcgcgtggaaggttccggcgacaagtaccttgtcctggcccacggcttcggcacggaccaatccgcgtggcagcgcgtgctcccttacttcacccgcaactacagcgtcattctctacgacctcgtctgcgccggcagcgtcaaccccgaccacttcgactaccgccgttataccaccctcgacgcctacgtcgacgacctcc

SEQ ID NO: 121196 - DNA, 262 bp, Glycine max
gctggctgccagcgatagtgaatcagaatcgtaagctcgacaaagaagcaaggttattattctttgtggttgcggaacgaagcatgctgttgctgttcgagaatggatgagttgaacggcgccatgacgacggagaatagcaatgcggaggtggttcgatgggagaggtttctgccgcggatggtgctcagagtgctgcttgtagaagctgatcattccacgcgccaaatcatccccgcgcttcttcgcaaatgcagttaca

SEQ ID NO: 121197 - DNA, 260 bp, Glycine max
gtctgtttccaaacagcaaaggatagcaatgacattcttaactcatgggcagcaaacttggagaaattacttgatcttgtggagaaaagttgtcatcagatacacaaggaaaccatggtccacaaagctgctttgaaggtttaagaaggttcgaatcagcagttactgtcacaggggcatctcaatgatgtgattttgtactgaagttgccttttcaggaaaatgttcttttgaactgtcaccgactgagttggtgagga

SEQ ID NO: 121198 - DNA, 268 bp, Glycine max
gaccgttttccgatcctctttctcctcgccaccctcatcaccctcgcctccggtgcccgccacgatattctccggttaccctccgaagcatccacttttttcaaagcacccggtggcgatcaaaacgatgagggcacgaggtgggccgttttaattgccggttccaatggctactggaattacaggcaccagtctgatgtttgccatgcgtatcaactactgaggaaaggtggtctcaaagaagaaaatattgttgtatttatgtatg

SEQ ID NO: 121199 - DNA, 264 bp, Glycine max
gcagaaagcaagctcatcctagagttttaaaaatggcagcagcctcctccatggctctctcttccccatccttggctggcaaggccgtgaagctgggcccatcagcccccgaagtcgggagggtcagcatgaggaagaccgtcaccaagcaggcctcctccggaagcccatggtacggcccagaccgcgtcaagtacttgggcccattctctggcgagcccccgtcctacctcactggcgagttcccaggtgactacggctggg

SEQ ID NO: 121200 - DNA, 262 bp, Glycine max
cgcttgctctctctctctcgctctttcagctttgactttggtggaaactaaagactagtcaaaatggtgaagttcacagctgaagagctgcgtcgcattatggactataagcataatatccgtaatatgtctgtcattgctcatgttgatcacggaaaatcaaccctgactgattctcttgtggctgctgctggtattattgctcaagaagttgcaggtgatgtccgtatgactgatacccgtgcagatgaagctgagcgtg

SEQ ID NO: 121201 - DNA, 260 bp, Glycine max
cacccatcttctcattaacagattccccaaatcaactctccgcaaactttctagaatatgccaagaaacctgaagtatttgattggatggtgaaaatcagaaggaagattcatgagaatccagaattgggttatgaggaatttgagaccagtaaactcattagagaggaattggataaactgggtgtcccctataaacacccagttgctgtcactggtattattggcttcattgggacaggaaagtcaccttttgttgca

SEQ ID NO: 121202 - DNA, 259 bp, Glycine max
cggagactttgccgaactatacatgttcaaatggaccacccttcttattcctccaacaacccttctcataataaacttggtgggggtggttgctggcatctcctatgccatcaacagtggctaccaatcttggggacccctctttggtaagcttttctttgcattttgggtgatcatccatctataccctttcctcaaaggtctcatggggcgccaaaacagaacaccaaccattgtggtggtgtggtccgttctgctt

SEQ ID NO: 121203 - DNA, 259 bp, Glycine max
atcgaaaagatgcaggcacggcagaattaccggaatttatggcacaccgatctcatgagatccattcaggccgatactccttattgttgcctcgcgttgtggtgtgcaccatgtgtgtcttaccttcttcgcaaacgagctctctatgatgatatgtcaaggtacacatgttgtgctggctacatgccttgcagtggtaggtgtggagaaagtaaatgtcctgaattttgcctttgcactgaggttttcctctgctttg

SEQ ID NO: 121204 - DNA, 257 bp, Glycine max
agaatgtgttggcttcttctccccgacgaactgtggaggcgaattctggagatcggaatcgagagcaacggtttcagttacaaggatctctgctgcgtctcaatctcatgccgccgccttcatcgcctctcctcggaagaacctctttggaaccgtcttctcttctctgactatccccaatcccaatctcaaccttcttcttcttcttcttctacttcttctaaatctctgtacagattaaggtttgagagagacaa

SEQ ID NO: 121205 - DNA, 260 bp, Glycine max
gcgggtctctttagtagtttttattttgggtcgattattttttgggatataggtggtggttttgatatcttcaataaaaaagggaaaaaggtacgttttgttcgttggggatttcctggaaaaaatcgtcgtattattctcgaaatacctatgaacgagcttcactccatcagaataatgacagaagttaaagaagagggtatttttactcgtaccagtacttttgagagtatcgtttatctggaaaccatagaacaggg

SEQ ID NO: 121206 - DNA, 266 bp, Glycine max; identical to SEQ ID NO: 107657

SEQ ID NO: 121207 - DNA, 265 bp, Glycine max
tgtgaagaagcctcatcgttatcgccctggaactgttgctcttcgtgagattaggaaataccagaagagcactgagctcctaatcaggaagcttcctttccagaggttggttcgtgaaattgcccaggatttcaagactgatctgcgtttccagagccatgctgtgcttgcattgcaagaggctgctgaggcataccttgttgggctctttgaggacactaacttgtgtgccattcacgccaagcgtgtgactattatgcccaag

SEQ ID NO: 121208 - DNA, 258 bp, Glycine max
gctagcaccacattcacctgaggcttccaaagcaatggcttcccttgcagcatccactgctgctgcttcccttggcatgtcagaaatgcttggaaaccccatcaacttcagtggtgccacaaggccagctccatctgcttctagtcctgcctccttcaagactgtggctcttttctccaaaaagaaggctacaccaacacctccaaaaaaagctgctgctgctgctcctgccaatgatgagcttgccaagtggtatgg

SEQ ID NO: 121209 - DNA, 258 bp, Glycine max
gccgggggcgccgcacccgccaccctcgcccagctcgaggtccaccacggcagcaacgactacgcctcctacggcgtcacctcgtcgacggttttaacgtccccatgaccttcaccccgcacgagggcaaaggcgtgtgccctgtcgtgggttgccgcaacgaccttctcgccacgtgtccgcgcgtgctgcagcaccgtgtgcccgcgggtcacggacccgtggtggcttgcaagagcgggtgcgaggcttttcaca

SEQ ID NO: 121210 - DNA, 258 bp, Glycine max
ctcaagtccaacctacccctttttcttctcccaccaacttcaccgtcttcttcctcgatcatgtctcacttcaagggcaagtaccatgatgagcttattgccaatgctgcttacattggcactcctggaaagggtattcttgctgctgatgagtcaacagggacaattggcaagcgtttggccagcatcagtgtagagaatgttgaatccaacaggcgtgctcttagggagctgcttttcaccgctcccggtgctctt

SEQ ID NO: 121211 - DNA, 256 bp, Glycine max
ctcgagccgaatcgctcgagcggctcgagcggaagaaacttctacagcacaaggaattggcctccagagtccgatccgacagggagaatttgcgagcttcaaagaaagagttcaataaaacagaagatgatttgaaatctcttcaaagtgttgggcagattattggcgaagttctcaggcctcttgacaatgaacgcctgattgttaaagcaagcagtggtcccaggtatgtggttggttgccgcagtaaagtgga

SEQ ID NO: 121212 - DNA, 255 bp, Glycine max
caaactatcatggccacggcaacagcagctgccacctcgtcctttatggggacgcgtctcctggaggctcactccggagcggggcgagtgcacgcccgattcggcttcggcaagagaaaggctcccgccccaaagaaagcctccaggggatcgggccgagacaccgacagacccctttggtatccgggcgccaaagcgccgaaatacctcgatgggagtcttgtcggagactacgggttcgatccgtttgggcta

SEQ ID NO: 121213 - DNA, 258 bp, Glycine max
actacgtacacgctcatgctcctcaaagacaacaatggcaccaacagcgaagacgaagacttacctggcccaggagaaaaccctagaatcgagcttcgttcgggacgaggaggggcgtcccaaggttgcctacaacgaattcagcgacgagatcccagtgatgtctcttgccggtatcgatgaggtggatggacgcagaagagagatttgtgagaagatcgtggaggcttgcgagaatgggggtatatgccaggttgt

SEQ ID NO: 121214 - DNA, 259 bp, Glycine max
ggttctttgtgggatgatttggggaaggcaatggaaggagaagatgaaatagaggttggagaagtcgattgcggcatggacaaagcagtgtgttccaaagttgatattcattcatatcctacctttaaggttttctatgatggcgaggaagtagccagataccaaggtacaagagatgttgaatcaatgaaaacctttgttttggaagaagctgaaaaggcagcagcaaaagcacttgaaagtgacaaagaattataac

SEQ ID NO: 121215 - DNA, 269 bp, Glycine max
gagatccagcagcaatggtgtacgtcaaggctcagaaatcaaaagcctacttcaagagatatcaagtcaagttcaagagaagaagagagggaaaaaccgattaccgtgccaggattcggttgattaatcaggacaagaacaaatataacactccgaaataccgatttgtggttcgctttagcaacaaggacattgttgcacaaataatatctgctagcattgccggcgatttagttcttgctacagccatatcacatgagctgccacga

SEQ ID NO: 121216 - DNA, 261 bp, Glycine max
aagagaatggctcccaagggtttaatctttttggctgtgttatgcttctcagcactgtcactgagtcgttgtcttgcggaggataatggacttgttatgaacttctacaaggaatcatgccctcaggctgaagacatcatcaaagaacaagtcaagcttctctacaagcgccacaagaacactgctttctcctggctcagaaacatcttccatgactgtgctgttcagagttgtgatgcttcactgttgctggactccaca

SEQ ID NO: 121217 - DNA, 258 bp, Glycine max
gtatttccctacctctcccttcaagatgcagatcttcgtcaagaccctcaccggcaagaccatcacccttgaggtggaaagctctgacaccatcgacaacgtcaaggccaagatccaggacaaggaaggaatccccccggaccagcaacgtctcattttcgccggaaagcaacttgaggacggccgtacccttgctgactacaacattcagaaggagagtactcttcacctcgtcctccgtctccgtggtggcatgca

SEQ ID NO: 121218 - DNA, 254 bp, Glycine max
attttggatggtggaagtgaccttcccttcccagatgggattatcatcaatggacgtggttccaatgcctacacatttacagttgatcaaggcaagacgtacagattcaggatatcaaatgtgggactcacttcttccatcaactttagaatccaagggcataaaatgacaattgttgaggtggaagggacccacactctccaaaacatttatgattcacttgatgttcatctagggcagacttactctgtgtt

SEQ ID NO: 121219 - DNA, 254 bp, Glycine max
gtagccgtcgcactttgcgttttctgcgtcatctccgattccccgacaatggccacccaaatgagcaagaagagaaagttcgtagctgatggagtgttcttcgctgaactgaacgaggttctgacaagggagttagccgaggacggatactccggcgtggaagttagggttacgccgatgcgcaccgaaatcatcatcagagccaccagaacccaagccgttctcggtgagaagggaaggagaatcagggaact

SEQ ID NO: 121220 - DNA, 253 bp, Glycine max
ctggggataagattaaggagtatataaagctgagtcagtacccaacagcaacgattgagttcagaggaactgtgattggtggttcagaaccttctgctcctcaagttgcttccttttctagccgtggacccaaccatcttacatcgcagattctgaagcctgatgttattgctccgggggttaatatcttagcagggtggactgggcgtgtggggcccacggatttggacattgatcctaggagggtcgagtt

SEQ ID NO: 121221 - DNA, 256 bp, Glycine max
cattgttggtgcttaaatgcacaggtgagggttccgatcccgttattctggcgaacgcttccgacgtcagccacttcggttacttccagcgttccagcgtcaaggagttcatcgtcttcgtcggtcgcaccgtcgcccgtcgcacccctcagggccaacgccaatccgtacaacacgatgagtacaaggtgcacacatacaacagaaatggtctttgcgcgttgggatttatggatgatcattacccgattcggag

SEQ ID NO: 121222 - DNA, 258 bp, Glycine max
cgacgaggtcttcaccttcgccaagaacatcgctgcgccttatgacctcgtcatgcagaccaagcagcttggccgcctccccgttgtccacttcgccgccggcggagtcgccacccccgccgacgccgcgctcatgatgcagctcggctgcgacggcgtcttcgtcggctccggcgttttcaagagcggcgatcccgcgaacgcgccagggcgattgttcaggccgtgactcactacagcgaccctgagattttggcg

SEQ ID NO: 121223 - DNA, 262 bp, Glycine max
ggagtggtgcctacattgtgaggcaagctgcaaagagcattgttgcaaatggacttgctaggagggcaattgtgcaagtttcctatgccattggtgtgcctgagcccttgtctgtgtttgttgacacttatggcactgggaagatccctgacaaggaaatcctcagcattgtgaaggagagttttgacttcaggcctggcatgatctccatcaaccttgatctcaagaggggtggaaatggcaggttcttgaagactgctgc

SEQ ID NO: 121224 - DNA, 275 bp, Glycine max
ctatactataggtctcgcccaatacctactctccgctcccaagagcacgcaccaccactattgcacttcttcctcgttctccctctttttcttcttcttcgctaaacccttttttctatctcactaacacaacaatgggagacgagaagaagggcaagcctgctgcttccggcgtgtggtccaccatcaagcctttcgtcaatggtggagcctccggcatgctcgccacctgcgtcattcaacccatcgatatgatcaaggtgaggattcaactt

SEQ ID NO: 121225 - DNA, 259 bp, Glycine max
gcgcaaatccaccggtgggaaggctcctaggaagcaactcgccaccaaggctgcaagaaaatctgcacctaccaccggtggagtcaagaagcctcatcgctatcgtcctggaactgttgctcttcgtgagatccgaaaataccaaaagagcacagagcttctgatccgcaagctcccctttcagcgtcttgttcgtgaaatcgcgcaagacttcaagactgatttgaggttccagagtcacgcggttcttgcgcttcag

SEQ ID NO: 121226 - DNA, 253 bp, Glycine max
tgaaggaggtgaagctccgtgatgattactatgtgatggaccctgaaaaggccgtggaattggtggatgagaacactatttgtgttgctgctatccttggttcaacactaaatggagaatttgaagatgtcaaacgcttaaatgatctcctaattgaaaagaataaaataactgggtgggacactcctattcatgttgatgcagcaagtggtggcttcattgccccatttctttacccagagcttgagtggga

SEQ ID NO: 121227 - DNA, 253 bp, Glycine max
cttgaacccaccgcgtttcggagagagagacgtcgcaatggggaggaggcctgcaaggtgttaccggcagataaaaaacaagccataccccaaatcacgtttctgccgtggtgttcctgatcctaagatcagaatttatgatgttggtatgaagaagaaaggtgttgatgagtttcccttctgcgttcatctggttagctgggaaaaagaaaatgtttcaagtgaagcattggaagctgctagaattgcatgc

SEQ ID NO: 121228 - DNA, 252 bp, Glycine max
cttgaacccaccgcgtttcggagagagagacgtcgcaatggggaggaggcctgcaaggtgttaccggcagataaaaaacaagccataccccaaatcacgtttctgccgtggtgttcctgatcctaagatcagaatttatgatgttggtatgaagaagaaaggtgttgatgagtttcccttctgcgttcatctggttagctgggaaaaagacaatgtttcaagtgaagcattggaagctgctagaattgcatg

SEQ ID NO: 121229 - DNA, 254 bp, Glycine max
gaccgttttccgatcctctttctcctcgccaccctcatcaccctcgcctccggtgcccgccacgatattctccggttaccctccgaagcatccacttttttcaaagcacccggtggcgatcaaaacgatgagggcacgaggtgggccgttttaattgccggttccaatggctactggaattacaggcaccagtctgatgtttgccatgcgtatcaactactgaggaaaggtggtctcaaagaagaaaatattgt

SEQ ID NO: 121230 - DNA, 254 bp, Glycine max
gtcaacaatgccaatgcaccatcttctcatttccttccttatcttctctctcactcctactccgacaacctccctcaactccgacggcctctccctgcttgccctgaaagccgccgtggactccgaccccaccggagttctttcctcctggtcggaaaccgacggcaccccatgccactggccgggagtctcctgctccggcgacaaagtaagccaagtttccctcccaaacaagaccctgagcggttacatcc

SEQ ID NO: 121231 - DNA, 259 bp, Glycine max
gaacaagaggtcattcaagtatgcctgggtgcttgacaagctcaaggctgagcgcgaaagaggaattaccattgatattgctttgtggaagtttgaaaccaccaagtactactgcacagtcatcgatgcccccggacatcgtgactttatcaagaacatgattactggtacctcccaggctgattgtgctgtccttatcattgactccaccactggtggttttgaagctggtatttctaaggatggacagactcgtgag

SEQ ID NO: 121232 - DNA, 254 bp, Glycine max
gcgtgtttcgtcttcttcgtctttactcttttcttcaccgaagcgaaaaagaaaaggcttgacttgagagaaatagagcttcgaatcgaaactcagaattagaaaaaaacacaaatcacaatcacaatggcaaggtacgaccgagcaatcaccgttttctcccccgacggccacctcttccaggtcgagtatgccctcgaagccgtccgcaagggcaacgccgccgtcggcgtccgcggcaccgacaacgtcgt

SEQ ID NO: 121233 - DNA, 252 bp, Glycine max
gggatgagagttttggaattccgggagcattttacatcaaaaactatatgcaatctgagtttttccttgtgagtttcaagcttgaagacgttccaaatcatggaaccattctctttgcttgcaactcatgggtttacaacgcaaaattgtacaaaaaagatcgcattttctttgctaataaggcatatcttccaaatgacactccaactccactagtaaagtacagataagaagaattggaaaatctaagag

SEQ ID NO: 121234 - DNA, 249 bp, Glycine max
agtgaagtgaacacaatggagagaagggttggctatgaggtgctggtggctttggtgacccttttggttttctcatttgcttgtgccactgcttcatcatcaggaccaacaaaactccaccaccgtgtggagcaattcaggaggaatctgcttgctaatggccttggtagaactcctccaatggggtggaacagttggaatcatttcagctgtcaaattaacgaaaaaatgatcagagaaactgctgat

SEQ ID NO: 121235 - DNA, 252 bp, Glycine max; identical to SEQ ID NO: 119091

SEQ ID NO: 121236 - DNA, 249 bp, Glycine max
gggacaacagcatgttgtcttggcagagaactgcttttcatttccaaccagagaaaaactggatgaacgatcccaatggtcctatgtactacaagggatggtatcactttttctaccaatacaacccgaacggtgcagtttggggtgacatagtttggggacatgcagtttcaagggacatgatccattggcttcaccttccactggcaatggtggctgatcaatggtatgacatgcaaggtgtgtgga

SEQ ID NO: 121237 - DNA, 252 bp, Glycine max
gttgagaccggtgtcttgaagcctggaatggtggtgacttttgcaccaactggactgacaactgaagtcaagtctgtggagatgcaccatgaatctcttacagaggcacatcctggtgacaatgtgggattcaatgttaagaatgttgctgttaaggatttgaagcgtggttatgttgcctcaaactcaaaggatgaccctgcaaaggaggctgctaacttcacagcccaagtcatcatcatgaaccaccct

SEQ ID NO: 121238 - DNA, 261 bp, Glycine max
ccctaattgaagttctctcctccacactatatattgcttgttttgagtgagtctatcccttaaaggctctctcttgcagtcgcagaggaaaaccctagctagtagtctcagttcgtttgagagagaaaaaatggcagagggtctcgttctccgcggaaccatgcgcgcccacaccgacgtcgtgacggcgattgccactcccatcgacaactccgacatgatcgtgacggcgtcgcgcgacaaatccatcattctctggca

SEQ ID NO: 121239 - DNA, 266 bp, Glycine max
gtcggccctgaatttggtttcttggaatgctgttatgaaagggtatgcaatgcatgggaaggctaaggaaacaatggaaatgtttcttatgatgctgcagagtggtcagaagcctgatttggttacatttacatgtgttttatcagcgtgcgcgcaaaacggcctgactgaagaagggtggcgttgttataatagtatgtccgaagaacatggcattgaacctaaaatggaacattatgcttgcttggtgacacttctcagtcgtg

SEQ ID NO: 121240 - DNA, 262 bp, Glycine max
tttctctcttcaatggccggaatccgcttgcagccggaggactctgacgtctcccaacaatcccgcgcggtggctctctccgccaccgatctggtctccgacgacgaccgctccgtcgccgccgactcttggtccatcaagagcgagtacggaagcactctggacgacgaccagcgccatgctgacgccgccgaagctctctccaacgccaacctccgacctccctccgattacagttctgacaaggatgaacctgattctg

SEQ ID NO: 121241 - DNA, 259 bp, Glycine max
cctaggcacccagagacgaggaagggcgtagtaagcgacgaaatgcttcggggagttgaaaataagcgtagatccggggattcccgatataggtcaacctttcgaactgctgctgaatccacgggcaggcaagagacaacctggtgaactgaaacatcttagtagccagaggaaaagaaagcaaaagcgattcccgtagtagcggcgagcgaaatgggagcagcctaaaccgtgaaaacggggttgtgggagagctata

SEQ ID NO: 121242 - DNA, 254 bp, Glycine max
actttcttgcgaaaccgagagagcgaaggggcaaacacaattttttttatcttcttttttattttttgtagagagagagagagagaaaatgttggggatcttcagcagttcagtggtgtcgccgccggaggagctggtggccgctggcagcagaacgccgtcgccgaagacgacggcgtgggaagctgctgaaccggttcgtggagagcaaggcgtcggcggtgtcgctgcaggtgggggaacacgtgcagttg

SEQ ID NO: 121243 - DNA, 253 bp, Glycine max
cataacacaaggcagaaagcaagctcatcctagagttttaaaaatggcagcagcctcctccatggctctctcttccccatccttggctggcaaggccgtgaagctgggcccatcagcccccgaagtcgggagggtcagcatgaggaagaccgtcaccaagcaggcctcctccggaagcccatggtacggcccagaccgcgtcaagtacttgggcccattctctggcgagcccccgtcctacctcactggcgag

SEQ ID NO: 121244 - DNA, 255 bp, Glycine max
gaaaaaaaaaaacccttagccaacacaaccatcatggccacctctgctattcagcaatcagcattcactggtcaaactgctctgaagcagctcaatgagttcgtccgcaagaccggtggcgccggcaaaggtcgcactaacatgcgccgcaccgtcaagagtgctcctcagagcatttggtatggccctgaccgtcccaagtacttgggtccattctcggagcagattccatcatacctgaccggagaattccct

SEQ ID NO: 121245 - DNA, 254 bp, Glycine max
gaaactgagagaaattcgcaaaccctaatttcggaaagatcggcgatggctgcctccaaggatcgcgagaacttcgtctacatcgccaagctcgccgaacaggccgagcgatacgaagagatggtggaatcaatgaagaacgttgcgaatctcgacgttgaactgactgtggaggagcggaatttactttctgttgggtacaagaatgtgattggtgctcggagagcatcgtggaggatcctgtcttccattga

SEQ ID NO: 121246 - DNA, 265 bp, Glycine max
actccctcctcttcacacattttcttagctctctccaacaatccctctcgttcacactttcagattgtgtgaagatgggggctggtggccgaactgctgttcctcctgccaacaggaagtcagaggctgaccctttgaagcgggtaccatttgaaaaacctcagtttagtctcagccagattaagaaggccattccacctcactgtttccagcgctctgttctccgctcattctcctatgttgtttatgacctcaccatagcctt

SEQ ID NO: 121247 - DNA, 259 bp, Glycine max
tgggcaaggtcaagatcggaatcaacggatttggaagaattggccgtttggtggccagggtggctctgcagagagacgatgttgaactcgttgccgttaacgatcctttcattaccaccgattacatgacatacatgtttaaatacgacagtgttcacgggcactggaagcatcacgatgtcaccgttaaggatgagaagacccttctcttcggtgacaagccagtcactgtttttggacacaggaaccctgaagagat

SEQ ID NO: 121248 - DNA, 257 bp, Glycine max
  unsure (1)..(257): unsure at all n locations
ccaactatcatggccacggcaacagcagctgccacctcgtcctttatggggacgcgtctcctggaggctcactccggagcggggcgagtgcacgcccgattcggcttcggcaagagaaaggctcccgccccaaagaaagcctccaggggatcgggccgagacaccgacagaccccttatggtatccgggcgccaaagcgccgnaatacctcgatgggagtcttgtcggagactacgggttcgatccgtttgggctag

SEQ ID NO: 121249 - DNA, 257 bp, Glycine max
cgcttgctgtcgttttcaataagtcaagcagatttgccaggttgcagaacattcagtgtgctattgcgggcaagaatctgtacatgagattccgatgcagcactggtgatgccatggggatgaacatggtgtcaaaaggtgttcaaaatgttcttgattttcttcaggatgacttccctgatatggatgttattggaatctctggcaatttctgttcggacaagaaagccgcagccgtgaattggattgaagggcgt

SEQ ID NO: 121250 - DNA, 258 bp, Glycine max
ctcgagccggtttctctccacaggagcagagaatgcatcgcttcatcatcctcaccattctcctttccctggcactcgcagatggaggttccattggagttaactacggtcgtatagcgaacaacctcccctccgcggtgaaggtcgttcaactcctcaaatcccaaggactgacacgtgtcaaagtctacgacaccgacccggcagtgttacgggcactatccggatccggaatcaaagtgacggttgatcttccga

SEQ ID NO: 121251 - DNA, 259 bp, Glycine max
ctgcttcaacttgctccctcagaagcgaagaagaagccacagaggaccagtctcctactctctctcacccacaagaaaaatggcatctcacatcgttggatacccccgcatgggtcccaagagagagctcaagttcgctctcgagtctttctgggatggcaagagcagcgccgaggatttgcagaaggtggctgctgatctcaggtcatccatctggaagcagatggctggtgctgggatcaagtacatccacagcaac

SEQ ID NO: 121252 - DNA, 254 bp, Glycine max
ctcatctcttacaacgaaaccctcttcatcttgttctatctgtgacgagcatcatggcctcaagagcagtgttattgttggctatgtgtgtgcttccggcgatggttgtggccattcgcccagcaaagaaccctttttgcgtgaagggtcgtgtctactgtgacccttgccgtgctggttttgagacctcagctaccacctacattgctggtgctgagattatgttgcaatgcaagagcagggttagcaacgag

SEQ ID NO: 121253 - DNA, 248 bp, Glycine max
ctagtcctgttatttctcagcgcgtaaagcatggctttgttggtggagaaaaccacgagtggtcgcgagtacaaggtcaaggacctttcccaggccgacttcggccgtgctcgagatcgagctggccgaggttgagatgcccggcctcatggcctgtcggaccgagttcggcccctcccagcccttcaagggggcccgcatcaccggctccctccacatgaccatccagaccgccgttctcattgaga

SEQ ID NO: 121254 - DNA, 250 bp, Glycine max
ctcgagcgattgattttacgaagagcaatgagtggacaggtggaaggtcatttcaaaggagatgcctgcatcacattggtcatgaacaaaatccatatgaacaagctatatctatcattgggaaaacattgtcttcctttgatgaggataacttaattccctgttttggttttggagatgcatcaacacatgaccaggaagtttttagtttctatccggatgagagattttgtcgtggatttgaagaagt

SEQ ID NO: 121255 - DNA, 249 bp, Glycine max
actccctcctcttcacacattttcttagctctctccaacaatccctctcgttcacactttcagattgtgtgaagatgggggctggtggccgaactgctgttcctcctgccaacaggaagtcagaggctgaccctttgaagcgggtaccatttgaaaaacctcagtttagtctcagccagattaagaaggccattccacctcactgtttccagcgctctgttctccgctcattctcctatgttgtttatg

SEQ ID NO: 121256 - DNA, 254 bp, Glycine max
gagtgatttcagtgagtgatcggtgttcacttgatctcatcataatcgtcagcgtcaattgaagaagatgccgatcagaaacatcgccgtcggaaggcctgaagaggcgactcaccccgacacgttgaaggcggctttggctgagttcatctcaaccttcatcttcgtgttcgccggctcaggctccggcatcgcctacaacaagctcaccgacaacggcgctgccacccctgccggcctcatctccgcctcca

SEQ ID NO: 121257 - DNA, 257 bp, Glycine max
cgcgactgttgtcatagtcaacaaggttgaaacttccaggaaaaaacttcgaattgggagggcgatcctcccggtgaactgaccgtaccccaaaccgacacaggtgaacaagtagagtatactagggcgcttgagagaaccatgtcgaaggaactcggcaaaatgaccccgtaacttcgggagaaggggtgctctcctatcttttgattaggaaagcggcacataccagggggtagcgactgtttattaaaaacaca

SEQ ID NO: 121258 - DNA, 251 bp, Glycine max
cactgttgagtactacaatgacaagggtgccatggttccaatccgcgtccacactgtgctcatctccacacagcatgatgagactgtcacaaatgatgagattgcagctgatcttaaagaacacgtgattaagcctgtgattcctgagaagtaccttgatgagaagaccattttccatttgaacccttctggcaggtttgtcattggagggccgcatggcgatgctggtctcaccggccgcaagatcatca

SEQ ID NO: 121259 - DNA, 249 bp, Glycine max
ctctttctctagtcctgttatttctcagcgcgtaaagcatggctttgttggtggagaaaaccacgagtggtcgcgagtacaaggtcaaggacctttcccaggccgacttcggccgcctcgagatcgagctggccgaggttgagatgcccggcctcatggcctgtcggaccgagttcggcccctcccagcccttcaagggggcccgcatcaccggctccctccacatgaccatccagaccgccgttctca

SEQ ID NO: 121260 - DNA, 247 bp, Glycine max
caaactatcatggccacggcaacagcagctcccacctcgtcctttatggggacgcgtctcctggaggctcactccggagcggggcgagtgcacgcccgattcggcttcggcaagaaaaaggctcccgccccaaagaaagcctccaggggatcgggccgagacaccgacagacccctttggtatccgggcgccaaagcgccgaatacctcgatgggagtcttgtcggagactacgggttcgatccgtt

SEQ ID NO: 121261 - DNA, 254 bp, Glycine max
tgagagtggtgtcattaagcttgatgataagcagagtgaaagcaagtgtgctcttgtgtatggtcaaatgaatgagccccctggtgcccgtgcccgtgttggtcttactgggcttactgtggctgaacacttccgtgatgctgaagggcaagatgtgcttcttttcgtagacaacattttccgttttacccaagctaactcagaggtgtctgctttgcttggtcgtatcccatctgctgttggttaccaaccaa

SEQ ID NO: 121262 - DNA, 251 bp, Glycine max
ggttctttgtgggatgatttggggaaggcaatggaaggagaagatgaaatagaggttggagaagtcgattgcggcatggacaaagcagtgtgttccaaagttgatattcattcatatcctacctttaaggttttctatgatggcgatgaagtagccagataccaaggtacaagagatgttgaatcaatgagaacctttgttttggaagaagctgaaaaggcagcagcaaaagcacttgacagtgacaaaga

SEQ ID NO: 121263 - DNA, 253 bp, Glycine max
accggttgtctgcattgacgatgcctccaaacgctgctctgagttttcaagtggcttagctgtttggacacctctacttttattggttcctttggttcttggacttgataaagtcaatcctaggtatattccattattgcgctcaacttttaaatttccccaaagccttggcatcatgggcggcaaaccaggtgcttcaacatacattattggtgttcagactgagaaggcattctaccttgatccccatgat

SEQ ID NO: 121264 - DNA, 250 bp, Glycine max
gtctcattctactacaagtcagatgcagcaattcaacaagatcccgagctccaagcttggtggaaagaacttgtccaagtgggtcatggtgatttgaaagataagccatggtggcaaaagatgcaaactcgtgaagagttgattgaagcctcggctaccctcgtatggatcgcttcagcccttcatgcagctgttaactttggacagtatccatatggaggtttaatcctaaacaggccaaccattagca

SEQ ID NO: 121265 - DNA, 250 bp, Glycine max
gatcgagataactagaaacagtgtgatgaaaatgaaggtccttgttttcttcgttgctacaattttggtagcatggcaatgccatgcgtacgatatgttccctctccgaatgaacactggctatggtgcccgtactccggaggtgaaatgcgcaagttggaggcttgctgtggaagcacacaacatctttggctttgagaccattcctgaagagtgcgttgaagcaacaaaggaatacatccatggcgaa

SEQ ID NO: 121266 - DNA, 246 bp, Glycine max
caccgatagatagagagcgcggcataacctaaacctatctttcttctctctctgtgtgtgcgcttcaacggcaaccagaagcagccatggccactgcaaggactgtgaaggatgtttcacctcatgagttcgttaaggcgtactcctctcacctcaagcgatccggcaagatggagctgccagagtggactgatattgtgaaaactgcaagatttaaggagttggctccttatgatcctgactggt

SEQ ID NO: 121267 - DNA, 244 bp, Glycine max
ctaatccctatttttcttcctcagtagtgtcatttacgcttctcttctctgcagcaactatgcctaaccctaaggtcttcttcgacatgaccatcggcggtcaatctgctggccgcatcgtgatggagctctacgccgacgtcactccccgcaccgccgagaacttccgcgcgctttgcaccggcgagaagggcgtagggcggagcggcaagcccctccactacaagggctcgtccttccaccg

SEQ ID NO: 121268 - DNA, 244 bp, Glycine max
cacaacaaaaaaagacaacccagagagcgcgtcttaataaacgctcttctctgaaaacccccatttcttttcttctttcttcttctctttcgcttcttcgatcttcgatcttcgtcgctgaaaatgagagagtgcatttcaatccacatcggccaggccgggattcaggttggaaacgcctgctgggagctttactgcctcgaacacggcattcagcctgatgggcagatgccaagtgacaaga

SEQ ID NO: 121269 - DNA, 232 bp, Glycine max
cttttccccggcgagaaaatgagagaaatcctccacattcagggcggccagtgcggcaaccagatcggagccaagttctgggaggtgatctgcgatgagcacggcatcgaccacaccggaaagtacagcggcgactccgaactccaattggaacgcatcaatgtctactacaacgaggccagcggtggaaggtacgttccacgcgccgttctcatcgatctggagccggcac

SEQ ID NO: 121270 - DNA, 249 bp, Glycine max
cgattgttctgttgtgcgactgaaagaagagagatcgaaaatggcgttggctttcgacgagttcggaaggcctttcataatcctgaaggaacaggagcagaagagcagacttcgaggtttggacgctcagaaagccaacatctccgccggcaaagccgtcgctcgcatcctccgaacctccctcggccccaaaggcatggacaagatgctccagagccccgacggcgacgtcactatcacgaacgacgg

SEQ ID NO: 121271 - DNA, 247 bp, Glycine max
ctcatttcaatttgcatttgcatttgcgtttcatttggcgttttgtttctttctggaagcttcgttcgggcatcaatggcgtccttcgatgaagctcctcccggaaactccaagaacggcgagaagatcttcaaaaccaagtgcgctcagtgccacaccgtcgacaaaggtgccggccacaaacaaggacccaatctgaatggtttgtttggaagacaatctggtacaactcctggatattcctatt

SEQ ID NO: 121272 - DNA, 240 bp, Glycine max
cgagcatggaagacagtattgaccacttggctttcgagaggaacaaggcgcagttcgatgttgacgagatgaagatcgtttgggcgggttctcgtcaagactttgagctttccgatcggatttctcgccttgttgccagcgatccggccttcagaaaggatgacgcaaccacgcttggtaggaaggagttgtttaaaaacaccttgagaaacgctgcttatgcatggacaaggatcaacg

SEQ ID NO: 121273 - DNA, 244 bp, Glycine max
aaccaacttcacctttccttccttccttccttcttccgatttcgaagatggctgaagcagaggatgccgtacgacgccgtaatgcggtcgccgagtatcgaaagaaacttctccagcacaaggaattggaatccagagtccgatccgtcagggagaatttgcgagcttcaaagaaagagttcaataaaacagaagatgatttgaagtctcttcaaagtgttgggcagatcattggcgaagttct

SEQ ID NO: 121274 - DNA, 239 bp, Glycine max
ggttatttcgccctaatggctcttgctccatccaaagtttccaccttttctggtttttctcccaaacccagtgttgggggtgctcagaaaaacccaacttgcgcggttccccggagcttttggatgaggaacctgggagcagaaaactctaagggttgtgcccacagggtgctcccactggggtgaatttgtaacgctttacgagggttacgaagagcgagcttgctgttccaactgct

SEQ ID NO: 121275 - DNA, 233 bp, Glycine max
tcaacatcaagcctcaaacagacagatgggttttccccgataccaagagggggatcatcgtgttggcagagggtcgtttgatgaacttggggtgtgccacgggacaccccagctttgtgatgtcgtgctccttcaccaaccaggtcattgctcagcttgaattgtggaaagagaagggttctgggaagtatgagaagaaggatgtatggatgcccaagcaccattacgagaaa

SEQ ID NO: 121276 - DNA, 242 bp, Glycine max
gttcggcactcgcatagaacgaacgcatgggtcaagcttttcggacgctcttcgacaccttcttcggcaacaccgagatgcgggttgtgatgcttggtctagatgctgctggcaaaacaactatactgtacaagctccacattggagaagttttatctactgttcctacaataggttttaatgtggagaaggttcagtataagaatgttgtttcacggtttgggatgttggagggcaagaga

SEQ ID NO: 121277 - DNA, 245 bp, Glycine max
  unsure (1)..(245): unsure at all n locations
attatttcttccgtgaaagcacgatgtcttccaggggatggattggaggagcattttgtaatacaaatggaaggtgttaacgtcttggctgtcagttatggtgccccaggggcttgcccttatcctcggcatctcaagcttcctgcaaagatgatcttcaagatacacacaggtcntaagagcagngtacaggcaccgagagcactaaaatctctgatgaggcacagttgggcaggcagggagag

SEQ ID NO: 121278 - DNA, 222 bp, Glycine max
  unsure (1)..(222): unsure at all n locations
gccttgggctgcgtcttccccgaactgttgtcccgcaacggggtcaagtttggagaagctgtgtggttcaaggccgggtcccagatcttcagcgagggtgggctggactacttgggcaacccaagccttgtccacgcccagagcatcctcgccatctgggccacccaagataatcnaattggagcagtatagggacatcgtatgctggtgggccccacggtg

SEQ ID NO: 121279 - DNA, 163 bp, Glycine max
acggtggtgacgaccatggttagagacgatctatgcatcaccgttcccagcttcttccgctgccctatctccctcgacgtcatgaaatcccctgtcagcctctgcaccggcgttacctacgaccgttccagcatccaacgctggctcgacaacggcaacaaca

SEQ ID NO: 121280 - DNA, 151 bp, Glycine max
gatctgtcttccgaagcaggaactaaatatggctgacttgttggaatggtcaaagcaagattagaaacgaatgcttcatgtcgtctaccgtgttggtgaccttgatcgcaccatcaaattttacaccgaatgtttaggaatgaagcttttg

SEQ ID NO: 121281 - DNA, 225 bp, Glycine max
  unsure (1)..(225): unsure at all n locations
gaaaaagttagggtttgtaactttgtcttttgcttgcgaatctgaatcgaataataatcaatcaatcatcatgtcgtcggcgaagaagatcacactgaagagttcggacggcgaggctttcgaggtggacgaggcggtggcgctggagtctcagacgantaagcacantancgaggacgacntcgccgacagcggcaactcactgtcgaacgagtacgagcaaga

SEQ ID NO: 121282 - DNA, 167 bp, Glycine max
tgaaaatgaaagtgcttgttttgtttgttgctacagttttggtagcatatgaatgccatggctcagactaccagaagttccctctccaaatgaaaactgggtttggtgggcaatacagcaatgaggtggcatgtgccagttggaggcattgcgatgaagcaaacaac

SEQ ID NO: 121283 - DNA, 88 bp, Glycine max
atcagccccagaagtgggaagggtgagcatgaggaagaccgtcaccaagcaggtctcctcaggaagcccatggtacggcccagaccga

SEQ ID NO: 121284 - DNA, 138 bp, Glycine max
accctggcatctctgcggttattcccggttggttctccgaaatcagcccaatgtggcccggggaggcacattccttgaagatggaaaagatcttgtttcaagggaagtctgactatcagaatgtcatggtcttccagt

SEQ ID NO: 121285 - DNA, 102 bp, Glycine max
agttgctgtcccgcaacggggtgaagttcggagaagccgtgtgcttcaaggccgggtcccagatcttcagcgagggtgggctcgactacttgggcaacccaa

SEQ ID NO: 121286 - DNA, 208 bp, Glycine max
ggggtggacaatctgtttgagaggatggaccgcatggtggtgcacaacccctcgttttgcgacatcacttggggtgctggagggacaacggctgatcttacattggaaattgccaacaagatgcagaacattgtctgtgtggagaccatgatgcacctcaccatcaccaacaatccatatgtagaagaattaccaagcactctacacc

SEQ ID NO: 121287 - DNA, 170 bp, Glycine max
ttgagctgcatagaaaatttgttgctgcagttaatcaactgggcctagataaggctgttcctaagaaaatacttgacctgatgaatgttgaagggcttacaagggaaaatgttgcaagccatctacagaaatatagactctatctgaaaaaggcagcccagcaagcgtac

SEQ ID NO: 121288 - DNA, 192 bp, Glycine max
  unsure (1)..(192): unsure at all n locations
gtcggaatcctccttcttcggtaacaaaaccggtgctgctctacgggcgtcttttgcatccaaagctcaaaaggaaaacaaccacaactcgcagcctcaggcttcgtacaaagttgcggttcttggtgctgctggagggataggatagccgcacacgcatcacaacaagangtcgccaatagtctccaacca

SEQ ID NO: 121289 - DNA, 172 bp, Glycine max
cttcaacatctaagttttcagcagaaaaagccaatttctcttatggggcagaaagattcgattaagtttagggaaaggaaagcaaacaaagaaagccaatcggaaatgattttatcactacgcgaatcaaaaatcaaagtaggagcgagaatcaccttagggctaggccacc

SEQ ID NO: 121290 - DNA, 189 bp, Glycine max
gaaggaggcacctttgcactctactcattgctgtgtcgccacgcccgggttagcttgctgccaaacactcagcttgcagatgaggacttaactgagtacaccatggataatggaactgttcctgttgataagaaaaatgttgggttggggctgaagaacttgttggagaaacacagggatgctcaaagg

SEQ ID NO: 121291 - DNA, 262 bp, Glycine max
cgctctgtttctgtctctgtgtttgcggctgaggattccgaacgagcgaccttcttcgtttctcgcaaagtttaagtcatcatgggtaaggaaaagactcacatcaacattgtcgtcattggacatgtcgactctgggaagtcaactaccacatggtcatttaacgacaagcgttgagggaatgacaagcgcgtgtaattgagggacgtagaaggaggcagctgagtagatccaagagtcatcatttcagtctgggtgcctg

SEQ ID NO: 121292 - DNA, 230 bp, Glycine max
  unsure (1)..(230): unsure at all n locations
ggagtgctgactcctggtcgtgttagacttttgcttcacaggggaactccttgcttccgtggatatggaaggcgtaatggagagcgtaggagaaagtctgttcgtgggtgcattgtcagcccagacctctctgttttgaacttggtaattgtgaagaaaggtgagaactgattaccaggagtgactgatgttagaagccaaggantagaggcccaaagagagcaatcaaa

SEQ ID NO: 121293 - DNA, 143 bp, Glycine max
attcgagagtgctgaaatgggtgttcccgctgagaacgatggctgcaaatgtggagctaactgcacctgcaacccctgcacttgcaagtgaggtgttggagagctaaagcttcaagcagaaatggcccttagaaataatgata

SEQ ID NO: 121294 - DNA, 171 bp, Glycine max
ctcgagccgataacacaaagcacaaagcaaagctcatccttgagttaaaaaatggcagcagcttcttccatggctctctcatccccatccttggctggcaaggccgtgaagctgggcccatcagccccagaagtgggaagggtgagcacgaggaagaccggtaccaagcag

SEQ ID NO: 121295 - DNA, 162 bp, Glycine max
aaattgctacatagcacacactccctcttctcttctacggttatggcgtccacgttgggcacttcttcaattgcggttcttccttcgcgctgcatctcttctttttcttccaagccttccattcacacactctctctaacttcagggcagagctatgggcgg

SEQ ID NO: 121296 - DNA, 281 bp, Glycine max
  unsure (1)..(281): unsure at all n locations
gagaaaaccgaatagaaaagaaggtagctagctagggttttggcgcgaagaagaatggggaagaagaagctggagataaagcgaatcgagaacaaaagcaatcggcagataacattctccaagaggcgcaaaggattgatgaagaaagcncgcgagttatccattctctgcgatgcgaagttggcgctgctcatcttctccagcaccggcaagctctacgagctttgcaacggtgacagtttgccgaggncgtgcagcgatattggataacttaggagcga

SEQ ID NO: 121297 - DNA, 277 bp, Glycine max
gttgctattatcatccgcagctgcttttattcgcaccgcaaacagtgagccatggccgtcggaaagaacaagcgcatctccaatgggaagaagggtggcaagaagaaggcagctgatccctttgccaagaaggattggtatgacattaaggctccttctgtttttcaagtgaaaaatgttggcaaaaccctcgtctctcgtactcagggtaccaagattgcttctgaaggactcaagcatagagtgtttgaggtctccttggctgatcttcaagggg

SEQ ID NO: 121298 - DNA, 211 bp, Glycine max
  unsure (1)..(211): unsure at all n locations
acatcagtggctcaagacgtcttgcccgtgttgactgatgcgtttgatggcaatcttttgagccttgagtttgataactttgctgaagtgcgcaaactctatgaaggtggagttacactacctacaaactttcttagcaagaatgccccaanaccagaggataaggaaagttttcgaacatacggcgaacagtactactagnatctaccac

SEQ ID NO: 121299 - DNA, 146 bp, Glycine max
ctcacaacaacatcagaatcagaaacaacaatggccaacactaacttggaagatgttccctctctggatctcatgactgagctccttcgtcgtctcaagtgctcttccaaacctgacaagcgtcttattctcattggcccacctgg

SEQ ID NO: 121300 - DNA, 221 bp, Glycine max
  unsure (1)..(221): unsure at all n locations
cagaaagcaagctcatcctagagttttaaaaatggcagcagcctcctccatggctctctcttccccatccttggctggcaaggccgtgaagctgggcccatcagcccccgaagtcgggagggtcagcatgaggaagaccgtcaccaagcaggcctcctccggaagcccantgnacggcccagaccgcggcaagnacattggcccaatctcgtcgagccccc

SEQ ID NO: 121301 - DNA, 267 bp, Glycine max
  unsure (1)..(267): unsure at all n locations
aggtgatttcagtgagtgatcggtgttcacttgatctcatcataatcgtcagcgtcaattgaagaagatgccgatcagaaacatcgccgtcggaaggcctgaagaggcgactcaccccgacacgttgaaggcggctttggctgagttcatctcaaccatcaatctcgagntcgccggcataggcactcggcaactccaataacaagcacatcgacaacggcgcagctaccccagctggccacaatctgtcaccatcgctcagcatcg

SEQ ID NO: 121302 - DNA, 197 bp, Glycine max
  unsure (1)..(197): unsure at all n locations
ataacacaaagcacaaagcaaagctcatccttgagttaaaaaatggcagcagcttcttccatggctctctcatccccatccttggctggcaaggccgtgaagctgggcccatcagccccagaagtgggaagggtgagcatgaggaagaccgtcaccaagcaggtctcctcaggaagcccnatgnacggcccagaccg

SEQ ID NO: 121303 - DNA, 259 bp, Glycine max
gattgctagaatggaatttcgatgctcagtcatctcttttaccattctcttctctcttgctcttgcaggagagagccatgtccatgcatcgctacctgaggaagattattgggaagctgtttggccaaacactcccattcccactgcactgcgagagcttctaaagcctctccctgcaggtgttgaaatcgatgaactccctaagcaaattgatgatacagtgtacccaaaaacattcttctataaagaagaccttcat

SEQ ID NO: 121304 - DNA, 274 bp, Glycine max
ggaaagcaaacatgcttgatcaggtccaacaccctacaatcatggacaaggttgctggccagctccatctccgttctggtgtttctggtattaggagttatgaaggagcctactgccaccccacaatgtaccaaagaccctcttttgggaattactcgaatgctgcattgcagtatcctgtgatgccctcatgcaaagctactatggatttggcttctgctgcaacaactgcctcccccgatctttgttgctgctccagcagagaaaggccatt

SEQ ID NO: 121305 - DNA, 159 bp, Glycine max
acaaaatggaaaagaatgtggggattctcgccattgacatctacttccctcccgcttgcgttcagcaggaagcattggagactcatgatggtgccagttaaggggagtataccattggacttggccaagactgcatgtcatcggaaccgaagatgaaga

SEQ ID NO: 121306 - DNA, 162 bp, Glycine max
  unsure (1)..(162): unsure at all n locations
gtcggtttagttttccaggatggtgtcattcttggtgctgatactagggcaactgaaggacctatagtggctgataaaaactgtgagaaaattcattatatggcacccaacatatattgctgtggagcaggcacagctgctgatacagaggcagnaacagac

SEQ ID NO: 121307 - DNA, 176 bp, Glycine max
actgtaggcaaggggagaccaccaccgcaatgtttgcattatacctgtctcagcacatggtacaaatcctgctagtgctgctatgtgtggaatgaaaattgtctctgttggaactgacgccaagggtaacattaatatagaagaattgagaaaggctgccgaaacacataaggaca

SEQ ID NO: 121308 - DNA, 275 bp, Glycine max
  unsure (1)..(275): unsure at all n locations
cgatgctcaatttgattgggacagtgacttcggaattcccggtgcattttatattaagaacttcatgcaaaacgagttctacctcaagtctttaattctcgaagacattccaaaccatggaaccattcacttcatatgtaactcctggggttacaatacaaaacacaacaagacagtacgcantttcattgtccaacaanatagatctactaagcgagacaccggcgctacagttcaagnactagagaagaagaanngttagaagatatggggag

SEQ ID NO: 121309 - DNA, 246 bp, Glycine max
  unsure (1)..(246): unsure at all n locations
aaccacgcttttctctacagtcatgggcaaggtcaagatcggaatcaacggatttggaagaattggccgtttggttgccagagtcgctctgcaaagagacgatgtggagctcgttgccgttaacgaccctttcattaccaccgattacatgacatacatgntttaantcgacaggggtcacggacancgtaagcancacgangtcatcgggaatgacgagaagacccaacctacggtgactagcca

SEQ ID NO: 121310 - DNA, 207 bp, Glycine max
  unsure (1)..(207): unsure at all n locations
ggcattcagcctgatgggcagatgccaagtgataagactgttggtggaggtgatgatgctttcaacaccttcttcagtgaaactggggctggaaagcacgtgcctcgtgcgatttttgtagatctcgagcctactgtgattgactaagntaggacntggacagaccgccaacaatgtcaaccagagcagctcatnatcggaaaggag

SEQ ID NO: 121311 - DNA, 247 bp, Glycine max
  unsure (1)..(247): unsure at all n locations
cgctttcctgttttcaatttcgattctttcgttaatttaataagatgtttgggagggcaccgaagaagagcgataatacgaggtactacgaaatcctcggcgtctccaagaacgcttcgcaggatgatctgaagaaggcttacaagaaagccgccattaagaatcaccccgacaagggcggngantccgagaagtttaaagagcngtcgcaagccgatgaggatctgatngactctgataagcgtga

SEQ ID NO: 121312 - DNA, 252 bp, Glycine max
  unsure (1)..(252): unsure at all n locations
cacccccgtaccgtctctgcctctctgcaatccacagccgaaaatgcctttcaagaggtacgttgagatcgggagggttgctcaaatcaactacggcaaggaatatggcaggctcgtcgtcatcgtcgacgtcattgaccagaacagagcacttgatcgatgcccctgagantgntaggntccaaggctaagtcaaaaggcagttccggatcgacagcatgagggtcagcatgagggnccctaagtagaaag

SEQ ID NO: 121313 - DNA, 267 bp, Glycine max
  unsure (1)..(267): unsure at all n locations
cgcgttctgcgccgtcgccgtcgccgtcgccgtcgcgggctcctccttcgatgatgccaaccctatccgtttagcgtcggacttggagtcgcaggtgctggacgtgatcggacagagccgccacgctctctccttcgcccgcttcgctcgccgccacggcaagcgctaccggttcgncgacgagantcgcaaccgcgtctggagctcctctgtcaagctgatacgcagcagagccaccaacaggaggncactctctgacacgcgcgg

SEQ ID NO: 121314 - DNA, 264 bp, Glycine max
gcagaaagcaagctcatcctagagttttaaaaatggcagcagcctcctccatggctctctcttccccatccttggctggcaaggccgtgaagctgggcccatcagcccccgaagtcgggagggtcagcatgaggaagaccgtcaccaagcaggcctccgccggaagcccagtggacggcccagaccgcgtcaagtattgttgcccaggctctggcgagcccccggcctacctcactggctagttcccatgtgacgacggctggg

SEQ ID NO: 121315 - DNA, 245 bp, Glycine max
aaaaaaaaaacactctttcactttcttgactacggtctcacttcgacatggctcgtactaagcaaactgctcgcaagtccaccggcggcaaggcgccacgtaagcagttggcgaccaaggccgcccggaagtccgctcccgcgaccggaggagtgaagaagccccaccgcgttaggccgggaaccgtggcgcttagggaaatctgaaaggatcagaagagcaccgagctactcatcagtgaagct

SEQ ID NO: 121316 - DNA, 260 bp, Glycine max
  unsure (1)..(260): unsure at all n locations
gcaaagctcatccttgagttaaaaaatggcagcagcttcttccatggctctctcatccccatccttggctggcaaggccgtgaagctgggcccatcagccccagaagtgggaagggtgagcatgaggaagaccgtcaccaagcaggtctcctcaggaagcccatggtacggcccagaccgagtcaagnacnttggcccagtcgcntgcgagcccccggccgatcgatccggtgatgtcctaggcgacgactgcagggaca

SEQ ID NO: 121317 - DNA, 232 bp, Glycine max
  unsure (1)..(232): unsure at all n locations
cctaaacccgtttgcgttgttgtttgcgaagaaatggcgactaagaggagcgtgggaacgttgaaggagggtgatttgaaagggaagagggtgttcgtgagggtcgatctgaacgtgcctttggatgacaaccttaacatcaccgatgacactagagtccgtgctgctgttcccaccatcaaggtactaacgtggcagtgagccaaagngagccgttctagccacggttgac

SEQ ID NO: 121318 - DNA, 197 bp, Glycine max
  unsure (1)..(197): unsure at all n locations
tgcagatcttcgtcaagaccctcaccggaaagaccatcacccttgaggtggaaagctctgacaccatcgacaacgtcaaggccaagatccaggacaaggaaggaattcccccggatcagcaacgtctcatcttcgccggaaagcagctcgaggacggccgtaccctcgccgactacaacatccagaaggagncaacc

SEQ ID NO: 121319 - DNA, 202 bp, Glycine max
gctgaagtgtgtgatgcgaacccacagttaattttgagtggggagcttcgtgcccttcagccagtttttcagatttatggccgtcgacaggttttctctggacctatagttaccttgaaggtgtttgaagacaatgttttggttcgtgagttccttgaagagaaaggcaatggaagagttctagttgttgactgaggcgcga

SEQ ID NO: 121320 - DNA, 237 bp, Glycine max
  unsure (1)..(237): unsure at all n locations
caaaagttggagtgcaaacatctcagatgcaaatgttaccaacaaatactcatatgttctcctgggagagttttgatgaagatatttcttctcttgatgacggctctgcaattacaatcactacttctggtctcctggaacagataaatgttacacgggagacgagngagtagccttggcatataacgagtgtcgagatatgcncatccgaatcctngctccgaggaggcaaacgac

SEQ ID NO: 121321 - DNA, 208 bp, Glycine max
taacatcatacaaagcttggttgattggtgttatgcatattgcaagttacgtgattttgatatgaacccacgagcacatcaagttttttattctgggtgccaggccattatgtatattctgtgttttcgcatgagatctttgatggatattccgtaggcttaaattcagcatcgttagactcccatgtgaggcaatcttgtaacagat

SEQ ID NO: 121322 - DNA, 239 bp, Glycine max
ggtggcccagcacaatgctggggttatggcagatcttgatttcttcatcggggatgaggcactttccaagtctcggtctagcagcacttacaatctcagctacccgattcggcatggccaggttgagaattgggatgccatggagcgcttctggcagcagtgcattttcaattattgaggctttagtcggaggatcacgatgtccgctggaccgagagcccatggaccgcgcccgagag

SEQ ID NO: 121323 - DNA, 246 bp, Glycine max
  unsure (1)..(246): unsure at all n locations
aacactcataacacaaagcacaaagcaaagctcatccttgagttaaaaaatggcagcagcttcttccatggctctctcatccccatccttggctggcaaggccgtgaagctgggcccatcagccccagaagtgggaagggtgagcatgaggaagaccgtcaccaagcaggtctcctcaggaagcccattgnacggcccagaccgagtctagtatcgttgcccatgctctggtcgacccccgnccta

SEQ ID NO: 121324 - DNA, 259 bp, Glycine max
  unsure (1)..(259): unsure at all n locations
cttccatcggcgcggcacccacacacacagttcgtcggaatgggaagggtgattcgcgctcaggtaagggtgctgggtcggtgttcaagtctcacactcaccaccgcaagggtccggcgaggttccgcagcctcgacttcggcgagcgcaacggctacctcaagggcgtcgtcaccgacagtatccacgaccccggncgcggcgcccctcgcgccaaggtggcaggccgccaccccagtcgcgataagaagcaaacgga

SEQ ID NO: 121325 - DNA, 258 bp, Glycine max
  unsure (1)..(258): unsure at all n locations
agtgccctgagatcactttgagcaatggtgaaggctgtggcagttcttggcagcagcgagggtgtcactggaactattttcttcactcaggagggaaatggtccaaccaccgtaactggatctcttgctggtcttaagcctggtctccatggcttccatgtccatgccttgggggacactaccaagtggtgccngncaacgtgagcgcagttcaagccgaagtacaacgagcacggagtcccagtggacgagaacgtc

SEQ ID NO: 121326 - DNA, 242 bp, Glycine max
  unsure (1)..(242): unsure at all n locations
gttcgacaccaactacgatataattgtccctgaattgggccctgatgtgaacttcacctatgactctcacaaggctgttgatgaatacaaggaggccaaggcgcttggagtggataccgttccggtcctcgttggccctgttacatacctgttgctctccaagccagccaagggagntgagaaagtcntttctctctgctctctccggttcaagggacttgctgtctactaggaagtcattg

SEQ ID NO: 121327 - DNA, 261 bp, Glycine max
  unsure (1)..(261): unsure at all n locations
cctaaacccgtttgcgttgttgtttgcgaagaaatggcgactaagaggagcgtgggaacgttgaaggagggtgatttgaaagggaagagggtgttcgtgagggtcgatctgaacgtgcctttggatgacaaccttaacatcaccgatgacactagagtccgtgcntcntntcccaccagcaaggatcgtaacngggcaggtagccaaagggatcctgtctagtcacgtgtgtacgcctaaatgtgtatcaccgaaatacag

SEQ ID NO: 121328 - DNA, 184 bp, Glycine max
gggatgagagttttggaattccgggagcattttacatcaaaaactatatgcaatctgagtttttccttgtgagtttcaagcttgaagacgttccaaatcatggaaccattctctttgcttgcaactcatgggtttacaacgcaaaattgtacaaaaaagagtgcattttcgtttcgaagaaggc

SEQ ID NO: 121329 - DNA, 245 bp, Glycine max
ctctctttctctagtcctgttatttctcagcgcgtaaagcatggctttgttggtggagaaaaccacgagtggtcgcgagtacaaggtcaaggacctttcccaggccgacttcggccgcctcgagatcgagctggccgaggttgagatgcccggcctcatggcctgtcggaccgagttcggccccgtccagcccgtcaagggggcccgcatcaccggcgcctcgccacaggatcatccagaccgcc

SEQ ID NO: 121330 - DNA, 262 bp, Glycine max
  unsure (1)..(262): unsure at all n locations
gcagagatgacaacccgatttaagaagaaccgcaagaagcgcggccacgtcagcgccggccacggccgtattggaaagcaccgcaagcaccccggcggccggggaaatgccggcggcatgcaccaccacaggatcctcttcgacaagtaccacccgggggttcttcgggaagggagggactagggacgttcagtagcgtcgcaacaaatgctatgctcccagcgtcaacatcgacaagcgantgtcgctggaccccaagacg

SEQ ID NO: 121331 - DNA, 223 bp, Glycine max
  unsure (1)..(223): unsure at all n locations
aacaaatcaaagccatggccacctccaacttctctattgttctctccgtctccctagccttctttttggtgctacttaccaaggcacactcgaccgataccgtttctttcaccttcaacaagttcaacccagtccaaccaaacattatgctccaaaaagatgcgagnagttcagtcgcgtgggngttacaacgcaccaaagtctgcagcaacggcgtgctcac

SEQ ID NO: 121332 - DNA, 253 bp, Glycine max
  unsure (1)..(253): unsure at all n locations
atttcgcattggtttgcgttgcgtggttggttttgcggtatcgaagaagaagatggggaaacaggttgtgccggtgaaatcagtgatctacgcgctttcccctttccagcaaaagattatgccgggtctctggaaggacttgcccacgaagattcaccacaaggtctccgagaattggatcagcgccacgcgtttgcgcggnctccgcgacggcaccgatgcggatgtgcaaaacgatcnggaaaaggagaag

SEQ ID NO: 121333 - DNA, 191 bp, Glycine max
atggtgatggtgagccaactgataatgccgcgagattttataaatggtttacagaggggggtgagaaaggagaagggtggcttcagaatcttcactatggtgtgtttggccttggaaacaggcagtatgagcattttaacaaggtggcgaaggtagtggatgacatgctcgttgagcaaggggggaagcgc

SEQ ID NO: 121334 - DNA, 258 bp, Glycine max
  unsure (1)..(258): unsure at all n locations
atagcccaagccctatacaaccaaaccctaacacacacccatttgattcagtttccatggctagcctcaaggttgcatttttggctgcagtgctctgcatggttgtggtgagtgcacccatggcacatgcagctatcacgtgcgggcaggtgacgaatagcctgatcaattgcatcggttacctccagaacggaggaacgccgccgncgggantcntcaacggagntaagagccacaangccgccgccaagaccaccg

SEQ ID NO: 121335 - DNA, 234 bp, Glycine max
  unsure (1)..(234): unsure at all n locations
tcgagagccgcggcaacgaggaccacgtctccgtcatccgcgactaccgatccaagatcgagtccgagctctccaacatctgcgacggtattctcaagctcctcgactctcgcctcattccctccgcttcctccggcgattccaaggtcttctacctcaagatgaagggagattaccacaggtacctcgccgagtgcaagaccggcgccgagcgntaggaggcatccgagagca

SEQ ID NO: 121336 - DNA, 246 bp, Glycine max
  unsure (1)..(246): unsure at all n locations
ggggtcacatggggtggttcctcttctgttgttgtttttctctacttttttttcattcttctgggtcacccagaagaaacttgcccatcatagcctttgaggatggctacacccccttgtttggggaccataatttggccatccatagagatggcaaatcagnttcaccttcacgtgagtaaagaacaggctctggagttgtgtctcaggaccggtaccggcacgggtaagtcagtgcctcgatca

SEQ ID NO: 121337 - DNA, 230 bp, Glycine max
  unsure (1)..(230): unsure at all n locations
aaacagagcaaagagagagtgtgtgaaaagtgaaacaaaaaacagaacaacaatggcgacacttaaggttcctcagcctcttccccccgttgcagatgattgtgagcagctccgaaaagccttctcaggttggggaactaacgaggagnctgattaaatcgatcttgcncagaggaantcctcgcagaggaagcggatcagagaaactgattgtcagacctattgagaag

SEQ ID NO: 121338 - DNA, 252 bp, Glycine max
  unsure (1)..(252): unsure at all n locations
gttagggtttggcagagaacagaaattgggaaattcctcaatcttttgaactcgtcaagtgcgtgcaacactgtacaataatcttcatcgtccttgaaattcccaatcccctgtagtggtagtaagttgctagcaatcgagaatgggagggcacggaggtcncaacagtcgcccccaaaagcgatggaacgtgtacaatgtcgacaacagagagaaggtccgtcgcgacgaagagcaagccgccagggagga

SEQ ID NO: 121339 - DNA, 144 bp, Glycine max
gtgatttcagtgagtgatcggtgttcacttgatctcatcataatcgtcagcgtcaattgaagaagatgccgatcagaaacatcgccgtcggaaggcctgaagaggcgactcaccccgacacgttgaaggcggctttggctaagt

SEQ ID NO: 121340 - DNA, 223 bp, Glycine max
  unsure (1)..(223): unsure at all n locations
ccctgactgattctcttgtggctgctgctggtattattgctcaagaagttgcaggtgatgtccgtatgactgatacccgtgcagatgaagctgagcgtggtattacaatcaagtctacgggtatctcactctactatgaaatgactgatgaagctctcaagagttttaagggagagcgcaatgggaatgagtatcttataagcgcagtgacgtcccntggcac

SEQ ID NO: 121341 - DNA, 248 bp, Glycine max
  unsure (1)..(248): unsure at all n locations
cgacgcggagacggcgtcgtcggactcgacaacttcaacgactactacgatccgtctctgaaaaaagcccgcaagtccctcctcgccaagcatgacgtcttcatcgtcgatggcgacctcaacgacgccaagctcttggcaaagtctctcgagntntgncgcgaatacccacgtgatgtacctctcggcgcaggccggggttctcgacgccatggagaagcctcacgcctacgtccacagcaacatcg

SEQ ID NO: 121342 - DNA, 248 bp, Glycine max
  unsure (1)..(248): unsure at all n locations
agagaacaagaaaaagaggcgcaagatgagtggtagggtttctgggaaggtgaagtggttcaatgatcagaaggggtttggattcataagccctgacgatggcagcgacgatctcttcgttcaccaatctcagatcaaatctgacggtttccgaagcctcgccgaaggagagtccgttgagntcgccagtgaatctgtatctgtcggacgcgcgaaggcagtagatgncattggtcccgacggcgcca

SEQ ID NO: 121343 - DNA, 245 bp, Glycine max
  unsure (1)..(245): unsure at all n locations
ctagttctagatcgcgagcggccgccctttttggtcgaggctctccagaaccctcgtcaccgcctcaccattttgaggatggagctggagatccagaagtttttgaataatgctgatcagctgcattttgagtttcatcatttcccttcttcctatctccgactggcatcacaccgngntgcgtaacacgacaacaggcaaacaatggggcaagagatgggcngaganggtcagggaaggaatag

SEQ ID NO: 121344 - DNA, 235 bp, Glycine max
  unsure (1)..(235): unsure at all n locations
aaggattccgccatcgcgagtctcaaggagtggcttgccgatcccgccattgcaaacaacgccacgctgaggctcgacgccggtctcgtcttcctccatgaaaatgatttcaacgaagccctcaaacacaccaatgctggtggaaccatggacctgcacgcgctgaantntcagagcgttagtaagaggcagatgnctgaggatgcngagaggcagcgncggancatgcagcaga

SEQ ID NO: 121345 - DNA, 215 bp, Glycine max
agaatggctcccaagggtttaacctttctggctgtgttaatatgcgtttcagcactgtcactgagtccttctgttgcgggggaagggcaaaataatggccttgttatgaacttctacaaggaatcatgccctcaggctgaagacatcatcacagaacaagtcaagcgtctctacaagcgccacaagaacacgtcgttcctcggctcaggaacagc

SEQ ID NO: 121346 - DNA, 184 bp, Glycine max
atttgagcaaaaatggttcaagcacagcctctacaacatgttggtaatggtgcagggaaagaagatcaagcttattttgatccaagtgctccaccacccttcaagattgcaaatatcagagcagcaattccaaaacattgctgggagaagaacacattgagatctctgagtctatgtcctaggg

SEQ ID NO: 121347 - DNA, 218 bp, Glycine max
aagcaagctcatcctagagttttaaaaatggcagcagcctcctccatggctctctcttccccatccttggctggcaaggccgtgaagctgggcccatcagcccccgaagtcgggagggtcagcatgaggaagaccgtcaccaagcaggcctcctccggaagcccatggtacggcccagaccgcgtcaagtagcttggcccattctcatgcgagccccc

SEQ ID NO: 121348 - DNA, 203 bp, Glycine max
ggaagtctcttcttacttgaagaaggttggttacaacccagacaagattcccttttttctcatctctggttttgagggtgacaacatgattgagaggtccaccaaccttgactggtacaagggaccaactctccttgaggctcttgaccaaagtcaatagcccaagaggcccgtcgacaagcctctaaggcgtccacagcagg

SEQ ID NO: 121349 - DNA, 251 bp, Glycine max
  unsure (1)..(251): unsure at all n locations
gctgggctttcggccgacccagaaaccttcgccagaaaccgtgagctcgaagtgatccactccaggtgggccatgctcggggccttgggctgcgtcttccccgaactgttgtcccgcaacggggtcaagtttggagaagcntgtgtggttcaaggccgggttccagagcgtcagcgagggtgtgccggacgattnttgcaacccaagccgtgtccacgcccagagcatgcctgctatctgtgtcacccaag

SEQ ID NO: 121350 - DNA, 253 bp, Glycine max
  unsure (1)..(253): unsure at all n locations
gccatttgggagttaggttctgcacgctctgcttccagcgagtgttctttcttcgtttcaacaccttaatttgcacacgctgcttcttcagcttgagaaatggcacaagaaacctttctattcacatctgaatctgtaaacgagggtcaccccgacaagcatngcgaccagatcgcngaggtagngcgctaagtgngtcgtttacaggacccagtcagcaagtgagccngggatacatgcatcaagaccaaca

SEQ ID NO: 121351 - DNA, 220 bp, Glycine max
  unsure (1)..(220): unsure at all n locations
gtgcagaagagcgtcgcagttgtaaccctaatcagaagaagcgcagtatcaagcgagtgacagccaccagccatgggtcgtatgcacagccgcggtaagggtatatcctcttctgctttgccctacaaaaggacacctcctagctggctcaagatctcttcgcaagatgtcgaagaaaagagcatcaagntttcgaagaaaggtttgaccccgtctcaga

SEQ ID NO: 121352 - DNA, 178 bp, Glycine max
cgaccttgctctagcctctggaaaaatttttgaaggagaaggtttcaagtacataaaggaatgttttgaaaatggcacattgcatctcattgggctactgagtgatggtggagttcactccagacttgatcagttgcagttgttgcttaaaggagttagtgagcgaggtgttaaaaga

SEQ ID NO: 121353 - DNA, 269 bp, Glycine max
ccataacacaaggcagaaagcaagctcatcctagagttttaaaaatggcagcagcctcctccatggctctctcttccccatccttggctggcaaggccgtgaagctgggcccatcagcccccgaagtcgggagggtcagcatgaggaagaccgtcaccaagcaggcctcctccggaagcccatggtacggcccagaccgcgtcaagtacttgggcccattctctggcgacccccgtcctacctcactggcgagttcccaggtgactacg

SEQ ID NO: 121354 - DNA, 259 bp, Glycine max
cttggactgggctgtccatgccttcagaatcaccaatgttggtgtgcaggataccactcagatccacacccacatgtgctactccaacttcaacgacatcatccactccatcatcgacatggacgctgatgttatcaccattgagaactctcgctccgatgagaagctcctgtcagtcttccgtgaaggtgtgaagtatggtgctggaattggccctggtgtctagacatccactccccaagaataccaccaactgaag

SEQ ID NO: 121355 - DNA, 263 bp, Glycine max
tctcgagccgaatcggctcgagaaggtgttgaagaccagtgtggactccatggtcaagctagtcatgctcaaaaaccttacgggttcagccatggctggtgctcttggtgggttcaatgctcatgctagcaatattgtgtcagctatctacattgccactggtcaggatcctgcccagaatgtggagagttcactctgcatcaccatgatggaagctatcaatgaggccaggaccttcatgtttccgtgaccatgccctccat

SEQ ID NO: 121356 - DNA, 263 bp, Glycine max
ggatcttgggtcccaaggcctcctgcatctcgtttaaggattctgcttgtcgctgctttgggtacatggtgtctaagaagaagtacatctacaccatcgacgacgactgcttcgttgctaaagatccttctggaaaggacatcaatgcacttgagcagcacattaagaatctcctatgtccatccacaccatttttcttcaacaccctttatgatccttacaggctggtgctgattttgtccgtggatacccttttagtcttc

SEQ ID NO: 121357 - DNA, 260 bp, Glycine max
gattcgcatttgcgtacacccctgaccccttgatttctctcagttccgttctgcatcatagagtatggccagccacgatcttcgattcttcgagttgaacacaggcgctaagataccttccgttggtttgggaacgtggctcgctgaacctggcgttgttgctcgcgccttggccactgcaataaacgttggatatcggcatatagattgtgcgcaaatttatgcaatgaaaaggagattggtgctgccttgaagaagtt

SEQ ID NO: 121358 - DNA, 258 bp, Glycine max
ctcaaaaccccgattccaatagtcatatatttggtacccctcaaggcgcaggaactgctattctaacacttctcgggggatttcatccgcaaactcaaagtttatggctgaccgatattgcacaccatcatttagctattgcatttctttttctagttgatggccatatgtatagcaccaacttcgggattggtcacagtataacagatcttttagaagcactactcctccggggggtagattggggcgtggacataa

SEQ ID NO: 121359 - DNA, 261 bp, Glycine max
cacagatcccaatcctctctcaagccctaatttcccctcatttccatggccacagaagagtccactgtcgcggtggaacccgctcccgaacctgcctccgccgatcctcccccggaggagaaggaggagaccaaacctgaagccaaggctaagaaaaccaaggagcccaaacctaaaaaggtttccagacctcgcaaccctcccactcatccttcctacgagagatggttaaagatgcaattacctcgctgaaggagaaaa

SEQ ID NO: 121360 - DNA, 260 bp, Glycine max
ggtctgttggggtcattttatttgagttgcttgttggtattccacccttcaatgcagagcaccctcagactatatttgataatattcttaatcgtaagataccttggccagcagttcctgaagagatgagtcctcaagcacaggatcttattgatcgattattgacagatgatcctaatcaaagactaggatccaaaggggcgtcagaggtaaagcaacatttttcttcaaggacataaactgggatacacttgccaggc

SEQ ID NO: 121361 - DNA, 269 bp, Glycine max
taggtagagagctcttcctccctttctcacagcaatggccgccgcagcacgccctctcgtcaccgtgcaggccctcgacggtgacatggcaaccgatgcctccgccaccgttcccatccctgacgtcatgaaggcctctatccgccccgacatcgtcaatttcgtacactcgaacatctccaagaacagccgccagtcatacgccgtcagtcgtcgcgctggtcaccaacctccgccgaatcctggggtaccggccgagccgtctcccg

SEQ ID NO: 121362 - DNA, 159 bp, Glycine max
cccaagtactctaaggctaggtatgatgaaatcgtgaaggcagtctcttcttacttgaagaaggttggttacaacccagacaagattccctttgttcccatctctggttttgagggtgacaacatgattgagaggtccaccaaccttgactggtacaag

SEQ ID NO: 121363 - DNA, 261 bp, Glycine max
gttttggtgtttgttgttgaatcgtgaaaatgttcagaaaccagtacgacacggacgtgaccacatggagccctgcggggaggctgttccaggtggagtacgctatggaggcggtgaagcagggctcggcggcgatagggctccgatcgaagacccacgtggtcctcgcatgcgtcaacaaggccaactccgaactctcctcgcaccaggtgaagatcttcaggtcgacaatcacatcggcgtcgccatcgctggcctcac

SEQ ID NO: 121364 - DNA, 257 bp, Glycine max
acacagtggtccttctacagggctttgattgctgagttcattgccacaatgctcttcctttacatcacagtgctcactgtgattggttacaagagccagagtgatgtaaaggctgggggtgatgtgtgtggtggagttggcattcttggcattgcttgggcctttggtggcatgatcttcattctggtgtactgcactgctggaatctcagggggtcacataacccagcagtgacatttgggctcttcttggctcgc

SEQ ID NO: 121365 - DNA, 261 bp, Glycine max
ctcgtgtcatcgtgaccgagattgatcccatctgtgcccttcaggctctcatggaaggccttcaggttctgaccttggaggatgttgtttctgaggctgatatctttgtcaccaccaccggtaacaaggacatcatcatggttgaccacatgaggaaaatgaagaacaatgccattgtttgcaacattggtcactttgacaatgagatcgacatgcttgggtggagaactaccccggcgtgaagcgcatcaccatcaagcc

SEQ ID NO: 121366 - DNA, 259 bp, Glycine max
gtttaacctttctggctgtgttaatatgcgtttcagcactgtcactgagtccttctgttgcgggggaagggcaaaataatggccttgttatgaacttctacaaggaatcatgccctcaggctgaagacatcatcacagaacaagtcaagcttctctacaagcgccacaagaacactgctttctcctggctcaggaacatcttccatgactgtgctgttcgagttgtgatgcttcactgttgctggactccacaagaagg

SEQ ID NO: 121367 - DNA, 261 bp, Glycine max
gcagaatggatgacatgccgttgccggcgctctttgagcaagcccgcaagatccacgccgcagccaccgattccggcgccgaccaggaggttgtgaagaaggggtgcgaggctctgcatagatgcgaggacatggtcaataatctaggtttgttctctcccaacgagaccaaagaagatatcagcaccacgaatctcaaatacattctggtgccattttatctgcggagttgacagataaaatagcacaggatgacaggat

SEQ ID NO: 121368 - DNA, 262 bp, Glycine max
gtgcctctagggttatcatatctccatttccatttcctctctctcagtttccaagaatcttaagctatgggaaagtcttacccaaccgtgagcgctgattaccagaaggccgttgagaaggcgaagaagaagctcagaggcttcatcgctgagaagagatgcgctcctctaatgctccgtttggcatggcactctgctggaacttacgacgtgagctcgaaaccggtggtcccttcggaaccataaagcacccctccgaact

SEQ ID NO: 121369 - DNA, 262 bp, Glycine max
accccctctccgtcgtcaaaaacctcctcagcctccacatcctcctcgactacttcgacaacacaaagctccaccagatccccaacggcaccacgctctccaccactctctaccaaaccaccggcaatgccaacggcaacgtcggctccgtcaacatcaccgacctcaaaggcggtaaggttggcttcggctccgctgctcccggctccaaactcgactcctctacaccaaatccgtcaaacaaatcccctacaacatctcc

SEQ ID NO: 121370 - DNA, 257 bp, Glycine max
caccttcatcatggctgagttcttcttcccaaacaagtcggtcggcgaccagaacagtgtcgaggattggcgcatccgcggcatgactcctttgactcctcccgatctcctccagcatgaaattcgccagacagacaagtcaagagagactgtcgtcaagtcccgcaaagaggctgtcgaggtcgtacacggcgtggacgagaagaggagactcatggtttcattggtccttgctccatccacgaccctgccatggc

SEQ ID NO: 121371 - DNA, 257 bp, Glycine max
ctccactattggagctgtcaacagagctccactgagcttgaacagctctgaagctggagattcggttcccagtacagccttctttggcacaagcttgaagaaggttactgcctcaagggtccctaacgtcaagatttcttctggaagtttcaaaatcgttgcggcggagaaagagattgatgagcaacaacagacaaacaaggacagatggaaaggtctgcctatgatattacggatgaccagcaagacatcacaag

SEQ ID NO: 121372 - DNA, 258 bp, Glycine max
gcctcgctctgtttctgtctctgtgtttgcggctgaggattccgaacgagcgaccttcttcgtttctcgcaaagtttaagtcatcatgggtaaggaaaagactcacatcaacattgtcgtcattggacatgtcgactctgggaagtcaactaccactggtcatttgatctacaagcttggaggtattgacaagcgtgtgattgagaggttcgagaaggggctgctgagatgaacaagaggtcattcaagtatgcctgg

SEQ ID NO: 121373 - DNA, 258 bp, Glycine max
  unsure (1)..(258): unsure at all n locations
ccgcccatcacatcacaatttgtgcattgcctcgtgtcctttttcttctttgcttgccaaaaatcttacacacacaggtatctaccaaatgggttctcaccagcaagaaccatggctattggagaatgggaaaccgagggtgttgaccaaggagaataggcatggccgttctgcacanagcatgtcctccacgtctttgcgcaagaagtctagccgactacttgtctccaagcttccatgtgccacactcagaagcat

SEQ ID NO: 121374 - DNA, 257 bp, Glycine max
caaaccctcccctcacactctccaaaccctagcggcactacacacgttatctctctctctctctctctctctccctctctccttccccaagatgtcgagcgccgatcccgagcaccgagaagaggaggaggcacccgccgtcggcgacgacgaggacaccggagcacacgtcgctcccatcgtcaagctcgaggaggttgctgtcaccaccggcgagaggacgaagatgcaatcctagatctcaaatcgaagcttta

SEQ ID NO: 121375 - DNA, 258 bp, Glycine max
gtttaacctttctggctgtgttaatatgcgtttcagcactgtcactgagtccttctgttgcgggggaagggcaaaataatggccttgttatgaacttctacaaggaatcatgccctcaggctgaagacatcatcacagaacaagtcaagcttctctacaagcgccacaagaacactgctttctcctggctcaggaacatcttccatgactgtgctgttagagttgtgatgcttcactgttgctggactccacaagaag

SEQ ID NO: 121376 - DNA, 256 bp, Glycine max
attttggatggtggaagtgaccttcccttcccagatgggattatcatcaatggacgtggttccaatgcctacacatttacagttgatcaaggcaagacgtacagattcaggatatcaaatgtgggactcacttcttccatcaactttagaatccaagggcataaaatgacaattgttgaggtggaagggacccacactctccaaaacatttatgatcacttgatgttcatctagggcagacttactctgtgttggt

SEQ ID NO: 121377 - DNA, 253 bp, Glycine max
cttcttctcttgcggctagtgctttagcgcacttcttctagatttaaggaagatgggtaaggaaaaggttcacatcagtattgtggtcattggccatgtcgactctgggaaatccactaccactggtcacctgatttacaagcttggaggcattgacaagcgtgttattgagaggtttgagaaggaagctgctgagatgaacaagaggtctttcagtatgcctgggtgctggacaaacttaaggctgagcgtg

SEQ ID NO: 121378 - DNA, 249 bp, Glycine max
gaagcagaagaagagcacaaaccacaagtttgagaagattgggaagctggtttcctatgctcctgagatcactgcctatgttgaggttggtaagatcaaaaagctcactggtgtgaaaaccaaggagctcttggtttggatcacactcagtgagatctttgttgatgatcctcccactggcaagatcactttcaagactccttcggggctcttaggacattccccgtctcggctttcgagattgaagag

SEQ ID NO: 121379 - DNA, 245 bp, Glycine max
ctcgagccgctcgtgtctctgactttggccttgcttaccttgctctcccaacctctacaccataccgtgtgtctggttaccgtgcgccagaggtcactgatgcacgcaagatatcccaaaaggccgatgtctatagctttggtatcatgcttttggtcctgcttacagggaaggctcctactcattcttcactaactgaggaaggggtggactcccaagatgggtccaatctgtggttcaagatg

SEQ ID NO: 121380 - DNA, 260 bp, Glycine max
ctactcactcactgcagatctcaattgcatcgctgtccatggctaccatcgttagcatcaaggcccgccagatcttcgacagtcgtggcaatccaactgtcgaggtggatttgacttgctccgatggtacttttgccagagctgctgttccaagtggtgcatccactgggatttatgaggcccttgaattgagagatggaggatctgactaccttggaagggtgtatcaaaggctgttgacaatgtgaacaccgtcattg

SEQ ID NO: 121381 - DNA, 255 bp, Glycine max
caagtccaacctacccctttttcttctcccaccaacttcaccgtcttcttcctcgatcatgtctcacttcaagggcaagtaccatgatgagcttattgccaatgctgcttacattggcactcctggaaagggtattcttgctgctgatgagtcaacagggacaattggcaagcgtttggccagcatcagtgtagagaatgttgaatccaacaggcggctcttagggagctgcttttcaccgctcccggtgctctt

SEQ ID NO: 121382 - DNA, 254 bp, Glycine max
gtggtgccttatcgctgtggttatcatcttcttcttcctctttcttagatctcttctttctctacgccgcacgccgaaaccatggccggaaaaggagagggtcctgctatcggaatcgatctcggaaccacctactcttgcgtcggtgtgtggcaacatgaccgcgttgaaatcatcgccaacgaccaagggaacagaaccacgccgtcttacgcggattcactgacaccgagcgtctcatcggtgatgcggcc

SEQ ID NO: 121383 - DNA, 248 bp, Glycine max
tgttgatgtgttgactcctaaggttttcattggtttgattgtgggtgcaatgcttccttactggttttctgctatgactatgaagagtgtgggaagtgctgctctgaagatggttgaagaagtacgcaggcaattcaacaccattccagggttgatggagggaactgctaagcctgactatgccacatgtgttaagatctccactgatgcttcattaaagaaatgattccacctggtgctcttgtcat

SEQ ID NO: 121384 - DNA, 249 bp, Glycine max
gggggagcttgtggcaacttgggcaatcgatcactcgccgtcttgcccatggagataagaaggctgttgctcgccgatgttttgcctcagaagctgagctgaaaaagacagtgtttcatgacttccatgttgctcatggtgggaagatggttccatttgctggatggagcatgccaatccaatacaaggactcaatcatggactctaccacaactgtaggcagaatggtagcctttttgatgtttccca

SEQ ID NO: 121385 - DNA, 259 bp, Glycine max
ccaccccccccctcaaaaagttgcaagagttaaagcaaaaaccaaagtgagagagaaaatgatgaagccatcgatgctcagatctcttcactctgccgccacccgcggcgcctcccacctctcccgccgtggctacgcctccgagccggtgccggagcgcaaggtggccgttctaggtgccgccggcgggatcgggcaacccctctcccttctcatgaagtcaaccccctcgtttccagcctctccctcagacgatatc

SEQ ID NO: 121386 - DNA, 250 bp, Glycine max
gagagatggggagtgacagcgaggcagagaaggagaagaagaagatgcttgcgctcgctcccattgctaaaccccttgccggaaagaagctttgcaagcgaaccctaaaacttgttcgtagagctgccgaacacaaatgcctgaaaagaggagtgaaggaggttgttaaaagcataaggagaggtcataaaggattgtgtgtgatagctgggacatatcgccgattgatgtcatcactcatcttcctatt

SEQ ID NO: 121387 - DNA, 257 bp, Glycine max
cttgcattccacaaggcagcaggaggttatggtggattcaaaattgagagccgccccgggattccggtgccttttcctcctccagcaggagatttcacgatattggcaggagactggtacaagagaaatcacacagatttgagggctattttggatggtggaagtgaccttcccttcccagatgggattatcatcaatggacgtggttccaatgccacacatttacagttgatcaaggcaagacgtacagattcagg

SEQ ID NO: 121388 - DNA, 253 bp, Glycine max
cttcgatcagtttggattcacccacaagggtcgccttgagctcagcgtttccaaaatctcactctccaattccaatttggacctctcgaaggtcggcttctttctctgcaccctcgattcctggcttcatgtcctccagcaactcgaggacggtgagattcggtgcgcccttcaatccgatctggtcaagtccgtctattccttcaattctctaacggcaaggactctttcagcacgctctacaaagaggaaa

SEQ ID NO: 121389 - DNA, 252 bp, Glycine max
ctgggaacccaacaagcccttaactgtccaagacgttcaggtggctccgcctcaggccggcgaggtccgtgtccaaatcctcttcaccgctctctgccacaccgatgcttacacttggggcggcaaggatcccgaaggtctcttcccctgtattcttggccatgaagctgcagggattgtggagagtgttggagaaggtgttactaatgttcgcctggggatcatgtcattccctgttatcaggctgagtgt

SEQ ID NO: 121390 - DNA, 250 bp, Glycine max
caaattacaaaatcccctcatattatctctctctctcttaaaccatcatgtcctccaccgcgcctcccgtcctccccatctccaacccccaaaccaccgcgggaaccaccggtgcaggcggcggcgccatcgaggctccggccaacaacccggccttccgcgctttcatcaacaacctctccaactccctccgccacggcctcgaccagcgcgcccctggtcggagctcgcggaccgctcagcgttctcg

SEQ ID NO: 121391 - DNA, 245 bp, Glycine max
gtaaagatggcgaggatggttcagaagaacacgctgtgattggattatggagtggcattgcttggttagttggaatgactgtattcattgctgtgttgtctgagtatgtggtggatacaattgaggatgcatcagattcatggggtgtgtctgtgagcttcctaggcataatcttgctgccgatagttggcaatgcagctgtacatgaggcgcaattatcatcgccttcaggaagaagctggaca

SEQ ID NO: 121392 - DNA, 240 bp, Glycine max
caaaaatggcggcgaaacttcaaatatttacgggattgccccccgcgccatttcaatcttcttcttcctccactctctgcgtactcaagaagcctctcactacctccttcttcggcaccgcgcgagtggaagttctgaaacttagagtgatgacgactgtgaagcctacgcgtggcggaggtgctctcggtgctcgcatgaacctctttacaggttcgccagagttgtgaagtcgtacgc

SEQ ID NO: 121393 - DNA, 260 bp, Glycine max
caaccgttcacaaatctttttctaagtgtagtagaggagaggaaccgcgccaaccctctcttcttcttcttcttcaatccttttataacatttatagtttcattcttaatcgttgggaaaaatgttcatcgagaatttaaggtagagagtcctaatgtgaagtacaccgagactgagattcagtccgtgtacaactacgaaaccaccgaacttgttcacgagaacaggaatggcacctatcagtggattgtcaaacccaa

SEQ ID NO: 121394 - DNA, 257 bp, Glycine max
ctcttcttctcttgcggctagggttttagcgcagttcttctagatttaaggaagatgggtaaggaaaaggttcacatcagtattgtggtcattggccatgtcgactctgggaaatccactaccactggtcacctgtttacaagcttggaggcattgacaagcgtgttattgagaggtttgagaaggaagctgctgagatgaacaagaggtctttcaagtatgcctgggtgctggacaaacttaaggctgagcgtgaa

SEQ ID NO: 121395 - DNA, 257 bp, Glycine max
cacaaggcagaaagcaagctcatcctagagttttaaaaatggcagcagcctcctccatggctctctcttccccatccttggctggcaaggccgtgaagctgggcccatcagcccccgaagtcgggagggtcagcataggaagaccgtcaccaagcatgcctcctccggaagcccatggtacggcccagaccgcgtcaagtacttgggcccattctctggcgagcccccgtcctacctcactggcgagttcccaggtg

SEQ ID NO: 121396 - DNA, 258 bp, Glycine max
gtttcttcctttctctgctctttgtcttctctgacacatttggggccttgttgagtgtgtttttgcaagagggtatggcgaaggacgttgaggttgctgagcgtggctccttctctgggaaggactaccaggacctccaccagcacaactcattgatgctgaggagctcacaaagtggtccttttacagggctcttattgctgagttcattgccactttgctcttcctctacattactgtgctcacagttatagggta

SEQ ID NO: 121397 - DNA, 258 bp, Glycine max
tagaggtggtgtctcgatcacgcgccgtggagatcgcgggcgtgtactcattttcgggtcgacccgttccactcgggtcgtcgggttggatccgtctcggcgacctctacgtcgaagaagagatagaattgctcgggagctcaaggtacctgcagcttccgctgggtcccaccacgttctgaccgtacgatcttcctatcgggaccctctcactcgagagcctttaaatcccgttgagcaggcaatgctcgttccccg

SEQ ID NO: 121398 - DNA, 260 bp, Glycine max
ctctgtttctgtctctgtgtttgcggctgaggattccgaacgagcgaccttcttcgtttctcgcaaagtttaagtcatcatgggtaaggaaaagactcacatcaacattgtcgtcattggacatgtcgactctgggagtcaactaccactggtcatttgatctacaagcttggaggtattgacaagcgtgtgattgagaggttcgagaaggaggctgctgagatgaacaagaggtcattcaagtatgcctgggtgcttga

SEQ ID NO: 121399 - DNA, 257 bp, Glycine max
ttctcaactgcgcggtgagtgagtgagagacggaaagtgcaaagccaccgtcttctcttctcagagcttggctttgcttatcgattctctctcctctcatctttctcattcaaggtttgtaaaagatggccgatgtgaggatattcaaccccttgtttgtgacaatggaactggaatggtcaaggctggatttgctggtgatgatgctcccagggctgtctttcccagtattgttggccgacctcgacacactggtg

SEQ ID NO: 121400 - DNA, 200 bp, Glycine max
ctcagtagtgtcatttacgcttctcttctctgcagcaactatgcctaaccctaaggtcttcttcgacatgaccatcggcggtcaatctgctggccgcatcgtgatggagctctacgccgacgtcactccccgcacgccgagaacttccgcgcgctttgcaccggcgagaagggcgtagggcggagcggcaagcccctcca

SEQ ID NO: 121401 - DNA, 255 bp, Glycine max
gccagatctcagacgagactcagtcacactttctctctttctcttccacaatgcagctcctccgggcggtgctcgcggcggcgctgctcctcctcgccactctctccgacgcccacaacatcacaaccatcctccaaagcaccctgagttctccaccttcaaccactacctgaccctgacccacctggccccggaaatcaacggcaaaaccaccatcaccgtctgcgccgtggacaacgccgccatgtcggacct

SEQ ID NO: 121402 - DNA, 256 bp, Glycine max
ggtagctacttctactacccttcccttgcattccacaaggcagcaggagatatatggtggattcaaaattgagagccgccccgggattccggtgccttttcctcctccagcaggagatttcacgatattggcagagactggtacaagagaaatcacacagatttgagggctattttggatggtggaagtgaccttcccttcccagatgggattatcatcaatggacgtggttccaatgcctacacatttacagttg

SEQ ID NO: 121403 - DNA, 258 bp, Glycine max
aaaattttcaaagtcgaagcgagaacttgccatttcgagggttttagggttagggttttctcaaattgcaagaacatgggtttcaacattcaaccctatgggattcagtccatgctcaaggaaggccataagcactttctggcctcgatgaagcggttctcaagaacatcgacgcctgcaaacaactttccactatcactcgaacttccctcggtcccaatgggatgaataagatggttataaatcacttggacaagc

SEQ ID NO: 121404 - DNA, 261 bp, Glycine max
gatcccattggtactgtcacttcctgcaacggtttattcattatccaaaaaagatcagctcaaggttagggtgaacactgtacttggttcagctgcaccacctttaacagttaagcttgtgcaagctttccgctctacgctaaagattcagctattgagagcaaggagctccaatatgatcaaaataatggaattcatttcttggaagctttcccagacaatgtagatgtgggaacttatgtgtttgtttttgagattgca

SEQ ID NO: 121405 - DNA, 260 bp, Glycine max
gcaaaacctaattttcatttcttccctcaaatttcaaaatgcgtgagatccttcacatccagggtggccaatgcggcaaccagatcggcgccaagttctgggaggtggtttgcgcggagcacgggatcgaccctacggaaggtacggtggggactcggagttgcagctcgagaggatcaatgtctactacaacgaggccagttgcggtcggttcgtgccgcgcgctgttctcatggacctcgaaccgggcaccatggaca

SEQ ID NO: 121406 - DNA, 255 bp, Glycine max
gatcccattggtactgtcacttcctgcaacggtttattcattatccaaaaaagatcagctcaaggttagggtgaacactgtacttggttcagctgcaccacctttaacagttaagcttgtgcaagctttccgtctaacgctaaagattcagctattgagagcaaggagctccaatatgatcaaaataatggaattcatttcttggaagctttcccagacaatgtagatgtgggaacttatgtgtttgtttttgag

SEQ ID NO: 121407 - DNA, 179 bp, Glycine max
atacaatcaaccaaccccttcactctctctctctctctcttgcaatggctgccattgttttcatccacattgcatcattggtctctctttttgttgcaacaagtgcaagaatccctggagtttacaccggtggccctggcagagtgctcatgccagcttctacggtggcagtgatgctt

SEQ ID NO: 121408 - DNA, 254 bp, Glycine max
cgagacagaggcacagagagaaaatggtttcggggtcagggatctgtgccaagagggtaattgtggacgcacgacaccacatgctggggaggctggcatcgatcgtggcgaaagaacttctgaatgggcagaggtggtggtggtacgctgcgaggagatttgcatctccggtgggctcgtcaggcagaagatgaagtacttgcgtttcctccgcaagcgcatgaacaccaagccctctcacggccccatccatt

SEQ ID NO: 121409 - DNA, 254 bp, Glycine max
caaaaacaatggcgacatcgctctccgtttcgccatctctctctctcaacactctcttcttcgccaaagcgcttcctctatctcgtccctcccttctctctctccctctccccaaatccctcctctctcttccacgcgccgccgcaccttcgccgtccgcgccgaatcccaaaacggcgccgatgccgtccccgcacactacgacttcgacctcttcaccatcggcgccggcagcggcggcgtccgagccgctc

SEQ ID NO: 121410 - DNA, 253 bp, Glycine max
cggcgctgccacccctgccggcctcatctccgcctccatcgcccatgcattcgccctcttcgtcgccgtctccgtcggcgccaacatctccggcggccacgtcaaccccgccgtcaccttcggcgccttcgcggcggcaacatcaccttcctccgcggcatcgtctacgtcatcgcccagctcctcggctccatcgtcgcctccctcctcctggccttcgtcaccgcctccactgttccagcattcggactct

SEQ ID NO: 121411 - DNA, 247 bp, Glycine max
aacttctgctacttcctactccaaccgcacttctgctccgcaattatcatgggcaaggtcaagatcggaatcaacggatttggaagaattggccgtttggtagccagagtggctctgcagagagacgagttgaactcgttgccgttaacgaccctttcatcaccaccgattacatgacatacatgtttaaatacgacagtgttcatggacactggaagcatcacgatgtcaccgttaaggacgagaa

SEQ ID NO: 121412 - DNA, 151 bp, Glycine max
caaatcttagccgccattgatttttcctcttccatttctcttactttctcagcctttttcgattacccatttggttatttcgccctaatggctcttgctccatccaaagtttccaccttttctggttttctcccaaacccagtgttggggg

SEQ ID NO: 121413 - DNA, 247 bp, Glycine max
cggagtcacggtggaggagcgcaacctcctctcggtggcctacaagaacgtgatcgggtctctgcgtgccgcgtggcgcatcgtgtcctccatcgaacagaaggaggaagggcgcaagaacgacgacacgtgtccctcgtgaagcactacagatccaaggtcgagaacgagctcacgcaggtctgcgccacatcctcaacctcctcgactccaacctcgtaccctccgtcttcgccagcgagtccaa

SEQ ID NO: 121414 - DNA, 248 bp, Glycine max
ctccattcaaacagtggtaccttcagcactatggtgttgagattggtaggaagaagaagacagctgccaagaaggaaactgcagaggagggtgctgctgctgttgctgtggaagaagccaaaaagagaatcatctgcagagaaaattggagaagcgccagaaagatcgtaagcttgatgctcacattgaggagcagtttggtggtgggcgtttgcttgcttgcatttcctctcggcctggtcaatgtg

SEQ ID NO: 121415 - DNA, 251 bp, Glycine max
cagaagaagatggcacaaacgctggcaatgcccgtggcaccttcgctagctatcatctccaattctcgcctctccaacacactctccgttcccgttctgaacaaaccaaaggttcaagggtcaagcataagtgcgttcgtgttggcggtgtggagattccgaacaacaagcgaatcgagtactcgctgcagtacattcatggagttggaaggaccagagcgaaacagattctctgtgatatccaaatggat

SEQ ID NO: 121416 - DNA, 255 bp, Glycine max
ttagaagagctcaatcctcctaacataattcttgttcatggagaagctaatgagatgggcaggctcaagcagaagctcataagtcaatttgctgatcgcaacactaaaattcttactccaaaaaactgtcatctgttgaaatgtatttcaattcgcagaaaatggcaaaaaccatagggaagctggctgaaaaaacaccagaagttggtgaaactgtcagtggtttgcttgtaaaaaaaggcttcacatatcaga

SEQ ID NO: 121417 - DNA, 245 bp, Glycine max
cccgccaccaaaccctagcttagcaaaatgccgagggaaatcatcactcttcaggttgggcaatgtgggaatcagatcggcatggagttctggaagcagctctgcctcgaacacggcatcagcaaagtggcatcctcgaagacttcgccactcaggggggtgaccggaaagacgtgttcttctatcaagccgatgaccagcattatataccacggggtctcctgattgacttggagccaagagtc

SEQ ID NO: 121418 - DNA, 249 bp, Glycine max
gtttgaatcgtgaaaatgttcagaaaccagtatgacacggacgtgacgacatggagcccggcggggaggctgttccaggtggagtacgcgatggaggcggtgaagcagggctcggctgcgataggctccgatccaagacccacgtggtcctcgcatgcgtcaacaaggctaactccgaactttcatcgcaccagaagaagatcttcaaggtcgacaaccacatcggcgtcgccatcgccggcctcaccg

SEQ ID NO: 121419 - DNA, 254 bp, Glycine max
gatcgagataactagaaacagtgtgatgaaaatgaaggtccttgttttcttcgttgctacaattttggtagcatggcaatgccatgcgtacgatatgttccctctccgaatgaacactggctatggtgcacgtactccggaggtgaaatgcgcaagttggaggcttgctgtggaagcacacaacatctttggctttgagaccattcctgaagagtgcgttgaagcaacaaaggaatacatccatggcgaacaat

SEQ ID NO: 121420 - DNA, 246 bp, Glycine max
ctagggttttagcgcacttcttctagatttaaggaagatgggtaaggaaaaggttcacatcagtattgtggtcattggccatgtcgactctgggaaatccactaccactggtcacctgatttacagcttggaggcattgacaagcgtgttattgagaggtttgagaaggaagctgctgagatgaacaagaggtctttcaagtatgcctgggtgctggacaaacttaaggctgagcgtgatagagga

SEQ ID NO: 121421 - DNA, 249 bp, Glycine max
gaacattaaagctgagtaactattcctcaatggaaggtgttctttactgtaagcctcactatgagcagctcttcaaggagagtggcgtccttcagcaagaacttccagtcacctgcaaagctagctataagacaactcctgagctgacaaggtctcctagtaaagctgcgagcatgttttctggcacacaagaaaagtgtgccacatgtggcaaaactgcttatccattagagaaggtaacagtggaag

SEQ ID NO: 121422 - DNA, 247 bp, Glycine max
gaatgcccgccacgtgtgcggcgaggatcttccagctgacccgagagctcggtcataaatccgacggcgaaaccatccggtggctcctcgagcacgccgagcccgccatcatcgccgccaccggaccggcacagtccccgccatcgcgatgtccgtcaatggaacgttaaagattccgaccacctcaccttccgatcaagaacccggagagccgcccgagaggaagatgcgcaaacgacccgcgaat

SEQ ID NO: 121423 - DNA, 242 bp, Glycine max
atttcagtgagtgatcggtgttcacttgatctcatcataatcgtcagcgtcaattgaagaagatgccgatcagaaacatcgccgtcggaaggcctgaagaggcgactcaccccgacacgttgaggcggctttggctgagttcatctcaaccttcatcttcgtgttcgccggctcaggctccggcatcgcctacaacaagctcaccgacaacggcgctgccacccctgccggcctcatctccg

SEQ ID NO: 121424 - DNA, 199 bp, Glycine max
ccttaacaagtcccaggcaattgtttagttagattgagttcgctgtaggattgtgttatcagttttgtcaactatagctcaatctttctgtgatagtatgttaattttgaggcaggttttgatcaatgtttatcatttcagtttcgtcatgaagcatatggattaacattagccctgattaaacggcacttttattacg

SEQ ID NO: 121425 - DNA, 247 bp, Glycine max
aaggaatccactctccacctcgtgcttcgcctcaggggtggcatgcaaatctttgtcaagactttgactggcaagaccatcaccctcgaggtcgaatcctcggacaccattgataatgtcaaggcaagatccaggacaaggagggtatccctccagatcagcagaggttgatatttgctggtaaacaacttgaggatggaagaacccttgctgattacaatattcagaaggagtctaccttacactt

SEQ ID NO: 121426 - DNA, 279 bp, Glycine max
gtgagaaggaggaagacgaagatgagcaaccacgtccaatcccattcccacgcccacaacctcgtcaagaagaagagcacgagcagagagaggaacaggaatggcctcgcaaggaggaaaaacgcggagaaaagggaagtgaagaggaagatgaggatgaggatgaggaacaagatgaacgtcaattcccattcccacgcccacctcatcagaaggaagagcgaaagcaagaggaagatgaggatgaggagcagcagcgagagacgaagaaagtgaaga

SEQ ID NO: 121427 - DNA, 279 bp, Glycine max
ctcgtagactgtgtggaagaaagcgaaggttgttacaatggatggcactatcaatcgttcgaatgggttttagaacatggtgggattgccactgatgatgattatccttacagagctaaagagggtagatgcaaagccaataagatacaagacaaggttacaattgacggatatgaaactctaataatgtcagatgagagtacagaatcagagacagagcaagcgttcttaagcgccatccttgagcaaccaattagtgtctccttgatgcaaaagatt

SEQ ID NO: 121428 - DNA, 275 bp, Glycine max
gcaatgactatgtcatttaatccaaacccgtgttctgatgcgtggagtttggaatttctgaagcgtaccggatttcattgtgatatcatttgtgtcactggatggactgccactccaatgcaggatgtacaggttacaattgattggtttatttcctctcaggaatgtgttcccaggacctattgtgttttaaatccacaaaatccttttgtgttaaataggtggatggggaaactgactttcccccagggcacttcccgagtgtcaaaagaatg

SEQ ID NO: 121429 - DNA, 279 bp, Glycine max
aacaaacacagacagacagagagagagaaagagaaccaaaccaaataaagctcttggttggttcacccttgtgcttattttttgttgctgagaaagagcaaagaagaagaataagaagaaggttttgatcggatgcgatgagcacacaaggacaagtgattgatgaggcggttctggatgacataatccggcgcctaacggaggtccgattggcccgacccggaaagcaggttcagctctccgagtctgagatcaagcaacttgcgtcgcttccagaga

SEQ ID NO: 121430 - DNA, 279 bp, Glycine max
tcaatatcctagtataccttaataaataatttaagatactatgatgagagcacggttcccattactgttgctgggacttgttttcctggcttcagtttctgtctcatttggcattgcttactgggaaaaagagaaccccaaacacaacaagtgtctccagagttgcaatagcgagagagactcgtacaggaaccaagcatgccacgctcgttgcaacctccttaaggtggagaaagaagaatgtgaagaaggtgaaattcccgaccacgaccacgacca

SEQ ID NO: 121431 - DNA, 280 bp, Glycine max
ggatttcattgtgatatcatttgtgtcactggatggactgccactccaatgcaggatgttcaggttacaattgattggtttatttcctctcaggaatgtgttcccaggacctattgtgttttaaatccacaaaatccttttgtgttaaataggtggatggggaaactgactttcccccagggcacttcccgaagtgtcaaaagaatgcctctttctatagggggaggagctggtgcaaagaatgctattctcatgaatatgcaaatgctgttctttcaat

SEQ ID NO: 121432 - DNA, 278 bp, Glycine max
tgataaaccgcgatcacaggttgccgcaccttaaaaccggaaacaaaagcaatcgttacttgatttcaagaatttctcaatttctttctacttctttgtgtacgatttcttaagggaaagaaaatcactctctgtgctggccacagacttcgtgaatcattttcttttccacttttagtttatttgctgaacactctcctatttgatataggacttcgtgtcagatttaaacttcttctgtttctttctcagttctctgttcaatttcaagttcaagc

SEQ ID NO: 121433 - DNA, 276 bp, Glycine max
aggaaattgaggaaaaacttgtgaggaggaacaatgatccgagtctgcagggcaatcgacttggcccggttcaactgccatacactttgctttatcctagcagtgagggcaatcgacttggcccggttcaactgccatacactttgctttatcctagcagtgaggaagggttaacttttaggggaattccaaatagcatctctatctaagggagcctgtggtttactctaattactctatatatagtgcatgtgtacctccaataaaaaagatgca

SEQ ID NO: 121434 - DNA, 276 bp, Glycine max
ccgaaatgttaagagaatgcctctttctatagggggaggagctggtgcaaagactgctattctcatgaatatgccaaatgctgttctttcaatgtggagatattttgttggagatctcgtctttgaagtttctaagatgacttctccctacattaaatgtacagtctctttcttcatagcatttggaaatttggctgatgacaccatcaattttgaggcttttccccacaagctggtacagtttggagagattcaggaaaagttgtattgaaattt

SEQ ID NO: 121435 - DNA, 276 bp, Glycine max
atcatcgcccaagggaaaggagcacttggagttgcaattccaggatgtcctgagacgtttgaggagccacaagaacaatcaaacagaagaggctcaaggtcgcagaagcagcagctacaggacagtcaccagaagattcgtcacttcaatgaaggagacgtactcgtgattcctcctggtgttccttactggacctataacactggcgatgaaccagttgttgccatcagtcttcttgacacctctaacttcaataacagcttgatcaaaccccta

SEQ ID NO: 121436 - DNA, 277 bp, Glycine max
gagagaagtaatggcgaacatagacatcgaagggatcttgaagcagcagcagccttatgatgggcgcgttccgaagacgtagatagtgtgtactttgggccctgcttctcgatccgtagaaatgaccgagaagcttctgagggcagggatgaacgttgctcgtttcaatttctctcatggcacccacgactatcaccaggaaaccctcaacaatctcaagactgccatgcacaacactggcatactctgtgccgtcatgctgacactaagggacctg

SEQ ID NO: 121437 - DNA, 275 bp, Glycine max
cttaattattaacacttccttagttcaatatggggaagcccttacactctctctctttcttccctttgcttgctactcttgtcgagtgcatgctttgctattagctccagcaagctcaacgagtgccaactcaacaacctcaacgcgttggaacccgaccaccgcgttgagtccgaaggtggtttgattcaaacatggaactctcaacaccctgagctgaaatgcgccggtgtcactgtttccaaactcaccctcaaccgcatggcctccacttg

SEQ ID NO: 121438 - DNA, 273 bp, Glycine max
atgaaactctaataatgtcagatgagagtacagaatcagagacagagcaagcgttcttaagcgccatccttgagcaaccaattagtgtctccattgatgcaaaagattttcatttatacaccgggggaatttatgatggagaaaactgtacaagtccgtatgggattaatcactttgttttacttgtgggttatggttcagcggatggtgtagattactggatagcgaaaaattcatggggagaagattggggagaaatggttacatttggat

SEQ ID NO: 121439 - DNA, 276 bp, Glycine max
gttccaaactctcttcaaaaaccaatatggccacgttcgcgtcctccagaggttcaacaaacgctcccaacagcttcagaatctccgagactaccgcattttggagttcaactccaaacccaacacccttcttctcccccaccatgctgacgctgattacctcatcgttatccttaacgggactgccattcttaccttggtgaacaacgacgaccgagactcttacaaccttcaatctggcgatgccctaagagtccctcaggaaccacatactat

SEQ ID NO: 121440 - DNA, 275 bp, Glycine max
tgatccttttcttggtggaattcaaaaatatgccactcccatgatgcccctagatgaagaaattctttctaaggttgcacaagatatagttgaggaatggtttgattgtgttgatgaggaggattcctttgaggaagtttctttgagtgcagcactcaatggtgttgagggtttggactatatggaaagaattcctcttgccacatctgagggttttcctcatgtgctttcacgcaaaaatggtgaaaaaggcaaaaggaatttgtttctgggga

SEQ ID NO: 121441 - DNA, 276 bp, Glycine max
caagtgttgatttgcagcgcactcatcgtattaaaggaatgattaaaatggtggccacagttggtattcctgagaatacaggtatatcattggcctgtgctatgaatagttcttttagggggcgtgccagttctgatatttacaccatctgctctcaagactgtgaattatggaatcctgcttgcacaaaagcaatgactatgtcatttaatccaaacccgtgttctgatgcgtggagtttggaatttctgaagcgtaccgatttcattgtgatat

SEQ ID NO: 121442 - DNA, 188 bp, Glycine max
gaaatttcgataaaccgcgatcacaggttgccgcaccttaaaaccggaaacaaaagcaatcgttacttgatttcaagaatctctcaatttcttcctacttctttgtgtacgatttcttaagggaaagaaaatcactctctgtgctggacacagacttcgtgaatcattttcttttccactcttagtat

SEQ ID NO: 121443 - DNA, 275 bp, Glycine max
cacaaaacttccacttgagagaaaagtagtgtattaagactacaaattttcaatttttcaatggcgtcgaggcaacaaaaagaggatcgagctgaggcagctgcgaaagttgctgcgaaagaactcgaacaactcaaccgagaaaaagaccgtgatttcagtgttggtgttgcagaccaacaccaacaagaagaacatcagttagatcaacaaaagcgtggtgtaatcggatccatgttcaaggcggtgcaagacaccacgagaacgccaaggaa

SEQ ID NO: 121444 - DNA, 271 bp, Glycine max
tactagttcaatatcctagtataccttaataaataatttaagatactatgatgagagcacggttcccattactgttgctgggacttgttttcctggcttcagtttctgtctcatttggcattgcttactgggaaaaagagaaccccaaacacaacaagtgtctccagagttgcaatagcgagagagactcgtacaggaaccaagcatgccacgctcgttgcaacctccttaaggtggagaaagaagaatgtgaagaagtgaaattccacga

SEQ ID NO: 121445 - DNA, 249 bp, Glycine max
agtacaccgtattaaagaatttaagatatactatgatgagagcgcggttcccattactgttgctgggagttgttttcctggcatcagtttctgtctcatttggcattgcgtattgggaaaagcagaaccccagtcacaacaagtgcctccgaagttgcactagcgagaaagactcctacaggaaccaagcatgccacgctcgttgcaacctccttaaggtggaggaagaagaagaatgcgaagaaggtc

SEQ ID NO: 121446 - DNA, 276 bp, Glycine max
cttaattattaacacttccttagttcaatatggggaagccctacactctctctctttcttccctttgcttgctactcttgtcgagtgcatgctttgctattagctccagcaagctcaacgagtgccaactcaacaacctcaacgcgttggaacccgaccaccgcgttgagtccgaaggtggtttgattcaaacatggaactctcaacaccctgagctgaaatgcgccggtgtcactgtttccaaactcaccctcaaccgaatggcctccacttgcc

SEQ ID NO: 121447 - DNA, 278 bp, Glycine max
cttattaacactttccttagttcaatatggggaagcccttcttcactctctctctttcttccctttgcttgctactcttgtcgagtgcatgctttgctattacctccagcaagttcaacgagtgccaactcaacaacctcaacgcattggaacccgaccaccgcgttgagtccgaaggtggtcttattgaaacatggaactctcaacaccctgagctgcaatgcgccggtgtcactgtttccaaacgcaccctcaaccgaacggcctccacttgccat

SEQ ID NO: 121448 - DNA, 272 bp, Glycine max
ctctccattgtctttgaacactcatcaccatggccaagcttgttctttccctttgtttccttcttttcagtggctgcttcgctctgagagagcaggcacagcaaaatgagtgccagatccaaaagctgaatgccctcaaaccggataaccgtatagagtcggaaggtgggttcattgagacctggaaccctaacaacaagccattccagtgtgccggtgttgccctctctcgctgcacccttaaccgcaatgccctcgtagaccttcctaca

SEQ ID NO: 121449 - DNA, 274 bp, Glycine max
acgaccaccagaatctcaaaataatcaaacttgccatacccgtcaacaaacctggcagatatgatgatttcttcttatctagcactcaagcccaacagtcctacttgcaaggcttcagccataatattctagagacctccttccatagcgaattcgaggagataaacagggttttgttgggagaggaagaggagcagaggcagcaagagggagtgatcgtggaactctcaaaggaacaaattcggcaactgagcagcgtgccaaatctagttca

SEQ ID NO: 121450 - DNA, 187 bp, Glycine max
tgaaattttgatagaccgcgatcacaggttgccgcaccttaaaaccggaaacaaaagcaatcgttacttgatttcaagaatctctcaatttcttcctacttctttgtgtacgatttcttaagggaaaggaaatcactctctgtgctggccacagacttcgtgaatcattttcttttccacacaacat

SEQ ID NO: 121451 - DNA, 274 bp, Glycine max
tggtgaacaagtcctcaagtttccaccacctcatgtcattcaagtgagtaagtctgcatggatgaccgatgaagaatttgcaagagagatggttgcgggtgtaaatccatgcgtaattcgtggtcttcaagagtttcctccaaaaagcaatctggatcctacaatctatggtgagcaaaccagtaagataacagcagatgcccttgatctagatggatacacagtggacgaggcactagcaagtcggaggttatttagttagattaccatgatg

SEQ ID NO: 121452 - DNA, 272 bp, Glycine max
attcttcagaagatttttctgaaaaggaagatcaagaaaaacccaaaaagattgatgccagattgagacaaagaatagatcctcaatacaatgaggttcaggctcagatggaaacaaatttgtttaaattgtctcttgatgatgttgaaactcctaaaggttccatgttggatcttaaaatttctcaatctaaaattgcacttcccaaaaacacagttggaggaaccattctgcgtagtgacctattggcaaatttttgacagagggcaatt

SEQ ID NO: 121453 - DNA, 275 bp, Glycine max
tctcgagccgattcggctcgaggaaagtcttccatagccccccatcaatgaagagcaccatcttctttgctctctttctcatttgtgccttcaccacctcatacctaccttcagccatcgctgatttcgtgctcgataatgaaggtaaccctcttgaaaatggtggcacatattatatcttgtcagacataacagcatttggtggaataagagcagccccaacgggaaatgaaagatgccctctcactgtggtgcaactcgcaatgagctcgaca

SEQ ID NO: 121454 - DNA, 273 bp, Glycine max
ggcacaggaggaaattctgtcttctagtgcaagtgatttcagaactgcaatggtgagtaaaaatagcaagcctcaagctactgcaatgcatgtgggagctatagaaattatcattgatagtttcgcaagtcctgactgcaacatagttggtgcaatgcttttggttgatacttatcataccaatcctgaaaatgcagttcgtagtatttttgttgcgcctttcagaggcggaaggcccattcgggtggttacattccgaataccattgtgcag

SEQ ID NO: 121455 - DNA, 272 bp, Glycine max
aaaactacccttttgcttttgctctttgttctttgccatggagtggctacaacaacaatggccttccatgatgatgagggtggtgataaaaagtcaccaaaaagtttgtttttgatgagcaactccacgagggttttcaagtctgatgcaggggaaatgcgtgtgctgaaaagccatggtggtaggatattttataggcacatgcacattggcttcatctctatggaaccaaagtccttgtttgttcctcagtactcgactctaatctcatc

SEQ ID NO: 121456 - DNA, 269 bp, Glycine max
ctcgagccgtgccagttctgatatttacaccatctgctctcaagactgtgaattatggaatcctgcttgcacaaaagcaatgactatgtcatttaatccaaacccgtgttctgatgcgtggagtttggaatttctgaagcgtaccggatttcattgtgatatcatttgtgtcactggatggactgccactccaatgcaggatgttcaggttacaattgattggtttatttcctctcaggaatgtgttcccaggactattgtgttttaaa

SEQ ID NO: 121457 - DNA, 271 bp, Glycine max
caattcaccacttgcctctctcgctaccctacctcaaagggtgctctaatcttcggggatgcaccaaacaacatgcaacaatttcacaaccaagatattttccacgatttggctttcaccccattaaccgtcacaccacaaggagaatacaacgtgagagtcagctccataagaatcaaccagcacagtgtgttcccaccgaacaagatatcatcaaccatcgtagggtcttctggaggaacaatgattagcacctaactcctcacatggt

SEQ ID NO: 121458 - DNA, 272 bp, Glycine max
tttgaagtttctaagatgacttctccctacattaaatgtacagtctctttcttcatagcatttggaaatttggctgatgacaccatcaattttgaggcttttccccacaagctggtacagtttggagagattcaggaaaaagttgtattgaaattttcacaagaggaatttcttacagcttggtcaacccaggtgcgtcctgcaacaactctgttggctgatgggtgtccatatttgtatgctatggtgcatgaagttcagtgtctacaata

SEQ ID NO: 121459 - DNA, 270 bp, Glycine max
cgaaaggaagcagatcgtgacagtggaaggaggtctcagcgttatcagccccaagtggcaagaacaacaagatgaagatgaagatgaagacgaagatgatgaagatgaacaaattccctctcaccctcctcgccgaccaagccatggaaagcgtgaacaagacgaggacgaggacgaagatgaagataaacctcgtcctagtcgaccaagccaaggaaagcgtgaacaagaccaggaccaggacgaggacgaagtgaagatgaagatcaa

SEQ ID NO: 121460 - DNA, 192 bp, Glycine max
taagatttgaaattttgataaaccgcgatcacaggttgccgcaccttaaaaccggaaacaaaagcaatcgttacttgatttcaagaatctctcaatttcttcctacttctttgtgtacgatttcttaagggaaagaaaatcactctctgtgctggccacagacttcgtgaatcattttcttttccacacaac

SEQ ID NO: 121461 - DNA, 273 bp, Glycine max
ccattactgatggtattgacaagactagtgcaactttgcaatttagaaagttagcagattgtgattttctcaagagaaactttaagcagatgtctaatgttttgtgggtagctcctgaggacaaggcgagtttatggtcacaacttcattatgtttcgtgtaataatctggaaatgcaagaagcttatcttgtcaatctcgtaaatgtgttacgagaattgtatttgcacagtccagaggaagctcgccaattgagaaggaaagctctctctc

SEQ ID NO: 121462 - DNA, 269 bp, Glycine max
cttggttgtttattatacaatagcaactcgatttagaaaatttctaccgcattacattaggtggcatctgtataccttgttgatctacattctcccatcttttctcactgctgaaattaaatataagcggaatcagagtaatattcagatttccggcttattttacgacggcagatacaaattctggactaaacacgagaaaaatcttgctttgacagaagaggaaaagatggaagtgattagaaatagaggattcctgctgatgttct

SEQ ID NO: 121463 - DNA, 271 bp, Glycine max
acgagcagcaacaaagaccccaggaagaggaagaagaagaagaggatgagaagccacagtgcaagggtaaagacaaacactgccaacgcccccgaggaagccaaagcaaaagcagaagaaatggcattgacgagaccatatgcaccatgagacttcgccacaacattggccagacttcatcacctgacatctacaaccctcaagccggtagcgtcacaaccgccaccagccttgacttcccagccctctcgtggtcagactcagtgctgag

SEQ ID NO: 121464 - DNA, 272 bp, Glycine max
aacttattaacactttccttagttcaatatggggaagcccttcttcactctctctctttcttccctttgcttgctactcttgtcgagtgcatgctttgctattacctccagcaagttcaacgagtgccaactcaacaacctcaacgcgttggaacccgaccaccgcgttgagtccgaaggtggtcttattgaaacatggaactctcaacaccctgagctgcaatgcgccggtgtcactgtttccaaacgcaccctaaccgcaacggcctcca

SEQ ID NO: 121465 - DNA, 272 bp, Glycine max
tatatatactatgatgagagtgcggtttcctttgttggtgttgctgggaactgttttcctggcatcagtttgtgtctcattaaaggtgagagaggatgagaataaccctttctacttgagaagctctaacagcttccaaactctctttgagaaccaaaacggtcgcattcgtctcctccagagattcaacaaacgctccccacaacttgagaaccttcgagactaccggattgtccagtttcagtcaaaacccacacaatccttctccccca

SEQ ID NO: 121466 - DNA, 270 bp, Glycine max
caggagctgaacccttccttcgtaagaaatcaaagtgccaccctttacatcagccaatgagttcaagtcaatagagaagttcaaaattttcaacacaaataatttgtgggtgaacttaaacgcagttaaaaggcttgttgaagctgatgctcttaagatggaaattattcccaatccaaaggaagttgacggaataaaagttcttcagctggaaactgcagctggtgctgcaataaggttctttgacaaggctatgggattaatgttcct

SEQ ID NO: 121467 - DNA, 197 bp, Glycine max
ctcgagccgaatcggctcgagtaaaccgcgatcacaggttgccgcaccttaaaaccggaaacaaaagcaatcgttacttaatttcaagaatttctcaatttctttctacttctttgtgtacgatttcttaagggatagaaaatcactctctgtgctggccacagacttcgtgaatcattttcttttccacacaaaat

SEQ ID NO: 121468 - DNA, 267 bp, Glycine max
ctctccattggtccttaaacactcatcagtcatcaccatggccaagctagttttttccctttgttttctgcttttcagtggctgctgcttcgctttcagttccagagagcagcctcagcaaaacgagtgccagatccaaaaactcaatgccctcaaaccggataaccgtatagagtcagaaggagggctcattgagacatggaaccctaacaacaagccattccagtgtgccggtgttgccctctctcgctgaccctcaaccgcaac

SEQ ID NO: 121469 - DNA, 267 bp, Glycine max
actcatcagtcatcaccatggccaagctagttttttccctttgttttctgcttttcagtggctgctgcttcgctttcagttccagagagcagcctcagcaaaacgagtgccagatccaaaaactcaatgccctcaaaccggataaccgtatagagtcagaaggagggctcattgagacatggaaccctaacaacaagccattccagtgtgccggtgttgccctctctcgctgcaccctcaaccgcaacgccctcgtagaccttccta

SEQ ID NO: 121470 - DNA, 271 bp, Glycine max
gactagttctagtggagatctcgtctttgaagtttctaagatgacttctccctacattaaatgtacagtctctttcttcatagcatttggaaatttggctgatgacaccatcaattttgaggcttttccccacaagctggtgcagtttggagagattcaggaaaaagttgtattgaaattttcacaagaggaatttcttacagcttggtcaactcaggtgcgtcctgcaacaactctgttggctgatgggtgccatatttgtatgctatgg

SEQ ID NO: 121471 - DNA, 273 bp, Glycine max
ttgtctttgaacactcatcaccatggccaagcttgttctttccctttgtttccttcttttcagtggctgcttcgctctgagagagcaggcacagcaaaatgagtgccagatccaaaagctgaatgccctcaaaccggataaccgtatagagtcggaaggtgggttcattgagacctggaaccctaacaacaagccattccagtgtgccggtgttgccctctctcgctgcacccttaaccgcaatgcccttcgtaaccttcctacaccaacggt

SEQ ID NO: 121472 - DNA, 270 bp, Glycine max
ggaacaggaatggcctcgcaaggaggaaaaacgcggagaaaagggaagtgaagaggaagatgaggatgaggatgaggaacaagatgaacgtcaattcccattcccacgcccacctcatcagaaggaagagcgaaagcaagatgaagatgaggatgaggagcagcagcgagagagcgaagaaagtgaagattctgagttacgaagacatgagaataagaacccttttctcttcggctctaacaggttcgaaactccttcaaaaaccaatat

SEQ ID NO: 121473 - DNA, 267 bp, Glycine max
  unsure (1)..(267): unsure at all n locations
ggacagtgagaaaactttgtcagcaanaaaagttccaagctgaatgtcggatatcttctaaagtgggattagaataaagacctatttagaagatatcccacattcagcttgggaccttttttgctgggacagtgagaaaactttgccaaataatttttctgcagaattgctctcttgcaaattggatactgttactggccaatattatcctcagtgggctccgattaattgtcgagttcatcgacaaccattcacatcactgaagga

SEQ ID NO: 121474 - DNA, 269 bp, Glycine max
agatcatacatagtagtgttggtgggttgcaaagatgcttgggggtcttctccataggggtcataagataaaagggacagtggtgttgatgcgcaagaatgtgttggacgtgaatagcgtaaccagcgttgggggaattattggtcaaggtctcgacttagttggctcaacactcgatactcttactgccttcttgggccgatccgtgtctctccagcttattagtgctaccaaagctgatgccaacggaaaaggaaacttggaaaggc

SEQ ID NO: 121475 - DNA, 269 bp, Glycine max; identical to SEQ ID NO: 104225

SEQ ID NO: 121476 - DNA, 268 bp, Glycine max
agacgtactcgtgattcctcctggtgttccttactggacctataacactggcgatgaaccagttgttgccatcagtcttcttgacacctctaacttcaataaccagcttgatcaaacccctagggtattttaccttgctgggaacccagatatagagtacccagagaccatgcaacaacaacaacagcagaaaagtcatggtggacgcaagcaggggcaacaccagcaggaggaagaggaagaaggtggcgcgtgctcagtggcttca

SEQ ID NO: 121477 - DNA, 266 bp, Glycine max
gaagaaattcaaccaagcgcgggtaaacggcgggagtaactatgactctcttaaggtagccaaatgcctcgtcatctaattagtgacgcgcatgaatggattatcgagattcccactgtccctgtctactatccagcgaaaccacagccaagggaacgggcttggcggaatcagcggggaaagaagaccctgttgagcttgactctagtccgactttgtgaaatgacttgagaggtgtaggataagtggagctggaaacagcgaaa

SEQ ID NO: 121478 - DNA, 265 bp, Glycine max
ggagagattcaggaaaaagttgtattgaaattttcacaagaggaatttcttacagcttggtcaactcaggtgcgtcctgcaacaactctgttggctgatgggtgcccatatttgtatgctatggtgcatgatagttcagtgtctacaataccaggtgattttgtcattggtgttaagttgacaaccataaacaatatgtgtgcatatgggctcaatcctggtatttcaggttctcgtcttttgggcacattcctcagtccatttc

SEQ ID NO: 121479 - DNA, 264 bp, Glycine max
catgggaaacaaaactacccttttgcttttgctctttgttctttgccatggagtggccacaacaacaatggccttccatgatgatgagggtggtgataaaaagtcaccaaaaagtttgtttttgatgagcaactccacgagggttttcaagactgatgcaggggaaatgcgtgtgctgaaaagccatggtggtaggatattttataggcacatgcacattggcttcatctctatggaaccaaagtccttgtttgttcctcagta

SEQ ID NO: 121480 - DNA, 264 bp, Glycine max
caaggtttcagcttttgagtaccactaccaatggtgattttgttcaagggaaagatctcgcaatggttaaagttaatgtagcatgtgctgctgttggcttgacatcaagttacactccaactccattgttggaatctggtttgcaaaaagacagagggttaattgtggagtattttggaaggatgtcttacgttgctcataacgttaatcagccccaagagaaagatttgttggagggaaatttttccttgatattaaatctcg

SEQ ID NO: 121481 - DNA, 270 bp, Glycine max
cctagatgaagaaattctttctaaggttgcacaagatatggttgaggaatggtttgattgtgttgatgaggaggattcctttgaggaagtttctttaagtgcagcactcaatggtgttgagggtttagactatatggaaagaattcctcttgccacatctgagggttttcctcatgtgctttcacgcaaaaatggtgaaaaaggcaaaaggagatttgtttctggggatggtgaagagatgacattgattccgggaccagtgttgaagag

SEQ ID NO: 121482 - DNA, 271 bp, Glycine max
aaaaggtttcgttcaaagtcacactcacctccgatccaaagttacccttcaaagtgtttagcgttccagaggcggcaccttttactgccgttctcaaattcgccgccgaagaattcaaagtcccgccccagaccagcgctatcatcaccaacgatggtgttggcataaatccccagcagagcgcaggcaatgtcttccttaagcatggttcagaactgcgcctgattccgcgtgatagggtcggtgccttttagatgttacgggtgtctga

SEQ ID NO: 121483 - DNA, 264 bp, Glycine max
gtgcggtttcctttgttggtgttgctgggaactgttttcctggcatcagtttgtgtctcattaaaggtgagagaggatgagaataaccctttctacttgagaagctctaacagcttccaaactctctttgagaaccaaaacggtcgcattcgtctcctccagagattcaacaaacgctccccacaacttgagaactgtcgagactaccggattgtccagtttcagtcaaaacccaacacaatccttctccccaccatgctgacg

SEQ ID NO: 121484 - DNA, 267 bp, Glycine max
taaaattcttccaccaagttatgggtttccttgtgttgcttcttttctccctcttaggtctctcttctagttccagcatatcaactcatcgttccatattggaccttgacctaaccaagtttaccacacagaaacaggtgtcttcactgttccaactatggaagagtgagcatggacgtgtctaccataaccacgaagaagaggcaaagagacttgagattttcaagaataacttgaactatatcagggcatgaatgcaaacagaaa

SEQ ID NO: 121485 - DNA, 266 bp, Glycine max
ccttgctctatactacacagtacacacactagaagaataatggcttccatcctccactactttttagccctctctctttcttgctcttttcttttcttcttatccgactcagtcacccctacaaaaccaataaaccttgttgttctacccgttcaaaatgatggttccacagggctccattgggccaacctccaaaaaagaacccctctaatgcaagtaccagtcctggtggacctcaatggaaatcactgtgggttaactgtgag

SEQ ID NO: 121486 - DNA, 262 bp, Glycine max
gttcctcactgaccaagccaatgcgatgagaaccaaactttctttagctatctttgtcttttttcttttagccttattttcaaacctagcctttggcaaatgtaaagaaaccgaggtagaagaagaagaccctgagctcgtaacatgcaaacaccaatgccaacagccacagcaatacactgagggtgacaagcgggtatgcttgcaaagatgtgacaggtatcatcgtatgaagcaagagcgagagaacaaatccaagagg

SEQ ID NO: 121487 - DNA, 268 bp, Glycine max
gggagttgatcctggaactaaccctgtttgccatttccttggaagcaaggccattttatgggtacccaatttatctatggacactgcctatcagactaacgttgttgtttaattagtccatgcatctgcatcttgggcaccataagattgtatataaaataaattatggtgtgttgtgtatgttgtgcaagacctggaacttcacctttctacgtacgtgtgctgttaggatgcagtgtgctttgatgatctttgatgaatatgcagt

SEQ ID NO: 121488 - DNA, 265 bp, Glycine max
gtacgatttcttaagggaaagaaaatcactctctgtgctggccacagacttcgtgaatcattttcttttccactcttagtttattttctgaacactctcctatttgatataggacttcgtgtcagatttaaacttcttctgtttctttctcagttctctgcttaatttcaagttcaagctggtgaaatcttggattagtgctctcactcttctatctggtataggacttcgtgggtagacttttccattctctcctttctttcac

SEQ ID NO: 121489 - DNA, 188 bp, Glycine max
tgaaattttgataaaccgcgatcacaggttgccgcaccttaaaaccggaaacaaaagcaatcgttacttgatttcaagaatctctcaatttcttcctacttctttgtgtacgatttcttaagggaaagaaaatcactctctgtgctggccacagacttcgtgaatcattttcttttccactcttagtt

SEQ ID NO: 121490 - DNA, 266 bp, Glycine max
tgacaatctaattctgcaaaaatggcaagcaataaggagtctaagttcccagcacagagccagaaaactcagccaggaaaagaacatgtaatgaatccactcccacaagccacaaatcctgatcacaaggccgccaataaactccagggaaaggtggcgttggtgacaggaggtgactcaggaattggcagagcggtttacctgtgtttcgcaaaagagggtgcaaccgtggcctttacatacgtaaaggccatgaggacagggat

SEQ ID NO: 121491 - DNA, 263 bp, Glycine max
attttgattctagcaagcagagcttttgtcagttttctattgaccttctcggtggaggaatcttagtggacaaaactggagattggatcacacttatacaaaattctccaattagtaacttgttgagagttgctgcttggaagaaaggctgtttaatggtcaagattgtgatgtctgggaatgcagcagtcaaaaggagtgattgggcctcattggtacaagtgtttttaacaaacagcaacagtacgagcattttgatgcat

SEQ ID NO: 121492 - DNA, 262 bp, Glycine max
atggtactgcaattgatcccaaaaggggttctgttagcaacattgcacctttggcaattggactcattgttggggcaaacatccttgttggtgggccatttgatggagcctgcatgaaccctgctctagcttttgggccttccttagtgggctggagatggcaccaacactggatcttctgggtgggtccactgattgggtgtgcactggcagcactggtgtatgaatatgttgtgatcccaactagccccctcatcaacac

SEQ ID NO: 121493 - DNA, 267 bp, Glycine max
atggaatttcgatgctcagtcatctcttttaccattctcttctctcttgctcttgcaggagagagccatgtccatgcatcgctacctgaggaagattattgggaagctgtttggccaaacactcccattcccactgcactgcgagagcttctaaagcctctccctgcaggtgttgaaatcgatgaactccctaagcaaattgatgatacacagtacccaaaaacattcttctataaagaagaccttcatcaggcaaaacaatgaaag

SEQ ID NO: 121494 - DNA, 274 bp, Glycine max
tctcgagccgctcgagccgctcgagcggtgaggtagatctacggttaaattggtgtagtgtggtaagctgggaggaggatttagagtgacttcacttagttaggccatttctctcgtttcttcctgaagttcaaactgctgacaggaaagtgccatttagagagaaggtcatatacactgtgatctctcttttcattttcctggtttgtagtcagctccctctatatgggatacactcaacaacatgtgctgatccattctattggatgcgtgt

SEQ ID NO: 121495 - DNA, 268 bp, Glycine max
gtgttggtgggttgcaaagatgcttgggggtcttctccataggggtcataagataaaagggacagtggtgttgatgcgcaagaatgtgttggacgtgaatagcgtaaccagcgttgggggaattattggtcaaggtctcgacttagttggctcaacactcgatactcttactgccttcttgggccgatccgtgtctctccagcttattagtgctaccaaagctgatgccaacggaaaagggaaacttggaaaggctacctttttggaa

SEQ ID NO: 121496 - DNA, 269 bp, Glycine max
cacacacacacacacactaagaataatggcttctatcctccactactttttagccctctctctttctttctctttccttttcttcttatccgactccgtccccattccccaacaccacactaaccctacaaaacctataaaccttctggttctacccgttcaaaatgatgcttccacagggctccattgggccaacctccaaaaaaggacccctctaatgcaagtaccagtcctggtggacctcaatggaaaccacttgtgggttaact

SEQ ID NO: 121497 - DNA, 272 bp, Glycine max
agtacaccgtattaaagaatttaagatatactatgatgagagcgcggttcccattactgttgctgggagttgttttcctggcatcagtttctgtctcatttggcattgcgtattgggaaaagcagaaccccagtcacaacaagtgcctccgaagttgcaatagcgagaaagactcctacaggaaccaagcatgccacgctcgttgcaacctccttaaggtggaggaagaagaagaatgcgaagaaggtcaaattccacgaccacgaccacaa

SEQ ID NO: 121498 - DNA, 97 bp, Glycine max
aaattaattaagagcaccgagcactattagtttgcgtttagcttctgtcatgtttattaagatatatttcgcagattgtaacacaaaattttgtggc

SEQ ID NO: 121499 - DNA, 170 bp, Glycine max
taaaccgcgatcacacgttgccgcaccttaaaaccggaaacaaaagcaatcgttacttgatttcaagagtctctcaatttcttcctacttctttgtgtacaatttcttaaggtaaagaagatcactctctgtgctggccacagacttcgtgaatcattttcttttccaca

SEQ ID NO: 121500 - DNA, 272 bp, Glycine max
atcaccatggccaagcttgttctttccctttgtttccttcttttcagtggctgcttcgctctgagagagcaggcacagcaaaatgagtgccagatccaaaagctgaatgccctcaaaccggataaccgtatagagtcggaaggtgggttcattgagacctggaaccctaacaacaagccattccagtgtgccggtgttgccctctctcgctgcacccttaaccgcaatgcccttcgtagaccttcctacaccaacggtccccaggaaatcta

SEQ ID NO: 121501 - DNA, 270 bp, Glycine max
tgcagatcatgatgactattgttgatgaccttgtatcagtggacactcttgttgaggaacgcttgacagttgagccatgcaacgagtatatccagagctgtgacattgttgcattcaacaaaatctaagttttcttgttgacttttgagtttggccattttcaagcggctgatcagtctgttactcttcctttaatcgttcatgtttggtctgtttcaatggtggttttcttgcaagaattgtgagaagtaaagagatattatagatata

SEQ ID NO: 121502 - DNA, 170 bp, Glycine max
tgaaattttgataaaccgcgatcacaggttgccgcaccttaaaaccggaaacaaaagcaatcgttacttgatttcaagaatctctcaatttcttcctacttctttgtgtacgatttcttaagggaaagaaaatcactctctgtgctggccacagacttcgtgaatcattt

SEQ ID NO: 121503 - DNA, 254 bp, Glycine max
cacctttgttcactcttcttctcttgcggctagggttttagcgcagttcttctagatttaaggaagatgggtaaggaaaaggttcacatcagtattgtggtcattggccatgtcgactctgggaaatccactaccactggtcacctgatttacaagcttggaggcattgacaagcgtgttattgagaggtttgagaaggaagctgctgagatgaacaagaggtctttcaagtatgcctgggtgctggacaactt

SEQ ID NO: 121504 - DNA, 272 bp, Glycine max
aacaattccttcacttgcagcactgttgcatcatcatcttcattgcaaaaccctaaacttcaccttcaaccatgaccacacaagtaccaccacacagtgtccaagtccacacaacaacacaccgctacgaagctggcgtcgtcccccccggagcccgtttcgaaccgccgcgttatgaagccggcgtcaaagcgccctccatttaccattccgagagaggtccaacgacttcccaggtcctcgccgtcctcgccggcctcccggtcggtggc

SEQ ID NO: 121505 - DNA, 278 bp, Glycine max
caaaagggtctgagagacaggggaaggtatccaagctggccaaaggagagatgctaatgttgaacattggatcaatgtcgacgggggctagagtagttgctgtgaagaatgacttggcgaagttgcaacttacttcccctgtgtgcactagcaagggtgagaagattgcacttagtcgacgtgttgagaagcattggcgtcttatcgggtggggacaaatccaagctggaatcactcttgatgtccctcccgccccccatctgagttgaacactgatc

SEQ ID NO: 121506 - DNA, 211 bp, Glycine max
ctcgagccgctcgagccgaatcggctcgagtgataaaccgcgatcacaggttgccgcaacttaaaacacggaaacaaaagcaatcgttacttgatatcaagaatctctcaatttcttcctacttctttgtgtacgatttcttaagggaaagaaaatcactctctgtgctggccacagacttcgtgaatcattttcttttccacacaacata

SEQ ID NO: 121507 - DNA, 270 bp, Glycine max
cgttcatcatggttcggttcagcaacaacgtgatcggactcctgaacttcctgaccttcctcctctccatcccgatcctggtggccggagtgtggctgagcaagcagggcgccaccgagtgcgagcggtggctggagaagccggtgatcgcactcggcgtcttcctcatgctcgtctcactcgccggcctcgtcggcgcgtgctgtcgcgtgtcgtggctcctctggctctacctcctcgtcatgttcgtcctcatcgttcttctcttcg

SEQ ID NO: 121508 - DNA, 188 bp, Glycine max
gaaattttgataaaccgcgatcacaggttgccgcaccttaaaaccggaaacaaaagcaatcgttacttgatttcaagaatttctcaatttctttctacttctttgtgtacgatttcttaagggaaagaaaatcactctctgtgctggccacagacttcgtgaatcattttcttttccacttttagttt

SEQ ID NO: 121509 - DNA, 268 bp, Glycine max
gttctaaattgaaaagctttctagctggtcataatatcaccattactgatggtattgacaaaactagtgcaactttgcaatttagaaagttagcagattgtgattttctcaagagaaactttaagcagatgtctaatgttttgtgggtggctcctgaggataaggcgagtttatggtcacaacttcattatgtttcgtgtaataatctggaaatgcaagaagcttatcttgtcaatctcgtaaatgtgttacgagaattgtatttgca

SEQ ID NO: 121510 - DNA, 266 bp, Glycine max
caacagtacagagcattttgatgcatgtaagtggacaaaatcggaaccacattcctgggaattgatcttcccaatagaggtatgcggtcctaataatggttttgaaatgtggagttctgagtgggcaaatcaaacttcatggcatttgagtttccttattgacaatcccaaacagtctacagtttttgacattctcttgggaatttctcaagattttgaaattgctggtaatactcttatgccagctttttctgttccacaggcta

SEQ ID NO: 121511 - DNA, 269 bp, Glycine max
tgaacactcatcaccatggccaagcttgttctttccctttgtttccttcttttcagtggctgcttcgctctgagagagcaggcacagcaaaatgagtgccagatccaaaagctgaatgccctcaaaccggataaccgtatagagtcggaaggtgggttcattgagacctggaaccctaacaacaagccattccagtgtgccggtgttgccctctctcgctgcacccttaaccgcaatgcccttcgtagaccttcctacaccaacggtcc

SEQ ID NO: 121512 - DNA, 267 bp, Glycine max
aatttgtttaaattgtctcttgatgatgttgaaactcctaaaggttccatgttggatctgaaaatttctcaatctaaaattgcacttcccaagaacacagttggaggaaccattctgcgtagtgatctattggcaaattttttgacagagggcaattttagagcaagtgttgatttgcagcgcactcatcgtattagaggaatgattaaaatggtggccacagttggtattcctgagaatacaggtatatcattggcctgtgctatg

SEQ ID NO: 121513 - DNA, 270 bp, Glycine max
atttgaaattttgataaaccgcgatcacaggttgccgcaccttaaaaccggaaacaaaagcaatcgttacttgatttcaagaatctctcaatttcttcctacttctttgtgtacgatttcttaagggaaagaaaatcactctctgtgctggccacagacttcgtgaatcattttcttttccactcttagtttatttactgaacactctcctatttgatataggacttcgtgtcagatttaaacttcttctgtttctttctcagttctctg

SEQ ID NO: 121514 - DNA, 271 bp, Glycine max
caaactttctttagctatctttttcttttttcttttagccttattttcaaacctagcctttggcaaatgtaaagaaaccgaggtagaagaagaagaccctgagctcgtaacatgcaaacaccaatgccaacagccacagcaatacactgagggtgacaagcgggtatgcttgcaaagatgtgacaggtatcatcgtatgaagcaagagcgagagaaacaaatccaagaggaaactcgtgagaagaaagaggaggaaagccgtgaaagggaa

SEQ ID NO: 121515 - DNA, 270 bp, Glycine max
ctacccttttgcttttgctctttgttctttgccatggagtggccacaacaacaatggccttccatgatgatgagggtggtgataaaaagtcaccaaaaagtttgtttttgatgagcaactccacgagggttttcaagactgatgcaggggaaatgcgtgtgctgaaaagccatggtggtaggatattttataggcacatgcacattggcttcatctctatggaaccaaagtccttgtttgttcctcagtacctcgactccaatctcatca

SEQ ID NO: 121516 - DNA, 271 bp, Glycine max
ggcaccaacagccaagactctgacttacctggcccaggagaaaaccctagaatcgagcttcgttcgggacgaggaggagcgtcccaaggttgcctacaacgaattcagcgacgagatcccagtgatttctcttgccggaatcgacgaggtggatggacgcagaagagagatttgtgagaagatcgtggaggcttgcgagaattggggtatattccaggttgttgatcacggtgtggatcaacaactcgtggccgagatgaccgtctcgcca

SEQ ID NO: 121517 - DNA, 276 bp, Glycine max
gaaaaacccaaaaagattgatgccagattgagacaaagaatagatcctcaatacaatgaggttcaggctcagatggaaacaaatttgtttaaattgtctcttgatgatgttgaaactcctaaaggttccatgttggatcttaaaatttctcaatctaaaattgcacttcccaaaaacacagttggaggaaccattctgcgtagtgacctattggcaattttttgccaaagttcaataacctcgagactaccggattgtcagtttcagtcaaaacca

SEQ ID NO: 121518 - DNA, 270 bp, Glycine max
agaagaaaaaagagaagaagatgggtttgaagaacaacatggtggtgctaaaggtgtgtttggtgctacttttccttgtggggggtactactagtgccaacttgaggctgagtaagctggcctgctcatgaaaagtgatcatcatcaacactcaaatgatgatgagtcttcaaaaccatgctgtgatcaatgcgcatgcacaaagtcaaaccctcctcaatgccgctgttcagatatgaggctgaattcgtgccattcagcttgcaaatc

SEQ ID NO: 121519 - DNA, 215 bp, Glycine max
tgctagtggatcaccatctagccaatgacaacaggaccaagccttatgtggagctaatcggcgaaagcctcgactaggtcttcactgagtactctagagccattaccttgctctcagcacgatcaactcctcttcactgggcacaaatggttaggtcagaaagcagtgcaatggtgccgactatcaccattatcaggacccttgacttttcctcc

SEQ ID NO: 121520 - DNA, 266 bp, Glycine max
tagtttcgcaagtcctgattgcaacatagttggtgcaatgcttttggttgatacttatcataccaatcctgaaaatgcagttcgtagtatttttgttgcgcctttcagaggcggaaggcccattcgggtggttacatttccgaataccattgtgcagattgaaccagacatgaattcaaggtttcagcttttgagtaccactaccaatggtgattttgttcaagggaaagatctcgcaatggttaaagttaatgtagcatgtgctg

SEQ ID NO: 121521 - DNA, 268 bp, Glycine max
agaaaatatgattaggaaagaataagtcatcatattttcttgtattgatagccccgctgtcccttttaaactcccgagagagtataaaactgcatcgaatattacaagatgcactcttgtcaaatgaagggggggaaatgatactacaagccactaggcatgggtctagcaaaggaaacaataatgggaggtggaggccgtgtggccaaagttgaaattcagcagaagaagcctctctcaagggttccaaacacaaagccaccattca

SEQ ID NO: 121522 - DNA, 268 bp, Glycine max
ccttaaacactcatcagtcatcaccatggccaagctagttttttccctttgttttctgcttttcagtggctgctgcttcgctttcagttccagagagcagcctcagcaaaacgagtgccagatccaaaaactcaatgccctcaaaccggataaccgtatagagtcagaaggagggctcattgagacatggaaccctaacaacaagccattccagtgtgccggtgttgccctctctcgctgcaccctcaaccgcaacgcccttcgtaga

SEQ ID NO: 121523 - DNA, 268 bp, Glycine max
ctacccttttgcttttgctctttgttctttgccatggagtggccacaacaacaatggccttccatgatgatgagggtggtgataaaaagtcaccaaaaagtttgtttttgatgagcaactccacgagggttttcaagactgatgcaggggaaatgcgtgtgctgaaaagccatggtggtaggatattttataggcacatgcacattggcttcatctctatggaaccaaagtccttgtttgttcctcagtacctcgactccaatctcat

SEQ ID NO: 121524 - DNA, 268 bp, Glycine max
tgaaacagaagttacagattggccagtaccactgaaaatcatttctggaaccattcttgcaacaattttgggaacaaccttctggaaactcttttcctttcttagagatgctggtaatgggggagtttttgttggtaatgttgcttcagcattcacaacttcaagtgtgcttgaggcccaaagtagaaagcccaacagatatgaagtttcccaatacagatatcgcaatgtgccaataaagcgcagagcatgggttgaaggccagatg

SEQ ID NO: 121525 - DNA, 267 bp, Glycine max
gttggagatctcgtctttgaagtttctaagatgacttctccctacattaaatgtacagtctctttcttcatagcatttggaaatttggctgatgacaccatcaattttgaggcttttccccacaagctggtgcattttggagagattcaggaaaaagttgtattgaaattttcacaataggaatttcttacagcttggtcaactcaggtgcgtcctgcaacaactctgttggctgatgggtgcccatatttgtatgctatggtgcat

SEQ ID NO: 121526 - DNA, 267 bp, Glycine max
tggcgcagggctcctgcctgcacctcatgaaggctgcgtatcccgagggattcgaagaggccgccatcggatctatcctcaaggagactctcaaggcgttggagtatctccatcgacacggacacattcaccgcgacgttaaggccgggaatattcttcttgacgataacggcctggtcaagctcgctgactttggtgtttccgcttgcatgttcgacaccggcgaccgccagcgctccagaaacaccttcgtcggaactccgtgct

SEQ ID NO: 121527 - DNA, 272 bp, Glycine max
aaacactcatcagtcatcaccatggccaagctagttttttccctttgttttctgcttttcagtggctgctgcttcgctttcagttccagagagcagcctcagcaaaacgagtgccagatccaaaaactcaatgccctcaaaccggataaccgtatagagtcagaaggagggctcattgagacatggaaccctaacaacaagccattccagtgtgccggtgttgccctctctcgctgcaccctcaaccgcaacgcccttcgtagaccttccta

SEQ ID NO: 121528 - DNA, 273 bp, Glycine max
ctcgagccgctcgagccgtgtctttgaacactcatcaccatggccaagcttgttctttccctttgtttccttcttttcagtggctgcttcgctctgagagagcaggcacagcaaaatgagtgccagatccaaaagctgaatgccctcaaaccggataaccgtatagagtcggaaggtgggttcattgagacctggaaccctaacaacaagccattccagtgtgccggtgttgccctctctcgctgcacccttaaccgcaatgcccttcgtaga

SEQ ID NO: 121529 - DNA, 265 bp, Glycine max
agattgcaaaattatcttccgtttcaggattagcgtttcaccgttacagtgaaacatgggagaaccaagacgaatctatctgcgtatctttgcgctgctcctcttcatttccgcctcttcgtttcagcttctccgcgctttcgatgacgcgatcttttacgagtcgttcgacgaggatttcgaagaccgttggattgtgtctcagaaagatgagtacaatggtgtctggaaacatgccaagagtgagggacatgatgattatggg

SEQ ID NO: 121530 - DNA, 264 bp, Glycine max
taagatttgaaattttgataaaccgcgatcacaggttgcagcaccttaaaaccggaaacaaaagcaatcgttacttgatttcaagaatttctcaattactttctacttctttgtgtacgatttcttaagggaaagaaaatcactctctgtgctggccacagacttcgtgaatcattttcttatccacttttagtttattttctgaacactctcctatttgatataggacttcgtgtcagatttaaacttctgctgtatctttct

SEQ ID NO: 121531 - DNA, 260 bp, Glycine max
acaaaatcagaaccacattcctgggaattgatcttcccaatagaggtatgtggtcctaataatggttttgaaatgtggagttctgagtgggcaaatcaaacttcatggcatttgagtttccttattgacaatcccaaacagtctacagtttttgatattctcttgggaatctctcaagattttgaaattgctggtaatactcttatgccagctttttctgttccacaggctactgccagatcttctgaaaatgcggaatc

SEQ ID NO: 121532 - DNA, 264 bp, Glycine max
ggagctgtcaccgaagttaagttacagggtagatgtggatcatgctgggctttcagcaccacaggatctatagaaggagccaattttcttgccaccggaaagctcgtcagtcttagtgaacaacagctccttgactgtgacaacaagtgtgacataacagaaaagacttcatgtgacaatgggtgtaatggaggtcttatgacaaatgcctacaattatttgctcgagtctggtgggttggaggaggagtcttcatatccctac

SEQ ID NO: 121533 - DNA, 267 bp, Glycine max
cagcaacgaggacgaagccagaggccccaagaccgtcaccaaaaggtacatcgcttcagagagggtgatttgatcgcagtgcctactggtgttgcatggtggatgtacaacaatgaagacactcctgttgttgccgtttctattattgacaccaacagcttggagaaccagctcgaccagatgcctaggagattctatcttgctgggaaccaagagcaagagtttctaaaatatcagcagcagcagcaaggaggttcccaaagccag

SEQ ID NO: 121534 - DNA, 266 bp, Glycine max
agcaaagcaatggctacttcaaagttgaaaacccagaatgtggttgtatctctctccctaaccttaaccttggtactggtgctactgaccagcaaggcaaactcagcggaaactgtttctttcagctggaacaagttcgtgccgaagcaaccaaacatgatcctccaaggagacgctattgtgacctcctcgggaaagttacaactcaataaggttgacgaaaacggcaccccaaaaccctcgtctcttggtcgcgccctctactc

SEQ ID NO: 121535 - DNA, 265 bp, Glycine max
atggggaagcccttcttcactctctctctttcttccctttgcttgctactcttgtcgagtgcatgctttgctattacctccagcaagttcaacgagtgccaactcaacaacctcaacgcgttggaacccgaccaccgcgttgagtccgaaggtggtcttattgaaacatggaactctcaacaccctgagctgcaatgcgccggtgtcactgtttccaaacgcaccctcaaccgcaacggcctccacttgccatcttactcacctt

SEQ ID NO: 121536 - DNA, 265 bp, Glycine max
ctcgagccgcggctgcgagattgatgaagaaacttctaataagctcgaagggttgcctggtgttctgtttgtgctgccggattcgtatgttgatcctgagaacaaggactatggtgctgaattatttgtgaatggagagatcgtccagagatcacctgaaagacagagaagggtggaaccacagccacaaaggcatcaggacagaccacgatacaatgatagaacaaggtatgtccggcgcagagaaaacatgcagtgaaggacc

SEQ ID NO: 121537 - DNA, 198 bp, Glycine max
atcattggaagctatgtgatctggactgctgttgctggagttagatactcaattgagcaaataagaaaaaggagatcttcggttttgtttggccaattatggaagtggtgtggcattcttgtgaagagttctgcacttctgtctatatggatatttgttatcccagtgcttattgggcttctctttgagcttttggtc

SEQ ID NO: 121538 - DNA, 264 bp, Glycine max
gaaacataccgaatgagagcatcaaactcttcttcttcgatttccattgcgaacgttactttttcttcttctttctcttcattttcttcgctcttcgatcttcgtccggggactgctccgaataccaccaccaccactcgccgatggccacgatcggaggcttacacgactcccaaggctctcaaaacagcgtcgaaaccgaagccctcgctcgattcgccgtagacgaacacaacaagaagcagaattcgcttctggagtttg

SEQ ID NO: 121539 - DNA, 223 bp, Glycine max
  unsure (1)..(223): unsure at all n locations
tctcgagccgattcggctcgagatatatactatgatgagagtgcagtttcctttgttggtactngtgggaactgttttcctggcatcagtttgtgtctcattaaaggtgagagaggatgagaataaccctttctacttgagaagctctaacagcttccaaactctctttgagaaccaaacggtcgcattcgtctctccagagattcaaaaacgctcccacaat

SEQ ID NO: 121540 - DNA, 263 bp, Glycine max
agcagattgtgattttctcaagagaaactttaagcagatgtctaatgttttgtgggtggctcctgaggacaaggcgagtttatggtcacaacttcattatgtttcgtgtaataatctggaaatgcaagaagcttatcttgtcaatctcgtaaatgtgttacgagaattgtatttgcacagtccagaggaagctcgccaattgagaaggaaagctctctctcgtattgaatggctgcaaaaagctgatgtgcctaccatagcac

SEQ ID NO: 121541 - DNA, 264 bp, Glycine max; identical to SEQ ID NO: 114028

SEQ ID NO: 121542 - DNA, 262 bp, Glycine max
acataccagctggcaccccactgtacatcgttaacagagatgagaatgataagctcttccttgccatgctccatatacctgtctctgtctctactcctggaaaatttgaggaatttttcgggcctggaggacgagacccagaatcggtcctctcagcattcagctggaatgtgctgcaagctgcgctccaaaccccaaaagtaaagttcgaaaagctttttgatcaacagaacgagggaagtattttcgcaataagcagaga

SEQ ID NO: 121543 - DNA, 263 bp, Glycine max
agcatagcatcactatggctcttctgagtcgagcctcttcacgcttccctcagctggtttcccctcaaagagttgtttccctccacacaacgctcccatctcttaacgcatcaacatccacacccacgcccgccccatatgccccgccaccgcctccgtccgcttcccctcccgccggcgtgtcgaaggcggcggagttcgtgatctcgaaggttgacgatctgatgaactgggcccggcgcggctccatctggcccatgacc

SEQ ID NO: 121544 - DNA, 260 bp, Glycine max
ctgaagttatagatcgcagtgcctactggtgttgcatggtggatgtacaacaatgaagacactcctgttgttgccgtttctattattgacaccaacagcttggagaaccagctcgaccagatgcctaggagattctatcttgctgggaaccaagagcaagagtttctaaaatatcagcaagagcaaggaggtcatcaaagccagaaaggaaagcatcagcaagaagaagaaaacgaaggaggcagcatattgagtggctt

SEQ ID NO: 121545 - DNA, 263 bp, Glycine max
aaaaagtttcctctacaaaagcacaatttgttagtggaaaaaccttcaaatatgatataattggtgctggttcacattcttcagatgattttcctgaaaaggaagatcaagaaaaacccaaaaagattgatgccagattgagacaaagaatagatcctcaatacaatgaggttcaggctcagatggaaacaaatttgtttaaattgtctcttgatgatgttgaaactcctaaaggttccatgttggatcttaaaatttctcag

SEQ ID NO: 121546 - DNA, 261 bp, Glycine max
cggagttttggtatgcagagggaggaagccaggcagaagggaggagggacacaaattcacagcatagcaaaagatggtggcttccatcaccccaagtaccaaaaactggtctttctgatactgaaaggaaaaggttgcttcatcagggtagggtggtacggcaagtattcaaggctgccaaagctatcaatgaaagtgtgttgcttgaaatgcccgtgccatctattattaaagatgcacttgcaaaggtgataattttgt

SEQ ID NO: 121547 - DNA, 261 bp, Glycine max; identical to SEQ ID NO: 103663

SEQ ID NO: 121548 - DNA, 262 bp, Glycine max
ttaagaccgtggaactcgtgaagccaactggatgggtttatctttccttgtctggagttgatcctagggatacctttgtgaatactttcatgttgcaaattgctgtgttgtcaaaccatctcaatggaagggatactcacgtgcggcagatcaaagtttacgggcctcgaccgaaccctatcccacatcagccattccaatttacttcaagggaattcatcacctactcttctataagatgagagtttatggaaggatttga

SEQ ID NO: 121549 - DNA, 264 bp, Glycine max
aatgccaggtcttaccatcggagacactattcctgatcttcaagttgaaactaaccaaggcaaaatcaagcttcatcagttctgtgctgatggctggaccatccttttctctcacccaggtgatttcaccccggtttgtaccactgagcttggtaagatggctcagtatgctaaggagttttatcaacgaggagtgaagctcttaggtttatcttgtgatgatgtgcaatcccacaatgagtggatcaaagacattgaagccta

SEQ ID NO: 121550 - DNA, 241 bp, Glycine max
tgaacacccacgcccacaccaacctcatcaaaaggaagaggaaaagcacgaatggcaacacaagcaggaaaagcaccaaggaaaggaaagtgaagaagaagaagaagaccaagacgaggatgaggagcaagacaaagagagccaagaaagtgaaggttctgagtctcaaagagaaccacgaagacataagaataagaacccttttcacttcgaaccaacaaggttccaaactctcttcaaa

SEQ ID NO: 121551 - DNA, 259 bp, Glycine max
ttctcaacaacttctgctacttcctactccaaccgcacttctgctccgcaattatcatgggcaaggtcaagatcggaatcaacggatttggaagaattggccgtttggtagccagagtggctctgcagagagacgatgttgaactcgttgccgttaacgaccctttcatcaccaccgattacatgacatacatgtttaaatacgacagtgttcatggacactggaagcatcacgatgtcaccgttaaggacgagaagac

SEQ ID NO: 121552 - DNA, 259 bp, Glycine max
ctggaatgaatcatcacatgcttcatgaactcatgggagttgatcctggaactaaccctgtttgccatttccttggaagcaaggccattttatgggtacccaatttatctatggacactgcctatcagactaacgttgttgtttaattagtccatgcatctgcatcttgggcaccataagattgtatataaaataaattatggtgtgttgtgtatgttgtgcaagacctggaacttcacctttctacgtacgtgtgctg

SEQ ID NO: 121553 - DNA, 252 bp, Glycine max
cttgttcctctcgcccagaatccgcgatctaccccgacgatggcaccgggcttttctcggcttctacagatctctgaaatggggcctgtttcagctttagccaagtactcgctcgtcttcctgggtgaccaatccgtgggcgaaatcagcatcatcactcgctgcatgtatgataaattcgataacacctatcaggctacaattggtcttgattttctatcagaaactatgtatcttgaagatcgaactgtt

SEQ ID NO: 121554 - DNA, 260 bp, Glycine max
gaatcctgcttgcacaaaagcaatgactatgtcatttaatccaaacccgtgttctgatgcatggagtttggaatttctgaagcgtacaggatttcattgtgatatcatttgtgtcactggatggactgccactccaatgcaggatgttcaggttacaattgattggtttatttcctctcaggaatgtgttcccaggacttattgtgttttaaatccacaaaatccttttgtgttgaataggtggatggggaaactgactt

SEQ ID NO: 121555 - DNA, 255 bp, Glycine max
aaatcataaaattcttccaccaagttatgggtttcgctgtgttgcttcttttctccctcttaggtctctcttctagttccagcatatcaactcatcgttccatattggaccttgacctaaccaagtttaccacacagaaacaggtgtcttcactgttccaactatggaagagtgagcatggacgtgtctaccataaccacgaagaagaggcaaagagacttgagattttcaagaataacttgaactatatcaggg

SEQ ID NO: 121556 - DNA, 263 bp, Glycine max
ccacgcccacaacctcgtcaagaagaagagcacgagcagagagaggaacaggaatggcctcgcaaggaggaaaaacgcggagaaaagggaagtgaagaggaagatgaggatgaggatgaggaacaagatgaacgtcaattcccattcccacgcccacctcatcagaaggaagagcgaaagcaagaggaagatgaggatgaggagcagcagcgagagagcgaagaaagtgaagattctgagttacgaagacataagaataagaa

SEQ ID NO: 121557 - DNA, 259 bp, Glycine max
ggaatttactctccacattggaatctgaatgcaaacagtgtgatctatgtgactcgaggacaaggaaaggttagagttgtgaactgccaagggaatgcagtgttcgacggtgagcttaggaggggacaattgctggtggtaccacagaacttcgtggtggcggacaagccggagaacaaggattcgaatacatagtattcaagacacaccacaacgcagtcactagctacttgaaggatgtgtttagggcaattccctc

SEQ ID NO: 121558 - DNA, 238 bp, Glycine max
aacttattaacactttccttagttcaatatggggaagcccttcttcactctctctctttcttccctttgcttgctactcttgtcgagtgcatgctttgctattacctccagcaagttcaacgagtgccaactcaacaacctcaacgcgttggaacccgaccaccgcgttgagtccgaagtggtcttattgaaacatggaactctcaacaccctgagctgcaatgcgccggtgtcactg

SEQ ID NO: 121559 - DNA, 266 bp, Glycine max
accggttcgtggagagcaaggcgtcggcggtgtcgctgcaggtgggggaacacgtgcagttggcttacacacaccacaacgaatcaccgtggcatcccagatcatttgctgttaaggatgagatattctgcttgtttgagggggctctagacaatttgggcagcctgagacaacagtatggactggccaagtcagccaatgaagtgattttggtgattgaggcttacaaagctttacgtgatcgagcaccctaccctgccaatcgt

SEQ ID NO: 121560 - DNA, 275 bp, Glycine max
cttccatagccccccaaaaatgaagagcaccatcttctttgctctctttctcttttgtgccttcaccacctcatacctaccttcagccatcgctgatttcgtgctcgataatgaaggtaaccctcttgaaaatggtggcaatattatatcttgtcagacataacagcatttggtggaataagagcagccccaacgggaaatgaaagatgccctctcactgtggtgcaatcttcgcaatgagtcgacaaagggatgggacaatcatctcgtcccat

SEQ ID NO: 121561 - DNA, 270 bp, Glycine max
tgattttcctgaaaaggaagatcaagaaaaacccaaaaagattgatgccagattgagacaaagaatagatcctcaatacaatgaggttcaggctcagatggaaacaaatttgtttaaattgtctcttgatgatgttgaactcctaaaggttccatgttggatcttaaaatttctcagtctaaaattgcacttcccaagaacacagttggaggaactattctgcgtagtgatctattggcaaattttctgacagagggcaattttagagca

SEQ ID NO: 121562 - DNA, 268 bp, Glycine max
aggaattttagtggacaaaactggagattggatcacacttatacaaaattctccaattagtaacttgttgagagttgctgcttggaagaaaggctgtttaatggttaagattgtgatgtctgggaatgcagcagtaaaaggagtgattgggcctcattggtacaagtgtttttaacaaacagcaacagtacagagcattttgatgcatgtaagtggacaaaatcggaaccacattcctgggaattgatcttcccaatagaggtatgtg

SEQ ID NO: 121563 - DNA, 267 bp, Glycine max
attcaaaccttgctctatattacacagtacacacactataagaataatggcttccatcctccactactttttagccctctctctttcttgctcttttcttttcttcttatccgactcagtcacccctacaaaaccataaaccttgttgttctacccgttcaaaatgatggttccacagggctccattggtccaacctccaaaaaagaacccctctaatgcaagtaccagtcctggtggacctcaatggaaatcacttgtgggttaac

SEQ ID NO: 121564 - DNA, 265 bp, Glycine max
gaaatgatcaacagtctttgtggtggtgatgaaaaactgatgcgtgaaaggacacacctgctgttggcttgttgttcaaggatggcaatttgtaagaaagatgtttggagagttgaatgtggaatcccttctggattccgctcacagttatttgcaatagcatttttaatgagatgctcattagatatagctatgaaaaattactgcgccaggctaaagctccaagtatgtttttacaatccttcaaaaattttgtttctttgtg

SEQ ID NO: 121565 - DNA, 266 bp, Glycine max
aaacccgattttcataatttcttgcgcaagatcaccaaggagaacaatacccttcttgtgtttgatgaagttatgactgggtttcgtttgtcatacggaggtgctcaagagtattttggcataactcctgatatacaactctaggaaagatcattggtggaggtctgccggtgggggcttatggagggaggagggatattatggagaaggtggcaccagctggcccaatgtatcaggctgggaccttgagtgggaacctttggcca

SEQ ID NO: 121566 - DNA, 268 bp, Glycine max
gccggtgatgtccgtatgactgatacccgtgcagatgaagctgagcgtggtattaccatcaagtctacaggtatctcactctactatgaaatgactgatgaagctctcaagagttttaagggagagcgcaatgggatgagtatcttatcaatctcattgactcccctgggcacgttgacttctcatctgaggttactgctgcactccgtattactgatggagctctagttgtggtcgattgtgtggaaggagtttgtgtccaaactga

SEQ ID NO: 121567 - DNA, 270 bp, Glycine max
aacactttccttagttcaatatggggaagcccttcttcactctctctctttcttccctttgcttgctactcttgtcgagtgcatgctttgctattacctccagcaagttcaacgagtgccaactcaacaacctcaaccgttggaacccgaccaccgcgttgagtccgaaggtggtcttattgaaacatggaactctcaacaccctgagctgcaatgcgccggtgtcactgtttccaaacgcaccctcaaccgcaacggcctccacttgcc

SEQ ID NO: 121568 - DNA, 271 bp, Glycine max
cagatccaaaaactcaatgccctcaaaccggataaccgtatagagtcagaaggagggctcattgagacatggaaccctaacaacaagccattccagtgtgccggtgttgccctctctcgctgcaccctcaaccgcaagcccttcgtagaccttcctacaccaacggtccccaggaaatctacatccaacaaggtaagggtatttttggcatgatatacccgggttgtcctagcacatttgaagagcctcaacaacctcaacaaagaggaca

SEQ ID NO: 121569 - DNA, 270 bp, Glycine max
ctgcaacatagttggtgcaatgcttttggttgatacttatcataccaatcctgaaaatgcagttcgtagtatttttgtcgcgcctttcagaggcggaaggcctattcgggtggttacatttccgaataccattgtgcgattgaaccagacatgaattcaaggtttcagcttttgagtaccactaccaatggtgattttgttcaaggaaaagatctcgcaatggttaaagttaatgtagcatgtgctgctgttggcttgacatcaagttac

SEQ ID NO: 121570 - DNA, 272 bp, Glycine max
gttgaaactcctaaaggttccatgttggatcttaaaatttctcaatctaaaattgcacttcccaaaaacacagttggcggaaccattctgcgtagtgacctattggcaaattttttgacagagggcaattttagagcaatgttgatttgcagcgcactcatcgtatcaaaggaatgattaaaatggtggccacagttggtattcctgagaatacaggtatagcattggcctgtgctatgaatagttcttttagggggcgtgccagttctgat

SEQ ID NO: 121571 - DNA, 274 bp, Glycine max
agcaaaatgaccaagttcacaatcctcctcatctctcttctcttctgcatcgcccacacttgcagcgcctccaaatggcagcaccagcaagatagctgccgcaagcagctccagggggtgaacctcacgccctgcgagaacacatcatggagaagatccaaggccgcggcgatgacgatgatgatgatgacgacgacaatcacattctcaggaccatgcggggaagaatcaactacataaggaggaacgaaggaaaagacgaagacgaagaaga

SEQ ID NO: 121572 - DNA, 280 bp, Glycine max
agtatttttggcatgatatacccgggttgtcctagcacatttgaagagcctcaacaacctcaacaaagaggacaaagcagcagaccacaagaccgtcaccagaagatctataacttcagagagggtgatttgatcgcagtgccactggtgttgcatggtggatgtacaacaatgaagacactcctgttgttgccgtttctattattgacaccaacagcttggagaaccagctcgaccagatgcctaggagattctatcttgctgggaaccaagagcaaga

SEQ ID NO: 121573 - DNA, 283 bp, Glycine max
agaaattatcattgatagtttcgcaagtcctgattgcaacatagttggtgcaatgcttttggttgatacttatcataccaatcctgaaaatgcagttcgtagtatttttgttgcgcctttcagaggcggaaggcccattcgggtgttacatttccgaataccattgtgcagattgaaccagacatgaattcaaggtttcagcttttgagtaccactaccaatggtgattttgttcaagggaaagatctcgcaatggttaaagttaatgtagcatgtgctgctg

SEQ ID NO: 121574 - DNA, 252 bp, Glycine max
gcaaaaagaaagaatcccaggcgaggagaaagatggaggggaaggagcaggatgtgtcgttgggagcgaacaagttccccgagagacagccgattgggacggcggcgcagagccaagacgacggcaaggactaccagagccggcgccggcgccgctggttgacccgacggagtttacgtcatggtcgttttacagagcagggatagcagagtttgtggcaactttccggtttctctacatcaccgtcttaac

SEQ ID NO: 121575 - DNA, 268 bp, Glycine max
cggctcgagatacatagtagtgttggtgggttgcaaagatgcttgggggtcttctccataggggtcataagataaaagggacagtggtgttgatgcgcaagaatgtgttggacgtgaatagcgtaaccagcgttggggaattattggtcaaggtctcgacttagttggctcaacactcgatactcttactgccttcttgggccgatccgtgtctctccagcttattagtgctaccaaagctgatgccaacggaaaagggaaacttgga

SEQ ID NO: 121576 - DNA, 267 bp, Glycine max
cagaaggaagagcgaaacaagaggaagatgaggatgaggagcagcagcgagagagcgaagaaagtgaagattctgagttacgaagacataagaataagaacccttttctcttcggctctaacaggttcgaaacttcttcaaaaaccaatatggtcgcattcgcgtcctccagaggttcaaccaacgctccccacaacttcagaatctccgagactaccgcattttggagttcaactccaaacccaacaccctccttctccccaacca

SEQ ID NO: 121577 - DNA, 266 bp, Glycine max
atcacgtcacatcacatataaccatcttcttctttgaaaccttaaattgtgctcaaaaatactatatagttaattaaggttgtgtgaaaatgcgaatgagttgtaacggatgtcgtgttctgcgcaaagggtgtgcgaagattgtagtataagaccgtgtttgcaatggatcaagaacccggagtcaacagctaatgcaactgtttttcttgccaagttctatggtcgtgctggcctcatgaacctcatcaacgctggtcctgaaa

SEQ ID NO: 121578 - DNA, 262 bp, Glycine max
gtttcatatactacgttttgccggcaataagaggaaacggtggcggaatagaacgagccgcactcgggaaagacacttgccctatcactgtagtgcaatctcccaatccaaactctaaggggttagaaattaatttgaatctgcataccccgcctattacataaacgaaaccctaattttgcaaataaagttcagttacccacagcagtgtgaaagaaagaatccttggtgggccatttctaaggatatatctgaaggacca

SEQ ID NO: 121579 - DNA, 264 bp, Glycine max
agatcatacatagtagtgttggtgggttgcaaagatgcttgggggtcttctccataggggtcataagataaaagggacagtggtgttgatgcgcaagaatgtgttggacgtgaatagcgtaaccagcgttggggaattattggtcaaggtctcgacttagttggctcaacactcgatactcttatctagttcttgggccgatccgtgtctctccagcttattagtgctaccaaagctgatgccaacggaaaagggaaacttgga

SEQ ID NO: 121580 - DNA, 266 bp, Glycine max
gagctagctagctagcaagcaagcacagagatggaggcaaagcgaggccatgccctcatgtgcttggcacgtgtttcactcttcctctgcgctctaaccctatccgctgctcacggaagcaccacggttcaagactcgcgagaaagttgaaactcggggacaacgagcttctgcgcacggagaagaagttcaaggttttcatggagaattacgggaggagctactccacagaggaggagtatttgcgccgtttggggattttcgcc

SEQ ID NO: 121581 - DNA, 262 bp, Glycine max
ccgtattaaagaatttaagatatactatgatgagagcgcggttcccattactgttgctgggagttgttttcctggcatcagtttctgtctcatttggcattgcgtattgggaaaagcagaaccccagtcacaacagtgcctccgaagttgcaatagcgagaaagactcctacaggaaccaagcatgccacgctcgttgcaacctccttaaggtggaggaagaagaagaatgcgaagaaggtcaaattccacgaccacgacca

SEQ ID NO: 121582 - DNA, 272 bp, Glycine max
caaagaatagatcctcaatacaatgaggttcaggctcagatggaaacaaatttgtttaaattgtctcttgatgatgttgaaactcctaaaggttccatgttggatcttaaaatttctcagtctaaaattgcacttcccagaacacagttggaggaactattctgcgtagtgatctattggcaaattttctgacagagggcaattttagagcaagtgttgatttgcagcgcactcatcgtattaaaggaatgattaaaatggtggccacagtt

SEQ ID NO: 121583 - DNA, 273 bp, Glycine max
attcctttgaggaagtttctttgagtgcagcactcaatggtgttgagggtttggactatatggaaagaattcctcttgccacatctgagggttttcctcatgtgctttcacgcaaaaatggtgaaaaaggcaaaaggagtttgtttctggggatggtgaagagatgacattgattccgggaaccagtgttgaagaggcttacaacaagctaacagttgaacttgagaaaagtgttcctacattggttggcattgaatgtcccaaggatgaaaa

SEQ ID NO: 121584 - DNA, 273 bp, Glycine max
ggttgaggaatggttcgattgtgttgatgaggaggattcctttgaggaagtttctttaagtgcagcacttaatggtgttgagggtttggactatatggaaagaattcctcttgccacatctgagggatttcctcatgtgcttcacgcaaaaatggtgaaaaaggcaaaaggagatttgtctctggggatggtgaagagatgacactgattccgggaaccagtgttgaagaggcttacaacaagctaatagttgaacttgagaaaatgtcccta

SEQ ID NO: 121585 - DNA, 280 bp, Glycine max
ctgtcttctagtgcaagtgatttcagagctgcaatggtgagtaaaaatagcaagcctcaagctactgcaatgcatgtgggagctatagaaattatcattgatagtttcgcaagtcctgattgcaacatagttggtgcaatgctttggttgatacttatcataccaatcctgaaaatgcagttcgtagtatttttgttgcgcctttcagaggcggaaggctcattcgggtggttacatttccgaataccattgtgcagattgaaccagacatgaattcagg

SEQ ID NO: 121586 - DNA, 273 bp, Glycine max
tccattggtccttaaacactcatcagtcatcaccatggccaagctagttttttccctttgtgttctgcttttcagtggctgctgcttcgctttcagttccagagagcagcctcagcaaaacgagtgccagatccaaaactcaatgccctcaaaccggataaccgtatagagtcagaaggagggctcattgagacatggaaccctaacaacaagccattccagtgtgccggtgttgccctctctcgctgcaccctcaaccgcaacgcccttcgt

SEQ ID NO: 121587 - DNA, 266 bp, Glycine max
aatcttctaaaattaaattaccatatatagtcacattttctttacactttgtgaggtctaaaatgttgtccatttttcacaaggggtttgctcacccacctgaagagcttaaaagccctgcatctaacagtggtccaacaagcctaagattcctgaggaaactctaagagaatttctttctcatcatccccataacactttttctctgagttttggtcactctgctgttctagcttatactcgtcctgatccaccttcctttgttc

SEQ ID NO: 121588 - DNA, 261 bp, Glycine max
tggattagtgcttccactctcctatctggtataggacttcgtgggtagacttttctatttctctccttctttcactctcttcttctcactgatccgcattgccgttcaaagtggtcttatttgaaaaacactgggcgttggtgcaaatgtttgcttcattaattttctctggagacaacaggcttcctgagaaaacaatctttacttgcagagatttggacatcttggttgtttattatacaatagcaactcaatttagaa

SEQ ID NO: 121589 - DNA, 259 bp, Glycine max
aaattttgataaaccgcgatcacaggttgccgcaccttaaaaccggaaacaaaagcaatcgttacttgatttcaagaatctctcaatttcttcctacttctttgtgtacgatttcttaagggaaagaaaatcctctctgtgctggccacagacttcgtgaatcattttcttttccactcttagtttattgcgtgaacactctcctatttgatataggacttcgtgtcagatttaaacttcttctgtgtctttctcagtt

SEQ ID NO: 121590 - DNA, 263 bp, Glycine max
gttcaatatcctagtataccttaataaataatttaagatactatgatgagagcacggttcccattactgttgctgggacttgttttcctggcttcagtttctgtctcatttggcattgcttactgggaaaagagaaccccaaacacaacaagtgtctccagagttgcaatagcgagagagactcttacaggaaccaagcatgccacgctcgttgcaacctccttaaggtggagaaagaagaatgtgaagaaggtgaaattcca

SEQ ID NO: 121591 - DNA, 264 bp, Glycine max
caagtcctgactgcaacatagttggtgcaatgcttttggttgatacttatcataccaatcctgaaaatgcagttcgtagtatttttgttgcgcctttcagaggcggaaggcccattcgggtggttacatttcgaataccattgtgcagattgaaccagacatgaattcaaggtttcagcttttgagtaccactaccaatggtgattttgttcaaggaaaagatctcgcaatggttaaagttaatgtagcatgtgctgctgttgg

SEQ ID NO: 121592 - DNA, 265 bp, Glycine max
ggtccgtcaaaagtttttaaattttgtgaggttcattatgaagaaaagggacaaacttagttgtcaagttggaatcaacccatactccatggaatggactggtttggccaatagattactgagtaagggcaatgatattctgtgttgcgattatgctagttttgatggtttgattaccaagcaagttatgagcaagatggcagaaatgataaacagtctttgtggtggtgatgaaaaattgatgcgtgaaaggacgcacctgctg

SEQ ID NO: 121593 - DNA, 265 bp, Glycine max
ttccgggaaccagtgttgaagaggcttacaacaagctaacagttgaacttgagaaaagtgttcctacattggttggcattgaatgtcccaaggatgaaaaacttcctcgtcgcaaagtttttgataaacctaaacgcgctgcttcactattctccctatggagtttaatcttgtggttcgtcagaagtttttaaaagttgtgaggttcattatgaagaaaagggacaagcttagttgtcaagttggaatcaacccatattctatg

SEQ ID NO: 121594 - DNA, 266 bp, Glycine max
ctagggtattgggagctctcgttgtttcggagttagggaccttacgcagccatggccactgctacgaatgccgccgccgccccaccacgccagctctcccagaaggaagctgacatccagatgatgttggccgcgacgtccacctcggcaccaagaactgcgacttccaaatggaacgttacatcttcaagcgccgcaacgacgggatttacattattaaccttgggaagacgtgggagaagcttcagctagcagctagggttata

SEQ ID NO: 121595 - DNA, 266 bp, Glycine max
gagaaactttaagcagatgtctaatgttttgtgggtggctcctgaggacaaggcgagtttatggtcacaacttcattatgtttcgtgtaataatctggaaatgcaagaagcttatcttgtcaatctcgtaaatggttacgagaattgtatttgcacagtccagaggaagctcgccaattgagaaggaaagctctctctcgtattgaatggctgcaaaaagctgatgtgcctaccatagcacagattgaagagttccattcgatgca

SEQ ID NO: 121596 - DNA, 270 bp, Glycine max
aacagcttggagaaccagctcgaccagatgcctaggagattctatcttgctgggaaccaagagcaagagtttctaaaatatcagcaagagcaaggaggtcatcaaagccagaaaggaaagcatcagcaagaagaaaaaacgaaggaggcagcatattgagtggcttcaccctggaattcttggaacatgcattcagcgtggacaagcagatagcgaaaaacctacaaggagagaacgaaggggaagacaagggagccattgtgacagtga

SEQ ID NO: 121597 - DNA, 274 bp, Glycine max
taaacactcatcagtcatcaccatggccaagctagttttttccctttgttttctgcttttcagtggctgctgcttcgctttcagttccagagagcagcctcagcaaaacgagtgccagatccaaaaactcaatgccctcaaaccggataaccgtatagagtcagaaggagggctcattgagacatggaaccctaacaacaagccattccagtgtgccggtgttgccctctctcgctgcaccctcaaccgcaacgcccttcgtagaccttcctac

SEQ ID NO: 121598 - DNA, 276 bp, Glycine max
gtctttgaacactcatcaccatggccaagcttgttctttccctttgtttccttcttttcagtggctgcttcgctctgagagagcaggcacagcaaaatgagtgccagatccaaaagctgaatgccctcaaaccggataccgtatagagtcggaaggtgggttcattgagacctggaaccctaacaacaagccattccagtgtgccggtgttgccctctctcgctgcacccttaaccgcaatgcccttcgtagaccttcctacaccaacggtcccca

SEQ ID NO: 121599 - DNA, 277 bp, Glycine max
cacttccttagttcaatatggggaagcccttcactctctctctttcttccctttgcttgctactcttgtcgagtgcatgctttgctattagctccagcaagctcaacgagtgccaactcaacaacctcaacgcgttggaaccgaccaccgcgttgagtccgaagtggtttgattcaaacatggaactctcaacaccctgagctgaaatgcgccggtgtcactgtttccaaactcaccctcaaccgcaatggcctccacttgcgatcttactcacttt

SEQ ID NO: 121600 - DNA, 268 bp, Glycine max
tggagattggatcacacttatacaaaattctccaattagtaacttgttgagagttgctgcttggaagaaaggctgtttaatggttaagattgtgatgtctgggaatgcagcagtcaaaaggagtgattgggcctcattggtacaagtgtttttaacaaacagcaacagtacagagcattttgatgcatgtaagtggacaaaatcggaaccacattcctgggaattgatcttcccaatagaggtatgcggtcctaataatggttttgaa

SEQ ID NO: 121601 - DNA, 265 bp, Glycine max
gcctctttctatagggggaggagctggtgcaaagaatgctattctcatgaatatgccaaatgctgttctttcaatgtggagatattttgttggagatctcgtctttgaagtttctaagatgacttctccctcattaaatgtacagtctctttcttcatagcatttggaaatttggctgatgacaccatcaattttgaggcttttccccacaagctggtacagtttggagagattcaggaaaaagttgtattgaaattttcacaag

SEQ ID NO: 121602 - DNA, 260 bp, Glycine max
ccattggtccttaaacactcatcagtcatcaccatggccaagctagttttttccctttgttttctgcttttcagtggctgctgcttcgctttcagttccagagagcagcctcagcaaaacgagtgccagaccaaaaactcaatgccctcaaaccggataaccgtatagagtcagaaggagggctcattgagacatggaaccctaacaacaagccattccagtgtgccggtgttgccctctctcgctgcaccctcaaccgc

SEQ ID NO: 121603 - DNA, 260 bp, Glycine max
atttgaaattttgataaaccgcgatcacaggttgccgcaccttaaaaccggaaacaaaagcaatcgttacttgatttcaagaatctctcaatttcttcctacttctttgtgtacgatttcttaagggaaaaaaatcactctctgtgctggccacagacttcgtgaatcattttcttttccactcttagtttatttgctgaacactctcctatttgatataggacttcgtgtcagatttaaacttcttctgtttctttctc

SEQ ID NO: 121604 - DNA, 261 bp, Glycine max
cttaattattaacacttccttagttcaatatggggaagcccttcactctctctctttcttccctttgcttgctactcttgtcgagtgcatgctttgctattagctccagcaagctcaacgagtgccaactaacaacctcaacgcgttggaacccgaccaccgcgttgagtccgaaggtggtttgattcagacatggaactctcaacaccctgagctgaaatgcgccggtgtcactgtttccaaactcaccctcaaccgcaa

SEQ ID NO: 121605 - DNA, 260 bp, Glycine max
cccaaggatgaaaaacttcctcgtcgcaaagtttttgataaacctaagacgcgctgcttcactattctccctatggagtttaatcttgtggttcgtcagaagtttttaaattttgtgaggttcattatgaaaaaagggacaagcttagttgtcaagttggaatcaacccatattctatggaatggactggtttggccaatagattactgagtaagggcaacgatattctgtgttgcgattatgctagttttgatggtttg

SEQ ID NO: 121606 - DNA, 261 bp, Glycine max
ctctttctccgagaacaaaaaaaaaaacgtgattcgctcttctcttcgaataaaccacaaaaccaacaaacgagaagaggagtgagagaagatggggttgtcgttcacgaagctgttcagcaggttgtttgcaagaaggaaatgaggattctgatggtaggtctcgatgctgctggtaagacaaccatcttgtacaagctcaagcttggagaaatcgtcaccaccatccccaccatcggatttaatgttgagactgtggag

SEQ ID NO: 121607 - DNA, 264 bp, Glycine max
gaagcagatcgtgacagtggagggaggcctcagcgttatcagccccaagtggcaagaacaagaagacgaagacgaagatgaagacgaagaatatgaacaaactccctcttatcctccacgacgaccaagccaggaaagcatgaagatgacgaggacgaggacgaagaagaagatcaacctcgtcctgatcaccctccacagggaccaagcaggcccgaacaacaagaaccacgtggaagaggatgtcagactagaaatggggtt

SEQ ID NO: 121608 - DNA, 263 bp, Glycine max
ctgggatatgcttcattgataccatatgttgagccagttgtgcaagctcaaagtgctgaagtttactttgacttcttccctgtggaggttgatagtcaagagggagttgctcacattggtgaattgaaatcggtgtctatgttccactgcctacaaaaactaatttggtggaaactcccaaggaatggcaactggatctaccttgtgacaaaattcctagtgtcttgaccacaactgatgagagattggtaggcacagaacat

SEQ ID NO: 121609 - DNA, 233 bp, Glycine max
atgagaaccaaactttctttagctatctttttctttattcttttaggcttattttcaaacctagcctttggcaaatgtaaagaaaccgaggtagaagaagagaccctgagctcgtaacatgcaaacaccaatgccaacagccacagcaatacactgagggtgacaagcgggtatgcttgcaaagatgtgacaggtatcatcgtatgaagcaagagcgagagaaacaaatccaa

SEQ ID NO: 121610 - DNA, 269 bp, Glycine max
actccctcttatcctccacgacgaccaagccatggaaagcatgaagatgacgaggacgaggacgaagaagaagatcaacctcgtcctgatcaccctccacagcgaccaagcaggcccgaacaacaagaaccacgtgaagaggatgtcagactagaaatggggttgaggaaaatatttgcaccatgaagcttcacgagaacattgctcgcccttcacgtgctgacttctacaacccaaaagctggtcgcattagcaccctcaacagtctc

SEQ ID NO: 121611 - DNA, 270 bp, Glycine max
ctgaaaccttgaattcatgtctggttcagcttttgagtaccactaccaatggtgattttgttcaaggaaaagatctcgcaatggttaaagttaatgtagcatgtgctgctgttggcttgacatcaagttacactccactccattgttggaatctggtttgcaaaaagacagagggttaattgtggaatattttggaaggatgtcttacgttgctcataacgttaatcagccccaagagaaagatttgttggagggaatttttcctttgat

SEQ ID NO: 121612 - DNA, 235 bp, Glycine max
taaaattcttccaccaagttatgggtttccttgtgttgcttcttttctccctcttaggtctctcttctagttccagcatatcaactcatcgttccatattggaccttgacctaaccaagtttaccacacagaacaggtgtcttcactgttccaactatggaagagtgagcatggacgtgtctaccataaccacgaagaagaggcaaagagacttgagattttcaagaataacttg

SEQ ID NO: 121613 - DNA, 260 bp, Glycine max
cacaggctctgcctgttgctttgatgattcatgataactcgtcggatcgcacggcctttgtgccggcgacgcatcattcaaatttctgccctatcaactttcgatggtaggatagtggcctaccatggtgtgacgggtgacggagaattagggttcgattccggagagggagcctgagaaacggctaccacatccaaggaaggcagcaggcgcgcaaattacccaatcctgacacggggaggtagtgacaataaataaca

SEQ ID NO: 121614 - DNA, 262 bp, Glycine max
ggccaggcaagccccactcaaccaccacacctctcctcgttcacgctacccctttctgctcttcttctacctttcaagttttaaaagtataaagatggcagagacattcctatttacctcagagtcggtaacgagggacaccctgacaagctctgcgaccaaatctccgatgctgtcctcgacgcttgcctcgagcaggacccagacagcaaagttgcctgcgaaacatgcaccataaccaacttggtcatggtcttcggag

SEQ ID NO: 121615 - DNA, 264 bp, Glycine max
tggaaccacttactatttggttaaccctcacgaccaccagaatctcaaaataatcaaacttgccatacccgtcaacaaacctggcagatatgatgatttcttcttatctagcactcaagcccaacagtcctacttgcaaggcttcagccataatattctagagacctccttccatagcgaattcgaggagataaacagggttttgtttggagaggaagaggagcagaggcagcaagagggagtgatcgtggaactctcaaagga

SEQ ID NO: 121616 - DNA, 258 bp, Glycine max
gtaatattcagatttccggcttattttacgacggcagatacaaattctggactaaacacgagataaatcttgctttgacagaagaggaaaagatggaagtgattagaaatagaggcattcctgctgatgttttgcaaagcgagctcatgaatttgaaaaacatgttgctcatgaaagcctcaaggatcaaattcctgctgttgacaagttgtattctactaaggttaataagtttgcaaaaattatgaaccttagaca

SEQ ID NO: 121617 - DNA, 264 bp, Glycine max
gttatttgcaatagcatttttaatgagatgctcattagatatagctatgaaaaattactgcgccaggctaaagctccaagtatgtttttacaatccttcaaaaattttgtttctttgtgtgtgtatggtgatataacttaattagtgttcatgaatacgtcaagccttactttagtggttctaaattgaaaagctttctagctggtcataataccatcagtaatggtgatattatgaccagctagaaagcttttcataatatca

SEQ ID NO: 121618 - DNA, 269 bp, Glycine max
gtttatctccgcactccgtcttcatcaatcagcatcaccaccgctccaacacaggggaaaatgagggagatccttcacgttcagggagggcaatgcgggaaccagatcggttcgaagttctgggaagtggtgtcgacgagcacggcatagatccgacggggaagtacgtcggaaactcagatctacaactcgagcgcgtgaacgtgtactacaacgaagcttcctgcgggcggtttgtcccacgcgcagtgctgatggacctggagccc

SEQ ID NO: 121619 - DNA, 270 bp, Glycine max
tttatgtaagggagacaaataaaacatggaataaaaagctcgcagtggccagtaatttgccaaaagcaaactggagaaagaatatagtcttcagctggacaaggatcattcatcttgaaagaagagtttgtgtgtacaatctttatagttctaaggagggtgcaagagagaactgaatttgctgtgatggcaactcgtagatatgcttttggaagagctgatgaggccactcatccagactccatgagggccactttggctgaatttgtt

SEQ ID NO: 121620 - DNA, 263 bp, Glycine max
tatactatgatgagagtgcggtttcctttgttggtgttgctgggaactgttttcctggcatcagtttgtgtctcattaaaggtgagagaggatgagaataaccctttctacttgagaagctctaacagttccaaactctctttgagaaccaaaacggtcgcattcgtctcctccagagattcaacaaacgctccccacaacttgagaaccttcgagactaccggattgtccagtttcagtcaaaacccaacacaatccttctc

SEQ ID NO: 121621 - DNA, 256 bp, Glycine max
aacttattaacactttccttagttcaatatggggaagcccttcttcactctctctctttcttccctttgcttgctactcttgtcgagtgcatgctttgctattacctccagcaagttcaacgagtgcaactcaacaacctcaacgcgttggaacccgaccaccgcgttgagtccgaaggtggtcttattgaaacatggaactctcaacaccctgagctgcaatgcgccggtgtcactgtttccagacgcaccctca

SEQ ID NO: 121622 - DNA, 256 bp, Glycine max
cttacttattaacacttccttagttcaatatggggacgcccttcactctctctctttcttccctttgcttgctactcttgtcgagtgcatgctttgctattagctccagcaagctcaacgagtgcaactcaacaacctcaacgcgttggaacccgaccaccgcgttgagtccgaaggtggtttgattcaaacatggaactctcaacaccctgagctgaaatgcgccggtgtcactgtttccaaactcaccctcaac

SEQ ID NO: 121623 - DNA, 255 bp, Glycine max
ccattgtgcagattgaaccagacatgaattcaaggtttcagcttttgagtaccactaccaatggtgattttgttcaagggaaagatctcgcaatggttaaagttaatgtagcatgtgctgctgttgcttgacatcaagttacactccaactccattgttggaatctggtttgcaaaaagacagagggttaattgtggagtattttggaaggatgtcttacgttgctcataacgttaatcagccccaagagaaaga

SEQ ID NO: 121624 - DNA, 257 bp, Glycine max
gctgcttcactattctccctatggagtttaatcttgtggtccgtcaaaagtttttaaattttgtgaggttcattatgaagaaaagggacaaacttagttgtcaagttggaatcaacccatactccatgaatggactggtttggccaatagattactgagtaagggcaatgatattctgtgttgcgattatgctagttttgatggtttgattaccaagcaagttatgagcaagatggcagaaatgataaacagtcttt

SEQ ID NO: 121625 - DNA, 194 bp, Glycine max
agatttgaaattttgataaaccgcgatcacaggttgccgcaccttaaaaccggaaacaaaagcaatcgttacttgatttcaagaatctctcaatttcttcctacttctttgtgtacgatttcttaaggaaagaaaatcactctctgtgctggccacagacttcgtgaatcattttcttttccactcttagttta

SEQ ID NO: 121626 - DNA, 262 bp, Glycine max
aattaagaaatccttctccggagccatggcagatctcaagtccacattcttgaacgtctattctgttctcaaatctgaactcctccacgaccctgcttttgagttctccgatgatgctcgtaattgggcgaccggatgctggactacaatgtgccgggaggaaagttgaaccggggactgtcagtaattgatagctacagattgttaaaagaaggacaggcattaaatgatgacgaaatttttcatgccagtgctcttggtt

SEQ ID NO: 121627 - DNA, 265 bp, Glycine max
tgatgagagtgcggtttcctttgttggtgttgctgggaactgttttcctggcatcagtttgtgtctcattaaaggtgagagaggatgagaataaccctttctacttgagaagctctaacagcttccaaactcctttgagaaccaaaacggtcgcattcgtctcctccagagattcaacaaacgctccccacaacttgagaaccttcgagactaccggattgtccagtttcagtcaaaacccaacacaatccttctcccccaccat

SEQ ID NO: 121628 - DNA, 236 bp, Glycine max
ctcgagcgctcgagccgctcgagccgagcatttttaatgagatgctcattagatatagctatgaaaaattactgcgccaggctaaagctccaagtatgtttttacaatccttcaaaaattttgtttctttgtgttgtatggtgatgataacttaattagtgttcatgaatacgtcaagccttactttagtggttctaaattgaaaagctttctagctggtcataatatcaccatta

SEQ ID NO: 121629 - DNA, 249 bp, Glycine max
taagagtcacagctccactatcctcctaggagattctatcttgctgggaaccaagagcaagagtttctaaaatatcagcagcagcagcaaggaggttcccaaagccagaaaggaaagcaacaagaagaagaaaacgaaggaagcaacatattgagtggcttcgcccctgaattcttgaaagaagcgttcggcgtgaacatgcagatagtgagaaacctacaaggtgagaacgaagaggaggatagtgga

SEQ ID NO: 121630 - DNA, 249 bp, Glycine max
agcggtttcctttgttggtgttgctgggaactgttttcctggcatcagtttgtgtctcattaaaggtgagagaggatgagaataaccctttctacttgagaagctctaacagcttccaaactctctttgagaaccaaaacggtcgcattcgtctcctccagagattcaacaaacgctccccacaacttgagaaccttcgagactaccggattgtccagtttcagtcaaaacccaacacaatccttctcc

SEQ ID NO: 121631 - DNA, 250 bp, Glycine max
gttctttaattttctgattttagcaaattaaaatagtagtgttattggtaggttttggcaaagatgttttcagttccaggggtgtcgggaatcctgaacagaggaggagggcataagataaaagggacagtggtgttgatgaggaagaatgtgttggacttcaacagcgtggctgatcttactaaaggaaatgttgggggactcataggcaccggcctcaacgttgttggctcaacacttgataacctca

SEQ ID NO: 121632 - DNA, 252 bp, Glycine max
gaagggtgccattgtgacagtgaaaggaggtctcagcgtgataagcccacccacggaagagcagcaacaaagacccgaggaagaggagaagccagattgtgacgagaaagacaaacattgccaaagccaaagcagaaatggcattgacgagaccatttgcacaatgagacttcgccacaacattggccagacttcatcacctgacatcttcaaccctcaagctggtagcatcacaaccgctaccagcctcga

SEQ ID NO: 121633 - DNA, 251 bp, Glycine max
ttctcgaccgaatccgctcgacgtgctcgagcacacacacacacacactaagaataatacgcttctatcctccactactttttagccatctctctttctttctctttccttttcttcttatccgactccgtccccattccccaacaccacactaaccctacaaaacctataaaccttctggttctacccgttcaaaatgatgcttccacagggctccattgggccaacctccaaaaaaggacccctctaat

SEQ ID NO: 121634 - DNA, 250 bp, Glycine max; identical to SEQ ID NO: 102492

SEQ ID NO: 121635 - DNA, 248 bp, Glycine max
aacaaaactacccttttgcttttgctctttgttctttgccatggagtggccacaacaacaatggccttccatgatgatgagggtggtgataaaaagtcaccaaaaagtttgtttttgatgagcaactccacgagggttttcaagactgatgcaggggaaatgcgtgtgctgaaaagccatggtggtaggatattttataggcacatgcacattggcttcatctctatggaaccaaagtccttgtttgt

SEQ ID NO: 121636 - DNA, 248 bp, Glycine max
ttgaaattttgataaaccgcgatcacaggttgccgcaccttaaaaccggaaacaaaagcaatcgttacttgatttcaagaatctctcaatttcttcctacttctttgtgtacgatttcttaagggaaagaaaatcactctctgtgctggccacagacttcgtgaatcattttcttttccactcttagtttatttcctgaacactctcctatttgatataggacttcgtgtcagatttaaacttcttct

SEQ ID NO: 121637 - DNA, 249 bp, Glycine max
ttctcgagcgaatcggctcgagcaaatgctgttctttcaatgtggagatattttgttacagatctcgtctttgaagtattctaagatgacttctccctacattaaatgtacagtctctttcttcatagcatttggaaatttggctgatgataccatcaattttgaggcttttccccacaagctggtgcagtttggagagattcaggaaaaagttgtattgaaattttcacaagaggaatttcttacagc

SEQ ID NO: 121638 - DNA, 167 bp, Glycine max
gtgtggtgaggccatcttatatgaaataatatcaaaatatattttgtgtaataataaaactatggcctatgtatttaccaccctccgacccagcctatgttaatatctgagtggcgttgtacctttgaatcgccttaataaaatgtcagtcttcaagttttgtcttt

SEQ ID NO: 121639 - DNA, 242 bp, Glycine max
  unsure (1)..(242): unsure at all n locations
caaggaaaggttagagttgtcctcgagtcacatagatcacactgtttgcattcagattccaatgtggagagtgtgatcactgtgactcgggacaggnnaggttagagttgtgaactgccaagggaatgcagtgttcgacggtgagcttaggaggggacaactgctggtggtaccacagaacttcgtggtggcggacaagccggagaacaaggattcgaatacatagtattcaagacacacca

SEQ ID NO: 121640 - DNA, 242 bp, Glycine max
aattttgataaaccgcgatcacaggttgccgcaccttaaaaccggaaacaaaagcaatcgttacttgatttcaagaatctctcaatttcttcctacttctttgtgtacgatttcttaagggaaagaaaatcactctctgtgctggccacagacttcgtgaatcattttcttttccactcttagtttatttgctgaacactctcctatttgatataggacttcgtgtcagatttaaacttctt

SEQ ID NO: 121641 - DNA, 250 bp, Glycine max
tgctcgagcgaatcggctcgagcaaatgctgttctttcaatgacggagatattttgttggagatctcgtctttgaagtttctaagatgacttctccctacattaaatgtacagtctctttcttcatagcatttggaaatttggctgatgataccatcaattttgaggcttttccccacaagctggtgcagtttggagagattcaggaaaaagttgtattgaaattttcacaagaggaatttcttacagct

SEQ ID NO: 121642 - DNA, 249 bp, Glycine max
attgccgttcaaagtggtcttatttgaaaaacacttgggcgttggtgcaaatgtttgcttcgttaattttctctggagacgacaggctcactgagaaaacaatttttacttgcagagatttggacatcttggttgtttattatacaatagcaactcaatgtagatcaacaaggtatacagatgccacctaatgtaatgcggtagaaatttcctaaattgagttgctattgtataataaacaaccaagat

SEQ ID NO: 121643 - DNA, 250 bp, Glycine max
gcactcaatggtgttgagggtttggactatatggaaagaattcctcttgccacatctgagggttttccccatgtgctttcacgcaaaaatggtgaaaaaggcaaaaggagatttgtttctggggatggtgaagagatgacattgattccgggaaccagtgttgaagaggcttacaataagctaatagttgaacttgagaaaagtgttcctacattggttggcattgaatgtcccaaggatgagaaacttc

SEQ ID NO: 121644 - DNA, 251 bp, Glycine max
ggaaaaatttgtacaaatgatgaagagcatctatgaaacagaagttacagattggccagtaccactgaaaatcatttctggaaccattctacgcaacaattttgggaacaaccttctggaaactcttttcctttcttagagatgctggtaatgggggagtttttgttggtaatgttgcttcagcattcacaacttcaagtgtgcttgaggcccaaagtagaaagcccaacagatatgaagtttcccaatac

SEQ ID NO: 121645 - DNA, 249 bp, Glycine max
atatcctagtacaccgtattaaagaatttaagatatactatgatgagagcgcggttcccattactgttgctgggagttgttttcctggcatcagtttctgtctcatttggcattgcgtattgggaaaagcagaaccccagtcacaacaagtgcctccgaagttgcaatagcgagaaagactcctacaggaaccaagcatgccacgctcgttgcaacctccttaaggtggaggaagaagaagaatgcgaa

SEQ ID NO: 121646 - DNA, 250 bp, Glycine max
aaaaaacattgcccttgttctttcaaagttaccaaacacaagtacacaacacaacagcaacatatggcgtctgaacaattggctcgcagagagaacaccaccaccgagaaggagattcacgttgagaaacacagggttcccaagatggccacccacttcgagcaccttgcggacaagctaaagaatctgacatcaccgctgggaaggatactccgcagggtagcatagaagccttgcaagctggagagag

SEQ ID NO: 121647 - DNA, 248 bp, Glycine max
cccagatatagagcacccagagaccatgcaacaacagcagcagcagaagagtcatggtggacgcaagcaggggcaacaccagcagcaggaggaagaaggtggcagtgtgctcagtagcttcagcaaacatttcttagcacaatccttcaacaccaacgaggacacagctgagaaacttcggtctccagatgacgaaaggaagcagatcgtgacagtggagggaggcctcagcgttatcagccccaagt

SEQ ID NO: 121648 - DNA, 248 bp, Glycine max
ttggcattgaatgtcccaaggatgaaaaacttcctcgtcgcaaagtttttgataaacctaagacgcgctgcttcactattctccctatggagtttaatcttgtggttcgtcagaagtttttaaattttgtgaggttcattatgaagaaaagggacaagcttagttgtcaagttggaatcaacccatattctatggaatggactggtttggccaatagattactgagtaagggcaacgatattctgtgt

SEQ ID NO: 121649 - DNA, 247 bp, Glycine max
aacacaacaagaaaagacaacacagagagaagcgtcttaataaacgctcttctctgaaaaacctgatttcttctcttcttctcttctctttcgtttcgatcttcgatctctgaaaatgagagagtgcatttcaatccacatcggtcacgccggtattcaggtcggaaacgcctgctgggagctctactgcctcgaacacggcattcagcctgatgggcagatgccaagtgataagactgttggtgga

SEQ ID NO: 121650 - DNA, 247 bp, Glycine max
tggccgtgtcgcagcaaaaccaaaccacatattaacttgtttgctctaagtcatggctctgatcttgcacgcaaccaaagcaaacaagaatgctttcaagactctgattgcggcagagtacagtggcgtccaagtggaattggcccctaatttcgagatgggtgtctctaatagaactcctgaattccttaaaatgaatcccataggaaaggttcctgtcttggaaacgcccgatggtccagtcttt

SEQ ID NO: 121651 - DNA, 246 bp, Glycine max
atccttcaaaaattttgtttctttgtgtgtgtatggtgatgataacttaattagtgttcatgaatatgtcaagccttactttagtggttctaaattgaaaagctttctagctggtcataatatcaccattactgatggtattgacaaaactagtgcaactttgcaatttagaaagttagcagattgtgattttctcaagagaaactttaagcagatgtctaatgttttgtgggtggctcctgagga

SEQ ID NO: 121652 - DNA, 237 bp, Glycine max
gacagagggcaattttagagcaagtgttgatttgcagcgcactcatcgtattagaggaatgattaaaatggtggccacagttggtattcctgagaatacaggtatatcattggcctgtgctatgaatagttcttttagggggcgcgccagttctgatatttacaccatctgctctcaagactgtgaattgtggaatcctgcttgcacaaaagcaatgactatgtcatttaatccaaa

SEQ ID NO: 121653 - DNA, 242 bp, Glycine max
caacgccgtgagcagctacattaaggatgtgtttagggcaatcccttcggaggttctttccaattcttacaaccttggccagagtcaagtgcgtcactcaagtatcaaggaaactccggccctttggtcaacccataaataacaacaagcatatatgaaggtgtggtgaggccatcttatatgaaataatatcaaaatatattttgtgtaataataaaactatggcctatgtatttaccacc

SEQ ID NO: 121654 - DNA, 245 bp, Glycine max
aacgaaggaagcaacatattgagtggcttcgcccctgaattcttgaaagaagcgttcggcgtgaacatgcagatagtgagaaacctacaaggtgagaacgaagaggaggatagtggagccattgtgacagtgaaaggaggtctaagagtcacagctccagccatgaggaagccacagcaagaagaagatgatgatgatgaggaagagcagccacagtgcgtggagacagacaaaggttgccaacg

SEQ ID NO: 121655 - DNA, 245 bp, Glycine max
cacacacaactactacaagtacttccttacaatcaaaaccaacaacaactatggcaagttatcaaaagcactacgatgatcagggtcgcaaggttgacgagtatggcaacgttgagaagcaaaccgacgaatacggcaaccctgttcatgctgctagtgtcacctatgtagccaccagaactgctgctggtggttacagtgatgacattaataagcaacatgataccaccaatgcctacggcgta

SEQ ID NO: 121656 - DNA, 244 bp, Glycine max
gagtttctgatgatgaattcaataactataagcttgtgttctgtccacagcaagctgaggatgacaaatgtggggatattgggattagtattgatcatgatgatggaaccaggcgtttggtggtgtctaagaacaaaccgttagtggttcagtttcaaaaacttgataaagaatcactggccaagaaaaatcatggcctttctcgcagtgagtgagacacaagtgtgagagtactaaataaatg

SEQ ID NO: 121657 - DNA, 246 bp, Glycine max
aattttcacaagaggaatttcttacagcttggtcaacccaggtgcgtcctgcaacaactctgttggctgatgggtgtccatatttgtatgctatggtgcatgatagttcagtgtctacaataccaggtgattttgtcattggtgttaagttgacaaccataaacaatatgtgtgcatatgggctcaatcctggtatttcaggttctcgtcttttgggcaccattcctcagtccatttcacagcaaa

SEQ ID NO: 121658 - DNA, 247 bp, Glycine max
cttgaaagaagcgttcggcgtgaacatgcagatagtgagaaacctacaaggtgagaacgaagaggaggatagtggagccattgtgacagtgaaaggaggtctaagagtcacagctccagccatgaggaagccacagcaagaagaagatgatgatgatgaggaagagcagccacagtgcgtggagacagacaaaggttgccaacgccaaagcaaaaggagcagaaatggcattgatgagaccatttgc

SEQ ID NO: 121659 - DNA, 244 bp, Glycine max
ccgggcggacggtcgtcggtgcagatcttggtggtagtagcaaatattcaaatgagaactttgaaggccgaagaggggaaaggttccatgtgaacggcacttgcacatgggttagtcgatcctaagggacgggggaagcccgtctgatagcgctctgtgcgcgtactccgaaagggaatcgggttaaaattcctgaaccgggacgtggcggctgacggcaacgttagggagtccggagacgtcg

SEQ ID NO: 121660 - DNA, 247 bp, Glycine max
ggccaagtaaattggaaaggtgtagcatactacaataggctgatcaattacttgctagaaaaaggtattactccatatgcaaatctctaccattatgatcttcctttagcacttgaggagaggtacaacggattattgagccggcaagttgtgaatgattttgcagattatgcagaattttgtttcaagacttttggagatagagttaagaattggatgacgtttaatgaacctcgtgtggtggctg

SEQ ID NO: 121661 - DNA, 246 bp, Glycine max
gaccaagttcacaatcctcctcatctctcttctcttctgcatcgcccacacttgcagcgcctccaaatggcagcaccagcaagatagctgccgcaagcagctccagggggtgaacctcacgccctgcgagaagcacatcatggagaagatccaaggccgcggcgatgacgatgatgatgatgacgacgacaatcacattctcaggaccatgcggggaagaatcaactacataaggaggaacgaagg

SEQ ID NO: 121662 - DNA, 247 bp, Glycine max
aattaagagagttttttttgttcctcactgaccaagccatggcgatgagaaccaaactttctttagctatctttttcttttttcttttagccttattttcaaacctagcctttggcaaatgtaaagaaaccgaggtagaagaagaagaccctgagctcgtaacatgcaaacaccaatgccaacagccacagcaatacactgagggtgacaagcgggtatgcttgcaaagatgtgacaggtatcatcg

SEQ ID NO: 121663 - DNA, 246 bp, Glycine max
atgccacctaatgtaatgcggtagaaattaaatataagcggaatctgagtaatattcatatttccggcttattttacgacggcagatacaaattctggactaaacacgagaataatcttgctttgacagaagaggaaaagatggaagtgattagaaatagaggcattcctgctgatgttcttgcaaagcgagctcatgaatttgaaaaacatgttgctcatgaaagcctcaaggatcaaattcctg

SEQ ID NO: 121664 - DNA, 246 bp, Glycine max
taaaaggatagaagatgatcagaaatttaaaaacaaaaaaagtaagaaaaggaaaaacttggaggcatcaaatcagttggagaatgatagaaagaaaagtaagaaagaaatgatctctaagacaagagaggaggttgaagctgattacaaggctgcatccttagccccagatgttatggagaagaaacagatgcaaactgaaactctctctgctgtctttgagacatactttcgcattttgaagaa

SEQ ID NO: 121665 - DNA, 245 bp, Glycine max
gatcgcagtgcctactggtgttgcatggtggatgtacaacaatgaagacactcctgttgttgccgtttctattattgacaccaacagcttggagaaccagctcgaccagatgcctaggagattctatcttgctgggaaccaagagcaagagtttctaaaatatcagcaagagcaaggaggtcatcaaagccagaaaggaaagcatcagcaagaagaagaaaacgaaggaggcagcatattgagtg

SEQ ID NO: 121666 - DNA, 242 bp, Glycine max
gagagattggtaggcacagaacatgagggatatgatccttttcttggtggaattcaaaaatatgccactcccatgatgcccctagatgaagaaattctttctaaggttgcacaagatatggttgaggaatggtttgattgtgttgatgaggaggattcctttgaggaagtttctttaagtgcagcactcaatggtgttgagggtttagactatatggaaagaattcctcttgccacatctga

SEQ ID NO: 121667 - DNA, 245 bp, Glycine max
ggttaaagttaatgtagcatgtgctgctgttggcttgacatcaagttacactccaactccattgttggaatctggtttgcaaaaagacagagggttaattgtggagtattttggaaggatgtcttacgttgctcataacgttaatcagccccaagagaaagatttgttggagggaaatttttcctttgatattaaatctcgctctagattggaaaaagtttcctctacaaaagcacaatttgtta

SEQ ID NO: 121668 - DNA, 244 bp, Glycine max
agccattccagtgtgccggtgttgccctctctcgctgcaccctcaaccgcaacgcccttcgtagaccttcctacaccaacggtcccacggaaatctacatccaacaaggtaagggtatttttggcatgatatacccgggttgtcctagcacatttgaagagcctcaacaacctcaacaaagaggacaaagcagcagaccacaagaccgtcaccagaagatctataacttcagagagggtgattt

SEQ ID NO: 121669 - DNA, 248 bp, Glycine max
caattttcacagctttgcatacactttcttttgtgaacaacccatcttcttcacctttctcaatttccacaccaacccttaactttctactaaacattcggcattttatgagttgatcagcacccagatgcggtaagaaaaccaacctacacttattcacaagcgcctctgtcaaagaagcagctccacagtgtgttatgaagcacccgacagaagggtgtcctaaaatcaattgttgttgcacccaa

SEQ ID NO: 121670 - DNA, 245 bp, Glycine max
atcgggagaagtaatcgagcttcagcaatggtgtacgtcaaggctcagaaatcaaaagcctacttcaagagatatcaagtcaagttcaagagaagaagagagggaaaaaccgattaccgtgccaggattcggttgattaatcaggacaagaacaaatataacactccgaaataccgatttgtggttcgctttagcaacaaggacattgttgcacaaataatatctgctagcattgccggcgattt

SEQ ID NO: 121671 - DNA, 242 bp, Glycine max
ctcgagcgaattcggctcgagaattttgataaaccgcgatcacaggttgccgcaccttaaaaccggaaacaaaagcaatcgttacttgatttcaagaatttctcaatttctttctacttctttgtgtacgatttcttaagggaaagaaaatcactctctgtgctggccacagacttcgttaatcattttcttttccactcttagtacaattattgaacactctcctatttgatatatgactt

SEQ ID NO: 121672 - DNA, 246 bp, Glycine max
aagcaaagcaatggctacttcaaagttgaaaacccagaatgtggttgtatctctctccctaaccttaaccttggtactggtgctactgaccagcaaggcaaactcagcggaaactgtttctttcagctggaacaagttcgtgccgaagcaaccaaacatgatcctccaaggagacgctattgtgacctcctcgggaaagttacaactcaataaggttgacgaaaacggcaccccaaaaccctcgtc

SEQ ID NO: 121673 - DNA, 241 bp, Glycine max; identical to SEQ ID NO: 104135

SEQ ID NO: 121674 - DNA, 241 bp, Glycine max
tatttctgaaggtaagttggaggaggcgattgagaacttaacagaagctatttcactcaatcctacctctgccataatgtatggaactagagccagtgtttacatcaaaatgaagaaacccaatgctgcgatccgtgatgcaaatgctgctttggagattaatcctgattctgctaaaggatacaaatcacgtggcatagcacgagcaatgcttggtcaatgggaagaagctgcaaaggat

SEQ ID NO: 121675 - DNA, 242 bp, Glycine max
atacaataccaacacgatttacaaaatttctaccgcattacaaggtatacagacgccacctaatgtaatgcacgtagaaattttctaaatcgagttgctattgtataataaacaaccaagatgtccaaatctctgccgcattacattaggtggcatctgtataccttgttgatctacattctcccatcttttctcactgctgaaattaaatataagcggaatcagagtaatattcagatttc

SEQ ID NO: 121676 - DNA, 239 bp, Glycine max; identical to SEQ ID NO: 111682

SEQ ID NO: 121677 - DNA, 241 bp, Glycine max
  unsure (1)..(241): unsure at all n locations
cggctcgagtatatatactatgatgagagtgcggtttcctttgttggtgttgctgggaactgttttcctggcatcagtttgtgtctcattaaaggtgagagaggatgagaataaccctttctacttgagaagctctaacagcttccaaactctctttgagaaacaaaacgggtcgcattcgtctcctccagagattcaacaaacgctccgcacaacttgagatttancgagactaccggat

SEQ ID NO: 121678 - DNA, 241 bp, Glycine max
gcctcaagctactgcaatgcatgtgggagctatagaaattatcattgatagtttcgcaagtcctgactgcaacatagttggtgcaatgcttttggttgatacttatcataccaatcctgaaaatgcagttcgtagtatttttgttgcgcctttcagaggcggaaggcccattcgggtggttacatttccgaataccattgtgcagattgaaccagacatgaattcaaggtttcagcttttg

SEQ ID NO: 121679 - DNA, 241 bp, Glycine max
atcctccactactttttagccctctctctttctttctctttccttttcttcttatccgactccgtccccattccccaacaccatactaaccctacaaaacctataaaccttctggttctacccgttcaaaatgatgcttccacagggctccattgggccaacctccaaaaaaggacccctctaatgcaagtaccagtcctggtggacctcaatggaaaccacttgtgggttaactgtgagc

SEQ ID NO: 121680 - DNA, 243 bp, Glycine max
caattagtaacttgttgagagttgctgcttggaagaaaggctgtttaatggttaagattgtgatgtctgggaatgcagcagtcaaaaggagtgattgggcctcattggtacaagtgtttttaacaaacagcaacagtacagagcattttgatgcatgtaagtggacaaaatcggaaccacattcctgggaattgatcttcccaatagaggtatgcggtcctaataatggttttgaaatgtgga

SEQ ID NO: 121681 - DNA, 243 bp, Glycine max
gtactattcaaggttacaagaaacttcaagcagttttaagggccataatgctacgtcgtacaaaaggaactttgcttgatgggaagccaataatcaatttgcctcccaagacaattgagctaagtaaggtggatttttcgattgaggagcgagcattctacaccaaattggaatcagactcgcgtcttcaatttaaggcatatgctgctgctgggacagtgagccaaaactatgctaatattc

SEQ ID NO: 121682 - DNA, 242 bp, Glycine max
  unsure (1)..(242): unsure at all n locations
gggaagtcgtactgtaaagcggattgctgatgtttcaaaacttagaaattaccagtttccacaggatgcaggtcgtgtggcccatccagtgcgaccacactcttacatcaagatggacaacttctacacagttacggacagggnaaagggggctgaagttgttagaatgtacaaaaccttgctgggaagtcaagggttccgaaaaggcatggatctttattttaagagacatgtgggccaag

SEQ ID NO: 121683 - DNA, 240 bp, Glycine max
caatttctttctacttctttgtgtacgttttcttaagggaaagaaaatcactctctgtgctggccacagacttcgtgaatcattttcttttccactttgagtttattttttgaacactctcctatttgatataggacttcgtgtcagatttaaacttcttctgtgtctgtctcagttctctgttcaatttcaagttcaagtgggtgaaatcttggattagtgcttccactctcctatctg

SEQ ID NO: 121684 - DNA, 242 bp, Glycine max
gttcccaggacctattgtgttttaaatccacaaaatccttttgtgttaaataggtggatggggaaactgactttcccccagggcacttcccgaagtgtcaaaagaatgcctctttctatagggggaggagctggtgcaaagaatgctattctcatgaatatgccaaatgctgttctttcaatgtggagatattttgttggagatctcgtctttgaagtttctaagatgacttctccctacat

SEQ ID NO: 121685 - DNA, 238 bp, Glycine max
gtctttgaacactcatcaccatggccaagcttgttctttccctttgtttccttcttttcagtggctgcttcggtctgagagagcagggacagcaaaatgagtgccagatccaaaagctgaatgccctcaaaccggataaccgtatagagtcggaaggtgggttcattgagacctggaaccctaacaacaagccattccagtgtgccggtgttgccctctctcgctgcacccttaaccg

SEQ ID NO: 121686 - DNA, 238 bp, Glycine max
tctctccattgtctttgaacactcatcaccatggccaagcttgttctttccctttgtttccttcttttcagtggctgcttcgctctgagagagcaggcacagcaaaatgagtgccagatccaaaagctgaatgccctcaaaccggataaccgtatagagtcggaaggtgggttcattgagacctggaaccctaacaacaagccattccagtgtgccggtgttgccctctctcgctgca

SEQ ID NO: 121687 - DNA, 238 bp, Glycine max
gagaatacaggtatatcattggcctgtgctatgaatagttcttttagggggcgtgccagttctgatatttacaccatctgctctcaagactgtgaattatggaatcctgcttgcacaaaagcaatgactatgtcatttaatccaaacccgtgttctgatgcgtggagtttggaatttctgaagcgtaccggatttcattgtgatatcatttgtgtcactggatggactgccactccaa

SEQ ID NO: 121688 - DNA, 241 bp, Glycine max
ttaattattaacacttccttagttcaatatgggcaagcccttcactctctctctttcttccctttgcttgctactcttgtcgagtgcatgcttcgctattagctccagcaagctcaacgagcgccaactcaacaacctcaacgcgttggaacccgaccaccgcgttgagtccgaaggtggtttgattcaaacatggaactctcaacaccctgagctgaaatgcgccggtgtcactgtttcc

SEQ ID NO: 121689 - DNA, 238 bp, Glycine max
cgatgagtgcgctgcaaatcaacacttgctctaaaatggtggccacagttggtattcctgagaatacaggtatatcattggcctgtgctatgaatagttcttttagggggcgtgccagttctgatatttacaccatctgctctcaagactgtgaattatggaatcctgcttgcacaaaagcaatgactatgtcatttaatccaaacccgtgttctgatgcgtggagtttggaatttct

SEQ ID NO: 121690 - DNA, 238 bp, Glycine max
ccttctggatttccgctcacagttatttgtaatagcatttttaatgagatgctcattagatatagctatgaaaaattactgcgccaggctaaagctccaagtatgtttttacaatccttcaaaaattttgtttctttgtgtgtgtatggtgatgataacttaattagtgttcatgaatatgtcaagccttactttagtggttctaaattgaaaagctttctagctggtcttaatatca

SEQ ID NO: 121691 - DNA, 241 bp, Glycine max
ttctcaacaacttctggtacttcctactccaagcgcacttctgctccgcaattatcatgggcaaggtcaagatcggaatcaacggatttggaagaattggccgtttggtagccagagtggctctgcagagagacgatgttgaactcgttgccgttaacgaccctttcatcaccaccgattacatgacatactggtgtacatacgacagtgttcatggacactggaagcatcacgatgtcac

SEQ ID NO: 121692 - DNA, 241 bp, Glycine max
cactttccttagttcaatatggggaagcccttcttcactctctctctttcttccctttgcttgctactcttgtcgagtgcatgctttgctattacctccagcaagttcaacgagtgccaactcaacaacctcaacgcgttggaacccgaccaccgcgttgagtccgaaggtggtcttattgaaacatggaactctcaacaccctgagctgcaatgcgccggtgtcactgtttccaaacgca

SEQ ID NO: 121693 - DNA, 241 bp, Glycine max
ggtcaaccctgacaacatagtatgtggttcctgaggggactctcagggcatcaccagattgaagtctgtaggagtctctgtcgtcgttgttcaccctgacaacaacgaaaatctcagattaataacactcgccatacccgttaacaagcctggtagatttgagagtttcttcctatctagcactgaagctcaacaatcctacttgcaaggattcagcaggaacattttagaggcctcctac

SEQ ID NO: 121694 - DNA, 241 bp, Glycine max
tactcgagccgaatcggctcgagagcagtcaaaaggagtgattggacctcattggtacaagactttttaacaaacagcaacacgtacagagcattttgatgcatgtaagtggacaaaatcggaaccacattcctgggaattgatcttcccaatagaggtatgcggtcctaataatggttttgaaatgtggagttctgagtgggcaaatcagacttcatggcatttgagtttccttattgac

SEQ ID NO: 121695 - DNA, 238 bp, Glycine max
caatatcctagtacaccgtattaaagaatttaagatatactatgatgagagcgcggttcccattactgttgctgggagttgttttcctggcatcagtttctgtctcatttggcattgcgtattgggaaaagcagaaccccagtcacaacaagtgcctccgaagttgcaatagcgagaaagactcctacaggaaccaagcatgccacgctcgttgcaacctccttaaggtggaggaaga

SEQ ID NO: 121696 - DNA, 238 bp, Glycine max
tggggaacaactatatgatcctgttagaaatactgtgactgttgtttatgaggaatatagaaatcaatgtgcagccaattctttgagctcgaaaggaatgtttcaactgatccaaagaaaaggttcttcaaggaatctgatggctcttgttaatgatgatggatctgtggcaaaggcttggcctgttaatttagttgactgtaatgggaagcctgtatggtgccatggacctgagaat

SEQ ID NO: 121697 - DNA, 241 bp, Glycine max
gcagaaccccagtcacaacaagtgcctccgaagttgcaatagcgagaaagactcctacaggaaccaagcatgccacgctcgttgcaacctccttaaggtggaggaagaagaagaatgcgaagaaggtcaaattccacgaccacgaccacaacacccggagagggaacgtcagcaacacggtgagatggaggaagacgaaggtgagcagccacgtccattcccattcccacgcccacgccaa

SEQ ID NO: 121698 - DNA, 240 bp, Glycine max
agtataccttaataaataatttaagatactatgatgagagcacggttcccattactgttgctgggacttgttttcctggcttcagtttctgtctcatttggcattgcttactgggaaaaagagaaccccaaacacaacaagtgtctccagagttgcaatagcgagagagactcgtacaggaaccaagcatgccacgctcgttgcaacctccttaaggtggagaaagaagaatgtgaagaa

SEQ ID NO: 121699 - DNA, 239 bp, Glycine max
tggggaagcccttcactctctctctttcttccctttgcttgctactcttgtcgagtgcatgctttgctattagctccagcaagctcaacgagtgccaactcaacaacctcaacgcgttggaacccgaccaccgcgttgagtccgaaggtggtttgattcaaacatggaactctcaacaccctgagctgaaatgcgccggtgtcactgtttccaaactcaccctcaaccgcaatggcctc

SEQ ID NO: 121700 - DNA, 238 bp, Glycine max
accggcgcaatggcctccacttgccatcttactcaccttatccccggatgatcatcatcgcccaagggaaaggagcacttggagttgcaattccaggatgtcctgagacgtttgaggagccacaagaacaatcaaacagaagaggctcaaggtcgcagaagcagcagctacaggacagtcaccagaagattcgtcacttcaatgaaggagacgtactcgtgattcctcctggtgttcc

SEQ ID NO: 121701 - DNA, 240 bp, Glycine max
gttcagcaaaaagtacttgcaagctcccaaggatgtgtcgcagcaaatcaaaatggccaacaagaaaatgaagaaggaacaatattcttgtgaccatccacctgcatcatgggattggaggaaaaaaggtgtcatcacccaagtaaagtaccaagggggctgtggaagcggttgggcgttttctgccacgggagccatagaagcagcacatgcaatagcaacaggagaccttgttagcct

SEQ ID NO: 121702 - DNA, 240 bp, Glycine max
tgattttcctgaaaaggaagatcaagaaaaacccaaaaagattgatgccagattgagacaaagaatagatcctcaatacaatgaggttcaggctcagatggaaacaaatttgtttaaattgtctcttgatgatgttgaaactcctaaaggttccatgttggatcttaaaatttctcagtctaaaattgcacttcccaagaacacagttggaggaactattctgcgtagtgatctattggc

SEQ ID NO: 121703 - DNA, 262 bp, Glycine max
gagccgctcgaccgattcggctcgagactagttcaatatcctagtataccttaataaataatttaagatactatgatgagagcacggttcccattactgttgctggaacttgttttcctggcttcagtttctgtctcatttggcattgcttactgggaaaaagagaaccccaaacacaacaagtgtctccagagttgcaataggagagagactcgtacaggaaccaagcatgccacgctcgttgcaacctccttaaggtgga

SEQ ID NO: 121704 - DNA, 261 bp, Glycine max
tgctgaacactctcctatttgatataggacttcgtgtcagatttaaacttcttctgtttctttctcagttctctgcttaatttcaagttcaagctggtgaaatcttggattagtgctctcactcttctatctggtataggacttcgtgggtagacttttccatttctctcctttccttcactctcttcttctcactgatccgattgccgttcaaagtggtcttatttgaaaaacacttgggcgttggtgcaaatgtttgct

SEQ ID NO: 121705 - DNA, 258 bp, Glycine max
gggaaccagtgttgaagaggcttacaacaagctaagagttgaacttgagaaaagtgttcctacattggttggcattgaatgtcccaaggatgagaaacttcctcgtcgcaaaatttttgacaaacctaagacgcgctgcttcactattctccctatggagtttaatcttgtggttcgtcagaagtttttaaattttgtgggttcattatgaagaaaagggacaagcttagttgtcaagttggaatcaacccatactcc

SEQ ID NO: 121706 - DNA, 254 bp, Glycine max
aaactcaccctcaaccgcaatggcctccacttgccatcttactcaccttatccccggatgatcatcatcgcccaagggaaaggagcacttggagttgcaattccaggatgtcctaagacgtttgaggagccacaagaacaatcaaacagaagaggctcaaggtcgcagaagcagcagctacaggacagtcaccagagattcgtcacttcaatgaaggagacgtactcgtgattcctcctggtgttccttactgg

SEQ ID NO: 121707 - DNA, 251 bp, Glycine max
atgttccactgcctacaaaaactaatttggtggaaactcccaaggaatggcaactggatctaccttgtgacaaaattcctagtgtcttgaccacaactgatgagagattggtaggcacagaacatgagggatatgatccttttcttggtggaattcaaaaatatgccactcccatgatgcccctagatgaagaattctttctaaggttgcacaagatatagttgaggaatggtttgattgtgttgatgagg

SEQ ID NO: 121708 - DNA, 248 bp, Glycine max
atccactgaagggttccagtcacttccttatgttgttgcactgttcagtgcaatgctttggatttactatgctttcgtcaaaagggaagctgccctccttctcattaccattaacacatttggaattgttgtggagtcaatttaccttgcaatcttcctactttatgccccaaggaagcctaggcttacaacctcaagcttcttctcttactgaatgtgtttgggtttggagccatgcttctatcaac

SEQ ID NO: 121709 - DNA, 249 bp, Glycine max
aacgccgctgatcctgcatgctgggaaaaccaacaaaattcttacaagacactcattgcagccgagtatgctggcgtccaagttgattttgcccctaattttgagatgggtgtctccaataaaactcctgaatttctcaagatcaatcctattggcaaggttcctgtgctggaaacccccgatggtccaatatcgagagcaatgccattgctcgctatgttacccggctgaaaggtgataacactttgt

SEQ ID NO: 121710 - DNA, 246 bp, Glycine max
cgaccacgaccacaacacccggagagggaacctcagcaacccggtgagaaggaggaagacgaagatgagcaaccacgtccaatcccattcccacgcccacaacctcgtcaagaagaagagcacgagcagagagaggaacaggaatggcctcgcaaggaggaaaaacgcggagaaaagggaagtgaagaggagatgaggatgaggatgagggacaagatgaacgtcaattcccattcccacgcccac

SEQ ID NO: 121711 - DNA, 242 bp, Glycine max
gaagattttcctgaaaaggaagatcaagaaaaacccaaaaagattgataccagattgagacaaagaatagatcctcaatacaatgaggttcaggctcagatggaaacaaatttgtttaaattgtctcttgatgatgttgaaactcctaaaggttccatgttggatcttaaaatttctcaatctaaaattcacttcccaaaaacacagttggaggaaccattctgcgtagtgatctattggca

SEQ ID NO: 121712 - DNA, 244 bp, Glycine max
gttcaatatcctagtataccttaataaataatttaagatactatgatgagagcacggttcccattactgttgctgggacttgttttcctggcttcagtttctgtctcatttggcattgcttactgggaaaaagagaaccccaaacacaacaagtgtctccagagttgcaatagcgagagagactcgtaaggaaccaagcatgccacgctcgttgcaacctccttaaggtggagaaagaagaatg

SEQ ID NO: 121713 - DNA, 246 bp, Glycine max
cggctcgagatatatactatgatgagagtgcggtttcctttgatggtgttgctgggaactgctatactggcatcagtttgtgtctcattagaggtgagagaggatgagaataagcctatctaacttgagaagctctaacagcttccaaactctctatgagaaccaaaacggtcgcattcgtctcctccaggattcaacaaacgctccccacaacttgagaaccttcgagactaccggattgtccag

SEQ ID NO: 121714 - DNA, 250 bp, Glycine max
ttgtggagtattttggaaggatgtcttacgttgctcataacgttaatcagccccaagagaaagatttgttggagggaaatttttcctttgatattaaatctcgctctagattggaaaaagtttcctctacaaaagcacaatttgttagtggaaaaaccttcaaatatgatataattggtgctggttcacattctcagaagattttcctgaaaaggaagatcaagaaaaacccaaaaagattgatgccaga

SEQ ID NO: 121715 - DNA, 284 bp, Glycine max
cacgcgtccgtattctgctcgtgatatgacttcgtgtcagatttaaacttcttctgtttctttctcagttctctgcttaatttcaagttctagctggtgaaatcttggattagtgctctcactcttctatctggtataggacttcgtgggtagacttttccatttctctcctttctttcactctcttcttctcattgatccgcatcgccgttcaaagtggtacttttgaaaaacacttgggcgttggtgcaaatgtatgcttcgttaattttctctggagacga

SEQ ID NO: 121716 - DNA, 257 bp, Glycine max
tatactatgatgagagtgcggtttcctttgttggtgttgctgggaactgttttcctggcatcagtttgtgtctcattaaaggtgagagaggatgagaataaccctttctacttgagaagctctaacagcttccaaactctctttgagaaccaaaacggtcgcattcgtctcctccagagattcaacaaacgctccccacacttgagatttttcgagactaccggattgtccagtttcagtcaaaacccaacacaatc

SEQ ID NO: 121717 - DNA, 257 bp, Glycine max
aataaagatgagtttgaagaacaacatggtggtgctaaaggtgtgtttgttgcttcttttccttgtgggggttacagctgcacgcatggaactgagcttcttcaaaagtgatcagtcatcaagttatgatgatgatgagtattcaaaaccatgctgtgatctctgcatgtgcacacgctcaatgcctcctcaatgcagtgtgaagatattaggctgaattcatgccactcagattgtaagagctgtatgtgcacacg

SEQ ID NO: 121718 - DNA, 248 bp, Glycine max
caaacttattaacactttccttagttcaatatggggaagcccttcttcactctctctctttcttccctttgcttgctactcttgtcgagtgcatgctttgctattacctccagcaagttcaacgagtgccaactcaacaacctcaacgcgttggaacccgaccaccgcgttgagtccgaaggtggtcttatgaaacatggaactctcaacaccctgagctgcaatgcgccggtgtcactgtttccaaa

SEQ ID NO: 121719 - DNA, 247 bp, Glycine max
ctaacaataattccttcacttgcagaacttagttctctgttgcatcatcatcatcttcattagtgttagccctaaacttcaccttcaaccatgaccacagtgccaccacacagtgtccaagtgcacacaacaacacaccgctacgaagccggcgtcgtcccgccggctcgttttgaggcgccgcgttacgagccggcatcaaggcgccctcttccatttaccattccgagagaggtccgacgacctc

SEQ ID NO: 121720 - DNA, 244 bp, Glycine max
atcacacacaactactacaagtacttccttacaatcaaaaccaacaacaactatggcaagttatcaaaagcactacgatgatcagggtcgcaaggttgacgagtatggcaacgttgagaagcaaaccgacgaatacggcaaccctgttcatcttgctagtgtcacctatgtagccaccagaactgctgtggtggttacagtgatgacattaataagcaacatgataccaccaatgcctacggcg

SEQ ID NO: 121721 - DNA, 237 bp, Glycine max
attgtctttgaacactcatcaccatggccaagcttgttctttccctttgtttccttcttttcagtggctgcttcgctctgagagagcaggcacagcaaaatgagtgccagatccaaaagctgaatgccctcaaaccggataaccgtatagagtcggaaggtgggttcattgagacctggaaccctacaacaagctattccagtgtgccggtgttgccctctctcgctgcacccttaa

SEQ ID NO: 121722 - DNA, 243 bp, Glycine max
ctcgagcgatcctagtataccttaataaataatttaagatactatgatgagagcacggatcccattactgttgctgggacttgttttcctggcttcagtttctgtctcatttggcattgcttactgggaaaaagagaaccccaaacacaacaagtgtctccagagttgcaatagcgccacctactcgtcaggaaccaagcatgccacgctcgttgcaacctaccttaaggtggagaaagaaga

SEQ ID NO: 121723 - DNA, 250 bp, Glycine max
cctggaaccctaacaacaagccattccagtgtgccggtgttgccctctctcgctgcacccttaaccgcaatgcccttcgtagaccttcctacaccaacggtccctaggaaatctacatacaacaaggtattggtaattttgggcatgatattcccgggttgtcctagcacttatcaagaggcgcaagaatctcagcaacgaggcgaagccagaggccccaagacggcaaccaaaaggtacatggcttcag

SEQ ID NO: 121724 - DNA, 256 bp, Glycine max
ctttccttgaaagttaatgcatgctttttagctagacagaagataagaaggcaaagcaatggctacttcaaagttgaaaacccagaatgtggttgtatctctctccctaaccttaaccttggtactggtgctactgaccagcaaggcaaactcagcggaaactgtttctttcagctggaacaagttcgtgccgaagaaccaaacatgatcctccaaggagacgctattgtgacctcctcgggaaagttacaactca

SEQ ID NO: 121725 - DNA, 248 bp, Glycine max
ctctgcacccaccattactcagcactgccattcttcaatcacactaatggctgtcaccttctcagatcttcacaccgaagagggcatcaaatccctcgatcaattcctttgtgggaaaacctatatctctggggatcaattgacaaaggatgatatcaaagtgtatgcagctgttgtggaaaagccaggagctcttttcctaatgctgctaagtggtacgatgccgtctcttctcaacttgctccaag

SEQ ID NO: 121726 - DNA, 243 bp, Glycine max
actccttgctcttagccctcctcctcttcgccgccgtgtccaccgccgcgatggcggtgccgcgtccgacgccgacgacatcctgatccgtcaggtggtgccagatgttggcgaaccgaagaggaggacaacctgctgaacgccgagcactacttcgcgagcttcaaggccaagttcgccaagacctcgccaccaaggaggagcacgatcatcgcttcggcgtcttcaagtccaacctccgca

SEQ ID NO: 121727 - DNA, 240 bp, Glycine max
caggctactgccagatcttctgagctccccaagagaatatcaaaaactggagattggatcacacttatacaaaattctccaattagtaacttgttgagagttgctgcttggaagaaaggctgtttaatggtcaagattgtgatgtctgggaatgcagcagtcaaaaggagtgattgggcctcattggacaagtgtttttaacaaacagcaacagtacagagcatttgatgcatgtaagtg

SEQ ID NO: 121728 - DNA, 239 bp, Glycine max
aagaacgttgagaagaaggatcctaccggagccaaggtcaccaaggctgcccagaagaagaagtgaatcgtgcgggctggttcatcaggggatgttggttacaataaatgttggtttcttttctgtactcttgtgtcttcttttctaggtagcttgtttttcggacaaagtttgaagtctccaccacatctcgcaactgtcggtttcagaactgggttcttgatcgacggtggcaaaat

SEQ ID NO: 121729 - DNA, 239 bp, Glycine max
gaatttgctagagagatgattgctggtgtaaatccctgcgtaattcgtggtcttgaagagttccctccaaaaagtaatctggatcctgcaatctatggtgatcaaagcagtaagataacagcagattcccttgatctagatgggtacacaatggacgaggtacttggtagtcgaaggttatttagttagattaccatgatatcttcatgccatatgtgaggcagataaatcagctgaat

SEQ ID NO: 121730 - DNA, 244 bp, Glycine max
tcaagacatgggtccatgaatacgttttcttgtactacaaatcagatgacacacttagagaagatcgtgaactccaagcctgctggaaagaactcgtagaggtgggtcatggagacaagaaaaatgagccatggtggcctaagatgcaaactcgtgaagagctagttgaagcttgcgctatcatcataggactgcttcagcacttcatgcagctgttaattttggacagtatccctatggaggt

SEQ ID NO: 121731 - DNA, 242 bp, Glycine max
caaagtttcttcctttctctgctctttgcgttctctgacacatttggtgccttgtagagcgtgttttggcaggaaggtggtatggcgaaggacgttgaggttgctgagcgtggctccttctctgggaaggactaccaggaccctccaccagcaccactcattgatgctgaggagctcacaaagtggtcttttacagggctctcattgctgaattcattgccactttgctcttcctctacatt

SEQ ID NO: 121732 - DNA, 252 bp, Glycine max
cggctcgagcttttctctctcgttttttctcaaaaagttgcaagagttaaagcaaaaaccaaagtgagagagaaaatgatgaagccatcgatgctcagatctcttcactctgccgccacccgcggcgcctcccacctctcccgccgtggctacgcctccgagccggtgccggagcgcaaggtggccgttctagggccgccggcgggatcgggcaacccctctcccttctcatgaagctcaaccccctcgttt

SEQ ID NO: 121733 - DNA, 248 bp, Glycine max
gcttcttcgagtttcacagccaagtcgtaaaagggtttcaagggatggaaaacatgcagagcttctggcaattgggtgatgaactccgtgggcactcaaaagcatcggaggatcacaagtggttaatggttgcctcgaaactggccgaacagacaagattgaagggggagcgtgtgaacaaccttgatcttcaaagggacccattgaaacaaggtcaagggataaatttgggttccaggaagagaaca

SEQ ID NO: 121734 - DNA, 246 bp, Glycine max
atatgctagtacaccgtattaaagaatttaagatatactatgatgagagcgcggttcccattactgttgctgggagttgttttcctggcatcagtttctgtctcattgggcattgcgtattgggaaaagcagaaccccagtcacaacaagtgcctccgaagttgcaatagcgagaaagactcctacagaaccaagcatgccacgctcgttgcaacctccttaaggtggaggaagaagaagaatgcg

SEQ ID NO: 121735 - DNA, 244 bp, Glycine max
gctggtgcaaagaatgctattctcatgaatatgccaaatgctgttctttcaatgtggagatattttgttggagatctcgtctttgaagtttctaagatgacttctccctacattaaatgtacagtctctttcttcatagcatttggaaatttggctgatgacaccatcaattttgaggcttttcccccaagctggtgcagtttggagagattcaggaaaaagttgtattgaaattttcacaaga

SEQ ID NO: 121736 - DNA, 241 bp, Glycine max
ctcgagccgtttttaatgagatgctcattagatatagctatgaaaaattactgcgccaggctaaagctccaagtatgtttttacaatccttcaaaaattttgtttctttgtgtgtgtatggtgatgataacttaattagtgttcatgaatacgtcaagccttactttagtggttctaaattgaaaactttctagctggtcataatatcaccattactgatggtattgacaagactagtgca

SEQ ID NO: 121737 - DNA, 243 bp, Glycine max
acttattaacactttccttagttcaatatggggaagcccttcttcactctctctctttcttccctttgcttgctactcttgtcgagtgcatgctttgctattacctccagcaagttcaacgagtgccaactcaacaacctcaacgcgttggaacccgaccaccgcgttgagtccgaaggtggtcttatgaaacatggaactctcaacaccctgagctgcaatgcgccggtgtcactgtttcca

SEQ ID NO: 121738 - DNA, 241 bp, Glycine max
agttcaatatcctagtacaccgtattatagaatttaagatatactatgatgagagcgcggttcccattactgttgctgggagttgttttcctggcatcagtttctgtctcatttggcattgcgtattgggataagcagaaccccagtcacaacaagtgcctccgaagttgcaatagcgagaaagatcctacaggaaccaagcatgccacgctcgttgcaacctccttaaggtggaggaaga

SEQ ID NO: 121739 - DNA, 238 bp, Glycine max
aagaaaatgaagaaggaacaatattcttgtgaccatccacctgcatcatgggattggaggaaaaaaggtgtcatcacccaagtaaagtaccaagggggctgtggaagcggttgggcgttttctgccacgggagccatagaagcagcacatgcaatagcaacaggagaccttgttagcctttctgacaagaactcgtagactgtgtggaagaaagcgaaggttgttacaatggatggca

SEQ ID NO: 121740 - DNA, 239 bp, Glycine max
tacccccaactaacaataattccttcacttgcagaacttagttctctgttgcatcatcatcatcttcattagtgttagccctaaacttcaccttcaaccatgaccacagtgccaccacacagtgtccaagtgcacacaacaacacaccgctacgaagccggcgtcgtcccgccggctcgttttaggcgccgcgttacgaagccggcatcaaggcgccctcttccatttaccattccgag

SEQ ID NO: 121741 - DNA, 236 bp, Glycine max
gtgtgatctatgtgactcgaggacaaggaaaggttagagttgtgaactgccaagggaatgcagtgttcgacggtgagcttaggaggggacaattgctggtggtaccacagaacttcgtggtggcggagcaagccggagaacaaggattcgaatacatagtattcaagacacaccacaacggatgactagctacttgaaggatgtgtctagggcaattccctcagaggttcttggcc

SEQ ID NO: 121742 - DNA, 240 bp, Glycine max
atacacacacacacacacactaagaataatggcttctatcctccactactttttagccctctctctttctttctctttccttttcttcttatccgactccgtccccattccccaacaccacactaaccctacaatacctataaaccttctggttctacccgttcaaaatgatgcttccacagggtcccttggtccaacctccaaaaaaggacccctctaatgcaagtagcagtcctggtg

SEQ ID NO: 121743 - DNA, 266 bp, Glycine max
acgcaggctcgggatccagctcaagtatagatgagtttgaagaacaacatggtggtgctaaaggtgtgtttgttgcttcttttccttgtgggggttacagctgcacgcatggaactgagcttcttcaaaagtgatcagtcatcaagttatgatgatgatgagtattcaaaaccatgctgtgatctctgcatgtgcacacgctcaatgcctctcaatgcagctgtgaagatattaggctgaattcatgccactcagattgtaagagc

SEQ ID NO: 121744 - DNA, 256 bp, Glycine max
ccaaaaatgaagagcaccatcttctttgctctctttctcttttgtgccttcaccacctcatacctaccttcagccatcgctgatttcgtgctcgataatgaaggtaaccctcttgaaaatggtggcacatattatatcttgtcagacataacagcatttggtggaataagagcagccccaacgggaaatgaaagatgcctctcactgtggtgcaatctcgcaatgagctcgacaaagggattggaacaatcatctc

SEQ ID NO: 121745 - DNA, 247 bp, Glycine max
aagaaatgaagagtactatcttctttgctctctttctagtttgtgccttcaccatctcatacctgccttcagccaccgctcagttcgtgctcgacactgatgatgatcctcttcaaaacggtggcacatactatatgttgccagttatgagaggaaagggcggtggaatagaagtagattcaactggaaaagaatatgccctctcactgttgtgcaatcacccaatgagctcgataaggggattgga

SEQ ID NO: 121746 - DNA, 244 bp, Glycine max
gcttctaccaagccgggtactgaggttatgtatgatgagaggctgtttaaccaggataagggaattgcgtctgggtttgccactgatgatcagtacaatgtgtatgagcatgggttgtttactgcgcagccacactttccacattgtataggccgaagaagaatattgatgatgagacttatggaggtcggatgagcagttggagaagattatgaagactgataggtttaagcccgataaaggg

SEQ ID NO: 121747 - DNA, 242 bp, Glycine max
gagaaccagagcgaggaactggaggagaagcagaagaagaaaatggagaaggagctcattaacttggctactatgtgcaggtttggacccatcatccagtgcgacttgtcctccgatgactaagaagttaaaagcaatgttgtcacttgtacgtactaacacatgatgtgatagtttatgctagctactataacataagctgtctctgagtgtgttgtatattaataaagatcatcactggt

SEQ ID NO: 121748 - DNA, 243 bp, Glycine max
gtgagaacaccattgaattttgattctagcaagcagagcttttgtcaattctctattgatcttcttggtggaggaattttagtggacaaaactggagattggatcacacttatacaaaattctccaattagtaacttgttgagagttgctgcttggaagaaaggctgtttaatggttaagattgtgtgtctgggaatgcagcagtcaaaaggagtgattgggcctcattggtacaagtgtttt

SEQ ID NO: 121749 - DNA, 235 bp, Glycine max
gagaagccacaacagcaatcaagcagaagaggctcaaggtcgcagcagcaactacaagacagtcaccagaagattcgtcacttcaatgaaggagacgtactagtgattcctcctggtgttccttactggacctataacactggcgatgaaccagttgttgccatcagtcttcttgacaccccaacttcaacaatcagcttgatcaaaaccccagagtattttaccttgctgggaa

SEQ ID NO: 121750 - DNA, 237 bp, Glycine max
cggctcgagcggctcgagctcgagccgaatcggctcgagtagcaaaatgaccaagttcacaaagctcctccagtctccactcttcagcatcgcccacacttgcagcgcctccaaatggcagcaccagcaagatagctgccgcaagcagctccagggggtgaacctcacgccctgctagaagccatcatggagaagatccaaggccgcggcgatgacgatgatgatgatgacgacgac

SEQ ID NO: 121751 - DNA, 253 bp, Glycine max
atctccatatctgttcccaaaagcttgtttgtaagaatggcttccggtgaacagaaattccctcctcaacaacaacaaacacagcctgggaaggagcatgctatgactccagtaccccaattcactagccctgactacaagccttcaaataaacttcaagggaagattgcacaagtcactgggggtgattctggattggacgagcggcgtgtaacttgtttgccttagaaggtgctaccgtggccttcacgta

SEQ ID NO: 121752 - DNA, 250 bp, Glycine max
cactcgagccgaatcggctcgagaaaaagatcatacatagtagtgcaggtgggttgcaaagaagcttgggggtcttctccataggggtcataagataaaagggacagtggtgttgatgcgcaagaatgtgttggacgtgaatagcgtaaccagcgttgggggaattattggtcaaggtctcgacttagttgctcaacactcgatactcttactgccttcttgggccgatccgtgtctctccagcttatta

SEQ ID NO: 121753 - DNA, 246 bp, Glycine max
tatatactatgatgagagtgcggtttcctttgttggtgttgctgggaactgttttcctggcatcagtttgtgtctcattaaaggtgagagaggatgagaataaccctttctacttgagaagctctaacagcttccaaactctctttgagaaccaaaacggtcgcattcgtctcctccagagattcaacaacgctccccacaacttgagaaccttcgagactaccggattgtccagtttcagtcaaa

SEQ ID NO: 121754 - DNA, 244 bp, Glycine max
agcaaaatgaccaagttcacaatcctcctcatctctcttctcttctgcatcgcccacacttgcagcgcctccaaatggcagcaccagcaagatagctgccgcaagcagctccagggggtgaacctcacgccctgcgagaagcacatcatggagaagatccaaggccgcggcgatgacgatgatgatatgacgacgacaatcacattctcaggaccatgcggggaagaatcaactacataaggag

SEQ ID NO: 121755 - DNA, 239 bp, Glycine max
cggctcgagcctgggtctgcacaagctgttgagaagctattaaagaaccaaagagaatcctacattgtggatgctcagcctaagaagaaagaggaggggaataagggaagaaagggtcctttgtcttcaattttgagggctttttactgaataagtatgtactaaaatgtatgctgtaatagccatagtgagcgaggaaagtatcgggctatgtaactatgactagagcttcaactatg

SEQ ID NO: 121756 - DNA, 237 bp, Glycine max
aacttattaacactttccttagttcaatatggggaagcccttcttcactctctctctttcttccctttgcttgctactcttgtcgagtgcatgctttgctattacctccagcaagttcaacgagtgccaactcaacaacctcaacgcgttggaacccgaccaccgcgttgagtccgcaagtgtcttattgaaacatggaactctcaacaccctgagctgcaatgcgccggtgtcact

SEQ ID NO: 121757 - DNA, 233 bp, Glycine max
ctgaaattttgataaaccgcgatcacaggttgccgcaccttaaaaccggaaacaaaagcaatcgttacttgatttcaagaatctctcaatttcttcctacttctttgtgtacgatttcttaagggaaagaaaatcactctctgtgctggccacagacttcgtgaatcattttcttttccactcttgtccatcctctgaacactctcctatttgatataggacttcgtgtcaga

SEQ ID NO: 121758 - DNA, 235 bp, Glycine max
gtttgttagtacagtggatcccctcaaagagccgcctcttgtaactgcaaacactgttttgtctatactttctgttgattaccctgtcgacaaagtttcctgctatgtatcagatgatggttcagctatgttgacctttgaagcactatcagaaacagctgagtttgcaaagaagtggggcctttttgcaaaaagcacaatattgaaccaagagccccagagttttattttgccc

SEQ ID NO: 121759 - DNA, 233 bp, Glycine max
cttaattattaacacttccttagttcaatatggggaagcccttcactctctctctttcttccctttgcttgctactcttgtcgagtgcatgctttgctattagctccagcaagctcaacgagtgccaactcaacaacctcaacgcgttggaacccgaccaccgcgttgagtccgacagggtttgattcaaacatggaactctcaacaccctgagctgaaatgcgccggtgtca

SEQ ID NO: 121760 - DNA, 233 bp, Glycine max
atttgtctctcatcaatggctgccacgagaccggtgcagtgtttgttacgaagggtttgcagaggaagtaggactattggggttgccacagaagttaatgcttcttcttcttctcagaaaatcatcgacaaggaatatgaacacagtgctcacaattaccatcctcttccgattgtattgctcaagcaaagggaacctctgtttgggatccagagggaaacaaatatcttgat

SEQ ID NO: 121761 - DNA, 238 bp, Glycine max
ctcttcctcaccgattgctagaatggaatttcgatgctcagtcaactcttttaccattctcttctctcttgctcttgcaggagagagccatgtccatgcatcgctacctgaggaagattattgggaagctgtttggccaaacactcccattcccactgcactgcgagagcttctaaagcctcccctgcaggtgttgaaatcgatgaactccctaagcaaattgatgatacacagtacc

SEQ ID NO: 121762 - DNA, 239 bp, Glycine max
gtttaatttcaagttcaagctggtgaaatcttgctttctgcgctcccactttcctatctggtataggacttcgtgggtagacttttctatttctctcctttctttcactctcttcttctcactaatccgcattgccgttcacagtggtcttatttgaacaacacttgggcgttggtgcccttcctgcttcgttaattttctctggagtcaacaggtttactgagaaaacaatttttact

SEQ ID NO: 121763 - DNA, 227 bp, Glycine max
ctatgatgagagcgcggttcccattactgttgctgggagttgttttcctggcatcagtttctgtctcatttggcattgcgtattgggaaaagcagaaccccagtcacaacaagtgcctccgaagttgcaatagcgagaaagactcctacaggaaccaagcatgccacgctcgttgcaacctccttaaggtggaggaagaagaagaatgcgaagaaggtcaaattcca

SEQ ID NO: 121764 - DNA, 276 bp, Glycine max
ctacttattaacactttccttagttcaatatggggaagcccttcttcactctctctctttcttccctttgcttgctactcttgtcgagtgcatgctttgctattacctccagcaagttcaacgagtgccaactcaacaacctcaacgcgttggaacccgaccaccgcgttgagtccgaaggtggtcttattgaaacatggaactctcaacaccctgagctgcaatgcgccggtgtcactgtttccaaacgcaccctcaaccgcaacggcctccatt

SEQ ID NO: 121765 - DNA, 242 bp, Glycine max
caagtcaactccctccaaactccaagctctctattttctctgagaaaatttgcaaatgtcgaatttcctgagcaatactaatccgaaccctaataagtccttcgaggtgaatcagcctcccactgattccgtgtccagtcttagcttcagtcccaaagccaacttcctcgtcgccacttcttgggacaatcaggttcgttgttgggaggtagcacggaatggagtaaatgttgccactgttc

SEQ ID NO: 121766 - DNA, 146 bp, Glycine max
caccatcaattttgaggcttttccccacaagctggtacagtttggagagattcaggaaaaagttgtattgaaattttcacaagaggaatttcttacagcttggtcaacccaggtgcgtcctgcaacaactctgttggctgatgggt

SEQ ID NO: 121767 - DNA, 263 bp, Glycine max
gccgcggcgaggacggcagcgacgaagatcacattctcatcaggaccatgccgggaagaatcaactacatcaggaagaaggaaggaaaagaagaagaagaagaaggacacatgcagaagtgctgcagcgaaatgagcgagctgaaaagccccatatgccagtgcaaagcgctacagaagataatggataaccagagcgagcaactggaggggaaggagaagaagcagatggagagagagctcatgaacttggctattaggtgc

SEQ ID NO: 121768 - DNA, 207 bp, Glycine max
caccccactcaattgaagactccacagtccaagcaccgtctcaacttcaatgccctcaaatcagcgccacaaacacacccttctcccaaccctaattccgttgcaaacaaggaacccccaccagaacacccaattgaagtcattgccagaatccgtgactacccagatcgaaaggacaagcctttatccgttcttcaaaccagttcc

SEQ ID NO: 121769 - DNA, 215 bp, Glycine max
actttccttagttcaatatggggaagcccttcttcactctctctctttcttccctttgcttgctactcttgtcgagtgcatgctttgctattacctccagcaagttcaacgagtgccaactcaacaacctcaacgcgttggaacccgaccaccgcgttgagtccgaagtggtcttattgaaacatggaactctcaacaccctgagctgcaatgcg

SEQ ID NO: 121770 - DNA, 249 bp, Glycine max
cttaattattaacacttccttagttcaatatggggaagccctgcactctctctctttcttccctttgcttgctactcttgtcgagtgcatgctttgctattagctccagcaagctcaacgagtgccaactcaacaacctcaacgcgttggaacccgaccaccgcgttgagtccgaaggtggtttgattcaaacatggaactctcaacacccggagctgaaatgcgccggtgtcactgtttcaaactcac

SEQ ID NO: 121771 - DNA, 261 bp, Glycine max
aaaagatgcctcagaggcactcgaagaacaacaacgatctcgcgttcttcacgtacgacgagaagcggaaactaggttatggtacccagaaggagaggttgggaaaggactccattaagcccttcgatgcttgctctctctgcctcaaatccctaatcgaccctatgagctgccagaagggccatctcttttgcaaagagtgcatagtccagtgcctcttgtctcagaagaaagacattcaaaggaagcttgcagcccatg

SEQ ID NO: 121772 - DNA, 257 bp, Glycine max
gccagttctgatatttacaccatctgctctcaagactgtgaattatggaatcctgcttgcacaaaagcaatgactatgtcatttaatccaaacccgtgttctgatgcgtggagtttggaatttctgaagcgtaccggatttcattgtgatatcatttgtgtcactggatggactgccactccaatgcaggatgttcaggttacaattgattggtttatttcctctcaggaatgtgttcccaggacctattgtgtttt

SEQ ID NO: 121773 - DNA, 260 bp, Glycine max
tgaagaggaagatgaggatgaggatgaggaacaagatgaacgtcaattcccattcccacgcccacctcatcagaaggaagagcgaaagcaagaggaagatgaggatgaggagcagcagcgagagagcgaagaaagtgaagattctgagttacgaagacataagaataagaacccttttctcttcggctctaacaggttcgaaactctcttcaaaaaccaatatggtcgcattcgcgtcctccagaggttcaaccaacgct

SEQ ID NO: 121774 - DNA, 182 bp, Glycine max
accctccatacacactctctctgagtcggtcgagttgaatcggtgtgagtcagtgaccgagtcgaaccatgtcggacgaagaacaccatttcgaatccaaggccgatgctggagcctccaagacctatcctcaacaagccggaaccatccgcaaaaacggttacatcgtcatcaagggtcgt

SEQ ID NO: 121775 - DNA, 110 bp, Glycine max
atttggaaatttggctgatgacaccatcaattttgaggcttttccccacaagctggtgcagtttggagagattcaggaaaaagttgtattgaaattttcacaagaggaat

SEQ ID NO: 121776 - DNA, 100 bp, Glycine max
ctttgaacactcatcaccatggccaagcttgttctttccctttgtttccttcttttcagtggctgcttcgctctgagagagcaggcacagcaaaatgagt

SEQ ID NO: 121777 - DNA, 268 bp, Glycine max
gtgttttcccatcagtacacatctttgcaccaagaagcatttgttagttttttgcgatcaaagtaaaatcaaagctatgcaggaggcgaactcggtggcgaaatcaacatgcaacgcagtggaagtatgcaactaaaggagaagaaggtgagggatttgatggtggacaagaagaggctagtggaggtgccgtacatggcgtcgctggcccacacaatgactacactggtagcgaacaaggttgtggcggtgccggtggctgcgccgc

SEQ ID NO: 121778 - DNA, 124 bp, Glycine max
  unsure (1)..(124): unsure at all n locations
gaagaatgtcgagaaggtcaaattccacgaccacgaccacataacncggagagggaacgtcagcaacacggtgagaaggaggaagacgaaggtgagcagccacgtccattcccattcccacgcc

SEQ ID NO: 121779 - DNA, 247 bp, Glycine max
  unsure (1)..(247): unsure at all n locations
gtaatattcatatttccggcttattttacgacggcagatacaaattctggactaaacacgagagaaatcttgctttgacagaagaggaaaagatggaagtgattagaaatagaggcattcctgctgatgttcttgcaaagcgagctcatgaatttgaaaaacatgttgctcatgaaagcctcaaggatcagattcacancgttgacaagttgtattctactaaggttaataattttgcaaaatttat

SEQ ID NO: 121780 - DNA, 180 bp, Glycine max
gttcaatatcctagtataccttaataaataatttaagatactatgatgagagcacggttcccattactgttgctgggacttgttttcctggcttcagtttctgtctcatttggcattgcttactgggaaaaagagaaccccaaacacaacaagtgtctccagagttgcaatagcgagaga

SEQ ID NO: 121781 - DNA, 252 bp, Glycine max
gcatcgagcgaatcggctcgagctagtacaccgtattaaagaaagtaagatatactatgatgagagcgcggttcccatagctgttgctgggagttgttttcctggcatcagtttctgtctcatttggcattgcgtattgggaaaagcagaaccccagtcacaacaagtgcctccgaagttgcaatagcgagaaagactcctacaggaaccaagcatgccacgctcgtggcaacctcctaaaggtggaggaag

SEQ ID NO: 121782 - DNA, 258 bp, Glycine max
cacgcagcgaggtagcgtcttcttcttccgtttctctgcatcggtgtgaacaatggctacatacgctgcgatgaagcccacaaagcccgggttggaggagtcccaagaacagatccacaagataaggatcaccctttcctccaagcacgtcaaaaacctacgagaaggtttgtgcggatttggttcgcggtgcaacggataagagactcagggtgaagggacctgttaggatgcccactaaggttcttcacatcacta

SEQ ID NO: 121783 - DNA, 255 bp, Glycine max
ccgcccaactgcttctagaaggttgcttcctgagaaaggcaccccagaatatgaagaaatgattaataaccatgaaaaggcttatttgagaacaattacatcaaagttgccgactctcattagcctttcagtgatagagatcttgtcgacacatgcttctgatgaggtctaccttggccagagggacaacccacattggacctctgattcaaaagcattacaagcctttcaaaagtttggaaacaagctcaagga

SEQ ID NO: 121784 - DNA, 180 bp, Glycine max
aattttgataaaccgcgatctcaggttgccgcaccttaaaaccggaaacaaaagcaatcgttacttgatttcaagaatctctcaatttcttcctacttctttgtgtacgatttcttaagggaaagaaaatcactctctgtgctggccacagacttcgtgaatcattttcttttccacaca

SEQ ID NO: 121785 - DNA, 152 bp, Glycine max
tgaaattttgataaaccgcgatcacaggttgccgcaccttataaccggcaacaaaagcaatcgttacttgatttcaagaatttctcaatttctttctacttctttgtgtacgatttcttaagggaaagaaaatcactctctgtgctggccac

SEQ ID NO: 121786 - DNA, 254 bp, Glycine max
gcaaagcaatggctacttcaaagttgaaaacccagaatgtggttgtatctctctccctaaccttaaccttggtactggtgctactgatcagcaaggcaaactcagcggaaactgtttctttcagctggaacaagttcgtgccgaagcaaccaaacatgatcctccaaggagacgctattgtgacctcctcgggaaagttacaactcaataaggttgacgaaaacggcaccccaaaaccctcgtctcttggtcgc

SEQ ID NO: 121787 - DNA, 188 bp, Glycine max
ctcgagccgatcgcaaattttctcccccaaatcgtagatctacggttaaattggtgtactgtggtaagatgggaggaggatttagagtgcttcacttagttaggccatatctcacgtatcttcctgaagttcaaactgctgacaggaaagtgccatttagcgagaaggtcatagacactgtgatctct

SEQ ID NO: 121788 - DNA, 245 bp, Glycine max
cactgaccaagccatggcgatgagaaccaaactttctttagctatctttttcttttttcttttagccttattttcaaacctagcctttggcaaatgtaaagaaaccgaggtagaagaagaagaccctgagctcgtaacatgcaaacaccaatgccaacagccacagcaatacactgagggtgacaagcgggtatgcttgcaaagatgtgacaggtatcatcgtatgaagcaagagcgagagaaac

SEQ ID NO: 121789 - DNA, 142 bp, Glycine max
gaagatgaacaaattccctctcaccctcctcgccgaccaagccatggaaagcgtgaacaagacgaggacgaggacgaagatgaagataaacctcgtcctagtcgaccaagccaaggaaagcgtgaacaagaccaggaccagg

SEQ ID NO: 121790 - DNA, 171 bp, Glycine max
cgcgatcacaggttgccgcaccttaaaaccggaaacaaaagcaatcgttacttgatttcaagaatttctcaatttctttctacttctttgtgtacgatttcttaagggaaagaaaatcactctctgtgctggccacagacttcgagaatcattttctattccacattaaat

SEQ ID NO: 121791 - DNA, 235 bp, Glycine max
attgggtaggaccctgggacagacaacaacccatatttggggtttgtgtacacgtcattccaagagcgagcaacatttgtggcgcacgggaacacggctcggctcgcgaaggagggcggggatccagtgctggcgcgcctatgcgggaccatcgcagcggacgagaagcggcacgagaacgcgtactcaagaatcgtggagaagcttctggaagtggaccccaccggggcatggt

SEQ ID NO: 121792 - DNA, 255 bp, Glycine max
cttcgaggttaacgctcgagacaacaagaagtttacatttgcagggaaggacaacattgtgagttctctggacaacgttgctaaggagcttgcctttaactatccttctgagatggtgaacggagtattcgaccgaaaggagagtttctttttcccttttgagttgccgagagaggagcgtggtcgtcgcgctgatgcgtgagaggtttagaacaatcaagaaaaggtgtgcatgtggctgaagatcacggggaa

SEQ ID NO: 121793 - DNA, 177 bp, Glycine max
taagatttgaaattttgataaaccgcgatcacaggttgccgcaccttaaaaccggaaacaaaagcaatcgttacttgatttcaagaatctctcaatttcttcctacttctttgtgtacgatttcttacgggaaagaaaatcactctctgtgctggccacagacttcgtgaatcattt

SEQ ID NO: 121794 - DNA, 253 bp, Glycine max
aatttcgatgctcagtcatctcttttaccattctcttctctcttgctcttgcaggagagagccatgtccatgcatcgctacctgaggaagattattgggaagctgtttggccaaacactcccattcccactgcactgcgagagcttctaacgcctctccctgcaggtgttgaaatcgatgaactccctaagcaaattgatgatacacagtacccaaaaacattcttctataaagaagactttcatccaggcaa

SEQ ID NO: 121795 - DNA, 86 bp, Glycine max
acaaaacaaaagcatcatatgctgtcgatttatttattcatagttgaagcgctagtcatagttacatagcccgatactttccacgc

SEQ ID NO: 121796 - DNA, 264 bp, Glycine max
gaatacaggtatatcattggcctgtgctatgaatagttcttttagggggcgtgccagttctgatatttacaccatctgctctcaagactgtgaattatggaatcctgcttgcacaaaagcaatgactatgtcatttaatccaaacccgtgttctgatgcgtggagtttggaatttctgaagcgtaccggatttcattgtgatatcatgtgtgtcactggatggactgccactccaatgcaggatgttcaggttacaattgattg

SEQ ID NO: 121797 - DNA, 262 bp, Glycine max
gacactttccttagttcaatatggggaagcccttcttcactctctctctttcttccctttgcttgctactcttgtcgagtgcatgctttgctattacctccagcaagttcaacgagtgccaactcaacaacctcaacgcgttggaacccgaccaccgcgttgagtccgaaggtggtcttattgaaacatggaactctcaacaccctgagctgcaatgcgccggtgtcactgtttccaaacgcaccctcaagcgcaacggcct

SEQ ID NO: 121798 - DNA, 236 bp, Glycine max
ttaacactttccttagttcaatatggggaagcccttcttcactctctctctttcttccctttgcttgctactcttgtcgagtgcatgctttgctattacctccagcaagttcaacgagtgccaactcaacaacctcaacgcgttggaacccgaccaccgcgttgagtccgaaggtggtcttattgaaacatggaactctcaacaccctgagctacaatgcggcggtgtcactgttt

SEQ ID NO: 121799 - DNA, 182 bp, Glycine max
aaattttgataaaccgcgatcacaggttgccgcaccttacaaccggaaacaaaagcaatcgttacttgatttcaagaatctctcaatttcttcctacttctttgtgtacgatttcttaagggaaagaaaatcactctctgtgctggccacagacttcgtgaatcattttcttttccacacaa

SEQ ID NO: 121800 - DNA, 115 bp, Glycine max
tggtccttaaacactcatcagtcatcaccatggccaagctagttttttccctttgttttctgcttttcagtggctgctgcttcgctttcagttccagagagcagcctcagcaaaa

SEQ ID NO: 121801 - DNA, 250 bp, Glycine max
attaaatgtacagtctctttcttcatagcatttggaaatttggctgatgacaccatcaattttgaggcttttccccacaagctggtgcagtttggagagattcaggaaaaagttgtattgaaattttcacaagaggaatttcttacagcttggtcaactcaggtgcgtcctgcaacaactctgttggctgatgggtgtccatatttgtatgctatggtgcatgatagttcagtgtctacaataccaggtg

SEQ ID NO: 121802 - DNA, 248 bp, Glycine max
gttccagggggaactgctgtattaccctcaacagctctgatgctttcagttcctgcacagattgctggatgtaaaactattgtccttgcaactcctccagctcaggatggtactatatgcaaggaggtagtgtattgtgcaaagaagggtggggtgactcacatccttagagctggaggagagcgagccatatctgccatggcttggggaacagaaacgtgtcccaaggttgagaaaattttggccca

SEQ ID NO: 121803 - DNA, 265 bp, Glycine max
agcaagcagagcttttgtcaattctctattgatcttcttggtggaggaattttagtggacaaaactggagattggatcacacttatacaaaattctccaattagtaacttgttgagagttgctgcttggaagaaaggctgtttaatggttaagattgtgatgtctgggaatgcagcagtcaaaaggagtgattgggcctcattggtccaagtgtttttaacaaacagcaacagtacagagcattttgatgcatgtaagtggacaa

SEQ ID NO: 121804 - DNA, 255 bp, Glycine max
  unsure (1)..(255): unsure at all n locations
acttattaacactttccttagttcaatatgngggaagcccttcttcactctctctctttcttccctttgcttgctactcttgtcgagtgcatgctttgctattacctccagcaagttcaacgagtgccaactcaacaacctcaacgcgttggaacccgaccaccgcgttgagtccgaaggtggtcttattgaaacatggaactctcaacaccctgagctgcaatgcgccggtgtcactgtttccaaacgcaccct

SEQ ID NO: 121805 - DNA, 232 bp, Glycine max
gtcatttaatccaaacccgtgttctgatgcattgagtttggaatttttgaagcgtaccggatttcactgtgatatcatttgtgtcactggatggactgccaccccaatgcacgatgttcaggttacaattgattggtttatttcctctcaggaatgtgttcccaggacttattgtgttttaaatccacaaaatccttttgtgttaaataggtggatggggaaactgatttcc

SEQ ID NO: 121806 - DNA, 254 bp, Glycine max
aaagcaatggctacttcaaagttgaaaacccagaatgtggttgtatctctctccctaaccttaaccttggtactggtgctactgaccagcaaggcaaactcagcggaaactgtttctttcagctggaacaagttcgtgccgaagcaaccaaacatgatcctccaaggagacgctattgtgacctcctcgggaaagttacaactcaataaggttgacgaaaacggcaccccaaaaccctcgtctcttggtcgcgc

SEQ ID NO: 121807 - DNA, 238 bp, Glycine max
caccgcacgaatatcttgttgtttggagcgatccgagaaaaactctgtaaacatgttggtttaccaggacctccttacaggtgatgagcttctctctgactccttccgttacaaggaaattgagaatggaatgctgtgggaagttgaggggaagtgggttgttaaaggagcagttgatgtagacgttggtgcaaacccttctgctgagggtggaggagaagatgagggagttgatgat

SEQ ID NO: 121808 - DNA, 238 bp, Glycine max
ctatgaagaaagagactgtacatttaatgtagggagaagtcatcttagcatttggaaatttggctgatgacaccatcaattttgaggcttttccccacaagctggtgcagtttggagagattcaggaaaaagttgtattgaaattttcacaagaggaatttcttacagcttggtcaactcaggtgcgtcctgcaacaactctgttggctgatgggtgcccatatttgtatgctatggt

SEQ ID NO: 121809 - DNA, 238 bp, Glycine max
gttaataaataatttaagatactatgatgagagcacggttcccattactgttgctgggacttgttttcctggcttcagtttctgtctcatttggcattgcttactgggaaaaagagaaccccaaacacaacaagtgtctccagagttgcaatagcgagagagactcgtacaggaaccaagcatgccacgctcgttgcaacctccttaaggtggagaaagaagaatgtgaagaaggtga

SEQ ID NO: 121810 - DNA, 111 bp, Glycine max
caagtacttccttacaatcaaaaccaacaacaactatggcaagttatcaaaagcactacgatgatcagggtcgcaaggttgacgagtatggcaacgttgagaagcaaaccg

SEQ ID NO: 121811 - DNA, 250 bp, Glycine max
aaactttaagcagatgtctaatgttttgtgggtagctcctgaggacaaggcgagtttatggtcacaacttcattatgtttcgtgtaataatctggaaatgcaagaagcttatcttgtcaatctcgtaaatgtgttacgagaattgtatttgcacagtccagaggaagctcgccaattgagaaggaaagctctctctcgtattgaatggctgcaaaaagctgatgtgcctaccatagcacagattgaagag

SEQ ID NO: 121812 - DNA, 248 bp, Glycine max
ggaagatcatacatagtagtgttggtgggttgcaaagatgcttgggggtcttctccataggggtcataagataaaagggacagtggtgttgatgcgcaagaatgtgttggacgtgaatagcgtaaccagcgttgggggaattattggtcaaggtctcgacttagttggctcaacactcgatactcttactgccttcttgggccgatccgtgtctctccagcttattagtgctaccaaagctgatgcca

SEQ ID NO: 121813 - DNA, 246 bp, Glycine max
gtggtcaattgcaacagttttaacacccattgctgcaaaatttgggttgccatgtcttcttattatgcgtgccttcatgggaattggtgagggtgttgcgatgcctgcaatgaataatatactttccaaatggattccagtgtcagagagaagcagatcacttgcactagtatatagtggcatgtaccttggttcagtcactggcttggcattctcacctatgctaatccagaaatttgggtggcc

SEQ ID NO: 121814 - DNA, 233 bp, Glycine max
gcagcagctacaggacagtcaccagaagattcgtcacttcaatgaaggagacgtactcgtgattcctcctggtgttccttactggacctataacactggcgatgaaccagttgttgccatcagtcttcttgacacctctaacttcaataaccagcttgatcaaacccctagggtattttaccgtgctgggaacccagatatagagtacccagagaccatgcaacaacaacaac

SEQ ID NO: 121815 - DNA, 250 bp, Glycine max
gaaattttgataaaccgcgatcacaggttgccgcaccttaaaaccggaaacaaaagcaatcgttacttgatttcaagaatttctcaatttctttctacttctttgtgtacgatttcttaagggaaagaaaatcactctctgtgctggccacagacttcgtgaatcattttcttttccacttttagtttattccctgaacactctcctatttgatataggacttcgtgtcagatttaaacttcttctgttt

SEQ ID NO: 121816 - DNA, 216 bp, Glycine max
tgatcgcagtgcctactggtgttgcatggtggatgtacaacaatgaagacactcctgttgttgccgtttctattattgacaccaacagcttggagaaccagctcgaccagatgcctaggagattctatcttgctgggaaccaagagcaagagtttctaaaatatcagcagcagcagcaaggaggttcccaaagccaaaggggaatcccccaagaag

SEQ ID NO: 121817 - DNA, 256 bp, Glycine max
cttcaaaacactcataacacaaagcacaaagcaaagctcatccttgagttaaaaaatggcagcagcttcttccatggctctctcatccccatccttggctggcaaggccgtgaagctgggcccatcagccccagaagtgggaagggtgagcatgaggaagaccgtcaccaagcaggtctcctcaggaagcccatggtacggcccagaccgagtcaagtacttgggcccattctctgaggagccccgtcctacctaa

SEQ ID NO: 121818 - DNA, 116 bp, Glycine max
tgagaacattgctcgcccttcacgtgctgacttctacaacccaaaagctggtcgcattagcaccctcaacagtctcaccctcccaggccacagccaattcggactcagtgcccaat

SEQ ID NO: 121819 - DNA, 197 bp, Glycine max
gtgatgataacttaattagtgttcatgaatatgtcaagccttactttagtggttctaaattgaaaagctttctagctggtcataatatcaccattactgatggtattgacaaaactagtgcaactttgcaatttagaaagttagcagattgtgattttctcaagagaaactttaagcagatgtctaatgttttgtgg

SEQ ID NO: 121820 - DNA, 235 bp, Glycine max
gcaagaaaaagactggctatctttagttgctgttcatagtgatgcatggttacttgctattgcattctattttggagccagatttgggtttgataaagctgacaggaaacggcttttcaacatgatcaatgaactgccaacaatatttgaagttgttactggtgcagcaaagaagcaagttaaggagaagtcttcagtttcaaaccacagtggcagcaagtctaagtccagctct

SEQ ID NO: 121821 - DNA, 233 bp, Glycine max
cttattaacactttccttagttcaatatggggaagcccttcttcactctctctctttcttccctttgcttgctactcttgtcgagtgcatgctttgctattacctccagcaagttcaacgagtgccaactcaacaacctcaacgcgttggaacccgaccaccgcgttgagtccgaaggtggtcttattgacacatggaactctcaacaccctgagctgcaatgcgccggtgtc

SEQ ID NO: 121822 - DNA, 244 bp, Glycine max
gacgaaggagctcttcttctaccacactttaattcaaaggccatagtgatactagtgattaatgaaggagatgcaaacattgaacttgttggcattaaagaacaacaacagaagcagaaacaggaagaggaacctttggaagtgcaaaggtacagagctgaattgtctgaagacgatgtatttgtacttccagcagcttatccatttgtcgtccacgctacctaaaaccacaatttccgagctt

SEQ ID NO: 121823 - DNA, 160 bp, Glycine max
tgcagaccgagctagctagctagcaagcaagcacagagatggaggcaaagcgaggccatgccctcatgtgcttggcacgtgtttcactcttcctctgcgctctaaccctatccgctgctcacggaagcaccacggttcaagacatcgcgagaaagttgaa

SEQ ID NO: 121824 - DNA, 161 bp, Glycine max
tctccattgtctttgaacactcatcaccatggccaagcttgttctttccctttgtttccttcttttcagtggctgcttcgctctgagagagcaggcacagcaaaatgagtgccagatccaaaaactcaatgccctcaaaccggataaccgtatagagtcag

SEQ ID NO: 121825 - DNA, 246 bp, Glycine max
accaattcacatcactgaaggaaattatgtcagaaagcaagatgtcagcattgaatatgatgcatgtacaattccaaatgattgtggttcattggttgttgccaaggttggaaatcacaaacaaattgttggtttccatgttgctggaagcaaaggaagactgggatatgcttcattgataccatatgttgagccagttgtgcaagctcaaagtgctgaagtttactttgacttcttccctgtgga

SEQ ID NO: 121826 - DNA, 235 bp, Glycine max
cctagttcaatatcctagtataccttaataaataatttaagatactatgatgagagcacggttcccattactgttgctgggacttgttttcctggcttcagtttctgtctcatttggcattgcttactgggagatagagaaccccaaacacaacaagtgtctccagagttgcactagcgcgagagactcgtacaggagccaagcatgtcacgctcgttgcaacctccttaaggtg

SEQ ID NO: 121827 - DNA, 201 bp, Glycine max
gttcaatatcctagtataccttaataaataatttaagatactatgatgagagcacggttcccattactgttgctgggacttgttttcctggcttcagtttctgtctcatttggcattgcttactgggaaaaagagaaccccaaacacaacaagtgtactccagagtttgcaataggcgagagagactcgtaccaggaacca

SEQ ID NO: 121828 - DNA, 239 bp, Glycine max
gtgcggtttcctttgttggtgttgctgggaactgttttcctggcatcagtttgtgtctcattaaaggtgagagaggatgagaataaccctttctacttgagaagctctaacagcttccaaactctctttgagaaccaaaacggtcgcattcgtctcctccagagattcaacaaacgctccccacaacttgagaactttcgagactaccggattgtccagtttcagtcaaaacccaacac

SEQ ID NO: 121829 - DNA, 117 bp, Glycine max
gctatacacacacacacacacactaagaataatggcttctatcctccactactttttagccctctctctttctttctctttccttttcttcttatccgactccgtccccattcccca

SEQ ID NO: 121830 - DNA, 118 bp, Glycine max
actaacaattccttcacttgcagcactgttgcatcatcatcttcattgcaaaaccctaaacttcaccttcaaccatgaccacacaagtaccaccacacagtgtccaagtccacacaac

SEQ ID NO: 121831 - DNA, 274 bp, Glycine max
tgatccttttcttggtggaattcaaaaatatgccactcccatgatgcccctagatgaagaaattctttctaaggttgcacaagatatagttgaggaatggtttgattgtgttgatgaggaggattcctttgaggaagtttctttgagtgcagcactcaatggtgttgagggtttggactatatggaaagaattcctcttgccacatctgagggttttcctcatgtgctttcacgcaaaaatggtgaaaaaggcaaaaggagatttgtttctggg

SEQ ID NO: 121832 - DNA, 269 bp, Glycine max
ttcattatgcagaaaagggacaagcttagttgtcaagttggaatcaacccatactccatggaatggactggtttggccaatagattactgagtaagggcaacgatattctgtgttgcgattatgctagttttgatggtttgattaccaagcaagttatgagcaaaatggcagaaatgataaacagtctttgtggtggtgatgcaaaattgatgcgtgaaaggacacacctgctgttggcttgttgttcaaggatggcaatttgtaagaa

SEQ ID NO: 121833 - DNA, 259 bp, Glycine max
caggaggaaattctgtcttctagtgcaagtgatttcagaactgcaatggtgagtagaaatagcaagcctcaagctactgcaatgcatgtgggagctatagaaattatcattgatagtttcgcaagtcctgactgcaacatagttggtgcaatgctcttggttgatacttatcataccaatcctgaaaatgcagttcgtagtatttttgtcgcgcctttcagaggcggaaggcctattcgggtggttacatttccgaata

SEQ ID NO: 121834 - DNA, 267 bp, Glycine max
tgataacttaattagtgttcatcaccatacacacacaaagaaacaaaatttttgaaggattgtaaaaacatacttggagctttgtgtgtgtatggtgatgataacttaattagtgttcatgaatacgtcaagccttactttagtggttctaaattgaaaagctttctagctggacataatatcaccattactgatggtattgacaagactagtgcaactttgcaatttagaaagttagcagattgtgattttctcaagagaaacttt

SEQ ID NO: 121835 - DNA, 263 bp, Glycine max
tcctagtacaccgtattaaagaatttaagatatactatgatgagagcgcggttcccattactgttgctgggagttgttttcctggcatcagtttctgtctcatttggcattgcgtattgggaaaagcagaaccccagtcacaacaagtgcctccgaagttgcaatagcgagaaagactcctacaggaaccaagcatgccacgctcgttgcaacctccttaaggtggaggaagaagaagaatgcgaagaaggtcaaattccacg

SEQ ID NO: 121836 - DNA, 259 bp, Glycine max
taccaggtgattttgtcattggtgttaagttgacaaccataaacaatatgtgtgcatatgggctcaatcctggtatttcaggttctcgtcttttgggcaccattcctcagtccatttcacagcaaactgtttggactcaaatggcaacagtgagaacaccattgaattttgattctagcaagcagagcttttgtcaattttctattgaccttctcggtggaggaattttagtggacaaaactggagattggatcacact

SEQ ID NO: 121837 - DNA, 262 bp, Glycine max
acactcatcaccatggccaagcttgttctttccctttgtttccttcttttcagtggctgcttcgctctgagagagcaggcacagcaaaatgagtgccagattcaaaagctgaatgccctcaaaccggataaccgtatagagtcggaaagtgggttcattgagacctggaagcctaacaacaagccattccagtgtgccggtgttgctctctctcgctgcagccttaaccgcaatgcccttcgtagaccttcctacaccaacg

SEQ ID NO: 121838 - DNA, 262 bp, Glycine max
caaaactcattttccaactacatttcttccaccaactcataaaatcgtcatatctgttcccaaaagcttgtttgtgagaatggcttcgggtgaaaagaaattcccacctcaacaacaacaaacacagcctgggaaggagcatgctatgaatccagtaccccaattcactagccctgactacaagccttcaaataaacttcaaggaaagatagcattagtgactgggggtgactctgggattggacgagcggtgtgtaacttg

SEQ ID NO: 121839 - DNA, 263 bp, Glycine max
ttaattattaacacttccttagttcaatatggggaagcccttcactctctctctttcttccctttgcttgctactcttgtcgagtgcatgctttgctattagctccagcaagctcaacgagtgccaactcaacaacctcaacgcgttggaacccgaccaccgcgttgagtccgaaggtggtttgattcaaacatggaactctcaacaccctgagctgaaatgcgccggtgtcactgtttccaaactcaccctcaaccgcaatg

SEQ ID NO: 121840 - DNA, 262 bp, Glycine max
attgtttgcaattcgtggatttacaatgccaaactcttcaaaagtgaccgcattttctttgccaaccagacatatcttccaagtgagacaccagctccactagtcaaatatagagaagaagagttgcataatttaagaggagatggaactggagaacgcaaagagtgggaaaggatctatgattatgatgtctacaatgatttaggtgatccggataaaggtgaaaatcatgcccgtcctgttctcggaggacatgacacct

SEQ ID NO: 121841 - DNA, 264 bp, Glycine max
cgggtgctgatcgtgccacaaaactttgtggtggctgcaagatcacagagtgacaacttcgagtatgtgtcattcaagaccaatgatacacccatgatcggcactcttgcaggggcaaactcattgttgaacgcattaccagaggaagtgattcagcacactttcaacctaaaaagccagcaggccaggcagataaagaacaacaaccctttcaagttcctggttccacctcaggagtctcagaagagagctgtggcttagagc

SEQ ID NO: 121842 - DNA, 266 bp, Glycine max
cttggttgtttattatacaatagcaactcgatttagaaaatttctaccgcattacattaggtggcatctgtataccttgttgatctacattctcccatcttttctcactgctgaaattaaatataagcggaatcagagtaatattcagatttccggcttattttacgacggcagatacaaattctggactaaacacgagaaaaatcttgctttgacagaagaggaaaagatggaagtgattagaaatagaggcattcctgctgatg

SEQ ID NO: 121843 - DNA, 285 bp, Glycine max
gcgtacttcggctcgaggcaccagcaagatagctgccgcaagcagctccagggggtgaacctcacgccctgcgagaagcacatcatggagaagatccaaggccgcggcgatgacgatgatgatgatgacgacgacaatcacattctcaggaccatgcggggaagaatcaactacataaggaggaacgaaggaaaagacgaagacgaagaagaagaaggacacatgcagaagtgctgcacagaaatgagcgagctgagaagccccaaatgccagtgcaaagcgctg

SEQ ID NO: 121844 - DNA, 256 bp, Glycine max
catacatactagtgttggtgggttgcaaagatgcttggggaccttctccataggggtcataagatttaagggacagtggtgttgatgcgcaagaatgtgttggacgtgaatagcgtaaccagcgttgggggaattattggtcaaggtctcgacttagttggctcaacactcgatactcttactgccttcttgggccgatccgtgtctctccagcttattagtgctaccaaagctgatgccaacggaaaagggacac

SEQ ID NO: 121845 - DNA, 259 bp, Glycine max
ccctcactttctcgctcgccaaacgcccctctctctcctccaatggccgaccagctcaccgacgaccagatcgccgagttcaaggaggccttcagcctcttcgacaaggacggcgatggttgtattactactaaggaacttgggactgtgatgcggtcactagggcaaaacccaactgaggcagaactgcaggatatgattaatgaggttgatgctgatggcaatggaaccatcgacttcccagagttcctcaacctga

SEQ ID NO: 121846 - DNA, 259 bp, Glycine max
ggaagcccttctctctctctctttcttccctttgcttgctactcttgtcgagtgcatgctttgctattagctccagcaagctcaacgagtgccaactcaacaacctcaacgcgttggaacccgaccaccgcgttgagtccgaaggtggtttgattcaaacatggaactctcaacaccctgagctgaaatgcgccggtgtcactgtttccaaactcaccctcaaccgcaatggcctccacttgccatcttactcacctta

SEQ ID NO: 121847 - DNA, 258 bp, Glycine max
cagagttgcaatagcgagagagactcgtacaggaaccaagcatgccacgctcgttgcaacctccttaaggtggagaaagaagaatgtgaagaaggtgaaattccacgaccacgaccacgaccacaacacccggagagggaacctcagcaacccggtgagaaggaggaagacgaagatgagcaaccacgtccaatcccattcccacgcccacaacctcgtcaagaagaagagcacgagcagagagaggaacaggaatgg

SEQ ID NO: 121848 - DNA, 259 bp, Glycine max
taccttaataaataatttaagatactatgatgagagcacggttcccattactgttgctgggacttgttttcctggcttcagtttctgtctcatttggcattgcttactgggaaaaagagaaccccaaacacaacaagtgtctccagagttgcaatagcgagagagactcgtacaggaaccaagcatgccacgctcgttgcaacctccttaaggtggagaaagaagaatgtgaagaaggtgaaattccacgaccacgacc

SEQ ID NO: 121849 - DNA, 261 bp, Glycine max
gacttcttccctgtggaggttgatagtcaagagggagttgctcacattggtgaattgaaatctggtgtctatgttccactgcctacaaaaactaatttggtggaaactcccaaggaatggcaactggatctaccttgtgacaaaattcctagtgtcttgaccacaactgatgagagattggtaggcacagaacatgagggatatgatccttttcttggtggaattcaaaaatatgccactcccatgatgcccctagatgaa

SEQ ID NO: 121850 - DNA, 259 bp, Glycine max
gagatctcgtctttgaagtttctaagatgacttctccctacattaaatgtacagtctctttcttcatagcatttggaaatttggctgatgacaccatcaattttgaggcttttccccacaagctggtgcagtttggagagattcaggaaaaagttgtattgaaattttcacaagaggaatttcttacagcttggtcaactcaggtgcgtcctgcaacaactctgttggctgatgggtgcccatatttgtatgctatggt

SEQ ID NO: 121851 - DNA, 262 bp, Glycine max
ctaacaattccttcacttgcagcactgttgcatcatcatcttcattgcaaaaccctaaacttcaccttcaaccatgaccacacaagtaccaccacacagtgtccaagtccacacaacaacacacccctacgaagctggcgtcgtcccccccggagcccgtttcgaaccgccgcgttatgaagccggcgtcaaagcgccctccatttaccattccgagagaggtccaacgacttcccaggtcctcgccgtcctcgccggcctc

SEQ ID NO: 121852 - DNA, 260 bp, Glycine max
caacgattaacaatggcttcaaccgacaagtcaccggacccaacgccggcgaagggtccggatccaactccggggaagccgatgagtgttggtcagcacgtgatcgacaagagtgcaatgatggtgcagtcgctggaccccattaagctgatgagtcagcacgtgtgctccttcgctatctacagccatgacatgtctcgccagatagagacacatcactactgctccagactccaccagaacttcatacaatgtgctgt

SEQ ID NO: 121853 - DNA, 237 bp, Glycine max
atatagtgcaactttgcaatttagaaagttagcagattgtgattttctcaagagaaactttaggcagatgtctaatgttttgtgggtggctcctgaggacaaggcgagtgtatggtcacaacttcattatgtgtcatgtaataatctggacattcaagaagcttatcttgtcaatctcgtaaatgtgttacgagaattgtatttgcacagtccagaggaagctcgccaattgagagg

SEQ ID NO: 121854 - DNA, 263 bp, Glycine max
ctactggctcctgttttgaaggctgtaattgagaaaaccaatgtgaacccaagtgaagttggggatattgttgtaggtagtgtattggctcctggagctcaaagagctagtgaatgccgaatggctgcattttatgctggttttcccgaaactgtgcctgttaggaccgttaataggcaatgttcatctgggctccaggctgtcgctgatgtagctgctgctataagggctgggttctatgacattggtattggtgccggttt

SEQ ID NO: 121855 - DNA, 261 bp, Glycine max
ctcgagccgctcgagccggttcaatatcctagtataccttaataaataatttaagatactatgatgagagcacggttcccattactgttgctgggacttgttttcctggcttcagtttctgtctcatttggcattgcttactgggaaaaagagaaccccaaacacaacaagtgtctccagagttgcaatagcgagagagactcgtacaggaaccaagcatgccacgctcgttgcaacctccttaaggtggagaaagaagaa

SEQ ID NO: 121856 - DNA, 262 bp, Glycine max
atttttgttcgtgcaggtgcagaagatggctcggagctccacaagaatgaaatgggtctctatcttcacacttctattcctctcccactcgcccctcacaatctccgcagaagatgggctagtggcgaatggagattttgaggctaccccaagaaacgggttcccaaacgaggcgattgtggagggccccagcgaggtcccaaactggaagtcaaacggcaacgttgagcttgtggaatcggggcaaaaacagggtgggatg

SEQ ID NO: 121857 - DNA, 254 bp, Glycine max
agagaatataggaatataagaactaagatggattggatcggagcgtaccgcggaggccagagaagcagggactggtgcgacccttcatcaccattcactgatttgtgggaccctcgtcgtgtcggtgacgctgatgatatcacctcctctctcgcccatgctcacgttgactggcgtgagactgataaagctcatatcttccgtgctgatcttccaggggtgaagaaagaggatctgaaggtgcaggtggagga

SEQ ID NO: 121858 - DNA, 253 bp, Glycine max
ttttaatgagatgctcattagatatagctatgaaaaattactgcgccaggctaaagctccaagtatgtttttacaatccttcaaaaattttgtttctttgtgtgtgtatggtgatgataacttaattagtgttcatgaatacgtcaagccttactttagtggttctaaattgaaaagctttctagctggtcataatatcaccattactgatggtattgacaagactagtgcaactttgcaatttagaaagtta

SEQ ID NO: 121859 - DNA, 256 bp, Glycine max; identical to SEQ ID NO: 110884

SEQ ID NO: 121860 - DNA, 257 bp, Glycine max
actcgccatacccgttaacaaacccggtagatttgagagtttcttcctatctagcactcaagctcaacagtcctacttgcaagggttcagcaagaatattctagaggcctcatacgacaccaaattcgaggagataaacaaggttctgtttggtagagaggaggggcagcaacaaggggaggagaggctgcaagagagtgtgattgtggaaatctcaaagaaacaaattcgggaactgagcaaacatgccaaatcta

SEQ ID NO: 121861 - DNA, 249 bp, Glycine max
atggaagagtgagcatggacgtgtctaccataaccacgaagaagaggcaaagagacttgagattttcaagaataacttgaactatatcagggacatgaatgcaaacagaaaatcaccccattctcatcgtttaggattgaacaagtttgctgacatcactcctcaagagttcagcaaaaagtacttgcaagctcccaaggatgtgtcgcagcaaattaaaatggccatcaagaaaatgaagcgggaaca

SEQ ID NO: 121862 - DNA, 258 bp, Glycine max
ctcaccgattgctagaatggaatttcgatgctcagtcatctcttttaccattctcttctctcttgctcttgcaggagagagccatgtccatgcatcgctacctgaggaagattattgggaagctgtttggccaaacactcccattcccactgcactgcgagagcttctaaagcctctccctgcaggtgtagaaatcgatgaactccctaagcaaattgatgatacacagtacccaaaaacattcttctataaagaaga

SEQ ID NO: 121863 - DNA, 256 bp, Glycine max
gtctttgaacactcatcaccatggccaagcttgttctttccctttgtttccttcttttcagtggctgcttcgctctgagagagcaggcacagcaaaatgagtgccagatccaaaagctgaatgccctcaaaccggataaccgtatagagtcggaaggtgggttcattgagacctggaaccctaacaacaagccattccagtgtgccggtgttgccctctctcgctgcacccttaaccgcaatgcccttcgtagacc

SEQ ID NO: 121864 - DNA, 260 bp, Glycine max
ctccaactccattgttggaatctggtttgcaaaaagacagagggttaattgtggaatattttggaaggatgtcttacgatgctcataacgttaatcagccccaagagaaagatttgttggagggaaatttttcctttgatattaaatctcgctctagattggaaaaagtttcctctacaaaagcacaatttgttagtggaaaaaccttcaaatatgatataattggtgctggttcacattcttcagatgattttcctgaa

SEQ ID NO: 121865 - DNA, 262 bp, Glycine max
cccaactaacaataattccttcacttgcagaacttagttctctgttgcatcatcatcatcttcattagtgttagccctaaacttcaccttcaaccatgaccacagtgccaccacacagtgtccaagtgcacacaacaacacaccgctacgaagccggcgtcgtcccgccggctcgttttgaggcgccgcgttacgaagccggcatcaaggcgccctcatccatttaccattccgagagaggtccgacgacctctcaggttct

SEQ ID NO: 121866 - DNA, 258 bp, Glycine max
aacttattaacactttccttagttcaatatggggaagcccttcttcactctctctctttcttccctttgcttgctactcttgtcgagtgcatgctttgctattacctccagcaagttcaacgagtgccaactcaacaacctcaacgcgttggaacccgaccaccgcgttgagtccgaaggtggtcttattgaaacatggaactctcaacaccctgagctgcaatgcgccggtgtcactgtttccaaacgcaccctcaa

SEQ ID NO: 121867 - DNA, 260 bp, Glycine max
ctcgagccgtttcgatcttcgatctctgaaaatgagagagtgcatttcaatccacatcgatcaggccggtattcaggtcggaaacgcctgctgggagctctactgcctcgaacacggcattcagcctgatgggcagatgccaagtgataagactgttggtggaggtgatgatgctttcaacaccttcttcagtgaaactggggctggaaagcacgtgcctcgtgcgatttttgtagatctcgagcctactgtgattgatg

SEQ ID NO: 121868 - DNA, 259 bp, Glycine max
cacgaccacaacacccggagagggaacgtcagcaacacggtgagaaggaggaagacgaaggtgagcagccacgtccattcccattcccacgcccacgccaacctcatcaagaggaagagcacgagcagaaggaggaacacgaatggcatcgcaaggaggaaaaacacggaggaaagggaagtgaagaggaacaagatgaacgtgaacacccacgcccacaccaacctcatcaaaaggaagaggaaaagcacgaatggca

SEQ ID NO: 121869 - DNA, 254 bp, Glycine max
ttaattattaacacttccttagttcaatatggggaagcccttcactctctctctttcttccctttgcttgctactcttgtcgagtgcatgctttgctattagctccagcaagctcaacgagtgccaactcaacaacctcaacgcgttggaacccgaccaccgcgttgagtccgaaggtggtttgattcaaacatggaactctcaacaccctgagctgaaatgcgccggtgtcactgtttccaaactcaccctca

SEQ ID NO: 121870 - DNA, 250 bp, Glycine max
atgaaatcaaggattctgtggttgctggattccagtgggcatcaaaagaaggtgctttggctgaagaaaacatgagagccatctgctttgaagtatgtgatgttgtgctgcacgctgatgctatccacagaggaggtggtcaaatcattcctactgccaggagagtcttctatgcttcccagattactgccaaacccaggcttcttgagcctgtctacctggttgaaatacaggctcctgaacaagctct

SEQ ID NO: 121871 - DNA, 255 bp, Glycine max
aaaatgaccaagttcacaatcctcctcatctctcttctcttctgcatcgcccacacttgcagcgcctccaaatggcagcaccagcaagatagctgccgcaagcagctccagggggtgaacctcacgccctgcgagaagcacatcatggagaagatccaaggccgcggcgatgacgatgatgatgatgacgacgacaatcacattctcaggaccatgcggggaagaatcaactacataaggaggaacgaaggaaaa

SEQ ID NO: 121872 - DNA, 253 bp, Glycine max
gaaaaattgatgcgtgaaaggacgcacctgctgttggcttgttgttcaaggatggcaatttgtaagaaagatgtttggagagttgaatgtggaatcccttctggatttccgctcacagttatttgcaatagcatttttaatgagatgctcattagatatagctatgaaaaattactgcgccaggctaaagctccaagtatgtttttacaatccttcaaaaattttgtttctttgtgtgtgtatggtgatgata

SEQ ID NO: 121873 - DNA, 253 bp, Glycine max
gagagaaatcttgctttgacagaagaggaaaagatggaagtgattagaaatagatgcattcctgctgatgttcttgcaaagcgagctcatgcatttgaaaaacatgttgctcatgaaagtctcaaggatcaaattcctgctgttgacaagttgtattctactaagggtaataagtttgctgaaattatgtaccttagacaaagtgttgttggtgatcttatactgcttactgatgggtagttgtctgagggta

SEQ ID NO: 121874 - DNA, 253 bp, Glycine max
atggccaagcttgttctttccctttgtttccttcttttcagtggctgcttcgctctgagagagcaggcacagcaaaatgagtgccagatccaaaagctgaatgccctcaaaccggataaccgtatagagtcggaaggtgggttcattgagacctggaaccctaacaacaagccattccagtgtgccggtgttgccctctctcgctgcacccttaaccgcaatgcccttcgtagaccttcctacaccaacggtc

SEQ ID NO: 121875 - DNA, 257 bp, Glycine max
ggtccttaaacactcatcagtcatcaccatggccaagctagttttttccctttgttttctgcttttcagtggctgctgcttcgctttcagttccagagagcagcctcagcaaaacgagtgccagatccaaaaactcaatgccctcaaaccggataaccgtatagagtcagaaggagggctcattgagacatggaaccctaacaacaagccattccagtgtgccggtgttgccctctctcgctgcaccctcaaccgca

SEQ ID NO: 121876 - DNA, 261 bp, Glycine max
gccatggcgatgagaaccaaactttctttagctatctttttcttttttcttttacccttattttcaaacctagcctttggcaaatgtaaagaaaccgaggtagaagaagaagaccctgagctcgtaacatgcaaacaccaatgccaacagccacagcaatacactgagggtgacaagcgggtatgcttgcaaagatgtgacaggtatcatcgtatgaagcaagagcgagagaaacaaatccaagaggaaactcgtgagaag

SEQ ID NO: 121877 - DNA, 255 bp, Glycine max
ttcaagttcaagctggtgaaatcttggattagtgctcccactctcctatctggtataggacttcgtgggtagacttttctatttctctcctttctttcactctcttcttctcactgatccgcattgccgttcaaagtggtcttatttgaaaaacacttgggcgttggtgcaaatgtttgcttcgttaattttctctggggacaacaggctcactgagaaaacaatttttacttgcagagatttggacatcttggt

SEQ ID NO: 121878 - DNA, 248 bp, Glycine max
cttcttcttcttcgcataatagcagcaacaatggtgaagcactacagacccccggggaagaaaaaggagggaaatgctgccaaatttgtcattaggtcacaagcaatcaagcagcttcaaatcagtctaccccttttcaggaaactatgtattttgaaaggtgtaactccaagggagcctaagaaaaagttcaagggaactcatcagacttattaccatgtcaaggatgtttccttccttcatcacga

SEQ ID NO: 121879 - DNA, 250 bp, Glycine max
gaaattttgataaaccgcgatcacaggttgccgcaccttaaaaccggaaacaaaagcaatcgttacttgatttcaagaatttctcaatttctttctacttctttgtgtacgatttcttaagggaaagaaaatcactctctgtgctggccacagacttcgtgaatcattttcttttccacttttagtttattctctgaacactctcctatttgatataggacttcgtgtcagatttaaacttcttctgttt

SEQ ID NO: 121880 - DNA, 250 bp, Glycine max
ttccttagttcaatatggggaagcccttcactctctctctttcttccctttgcttgctactcttgtcgagtgcatgctttgctattagctccagcaagctcaacgagtgccaactcaacaacctcaacgcgttggaacccgaccaccgcgttgagtccgaaggtggtttgattcaaacatggaactctcaacaccctgagctgaaatgcgccggtgtcactgtttccaaactcaccctcaaccgcaatgg

SEQ ID NO: 121881 - DNA, 248 bp, Glycine max
aaatgccgaactgctcatagaagaagactggagtctcttattgaagatggtagaagaatatattgaggagctatgcatgcagatattgaagtttaaaccggacttggtaatcacagagaagggtctgagtgatttggcaacccattatctcagcaagcatggagttagtgcaatcaggaggctgaggaaaactgataataatagaattgcaaaggcttgtggtgctgtaattgcgaacagaccagatg

SEQ ID NO: 121882 - DNA, 243 bp, Glycine max
ataaaattcttccaccaagttatgggtttccttgtgttgcttcttttctccctcttaggtctctcttctagttccagcatatcaactcatcgttccatattggaccttgacctaaccaagtttaccacacagaaacaggtgtcttcactgttccaactatggaagagtgagcatggacgtgtctaccataaccacgaggacgaggcaatgagacttgagattttcaagattaacttgaactat

SEQ ID NO: 121883 - DNA, 251 bp, Glycine max
ctccattggtccttaaacactcatcagtcatcaccatggccaagctagttttttccctttgttttctgcttttcagtggctgctgcttcgctttcagttccagagagcagcctcagcaaaacgagtgccagatccaaaaactcaatgccctcaaaccggataaccgtatagagtcagaaggagggctcattgagacatggaaccctaacgacaagccattccagtgtgccggtgctgccctctctcgctgc

SEQ ID NO: 121884 - DNA, 245 bp, Glycine max
tcaatattctagtataccttaataaataatttaagatactatgatgagagcacggttcccattactgttgctgggacttgttttcctggcttcagtttctgtctcatttggcattgcttactgggaaaaagagaaccccaaacacaacaagtgtctccagagttgcaatagcgagagagactcgtacaggaaccaagcatgccacgctcgttgcaacctccttaaggtggagaaagtagatgtga

SEQ ID NO: 121885 - DNA, 254 bp, Glycine max
tgatattctcttgggaatctcaaaaactgtagactgtttgggattgtcaataaggaaactcaaatgccatgaagtttgatttgaccactcagtctacagtttttgatattctcttgggaatctctcaagattttgaaattgctggtaatactcttatgccagctttttctgttccacaggctactgccatatcttctgaaaatgcggaatcctctgcatgatctggaatttgtgttgtctttcgcttgtgcgtt

SEQ ID NO: 121886 - DNA, 259 bp, Glycine max
  unsure (1)..(259): unsure at all n locations
tcctcgaccgaattcggctcgactttanacactcatcagtcatcaacatggccaagctagtactttccctttgttttctgctactcagtggctgctgcttcgctttcagttccagagagcagcctcagcgaaacgagtgccagatccaaaaactcaatgccctcaaaccggataaccgtatagagtcagaaggagggctcattgagacatggaagcctaacaacaagccattccagtgtgccggtgttgccctctctcg

SEQ ID NO: 121887 - DNA, 252 bp, Glycine max
ccgagactaccgcattttggagttcaactccaaacccaacacccttcttctcccccaccatgctgacgctgattacctcatcgttatccttaacgggactgccattcttaccttggtgaacaacgacgaccgagactcttacaaccttcaatctggcgatgccctaagagtccctgcaggaaccacatactatgtggttaaccctgacaacgacgagaatctcagaatgataacactcgccatacccgttaa

SEQ ID NO: 121888 - DNA, 250 bp, Glycine max
aaattgaaaagctttctagctggtcataatatcaccattactgatggtattgacaagactagtgcaactttgcaatttagaaagttagcagattgtgattttctcaagagaaactttaagcagatgtctaatgttttgtgggtagctcctgaggacaaggcgagtttatggtcacaacttcattatgtttcgtgtaataatctggaaatgcaagaagcttatcttgtcaatctcgtaaatgtgttacgag

SEQ ID NO: 121889 - DNA, 249 bp, Glycine max
attccttcacttgcagcactgttgcatcatcatcttcattgcaaaaccctaaacttcaccttcaaccatgaccacacaagtaccaccacacagtgtccaagtccacacaacaacacaccgctacgaagctggcgtcgtcccccccggagcccgtttcgaaccgccgcgttatgaagccggcgtcaaagcgccctccatttaccattccgagagaggtccaacgacttcccaggtcctcgccgtcctcgc

SEQ ID NO: 121890 - DNA, 246 bp, Glycine max
ctcgagccgtgctattgtataataaacaactcaatttagaaaatttcagcagtgagaaaagatgggagaatgtagatcaacaaggtatacagatgccacctaatgtaatgcggtagaaattaaatataagcggaatctgagtaatattcatatttccggcttattttacgacggcagatacaaattctggactaaacacgagaaaaatcttgctttgacagaagaggtaaagatggaagtgattag

SEQ ID NO: 121891 - DNA, 246 bp, Glycine max
gccaaatgtaggatgtgaaggattcatgtgctcaagtcatctgtcaatcactcaaagaaattcaagattgatccattctactagcaagattgttccaaattctgaaattcagaatataactactgagatggtgaagacaccagaggtctcaagatggatggatcaagtcatccctacaatagccccttgtgatgcagcagaaccatggcaactagggtttcaagatgcagcaacacctataatgca

SEQ ID NO: 121892 - DNA, 248 bp, Glycine max
  unsure (1)..(248): unsure at all n locations
gctgatgtcgagttcatgcaaaagcgggaaattgagctgcaaaaccacaataattatctgcgagctaagatagctgaacatgagagagctcaacaacagcaatcaaatatgatgtcaggaacactgtgcgagtcccttccttcacaatcatacgacaggaattttttccctgtaaatctcatagcttctgatgatcaacaacaatattctngtcaagaccacactgctctccaattgtctgatnatng

SEQ ID NO: 121893 - DNA, 246 bp, Glycine max
taattattaacacttccttagttcaatatggggaagcccttcactctctctctttcttccctttgcttgctactcttgtcgagtgcatgctttgctattagctccagcaagctcaacgagtgccaactcaacaacctcaacgcgttggaacccgaccaccgcgttgagtccgaagtggtttgattcaaacatggaactctcaacaccctgagctgaaatgcgccggtgtcactgtttccaaactca

SEQ ID NO: 121894 - DNA, 250 bp, Glycine max
cttccaccaagttatgggtttccttgtgttgcttcttttctccctcttaggtctctcttctagttccagcatatcaactcatcgttccatattggaccttgacctaaccaagtttaccacacagaaacaggtgtcttcactgttccaactatggaagagtgagcatggacgtgtctaccataaccacgaagaagaggcaaagagacttgagattttcaagaataacttgaactatatcagggacatgaat

SEQ ID NO: 121895 - DNA, 248 bp, Glycine max
ttcagaactgcaatggtgagtagaaatagcaagcctcaagctactgcaatgcatgtgggagctatagaaattatcattgatagtttcgcaagtactgactgcaacatagttggtgcaatgcttttggttgatacttatcataccaatcctgaaaatgcagttcgtagtatttttgtcgcgcctttcagaggcggaaggcctattcgggtggttacatttccgaataccattgtgcagattgaaccaga

SEQ ID NO: 121896 - DNA, 250 bp, Glycine max
tgcgagtcaacgggcgagtaaacccgtaaggcgcaaggaagctgattggtgggatccccctgtgggttgcaccgccgaccgaccctgatcttctgtgaagggttcgagtgagagcatacctgtcgggacccgaaagatggtgaactatgcctgagcggggcgaagcagaggaaactctggtggaggcccgcagcgatactgacgtgcaaatcgttcgtctgacttgggtatagggtcgaaagactaatcg

SEQ ID NO: 121897 - DNA, 278 bp, Glycine max
cggctcgagcggctcgagcggctcgagacattttcgacgtgcagggcctcggcaaaaggtatactttaaatcggatgaagtgcatgcatgcattgtcacgtgtggtggactctgccctggcctcaacactgtcataagggaaattgtctgtggtctttcctacatgtacggtgttaacaaagtccttggcatagatggtggttatagaggcttttattccaaaaacaccattactttaacacctaaggtggtcaatgacatccataagcgtgggggta

SEQ ID NO: 121898 - DNA, 277 bp, Glycine max
caaggggcaattttttcaaaacctttttctctctcgcaacctcacctcttcctccttcaatctctttcggaatttcccaaaatccttagtgggaggaagagatggttctgactcagaagcttcacgaagccttcaaaggcaccgtcgagaggattactggcccccgaaccgtttccgccttcaaagaaaaaggagttctcagtgtctctgagttcgtcaccgctggcgataatctcgttgccaaatgccccacctggtcctgggaatcgggtgatcc

SEQ ID NO: 121899 - DNA, 274 bp, Glycine max
agacgacaggctcactgagaaaacaatttttacttgcagagatttggacatcttggttgtttattatacaatagcaactcaatttagaaaatttctaccgcattacattaggtggcatctgtataccttgttgatctacattctcccatcttttctcactgctgaaattaaatataagcggaatctgagtaatattcatatttccggcttattttacgacggcagatacaaattctggactaatcacgagaaaaatcttgctttgacagaagag

SEQ ID NO: 121900 - DNA, 271 bp, Glycine max
gatcatacatagtagtgttggtgggttgcaaagatgcttgggggtcttctccataggggtcataagataaaagggacagtggtgttgatgcgcaagaatgtgttggacgtgaatagcgtaaccagcgttgggggaattattggtcaaggtctcgacttagttggctcaacactcgatactcttactgccttcttgggccgatccgtgtctctccagcttattagtgctaccaaagctgatgccaacggaaaagggaaacttggaaaggcta

SEQ ID NO: 121901 - DNA, 272 bp, Glycine max
aattttctgacagagggcaattttagagcaagtgttgatttgcagcgcactcatcgtattaaaggaatgattaaaatggtggccacagttggtattcctgagaatacaggtatatcattggcctgtgctatgaatagttcttttagggggcgtgccagttctgatatttacaccatctgctctcaagactgtgaattatggaatcctgcttgcacaaaagcaatgactatgtcatttaatccaaacccgtgttctgatgcgtggagtttgga

SEQ ID NO: 121902 - DNA, 275 bp, Glycine max
ctctccattgtctttgaacactcatcaccatggccaagcttgttctttccctttgtttccttcttttcagtggctgcttcgctctgagagagcaggcacagcaaaatgagtgccagatccaaaagctgaatgccctcaaaccggataaccgtatagagtcggaaggtgggttcattgagacctggaaccctaacaacaagccattccagtgtgccggtgttgccctctctcgctgcacccttaaccgcaatgcccttcgtagaccttcctacacc

SEQ ID NO: 121903 - DNA, 279 bp, Glycine max
accataaccacgaagaagaggcaaagagacttgagattttcaagaataacttgaactatatcagggacatgaatgcaaacagaaaatcaccccattctcatcgtttaggattgaacaagtttgctgacatcactcctcaagagttcagcaaaaagtacttgcaagctcccaaggatgtgtcgcagcaaatcaaaatggccaacaagaaaatgaagaaggaacaatattcttgtgaccatccacctgcatcatgggattggaggaaaaaaggtgtcatca

SEQ ID NO: 121904 - DNA, 278 bp, Glycine max
caccctcctcgccgaccaagccatggaaagcgtgaacaagacgaggacgaggacgaagatgaagataaacctcgtcctagtcgaccaagccaaggaaagcgtgaacaagaccaggaccaggacgaggacgaagatgaagatgaagatcaacctcgcaagagccgcgaatggagatcgaaaaagacacaacccagaagacctagacaagaagaaccacgtgaaagaggatgcgagacaagaaacggggttgaggaaaatatctgcaccttgaagcttca

SEQ ID NO: 121905 - DNA, 273 bp, Glycine max
gcaagagggaggggtgctgatcgttccacaaaactttgcggtggctgcaaaatcccagagcgataactttgagtatgtgtcattcaagaccaatgatagaccctcgatcggaaaccttgcaggggcaaactcattgttgaacgcattgccagaggaagtgattcagcacacttttaacctaaagagccagcaggccaggcaggtgaagaacaacaaccctttcagcttcctggttccacctcaggagtctcagaggagagctgtggcttagag

SEQ ID NO: 121906 - DNA, 278 bp, Glycine max
agaacattgtgatgatcaaaatacacaacaaattatcatggaggaaatcatgcaatctgtcagcactttagcacaggatcaatatggaaattatgttattcagcatattgtggaacatggtaaaccacatgaacggactaccattatcagcaagcttgctggtcagattgttaagatgagccagcaaaagtttgcttcaaatgttattgagaaatgtttggcttttggtagtcctgaagaacgtcagattttggtgaatgaaatgcttggcacttctg

SEQ ID NO: 121907 - DNA, 278 bp, Glycine max
attcaggaaaaagttgtattgaaattttcacaagaggaatttcttacagcttggtcaactcaggtgcgtcctgcaacaactctgttggctgatgggtgcccatatttgtatgctatggtgcatgatagttcagtgtctacaataccaggtgattttgtcattggtgttaagttgacaaccataaacaatatgtgtgcatatgggctcaatcctggtatttcaggttctcgtcttttgggcacattcctcagtccatttcacagcaaactgtttggaat

SEQ ID NO: 121908 - DNA, 280 bp, Glycine max
gtaaaaatagcaagcctcaagctactgcaatgcatgtgggagctatagaaattatcattgatagtttcgcaagtcctgactgcaacatagttggtgcaatgcttttggttgatacttatcataccaatcctgaaaatgcagttcgtagtatttttgttgcgcctttcagaggcggaaggcccattcgggtggttacatttccgaataccattgtgcagattgaaccagacatgaattcaaggtttcagcttttgagtaccactaccaatggtgattttgt

SEQ ID NO: 121909 - DNA, 275 bp, Glycine max
cttcttctcttgcggctagggttttagcgcagttcttctagatttaaggaagatgggtaaggaaaaggttcacatcagtattgtggtcattggccatgtcgactctgggaaatccactaccactggtcacctgatttacaagcttggaggcattgatccccgtgttattgagaggtttgagaaggaagctgctgagatgaacaagaggtctttcaagtatgcctgggtgctggacaaacttaaggctgagcgtgaaagaggaatcaccattgata

SEQ ID NO: 121910 - DNA, 271 bp, Glycine max
tgaaaaattgatgcgtgaaaggacacacctgctgttggcttgttgttcaaggatggcaatttgtaagaaagatgtttggagagttgaatgtggaatcccttctggatttccgctcacagttatttgcaatagcatttttaatgagatgctcattagatatagctatgaaaaattactgcgccaggctaaagctccaagtatgtttttacaatctttcaaaattttgtttctttgtgtgtgtatggtgatgataacttaattagtgttcatg

SEQ ID NO: 121911 - DNA, 257 bp, Glycine max
ggctcgagctagttcaatatcctagtataacttaataaataatttacgatactatgatgagagcacggttcccattactgttgctgggacttgttttcctggcttcagtttctgtctcatttggcattgcttactgggaaaaagagaaccccaaacacaacaagtgtctccagagttgcaatagcgagagagactcgtacaggaaccaagcatgccacgctcgttgcaacctccttaaggtggagaaagaagaatgt

SEQ ID NO: 121912 - DNA, 271 bp, Glycine max
gcgcactcatcgtattaaaggaatgattaaaatggtggccacagttggtattcctgagaatacaggtatatcattggcctgtgctatgaatagttcttttagggggcgtgccagttctgatatttacaccatctgctctcaagactgtgaattatggaatcctgcttgcacaaaagcaatgactatgtcatttaatccaaacccgtgttctgatgcgtggagtttggtatttctgaagcgtaccggatttcattgtgatatcatttgtgtc

SEQ ID NO: 121913 - DNA, 274 bp, Glycine max
aatttgataaaccgcgatcacaggttgccgcaccttaaaaccggaaacaaaagcaatcgttacttgatttcaagaatctctcaatttcttcctacttctttgtgtacgatttcttaagggaaagaaaatcactctctgtgctggccacagacttcgtgaatcattttcttttccactcttagtttattctctgaacactctcctatttgatataggacttcgtgtcagatttaaacttcttctgtttctttctcagttctctgtttaatttcaa

SEQ ID NO: 121914 - DNA, 275 bp, Glycine max
taagaaagtcttccatagccccccaaaaatgaagagcaccatcttctttgctctctttctcttttgtgccttcaccacctcatacctaccttcagccatcgctgatttcgtgctcgataatgaaggtaaccctcttgaaaatggtggcacatattatatcttgtcagacataacagcatttggtggaataagagcagccccaacgggaaatgaaagatgccctctcactgtggtgcaatctcgcaatgagctcgacaaagggattggaacaatca

SEQ ID NO: 121915 - DNA, 276 bp, Glycine max
ccgtattaaagaatttaagatatactatgatgagagcgcggttcccattactgttgctgggagttgttttcctggcatcagtttctgtctcatttggcattgcgtattgggaaaagcagaaccccagtcacaacaagtgcctccgaagttgcaatagcgagaaagactcctacaggaaccaagcatgccacgctcgttgcaacctccttaaggtggaggaagaagaagaatgcgaagaaggtcaaattccacgaccacgaccacaaaacccggaga

SEQ ID NO: 121916 - DNA, 183 bp, Glycine max
gaaattttaataaaccgcgatcacaggttgccgcaccttaaaaccggaaacaaaagcaatcgttacttgatttcaagaatctctcaatttcttcctacttctttgtgtacgatttcttaagggatagaaaatcactctctgtgctggccacagacttcgtgaatcattttcttttccacacaa

SEQ ID NO: 121917 - DNA, 271 bp, Glycine max
caaaaccaaaacactcaagttaacttcaacacctttaattttctgaacgaaattcagccacagaatatcaaagggagcgaagatgagtcaggagcagccaaggcgcccccaaggccaagaccccatcaaatacggcgacgtttttgacgtctacggtgaccttgcacagatgcccattgcaccggaagatgctgccatgatgcaaagcgcggaagctcgagtactcggaaaaacccaacccggcggagttcttccgtcatgcaatccgccg

SEQ ID NO: 121918 - DNA, 277 bp, Glycine max; identical to SEQ ID NO: 105199

SEQ ID NO: 121919 - DNA, 277 bp, Glycine max
ggtggacgcaagcaggggcaacaccagcaggaggaagaggaagaaggtggcagcgtgctcagtggcttcagcaaacacttctatggcaaatccttcaacaccaacgaggacatagctgagaaacttcagtctccagacgacgaaaggaagcagatcgtgacagtggaaggaggtctcagcgttatcagccccaagtggcaagaacaacaagatgaagatgaagatgaagacgaagatgatgaagatgaacaaattccctctcaccctcctcgccgac

SEQ ID NO: 121920 - DNA, 277 bp, Glycine max
tgggaagacctttgatacattggagggagctgatccgtcaagcttagccaataaggttgctaaagtagcaggctcaattaaccctggagaatctgcatctcctgccagtcttgggatggctgcaggggcttctgttcttgaaacggtgaaagaattagcaaaagacaatgattcttcaaaggagaaaaatcaagttcaaccagggcttagtggtcctctgaaaaagagaattcagcagcttgttgactctaatcctgtcatgcttttcatgaaagga

SEQ ID NO: 121921 - DNA, 271 bp, Glycine max
  unsure (1)..(271): unsure at all n locations
ctctcttcttcagtggtggaagctactagaacactagtttgttgagcactgcgatgaggaagtggacggttgcttccgctctccttcttctctctctcctctttctctttgcagatcaaggtcgaaagtttcaggctaatgccgagggagattccgacgagcttgtagatccacccaaggtggaggataagatcggtgctgtgcctcatggcctttcaaccgattcagatgtcgtcaagagggagtcgngatcgatctcgaagagatctct

SEQ ID NO: 121922 - DNA, 262 bp, Glycine max
gtgcggtttcctttgttggtgttgctgggaactgttttcctggcatcagtttgtgtctcattaaaggtgagagaggatgagaataaccctttctacttgagaagctctaacagcttccaaactctctttgagaaccaaaacggtcgcattcgtctcctccagagattcaacaaacgctccccacaacttgagattcttcgagactaccggattgtccagtttcagtcaaaacccaacacaatcgttctctcccaccatgctg

SEQ ID NO: 121923 - DNA, 269 bp, Glycine max
tttgcttgctactcttgtcgagtgcatgctttgctattacctccagcaagttcaacgagtgccaactcaacaacctcaacgcgttggaacccgaccaccgcgttgagtccgaaggtggtcttattgaaacatggaactctcaacaccctgagctgcaatgcgccggtgtcactgtttccaaacgcaccctcaaccgcaacggcctccacttgccatcttactcaccttatccacaaatgatcattgtcgttcaagggaagggagcaatt

SEQ ID NO: 121924 - DNA, 268 bp, Glycine max
ctttccttagttcaatatggggaagcccttcttcactctctctctttcttccctttgcttgctactcttgtcgagtgcatgctttgctattacctccagcaagttcaacgagtgccaactcaacaacctcaacgcgttggaacccgaccaccgcgttgagtccgaaggtggtcttattgaaacatggaactctcaacaccctgagctgcaatgcgccggtgtcactgtttccaaacgcaccctcaaccgcaacggcctccacttgcca

SEQ ID NO: 121925 - DNA, 270 bp, Glycine max
gggcatcactcgttgtttctctcttccatgcccaaaatgcgtttcgtctttgtttttctgtttttccattttcatttccctgaaaccctttctgccccaatctcagagtaccgcgcccttctctctctccgttcagtcattaccgacgccacaccacccgttctctcttcttggaacgcctccatcccttactgttcctggctcggcgtcacctgcgacaaccgccgccacgtcaccgccctcaacctcaccggcctcgacctctccggc

SEQ ID NO: 121926 - DNA, 271 bp, Glycine max
  unsure (1)..(271): unsure at all n locations
ctaaacacggggcactggtttcgaaccctcgttgtggttaggtcttcttcacctttcgaattttggaatccatgggtcagggaactccgggcggcatgaaccggcagggcgaccggaagccggacggcggcgacaagaaggagaagaagttcgagccgtcggctccgccggcgcgcgtggggcggaaacagcggaagcagaaaggtccggaggcngcggcgcggttgccgacagtgactccggtgacgaatgcaaactgcggcttctgaag

SEQ ID NO: 121927 - DNA, 269 bp, Glycine max
gagaatggctcccaagggtttaacctttctggctgtgttaatatgcgtttcagcactgtcactgagtccttctgttgcgggggaagggcaaaataatggccttgttatgaacttctacaaggaatcatgccctcaggctgaagacatcatcacagaacaagtcaagcttctctacaagcgccacaagaacactgctttctcctggctcaggaacatcttccatgactgtgctgttcagagttgtgatgcttcactgttgctggactcca

SEQ ID NO: 121928 - DNA, 272 bp, Glycine max
ccagattagtaccacaaaaatggagaaatagaataactgaatatcgtatagctcaaaataaagatttaaccaaatgcaattcatatgaaaaaagccaattaattctttacaaagaacaacaagtaaacgcattaaaaaaaaaaattagaaaacaatatagatacgatcttttatcctataattttatcaattatgcagataagaaagactcatatatttatggatatagatccctatttcaagtaaaaaaaaaccaagtgatttcttctaat

SEQ ID NO: 121929 - DNA, 226 bp, Glycine max
cttaattattaacacttccttagctcaatatggggaagcccttcactctctctctttcttccctttgcttgctactcttgtcgagtgcatgctttgctattagctccagcaagctcaacgagagccaactcaacaacctcaacgcgttggaacccgaccaccgcgttgagtccgaaggtggtttgattcaaacatggaactctcaacaccctgagctgaaatgcgc

SEQ ID NO: 121930 - DNA, 276 bp, Glycine max
acttattaacactttccttagttcaatatggggaagcccttcttcactctctctctttcttccctttgcttgctactcttgtcgagtgcatgctttgctattacctccagcaagttcaacgagtgccaactcaacaacctcaacgcgttggaacccgaccaccgcgttgagtccgaaggtggtcttattgaaacatggaactctcaacaccctgagctgcaatgcgccggtgtcactgtttccaaacgcaccctcaaccgcaacggcctccacttg

SEQ ID NO: 121931 - DNA, 270 bp, Glycine max
tctccattggtccttaaacactcatcagtcatcaccatggccaagctagttttttccctttgttttctgcttttcagtggctgctgcttcgctttcagttccagagagcagcctcagcaaaacgagtgccagatccaaaaactcaatgccctcaaaccggataaccgtatagagtcagaaggagggctcattgagacatggaaccctaacaacaagccattccagtgtgccggtgttgccctctctcgctgcaccctcaaccgcaacgcc

SEQ ID NO: 121932 - DNA, 268 bp, Glycine max
taaagatgagtttgaagaacaacatggtggtgctaaaggtgtgtttgttgcttcttttccttgtgggggttacagctgcacgcatggaactgagcttcttcaaaagtgatcagtcatcaagttatgatgatgatgagtattcaaaaccatgctgtgatctctgcatgtgcacacgctcaatgcctcctcaatgcagctgtgaagatattacgctgaattcatgccactcagattgtaagagctgtatgtgcacacgctcacagccagg

SEQ ID NO: 121933 - DNA, 268 bp, Glycine max
ggtccttaaacactcatcagtcatcaccatggccaagctagttttttccctttgttttctgcttttcagtggctgctgcttcgctttcagttccagagagcagcctcagaaaaacgagtgccagatccaaaaactcaatgccctcaaaccggataaccgtatagagtcagaaggagggctcattgagacatggaaccctaacaacaagccattccagtgtgccggtgttgccctctctcgctgcaccctcaaccgcaacgcccttcgt

SEQ ID NO: 121934 - DNA, 265 bp, Glycine max
cgacgtgagatagattgtgaagtagaaatcggtgcaagaaattctccactttatctaaaaaaattcggtgagtttgtgaagacaaaaaatcactagctactcaaaaatggccacagtaggaaggaacgttgcagctcctttgctgtttcttaacttgatcatgtattttattgttcttggctttgctagttggtgcctcaacaggttcatcaatggccaaacttaccaccctagttttggtggaaatggtgcaaccatgtttttc

SEQ ID NO: 121935 - DNA, 229 bp, Glycine max
actgatgagagattggtaggcacagaacatgagggatatgatccttttcttggtggaattcaaaaatatgccactcccatgatgcccctagatgaagaaattctttctaaggttgcacaagatatggttgaggaatggtttgattgtgttgatgaggaggattcctttgaggaagtttctttaagtgcagcactcaatggtgttgagggtttagactatatggaaagaa

SEQ ID NO: 121936 - DNA, 260 bp, Glycine max
cgcaatggttaaagttaatgtagcatgtgctgctgttggcttgacatcaagttacactccaactccattgttggaatctggtttgcaaaaagacagagggttaattgtggagtattttggaaggatgtcttacgttgctcataacgttaatcagccccaagagaaagatttgttggagggaaatttttcctttgatattaaatctcgctctagattggaaaaagtttcctctacaaaagcacaatttgttagtggaaaaa

SEQ ID NO: 121937 - DNA, 267 bp, Glycine max
aagaatagatcctcaatacaatgaggttcaggctcagatggaaacaaatttgtttaaattgtctcttgatgatgttgaaactcctaaaggttccatgttggatctgaaaatttctcaatctaaaattgcacttcccaagaacacagttggaggaaccattctgcgtagtgatctattggcaaattttttgacagagggcaattttagagcaagtgttgatttgcagcgcactcatcgtattagaggaatgattaaaatggtggccac

SEQ ID NO: 121938 - DNA, 268 bp, Glycine max
aacttaattagtgttcatgaatacgtcaagccttactttagtggttctaaattgaaaagctttctagctggtcataatatcaccattactgatggtattgacaagactagtgcaactttgcaatttagaaagttagcagattgtgattttctcaagagaaactttaagcagatgtctaatgttttgtgggtagctcctgaggacaaggcgagtttatggtcacaacttcattatgtttcgtgtaataatctggaaatgcaagaagctt

SEQ ID NO: 121939 - DNA, 270 bp, Glycine max
ccattggtccttaaacactcatcagtcatcaccatggccaagctagttttttccctttgttttctgcttttcagtggctgctgcttcgctttcagttccagagagcagcctcagcaaaacgagtgccagatccaaaaactcaatgccctcaaaccggataaccgtatagagtcagaaggagggctcattgagacatggaaccctaacaacaagccattccagtgtgccggtgttgccctctctcgctgcaccctcaaccgcaacgccctt

SEQ ID NO: 121940 - DNA, 269 bp, Glycine max
gcaactttgcaatttagaaagttagcagattgtgattttctcaagagaaactttaagcagatgtctaatgttttgtgggtggctcctgaggacaaggcgagtttatggtcacaacttcattatgtttcgtgtaataatctggaaatgcaagaagcttatcttgtcaatctcgtaaatgtgttacgagaattgtatttgcacagtccagaggaagctcgccaattgagaaggaaagctctctctcgtattgaatggctgcaaaaagctga

SEQ ID NO: 121941 - DNA, 267 bp, Glycine max
agaaaatatgattaggaaagaataagtcatcatattttcttgtattgatagccccgctgtcccttttaaactcccgagagagtataaaactgcatcgaatattacaagatgcactcttgtcaaatgaagggggggaaatgatactacaagccactaggcatgggtctagcaaaggaaacaataatgggaggtggaggccgtgtggccaaagttgaaattcagcagaagaagcctctctcaagggttccaaacacaaagccaccattc

SEQ ID NO: 121942 - DNA, 271 bp, Glycine max
ggtgaattgcaatggtgagagagtgtttgatggagagctgcaagagggaggggtgctgatcgttccacaaaactttgcggtggctgcaaaatcccagagcgataactttgagtatgtgtcattcaagaccaatgatagaccctcgatcggaaaccttgcaggggcaaactcattgttgaacgcattgccagaggaagtgattcagcacacttttaacctaaagagccagcaggccaggcaggtgaagaacaacaaccctttcagcttcctg

SEQ ID NO: 121943 - DNA, 270 bp, Glycine max
gacggcgctaaggcatacaaggacagcaaagtctgcaacatgcttacaatgcaagaattccacagaagataccatgatgaaactgggatcacatttgcttccctttacccaggttgcatcgccacaacaggcttgttcagagagcacattcccttgttcagacttctcttccctccattccaaaagtacataaccaagggctttgtctcagaagatgaatcaggaaagagacttgcacaggttgtgagtgatccaagcctaacaaaatca

SEQ ID NO: 121944 - DNA, 272 bp, Glycine max
ctaaacttcaccttcaaccatgaccacacaagtaccaccacacagtgtccaagtccacacaacaacacaccgactacgaagctggcgtcgtcccccccggagcccgtttcgaaccgccgcgttatgaagccggcgtcaaagcgccctccatttaccattccgagagaggtccaacgacttcccaggtcctcgccgtcctcgccggcctcccggtcggtggcatcctgctcctcctggcgggattgaccctggcaggaaccctcaccggactg

SEQ ID NO: 121945 - DNA, 274 bp, Glycine max
ctcgagccgcactttccttagttcaatatggggaagcccttcttcactctctctctttcttccctttgcttgctactcttgtcgagtgcatgctttgctattacctccagcaagttcaacgagtgccaactcaacaacctcaacgcgttggaacccgaccaccgcgttgagtccgaaggtggtcttattgaaacatggaactctcaacaccctgagctgcaatgcgccggtgtcactgtttccaaacgcaccctcaaccgcaacggcctccact

SEQ ID NO: 121946 - DNA, 141 bp, Glycine max
gactagttctagatcgcgagcggccacccttttttttttttttaattggaattccttctttaatttatgcttttcccgcataggtacttgagtgactcattacacaagggtacatagttacaatacccgttattccacaca

SEQ ID NO: 121947 - DNA, 264 bp, Glycine max
caaagtggtcttatttgaaaaacacttgggcgttggtgcaaatgtttgcttcattaattttctctggagacaacaggctcactgagaaaacaatctttacttgcagagatttggacatcttggttgtttattatacaatagcaactcaatttagaaaatttctaccgcattacattaggtggcatctgtataccttgttgatctacattctcccatcttttctcactgctgaaattaaatataagcggaatctgagtaatattc

SEQ ID NO: 121948 - DNA, 259 bp, Glycine max
gatcaagctgaacaatctgctaaaaggcaaaagctgaaaatctgggagaattttgttgaaggagaggaagtatctaatggtgcagcagttgagaacaaacagcaagaagtacttaaggtaattgttacggaagtcttgggtggtggtaaattctatgttcagacagttggagatcaaaagattgcatccattcagcaacagcttgcttctttgaacctaaaggatgctcctgtgcttggtgctttcaatcctaagaagg

SEQ ID NO: 121949 - DNA, 265 bp, Glycine max
ccccagggcacttcccgaagtgtcaaaagaatgcctctttctatagggggaggagctggtgcaaagaatgctattctcatgaatatgccaaatgctgttctttcaatgtggagatattttgttggagatctcgtctttgaagtttctaagatgacttctccctacattaaatgtacagtctctttcttcatagcatttggaaatttggctgatgacaccatcaattttgaggcttttccccacaagctggtgcagtttggagaga

SEQ ID NO: 121950 - DNA, 266 bp, Glycine max
atacatagtagtgttggtgggttgcaaagatgcttgggggtcttctccataggggtcataagataaaagggacagtggtgttgatgcgcaagaatgtgttggacgtgaatagcgtaaccagcgttgggggaattattggtcaaggtctcgacttagttggctcaacactcgatactcttactgccttcttgggccgatccgtgtctctccagcttattagtgctaccaaagctgatgccaacggaaaagggaaacttggaaaggct

SEQ ID NO: 121951 - DNA, 267 bp, Glycine max
cagagatgcttcttgagatgcagaaaaatgaaatgaaaaggcatgaagcttggctggtttatggagccttgctggtcagtgtatatatgatcgactaaagattttcccaacttttccatctcctccccttcatgctgtctggaagaccaatgcaaaagttcttacttcaactcataaacgcaaggcaagccctgagcaattggaacagcagccacctttgaaaaaagctgctacggatggtgagattggtgtggacctaatgaatca

SEQ ID NO: 121952 - DNA, 265 bp, Glycine max
tcctctacaaaagcacaatttgttagtggaaaaaccttcaaatatgatataattggtgctggttcacattcttcagaagattttcctgaaaaggaagatcaagaaaaacccaaaaagattgatgccagattgagacaaagaatagatcctcaatacaatgaggttcaggctcagatggaaacaaatttgtttaaattgtctcttgatgatgttgaaactcctaaaggttccatgttggatctgaaaatttctcaatctaaaattg

SEQ ID NO: 121953 - DNA, 267 bp, Glycine max
tttgaaattttgataaaccgcgatcacaggttgccgcaccttaaaaccggaaacaaaagcaatcgttacttgatttcaagaatctctcaatttcttcctacttctttgtgtacgatttcttaagggaaagaaaatcactctctgtgctggccacagacttcgtgaatcattttcttttccactcttagtttattttctgaacactctcctatttgatataggacttcgtgtcagatttaaacttcttctgtttctttctcagttctc

SEQ ID NO: 121954 - DNA, 270 bp, Glycine max
gaaaggaaaggttaactaagaagcaatacttcaatggccacccttgttgttcataaccaaacttcttctgctcaagatgctgaggctctccaacaggctttcaaaggatggggggctgatgacaaggccattatagcaatactgggtcacagaaatgttcatcagaggcaagaaatcagaaaagcttatgaggagatttaccaagaggatctcatcaaacgccttgagtccgagatctctggtgactttgagagagctatgtaccggtgg

SEQ ID NO: 121955 - DNA, 259 bp, Glycine max
acgatactgataagagagataccaacaagaaaagaaaaaaagaagagttgagattccctttgaagaaaagatggcatcccataggcaaagctatgaagctggtcaaactaagggccgaactgaggaaaagacgaaccagacgatgggcaatattggagagaaggctcaagctgcaaaggagaagacccaggaaatggcccaagctgcaaaggagaagacccaacaaacagcccaagctgccaaggacaagacttgcgac

SEQ ID NO: 121956 - DNA, 205 bp, Glycine max
tcgcaatgcggaactagttcaataccgataaaccgcgatcacaggttgccgcaccttaaaaccggaaacaaaagcaatcgttacttgatttcaagaatctctcaatttcttcctacttctgtgtgtacgatttcttaagggaaagaaaatcactctctgtgctggccacagacttcgagaatcattttcttatccacacaacata

SEQ ID NO: 121957 - DNA, 265 bp, Glycine max
agctgagaaacttcagtctccagacgacgaaaggaagcagatcgtgacagtggaaggaggtctcagcgttatcagccccaagtggcaagaacaacaagatgaagatgaagatgaagacgaagatgatgaagatgaacaaattccctctcaccctcctcgccgaccaagccatggaaagcgtgaacaagacgaggacgaggacgaagatgaagataaacctcgtcctagtcgaccaagccaaggaaagcgtgaacaagaccaggac

SEQ ID NO: 121958 - DNA, 258 bp, Glycine max
tcacattggtgaattgaaatctggtgtctatgttccactgcctacaaaaactaatttggtggaaactcccaaggaatggcaactggatctaccttgtgacaaaattcctagtgtcttgaccacaactgatgagagattggtaggcacagaacatgagggatatgatccttttcttggtggaattcaaaaatatgccactcccatgatgcccctagatgaagaaattctttctaaggttgcacaagatatagttgagga

SEQ ID NO: 121959 - DNA, 265 bp, Glycine max
gctgactaccttcatcattaagaaccctccagaagttaagaaaggatccaaagacaagaaggccatgaggagagctgagaaggagagacagaaggaaggtgaattagctgatgaggaacagaagaaagtgaagaaagaggttaagaagaaaggctcttcatcttctaaggatggcactgctaaatcaacctcttctaagaaaaaagcaagtggctctgcatgaagaccacacttcacctactcacagtcaaattgacgagaaaga

SEQ ID NO: 121960 - DNA, 261 bp, Glycine max
cttgaaaatggtggcacatgttatgtctgataagatataatatgtaccaccattttcaagagggttaccttcattatcgagcacatattatatcttgtcagacataacagcatttggtggaacaagagcagccccaacgggaaatgaaagatgccctctcactgtggtgcaatctcgcaatgagctcgacaaatggattggaacaatcatctcgtccccatatcgaatccgttttatcgccgaagccatcctttgagcctt

SEQ ID NO: 121961 - DNA, 264 bp, Glycine max
cgtgtctctccagcttattagtgctaccaaagctgatgccaacggaaaagggaaacttggaaaggctacctttttggaaggtatcattacttcattgccaactttgggagcaggccaatctgcattcaaaattaattttgaatgggatgatgggagtggaattcctggagcattttatatcaagaattttatgcaaactgagtttttccttgtgagtttgactcttgaagacattccaaaccatggaagcatccactttgtttg

SEQ ID NO: 121962 - DNA, 265 bp, Glycine max
gcagccccaacgggaaatgaaagatgccctctcactgtggtgcaatctcgcaatgagctcgacaaagggattggaacaatcatctcgtccccatatcgaatccgttttatcgccgaaggccatcctttgagccttaagttcgattcatttgcagttataatgctgtgtgttggaattcctaccgagtggtctgttgtggaggatctaccagaaggacctgctgttaaaattggtgagaacaaagatgcaatggatggttggttta

SEQ ID NO: 121963 - DNA, 265 bp, Glycine max
ttcaatatcctagtataccttaataaataatttaagatactatgatgagagcacggttcccattactgttgctgggacttgttttcctggcttcagtttctgtctcatttggcattgcttactgggaaaaagagaaccccaaacacaacaagtgtctccagagttgcaatagcgagagagactcgtacaggaaccaagcatgccacgctcgttgcaacctccttaaggtggagaaagaagaatgtgaagaaggtgaaattccacg

SEQ ID NO: 121964 - DNA, 269 bp, Glycine max
ggaagacgaaggtgagcagccacgtccattcccattcccacgcccacgccaacctcatcaagaggaagagcacgagcagaaggaggaacacgaatggcatcgcaaggaggaaaaacacggaggaaagggaagtgaagaggaacaagatgaacgtgaacacccacgcccacaccaacctcatcaaaaggaagaggaaaagcacgaatggcaacacaagcaggaaaagcaccaaggaaaggaaagtgaagaagaagaagaagaccaagacg

SEQ ID NO: 121965 - DNA, 266 bp, Glycine max
gttccactgcctacaaaaacaaatttggtggaaactcctaaggaatggcaactggatctaccttgtgacaaaattcctagtgtcttgactacaactgatgagagattggtaggcacagaacatgagggatatgatccttttcttggtggaattcaaaaatatgccactcccatgatgcccctagatgaagaaattctttctaaggttgcacaagatatggttgaggaatggttcgattgtgttgatgaggaggattcctttgagga

SEQ ID NO: 121966 - DNA, 268 bp, Glycine max
caagccccactcaaccaccacacctctcctcgttcacgctacccctttctgctcttcttctacctttcaagttttaaaagtataaagatggcagagacattcctatttacctcagagtcggtgaacgagggacaccctgacaagctctgcgaccaaatctccgatgctgtcctcgacgcttgcctcgagcaggacccagacagcaaagttgcctgcgaaacatgcaccaaaaccaacttggtcatggtcttcggagaaatcacgacca

SEQ ID NO: 121967 - DNA, 280 bp, Glycine max
ggttacaattgattggtttatttcctctcaggaatgtgttcccaggacctattgtgttttaaatccacaaaatccttttgtgttaaataggtggatggggaaactgactttcccccagggcacttcccgaagtgtcaaaagaatgcctctttctatagggggaggagctggtgcaaagaatgctattctcatgaatatgccaaatgctgttctttcaatgtggagatattttgttggagatctcgtctttgaagtttctaagatgacttctccctacatt

SEQ ID NO: 121968 - DNA, 290 bp, Glycine max
ttcggctcgagtaaaattcttccaccaagttatgggttcaccttgtgttgcttcttttctccctcttaggtctctcttctagttccagcatatcaactcatcgttccatattggaccttgacctaaccaagtttaccacacagaaacaggtgtcttcactgttccaactatggaagagtgagcatggacgtgtctaccataaccacgaagaagaggcaaagagacttgagattttcaagaataacttgaactatatcagggacatgaatgcaaacagaaaatcaccccat

SEQ ID NO: 121969 - DNA, 280 bp, Glycine max
attctctccattggtccttaaacactcatcagtcatcaccatggccaagctagttttttccctttgttttctgcttttcagtggctgctgcttcgctttcagttccagagagcagcctcagcaaaacgagtgccagatccaaaaactcaatgccctcaaaccggataaccgtatagagtcagaaggagggctcattgagacatggaaccctaacaacaagccattccagtgtgccggtgttgccctctctcgctgcaccctcaaccgcaacgcccttcgt

SEQ ID NO: 121970 - DNA, 277 bp, Glycine max
gttgttttatggcatgaggaagcatgctgattgggttatttaattatttccaattcttggtgcgtgtgattgaaaatttgaaggttcgaaagacaatgtgataagacagatacaaaaacaggtgaaggagcttgcgttccctgctgggtctgcacaagatatcgagaatctaataaagaaccagagggaatcctattttgctgacgaacagcctttgcaaaaggaggaagggaagaaagggtcctttgtcttttgaatatgtatgcttaggagacta

SEQ ID NO: 121971 - DNA, 283 bp, Glycine max
cacacaactactacaagtacttccttacaatcaaaaccaacaacaactatggcaagttatcaaaagcactacgatgatcagggtcgcaaggttgacgagtatggcaacgttgagaagcaaaccgacgaatacggcaaccctgttcatgctgctagtgtcacctatgtagccaccagaactgctgctggtggttacagtgatgacattaataagcaacatgataccaccaatgcctacggcgtagacactggtagacagcattctagtggtggctacgatggtg

SEQ ID NO: 121972 - DNA, 287 bp, Glycine max
ggggaagcccttcactctctctctttcttccctttgcttgctactcttgtcgagtgcatgctttgctattagctccagcaagctcaacgagtgccaactcaacaacctcaacgcgttggaacccgaccaccgcgttgagtccgaaggtggtttgattcaaacatggaactctcaacaccctgagctgaaatgcgccggtgtcactgtttccaaactcaccctcaaccgcaatggcctccacttgccatcttactcaccttatccccggatgatcatcatcgcccaag

SEQ ID NO: 121973 - DNA, 284 bp, Glycine max
aaataatttaagatactatgatgagagcacggttcccattactgttgctgggacttgttttcctggcttcagtttctgtctcatttggcattgcttactgggaaaaagagaaccccaaacacaacaagtgtctccagagttgcaatagcgagagagactcgtacaggaaccaagcatgccacgctcgttgcaacctccttaaggtggagaaagaagaatgtgaagaaggtgaaattccacgaccacgaccacgaacacaacacccggagagggaacctcagcaa

SEQ ID NO: 121974 - DNA, 287 bp, Glycine max
  unsure (1)..(287): unsure at all n locations
gaaaagtgttcctacattggttggcattgaatgtcccaaggatgaaaaacttcctcgtcgcaaagtttttgataaacctaagacgcgctgcttcactattctccctatggagtttaatcttgtggttcgtcagaagtttttaaattttgtgaggttcattatgaagaaaagggacaagcttagttgtcaagttggaatcaacgcatattctatggaatggactnggtttggcaatagattactgagtaagggaacgatattctgtgttgcgattatgctagttttga

SEQ ID NO: 121975 - DNA, 257 bp, Glycine max
ttgatagtttcgcaagtcctgactgcaacatagttggtgcaatgcttttggttgatacttatcataccaatcctgaaaatgcagttcgtagtatttttgttgcgcctttcagaggcggaaggcccattcgggtggttacatttccgaataccattgtgcagattgaaccagacatgaattcaaagtttcagcttttgagtacactacccatgggtgatttgttcaaggaaaagatctcgcaatgggtaaagttaatg

SEQ ID NO: 121976 - DNA, 241 bp, Glycine max
gaaattttgataaaccgcgatcacaggttgccgcaccttaaaaccggaaacaaaagcaatcgttacttgatttcaagaatctctcaatttcttcctacttctttgtgtacgatttcttaagggaaagaaaatcactctctgtgctggccacagacttcgtgaatcattttcctttccactcttagtttattccctgaacactctcctatatgatataggactcgtgtcagattaaacttct

SEQ ID NO: 121977 - DNA, 288 bp, Glycine max
  unsure (1)..(288): unsure at all n locations
aagaaagtcttccatagccccccaaaaatgaagagcaccatcttctttgctctctttctcttttgtgccttcaccacctcatacctaccttcagccatcgctgatttcgtgctcgataatgaaggtaaccctcttgaaaatggtggcacatattatatcttgtcagacataacagcatttggtggaataagagcagccccaacgggaaatganagatgccctctcactgtggtgcaatctcgcaatgagctcgacaaaagggattggaacaatcatctcgtccccata

SEQ ID NO: 121978 - DNA, 277 bp, Glycine max
ctaagttctctctcacttacaaccctgatgagactctctctacaagaattatcaatggaggtggcaaaaacccaacattcaatgaaaaattgaggatgaagatcacccaaatagatgctgttctgaaatgtgaagtttggatgtttagtaggtcaaggattcacatggaagaccagcttttggggtttgctttagtcccaattgcacaagttgttggcaaaggaaaggtgactgaagattacagcctttcctccactgatcttttccactctcctgc

SEQ ID NO: 121979 - DNA, 273 bp, Glycine max
tttccttattgacaatcccaaacagtctacagtttttgatattctcttgggaatttctcaagattttgaaattgctggtaatactcttatgccagctttttctgttccacaggctactgccagatcttctgaaaatgcggaatcctctgcatgatctggaatatgtgttttctttcgtttgttcgtttgtttaattcaataaaggaaattagacatgaccctcttgttgagtatgctctgtctatttgaaaatttccacacctcttttaattg

SEQ ID NO: 121980 - DNA, 274 bp, Glycine max
gcagtcaaaaggagtgattgggcctcattggtacaagtgtttttaacaaacagcaacagtacagagcattttgatgcatgtaagtggacaaaatcggaaccacattcctgggaattgatcttcccaatagaggtatgcggtcctaataatggttttgaaatgtggagttctgagtgggcaaatcaaactacatggcatttgagtttccttattgacaatcccaaacagtctacagtttttgacattctcttgggaatttctcaagattttgaaa

SEQ ID NO: 121981 - DNA, 273 bp, Glycine max
tctcagtgttgttcaccctatttataaactccttcaccctcactatcgtgacaccatgaacataaatggccttgctcggttatcactggtcaacgacggtggcgttatagaacaaacatttttgtggggaaggtattctgtggaaatgtctgctgtagtttacaaggattgggtttttacagatcaagcattgcctgctgatcttataaaaagaggaatggcaattgaggatccatcgtgccctcatggcattcgccttgtgatagaggacta

SEQ ID NO: 121982 - DNA, 276 bp, Glycine max
aatttttgaagcgtaccggatttcactgtgatatcatttgtgtcactggatggactgccaccccaatgcaggatgttcaggttacaattgattggtttatttcctctcaggaatgtgttcccaggacttattgtgttttaaatccacaaaatccttttgtgttaaataggtggatggggaaactgactttcccccagggcacttcccgaaatgttaagagaatgcctctttctatagggggaggagctggtgcaaagaatgctattctcatgaata

SEQ ID NO: 121983 - DNA, 280 bp, Glycine max
  unsure (1)..(280): unsure at all n locations
caattcaattcaatctgcctcgatcatggagaggaaaacatttgggtttttgttcttgctcctccttgtcttagcttctgatgtgacggtgaagagagcagaggcgaaagattgcttgacaaggaggcacgggttccagggtagatgcttattcgacaggcaatgtgcacatgtgtgcaggagcgatggtttcatcggtggtcagtgccgaggccctcttcgcaaatgcttttgcagcaggccatgttgatcgaaattactactgccnaagaggccatga

SEQ ID NO: 121984 - DNA, 182 bp, Glycine max
  unsure (1)..(182): unsure at all n locations
gcggtttcctttgttggtgttgctgggaactgttttcctggcatcagtttgtgactcattaaaggtgagagaggatgagaataaccctttctacttgagaagctctaacagcttccaaactctctttgagaaccaaaacggtcgcattcgtctcctccagagnagccacaaacgctccccac

SEQ ID NO: 121985 - DNA, 180 bp, Glycine max
gtgcggtttcctttgttggtgttgctgggaactgttttcctggcatcagtttgtgtctcattaaaggtgagagaggatgagaataaccctttctacttgagaagctctaacagcttccaaactctctttgagaaccaaaacggtcgcattcgtctcctccagagattcaacaaacgctcc

SEQ ID NO: 121986 - DNA, 253 bp, Glycine max
gcaggttatcttggtcttttcaacgaaaacgagtctggtgatcaagtcgtcgctgttgagtttgacactttccggaactcttgggatccaccaaatccacacatcggaattaacgtcaattctatcagatccatcaaaacgacgtcttgatggatctgatagaattgacgttaattctatcagatccatcaaaacgacgtcttgggatttcggccaacaataaagtagcccaggttctccatacctatgatgc

SEQ ID NO: 121987 - DNA, 273 bp, Glycine max
gcaaaatgaccaagttcacaatcctcctcatctctcttctcttctgcatcgcccacacttgcagcgcctccaaatggcagcaccagcaagatagctgccgcaagcagctccagggggtgaacctcacgccctgcgagaagcacatcatggagaagatccaaggccgcggcgatgacgatgatgatgatgacgacgacaatcacattctcaggaccatgcggggaagaatcaactacataaggaggaacgaaggaaaagacgaagacgaagaag

SEQ ID NO: 121988 - DNA, 120 bp, Glycine max
cttaattattaacacttccttagttcaatatggggaagcccttcactctctctctttcttccctttgcttgctactcgtgtcgagtgcatgctttgctattagctccagcaagctcaacg

SEQ ID NO: 121989 - DNA, 272 bp, Glycine max
ctcagtcatcaggtgggaagtttgataataattataactcaagctcttgggatgattgggaccaggaagatacaaggaagaaagaaccagctaaagggtcagctgcccatagcagtgatggttggactggatgggataatgccaaagatgatggatttgatgatatctatgggagtgcatctaataataaaggtggcgctcataatgacaagtcaggtgctgcctggacaggaggaggctttctctaaggttttgacctgatctctatcagc

SEQ ID NO: 121990 - DNA, 272 bp, Glycine max
aatggtgttctcactgttgccatttgattctagcaagcagagcttttgtcaattttctattgaccttctcggtggaggaattttagtggacaaaactggagattggatcacacttatacaaaattctccaattagtaacttgttgagagttgctgcttggaagaaaggctgtttaatggttaaaattgtgatgtctgggaatgcagcagtcaaaaggagtgattgggcctcattggtacaagtgtttttaacaaacagcaacagtacagagc

SEQ ID NO: 121991 - DNA, 255 bp, Glycine max
ggaatggaatagacacagtagtgaactgccaagggaatgcagtgttcgacggtgagctacggaggggacaattgctaatagtgccgcagagctttgtggtggctgagcaaggcggagaactaggattggaatacgtagtgttcaagacacaccacaacgccgtgagtagctacattaaggatgtgtgtagggcaatcccttcggacgttctttacaattcttacaagcttggccagagtcaagtgcgtcactcaa

SEQ ID NO: 121992 - DNA, 277 bp, Glycine max
ctctccattggtccttaaacactcatcagtcatcaccatggccaagctagttttttccctttgttttctgcttttcagtggctgctgcttcgctttcagttccagagagcagcctcagcaaaacgagtgccagatccaaaaactcaatgccctcaaaccggataaccgtatagagtcagaaggagggcacattgagacatggaaccctaacaacaagccattccagtgtgccggtgttgccctctctcgctgcaccctcaaccgcaacgcccttcgt

SEQ ID NO: 121993 - DNA, 168 bp, Glycine max
gcggaatcctctgcatgatctggaatttgtgttttcttttgcttgttcgtttgtttaattcaataaaggaaattaggcatgaccctcttgttgagtatgctctgcctatttgaaaatttccacacctcttttaattatcgtaatgatgtgtgaagtgtgtgttatttt

SEQ ID NO: 121994 - DNA, 253 bp, Glycine max
agtataccttaataaataatttaagatactatgatgagagcacggttcccattactgttgctgggacttgttttcctggcttcagtttctgtctcatttggcattgcttactgggaaaaagagaaccccaaacacaacaagtgtctccagagttgcaatagcgagagagactcgtacaggaaccaagcatgccacgctcgttgcaacctccttaaggtggagaaagaagaatgtgaagaaggtgaaattccac

SEQ ID NO: 121995 - DNA, 261 bp, Glycine max
gaaattttgataaaccgcgatcacaggttgccgcaccttaaaaccggaaacaaaagcaatcgttacttgttctcaagaatcttcaaactttcttctgttttctctgcactcggttcttcaggaaaagaaaatcactctctgtattgattacagacttcgtgaatcattttcttttcaactttcagttcacttgctgaacactctcctataaatatataggactacgtgtcagatttgaactttccctgctctttctcggtt

SEQ ID NO: 121996 - DNA, 276 bp, Glycine max
cggctcgagctttgttcactcttcttctcttgcggctagggttttagcgcacttcttctagatataaggaagatgggtaaggaaaaggttcacatcagtattgtggtcattggccatgtcgactctgggaaatccactaccactggtcacctgatttacaagcttggaggcattgacaagcgtgttattgagaggtttgagaaggaagctgctgagatgaacaagaggtctttcaagtatgcctgggtgctggacaaacttaaggctgagcgtgaa

SEQ ID NO: 121997 - DNA, 275 bp, Glycine max
ctgcattggagtggcagtccatccagtgacacaaatgatatcacaatgaaatccggtacgcttcagaaattccaaactccacgcatcataacacgtgtttggattaaatgacatagtcattgcttttgtgcaagcaggattccataattcacagtcttgagagcagatggtgtaaatatcagaactggcacgccccctaaaagaactattcatagcacaggccaatgatatacctgtattctcaggaataccaactgtgagcaccattttaatca

SEQ ID NO: 121998 - DNA, 270 bp, Glycine max
ctcgagccgctcgagccgattcggctcgaggatagttcagtgtctacaataccaggtgattatgtcattgaggttaagttgacaaccataaacaatatgtgtgcatatgggctcaatcctggtatttcaggttctcgtcttttgggcaccattcctcagtccatttcacagcaaactgtttggaatcaaatggcaacagtgagaacaccattgaattttgattctagcaagcagagcttttgtcaattctctattgatcttcttggtgga

SEQ ID NO: 121999 - DNA, 265 bp, Glycine max
cttattaacactttccttagttcaatatggggaagcccttcttcactctctctctttcttccctttgcttgctactcttgtcgagtgcatgctttgctattacctccagcaagttcaacgagtctccaactcaacaacctcaacgcgttggaacccgaccaccgcgttgagtccgaaggtggtcttattgaaacatggaactctcaacaccctgagctgcactgcgccggtgtcactgtttccaaacgcaccctgattcgcaacg

SEQ ID NO: 122000 - DNA, 152 bp, Glycine max
  unsure (1)..(152): unsure at all n locations
atactagtcaaataaccaaataacacctaaaacgaanttagaagggatnantgtagatgaggaaattaaaaataagatattattcctantagatcatcatgacncaatcatgccatctttgacgcgaataaatgcaacctccacactacata

SEQ ID NO: 122001 - DNA, 271 bp, Glycine max
ggatatgcttcattgataccatatgttgagccagttgtgcaagctcaaagtgctgaagtttactttgacttcttccctgtggaggttgatagtcaagagggagttgctcacattggtgaattgaaatctggtgtctatgttccactgcctacaaaaactaatttggtggaaactcccaaggaatggcaactggatctaccttgtgacaaaattcctagtgtcttgaccacaactgatgagagattggtaggcacagaacatgagggatatg

SEQ ID NO: 122002 - DNA, 274 bp, Glycine max
ctatttataaactccttcaccctcactatcgtgacaccatgaacatgtatggccttgctcggttatcactggtcaacgacggtggcgttatagaacaaacatttttgtggggaaggtattctgtggaaatgtctgctgtagtttacaaggattgggtttttacagatcaagcattgcctgctgatcttataaaaagaggaatggcaattgaggatccatcgtgccctcatggcattcgccttgtgatagaggactacccttatgctgttgatgg

SEQ ID NO: 122003 - DNA, 291 bp, Glycine max
aagctcggttttcggctctaggcaaatgtttgcttcattaattttctctggagacaacaggctcactgagaaaacaatctttacttgtagagatttggacatcttggttgtctattatacaatagcaactcaatttagaaaatttctaccacattacattaggtgatttctgtatacctttttgatctacattctcccatcttttctcactgctgaaattaaatataagcgttatctgagtaatattcatatttccggcttatgttacgacggcagatacaaattctggac

SEQ ID NO: 122004 - DNA, 276 bp, Glycine max
  unsure (1)..(276): unsure at all n locations
gttagattaccatgatatcttcatgccatatgtgaggcagataaatcagctgaattctgccaagacttatgcgacaaggactatcctttttttgagagaagatggaactttaaagccagtggccatcgaattaagtttgccacattctgctggggatctgtcagctgccgtcagtcaagtcgtcttacctgctaaggaaggtgttgagagcacaatttggctactagccanagcttatgtcatcgtaaatgactcttgctaccatcaactcatgag

SEQ ID NO: 122005 - DNA, 188 bp, Glycine max
taagatttgaaattttgatataccgcgatcacaggttgccgctccttaaaaccggaaacaaaagcaatcgttacttgatttcaagaatttctcaatttctttctacttctttgtgtacgatttcttaagggaaagaaaatcactctctgtgctggccacagacttcgtgaatcattttcttttccaca

SEQ ID NO: 122006 - DNA, 267 bp, Glycine max
  unsure (1)..(267): unsure at all n locations
caatatcctagtataccttaataaataatttaagatactatgatgagagcacggttcccattactgttgctggtacttgtnttcctggcttcagtttctgtctcatttggcattgcttactgggaaaaagagaaccccaaacacaacaagtgtcttcagagttgcaatagcgtaagagactcgtacaggaaccaagcatgccacgctcgttgcaacctccttaaggtggagaaagaagaatgtgaagaaggtgaaattccacgcaac

SEQ ID NO: 122007 - DNA, 263 bp, Glycine max
tcttgactcacaaaggaagggaaagtgtgttgtgctaaagacttctactcgacagacaatctttctacctgttgttgggcttgttgaccctgacaagttaaaacccggtgatctggttggtgttaacaaggatagttacttaatcttggataccctgccttccgagtatgattctagagttaaggccatggaagttgatgaaaagccaacagaggattacaatgacattggcggattagagaagcagattcaagaattagttg

SEQ ID NO: 122008 - DNA, 251 bp, Glycine max
gttctggctagtggttacaatggtggacaggggagagcacactttggtgatcggttacagaaccgtggttcagctcgggcatttcctgtttggcttgaaactggtgatgcagttgcaaatatgtattcagagttgcgggaagaggctcgtgatcatgcatgcttacgtaatgcatattttgagcaggtttacagcctatcttattggtataaagccctagcaaaggactaagtgctaaagggcactgcaca

SEQ ID NO: 122009 - DNA, 276 bp, Glycine max
gtctttaccaagtggaatatgcaatggaggctattggtaacgctggtaccgcaatagggatcttatcaaaagatggggttgtgctggttggtgaaaagaaagtcacatccaagctgctccaaacttcaacttccaccgagaaaatgtacaagattgacgatcatgttgcatgtgctgtggctgggataatgtctgatgcgaacatcctaatcaataccgctagggtccaagcacaacgctacacatacgcctatcaagagcccatgccagttgagc

SEQ ID NO: 122010 - DNA, 269 bp, Glycine max
acgctttccatggcttggtcggcgaggacgaggacgaagatgaagataaacctcgtcctagtcgaccaagccaaggaaagcgtgaacaagaccaggaccaggacgaggacgaagatgaagatgaagatcaacctcgcaagagacgcgaatggagatcgaaaaagacacaacccagaagacctagacaagaagaaccacgtgaaagaggatgcgagacaagaaacggggttgaggaaaatatctgcaccttgaagcttcacgagaacatt

SEQ ID NO: 122011 - DNA, 267 bp, Glycine max
attttgagtaccactaccaatggtgattttgttcaaggaaaagatctcgaaatggttaaagttaatgtagcatgtgctgctgttggcttgacatcaagttacaatccaactccatagttggaatctggtttgcaaaaagacagagggttaattgtggaatattttggaaggatgtcttacgttgctcataacgttaatcagccccaagagaaagatttgttggagggaaattttcctttgatataaaatctagctctagattggaaa

SEQ ID NO: 122012 - DNA, 263 bp, Glycine max
tttccttagttcaatatggggaagcccttcttctctctctctctttcttccctttgcttgctactcttgtcgagtgcatgctttgctattacctccagcaagttcaacgagtgccaactcaacaacctcaacgcgttggaacccgaccaccgcgttgagtccgaagtggtcttattgaaacatggaactctcaacaccctgagctgcaatgcgcgggtgtcactgtttccaaacgcaccctcaaccccaacggcctccacttg

SEQ ID NO: 122013 - DNA, 267 bp, Glycine max
gttcaatatcctagtacaccgtattaaagaatttaagatatactatgatgcgagcgcggttcccattactgttgctgggagttgttttcctggcatctgtttctgtctcatttggcattgcgtattgggaaaagcagaaccccagtcacaacaagtgcatccgaagttgccctagcgagaaagactcctacaggaaccaagcatgccacgctcgttgcaacctccttaaggtggaggaagaagaagaatgcgaagaaggtcaaattc

SEQ ID NO: 122014 - DNA, 270 bp, Glycine max
tctcgagccgattcggctcgagggatggactgccactccaatgcaggctgttcaggttacaaatgattggtttatttcctctcaggaatgtgttcccaggacctattgtgttttaaatccacaaaatccttttgtgttaaataggtggatggggaaactgactttcccccagggcacttcccgaagtgtcaaaagaatgcctctttctatagggggaggagctggtgcaaagaatgctattctcatgaatatgccaaatgctgttctttc

SEQ ID NO: 122015 - DNA, 259 bp, Glycine max
cttgggaatttctcaagattttgagattgctggtaatactcttatgccagctttttctgttccacaggctactgccagatcttctgaaaatgcggaatcctctgcatgatctggaatttgtgttttcttttgcttgttcgtttgtttaattcaataaaggaaattaggcatgaccctcttgttgagtatgctctgcctatttgaaaatttccacacctcttttaattatcgtaatgatgtgtgaagtgtgtgttatttt

SEQ ID NO: 122016 - DNA, 271 bp, Glycine max
tgctgttctttcaatgtggagatattttgttggagatctcgtctttgaagtttctaagatgacttctccctacattaaatgtacagtctctttcttcatagcatttggaaatttggctgatgacaccatcaattttgaggcttttccccacaagctggtacagtttggagagattcaggaaaaagttgtattgaaattttcacaagaggaatttcttacagcttggtcaacccaggtgcgtcctgcaacaactctgttggctgatgggtgt

SEQ ID NO: 122017 - DNA, 276 bp, Glycine max; identical to SEQ ID NO: 111014

SEQ ID NO: 122018 - DNA, 277 bp, Glycine max
aatttgttagtggaaaaaccttcaaatatgatataattggtagctggttcacattcttcagatgattttcctgaaaaggaagatcaagaaaaacccaaaaagattgatgccagattgagacaaagaatagatcctcaatacaatgaggttcaggctcagatggaaacaaatttgtttaaattgtctcttgatgatgttgaaactcctaaaggttccatgttggatcttaaaatttctcagtctaaaattgcacttcccaagaacacagttggaggaa

SEQ ID NO: 122019 - DNA, 274 bp, Glycine max
cttcttccctgtggaggttgatagtcaagagggagttgctcacattaggtgaattgaaatctggtgtctatgttccactgcctacaaaaactaatttggtggaaactcccaaggaatggcaactggatctaccttgtgacaaaattcctagtgtcttgaccacaactgatgagagattggtaggcacagaacatgagggatatgatccttttcttggtggaattcaaaaatatgccactcccatgatgcccctagatgaagaaattctttctaa

SEQ ID NO: 122020 - DNA, 273 bp, Glycine max
gtgaaaatcatgcccgtcctgttcttggaggaaatgacacctttccttatcctcgtagggggagaactggtagaaaaccaacaaggaaagatcctaatagtgagagtaggagcaatgatgtttatcttccaagagatgaggcttttggacacttgaagtcatctgactttcttacttatggactaaaatccgtatctcaaaatgttcttccattattgcaatctgcttttgatttgaatttcacaccccgtgagtttgatagctttgatgaag

SEQ ID NO: 122021 - DNA, 272 bp, Glycine max
cagtatggatcactccgcaagaatgctatgttcgtgccacactacaccctgaacgcgaacagcataatatacgcattgaatgggcgggcattggtacaagtggtgaattgcaatggtgagagagtgtttgatggagagctgcaagagggaggggtgctgatcgttccacaaaactttgcggtggctccaaaatcccagagcgataactttgagtatgtgtcattcaagaccatgatagaccccgatcggaaacttgcaggggcaactcatgt

SEQ ID NO: 122022 - DNA, 272 bp, Glycine max
aatggcttcaaccgacaagtcaccggacccaacgccggcgaagggtccggatccaactccggggaagccgatgagtgttggtcagcacgtgatcgacaagagtgcaatgatggtgcagtcgctggaccccattgagcagatgagtcagcacgtgtgctccttcgctatctacagccatgacatgtctcgccagatagagacacatcactactgctccagactccaccagaacttcatacaatgtgctgtctatgattccgatgaatccaaag

SEQ ID NO: 122023 - DNA, 277 bp, Glycine max
gtttgttgttcctcactgacctcaccatggcgaccagagccaagctttctttagctatcttccttttctttcttttagccttgatttcaaacctagccttgggcaaacttaaagaaaccgaggtcgaagaagatcccgagctcgtaacatgcaaacaccagtgccaacagcaacggcaatacactgagagtgacaagcgaacatgcttgcaacaatgtgacagtatgaagcaagagcgagagaaacaagtcggagaggaaactcgcgagaaggaaga

SEQ ID NO: 122024 - DNA, 264 bp, Glycine max
caaaccttgctctatactacacagtacacacactagaagaataatggcttccatcctccactactttttagccctctctctttcttgctcttttcttttcttcttatccgactcagtcacccctacaaaaccaataaaccttgttgttctacccgttcaaaatgatggttccacagggctccattgggccaacctccaaaaaagaacccctctaatgcaagtaccagtcctggtggacctcaatggaaatcacttgtgggttaa

SEQ ID NO: 122025 - DNA, 264 bp, Glycine max
ccttgcttatgagtacttgtctaatggctccttggataaatggatattcaagaaaaacaaaggtgagtttctgttggattgggatactaggttcaatatagctctgggaacagcataaggacttgcttaccttcatgaagattgcgactctaagattgttcattgtgacatcaagccggaaaacgtgcttctggatgaccacttcatggccaaggtttcggatttcggactggctaagctcatgaaccgagaacaaagccatgt

SEQ ID NO: 122026 - DNA, 265 bp, Glycine max
gaaaagggacaagcttagttgtcaagttggaatcaacccatattctatggaatggactggtttggccaatagattactgagtaagggcaacgatattctgtgttgcgattatgctagttttgatggtttgattaccaagcaagttatgagcaagatggcagaaatgatcaacagtctttgtggtggtgatgaaaaactgatgcgtgaaaggacacacctgctgttggcttgttgttcaaggatggcaatttgtaagaaagatgtt

SEQ ID NO: 122027 - DNA, 149 bp, Glycine max
ctggaatttgtgttttctttcgcttgttcgtttgtttaattcaataaaggaaattaggcatgaccctcttgttgagtatgctctgcctatttgaaaatttccacacctcttttaattgtcgtaatgatgtgtgaagtgtgtgttatttt

SEQ ID NO: 122028 - DNA, 265 bp, Glycine max
atgaaattgaaaggaagacaaaacacaagacagagtcattcagcaaggcttgaaacgagaagcgaggatgcccatcagatgtattctgcattggcaaccgaaccaaggaagcgttgtgaacagccaagtcctgaatgagatctcgcagtgcgtcgaaagccttaacggcgtcaaagaaggaagatgcaaagcctccctcactttctacagacccaatttacgagaccaatcggtgaccatcgattttcctcgcgattttctgggg

SEQ ID NO: 122029 - DNA, 271 bp, Glycine max
ctcgcccgcaccgtccagatcgtaatcaagagaagaggagcgagttttgtttttccttgcagcccaagccatggcgcctctgatcctgcatggtggaaaaaccaacaaaaattcttacaagacactcattgcggcggagtatgccggcgtccaagttgactttgccccaaattttgagatgggtgtctccaataaaactcctgaatttctcaagatcaatcctattggcaaggttcctgtgttggaaacacctgatggtccagtattcgag

SEQ ID NO: 122030 - DNA, 273 bp, Glycine max
gtcctagtcgaccaagccaaggaaagcgtgaacaagaccaggaccaggacgaggacgaagatgaagatgaagatcaacctcgcaagagccgcgaatggagatcgaaaaagacacaacccagaagacctagacaagaagaaccacgtgaaagaggatgcgagacaagaaacggggttgaggaaaatatctgcaccttgaagcttcacgagaacattgctcgcccttcacgcgctgacttctacaaccctaaagctggtcgcattagtaccctca

SEQ ID NO: 122031 - DNA, 272 bp, Glycine max
ctccattgtctttgaacactcatcaccatggccaagcttgttctttccctttgtttccttcttttcagtggctgcttcgctctgagagagcaggcacagcaaaatgagtgccagatccaaaagctgaatgccctcaaaccggataaccgtatagagtcggaaggtgggttcattgagacctggaaccctaacaacaagccattccagtgtgccggtgttgccctctctcgctgcacccttaaccgcaatgcccttcgtagaccttcctacac

SEQ ID NO: 122032 - DNA, 274 bp, Glycine max
cccaactaacaataattccttcacttgcagaacttagttctctgttgcatcatcatcatcttcattagtgttagccctaaacttcaccttcaaccatgaccacagtgccaccacacagtgtccaagtgcacacaacaacacaccgctacgaagccggcgtcgtcccgccggctcgttttgaggcgccgcgttacgaagccggcatcaaggcgccctcttccatttaccattccgagagaggtccgacgacctctcaggttctcgcagttgtcgc

SEQ ID NO: 122033 - DNA, 271 bp, Glycine max
ccttcaaacttaattattaacacttccttagttcaatatggggaagcccttcactctctctctttcttccctttgcttgctactcttgtcgagtgcatgctttgctattagctccagcaagctcaacgagtgccaactcaacaacctcaacgcgttggaacccgaccaccgcgttgagtccgaagtggtttgattcaaacatggaactctcaacacactgagctgaaatgcgccggtgtcactgtttccaaactcaccctcaaccgcaatg

SEQ ID NO: 122034 - DNA, 276 bp, Glycine max
atgggatgaagcatgggatgtgacatcaaagactattgcgtacactaatcatactgtcctccctgaagcactggagaaatggtctcaacctgtaatgtggaaactacttccacgccatatggaaattctacaagaaatagacaagagattcactgcaatgataaatacaacccgattggaccttgagaatgagctttccgccatgcgcatcttggatgataatccccagaagccggtagttcggatggcaaatttgtgtgtggtttctgctcatgc

SEQ ID NO: 122035 - DNA, 272 bp, Glycine max
caagccttactttagtggttctaaattgaaaagctttctagctggtcataatatcaccattactgatggtattgacaagactagtgcaactttgcaatttagaaagttagcagattgtgattttctcaagagaaactttaagcagatgtctaatgttttgtgggtagctcctgaggacaaggcgagtttatggtcacaacttcattatgtttcgtgtaataatctggaaatgcaagaagcttatcttgtcaatctcgtaaatgtgttacgag

SEQ ID NO: 122036 - DNA, 279 bp, Glycine max
atgaagatgaagacgaagatgatgaagatgaacaaattccctctcaccctcctcgccgaccaagccatggaaagcgtgaacaagacgaggacgaggacgaagatgaagataaacctcgtcctagtcgaccaagtcaaggaaagcgtgaacaagaccaggaccaggacgaggacgaagatgaagatgaagatcaacctcgcaagagccgcgaatggagatcgaaaaagacacaacccagaagacctagacaagaagaacctcgtgaaagaggatgcgaga

SEQ ID NO: 122037 - DNA, 278 bp, Glycine max
ctcaaaataatcaaacttgccatacccgtcaacaaacctggcagatatgatgatttcttcttatctagcactcaagcccaacagtcctacttgcaaggcttcagccataatattctagagacctccttccatagcgaattcgaggagataaacagggttttgttgggagaggaagaggagcagaggcagcaagagggagtgatcgtggaactctcaaaggaacaaattcggcaactgagcagacgtgccaaatctagttcaaggaaaaccatttcctc

SEQ ID NO: 122038 - DNA, 271 bp, Glycine max
tcaatatcctagtataccttaataaataatttaagatactatgatgagagcacggttcccattactgttgctgggacttgttttcctggcttcagtttctgtctcatttggcattgcttactgggaaaaagagaaccccaaacacaacaagtgtctccagagttgcaatagcgagagagactcgtacaggaaccaagcatgccacgctcgttgcaacctccttaaggtggagaaagaagaatgtgaagaaggtgaaattccacgaccacga

SEQ ID NO: 122039 - DNA, 280 bp, Glycine max
aattttgataaaccgcgatcacaggttgccgcaccttaaaaccggaaacaaaagcaatcgttacttgatttcaagaatttctcaatttctttctacttctttgtgtacgatttcttaagggaaagaaaatcactctctgtgctggccacagacttcgtgaatcattttcttttccacttttagtttaaatcctgaacactctcctatttgatataggacttcgtgtcagatttaaacttcttctgtttctttctcagttctctgttcaatttcaagttca

SEQ ID NO: 122040 - DNA, 281 bp, Glycine max
taaaattcttccaccaagttatgggtttccttgtgttgcttcttttctccctcttaggtctctcttctagttccagcatatcaactcatcgttccatattggaccttgacctaaccaagtttaccacacagaaacaggtgtcttcactgttccaactatggaagagtgagcatggacgtgtctaccataaccacgaagaagaggcaaagagacttgagattttcaagaataacttgaactatatcagggacatgaatgcaaacagaaaatcaccccattct

SEQ ID NO: 122041 - DNA, 279 bp, Glycine max
gtacttccttacaatcaaaaccaacaacaactatggcaagttatcaaaagcactacgatgatcagggtcgcaaggttgacgagtatggcaacgttgagaagcaaaccgacgaatacggcaaccctgttcatgctgctagtgtcacctatgtagccaccagaactgctgctggtggttacagtgatgacattaataagcaacatgataccaccaatgcctacggcgtagacactggtagacagcattctagtggtggctacgatggtgacactaataaac

SEQ ID NO: 122042 - DNA, 283 bp, Glycine max
gttccactgcctacaaaaactaatttggtggaaactcccaaggaatggcaactggatctaccttgtgacaaaacttctcatgttctgtgcctaccaatctctcatcagttgtggtcaagacactagggatatgatccttttcttggtggaattcaaaaatatgccactcccatgatgcccctagatgaagaaattctttctaaggttgcacaagatatagttgaggaatggtttgattgtgttgatgaggaggattcctttgaggaagtttctttgagtgcag

SEQ ID NO: 122043 - DNA, 284 bp, Glycine max
acttattaacactttccttagttcaatatggggaagcccttcttcactctctctctttcttccctttgcttgctactcttgtcgagtgcatgctttgctattacctccagcaagttcaacgagtgccaactcaacaacctcaacgcgttggaacccgaccaccgcgttgagtccgaaggtggtcttattgaaacatggaactctcaacaccctgagctgcaatgcgccggtgtcactgtttccaaacgcaccctcaaccgcaacggcctccacttgccatctta

SEQ ID NO: 122044 - DNA, 275 bp, Glycine max
gttcaatatcctagtataccttaataaataatttaagatactatgatgagagcacggttcccattactgttgctgggacttgttttcctggcttcagtttctgtctcatttggcattgcttactgggaaaaagagaaccccaaacacaacaagtgtctccagagttgcaatagcgagagagactcgtacaggaaccaagcatgccacgctcgttgcaacctccttaaggtggagaaagaagaatgtgaagaaggtgaaattccacgaccacgacc

SEQ ID NO: 122045 - DNA, 274 bp, Glycine max
tctggaaatgcaagaagcttatcttgtcaatctcgtaaatgtgttacgagaattgtatttgcacagtccagaggaagctcgccaattgagaaggaaagctctctctcgtattgaatggctgcaaaaagctgatgtgactaccatagcacagattgaagagttccattcgatgcagaggatgatgaatgctcctgattcaaatgataatattgatctactgttgagcattgatttgttgggtttacaaggagcaggtaaagcttttccaaacaag

SEQ ID NO: 122046 - DNA, 278 bp, Glycine max
catggctctattattcttctactttttggttcttatttcctttgccttcacaaccattatagtacaaaaaataagaaagaaacccaagaaaactgatgacacaacttgtaaaataccccatggtcctagaaagctacctattataggaaatatatacaatctgctatgctctcaaccccatagaaaattaagagacctggccataaaatatggacccgtgatgcatcttcaacttggacaggtttcaactattgtcatttcatcccctgagtgtgcta

SEQ ID NO: 122047 - DNA, 277 bp, Glycine max
gagctgaattgtctgaacaagatatatttgtaatcccagcaggttatccagttgtggtcaacgctacctcagatctgaatttctttgcttttggtatcaatgccgagaacaaccagaggaacttccttgcaggttcgaaagacaatgtgataagccagatacctagtcaagtgcaggagcttgcgttccctgggtctgcaaaagatattgagaacctaataaagagccaaagtgagtcctactttgtggatgctcagcctcagcagaaagaggaggg

SEQ ID NO: 122048 - DNA, 277 bp, Glycine max
atatggggaagcccttcactctctctctttcttccctttgcttgctactcttgtcgagtgcatgctttgctattagctccagcaagctcaacgagtgccaactcaacaacctcaacgcgttggaacccgaccaccgcgttgagtccgaaggtggtttgattcaaacatggaactctcaacaccctgagctgaaatgcgccggtgtcactgtttccaaactcaccctcaaccgcaatggcctccacttgccatcttactcaccttatccccggatgat

SEQ ID NO: 122049 - DNA, 118 bp, Glycine max
ccttaaaaccggaaacaaaagcaatcgttacttgatttcaagaatctctcaatttcttcctacttctttgtgtacgatttcttaagggaaagaaaatcactctctgtgctggccacag

SEQ ID NO: 122050 - DNA, 270 bp, Glycine max
atcagtcatcaccatggccaagctagttttttccctttgttttctgcttttcagtggctgctgcttcgcttttagttccagagagcagcctcagataaaacgagtgccagatccaaaaactcaatgccctcaaaccggataaccgtatagagtcagaaggagggctcattgagacatggaaccctaacaacaagccattccagtgtgccggtgttgccctctctcgctgcaccctcaaccgcaacgcccttcgtagaccttccacacaac

SEQ ID NO: 122051 - DNA, 282 bp, Glycine max
accagttcaatatcctagtacaccgtattaaagaatttaagatatactatgatgagagcgcggttcccattactgttgctgggagttgttttcctggcatcagtttctgtctcatttggcattgcgtattgggaaaagcagaaccccagtcacaacaagtgcctccgaagttgcaatagcgagaaagactcctacaggaaccaagcatgccacgctcgttgcaacctaccttaaggtggaggaagaagaagaatgcgaagaaggtcaaattccacgaccacg

SEQ ID NO: 122052 - DNA, 281 bp, Glycine max
caagttcacaatcctcctcatctctcttctcttctgcatcgcccacacttgcagcgcctccaaatggcagcaccagcaagatagctgccgcaagcagctccagggggtgaacctcacgccctgcgagaagcacatcatggagaagatccaaggccgcggcgatgacgatgatgatgatgacgacgacaatcacattctcaggaccatgcggggaagaatcaactacataaggaggaacgaaggaaaagacgaagacgaagaagaagaaggacacatgcaga

SEQ ID NO: 122053 - DNA, 285 bp, Glycine max
aacttattaacactttccttagttcaatatggggaagcccttcttcactctctctctttcttccctttgcttgctactcttgtcgagtgcatgctttgctattacctccagcaagttcaacgagtgccaactcaacaacctcaacgcgttggaacccgaccaccgcgttgagtccgaaggtggtcttattgaaacatggaactctcaacaccctgagctgcaatgcgccggtgtcactgtttccaaacgcaccctcaaccgcaacgggctcaacttgccatctta

SEQ ID NO: 122054 - DNA, 270 bp, Glycine max
tctttgagtgcagcactcaatggtgttgagggtttggactatatggaaagaattcctcttgccacatctgagggttttcctcatgtgctttcacgcaaaaatggtgaaaaaggcaaaaggagatttgtttctggggatggtgaagagatgacattgattccgggaaccagtgttgaagaggcttacaacaagctaacagttgaacttgagaaaagtgttcctacattggttggcattgaatgtcccaaggatgaaaaacttcctcgtcgc

SEQ ID NO: 122055 - DNA, 271 bp, Glycine max
ctcgagccgcgattttgcaaccggttccctaatattgatttgtcatatgaggtgctggacagtgacaatgttcgggctggggaggttgtcactgtgctggtcactcttgagcgggatcttgagggaaggacagaagtaggacctgttgatgctcccaggtatccaaaagccaaggaagaagggtggtggctcattgttggtgataccaaaaccaatctgttgcttgccattaaacgggtttccctgcagcggaggttaaaagccaaactgg

SEQ ID NO: 122056 - DNA, 273 bp, Glycine max
gtgctgctgttggcttgacatcaagctatactccgactccattgttggaatctggtttgcaaaaagacagagggttaattgtggagtattttggaaggatgtcttacgttgctcataacgttaatcagccccaagagaaagatttgttggaaggaaatttttcctttgatattaaatctcgctctagattggaaaaagtttcctctacaaaagcacaatttgttagtggaaaaaccttcaaatatgatatagttggtgctggttcacattctt

SEQ ID NO: 122057 - DNA, 267 bp, Glycine max
ataaaattcttccaccaagttatgggtttccttgtgttgcttcttttctccctcttaggtctctcttctagttccagcatatcaactcatcgttccatattggaccttgacctaaccaagtttaccacacagaaacaggtgtcttcactgttccaactatggaagagtgagcatggacgtgtctaccataaccacgaagaagaggcaaagagacttgagattttcaagaataacttgaactatatcagggacatgaatgcaaacaga

SEQ ID NO: 122058 - DNA, 277 bp, Glycine max
gcaaaatgaccaagttcacaatcctcctcatctctcttctcttctgcatcgcccacacttgcagcgcctccaaatggcagcaccagcaagatagctgccgcaagcagctccagggggtgaacctcacgccctgcgagaagcacatcatggagaagatccaaggccgcggcgatgacgatgatgatgatgacgacgacaatcacattctcaggaccatgcggggaagaatcaactacataaggaggaacgaaggaaaagacgaagacgaagaagaaga

SEQ ID NO: 122059 - DNA, 268 bp, Glycine max
aacagtgataacaccattgaattttgattctagcaagcagagcttttgtcaattctctattgatcttcttggtggaggaattttagtggacaaaactggagattggatcacacttatacaaaattctccaattagtaacttgttgagagttgctgcttggaagaaaggctgtttaatggttaagattgtgatgtctgggaatgcagcagtcaaaaggagtgattgggcctcattggtacaagtgtttttaacaaacagcaacagtaca

SEQ ID NO: 122060 - DNA, 280 bp, Glycine max
  unsure (1)..(280): unsure at all n locations
atagttggtgcttattcacattctttagnatatttttctgaaaaggaagatcaagaaaaacccaaaaagattgatgccagattgagacaaagaatagatcctcaatacaatgaggttcaggctcagatggaaacaaatttgtttaaattgtctcttgatgatgttgaaactcctaaaggttccatgttggatcttaaaatttctcaatctaaaattgcacttcccaaaaacacagttggcggaaccattctgcgtagtgacctattggcaaattttttga

SEQ ID NO: 122061 - DNA, 280 bp, Glycine max
gaccaagccatggcgatgagaaccaaactttctttagctatctttttcttttttcttttagccttattttcaaacctagcctttggcaaatgtaaagaaaccgaggtagaagaagaagaccctgagctcgtaacatgcaaacaccaatgccaacagccacagcaatacactgagggtgacaagcgggtatgcttgcaaagatgtgacaggtatcatcgtatgaagcaagagcgagagaaacaaatccaagaggaaactcgtgagaagaaagaggaggaaa

SEQ ID NO: 122062 - DNA, 280 bp, Glycine max
gatcaacctcgcaagagccgcgaatggagatcgaaaaagacacaacccagaagacctagacaagaagaaccacgtgaaagaggatgcgagacaagaaacggggttgaggaaaatatctgcaccttgaagcttcacgagaacattgctcgcccttcacgcgctgacttctacaaccctaaagctggtcgcattagtaccctcaacagcctcaccctcccagccctccgccaattccaactcagtgcccaatatgttgtcctctacaagaatggaatttact

SEQ ID NO: 122063 - DNA, 271 bp, Glycine max
gcgtgaacaagaccaggaccaggacgaggacgaagatgaagatgaagatcaacctcgcaagagccgcgaatggagatcgaaaaagacacaacccagaagacctagacaagaagaaccacgtgaaagaggatgcgagacaagaaacggggttgaggaaaatatctgcaccttgaagcttcacgagaacattgctcgcccttcacgcgctgacttctacaaccctaaagctggtcgcattagtaccctcaacagcctcaccctcccagccctc

SEQ ID NO: 122064 - DNA, 270 bp, Glycine max
cttgaatataatactcagcatggctaagcttgttctttccctttgttttctgcttttcagtggctgctgcttcgctttcagtttcagagagcagccacagcaaaacgagtgccagatccaacgcctcaatgccctcaaaccggataaccgtatagagtcagaaggtggcttcattgagacatggaaccctaacaacaagccattccagtgtgccggtgttgccctctctcgctgcaccctcaaccgcaacgcccttcgcagaccttccac

SEQ ID NO: 122065 - DNA, 270 bp, Glycine max
gttcaatatcctagtataccttattaaagaatttaagatatactatgatgagagcgcggttcccattactgttgctggtagttgttttcctggcatcagtttctgtctcatttggcattgcgtattgggaaaagcagaaccccagtcacaacaagtgcctccgaagttgcactagcgagaaagactcctacaggaaccaagcatgccacgctcgttgcaacctccttaaggtggaggaagaagaagaatgcgaagaaggtcaaattccac

SEQ ID NO: 122066 - DNA, 275 bp, Glycine max
ggaagaggtgggcgtgggaatgggaattgacgttcatcttgttccttctgatgaggtgggcgtgggaatgggaattgacgttcatcttgttcctcatccgaaggaagagcgaaagcaagaggaagatgaggatgaggagcagcagcgagagagcgaagaaagtgaagattctgagttacgaagacataagaataagaacccttttctcttcggctctaacaggttcgaaactctcttcaaaaaccaatatggtcgcattcgcgtcctccagaggt

SEQ ID NO: 122067 - DNA, 276 bp, Glycine max
tgcagatagctttaaatttgagcttcaatcatcttcatggatcactgccccctgaattaggaaagctggacaaacttgtttctctggatgtttcaaacaatcggctatctggtaatatcccacctgagcttaagggaatgttgagcttgatagaggtgaacttctcaaataatctgttcggaggtcctgtgccaacatttgtaccatttcagaagagtcctagttcaagttatttgggcaataaagggctttgtggagagcctttgaactcttcat

SEQ ID NO: 122068 - DNA, 274 bp, Glycine max
tatcgagccgattcggctcgagcttgtactacaaatcagatgacacgcttagagaagatccggaactccaagcctgctggacagaactcgtagaggtgggtcatggagacaagaaaaatgagccatggtggcctaagatgcaaactcgtgaagagctagttgaagcttgcgctatcatcatatggactgcttcagcacttcatgcagctgttaattttggacagtatccctatggaggtttaatcttaaaccgtccaactcttagtaggcgatt

SEQ ID NO: 122069 - DNA, 276 bp, Glycine max
cctcaaaccggataaccgtatagagtcagaaggagggctcattgagacatggaaccctaacaacaagccattccagtgtgccggtgttgctctctctcgctgcaccctcaaccgcaacgcccttcgtagaccttcctacaccaacggtccccaggaaatctacatccaacaaggtaagggtatttttggcatgatatacccgggttgtcctagcacatttgaagagcctcaacaacctcaacaaagaggacaaagcagcagaccacaagaccgtca

SEQ ID NO: 122070 - DNA, 279 bp, Glycine max
actcatcaccatggccaagcttgttctttccctttgtttccttcttttcagtggctgcttcgctctgagagagcaggcacagcaaaatgagtgccagatccaaaagctgaatgccctcaaaccggataaccgtatagagtcggaaggtgggttcattgagacctggaaccctaacaacaagccattccagtgtgccggtgttgccctctctcgctgcacccttaaccgcaatgcccttcgtagaccttcctacaccaacggtccccaggaaatctacat

SEQ ID NO: 122071 - DNA, 277 bp, Glycine max
actagttcaatatcctagtataccttaataaataatttaagatactatgatgagagcacggttcccattactgttgctgggacttgttttcctggcttcagtttctgtctcatttggcattgcttactgggaaaaagagaaccccaaacacaacaagtgtctccagagttgcaatagcgagagagactcgtacaggaaccaagcatgccacgctcgttgcaacctccttaaggtggagaaagaagaatgtgaagaaggtgaaattccacgaccacga

SEQ ID NO: 122072 - DNA, 278 bp, Glycine max
tgaaaggacacacctgctgttggcttgttgttcaaggatggcaatttgtaagaaagatgtttggagagttgaatgtggaatcccttctggatttccgctcacagttatttgcaatagcatttttaatgagatgctcattagatatagctatgaaaaattactgcgccaggctaaagctccaagtatgtttttacaatctttcaaaaattttgtttctttgtgtgtgtatggtgatgataacttaattagtgttcatgaatatgtcaagccttacttta

SEQ ID NO: 122073 - DNA, 267 bp, Glycine max
ttctctccatttgtccttgaatataatactcagcatggctaagcttgttctttccctttgttttctgcttttcagtggctgctgcttcgctttcagtttcagagagcagccacagcaaaacgagtgccagatccaacgcctcaatgccctcaaaccggataaccgtatagagtcagaaggtggcttcattgagacatggaaccctaacaacaagccattccagtgtgccggtgttgccctctctcgctgcaccctcaaccgcaacgc

SEQ ID NO: 122074 - DNA, 266 bp, Glycine max
agaggttcttgcccattcttacaaccttcgacagagtcaagtgtctgagcttaagtatgaaggaaattggggtcctttggtcaaccctgagtctcaacaaggctcaccccgtgttaaagtcgcataaatgacaagcatgatggtgtgaggatgaggccatcttatgaaataataacaaataaataaattttgtatgataataaaaagtatggcccatgtaccatcccagcgagcctatgtttatatctgagtggcgttgtaccttt

SEQ ID NO: 122075 - DNA, 250 bp, Glycine max
cggctcgagcggctcgaggcatgctctagtcacagacaccgacacagatctgtcttccgaagcaggaactaaatatggctgacttgttggaatggtcaaagcaagataagaaacgaatgcttcatgtcgtctaccgtgttggtgaccttgatcgcaccatcaaattttacacagaatgtttaggaatgaagcttttgaggcaaagagatatcccagaggagaaatatgctaatgcttttcttggatttgg

SEQ ID NO: 122076 - DNA, 268 bp, Glycine max
ttccgcacttccaaaggttgctcttcctgttgctgcctctgttgttgttctttaatgccaacaagttcaatgtttgcttctccttcattaatcactagtaccactatggcctttgaattgaagtgtggcagaaacctagtcaagtgcaggagcttgcgttccctgggtctgcaaaagatattgagaacctaataaagagccaaagtgagtcctactttgtggatgctcagcctcagcagaaagaggaggggaacaagggaagaaaggg

SEQ ID NO: 122077 - DNA, 271 bp, Glycine max; identical to SEQ ID NO: 111542

SEQ ID NO: 122078 - DNA, 271 bp, Glycine max
ctcgagccgattcggctcgagaactcctaaaggttccatgttggaccttaaaatttctcaatctaaaattgcacttcccaagaacacagttggaggaactattctgcgtagtgatctattggcaaatactctgacagagggcaattttagagcaagtgttgatttgcagcgcactcatcgtattaaaggaatgattaaaatggtggccacagttggtattcctgagaatacaggtatatcattggcctgtgctatgaatagttcttttagg

SEQ ID NO: 122079 - DNA, 271 bp, Glycine max
gctagaatggaatttcgatgctcagtcatctcttttaccattctcttctctcttgctcttgcaggagagagccatgtccatgcatcgctacctgaggaagattattgggaagctgtttggccaaacactcccattcccactgcactgcgagagcttctaaagcctctccctgcacgtgttgaaatcgatgaactccctaagcaaattgatgatacacagtacccaaaaacattcttctataaagaagaccttcatccaggcaaaacaatga

SEQ ID NO: 122080 - DNA, 272 bp, Glycine max
catttgctcccagcactgagcttaaccgagcttcacaaagatgaatcgggaaaaattgatgaagatggccggttcggttagaactgggggaaagggcaccgtgagaagaaagaagaaggctgtccacaagacaacaaccacagatgacaaaaggcttcagagcaccctgaagagaataggggtgaatgccatcccggctattgaggaggtcaatatctttaaggatgacgtattatccagtttctaaatcccaaagttcaagcatccattgc

SEQ ID NO: 122081 - DNA, 272 bp, Glycine max
agaatagcattctttgcaccagctcctccccctatagaaagaggcattctcttaacacttcgggaagtgccctgggggaaagtcaattttcccatccacctatttaacacaagctggtgcagtttggagagattcaggaaaaagttgtattgaaattttcacaagaggaatttcttacagcttggtcaactcaggtgcgtcctgcaacaactctgttggctgatgggtgtccatatttgtatgcaatggtgcatgatagttcagtgtctaca

SEQ ID NO: 122082 - DNA, 272 bp, Glycine max
aacttgagaagccgcaaccccatctattccaacaactttggaaagttctttgagatcacccctgagaaaaacccacagcttcgggacttggatatcttcctcagttctgtggatatcaacgaaggagctcttcttctaccacacttcaattcaaaggccatagtgatactagtgattaatgaaggagatgcaaacattgaacttgttggcattaaagaacaacaacagaagcagaaacaggtagaggaacctttggaagtgcaaaggtacag

SEQ ID NO: 122083 - DNA, 263 bp, Glycine max
cactcttcttctcttgcggctagggttttagcgcagttcttctagatttaaggaagatgggtaaggaaaaggttcacatcagtattgtggtcattggccatgtcgactctgggaaatccactaccactggtcacctgatttacaagcttggaggcattgacaagcgtgttattgagaggtttgagaaggaagctgctgagatgaacaagaggtctttcaagtatgcctgggtgctggacaaacttaaggctgagcgtgaaaga

SEQ ID NO: 122084 - DNA, 276 bp, Glycine max
tggatcttaaaatttctcagtctaaaattgcacttcccaagaacacagttggaggaactattctgcgtagtgatctattggcaaattttctgacagagggcaattttagagcaagtgttgatttgcagcgcactcatcgtattaaaggaatgattaaaatggtggccacagttggtattcctgagaatacaggtatatcattggcctgtgctatgaatagttcttttagggggcgtgccagttctgatatttacaccatctgctctcaagactgtg

SEQ ID NO: 122085 - DNA, 265 bp, Glycine max
aaaagcttgtttgtaagaatggcttccggtgaacagaaattccctcctcaacaacaacaaacacagcctgggaaggagcatgctatgactccagtaccccaattcactagccctgactacaagccttcaaataaacttcaagggaagattgcattagtcactgggggtgattctgggattggacgagcggtgtgtaacttgtttgccttagaaggtgctaccgtggccttcacgtatgtgaaggggcatgaggacaaggacgcga

SEQ ID NO: 122086 - DNA, 258 bp, Glycine max
  unsure (1)..(258): unsure at all n locations
attttgataaaccgcgatcacaggttgccgcaccttaaaaccggaaacaaaagcaatcgttacttgatttcaagaatttctcaatttctttctacttctttgtgtacgatttcttaagggaaagaaaatcactctctgtgctggccacagacttcgtgaatcattttcttttccacttttagtttatttactgtgcnatctcctatttgatataggacttcgtgtcagatttaaacttcttctgtttctttctcagtt

SEQ ID NO: 122087 - DNA, 267 bp, Glycine max
aaaagcattgcaccaactatgttgcagttcgtagtatttttgttgcgcctttcagaggcggaaggcccattcgggtggttacatttccgaataccattgtgcagattgaaccagacatgaattcaaggtttcagcttttgagtaccactaccaatggtgattttgttcaaggaaaagatctcgcaatggttaaagttaatgtagcatgtgctgctgttggcttgacatcaagttacactccaactccattgttggaatctggtttgc

SEQ ID NO: 122088 - DNA, 269 bp, Glycine max
attttgataaaccgcgatcacaggttgccgcaccttaaaaccggaaacaaaagcaatcgttacttgatttcaagaatctctcaatttcttcctacttctttgtgtacgatttcttaagggaaagaaaatcactctctgtgctggccactgacttcgtgaatcattttcttttccactcttagtataaattatgaacactctcctatttgatataggacttcgtgtcagatttaaacttcttctgtttctttctcagttctctgcttaat

SEQ ID NO: 122089 - DNA, 269 bp, Glycine max
aattgggttttcactgatcaagcactacctgcagatcttatcaagagaggagtggcaattaaggatccatcaaccccacatggagttcgtcttctgatagaggactatccttatgccgctgatggactggagatatgggctgcaattaagacatgggttcaagaatatgtgcccttgtactatgcaagagatgatgatgtcaaaaatgattctgaactccaacattggtggaaagaagctgtagagaaaggccatggtgatttgaaaga

SEQ ID NO: 122090 - DNA, 266 bp, Glycine max
caaacagcaacagtacagagcattttgatgcatgtaagtggacaaaatcagaaccacattcctgggaattgatcttcccaatagaggtatgtggtcctaataatggttttgaaatgtggagttctgagtgggcaaatcaaacttcatggcatttgagtttccttattgacaatcccaaacagtctacagtttttgatattctcttgggaatcactcaagattttgaaattgctggtaatactcttatgccagctttttctgttcca

SEQ ID NO: 122091 - DNA, 265 bp, Glycine max
aaatggtggccacagttggtattcctgagaatacaggtatatcattggcctgtgctatgaatagttcttttagggggcgcgccagttctgatatttacaccatctgctctcaagactgtgaattgtggaatcctgcttgcacaaaagcaatgactatgtcatttaatccaaacccgtgttctgatgcatggagtttggaatttctgaagcgtactggatttcattgcgatatcatttgtgtcactggatggactgccaccccaat

SEQ ID NO: 122092 - DNA, 275 bp, Glycine max
cattggtccttaaacactcatcagtcatcaccatggccaagctagttttttccctttgttttctgcttttcagtggctgctgcttcgctttcagttccagagagcagcctcagcaaaacgagtgccagatccaaaaactcaatgccctcaaaccggataaccgtatagagtcagaaggagggctcattgagacatggaaccctaacaacaagccattccagtgtgccggtgttgccctctctcgctgcaccctcaaccgcaacgcccttcgtaga

SEQ ID NO: 122093 - DNA, 272 bp, Glycine max
accgcaatgcccttcgtagaccttcctacaccaacggtccctaggaaatctacatacaacaaggtaatggtatttttggcatgatattcccgggttgtcctagcacttatcaagagccgcaagaatctcagcaacgaggacgaagccagaggccccaagaccgtcaccaaaaggtacatcgcttcagagagggtgatttgatcgcagtgcctactggtgttgcatggtggatgtacaacaatgaagacactcctgttgttgccgtttctatt

SEQ ID NO: 122094 - DNA, 275 bp, Glycine max
gtgcattcttctctcgctctctgccttccatcacactcggcattcactttcccaagatagtagaagatggcagacactgaggatattcaacctcttgtttgtgccaatggaacaggaatggttaacgctggatttactggagctgatgccccatgttctgtgttttccagcattgtaggttcttctcgtcacactggtgtgatggttggcatgggccaaaaagatgcatatgttggtgatgaggcacaatctaagaggggtattttgactctcaa

SEQ ID NO: 122095 - DNA, 285 bp, Glycine max
taatggttaagattgtgatgtctgggaatgcagcagtcaaaaggagtgattgggcctcattggtacaagtgtttttaacaaacagcaacagtacagagcattttgatgcatgtaagtggacaaaatcggaaccacattcctgggaattgatcttccaatagaggtatgtggtcctaataatggttttgaaatgtggagttctgagtgggcaaatcaaacttcatggcatttgagtgtccttattgacaatcccaaacagtctacagtttttgatattctcttggg

SEQ ID NO: 122096 - DNA, 253 bp, Glycine max
tgaaactcctaaaggttccatgttggatcttaaaatttctcaatctaaaattgcacttcccaaaaacacagttggaggaaccattctgcgtagtgacctattggcaaattatttgacagaggcaattttagagcaagtgttgatttgcagcgcactcatcgtatcaaaggaatgattaaaatggtggccacagttggtattcctgatgatacaggtatagcattggcctgtgctatgaatagttcttttaggg

SEQ ID NO: 122097 - DNA, 284 bp, Glycine max
ctgtgatgacaatagcatttgaatttgcatttgaaagccatatgcaagagcatgtaacatctatggcacgccaatatgttcggagcattatatcatcagtccaaagggtagcattagcactttctccttctcatttgagttcacatgcagggttaggtcaccattgggtactcctgaagcacaaacccttgctcattggatctgcaacagttataggtttgtcaaatttactgtctttgcatactgaggttgaggatcatgcaatgcattttaccctgtgcgat

SEQ ID NO: 122098 - DNA, 284 bp, Glycine max
aatttttatccctatttggattttattttatactgttatgttatccatggcttctgcatatgttgagtaccgttgctttgttggtgggctcgcttgggccacagacgatcatgccttggagaaagccttctctcactacggcaacatcgttgatcgaaggtccgtttgttgcagccatcgcacacgatcccgttctgatctctgatctttttccgttacttgatctatgatacttcttcttcttcttcttatataattctcttttattactcacgccaataggt

SEQ ID NO: 122099 - DNA, 285 bp, Glycine max
gtcacgaagatgatcgaggtggtgttgaacgatcgattggggaagaaggtgcgcgtgaagtgcaacgacgatgacaccatcggcgacctgaagaagctggtggcggctcagacgggcacaagagccgacaagatccgcatccagaagtggtaaccatatacaaggatcacatcactctcaaggattacgagatccacgacggcatgggtctcgaactctactacaactaaacacaaggtgtgttttatgcatgatatattactatgatctgggaatgggatgagg

SEQ ID NO: 122100 - DNA, 281 bp, Glycine max
cttgttgttcaaggatggcaatttgtaagaaagatgtttggagagttgaatgtggaatcccttctggatttccgctcacagttatttgcaatagcatttttaatgagatgctcattagatatagctatgaaaaattactgcgccaggctagactccaagcatgtttttacaatccttcaaaaattttgtttctttgtgtgtgtatggtgatgataacttaattagtgttcatgaatatgtcaagccttactttagtggttctaaattgaaaagctttctag

SEQ ID NO: 122101 - DNA, 284 bp, Glycine max
gtgaagagcgaagagaatggctcccaagggtttaatctttttggctgtgttatgcttctcagcactgtcactgagtcgttgtcttgcggaggataatggacttgttatgaacttctacaaggaatcatgccctcaggctgaagacatcatcaagaacaagtcaagcttctctacaagcgccacaagaacactgctttctcctggctcagaaacatcttccatgactgtgctgttcagagttgtgatgcttcactgttgctggactccacaagaaggagcttgtc

SEQ ID NO: 122102 - DNA, 283 bp, Glycine max
tctctccattgtctttgaacactcatcaccatggccaagcttgttctttccctttgtttccttcttttcagtggctgcttcgctctgagagagcaggcacagcaaaatgagtgccagatccaaaagctgaatgccctcaaaccggataaccgatagagtcggaaggtgggttcattgagacctggaaccctaacaacaagccattccagtgtgccggtgttgccctctctcgctgcacccttaaccgcaatgcccttcgtagaccttcctacaccaacggtcc

SEQ ID NO: 122103 - DNA, 247 bp, Glycine max
gtgttgcttcttttctccctcttaggtctctcttctagttccagcatatcaactcatcgttccatattggaccttgacctaaccaagtttaccacacagaaacaggtgtcttcactttccaactatggaagagtgagcatggacgtgtctaccataaccacgaagaagaggcaaagagacttgagattttcaagaataacttgaactatatcagggacatgaatgcaaacagaaaatcaccccattc

SEQ ID NO: 122104 - DNA, 282 bp, Glycine max
gaagatatatacatatatacgagagagtgagtaatcgagaaagagaagaagcatatatatcaaaatggctgcagagatggagagggagtcattgataactgaagctcctaatgcaccagttactgcacagagaagggtcagaaatgacttagaaaattctctaccaaaaccatacttgccaagagcattgaaagctcctgatacgggtcacccaaatggaacagcaggccacaggcaccacaacttatctgttcttcagcagcattgtgctttttttgatca

SEQ ID NO: 122105 - DNA, 280 bp, Glycine max
cttctcttgcggctagggttttagcgcagttcttctagatttaaggaagatgggtaaggaaaaggttcacatcagtattgtggtcattggccatgtcgactctgggaaatccactaccactggtcacctgatttacaagcttggaggcatgacaagcgtgttattgagaggtttgagaaggaagctgctgagatgaacaagaggtctttcaagtatgcctgggtgctggacaaacttaaggctgagcgtgaaagaggaatcaccattgatattgctttgt

SEQ ID NO: 122106 - DNA, 282 bp, Glycine max
ctcttcctcaccgattgctagaatggaatttcgatgctcagtcatctcttttaccattctcttctctcttgctcttgcaggagagagccatgtccatgcatcgctacctgaggaagattattgggaagctgtttggccaaacactcccattccactgcactgcgagagcttctaaagcctctccctgcaggtgttgaaatcgatgaactccctaagcaaattgatgatacacagtacccaaaaacattcttctataaagaagaccttcatccaggcaaaaca

SEQ ID NO: 122107 - DNA, 285 bp, Glycine max
aaaagtttccttgacaatctaattctgcaaaaatggcaagcaataaggagtctaagttcccagcacagagccagaaaactcagccaggaaaagaacatgtaatgaatccactcccacaagccacaaatcctgatcacaaggccgccaataaactcagggaaaggtggcgttggtgacaggaggtgactcaggaattggcagagcggtttgcctgtgtttcgcaaaagagggtgcaaccgtggcctttacatacgtaaagggccatgaggacagggataaagatga

SEQ ID NO: 122108 - DNA, 285 bp, Glycine max
aaaatgaccaagttcacaatcctcctcatctctcttctcttctgcatcgcccacacttgcagcgcctccaaatggcagcaccagcaagatagctgccgcaagcagctccagggggtgaacctcacgccctgcgagaagcacatcatggagaaatccaaggccgcggcgatgacgatgatgatgatgacgacgacaatcacattctcaggaccatgcggggaagaatcaactacataaggaggaacgaaggaaaagacgaagacgaagaagaagaaggacacatgc

SEQ ID NO: 122109 - DNA, 280 bp, Glycine max
actagttcaatatcctagtataccttaataaataatttaagatactatgatgagagcacggttcccattactgttgctgggacttgttttcctggcttcagtttctgtctcatttggcattgcttactgggaaaaagagaaccccaaacaaacaagtgtctccagagttgcaatagcgagagagactcgtacaggaaccaagcatgccacgctcgttgcaacctccttaaggtggagaaagaagaatgtgaagaaggtgaaattccacgaccacgaccac

SEQ ID NO: 122110 - DNA, 281 bp, Glycine max
tggtggtaccacagaacttcgtggtggcggacaagccggagaacaaggattcgaatacatagtattcaagacacaccacaacgcagtcactagctacttgaaggatgtgtttagggcaattccctcagaggttcttgcccattcttacaacttcgacagagtcaagtgtctgagcttaagtatgaaggaaattggggtcctttggtcaaccctgagtctcaacaaggctcaccccgtgttaaagtcgcataaatgacaagcatgatggtgtgaggatgagg

SEQ ID NO: 122111 - DNA, 282 bp, Glycine max
cggctcgaggcatgaagaaattcagaatgaaaaacatgaggaagaagaagatgaacatattgaagaggatgaagaaactaagcatgatcatgaagaacaacaagatggaaacaagaatgaaactgaagaacgtgaagagaacaagcatgaggcagactacaaaggggagaagaaaataagcatggagcagaagaccaggaggaagatgtggaagatgtaggaagaggaggaggagacgatgatatcgatgaaaatgatcaagagaaatcagagatggatact

SEQ ID NO: 122112 - DNA, 280 bp, Glycine max
caactaacaataattccttcacttgcagaacttagttctctgttgcatcatcatcatcttcattagtgttagccctaaacttcaccttcaaccatgaccacagtgccaccacacagtgtccaagtgcacacaacaacacacctatacgatccggcgtcgtcccgccggctcgttttgaggcgccgcgttacgaagccggcatcaaggcgccctcttccatttaccattccgagagaggtccgacgacctctcaggttctcgcagttgtcgccggccttcc

SEQ ID NO: 122113 - DNA, 277 bp, Glycine max
gcaagagtctctaaaatatcagcaagagcaaggaggtcatcaaagccagaaaggaaagcatcagcaagaagaagaaaacgaaggatgcagcatattgagtggcttcaccctggaattcttggaacatgcattcagcgtggacaagcagaagcgaaaaacctacaaggagagaacgaaggggaagacaagggagccattgtgacagtgaaaggaggtctgagcgtgataaaaccacccacggacgagcatcaacaaagaccccaggaagaggaagaag

SEQ ID NO: 122114 - DNA, 260 bp, Glycine max
agggagtctgcattcaatattcagtttgaatgggacgaaagcatgggaatccccggtgcgttttacataaagaactacatgcaagttgagttttacctcaagagtttgactcttgaagacgttccaaaccaaggaaccattcgctttgttgcaactcatgggtttataacactaaactttacaaaagcgtgcgcattttctttgccaaccatacatatgttccaagtgagacaccagcagcacttgttggggtacagaga

SEQ ID NO: 122115 - DNA, 282 bp, Glycine max
tacacacacacacacacactaagaataatggcttctatcctccactactttttagccctctctctttctttctctttccttttcttcttatccgactccgtccccattccccaacaccacactaaccctacaaaacctataaaccttctggtctacccgttcaaaatgatgcttccacagggctccattgggccaacctccaaaaaaggacccctctaatgcaagtaccagtcctggtggacctcaatggaaaccacttgtgggttaactgtgagcaacact

SEQ ID NO: 122116 - DNA, 287 bp, Glycine max
caaaaccaaaacactcaagttaacttcaacacctttaattttctgaacgaaattcagccacagaatatcaaagggagcgaagatgagtcaggagcagccaaggcgcccccaaggccaagaccccatcaaatacggcgacgtttttgacgtctacgtgaccttgcacagatgcccattgcaccggaagatgctgccatgatgcaaagcgcggaagctcgagtactcggaaaaacccaacccggcggacttcttccgtcatgcaatccgccgccacaaggaatgaacag

SEQ ID NO: 122117 - DNA, 277 bp, Glycine max
aggaaatagtatcttcgtttgttcaatatgtttggttcatcaggcatggcacaggaatctggtatgttcatggttagccagacaattggcagtgttttgtgctgcaaatgtggaattccaatgcaacccaatgctgctaatatgtgtgcaagtgtctgcgatcggaagttgatattacagaaggactgctgaagcgtcttgtgctggtgcattgccctgagtgtgagagttacttgcagccaccaagaagttgggtcaagctgcagctggaatcaaa

SEQ ID NO: 122118 - DNA, 281 bp, Glycine max
ctcgagccgggcactgctttttgaagtccagtcctcaccattctgtgtgcatcaaaaagagacatcaaaaggaatgtttggtgttcctaaacctgggcagaaaaggaaatttatggaagtaagcaagcattacgtggcccatgaaaacataagatcggtgatagaaatgattcagttagacttacaaatttcttgatgcctccaagttccggacccagaggatggaaaaatagttccaaaaatgatgccaaagagaaacatggagccgactccaagcccaa

SEQ ID NO: 122119 - DNA, 280 bp, Glycine max
agctagttgaagcttgcgctatcatcatatggactgcttcagcacttcatgcagctgttaattttggacagtatccctatggaggtttaatcttaaaccgtccaactcttagtaggcgattcatgcctgagaaaggttctgctgagtatgaggagctgaggaagaatccccagaaggcttacttgaagactattacaccaaagtttcagacccttattgacctttctgttatagaaatcttgtcaaggcatgcatctgatgaggtgtaccttggggagag

SEQ ID NO: 122120 - DNA, 276 bp, Glycine max
ctcgagccgatttgagtttccttattgacaatcccaaacagtctacagtttttgacattctcttgggaatttctcaagattttgaaattgctggtaatactcttatgccagctttttctgttccacaggctactgccagatcttctgaaatgcggaatcctctgcatgatctggaatttgtgttttctttcatttgtccgtttgtttaattcaataaaggaaattaggcatgaccctcttgttgagtatgctctgcctatttgaaaatttccacac

SEQ ID NO: 122121 - DNA, 277 bp, Glycine max
tagcatttggaaatttggctgatgacaccatcaattttgaggcttttccccacaagctggtgcatattggagagattcaggaaaaagttgtattgaaattttcacaagaggaatttcttacagcttggtcaactcaggtgcgtcctgaacaactctgttggctgatgggtgcccatatttgtatgctatggtgcatgatagttcagtgtctacaataccaggtgattttgtcattggtgttaagttgacaaccataaacaatatgtgtgcatatggg

SEQ ID NO: 122122 - DNA, 279 bp, Glycine max
taaaattcttccaccaagttatgggttcccttgtgttgcttcttttctccctcttaggtctctcttctagttccagcatatcaactcatcgttccatattggaccttgacctaaccaagtttaccacacagaaacaggtgtcttcactttccaactatggaagagtgagcatggacgtgtctaccataaccacgaagaagaggcaaagagacttgagattttcaagaataacttgaactatatcagggacatgaatgcaaacagaaaatcaccccattc

SEQ ID NO: 122123 - DNA, 109 bp, Glycine max
gtcactagctctgtgcattcttctctcgctctctgccttccatcacactcggcattgcctttcccaagatagtagaagatggcagacactgaggatattcaacctcttg

SEQ ID NO: 122124 - DNA, 250 bp, Glycine max
tagtatacctttataaataatttaatatactatgatgagagcacggttcccattactgttgctggtacttgttttcctggcttcagtttctgtctcatttggcattgcttactgggaaaaagagaaccccaaacacaacaagtgtctccagattgcaatagcgagagagactcgtacaggaaccaagcatgccacgctcgttgcaacctccttaaggtggagaaagaagaatgtgaagaaggtgaaattc

SEQ ID NO: 122125 - DNA, 275 bp, Glycine max
cttaattattaacacttccttagttcaatatgggtaagcccttcactctctctctttcttccctttgcttgctactcttgtcgagtgcatgctttgctattagctccagcaagctcaacgagtgccaactcaacaacctcaacgcgtggaacccgaccaccgcgttgagtccgaaggtggtttgattcaaacatggaactctcaacaccctgagctgaaatgcgccggtgtcactgtttccaaactcaccctcaactgcaatggcctccacttgc

SEQ ID NO: 122126 - DNA, 275 bp, Glycine max
ctatgtcatttaatccaaacccgtgttctgatgcatggagtttggaatttttgaagcgtaccggatttcactgtgatatcatttgtgtcactggatggactgccaccccaatgcaggatgttcaggttacaattgattggtttattcctctcaggaatgtgttcccaggacttattgtgttttaaatccacaaaatccttttgtgttaaataggtggatggggaaactgactttcccccagggcacttcccgaaatgttaagagaatgcctcttt

SEQ ID NO: 122127 - DNA, 277 bp, Glycine max
gaagagcactagcttgttcgctatctttctactttgcgccttcacctcatacctaccttccgccaccgcccaggacgtgctcgacgtggatggcgatccgattcggaacggtttcatatactacgttttgccggcaataagaggaacggtggcggaatagaacgagccgcactcgggaaagacacttgccctatcactgtagtgcaatctcccaatccaaactctaaggggttagaaattaagtttgaatctgcataccccgcctattacataaacg

SEQ ID NO: 122128 - DNA, 181 bp, Glycine max
attttgataaaccgcgatcacaggttgccgcaccttaaaaccggaaacaagagcaatcgtgacttgatttcaagaatcgctcaatttcttcctacttctttgtgtacggtttcttaagggaaagaaaatcactctctgtgctggcacagacttcgtgaatcatgttctgttccacacaaca

SEQ ID NO: 122129 - DNA, 277 bp, Glycine max
ccttgctctatactacacagtacacacactagaagaataatggcttccatcctccactactttttagccctctctctttcttgctcttttcttttcttcttatccgactcagtcacccctacaaaaccaataaaccttgttgttctacccgttcaaaatgatggttccacagggctccattgggccaacctccaaaaaagaacccctctaatgcaagtaccagtcctggtggacctcaatggaaatcacttgtgggttaactgtgagcagcagtact

SEQ ID NO: 122130 - DNA, 282 bp, Glycine max
gccagaaaggaaagcaacaagaagaagaaaacgaaggaagcaacatattgagtggcttcgcccctgaattcttgaaagaagcgttcggcgtgaacatgcagatagtgagaaacctacaaggtgagaacgaagaggaggatagtggagccattgtgacagtgaaaggaggtctaagagtcacagctccagccatgaggaagccacagcaagaagaagatgatgatgatgaggaagagcagccacagtgcgtggagacagacaaaggttgccaacgccaaagca

SEQ ID NO: 122131 - DNA, 277 bp, Glycine max
caacaatgaagacactcctgttgttgccgtttctattattgacaccaacagcttggagaaccagctcgaccagatgcctaggagattctatcttgctgggaaccaagagcaagagtttctaaaatatcagcaagagcaaggaggtatcaaagccagaaaggaaagcatcagcaagaagaagaaaacgaaggaggcagcatattgagtggcttcaccctggaattcttggaacatgcattcagcgtggacaagcagatagcgaaaaacctacaaggag

SEQ ID NO: 122132 - DNA, 272 bp, Glycine max
caaaaccaaaacactcaagtgaacttcaacacctttaattttctgaacgaaattcagccacagaatatcaaagggagcgaagatgagtcaggagcagccaaggcgcccccaaggccaagaccccatcaaatacggcgacgttttgacgtctacggtgaccttgcacagatgcccattgcaccggaagatgctgccatgatgcaaagcgcggaagctcgagtactcggaaaaacccaacccggcggacttcttccgtcatgcaatccgccgcc

SEQ ID NO: 122133 - DNA, 270 bp, Glycine max
gacaaagtgttgttggtgatcttaaacttcttactgatgggaagttgtatgagggtaagcatattcctgtatctaatattagtgcaggggaaaatcatgtagttcaaatacccttaatggcacaggaggaaattctgtcttcagtgcaagtgatttcagagctgcaatggtgagtaaaaatagcaaacctcaagctactgcaatgcatgtgggagctatagaaattatcattgatagtttcgcaagtcctgattgcaacatagttggtgc

SEQ ID NO: 122134 - DNA, 271 bp, Glycine max
taagaaatgaagagtactatcttctttgctctctttctagtttgtgccttcaccatctcatacctgccttcagccaccgctcagttcgtgctcgacactgatgatgatcctcttcaaaacggtggcacatactatatgttgcagttatgagaggaaagggcggtggaatagaagtagattcaactggaaaagaaatatgccctctcactgttgtgcaatcacccaatgagctcgataaggggattggactagtctttacatctccattaca

SEQ ID NO: 122135 - DNA, 270 bp, Glycine max
tggggaacaactatatgatcctgttagaaatactgtgactgttgtttatgaggaatatagaaatcaatgtgcagccaattctttgagctcgaaaggaatgtttcaactgatccaaagaaaaggttcttcaaggaatctgatgctcttgttaatgatgatggatctgtggcaaaggcttggcctgttaatttagttgactgtaatgggaagcctgtatggtgccatggacctgagaatggagttggacatccaatgtatggtcccttaaga

SEQ ID NO: 122136 - DNA, 273 bp, Glycine max
gagtgagagcactaatccatttctctcctttctttcactctcttcttctcactgatccgcattgccgttcaaagtggtcttatttgaaaaacacttgggcgttggtgcaaatgtttgcttcgttaattttctctggagacgacggctcactgagaaaacaatttttacttgcagagatttggacatcttggttgtttattatacaatagcaactcaatttagaaaatttctaccgcattacattaggtggcatctgtataccttgttgatcta

SEQ ID NO: 122137 - DNA, 274 bp, Glycine max
caaacttattaacactttccttagttcaatatggggaagcccttcttcactctctctctttcttccctttgcttgctactcttgtcgagtgcatgctttgctattacctccagcaagttcaacgagtgccaactcaacaacctcacgcgttggaacccgaccaccgcgttgagtccgaaggtggtcttattgaaacatggaactctcaacaccctgagctgcaatgcgccggtgtcactgtttccaaacgcaccctcaaccgcaacggcctcca

SEQ ID NO: 122138 - DNA, 271 bp, Glycine max
acatagtagtgttggtgggttgcaaagatgcttgggggtcttctccataggggtcataagataaaagggacagtggtgttgatgcgcaagaatgtgttggacgtgaatagcgtaaccagcgttgggggaattattggtcaaggtctcgacttagttggctcaacactcgatactcttactgccttcttgggccgatccgtgtctctccagcttattagtgctaccaaagctgatgccaacggaaaagggaaacttggaaaggctacctttt

SEQ ID NO: 122139 - DNA, 271 bp, Glycine max
tgctcgagccgctcgagccgctcgagcggtcgacttaattattaaagcttccttagttcaaagcggggaagcccttcactctctctcttactaccctttgattgctactcttgtcgagtgcatgctttgctattagctccacaagctcaacgagtgccaactcaacaacgtcaacgcgttggaacccgaccaccgcgttgagtccgaaggtggtttgattcaaacatggaactctcaacaccctgagctgaaatgcgccggtgtcactgtt

SEQ ID NO: 122140 - DNA, 272 bp, Glycine max
ttcttcatagcatttggaaatttggctgatgacaccatcaattttgaggcttttccccacaagctggtgcagtttggagagattcaggaaaaagttgtattgaaattttcacaagaggaatttcttacagcttggtcaactaggtgcgtcctgcaacaactctgttggctgatgggtgcccatatttgtatgctatggtgcatgatagttcagtgtctacaataccaggtgattttgtcattggtgttaagttgacaaccataaacaatatg

SEQ ID NO: 122141 - DNA, 276 bp, Glycine max
aagttctctccattgtcgatgaacactcatcaccatggccacagcctgtacattccctttgcaatccttctgattacagtggctgcttcgctctgagactgcaggcacagcatgatgagtgccagatccagaagctgaatgccctcaaacggataaccgtatacagtcggaaggtgggttcattgagacctggaaccctaacaacaagccagtccagtctgccggtgttgcactctctcgctgcacccttaaccgcaatgcccttcgtagaccttc

SEQ ID NO: 122142 - DNA, 270 bp, Glycine max
ggttaagattgtgatgtctgggaatgcagcagtcaaaaggagtgattgggcctcattggtacaagtgtttttaacaaacagcaacagtacagagcattttgatgcatgtaagtggacaaaatcggaaccacattcctgggattgatcttcccaatagaggtatgcggtcctaataatggttttgaaatgtggagttctgagtgggcaaatcaaacttcatggcatttgagtttccttattgacaatcgcaaacagtctacagtttttgac

SEQ ID NO: 122143 - DNA, 267 bp, Glycine max
cacacaactactacaagtacttccttacaatcaaaaccaacaacaactatggcaagttatcaaaagcactacgatgatcagggtcgcaaggttgacgagtatggcaacgttgagaagcaaaccgacgaatacggcaaccctttcatgctgctagtgtcacctatgtagccaccagaactgctgctggtggttacagtgatgacattaataagcaacatgataccaccaatgcctacggcgtagacactggtagacagcattctagtg

SEQ ID NO: 122144 - DNA, 270 bp, Glycine max
caagcacaatgcatcatctcaaagaaattaagagagttttttttgttcctcactgaccaagccatggcgatgagaaccaaactttctttagctatctttttcttttttcttttagccttattttcaaacctagcctttggaaatgtaaagaaaccgaggtagaagaagaagaccctgagctcgtaacatgcaaacaccaatgccaacagccacagcaatacactgagggtgacaagcgggtatgcttgcaaagatgtgacaggtatcatc

SEQ ID NO: 122145 - DNA, 267 bp, Glycine max
gtcggtaactctttcttttcttttctttctttctccgatcgcatcgctcgcaaccacaatcatgccttcccgaagaagaactctcttgaaggtcatcattctcggtgacagcggggtggggaagacgtctttgatgaaccgtatgtgaataagaagtttagtaatcagtacaaggcaaccattggagcggattttttaaccaaagaagtgcaatttgaagataggcttttcaccttacagatttgggatacagctggccaagaaaga

SEQ ID NO: 122146 - DNA, 272 bp, Glycine max
atttctatgcaggtcattgatgattttgctaagtttaatctgcttctcaaagtcaagaggggacagaaggaagagaagtttaaggtagaggtacacaagaataaccaaggggggttccatctaaatcagatggaacaagatcttcctaattctgatctgaagtttggtcaccctagcaatattgttcttatctatgtctagtgcttacccctttctctgtgccttggcaaataagtagttttacaatgtgtgtatccctttattaactggga

SEQ ID NO: 122147 - DNA, 274 bp, Glycine max
agctggtgcagtttggagagattcaggacaaagttgtattgaaattttcacaagaggaatttcttacagcttggtcaactcaggtgcgtcctgcaacaactctgttggctgatgggtggccatatttgtatgcaatggtgcatatagttcagtgtctacaataccaggtgattttgtcattggtgtcaagttgacaaccataaacaatatgtgtgcatatgggctcaatcctggtatttcaggttctcgtcttttgggcaccattcctcagtcc

SEQ ID NO: 122148 - DNA, 252 bp, Glycine max
gttcctcactgaccaagccaaggcgatgagaaccaaactttctttagctatctttttcttttttcttttagccttattttcaaacctagcctttggcaaatgtaaagaaaccgaggtagaagaagaagaccctgagctcgtaacatgcaaacaccaatgccaacagccacagcaatacactgagggtgacaagcgggtatgcttgcaaagatgtgacaggtatcatcgtatgaagcaagagcgagagaaaca

SEQ ID NO: 122149 - DNA, 262 bp, Glycine max
agcaaagcaatggctacttcaaagttgaaaacccagaatgtggttgtatctctctccctaaccttaaccttggtactggtgctactgaccagcaaggcaaactcagcggaaactgtttctttcagctggaacaagttcgtgccgaagcaaccaaacatgatcctccaaggagacgctattgtgacctcctcgggaaagttacaactcaataaggttgacgaaaacggcaccccaaaaccctcgtctcttggtcgcgccctct

SEQ ID NO: 122150 - DNA, 260 bp, Glycine max
tttgaaattttgataaaccgcgatcacaggttgccgaaccttaaaaccggaaacaaaagcaatcgttacttgatttcaagaatctctcaatttcttcctacttctttgtgtacgatttcttaagggaaagataatcactctctgtgctggacacagacttcgtgaatcattttcttttccactcttagtttatttgctgaacactctcctatttgatataggacttcgtgtcagatttaaacttcttctgtttctttctc

SEQ ID NO: 122151 - DNA, 262 bp, Glycine max
gttcaatatcctagtataccttaataaataatttaagatactatgatgagagcacggttcccattactgttgctgggacttgttttcctggcttcagtttctgtctcatttggcattgcttactgggaaaaagagaaccccaaacacaacaagtgtctccagagttacaatagcgagagagactcgtacaacaacaaggcatgccacgctcgttgcaacctccttaaggtggagaaagaagaatgtgaagaaggtgaaattc

SEQ ID NO: 122152 - DNA, 262 bp, Glycine max
cttagacaaagtgttgttggtgatcttaaacttcttactgatgggaagttgtatgagggtaagcatattcctgtatctaatattagtgcaggggaaaatcatgtagttcaaatacccttaatggcacaggaggaaattctgtcttctagtgcaagtgatttcagagctgcaatggtgagtaaaaatagcaagcatcaagctactgcaatgcatgtgggagctatagaaattatcattgatagtttcgcaagtcctgattgca

SEQ ID NO: 122153 - DNA, 246 bp, Glycine max
aaatggagagggagtccttgataactgaagctcctaatgcaccggttactgcacagagaagggtcagaagtgacttggaaaattctctaccaaaaccatcaaagccataatttttttcatgtgacacgttcagagcattgaaagctcctgataagggtcacccaaatggaacaacaggcccaaaggcaccacaacttatctgctctccagcaacattgtgctttttttgatcaagatgacaatgga

SEQ ID NO: 122154 - DNA, 245 bp, Glycine max
agtataccttagtagataatttaagatactatgatgagagcacggttcccattactgttgctgggacttgttttcctggcttcagtttctgtctcatttggcattgcttactgggaaaaagagaaccccaaacacaacaagtgtctccagagttgcaatagcgagagagactcgtacaggagacaagcatgccacgctcgttgcaacctccttaaggtggagaaagaagaatgtgaagaaggtga

SEQ ID NO: 122155 - DNA, 246 bp, Glycine max
ttcaaaccttgctctatactacacagtacacacactagaagaataatggcttccatcctccactactttttagccctctctctttcttgctcttttcttttcttcttatccgactcagtcacccctacaaaaccaataaaccttgttgttctacccgttcaaaatgatggttccacagggctccattgggccaacctccaaaaaagaacccctctaatgcaagtaccagtcctggtggacctcaat

SEQ ID NO: 122156 - DNA, 247 bp, Glycine max
cttaattattagcacttccttagttcaatatggggaagcccttcactctctctctttcttcgctttgcttgctactcgtgtcgagtgcatgctttgctattagctccagcaagctcaacgagtgccaactcaacaacctcaacgcgttggaacccgaccaccgcgttgagtccgaaggtggtttgattcagacatggagctctcaacaccctgagctgaaatgcgccggtgtcactgtttccaaact

SEQ ID NO: 122157 - DNA, 246 bp, Glycine max
agctggtgcagtttggagagattcaggaaaaagttgtattgaaattttcacaagaggaatttcttacagcttggtcaactcaggtgcgtcctgcaacaactctgttggctgatgggtgtccatatttgtatgcaatggtgcatgatagttcagtgtctacaataccaggtgattttgtcattggtgtcaagttgacaaccatagacaatatgtgtgcatatgggctcaatcctggtatttcaggtt

SEQ ID NO: 122158 - DNA, 261 bp, Glycine max
  unsure (1)..(261): unsure at all n locations
actcgagccgaatcggctcgagcggnctcgagtctaatcccacttacgaagatatcccacaaccagcttgggacctttttagctgggacagtgagaaaactttgccaaataatttaactgcagaattgctctcttgcaaattggatactgacactggccaatattatcctgagtgggctccaattaattgtcgagttcatcgacaaccacttcacatcactgaaggaaattatgtcagaaagcaagatgtcagcattgaat

SEQ ID NO: 122159 - DNA, 257 bp, Glycine max
ttcattgatggtgatctttttcctagccggtattgtctttgtcattttcttgagaactgtaagaagggacttgactcggtatgaggagttggacaaagaggcacaagctcagatgaatgaggagctttctggatggaagcttgttgtgggtgatgtatttagagagcctgatggttcgaagcttctctgtgtgatggttggggatggggttcagattcttggaatggctgctgtgactattgtttttgcagccctgg

SEQ ID NO: 122160 - DNA, 259 bp, Glycine max
cccatatgcacacatattgtttatgggcaccattcctcagtccatttcacagcaaactgtttggaatcaaatggcaacagtgagaacaccattgaattttgattctagcaagcagagcttttgtcaattctctattgatcttcttggtggaggaattttagtggacaaaactggagattggatcacacttatacaaaattctccaattagtaacttgttgagagttgctgcttggaagaaaggctgtctaatggttaag

SEQ ID NO: 122161 - DNA, 257 bp, Glycine max
atatcctagtacaccgtattaaagaatttaagatatactatgatgagagcgcggttcccattactgttgctgggagttgttttcctggcatcagtttctgtctcatttggcattgcgtattggtaaaagcagaaccccagtcacaacaagtgcctccgaagttgcaatagcgagaaagactcctacaggaaccaagcatgccacgctcgttgcaacctccttaaggtggaggaagaagaagaatgcgaagaaggtca

SEQ ID NO: 122162 - DNA, 249 bp, Glycine max
ccagcgaaacgctcttcgttatcttttctcagactccgcggcgtagatccgaggagttcgggaaatcctaactcatcatctcaactcaagtcatggctggacttgcacctgagggatcacagttcgatgctcgtcaatatgattctaaaatgagtgacttactttcatctgatggacaggacttcttcacatcctatgacgaggtttatgatagttttgacgctatgggtttgcaggaaaatcttctca

SEQ ID NO: 122163 - DNA, 248 bp, Glycine max
gccaggagaatggcctggttcccattgttgagcctgaggtccttgttgatggacctcgtgacattcacaagtgtgccgccgtcaccgagcgtgtccttgcagcatgctacaaggctttgggtgatcaccgtgtccttcttgagggtaccctattgaagccaaacatggtcacccctggatcccagtctgctaaggtttcccctcaggtggttgccgagcacactgtcagagcccttcagagaaccgtg

SEQ ID NO: 122164 - DNA, 245 bp, Glycine max
tattaacactttccttagttcaatatggggaagcccttcttcactctctctctttcttccctttgcttgctagtcttgtcgagtgcatgctttgctgttacctccagcaagttcaacgagtgccagctcaacagcctcaacgcgttggaacccgaccaccgcgttgagtccgaaggtggtcttattgagacgtggaactctcaacaccctgagctgcagtgcgccggtgtcactgtttccaaacg

SEQ ID NO: 122165 - DNA, 249 bp, Glycine max
tgacaccatcaattttgaggcttttccccacaagctggtacagtttggagagattcaggaaaaagttgtattggaattttcacaagaggaatttcttacagcttggtcaacccaggtgcgtcctgcaacaactctgttggctgatgggtgtccatatttgtatgctatggtgcatgatagttcagtgtctacaataccaggtgattttgtcattggtgttaagttgacaaccatgaacaatatgtgtgc

SEQ ID NO: 122166 - DNA, 256 bp, Glycine max
atcaccatggccaagcttgttctttccctttgtttccttcttttcagtggctgcttcgctctgagagagcaggcacagcaaaatgagtgccagatccaaaagctgaatgccctcaaaccggataaccgtatagagtcggaaggtgggttcattgagacctggaaccctaacaacaagccattccagtgtgccggtgttgccctcactcgctgcacccttaaccgcaatgcccttcgtagaccttcctacaccaacg

SEQ ID NO: 122167 - DNA, 254 bp, Glycine max
aagcacttgatcaagactcaagagtgaacaaaaaaaaatgatgggtacccttaaggtgtccaacagtagtttatacatattttcgaagttcctagtaatttgtatggtgatgatgatatctttggttgattcaagttattccttgtgtgattttgaggcaatcttcaattttggtgattcgaattcagaaacgggtgggtttcatacaagctttcctgcacagcctgctccatatggaatgacttacttcaaaa

SEQ ID NO: 122168 - DNA, 258 bp, Glycine max
atcgagccgcttgtgtcacgatctcaacggagcacctctcttcaggtcgccatctagactgcaatcatggctgatggaccacagcatccatcagttgttcagaagctagctggacagtcttacctggtgtccaggctaagccccaactttaactctgggaattattcctcgactggttcttacttcaatggaggactgcactcttctgggttggctgttgtgtcgcctggatctccagttactgtgcatgctccagca

SEQ ID NO: 122169 - DNA, 258 bp, Glycine max
ctcgagccgctgatgttcttgcaaagcgagctcatgaatttgagaaacatgttgctcatgatagcctcaaggatcagattcctgctgttgacaagttgtattctactaatgttaataaatttgcaaaaattatgaaccttagacaaagtgttgttggtgatcttaaacttcttactgatgggaagttgtatgagggtaagcatattcctgtatctaatattagtgcaggggaaaatcatgtagttcagatacccttaa

SEQ ID NO: 122170 - DNA, 258 bp, Glycine max
  unsure (1)..(258): unsure at all n locations
gaaattttgataaaccgcgatcacaggttgccgcaccttaaaaccggaaacaaaagcaatcgttacttgatttcaagaatctctcaatttcttcctacttctttgtgtacgatttcttaagggaaagaaaatcactctctgtgctggccacagacttcgtgaatcattttcttttccactcttagtacgatgggtnaacactctcctatttgatataggacttcgtgtcagatttaaacttcttctgtatctttctca

SEQ ID NO: 122171 - DNA, 257 bp, Glycine max
ggcgagaaacaatgtcatcaggtgaggtaaacaatgggagacatgcagaacaaacatatgacccagataaggaatcagcagagaacacacaaactcctcaagaacgtgtgcgcctgagttgtttgcgtgtcttgcatcaacttgcagctagtaccacctgtgcggaggccatggcagcaaccagtgttggaacacctcaggttgttccgctgctaatgaaagccatagggtggcaaggtggaagcattttagctctt

SEQ ID NO: 122172 - DNA, 260 bp, Glycine max
agaagtttttaaattttgtgaggttcattatgaagaaaagggacaagcttagttgtcaagttggaatcaacccatattctatggaatggactggtttggccaatagattactgagtaagggcaacgatattctgtgttgcgattatgctagttttgatggtttgattaccaagcaagttatgagcaagatggcagaaatgatcaacagtctttgtggtggtgatgaaaaactgatgcgtgaaaggacacacctgctgttg

SEQ ID NO: 122173 - DNA, 255 bp, Glycine max
gttgcaattccaggatgtcctgagacgtttgaggagccacaagaacaatcaaacagaagaggctcaaggtcgcagaagcagcagctacaggacagtcaccagaagattcgtcacttcaatgaaggagacgtactcgtgattcctcctggtgttccttactggacctataacactggcgatgaaccagttgttgccatcagtcttcttgacacctctaacttcaataaccagcttgatcaaacccctagggtattt

SEQ ID NO: 122174 - DNA, 254 bp, Glycine max
gttgttcctcactgacctcaccatggcgaccagagccaagctttctttagctatcttccttttctttctttgagccttgatttcaaacctagccttgggcaaacttaaagagaccgaggtcgaagaagatcccgagctcgtaacatgcaaacaccagtgccaacagcaacggcaatacactgagagtgacaagcgaacatgcttgcaacaatgtgacagtatgaagcaagagcgagagaaacaagtcgaagagg

SEQ ID NO: 122175 - DNA, 245 bp, Glycine max
atcctagtacaccgtattaaagaatttaagatatactatgatgatagcgcggttcccattgctgtcgctgggagttgtgttcctggcatctgtttctgtctcatctggcattgcgtattgaggcaagcagaaccccagtcacaacaagtgcctccgaagttgcaatagcgagaaagactcctacaggagccaagcatggcacgctcgttgcaacctccataaggtggaggaagaagaataatgcg

SEQ ID NO: 122176 - DNA, 247 bp, Glycine max
aagggttgttgttctttatctgcctggcctgctggctttttaggttcctggttccacctcaggagtctcagaagagagctgtggcttagagccctttttgtatgtgctaccccacttttgtctttttggcaatagtgctagcaaccaataaataataataataataatgaataagaaaacaaaggctttagcttgccttttgttcactgtaaaataataatgtaagtactctctataatgagtcacg

SEQ ID NO: 122177 - DNA, 256 bp, Glycine max
aattccttcacttgcagcactgttgcatcatcatcttcattgcaaaaccctaaacttcaccttcaaccatgaccacacaagtaccaccacacagtgtccaagtccacacaacaacacaccactacgaagctggcgtcgtcccccccggagcccgtttcgaaccgccgcgttatgaagccggcgtcaaagcgccctccatttaccattccgagagaggtccaacgacttcccaggtcctcgccgtcctcgccggcct

SEQ ID NO: 122178 - DNA, 257 bp, Glycine max
aaaacccccagcttcgggacttggatatcttcctcagtattgtggatatgaacgagggagctcttcttctaccacacttcaattcaaaggcgatagtgatactggtaattaatgaaggagatgcaaacattgaacttgttggcctaaaagaacaacaacaggagcagcaacaggaagagcaacctttggaagtgcggaaatatagagccgaattgtctgaacaagatatatttgtaatcccagcaggttatccagtt

SEQ ID NO: 122179 - DNA, 252 bp, Glycine max
gggacagcgtccggtggaaggcgtccaggtgcagttcagcagtcccagcagccagttcctatgatgccacagcagatgcttcctaggggacgtgtctatcgttatcctcctggtaggggtattcctgatgttcctgtacctggggttgctggaggtatgttttctgttccatatgatgtgggtgggatgccgctgcgtgatgcatgaatctcccagcaaatacctgttggggctctggcaacggctctggct

SEQ ID NO: 122180 - DNA, 257 bp, Glycine max
  unsure (1)..(257): unsure at all n locations
ggaagattgaatttcctctccctgatatcaaaacaagaagacgcattttccagntacatacttcaaggatgacattagctgatgatgtcaacttagaagaatttgttatgactaaggatgagttctctggagctgatataaaagcnatntgtactgaagctggcttacttgctttacgagaacgccggatgaaggtgacgcatgccgacttcaagaaggcaaaggataaggttatgtttaagaagaaagaaggggtg

SEQ ID NO: 122181 - DNA, 241 bp, Glycine max
aaagaaccaaagagaatcctactttgtggatgctcagcctaagaagaaagaggaggggaataagggaagaaagggtcctttgtcatcaattttgagggctttttactgaataagtatgtactaaaatgtatgctgtaatagctcatagtgagcgaggaaagtatcgggctatgtaactatgactagagcttcaactatgaataaataaatcgacagcatatgatgcttttgttttgtgttc

SEQ ID NO: 122182 - DNA, 251 bp, Glycine max
cttgctctatactacacagtacacacactagaagaaacatggcttccatcctacactactttttagccctctatctttcttgctcttttcttttcttcttatccgactcagtcacccctacaaaaccaataaaccttgttgttctacccgttcaaaatgatggttccacagggctccattggtccaacctccaaaaaagaacccctctaatgcaagtaccagtcctggtggacctcaatggaaatcacttg

SEQ ID NO: 122183 - DNA, 200 bp, Glycine max
cgagtaagatttgaaattttgataaaccgcgatcacaggttgtcgcaccttaaaaccggaaacaaaagcattcgttacttgatttctagaatttctcaatttctttctacttctttgtgtacgatttcttaagggatagaatatcattctctgtgctggtcacagacttcgtgaatcattttcttgtctacttgacatac

SEQ ID NO: 122184 - DNA, 250 bp, Glycine max
cctagatgaagaaattctttctgaagttgcacaagatatggttgaggaatggtttgattgtgttgatgaggaggattcctttgaggaagtttctttaagtgcagcacttaatggtgttgagggtttggactatatggaaagaattcctcttgccacatctgagggttttcctcatgtgctttcacgcaaaaatggtgaaaaaggcaagagaagatttgtttctggggatggtgaggagatgacattgatt

SEQ ID NO: 122185 - DNA, 251 bp, Glycine max
taattaattaaattcctcgtggaatcttgttgaagccatgtctacagctgctcaggtcatcaagtgcagagctgcggtggcatgggaagcagggaagccactatcgatagaaaccatagaagtggcaccaccccagaaaggtgaagtgcgtttgaagatcctcttcaactccctttgccgtacagatgtttactggtgggatgctaagggccagactccgctgtttcctcgtatcttaggccacgaagctt

SEQ ID NO: 122186 - DNA, 252 bp, Glycine max
aacacttccttagttcaatatggggaagcccttcactctctctctttcttccctttgcttgctactcttgtcgagtgcatgctttgctattagctccagcaagctcaacgagtgccaactcaacaacctcaacgcgttggaacccgaccaccgcgttgagtccgaaggtggtttgattcaaacatggcaatctcaacaccctgagctgaaatgcgccggtgtcactgtttccaaactcaccctcaaccgcaa

SEQ ID NO: 122187 - DNA, 261 bp, Glycine max
tcgagaattccttcacttgcagaacttagttctctgttgcatcatcatcatcttcattagtgttagccctaaacttcaccttcaaccatgaccacagtgccaccacacagtgtccaagtgcacacaacaacacaccgctacgaagccggcgtcgtcccgccggctcgttttgaggcgccgcgttacgaagccggcatcaaggcgccctcttccatttaccattccgagagaggtccgacgacctctcaggttctcgcagtt

SEQ ID NO: 122188 - DNA, 233 bp, Glycine max
tctatactagttaggacttcgtgggtagacttttctatttctctccttctttcactctcttcttctcactgatccgcattgccgttcaaagtggtcttatttgataaacacttgggcgttggtgcaaatgtttgcttcattaattttctctggatacaacaggctcactgagaaaacagtctttacttgcagagatttggacatcttggttgtttatgatacaatagcggctc

SEQ ID NO: 122189 - DNA, 254 bp, Glycine max
ctatacacacacacacacacactaagaataatggcttctatcctccactactttttagccctctatctttctttctctttccttttcttcatatccgactccgtccccattccccaacaccacactaaccctacaaaacctataaaccttctggttctacccgttcaaaatgatgcttccacagggctccattgggccaacctccaaaaaaggacccctctaatgcaagtaccagtcctggtggacctcaatgg

SEQ ID NO: 122190 - DNA, 253 bp, Glycine max
tggcaacagtgagaacaccattgaattttgattctagcaagcagagcttttgtcaattctctattgatcttcttggtggaggaattttagtggacaaaactggagattggatcacacttatacaaaattctcctgttagtaacttgttgagagttgctgcttggaagaaaggctgtttaatggttaagattgtgatgtctgggtatgcagcagtcaaaaggagtgattgggcctcattggtacaagtgttttt

SEQ ID NO: 122191 - DNA, 253 bp, Glycine max; identical to SEQ ID NO: 111676

SEQ ID NO: 122192 - DNA, 254 bp, Glycine max
ggccaggcaagccccactcaaccaccacacctctcctcgttcacgctaccccttactgctcttcttctacctttcaagttttaaaagtataaagatggcagagacattcctatttacctcagagtcggtgaacgagggacaccctgacaagctctgcgaccaaatctccgatgctgtcctcgacgcttgcctcgagcaggacccagacagcaaagttgcctgcgaaacatgcaccataaccaacttggtcatgg

SEQ ID NO: 122193 - DNA, 249 bp, Glycine max
cagagatctatgagtactattcactacaactcacatgcaacgaagatagcactggtgatcgatggcagagggcatcttcaaatatcatgtccacacatgtcatcaaggtcgtcacactcgaagcatgataagagtagcccttcataccatagaatcagttccgatttgaagcctggaatggtgtttgttgtccctcccggtcatcccttcgtcaccatagcttccaataaagagaatctcctcatgatt

SEQ ID NO: 122194 - DNA, 248 bp, Glycine max
ctcgctcgcactgtccagatcttaatcaataggagtgagtattgtatttccagccatgacgccgctgatcctgtatgctgggaaaaccaacaaaaattcttacaagacactcattgcatccgagtttgctggcgtccaagttgattttgcccctaattttgagatgggtgtctccaataaaactccagaatttctcaagatcaatcctattggcaaggttcctgtgctggaaacccccgatggtccaa

SEQ ID NO: 122195 - DNA, 248 bp, Glycine max
gccagcaccaacagcatcggcggcgacagtcactctccgacaacaacacttccgcggcgaaaaatgtctctggtggcgaacgaggatttccagcacattctgcgtgtgctgaacaccaacgtggatgggaagcagaagataatgttcgctatgacctccatcaagggtattggaaggagattcgccaacatcgcttgcaagaaggccgatgttgacatgaacaaaagggctggtgagttgagtgctgc

SEQ ID NO: 122196 - DNA, 251 bp, Glycine max
tctgaacaagatatatttgtaatcccagcaggttatccagttgtggtcaacgctacctcagatctgaatttctttgcttttggtatcaatgccgagaacaaccagaggaacttccttgcaggttcgaaagacaatgtgataagccagatacctagtcaagtgcaggagcttgcgttccctgggtctgcaaaagatattgagaacctaataaagagccaaagtgagtcctactttgtggatgctcagcctca

SEQ ID NO: 122197 - DNA, 236 bp, Glycine max
gaccaagccccactcaaccaccacaccactctctctgctcttcttctacctttcaagtttttaaagtattaagatggcagagacattcctatttacctcagagtcagtgaacgagtgacaccctgacaagctctgcgaccaaatctccgatgctgtcctcgacgtttgcttgaacaggacccagacagcaaggttgcctgcgaaacatgcaccaagaccaacttggtcatggtctg

SEQ ID NO: 122198 - DNA, 87 bp, Glycine max
cattggtccttaaacactcatcagtcatcaccatggccaagctagtttgttgcctttgttttctgcttttcagtggctgctgcttcg

SEQ ID NO: 122199 - DNA, 118 bp, Glycine max
gtcatttaatccaaacccgtgttctgatgcgtggagtttggaatttctgaagcgtaccggatttcattgtgatatcatttgtgtcactggatggactgccactccaatgcaggatgtt

SEQ ID NO: 122200 - DNA, 251 bp, Glycine max
aaataaccaaagaacacctagagcccaacttagaagggctcactgtagatgaggcaattcaaaacaagagattgttcctactagatcatcatgacccaatcatgccatatttgaggcgaataaatgcaacctccacaaaggcttatgctaccagaaccatccttttcctgaaaaatgaaggaactttaaggccacttgccatagagttgagtttgccacatcctcagggagatcaatctggtgcttttagt

SEQ ID NO: 122201 - DNA, 282 bp, Glycine max
agtacaccgtattaaagaatttaagatgtactatgatgagagcgcggttcccattactgttgctgggagttgttttcctggcatcagtttctgtctcatttggcattgcgtattgggaaaagcagaaccccagtcacaacagtgcctccgaagttgcaatagcgagaaagactcctacaggaaccaagcatgccacgctcgttgcaacctccttaaggtggaggaagaagaagaatgcgaagaaggtcaaattccacgaccacgaccacatcacccggagag

SEQ ID NO: 122202 - DNA, 280 bp, Glycine max
ctgcttttgatttgaatttcacaccccgtgagttctatagctttgatgaagttcatggactctattcaggcggaattaagctgccaacagatataatcagcaagattagtccactacccgtgcttaaggaaatcttccgactgatggtgaacaggcccttaagtttcctcctcctaaagtaattcaagtgacaaagtctgcatggatgactgatgaagaatttgcaagagaaatgcttgctggtgtaaatccaaacttgattcgttgtcttaaggatttc

SEQ ID NO: 122203 - DNA, 278 bp, Glycine max
ggcttatagtgcttcttattatccttgcatggaaattctgtatgagtgctatgaggatgtagccagtggtagtgagattcgcagtgttgttctggctgggcgtcgcttttatgagaaagagggtctacctgcttttccatgggtaacattgatcaaacccgcatgtggaaggttggtgagcgtgtccgatctacaagagcagccggtgatcaaggcccattatatcctttcactgctggtgtctttgtggcattgatgatggcccagattgagatcct

SEQ ID NO: 122204 - DNA, 277 bp, Glycine max
agaaactttaagcagatgtctaatgttttgttggtagctcctgaggacaaggcgagtttatggtcacaacttcattatgtttcgtgtaataatctggaaatgcaagaagcttatcttgtcaatctcgtaaatgtgttcgagaattgtatttgcacagtccagaggaagctcgccaattgagaaggaaagctctctctcgtattgaatggctgcaaaaagctgatgtgcctaccatagcacagattgaagagttccattcgatgcagaggatgatgaa

SEQ ID NO: 122205 - DNA, 276 bp, Glycine max
ctttccttagttcaatatggggaagcccttcttcactctctctctttcttccctttgcttgctactcttgtcgagtgcatgctttgctattacctccagcaagttcaacgagtgccaactcaacaacctcaacgcgtggaacccgaccaccgcgttgagtccgaaggtggtcttattgaaacatggaactctcaacaccctgagctgcaatgcgccgctgtcactgtttccaaacgcaccctcaactgcaacggcctccacttgccatcttactca

SEQ ID NO: 122206 - DNA, 277 bp, Glycine max
ggagcggccaagctgccaaatctttagctgcaatatacaagaatgtgatagccacagatgctagtgacaaacaacttgaatttgcagccaagctcccaaatgtgagataccaacacaccccttcaaccatgtcgacggcgagcttgaacaaatggtggcatctgagggaaccatagaccttgtgaccactccacaagccctgcattggtttgaccgcccaaccttctacgaacaagtgaagtgggttctcaggaaacctcatggaatcattgctgct

SEQ ID NO: 122207 - DNA, 277 bp, Glycine max
agaagagagcgtcctagtcgcaaccctaataagaagaaccacagcttcaagcgagtgacatccaccagccatgggtcgtatgcacagccgcggtaagggtatatcctcttctgctttgccctacaaaaggacacccccagctggctcaagatctcttcgcaagatgtggaagaaaatatctgcaagtttgcgaagaagggtttgaccccgtctcagattggtgtcattcttcgagattctcacggtattgctcaggtcaacagcgtcactggcagca

SEQ ID NO: 122208 - DNA, 277 bp, Glycine max
attctctccattggtccttaaacactcatcagtcatcaccatggccaagctagttttttccctttgttttctgcttttcagtggctgctgcttcgctttcagttccagagagcagcctcagaaaaacgagtgccagatcaaaaactcaatgccctcaaaccggataaccgtatagagtcagaaggagggctcattgagacatggaaccctaacaacaagccattccagtgtgccggtgttgccctctctcgctgcaccctcaaccgcaacgcccttc

SEQ ID NO: 122209 - DNA, 257 bp, Glycine max
taccaagcaagttatgagcaagatggcagaaatgatcaacagtctttgtggtggtgatgaaaaactgatgcgtgaaaggacacacctgctgttggcttgttgttcaaggatggcaatttgtaagaaagatgtttggaagttgaatgtggaatcccttctggatttccgctcacagttatttgcaatagcatttttaatgagatgctcattagatatagctatgaaaaattactgcgcaaggttaagcccaagtatgt

SEQ ID NO: 122210 - DNA, 285 bp, Glycine max
agcaacacggtgagaaggaggaagacgaaggtgagcagccacgtccattcccattcccacgcccacgccaacctcatcaagaggaagagcacgagcagaaggaggaacacgaatggcatcgcaaggaggaaaaacacggaggaaagggaagtgaagaggaacaagatgaacgtgaacacgcacgccgacaccaacctcatcaaaaggaagaggaaaagcacgaatggcaacacaagcaggaaaagcaccaaggaaaggaaagtgaagaagaagaagaagaccaag

SEQ ID NO: 122211 - DNA, 282 bp, Glycine max
caccaagttatgggtttccttgtgttgcttcttttctccctcttaggtctctcttctagttccagcatatcaactcatcgttccatattggaccttgacctaaccaagtttaccacacagaaacaggtgtcttcactgttcaactatggaagagtgagcatggacgtgtctaccataaccacgaagaagaggcaaagagacttgagattttcaagaataacttgaactatatcagggacatgaatgcaaacagaaaatcaccccattctcatcgtttaggat

SEQ ID NO: 122212 - DNA, 186 bp, Glycine max
attttgataaaccgcgatcacaggttgccgcaccttaaaaccggaaacaaaagcaatcgttacttgatttcaagaatctctcaatttcttcctacttctttgtgtacgatttcttaagggcaagaaaatcactctctgtgctggccacagacttcgtgaatcattttcttttccacacaacatacg

SEQ ID NO: 122213 - DNA, 249 bp, Glycine max
tatgttcaatatcgtaggatagcttaatgaacaatgtaaggtactatgatgtgagcacggttcccattactggtgctgggacttgttttcctggcttcagtttctgtctcatgtggcattgcttactgggaaaaagagaccccaaacacaacaagtgtctccagatttgcaatagcgagagatactcgtacaggaactaagcatgccacgctcgttgcaacctcgttaaggtgtgtgaagaagtgtgtg

SEQ ID NO: 122214 - DNA, 275 bp, Glycine max
tggagaaagtttcctctacaaaagcacaatttgttagtggaaaaaccttcaaatatgatataattggtgctggttcacattcttcagatgattttcctgaaaaggaagatcaagaaaaacccaaaaagattgatgcagattgagacaaagaatagatcgtcaatacaatgaggttcaggctcagatggaaacaaatttgtttaaattgtctcttgatgatgttgaaactcctaaaggttccatgttggatcttaaaatttctcagtctaaaattg

SEQ ID NO: 122215 - DNA, 262 bp, Glycine max
caaaaccctcttttttctctctcttgcaaaacctaattttcatttcttccctcaaatttcaaaatgcgtgagatccttcacatccagggtggccaatgcggcaaccagatcggcgccaagttctgggaggtggttgcgcggagacgggatcgaccctaccggaaggtacggtggggactcggagttgcagctcgagaggatcaatgtctactacaacgaggctagttgcggtcggttcgtgcggcgcgcggttctcatggga

SEQ ID NO: 122216 - DNA, 274 bp, Glycine max
ttatcgagccggatcggctcgagttgattacctacacttccttaactcgatatggggaagcccttcactctctctctttattccctttgcttgctactcttgtcgagtgcatgctttgctattaggtcgtggtagtcaacgagtgccaactcaacaacctcaacgcgttggaacccgaccaccgcgttgagtccgaaggtggtttgattcaaacatggaactctcaacaccctgagctgaaatgcgccggtgtcactgtttccaaactcaccct

SEQ ID NO: 122217 - DNA, 252 bp, Glycine max
ctccattgtctttggacactcatcaccatggccaagcttgttctttccctttggttccgtcttttcagtggctgcttcgctctgagagatcaggcagagcaaaatggagggccagatccagctgctgaatgccctcaaccggataaccgtatagagtcggaaggtggggtcattgagacctggaaccctaacaacaagccatgccagtgtgccggtgttgccctctctcgctgcacccttaaccgcaatgcc

SEQ ID NO: 122218 - DNA, 238 bp, Glycine max
cttcaaacttaattattaacacttccttagttcaatatgtgtaagccttatcatctctctctttcttccctttgcttgctactcttgtcgagtgcatgctttgctattagctccagcaagctcaacgagtgcgaaccaacaactctctacgcgttggaacccgaccaccgcgttgagtccgaagtggtttgattcaaacatggaactctcaacacctgagctgaaatgcgccggggtc

SEQ ID NO: 122219 - DNA, 277 bp, Glycine max
tctctccattgtctttgaacactcatcaccatggccaagcttgttctttccctttgtttccttcttttcagtggctgcttcgctctgagagagctggcacagcaaaatgagtgccagatccaaaagctgaatgccctcaaccggataaccgtatagagtcggaaggtgggttcattggagacctggaaccctaacaacaagccattccagtgtgccggtgttgccctctctcgctgcacccttaaccgcaatgcccttcgtagaccttcctacacca

SEQ ID NO: 122220 - DNA, 276 bp, Glycine max
cagcttttgagtaccactaccaatggtgattttgttcaaggaaaagatctcgcaatggttaaagttaatgtagcatgtgctgctgttggcttgacatcaagttacactccaactccattgttggaatctggtttgcaaaagacagagggttaattgtggaatattttggaaggatgtcttacgttgctcataacgttaatcagccccaagagaaagatttgttggagggaaatttttcctttgatattaaatctcgctctagattggaaaaagttt

SEQ ID NO: 122221 - DNA, 284 bp, Glycine max
tattcctgtatctaatattagtgcaggggagaatcatgtagttcaaatacccctaatggcacaggaggaaattctgtcttctagtgcaagtgatttcagaactgcaatggtgagtagaaatagcaagcctcaagctactgaatgcatgtgggagctatagaaattatcattgatagtttcgcaagtcctgactgcaacatagttggtgcaatgcttttggttgatacttatcataccaatcctgaaaatgcagttcgtagtatttttgtcgcgcctttcagagg

SEQ ID NO: 122222 - DNA, 259 bp, Glycine max
ataaaattcttccaccaagttatgggcctccttgtgttgcttctgggctccctcttaggtctctctgctagttccaggatatcaactcatcgttccagattagaccttgacctaaccaagtcgaccacacagtgacagggtcgtcactgtgccaactatggaagagtgagcatggacgtgtctacgataaccacgatgatgagggaaagagactggagatgtccaagaataacttgagctatacccgggacatgattgg

SEQ ID NO: 122223 - DNA, 271 bp, Glycine max
cataaaaatgcatgttgctgagaaaggtgaaggtcccgtggtcttgttcctccacggcttcccggagctctggtactcctggcgccaccagattctggctctcagcaacctcggctaccgcgccgtggctccaatctccgcggctacggagacaccgaggcaccagcttcaatcagcagctacaccatcctccacttagtttctgacatcgtcgcgctcattcactcacttgctgtggatcaagtcttcctcgtagcccatgattgggggg

SEQ ID NO: 122224 - DNA, 263 bp, Glycine max
ggctacttcaaagttgaaaacccagaatgtggttgtatctctctccctaaccttaaccttggtactggtgctactgaccagcaaggcaaactcagcggaaactgtttctttcagctggaacaagttcgtgccgagcaaccaaacatgatcctccaaggagacgctattgtgacctcctcgggaaagttacaactcaataaggttgacgaaaacggcaccccaaaaccctcgtctcttggtcgcgccctctactcgacccccat

SEQ ID NO: 122225 - DNA, 270 bp, Glycine max
gaaggcccattcgggtggttacatttcctaataccattgtgcagattgaaccagacatgaattcaaggtttcagcttttgagtaccactaccaatggtgattttgttcaagggaaagatctcgcaatggttaagttaatgtagcatgtgctgctgttggcttgacatcaagttacactccaactccattgttggaatctggtttgcaaaaagacagagggttaattgtggagtattttggaaggatgtcttacgttgctcataacgttaa

SEQ ID NO: 122226 - DNA, 245 bp, Glycine max
gtaaagctaacttcaacacctttaattttctaaaagtaattcagcggctgaataccaagcggagaagatgagtcaggagcagccacggcgtcccaaaggccaaaaccccatcaaatacgtcgacgtttttgtctctccggcgaccttgcacagaagcccgtcgcaccggaagatgctgccatgatgcaaagcgcggtaactcgagtgctcggacaaacccaacccggcggagagcttccgtcatg

SEQ ID NO: 122227 - DNA, 273 bp, Glycine max
cagcatatcaactcatcgttccatattggaccttgacttaaccaagtttaccacacagaaacaggcctcctcactgttccaactatggaagagtgagcatggacgtgtctaccataaccacgaagaagaggcatgagacttgagatttccaagaataacttgaactatatcagggacatgaatgcaaacagaaaatcaccccattctcatcgtttaggattgaacaagtttgctgacatcactcctcaagagttcagcaaaaagtacttgcag

SEQ ID NO: 122228 - DNA, 280 bp, Glycine max
caaacttattaacactgtccttagttcgatatcggtgagcccttcttcactctctctctttcttccctttgcttgctactcttgtcgagtgcatgctttgctattacctccagcaagttcaacgagtgccaactcaacaacctcaacgcgttggaacccgagcaccgcgttgagtccgaaggtggtcttattgatacatggaactctcaacaccctgagctgcaatgcgccggtgtcactggttccatacgcaccctcaactgcaacggcctccacttgg

SEQ ID NO: 122229 - DNA, 283 bp, Glycine max
attctctccattggtccttaaacactcatcagtcatcaccatggccaagctagttttttccctttgttttctgcttttcagtggctgctgcttcgctttcagttccagagagcagcctcagcaaaacgagtgccagatccaaaaactcaatgccctcaaaccggataaccgtatagagtcagactgagggctcattgagacatggaaccctaacaacaagccattccagtgtgccggtgttgccctctctcggtgcaccctcaaccgcaacgcccttcgtaga

SEQ ID NO: 122230 - DNA, 266 bp, Glycine max
gcaatctatggtgatcaaagcagtaagataacagcagattcccttgatctagatgggtacacaatctacgaggtacttggtagtcgaaggttatttatgttagattaccatgatatcttcatgccatatgtgaagcagataaatcagctgaattctgccaagacttatgcgacaaggactatcctttttttgagagaagatggaactttaaagccagtggccatcgtattaagtttgccacattctgctggggatctatcagctgc

SEQ ID NO: 122231 - DNA, 270 bp, Glycine max
gtcaccagaagatctataacttcagagagggtgatttgatcgcagtgcctactggtgttgcatggtggatgtacaacaatgaagacactcctgttgttgccgtttctattattgacaccaacagcttggataaccagctcgaccagatgcctaggagattctatcttgctgggaaccaagagcaagagtttctaaaatatcagcaagagcgcggaggtcatcaaagccagaaaggaaagcatcagcaagaagaagaaaacgaaggaggca

SEQ ID NO: 122232 - DNA, 272 bp, Glycine max
ttctcgagccgaatcggctcgagccaatccaatttccctatctctcactgtctctatatctgtatttctgaattttgggattcgaaaaaccctaagcaaagcaaagcggtaaggatggggaacacggagaagctgatgaaccagatcatggaattgaaattcacttcgaaatcgctgcagcgtcaatcgcgtaagtgcgagaaggaggagaaatcggagaagctgaaggtgaagaaggcgatcgagaaaggcaacatggacggcgctcgaat

SEQ ID NO: 122233 - DNA, 272 bp, Glycine max
gcacgatcagcacccgtccctcttgcagctctccatcaaactttgtggtggctgcaagatcacagagtgacaacttcgagtatgtgtcattcaagacgcaatgatacacccatgatcggcactcttgcaggggaaaatcattgttgaacccattaccagaggaagtgattcagcacactttcaacctaaaaagccagcaggccaggcagataaagaacaacaaccctttcaagttcctggttccacctcaggagtctcagaagagagctgtg

SEQ ID NO: 122234 - DNA, 135 bp, Glycine max
tcttcatcaagctccgctccaacacaggggtatatgagggccttccttcacgtgcatggagggcaatgcgggaaccagatcggctcctagctctgggaagtggtgtgcgacgagcactgcatagatccgacggga

SEQ ID NO: 122235 - DNA, 273 bp, Glycine max
ctccatttgtccttgaatctaatactcagcatggctaagcttgttctttcccttcgttttctgcttttcagtggctgctgcttcgccccaagtttcagagagcaagcacagcacaacgagtgccagatccaacgctcaatgccctcaaaccggataacagcacagagtcagaaggtggcttcattgagacatggaaccctaacaacaagccatgtcagtgtgccggtgttgccctctctcgctgcaccctcaaccgcaacgcccttcgcagac

SEQ ID NO: 122236 - DNA, 278 bp, Glycine max
ggacacccatcagccaacagagttgttgcaatggtgcatgatagttcagtgtctacaataccaggtgattttgtcattggtgtcaagttgacaaccataaacaatatgtgtgcatatgggctcaatcctggtattcaggttctcgtcttttgggcaccattcctcagtccatttcacagcaaactgtttggaatcaaatggcaacagtgagaacaccattgaattttgattctagcaagcagagcttttgtcagttttctattgaccttctcggtgga

SEQ ID NO: 122237 - DNA, 274 bp, Glycine max
cttaaacactcatcagtcatcatcatggccaagctagttttttcactttgttttctgcttttcagtggctgctgcttcgctttcagttccagagagcagcctcagcaaaacgagtgccagatccaaaaactcatgccctcaaaccggataaccgtatagagtcagaaggagggctcattgagacatggaaccctaacaacaagccattccagtgtgccggtgttgccctctctcgctgcaccctcaaccgcaacgcccttcgtagaccttccta

SEQ ID NO: 122238 - DNA, 267 bp, Glycine max
catttgtccttgaatataatactcagcatggctaagcttgttctttccctttgttttctgcttttcagtagctgctgcttcgctttcagtttcagagagcagccacagcaaaacgagtgccagatccaagcctcaatgccctcaaaccggataaccgtatagagtcagaaggtggcttgatcgtcacatggaagcctaacaacaagccattccagtgtgccggtgttgccctctctcgctgcacgctcaaccgcaacgcccttcgca

SEQ ID NO: 122239 - DNA, 269 bp, Glycine max
ttgctagaatggaatttcgatgctcagtcatctcttttaccattctcttctctcttgctcttgcaggagagagccatgtccatgcatcgctacctgaggaagattattgggaagctgtttggccaaacatcccattcccctcgcactgcgagagcttctaaagcctctccctgcaggtgttgaaatcgatgaactccctaagcaaattgatgatacacagtacccaaaaacattcttctataaagaagaccttcatccaggcaaaacaa

SEQ ID NO: 122240 - DNA, 265 bp, Glycine max
ctccattgtctttgaacacttgtcaccatggccaagcttgttctgtccctttgtttccgtcttttcagtggctgcttcgctctgagagagtaggcacagcataatgagtgccagatccagaagctgtatccctcaaaccggataaccgtatagactcggaaggtgggttcattgagacctggaaccctaacaacaagccattccagtatgccggtgttgtcctctctcgctgcagccttaaccgcaatgcccttcgtagaccttc

SEQ ID NO: 122241 - DNA, 266 bp, Glycine max
tgtgaattaaaatatattcaattttgcgtttctctgcctaaaaggattgaaagatgggtcaagcattcggttgctaccaagtcgatcagtcaaatgtggctatcaaggagcattttggaaaatttgatgatgtcctagagcctggatgtcactgcctgccttggtgtcttgggtaccagattgctggtagtctgtcgctgcgagtgcagcaacttgatgttcgatgtgagacgaaaaccaaggacaatgtctttgtcaatgtggtt

SEQ ID NO: 122242 - DNA, 215 bp, Glycine max
attcaatatcctagtacaccgtattaaagaatttaagatatactatgatgagagcgcggttcccattactgttgctgggagttgttttcctggcatcagtttctgtctcatttggcattgcgtattggaaaagcagaaccccagtcacaacaagtgcctcctaagttgcaatagcgagaaagactcctacaggaaccaagcttgcaacgctcgtt

SEQ ID NO: 122243 - DNA, 272 bp, Glycine max
caaaacttgagccttaaaaagagatagtaactccaactccaagtcacattggtgacaaagttagaaacaaggagaaagaaagaagatggcaggaaagaaaatcccagatgtgttgctgaattcaggacacaaatgccagttataggcatgggaacttcagtggagaatcgtccatcaaatgagacccttgcttctatctatgttgaagccattgaggtgggttaccgtcattttgacactgctgcagtgtatggaacagaggaagccatagg

SEQ ID NO: 122244 - DNA, 271 bp, Glycine max
cacacacacacacacactaagaataatggcttctatcctccactactttttagccctctctctttctttctctttccttttcttcttatccgactccgtccccattccccaacaccacactaatcctacaaacctataaaccttctggttctacccgttcaaaatgatgcttccacagggctccatctctacaacctccaaaaaaggacccctctaatgcaagtaccagtcctggtggacctcaatggaaaccacttgtgggttaactgtg

SEQ ID NO: 122245 - DNA, 270 bp, Glycine max
agcaaaatgaccaagttcacaatcctcctcatgtctcttctcttctgcatcgcccacacttgcagcgcctccaaatggcagcaccagcaagatagctgccgcaagcagctccagggggtgaacctcacgcctgcgagaagcacatcatggagaagatccaaggccgcggcgatgacgatgatgatgatgacgacgacaatcacattctcaggaccatgcggggaagaatcaactacataaggaggaacgaaggataagacgaagacgaag

SEQ ID NO: 122246 - DNA, 263 bp, Glycine max
tgttccactgcctacaaaaactaatttggtggaaactcccaaggaatggcaactagatctaccttgtgacgaaattcctagtgtcttgaccacaactgatgagagattggtaggcagagaacatgaggatatgatcgttttcttggtggaattcaaaaatatgccagtcccatgatgcccctagatgaagaaattctttgctaaggttgcacaagatatagttgaggaatggtttgattgtgatgatgaggaggattcctttg

SEQ ID NO: 122247 - DNA, 265 bp, Glycine max
ttttcgtttgcgttgctgttgcgactgagtgagtgaagatggcgtgcttgcacgaccacagttgcgaagaccatgactgttcctctaactggtctctctacaaacacatcgacctctccaaggtaacgctttgaatgaggcaaatccaggaagtgttaagtcagttttcaaagcttgggaagagcgtctggattcttctggggttcacttggaaagcaatgagggtgatcctgagttacttgtcttcattccatttacttcagat

SEQ ID NO: 122248 - DNA, 264 bp, Glycine max
ctccattggtccttaaacactcatcagtcatgaccatggccaagctagttttttccctttgttttctgcttttcagtggctgctgcttcgctttcagttccagagagcagcctcagcaaaacgagtggagatccaaaaactcaatgccctcaaaccggataaccgtatagagtcagaaggagggctcattgagacatggaaccctaacaacaagccattccagtgtgccggtgttgccctctctcgctgcaccctcaaccgcaa

SEQ ID NO: 122249 - DNA, 261 bp, Glycine max
cttgatgatgttgaaactcctagaggttccatgttggatcttaaaatttctcaatctaaaattgcacttcccaaaaacacagttggaggaaccattctgcgtagtgatctattggcaaattttttcgcagagggcaattttagagcaagtgttgatttgcagcgcactcatcgtattaaaggaatgattaaaatggtggccacagttggtattcctgagaatacaggtatagcattggcctgtgctatgaatagttctttt

SEQ ID NO: 122250 - DNA, 199 bp, Glycine max
tcaatatcctagtacaccgtattagagaatttaagatgtactatgatgagagcgcggttcccattactgttgctgggagttgttttcctggcatcagtttctgtctcatttggcattgcgtattgggaaagcagaaccccagtcacaacaagtgcctccgaagttgcaatagcggagaaaggactcctacaggaaccaa

SEQ ID NO: 122251 - DNA, 263 bp, Glycine max
atcgcgagaaagttgaaactcggggacaacgagcttctgcgcacggagaagaagttcaaggttttcatggagaattacgggaggagctactccacagaggaggagtatttgcgccgtttggggatttcgcccagaacatggtcagagcggcggacatcaggcgctggaccccaccgccgtccacggcgtcacgcagttctccgatctcaccgaggacgagtttaagaagctctacactggcgtcaatggcggcttcccgtcat

SEQ ID NO: 122252 - DNA, 264 bp, Glycine max
aagacagtcatggcgtcgtttcttcaatggtttctggatccgaagaagaactggttcgccgctcagcacatgagatccctctccagacggcttcgcaaatacgggctccgatatgacgatttgtacgtccttactacgatctagatgtgaaggatgcgctgaatcggcttccgaaagatgtggtggacgctcgccacgcgcgtcttaaacgcgccatcgatctttccatgaagcacgagtacctccctgacaatcttcaggcaa

SEQ ID NO: 122253 - DNA, 270 bp, Glycine max
ggcaaaaggagatttgtttctggggatggtgaagagatgacattgattccgggaaccagtgttgaagaggcttacaacaagctaatagttgaacttgagaaaagtgttcctacattggttggcattgaatgtcccaaggatgagaaacttcctcgtcgcaaaatttttgacaaacctaagacgcgctgcttcactattctccctatggagtttaatcttgtggttcgtcagaagtttttaaattttgtgaggttcattatgaagaaaagg

SEQ ID NO: 122254 - DNA, 270 bp, Glycine max
ctcccaaggaatggcaactggatctaccttgtgacaaaattcctagtgtcttgaccacaactgatgagagattggtaggcacagaacatgagggatatgatccttttcttggtggaattcaaaaatatgcactcccatgatgcccctagatgaagaaattctttctaaggttgcacaagatatagttgaggaatggtttgattgtgttgatgaggaggattcctttgaggaagtttctttgagtgcagcactcaatggtgttgagggttt

SEQ ID NO: 122255 - DNA, 268 bp, Glycine max
cctagtacaccgtattaaagaatttaagatatactatgatgagagcgcggttcccattactgttgctgggagttgttttcctggcatcagtttctgtctcatttggcattgcgtattgggaaaagcagaccccagtcacaacaagtgcctccgaagttgcaatagcgagaaagactcctacaggaaccaagcatgccacgctcgttgcaacctccttaaggtggaggaagaagaagaatgcgaagaaggtcaaattccacgacgacga

SEQ ID NO: 122256 - DNA, 262 bp, Glycine max
cactgttccaactatggaagagtgagcatggacgtgtctaccataaccacgaagaagaggcaaagagacttgagattttcaagaataacttgaactatatcagggacatgaatgcaaacagaaaatcaccccattctcatcgtttaggattgaacaagtttgctgacatcactcctcaagagttcagcaaaaagtacttgcaagctcccaaggatgtgtcgcagcaaatcaaaatggccaacaagagaatgaagaaggaaca

SEQ ID NO: 122257 - DNA, 260 bp, Glycine max
cccaactaacaataattccttcacttgcagaacttagttatctgttgcatcatcatcatcttcattagtgttagccctaaacttcaccttcaaccatgaccacagtgccaccacacagtgtccaagtgcacacaacaacacaccgctacgaagccggcgtcgtcccgccggctcgttttgaggcgccgcgttacgaagccggcatcaaggcgccctcttccatttaccattccgagagaggtccgacgacctctcaggtt

SEQ ID NO: 122258 - DNA, 252 bp, Glycine max
agcagattcccttgatctagatgggtacacaatggacgaggcacttggtagtcgaaggttacttatgttagattaccatgatatcttcatgccatatgtgaggcagataaatcagctgaattctgccaagacttatgcgacaaggactatcctttttttttgagagaagatggaactttaaagccagtggccatcgaattaagtttgccacattctgctggggatctgtcagatgccgtcagtcaagtcgtc

SEQ ID NO: 122259 - DNA, 251 bp, Glycine max
agcgcgggtaaacggcgggagtaactatgactctcttaaggtagccaaatgcctcgtcatctaattagtgacgcgcatgaatggattaacgagattcccactgtccctgtctactatccagcgaaaccacagccaagggaacgggcttggcggaatcagcggggaaagaagaccctgttgagcttgactctagtccgactttgtgaaatgacttgagaggtgtaggataagtgggagctggaaacagcgaa

SEQ ID NO: 122260 - DNA, 248 bp, Glycine max
gggtgtttataatggacaattgtgaggagctcattcctgagtaccttggatttgtgaaaggtgttgttgactccgatgacttgccgctcaacatctctcgtgagatgctgcaacaaaacaagatcctgaaggtgatcaggaagaatctcgtgaagaagtgcattgagatgttcaatgaaattgcggagaacaaggaagattacaacaagttctatgatgctttttcgaagaatttgaagttgggtatc

SEQ ID NO: 122261 - DNA, 253 bp, Glycine max
cggctcgaggtgcggtttcctttgttggtgttgctgggaactgttttcctggcatcagtttgtgtctcattaaaggtgagagaggatgagaataaccctttctacttgagaagctctaacagcttccaaactctctttgagaaccaaaacggtcgcattcgtctcctccagagattcaacaaacgctccccacaacttgagaaccttcgagactaccggattgtccagtttcagtcaaaacccaacacaatcc

SEQ ID NO: 122262 - DNA, 253 bp, Glycine max
ctccattgtctttgaacactcatcaccatggccaagcttgtactttccctttgtttccttcttttcagtggctgcttcgctctgagagagcaggcacagcaaaatgagtgccagatccaaaagctgaatgccctcaaaccggataaccgtatagagtcggaaggtgggttcattgagacctggaaccctaacaacaagccattccagtgtgccggtgttgccctctctcgctgcacccttaaccgcaatgccc

SEQ ID NO: 122263 - DNA, 253 bp, Glycine max
cgtccgaaccctctggatcggggatctgcagtactggatggacgagaactatctcaatacctgctttgctcacaccggcgaggttacatcggttaaagtaattcgaaacaagcaaactagtcaatctgaaggttatgggtttattgagtttaatagtcgtgctggagctgagagaattcttcaaacatataatggggcaataatgccaaatggggggcagagtttcaggttgaattgggcaacttttagtgct

SEQ ID NO: 122264 - DNA, 250 bp, Glycine max; identical to SEQ ID NO: 111323

SEQ ID NO: 122265 - DNA, 254 bp, Glycine max
atcctaaacgatgagaatggggtgaacaagtttgctgacatcactcctcaagagttcagcaaaaagtacttgcaagctcccaaggatgtgtcgcagcaaatcaaaatggccaacaagaaaatgaagaaggaacaatattcttgtgaacatccacctgcatcatgggattggaggaaaaaaggtgtcatcacccaagtaaagtaccaagggggctgtggaagcggttgggcgttttctgccacgggagccataga

SEQ ID NO: 122266 - DNA, 250 bp, Glycine max
gtagttcaaatacccctaatggcacaggaggaaattctgtcttctagtgcaagtgatttcagaactgcaatggtgagtaaaaatagcaagcctcaagctactgcaatgcatgtgggagctatagaaattatcattgatagtttcgcaagtcctgactgcaacatagttggtgcaatgcttttggttgatacttatcataccaatcctgaaaatgcagttcgtagtatttttgttgcgcctttcagaggcg

SEQ ID NO: 122267 - DNA, 246 bp, Glycine max
aatcgatgctcgacggtcacggctcagtttttgttcatcactgaccaagccattgcgatgactaccaaactttctttagctatctttttcttttttcttttagccttattttcaaacctagcctttggcaaatgtaaagaaaccgaggtagaagaagaagaccctgagctcgtaacatgcaaacaccaatgccaacagccacagcaatacactgagggtgacaagcgggtatgcttgcaaagatgt

SEQ ID NO: 122268 - DNA, 249 bp, Glycine max
tagtgcaccgtaagggttgtgaagcaggcagagaagagccatggtgcacgtttacttctaccgaaactatgggaaaacgttcaagaagcctcgtcgtccctacgagaaggagcgtttggacgccgagttgaagctggtcggtgagtacgggcttcgctgcaagagggagttatggagggtccagtacgccctgagccgcatccgtaacaacgccagaaacctattgacccttgatgagaagaaccctcg

SEQ ID NO: 122269 - DNA, 255 bp, Glycine max
atgcttacctttaccaacatcacccagagatctatgagtactattcactacaactcacatgcaacgaagatagcactggtgatcgatggcagagggcatcttcaaatatcatgtccacacatgtcatcaaggtcgtcacactcgaagcatgataagagtagcccttcataccatagaatcagttccgatttgaagcctggaatggtgtttgttgtccctcccggtcatcccttcgtcaccatagcttccaataaa

SEQ ID NO: 122270 - DNA, 256 bp, Glycine max
gcaaagaatgctattctcatgaatatgccaaatgctgttctttcaatgtggagatattttgttggagatctcgtctttgaagtttctaagatgacttctccctacattaaatgtacagtctctttcttcatagcatttggaaatttggctgatgacaccatcaattttgaggcttttccccacaagctggtgcagtttggagagattcaggaaaaagttgtattgaaattttcacaagaggaatttcttacagctt

SEQ ID NO: 122271 - DNA, 254 bp, Glycine max
tgaattttgattctagcaagcagagcttttgtcaattttctattgaccttctcggtggaggaattttagtggacaaaactggagattggatcacacttatacaaaattctccaattagtaacttgttgagagttgctgcttggaagaaaggctgtttaatggttaagattgtgatgtctgggaatgcagcagtcaaaaggagtgattgggcctcattggtacaagtgtttttaacaaacagcaacagtacagag

SEQ ID NO: 122272 - DNA, 252 bp, Glycine max; identical to SEQ ID NO: 113261

SEQ ID NO: 122273 - DNA, 248 bp, Glycine max
tttgtcctctttgttgaggacaaagcagcagaccacaagaccgtcaccagaagatctataacttcagagagggtgatttgatcgcagtgcctactggtgttgcatggtggatgtacaacaatgaagacactcctgttgttgccgtttctattattgacaccaacagcttggagaaccagctcgaccagatgcctaggagattctatcttgctgggaaccaagagcaagagtttctaaaatatcagcaa

SEQ ID NO: 122274 - DNA, 251 bp, Glycine max
aatatctacacaaaagtgttccacttgagtgaaaagtagtgtgttaagaactaaacaatttttcaatggcgtccaagaaacaagaggagcgagctgaggcagctgcgaaagttgctgccaaagaactcgaacaagtcaacagagaaagaagagaccgtgatttcggtgttgttgctgaacaacaacaacaacatcatcaggaagatcaacaaaaacgtggtgtaatcgggtccatgtttaaggcggtgcaa

SEQ ID NO: 122275 - DNA, 250 bp, Glycine max
atcaccattactgatggtattgacaaaactagtgcaactttgcaatttagaaagttagcagattgtgattttctcaagagaaactttaagcagatgtctaatgttttgtgggtggctcctgaggacaaggcgagtttatggtcacaacttcattatgtttcgtgtaataatctggaaatgcaagaagcttatcttgtcaatctcgtaaatgtgttacgagaattgtatttgcacagtccagaggaagctc

SEQ ID NO: 122276 - DNA, 248 bp, Glycine max
ctcgagcgcttgcacaaaagcaatgactatgtcatttaatccaaacccgtgttctgatgcatggagtttggaatttctgaagcgtactggatttcattgcgatatcatttgtgtcactggatggactgccaccccaatgcaggatgttcaggttacaattgattggtttatttcctctcaggaatgtgttcccaggacctattgtgttttaaatccacaaaatccttttgtgttaaataggtggatgg

SEQ ID NO: 122277 - DNA, 251 bp, Glycine max; identical to SEQ ID NO: 110931

SEQ ID NO: 122278 - DNA, 250 bp, Glycine max
gaaagatgtcgaagcgtggtcgtggtggttcggcggggaacaagttccgcatgtcgctgggtcttccagtggcggcgacgtagaactgcgccgacaacacgggggcgaagaacctctacatcatttcggtgaaagggatcaaaggccgtttgaaccgtcttccctcggcctgcgttggcgacatggtgatggccaccgtgaagaagggaaaacccgatctgaggaagaaggtcttgccagctgtcatcgt

SEQ ID NO: 122279 - DNA, 249 bp, Glycine max
attgaattttgattctagcaagcagagcttttgtcaattttctattgaccttctcggtggaggaattttagtggacaaaactggagattggatcacacttatacaaaattctccaattagtaacttgttgagagatgctgcttggaagaaaggctgtttaatggttaagattgtgatgtctgggaatgcagcagtcaaaaggagtgattgggcctcattggtacaagtgtttttaacaaacagcaacag

SEQ ID NO: 122280 - DNA, 251 bp, Glycine max
cacaaaaatggagaaccaacaaccggcacctatctccgtgacactgctacatctgctatccaaaacttcgctcccatcaacaaaatccaccaacatctctgcgcgtttcacttttactcatatgacatgagccggcaagtggaggcacaccatttttgcgcgcaccagaacgaggagatgaggcagtgccttatctacgacagccccgagaagaaagccaggctcatagggctggaatacatcatctccga

SEQ ID NO: 122281 - DNA, 250 bp, Glycine max
ttctctccattgtctttgaacactgcatcacgatggccaagcttgttctttccctgtgtgtccttcttttcagtggctgcttcgctctgagagagcaggcacagcaaaatgagtgccagatccaaaagctgaatgccctcaaaccggataaccgtatagagtcggaaggtgggttcattgagacctggaaccctaacaacaagccattccagtgtgccggtgttgccctctctcgctgcacccttaaccg

SEQ ID NO: 122282 - DNA, 256 bp, Glycine max
cgtattaaagaatttaagatatactatgatgagagcgcggttcccattactgttgctgggagttgttttcctggcatcagtttctgtctcatttggcattgcgtattgggaaaagcagaaccccagtcacaacaagtgcctccgaagttgcaatagcgagaaagactcctacaggaaccaagcatgccacgctcgttgcaacctccttaaggtggaggaagaagaagaatgcgaagaaggtcaaattccacgacca

SEQ ID NO: 122283 - DNA, 236 bp, Glycine max
atatcctagtataccttaataaataatttaagatactatgatgagagcatggttcccattactgttgctgggacttgttttcctggcttcagtttctgtctcatttggctttgcttactgggaaaaagagaaccccaaacacaacaagtgtctccagagttgcaatagcgagagagactcgtacaggaaccaagcatgccacgctcgttgcaactcccttaggggtggagaaagaa

SEQ ID NO: 122284 - DNA, 247 bp, Glycine max
gcattatcagaagcagaaagaaagaataagaggttgcagcaacaatggcagccatggctgcgcttcagagctcaatggtcggtctctccctctcctccaactctttcttaggccaacgcctttctcccatcaccctcccctctcttcttccgggtaagtcaacagagaagcaatgtcctattgtaatgaggcttaaacgatgggaacggaaggagtgtaaaccaaacagccttcctatcttgcacaa

SEQ ID NO: 122285 - DNA, 247 bp, Glycine max
cctcaacaacaacaaacacagcctgggaaggagcatgctatgaatccagtaccccaattcactagccctgactacaagccttcaaataaacttcaaggaaagatagcattagtgactgggggtgactctgggattggacgagcggtgtgtaacttgtttgccttagaaggtgctaccgtgggcttcacatatgtgaaggggcatgaggacaaggacgcgagggacacgttggaaatgatcaagaggg

SEQ ID NO: 122286 - DNA, 250 bp, Glycine max
aaacctagccttgggcaaacttaaagaaaccgaggtcgaagaagatcccgagctcgtaacatgcaaacaccagtgccaacagcaacggcaatacactgagagtgacaagcgaacatgcttgcaacaatgtgacagtatgaagcaagagcgagagaaacaagtcgaagaggaaactcgcgagaaggaagaagaacatcaagagcagcatgaggaggaggaagaccaaaatccctacgtttttgaagaagat

SEQ ID NO: 122287 - DNA, 249 bp, Glycine max
cgctggcggttggcgcaacctttcgatcttcatccaacggggcaacgttcgatctgctgaactgaacttctttttatatgcactctgtgatttcactctgcttcgccatactatgggggacaacaacagcaacaacgcatgccttcatgcgcaaccaaaacgccgccgttcaggcccgcaccaaagcgcagaaccgctccaacgtccttcagctcaaactgattggacagagtcacccaaccggtctca

SEQ ID NO: 122288 - DNA, 248 bp, Glycine max
agagaatggctcccaagggtttaacctttctggctgtgttaatatgcgtttcagcactgtcactgagtccttctgttgcgggggaagggcaaaataatggccttgttatgaacttctacaaggaatcatgccctcaggctgaagacatcatcacagaacaagtcaagcttctctacaagcgccacaagaacactgctttctcctggctcaggaacatcttccatgactgtgctgttcagagttgtgat

SEQ ID NO: 122289 - DNA, 248 bp, Glycine max
aatcccttctggatttccgctcacagttatttgcaatagcatttttaatgagatgctcattagatatagctatgaaaaattactgcgccaggctagagctccaagcatgtttttacaatccttcaaaaattttgtttctttgtgtgtgtatggtgatgataacttaattagtgttcatgaatatgtcaagccttactttagtggttctaaattgaaaagctttctagctggtcataatatcaccatta

SEQ ID NO: 122290 - DNA, 224 bp, Glycine max
  unsure (1)..(224): unsure at all n locations
cttggattagtgcttccactctcctatctagtttangacttcgtgggtagacttgtctatctctcccctacgatcacgctcttaggctcatcgatccgcattgccgtacatagtggtcttattgtgaaaacacttgggcgttggtgcacatgtcagcttcattgatgttctctggagacaacaggctcactcagaaaacagtctttacttgcagagatttggac

SEQ ID NO: 122291 - DNA, 248 bp, Glycine max
ctcatcgtattaaaggaatgattaaaatggtggccacagttggtattcctgagaatacaggtatatcattggcctgtgctatgagtagttcttttaggtggcgtgtcagttctgatatttacaccatctgctctcatgactgtgaattatggaatcttgcttgcacaaaatctatgactatgtgcttgaatccagacccgtgttctgatgcgtggtgtttggatattctgaagcgtaccggatttcat

SEQ ID NO: 122292 - DNA, 220 bp, Glycine max
atttacaccatctgctctcatgactgtgaattgtggaatcttgctgtgacaaaagcaatgacgatgttctttaatccaaacccgtgttctgatgcatggagtttggaattactgaagcgtactggatttcagtgcgatatcatttgtgtcactcgatggactgccaccccaatgcaggatgttcaggttacaattgatgggttgatttcctctcaggaat

SEQ ID NO: 122293 - DNA, 247 bp, Glycine max
aatggcttagatggccagggaagtaaaattctggttaggaagttacctgaaagcaagtaccctgtagttcgattatccgaaatacctgctaagcagttggaaaatgataaatctgagcagaaaaaaattgttattagacctaggcctaataaaaacagtttgaatgatgctaacggagttgggatgaaaggaaaccctttaagaagtgtggaagaaaggaaggaggaatatgaccgggcacgggcac

SEQ ID NO: 122294 - DNA, 246 bp, Glycine max
aagttattatcaaataattaattaaattcctcgtggaatcttgttgaagccatgtctacagctggtcaggtcatcaagtgcagagctgcggtggcatgggaagcagggaagccactatcgatagataccatagaagtggcaccaccccagaaaggtgaagtgcgtttgaagatcctcttcaactccctttgccgtacagatgtttactggtgggatgctaagggccagactccgctgtttcctcgt

SEQ ID NO: 122295 - DNA, 185 bp, Glycine max
tgaaattttgataaacctcgatcacaggttgccgcaccttataacttgaaacaaaagcaatcgttacttgatttcaagaatctctcaatttcttcctacttctttgtgtacgatttcttaaggtaaagaaaatcactctctgtgctggccatagacttcgttaatcattttcttttccacacaac

SEQ ID NO: 122296 - DNA, 243 bp, Glycine max
tgatgagcttgattgttaccttcttaatgaagacttggtttgtgatgaacttgaggatgttatggaagaggggggaaacattgtggactaccatggctgtgatttctttcctgagcgttggtttgattgcgtggttgtacttcaaactgataacaccattttgtatgaccgtttgagtaggagggggtacaaagattcaaagctttcgaacaatattgaatgtgaaatcttccaagtgctgct

SEQ ID NO: 122297 - DNA, 245 bp, Glycine max
ccattgtgcagattgaaccagacatgaattcaaggtttcagcttttgagtaccactaccaatggtgatttcgttcaaggaaaagatctcgcaatggttaaagttaatgtagcatgtgctgctgttggcttgacatcaagttacactccaactccattgttggaatctcgtttgcaggaagacagagggctaattgtggaatattttggaaggatgtcttacgttgctcataacgttaatcagccc

SEQ ID NO: 122298 - DNA, 243 bp, Glycine max
tctccacattggaatctgaatgcaaacagtgtgatctatgtgactcgaggacaaggaaaggttagagttgtgaactgccaagggaatgcagtgttcgacggtgagcttaggaggggacaattgctggtggtaccacagaacttcgtggtggcggacaagccggagaacaaggattcgaatacatagtattcaagacacaccacaacgcagtcactagctacttgaaggatgtgtttagggcaa

SEQ ID NO: 122299 - DNA, 91 bp, Glycine max
gttgtacctttgaatcgcctatgttaatatctgagtggcgttgtacctttgaatcgccttaataaaatgtcagtcttcaagttttgtcttt

SEQ ID NO: 122300 - DNA, 246 bp, Glycine max
aacttattaacactttccttagttcaatatgggtaagcccttcttcactctctctctttcttccctttacttgctactcttgtcgagtgcatgctttgctattacctccagcaagttcaactattgccaactcaacaacctcaacgcgttggaacccgaccaccgcgttgagtccgaaggtggtcttatctaaacatggaactctcaacatcctgagctgcaatgcgccggtgtcactgtttccat

SEQ ID NO: 122301 - DNA, 246 bp, Glycine max
aatggcaacagtgagaacaccattgaattttgattctagcaagcagagcttttgtcaattttctattgaccttctcggtggaggaattttagtggacaaaactggagattggatcacacttatacaaaattctccaattagtaacttgttgagagttgctgcttggaagaaaggctgtttaatggttaagattgtgatgtctgggaatgcagcagtcaaaaggagtgattgggcctcattggtaca

SEQ ID NO: 122302 - DNA, 250 bp, Glycine max
  unsure (1)..(250): unsure at all n locations
caaggatggcaatttgtaagaaagatgtttggagagttgaatgtggaatcccttctggatttccgctcacagttatattttatagcatnnntaatgagatgctcattagatatagctatgaaaaattactgcgccaggctaaagctccaagtatgtttttacaatccttcaaaaattttgtttctttgtgtgtgtatggtgatgataacttaattagtgttcatgaatacgtcaagccttactttagtgg

SEQ ID NO: 122303 - DNA, 244 bp, Glycine max
gccacttagtaagaaagagggtgtgaagagagtggggagaagatttggtgttgtggccatggcggagtctaagagtactgtgcttgttacgggagcgggtggtcgcacaggacaaatagtttacaaaaaattaagagagaggccaaaccaatatgtggctagaggtctggttagaacagatgaaagcaaacagaacattggtgctgcagatgacgttattgttggggatataagagatgctgaa

SEQ ID NO: 122304 - DNA, 244 bp, Glycine max
gtggaggttgatagtcaagagggagttgctcacattggtgaattgaaatctggtgtctatgttccactgcctacaaaaactaatttggtggaaactcccaaggaatggcaactggatctaccttgtgataaaattcctagtgtcttgactacaactgatgagagattggtaggcacagaacatgagggatatgatcctattcttggtggaattcaaaaatatgccactcccatgatgcccctag

SEQ ID NO: 122305 - DNA, 243 bp, Glycine max
gtcaagttggaatcaacccatactccatggaatggactggtttggccaatagattactgagtaagggcaacgatattctgtgttgcgattatgctagttttgatggtttgattacgaagcaagttatgagcaaaatggcagaaatgatagacagtctttgtggtggtgatgcaaaattcatgcgtgaaaggacacacctgctgttggcttgttgttcaaggatcgcaatttgtaacagagatg

SEQ ID NO: 122306 - DNA, 241 bp, Glycine max
cactttccttagttcaatatggtgaagcccttcttcactctctctctttcttccctttgcttgctactcttgtcgagtgcatgctttgctattacctccagcaagttcaacgagtgccaactcaacaacctcaacgcgttggaacccgaccaccgcgttgagtccgaagtggtcttattgaaacatggaactctcaacaccctgagctgcaatgcgccggtgtcactgtttccaaacgcac

SEQ ID NO: 122307 - DNA, 240 bp, Glycine max
cttaattattaacacttccttagttcaatatggggaagcccttcactctctctctgtcttccctttgcttgctactcttgtcgagtgcatgctttgctattagctccagcaagctcaacgagtgccaactcaacaacgtcaacgcgttggaacccgaccaccgcgttgagtccgaaggtggtttgattcaaacatggaactctcaacaccctgagctgaaatgcgccggtgtcactgttt

SEQ ID NO: 122308 - DNA, 242 bp, Glycine max
ttgtctttgaacactcatcaccatggccaagcttgttctttccctttgtttccttcttttcagtggctgcttcgctctgagagagcaggcacagcaaaatgagtgccagatccaaaagctgaatgccctcaaaccggataaccgtatagagtcggaaggtgggttcattgagacctggaaccctaacaacaagccattccagtgtgccggtgttgccctctctcgctgcacccttaaccgca

SEQ ID NO: 122309 - DNA, 243 bp, Glycine max
gcaagacaaagagagccaagaaagtgaaggttctgagtctcaaatagaaccacgaatacataagaataagaacccttttcacttcaactctaaaaagttccaaactctcttcaaaaaacaatatggccacgttcgcgtcctccagaggttcaacaaacgctcccaacagcttcagaatctccgagactaccgcattttggagttcaactccaaacccaacacccttcttctcccccaccatgc

SEQ ID NO: 122310 - DNA, 249 bp, Glycine max
ttctagcaagcagagcttttgtcagtttgctattgaccttctcggtggaggaatcttagtggacaaaactggagattggatcacacttatacaaaattctccaattagtaacttgttgagagttgctgcttggaagaaaggctgtttaatgatcaagattgtgatgtctgggaatgcagcagtcaaaaggagtgattgggcctcattggtacaagtgtttttaacaaacagcaacagtacagagcattt

SEQ ID NO: 122311 - DNA, 248 bp, Glycine max
tctcgagccgaatcggctcgacggctctagctccaccaagagtgctgatgaaatgacaaggctcaaggattatgtgaccaggatgaaagaacgtcagagtgacatctactacatcacaggtgaaagcaagaaggctgttgagaactctccattcttagagaagttgaagaagaagggatacgaggttctttatatggttgatgccattgatgaatatgctgttggtcagctcaaggaatttgagggca

SEQ ID NO: 122312 - DNA, 244 bp, Glycine max; identical to SEQ ID NO: 113082

SEQ ID NO: 122313 - DNA, 243 bp, Glycine max
tgatgataccatcaattttgaggcttttccccacaagctggtgcaatttggagagattcaggaaaaagttgtattgaaattttcacaagaggaatttcttacagcttggtcaactcaggtgcgtcctgcaacaactctgttggctgatgggtgtccatattgtatgcaatggtgcatgatagttcagtgactacaataccaggtgattttgtcattggtgtcaagttgacaaccataaacaat

SEQ ID NO: 122314 - DNA, 242 bp, Glycine max
acttgaagtgctttctctcagcagatccacaagctttgtcaacagtttgtgctgaattgagtgaggcatgcaagaagcatggcttcttccttgttgtcaaccatggagttgatagcaagctcatagctcaagctcataagctcatagatgatttcttctgcatgcaactctcacagaagcagaaggctcagagaaagattggagaacattgtggctatgctaatagcttcattggaagattc

SEQ ID NO: 122315 - DNA, 244 bp, Glycine max
cttgctctatactacacagtacacacactagaagaataatggcttccatcctccactactttttagccctctctctttcttgctcttttcttttcttcttatccgactcagtcacccctacaaaaccaataaaccttgttgttctacccgttcaaaatgatggttccacagggctccattggtccaacctccaaaatagaacccctctaatgcaagtaccagtcctggtggacctcaatggaaa

SEQ ID NO: 122316 - DNA, 242 bp, Glycine max
ctcttcttctaccacactacaattcaaaggcgatagtgatactggtaattaatgaaggagatgcaaacattgaacttgttggcctaaaagaacaacaacaggagcagcaacaggaagagcaacctttggaagtgcggaaatatagagccgaattgtctgaacaagatatatttgtaatcccagcaggttatccagttgtggtcaacgctacctcaaatctgaatttctttgctattggtatt

SEQ ID NO: 122317 - DNA, 243 bp, Glycine max
agcatgccacgctcgttgcaacctccttaaggtggaggaagaagaagaatgcgaagaaggtcaaattccacgaccacgaccacaacacccggagagggaacgtcagcaacacggtgagaaggaggaagacgaaggtgagcagccacgtccattcccattcccacgcccacgccaacctcatcaagaggaagagcacgagcagaaggaggaacacgaatggcatcgcaaggaggaaaaacacgg

SEQ ID NO: 122318 - DNA, 243 bp, Glycine max
tgcttctcctccacccatccacaaacgaacacacactttgattgagaatggggcgtgttcgcacaaagacagtcaagaagtcctcgcggcaagtgatcgagaggtactactctcgcatgacgctggacttccacacgaacaagaaggttctggaagaggtggccatcattccctccaagaggctccgcaacaagatcgcgggattctccacccacctcatgaagcggatccagaagggtcccg

SEQ ID NO: 122319 - DNA, 201 bp, Glycine max
gtacaccgtattaaagaattgaagatagactatgatgagagcgcggttcccagtactgtggctgaaagttgtgttcgtggcatcagtttctggctcatgtggcattgcgtatcgggtatagcagagccccagtcacaacaattgcctccgaaagttgcaatagtgggaaggactcctacaggaaccaagcatgccacgctc

SEQ ID NO: 122320 - DNA, 206 bp, Glycine max
gccttactttagtggttctaaattgaaaagctttctagctggtcataatatcaccattactgatggtattgactacactagtgcaactttgcaatttagaaagttagcagattgtgattttctcaagagaaactttaagcagatgtctaatgttttgtgggtagctcctgaggacaaggcgagtttatggtcacaacttcattatg

SEQ ID NO: 122321 - DNA, 245 bp, Glycine max
atccttttgtgttaaataggtggatggggaaactgactttcccccagggcacttcccgaagtgtcaaaagaatgcctctttctatagggggaggagctggtgcaaagaatgctattctcatgaatatgccaaatgctgttctttcaatgtggagatattttgttggagatctcgtctttgaagtttctaagatgacttctccctacattaaatgtacagtctctttcttcatagcatttggaaat

SEQ ID NO: 122322 - DNA, 266 bp, Glycine max
gtacaccgtattaaagaatttaagatatactatgatgagagcgcggttcccattactgttgctgggagttgttttcctggcatcagtttctgtctcatttggcattgcgtattgggaaaagcagaacccagtcacaacaagtgcctccgaagttgcaatagcgagaaagactcctacaggaaccaagcatgccacgctcgttgcaacctccttaaggtggaggaagaagaagaatgcgaagaaggtcaaattccacgaccacgacc

SEQ ID NO: 122323 - DNA, 260 bp, Glycine max
taccttaataaataatttaagatactatgatgagagcacggttcccattactgttgctgggacttgttttcctggcttcagtttctgtctcatttggcattgcttactgggaaaaagagaacccaaacacaacaagtgtctccagagttgcaatagcgagagagactcgtacaggaaccaagcatgccacgctcgttgcaacctccttaaggtggagaaagaagaatgtgaagaaggtgaaattccacgaccacgaccac

SEQ ID NO: 122324 - DNA, 251 bp, Glycine max
ttaattattaacacttccttagttcaatatggggaagcccttcactctctctctttcttccctttgcttgctactcttgtcgagtgcatgctttgctattagctccagcaagctcaacgagtgcaactcaacaacctcaacgcgttggaacccgaccaccgcgttgagtccgaagtggtttgattcaaacatggaactctcaacaccctgagctgaaatgcgccggtgtcactgtttccaaactcaccctc

SEQ ID NO: 122325 - DNA, 249 bp, Glycine max
gagcgaatcggctcagggaactattctgcgtagtgatctattggcaaattacctgacagagggcaatttaagagcaagtgttgatttgcagcgcactcatcgtattaaaggaatgataaaatggtggccacagttggtattcctgagaatacaggtatatcattggcctgtgctatgaatagttcttttagggggcgtgccagttctgatatttacaccatctgctctcaagactgtgaattatggaat

SEQ ID NO: 122326 - DNA, 257 bp, Glycine max
gaagaagaagaatgcgaagaaggtcaaattccacgaccacgaccacagcacccggagagggaacgtcagcaacacggtgagaaggaggaagacgaaggtgagcagccacgtccattcccatcccacgcccacgccaacctcatcaagaggaagagcacgagcagaaggaggaacacgaatggcatcgcaaggaggaaaaacacggaggaaagggaagtgaagaggaacaagatgaacgtgaacacccacgcccacac

SEQ ID NO: 122327 - DNA, 251 bp, Glycine max
tcgaaaagtttccttgacaatctaattctgcaaaaatggcaagcaataaggagtctaagttcccagcacagagccagaaaactcagccaggaaaagaacatgtaatgaatccactcccaaagccacaaatcctgatcacaaggccgccaataaactccagggaaaggtggcgttggtgacaggaggtgactcaggaattggcagagcggtttgcctgtgtttcgcaaaagagggtgcaacgtggcctttac

SEQ ID NO: 122328 - DNA, 247 bp, Glycine max
cttgtcagccattggttaaacactcatgcagttgttgagccattcatcatagcaacaaacaggcatctcagtgttgttcaccctatttataaactccttcaccctcactatcgtgaaccatgaacataaatggccttgctcggttatcactggtcaacgacggtggcgttatagaacaaacatttttgtggggaaggtatacggtggaaatgtctgctgtagtttacaaggattgggtttttacaga

SEQ ID NO: 122329 - DNA, 247 bp, Glycine max
tcacaacacatctaaacaaaaaatcaagaacaatggcttatgctaggcttgctcctatggctgtcttcttgcttgccacttccaccataatgttcccaacgaagatagaagcagcaattgtaatggtgcatgttcacctttcgagatgccaccgtgccgctcacgtgattgtcgttgtgtccctataggactagttgctggtttctgcatacatccaactggactttcatctgttgcgaagatgatc

SEQ ID NO: 122330 - DNA, 239 bp, Glycine max
aacttattaacactttccttagttcaatatggggaagcccttcttcactctctctctttcttccctttgcttgctactcttgtcgagtgcatgctttgctattacctccagcagttcaacgtgtgccaactcaacaacctcaacgcgttggaacccgaccaccgcgttgagtccgaagtggtcttattgaaacatggaactctcaacaccctgagctgcaatgcgccggtgtcactgtt

SEQ ID NO: 122331 - DNA, 238 bp, Glycine max
caaacagcaacagtacagagcatttcgatgcatgtaagtggacaaaatcagaaccacattcctgggaattgatcttcccaatagaggtatgtggtcctaataatggctatgaatgtggagttctgagtgggcaaatcaaacttcatggcatttgagtctccttatagacaatcccagacagtctacagtattcgacattctcttgggaatctctcaagattttgaaattgctggtaat

SEQ ID NO: 122332 - DNA, 239 bp, Glycine max
gagggatatgatccttttcttggtggaattcaaaaatatgccactcccatgatgcccctagatgaagaaattctttctaaggttgcacaagatatagttgaggaatggtttgttgtgttgatgaggaggattcctttgaggaagtttctttgagtgcagcactcaatggtgttgagggtttggactatatggaaagaattcctcttgccacatctgagggttttcctcatgtgctttca

SEQ ID NO: 122333 - DNA, 242 bp, Glycine max
aaggagggcaacttactgagatagttcgccgcagaccatatgctgttattttgtttgatgagattgagaaggcacatgctgatgtcttcaatgtattccttcaaattttggatatggaagagtaaccgactcacaaggtcgcacagtaagttttaccaacactgttatcattatgacctcaaatgttggatcacagtacatcttgaacacagatgatgacaccacgccgaaagagttggctt

SEQ ID NO: 122334 - DNA, 242 bp, Glycine max
ctagttcaatatcctagtataccttaataaataatttaagctactatgatgagagcacggttcccattactgttgctgggacttgttttcctggcttcagtttctgtctcatttggattgcttactgggaaaaagagaaccccaaacacaacaagtgtctccagagttgcaatagcgagagagactcgtacaggaaccaagcatgccacgctcgttgcaacctccttaaggtggagaaagaa

SEQ ID NO: 122335 - DNA, 261 bp, Glycine max
aagaggaagagcacgagcagaaggaggaacacgaatggcatcgcaaggaggaaaaacacggaggaaagggaagtgaagaggaacaagatgaacgtgaacacccacgcccacaccaacctcataaaaggaagaggaaaagcacgaatggcaacacaagcaggaaaagcaccaaggaaaggaaagtgaagaagaagaagaagaccaagacgaggatgaggagcaagacaaagagagccaagaaagtgaaggttctgagtctca

SEQ ID NO: 122336 - DNA, 253 bp, Glycine max
cactttctctcgtttcaatcgaaaaaaatcatgggcagaaaattcttcgtcggtggcaactggaaatgcaatgggaccactgaggaggtgaagaagattgttactactttaaatgaagtaaagtccctggagaagatgttgtagaagttgttgtgagccctccttttgtgttccttccttttgtaaaaagtttgctgcgccctgatttccatgtctcggcccaaaattgttgggttcgcaaaggtggtgctta

SEQ ID NO: 122337 - DNA, 250 bp, Glycine max
atactatgatgagagtgcggtttcctttgttggtgttgctgggaactgttttcctggcatcagtttgtgtctcattaaaggtgagagaggatgagaataaccctttctacttgagaactctaacagcttccaaactctctttgagaaccaaaacggtcgcattcgtctcctccagagattcaacaaacgctccccacaacttgagaaccttcgagactaccggattgtccagtttcagtcaaaacccaac

SEQ ID NO: 122338 - DNA, 250 bp, Glycine max
tcgatttgggggtgccattgatgatgctgctcgctacttcaaggatgctcatgacagggcgcttagtccttatgagtttgttgaaagtatgaagaagaagggaattcgtgtgccagaatagggcacaggatcaagaatagggacaacaaagataagagagttgagctgctacagaagtttgcacgcacacattttccttctgtgaaatacatggaatatgctgttcaagttgagacctacacgctcacaa

SEQ ID NO: 122339 - DNA, 247 bp, Glycine max
tgaacactcatcaccatggccaagcttgttctttccctttgtttccttcttttcagtggctgcttcgctctgagagagcaggcacagcaaaatgagtgccagatccaaaagctgaagccctcaaaccggataaccgtatagagtcggaaggtgggttcattgagacctggaaccctaacaacaagccattccagtgtgccggtgttgccctctctcgctgcacccttaaccgcaatgcccttcgtag

SEQ ID NO: 122340 - DNA, 245 bp, Glycine max
attgaattttgattctagcaagcagagcttttgtcaattctctattgatcttcttggtggaggaattttagtggacaaaactggagattggatcacacttatacaaaattctccattagtaacttgttgagagttgctgcttggaagaaaggctgtttaatggttaagattgtgatgtctgggaatgcagcagtcaaaaggagtgattgggcctcattggtacaagtgtttttaacaaacagcaa

SEQ ID NO: 122341 - DNA, 242 bp, Glycine max
ccctagggtattttaccttgctgggaacccagatatagagtacccagagaccatgcaacaacaacaacagcagaaaagtcatggtggacgcaagcaggggcaacaccagcagaggaagaggaagaaggtggcagcgtgctcagtggcttcagcaaacacttcttggcacaatccttcaacaccaacgaggacccagctgagaaacttcagtctccagacgacgaaaggaagcagatcgtgac

SEQ ID NO: 122342 - DNA, 237 bp, Glycine max
gtaataatctggaaatgcaagaagcttatcttgtcaatctcgtaaatgtgttacgagaattgtatttgcacagtccagaggaagctcgccaattgagaaggaaagctctcctcgtattgaatggctgcaaaaagctgatgtgcctaccatagcacagattgaagagttccattcgatgcagaggatgatgaatgctcctgattcaaatgataatattgatctactgttgagcattga

SEQ ID NO: 122343 - DNA, 217 bp, Glycine max
caatatggggaagcccttcactctctctctttcttccccttgcttgctactcttgtcgagtgcatgctttgctattagctccagcaagctaacgggtgccaacgcaacaacctcaacgcgttggaacccgaccaccgcgttgagtccgaagtggtttgattcacacatggaactctcaacaccctgagctgaaatgcgccggtgtcactgtttccaa

SEQ ID NO: 122344 - DNA, 257 bp, Glycine max
ctcacattggtgaattgaaatctggtgtctatgttccactgcctacaaaaactaatttggtggaaactcccaaggaatggcaactggatctaccttgtgacaaaattcctagtgtcttgacacaactgatgagagattggtaggcacagaacatgagggatatgatccttttcttggtggaattcaaaaatatgccactcccatgatgcccctagatgaagaaattctttctaaggttgcacaagatatagttgagg

SEQ ID NO: 122345 - DNA, 174 bp, Glycine max
accgcgatcacaggttgccgcaccttaaaaccggaaacaaaagcaatcgttacttgatttcaagaatctctcaatttcttcctacttctttgtgtacgatttcttaagggaaagaaaatcctctctgtgctggccacagacttcgtgaatcattttcttgtccacacaacatac

SEQ ID NO: 122346 - DNA, 249 bp, Glycine max
gcacgaatggcaacacaagcaggaaaagcaccaaggaaaggaaagtgaagaagaagaagaagaccaagacgaggatgaggagcaagacaaagagagccaagaaagtgaaggttctagtctcaaagagaaccacgaagacataagaataagaacccttttcacttcaactctaaaaggttccaaactctcttcaaaaaccaatatggccacgttcgcgtcctccagaggttcaacaaacgctcccaacag

SEQ ID NO: 122347 - DNA, 242 bp, Glycine max
gctattacctccagcaagttcaacgagtgccaactcaacaacctcaacgcgttggaacccgaccaccgcgttgagtccgaaggtggtcttattgaaacatggaactctcaacacctgagctgcaatgcgccggtgtcactgtttccaaacgcaccctcaactgcagcggcctccacttgccatcttactcaccttatctgcaaatgatcattgtcgttcaagggaagggagcaattggattt

SEQ ID NO: 122348 - DNA, 152 bp, Glycine max
cttgtaatagtaattagaaaaaaataaatatgaatgaaagaaatcactcaaagaaactacgctatgctgtttcatttccttgttttatgaaaggtcatgcacttgaatatcactccctctttttcctctctatttggattaaaaataaatga

SEQ ID NO: 122349 - DNA, 237 bp, Glycine max
ctcgagcgctccattggtccttaaacactcatcagtcatcaccatggccaagctagttttttccctttgttttctgcttttcagtggctgctgcttcgctttcagttcagagagcagcctcagcaaaacgagtgccagatccaaaaactcaatgccctcaaaccggataaccgtatagagtcagaaggagggctcattgagacatggaaccctaacaacaagccattccagtgtgcc

SEQ ID NO: 122350 - DNA, 242 bp, Glycine max
gtaacctctgtaactgtggagaacgtgacattccctcccaccgtgaagcctccctgctcccccaacaccttcttcctcgccggcgccggcgtcaggggcctccaaattcatcacgctttcgttaaattcactgccatctgcatttacctccaatacgacgccctttccttcctctccgttaagtggaaaaccaagtctgctcaccagttaacggaatccgaccaattcttctcagatatcgt

SEQ ID NO: 122351 - DNA, 243 bp, Glycine max
caactccaaacccaacaccctccttctccccaaccatgctgacgctgattacctcatcgttatccttaacgggactgccattctttccttggtgaacaacgacgacagagactctacagacttcaatctggtgatgccctgagagtcccctcaggaaccacatactatgtggtcaaccctgacaacaacgaaaatctcagattaataacactcgccatacccgttaacaagcctggtagattt

SEQ ID NO: 122352 - DNA, 259 bp, Glycine max
cgaggacgaagatgaagataaacctcgtcctagtcgaccaagccaaggaaagcgtgaacaagaccaggaccaggacgaggacgaagatgaagatgaagatcaacctcgcaagagccgcgatggagatcgaaaaagacacaacccagaagacctagacaagaagaaccacgtgaaagaggatgcgagacaagaaacggggttgaggaaaatatctgcaccttgaagcttcacgagaacattgctcgcccttcacgcgctg

SEQ ID NO: 122353 - DNA, 251 bp, Glycine max
taaacactcatcagtcatcaccatggccaagctagttttttccctttgttttctgcttttcagtggctgctgcttcgctttcagttccagagagcagcctcagcaaaacgagtgcagatccaaaaactcaatgccctcaaaccggataaccgtatagagtcagaaggagggctcattgagacatggaaccctaacaacaagccattccagtgtgccggtgttgccctctctcgctgcaccctcaaccgcaa

SEQ ID NO: 122354 - DNA, 248 bp, Glycine max
ctaattcggagaccttgcaagacttcatcaatggctgtcaaagtttatattgtgtactactccatgtatgggcatgttgagaaactagcagaagaaataaagaaaggggcttccctgtggaaggtgttgaggccaagttatggcaggtacctgagacactgctggatgaggtgcttggtaagatgagtgcaccacccaagagtgacgtaccagtcattacccccaatgaactatccgaggctgatggc

SEQ ID NO: 122355 - DNA, 243 bp, Glycine max
ggactctattcaggcggaattatgctgccaacagatataatcagcaagattagtccactactcgtccttaatgaaatctttagaactgatggtgaacaggcctttaagtttctcctcctaaagtaattcaagtgagtaagtctgcatggatgactgatgaagaatttgcaagagaaatgcttgctggtgtacttccaaacttgattcgttgtcttaaggattaccctccacgaagcaagctag

SEQ ID NO: 122356 - DNA, 244 bp, Glycine max
aatagatcctcaatacaatgaggttcaggctcagatggaaacaaatttgtttaaattgtctcttgatgatgttgaaactcctaaaggttccatgttggatcttaaaatttccagtctaaaattgcacttcccaagaacacagttggaggaactattctgcgtagtgatctattggcaaattttctgacagagggcagttttagagcaagtgttgatttgcagcgcactcatcgtattaaaggaa

SEQ ID NO: 122357 - DNA, 239 bp, Glycine max
atatcctagtacagcgtattaaagaatttaagatatactatgatgagagcgcggttcccattactgttgctggtagttgttttcctggcatcagtttctgtctcatttgcattgcgtattgggaaaagcagaaccccagtcacaacaagtgcctccgaagttgcaatagcgagaaagactcctacaggaaccaagcatgccacgctcgttgcaacctccttaaggtggaggaagaagaa

SEQ ID NO: 122358 - DNA, 237 bp, Glycine max
actcgccatacccgttaacaaacccggtagatttgagagtttcttcctatctagcactcaagctcaacagtcctacttgcaagggttcagcaagaatattctagaggctcatacgacaccaaattcgaggagataaacaaggttctgtttggtagagaggaggggcagcaacaaggggaggagaggctgcaagagagtgtgattgtggaaatctcaaagaaacaaattcgggaactg

SEQ ID NO: 122359 - DNA, 232 bp, Glycine max
caatatcctagtacaccgtattaaagaatttaagatatactatgatgagagcgcggttcccattactgttgctggtgtttgttttcctggcatcagtttctgtctctttggcattgcgtattgggaaaagcagaaccccagtcacaacaagtgcctccgaagttgctatagcgagaaagactcctacaggaaccaagcatgccacgctcgttgcaacctccttaaggtggag

SEQ ID NO: 122360 - DNA, 235 bp, Glycine max
ctccagcgttgttgcattgtagaaggcgatggccgcgcgagctctgttgaccagaaaaaccctagccaccgtgctccgcaacgacgcgaacccataatcggagttgcataacagcagcggctactcattcacgcgggttgcacgtgtacacgctacccgatctggattacgactatggcgcactggagccagccatcagcggcgacatcatgcagctgcaccaccagaagcacca

SEQ ID NO: 122361 - DNA, 244 bp, Glycine max
gatagctgccgcaagcagctccagggggtgaacctcacgccctgcgagaagcacatcatggagaagatccaaggccgcggcgatgacgatgatgatgatgacgacgacaatcacattctcaggaccatgcggggaagaatcaactacataaggaggaacgaaggaaaagacgaagacgaagaagaagaaggacacatgcagaagtgctgcacagaaatgagcgagctgagaagccccaaatgcc

SEQ ID NO: 122362 - DNA, 253 bp, Glycine max
gtcgcagaagcagcagctacaggacagtcaccagaagattcgtcacttcaatgaaggagacgtactcgtgattcctcctggtgttccttactggacctataacactggcgatgaacagttgttgccatcagtcttcttgacacctctaacttcaataaccagcttgatcaaactcctagggtattttaccttgctgggaacccagatatagagtacccagagaccatgcaacaacaacaacagcagaaaagtc

SEQ ID NO: 122363 - DNA, 249 bp, Glycine max
aagcaatggctacttcaaagttgaaaacccagaatgtggttgtatctctctccctaaccttaaccttggtactggtgctactgaccagcaaggcaaactcagcggaaactgttctttcagctggaacaagttcgtgccgaagcaaccaaacatgatcctccaaggagacgctattgtgacctcctcgggaaagttacaactcaataaggttgacgaaaacggcaccccaaaaccctcgtctcttggtcg

SEQ ID NO: 122364 - DNA, 229 bp, Glycine max
gataaacctcgtcctagtcgaccaagccaaggaaagcgtgaacaagaccaggaccaggacgaggacgaagatgaagatgaggatctacctcgcaagaggcgcgaatggagacgaaaaagacaacaaccagaagacctagacaagaagaaccacgtgaaagaggatgcgagacaagaaacggggttgaggaaatatctgcaccttgaagcttcacgagaacattgctcgg

SEQ ID NO: 122365 - DNA, 239 bp, Glycine max
attttcgcagcgatctttcgctcgttgttgtacgaggcatgcggtcggatagtgaacccgatttacgggtctgtcgggctattatggtccgggagctggcagctgtgcaagccgccgtggaaaacgtcttgaaaggcgcgccgattacgccgatcacgtctgaagccgcggctagcgggcggtgcccaccgctcaaggcttacgacatacgccacgtgttcaaagacgagaactccgcc

SEQ ID NO: 122366 - DNA, 235 bp, Glycine max
gataccatcaattttgaggctttccccacaagctggtgcagcttggagagattcaggaaaaagttgtattgaaattttcacaagaggaatttcttacagcttggtcactcaggtgcgtcctgcaacaactctgttggctgatgggtgtccatatttgtatgcaatggtgcatgatagttcagtgtctacaataccagggtgatttgtcattggtgtcaagttgacaaccataaac

SEQ ID NO: 122367 - DNA, 244 bp, Glycine max
cggctcgagagctcatacgacaccaaattcgaggagataaacaaggttctgtttggtagagaggaggggcagcaacaaggggaggagaggctgcaagagagtgtgattgtggaatctcaaagaaacaaattcgggaactgagcaaacatgccaaatctagttcaaggaaaaccatttcttctgaagataaacctttcaacttgagaagccgcgaccccatctattccaacaagcttggcaagtt

SEQ ID NO: 122368 - DNA, 233 bp, Glycine max
tcctagtataccttaataaataatttaagatactatgatgagagcacggttcccattactgttgctgggacttgttttcctggcttcagtttctgtctcatttgcattgcttactgggaaaaagagaaccccaaacacaacaagtgtctccagagttgcaatagcgagagagactcgtacaggaaccaagcatgccacgctcgttgcaacctccttaaggtggagaaagaaga

SEQ ID NO: 122369 - DNA, 234 bp, Glycine max
ttcaaaccttgctctatactacacagtacatacactagaagaatattggcttccatcctccactactttttagccctctctctttcttgctctttacttttcttttatccgactcagtcacccctacaaaaccaatataccttgttgttctacccgttcaaaatgatggttccacagggctccatagccccaacctccaaaaaagaacccctctaatgcaagtaccagtcctgg

SEQ ID NO: 122370 - DNA, 236 bp, Glycine max
  unsure (1)..(236): unsure at all n locations
agtntcatatcctattacaccgtattaaagaatttaagatatactatgatgagagcgcggttcccattactgttgctgggagttgtgttcctggcatcagtttctgttcatttggcattgcgtattgggaaaagcagaacctcagtcacaacgagtgcgtccgaagttgcgatagcgagaaagactcctacaggaaccaagcatgccacgctcgttgcaacctccttagggtggag

SEQ ID NO: 122371 - DNA, 216 bp, Glycine max
acgaaaggacggcgatcgtgacagtggaaggaggtctcagcgttatcagcccgaagtggcaagaacaacaagatggcgatgaagagaagacgaagatgatgaagatggacaaattccctctcaccctcctcgccgaccaagccatggaaagcgtgaacaagacgaggacgaggacgaagatgaagataaacctcgtcctagtcgaccaagccaagg

SEQ ID NO: 122372 - DNA, 250 bp, Glycine max
cgggaagcaaataagcacgggcgagagcgtggcaatcaaagtaatcaacaaagagcaagtgagaaaagaaggaatgatggaacaaatcaaacgcgaaatttccgtgatgcgttggtgcgacacccaaacgtggtggaaatcaaggaagtgatggccacaaagacaaaaatcttcttcgtgatggaatacgtgcgtggcggggaactcttcgccaaaatctccaaaggcaaactcaaagaagatctcgccc

SEQ ID NO: 122373 - DNA, 248 bp, Glycine max
ctctcttctagttccagcatatcaactcatcgttccatattggaccttcacctaaccaagtttaccacacagaaacaggtgtcttcactgttccaactatggaagagtgagatggacgtgtctaccataaccacgaagaagaggcaaagagacttgagattttcaagaataacttgaactatatcagggacatgaatgcaaacagaaaatcaccccattctcatcgtttaggattgaacaagtttgct

SEQ ID NO: 122374 - DNA, 245 bp, Glycine max
ctcgagcgaattagttcattctctttgcgcagttccctacctctcctttcaagatgcagatcttcgtcaagaccctcaccggaaagaccatcacccttgaggtggaaagtctgacaccatcgacaacgtcaaggccaagatccaggacaaggaaggaattcccccggatcagcaacgtctcatcttcgccggaaagcagctcgaggacggccgtaccctcgccgactacaacatccagaaggagt

SEQ ID NO: 122375 - DNA, 148 bp, Glycine max
tgaaattttgataaaccgcgatcacaggttgccgcaccttacaaccggaaacaaaagcaatcgttacttgatttcaagaatctctcaatttcttcctacttctttgttacggtttcttaagggaaagaaaatcactctctgtgctggc

SEQ ID NO: 122376 - DNA, 238 bp, Glycine max
gttcaacgagtgccaactcaacaacctcaacgcgttggaacccgaccaccgcgttgagtccgaaggtggtcttattgaaacatggaactctcaacaccctgagctgaatgcgccggtgtcactgtttccaaacgcaccctcaaccgcaacggcctccacttgccatcttactcaccttatccccaaatgatcattgtcgttcaagggaagggagcaattggatttgcatttccgggat

SEQ ID NO: 122377 - DNA, 232 bp, Glycine max
attaaatgtacagtctctttcttcatagcatttggaaatttggctgatgacaccatcaattttgaggcttttccccacaagctggtgcagtttggagagattcggaaaaagttgtattgaaattttcacaagaggaatttcttacagcttggtcaactcaggtgcgtcctgcaacaactctgttggctgatgggtgcccatatttgtatgctatggtgcatgatagttcagt

SEQ ID NO: 122378 - DNA, 230 bp, Glycine max
tctgcgtagtgatctattggcaaattttctgacagagggcaattttagagcaagtgttgatttgcagcgcactcatcgtattaaaggaatgattaaaatggtgccacagttggtattcctgagaatacaggtatatcattggcctgtgctatgaatagttcttttagggggcgtgccagttctgatatttacaccatctgctctcaagactgtgaattatggaatcctgc

SEQ ID NO: 122379 - DNA, 229 bp, Glycine max
cacagaacatgagggatatgatccttttcttggtggaattcaaaaatatgccactcccatgatgcccctagatgaagaaattctttctaaggttgcacaagtatagttgaggaatggtttgattgtgttgatgaggaggattcctttgaggaagtttctttgagtgcagcactcaatggtgttgagggtttggactatatggaaagaattcctcttgccacatctgagg

SEQ ID NO: 122380 - DNA, 233 bp, Glycine max
cttccaccaagttatgggtttccttgtgttgcttcttttctccctcttaggtctctcttctagttccagcatatcaactcatcgttccatattggaccttgaccaaccaagtttaccacacagaaacaggtgtcttcactgttccaactatggaagagtgagcatggacgtgtctaccataaccacgaagaagaggcaaagagacttgagattttcaagaataacttgaacta

SEQ ID NO: 122381 - DNA, 237 bp, Glycine max
caaacttaattattaacacttccttagttcaatatggggaagcccttcactctctctctttcttccctttgcttgctactcttgtcgagtgcatgctttgctattagctccagcaagctcaacgagtgccaactcaacaacctcaacgcgttggaacccgaccaccgcgttgagtccgaaggtggtttgattcaaacatggaactctcaacaccctgagctgaaatgcgccggtgtc

SEQ ID NO: 122382 - DNA, 230 bp, Glycine max
tgatgccagattgagacaaagaatagatcctcaatacaatgaggttcaggctcagatggaaacaaatttgtttaaattgtctcttgatgatgttgaaactcctaaggttccatgttggatcttaaaatttctcaatctaaaattgcacttcccaaaaacacagttggaggaaccattctgcgtagtgacctattggcaaattttttgacagagggcaattttagagcaag

SEQ ID NO: 122383 - DNA, 265 bp, Glycine max
tgctcgagccgattcggctcgagcttaattattaacacttccttagagcaatatggggaagcacttcactctctctctttctgccctttgcttgctactcttgtcgagtgcatgctttgctattagctccagcaagctcaacgagtgccaactcaacaacctcaacgcgttggaacccgaccaccgcgttgagtccgaaggtggtttgattcaaacatggaactctcaacaccctgagctgaaatgcgccggtgtcactgtttcc

SEQ ID NO: 122384 - DNA, 263 bp, Glycine max
cacaaatgattggtttatttcctctcaggaatgtgttcccaggacctattgtgttttaaatccacaaaatccttttgtgttaaataggtggatggggaaactgactttcccccagggcacttcccgaagtgtcaaaagaatgcctctttctatagggggaggagctggtgcaaagaatgctattctcatgaatatgccaaatgctgttctttcaatgtggagatattttgttggagatctcgtctttgaagtttctaagatga

SEQ ID NO: 122385 - DNA, 273 bp, Glycine max
actagttcaatatcctagtataccttaataaataatttaagatactatgatgagagcacggttcccattactgttgctgggacttgttttcctggcttcagtttctgtctcatttggcattgcttactgggaaaaagagaaccccaaacacaacaagtgtctccagagttgcaatagcgagagagactcgtacaggaaccaagcatgccacgctcgttgcaacctccttaaggtggagaaagaagaatgtgaagaaggtgaaattccacgacc

SEQ ID NO: 122386 - DNA, 257 bp, Glycine max
ggctcgagctgctgttgacaagttgtattatactaaggttaataactttgcaaaaattatgaacattagacaaagtgttgttggtgatcttaaacttcttactgatgggaagttgtatgagggtaagcatattcctgtatctaatattagtgcaggggagaatcatgtagttcaaatacccctaatggcacaggaggaaattctgtcttctagtgcaagtgatttcagaactgcaatggtgagtagaaatagcaagc

SEQ ID NO: 122387 - DNA, 272 bp, Glycine max
agaatattctagaggcctcatacgacaccaaattcgaggagataaacaaggttctgtttggtagagaggaggggcagcaacaaggggaggagaggctgcaagagagtgtgattgtggaaatctcaaagaaacaaattcgggaactgagcaaacatgccaaatctagttcaaggaaaaccatttcttctgaagataaacctttcaacttgagaagccgcgaccccatctattccaacaagcttggcaagttgtttgagattaccccagagaaa

SEQ ID NO: 122388 - DNA, 267 bp, Glycine max
gggaaagatctcgcaatggttaaagttaatgtagcatgtgctgctgttggcttgacatcaagttacactccaactccattgttggaatctggtttgcaaaaagacagagggttaattgtggagtattttggaaggatgtcttacgttgctcataacgttaatcagccccaagagaaagatttgttggagggaaatttttccttagatattaaatctcgctctagattggaaaaagtttcctctacaaaagcacaatttgttagtgga

SEQ ID NO: 122389 - DNA, 267 bp, Glycine max
aacttattaacactttccttagttcaatatggggaagcccttcttcactctctctctttcttccctttgcttgctactcttgtcgagtgcatgctttgctattacctccagcaagttcaacgagtgccaactcaacaacctcaacgcgttggaacccgaccaccgcgttgagtccgaaggtggtcttattgaaacatggaactctcaacaccctgagctgcaatgcgccggtgtcactgtttccaaacgcaccctcaaccgcaacgg

SEQ ID NO: 122390 - DNA, 261 bp, Glycine max
tgcacatggtaatctagtgtgtttgagtgctttcatgtgcaggttggatgaagtaattcagattccttcgcatcaagctcagattcaatgccagaatacatagggaagcacagagctctacagatagagagaaggaatctgaatttcttcatccaacctgcacatggtaatctagtgtgtttgagtgctttcatgtttggctttaataaaataaaagcagttgttttgtaaaatgttcagaatcaataaaagcatttactg

SEQ ID NO: 122391 - DNA, 265 bp, Glycine max
atccgcattgccgttctaagtggtcttatttgaaaaacacttgggcgttggtgcaaatgtttgcttcgttaattttctctggagacgacaggctcactgagaaaacaatttttacttgcagagatttggacatcttggttgtttattatacaatagcaactcaatttagaaaatttctaccgcattacattaggtggcatctgtataccttgttgatctacattctcccatcttttctcactgctgaaattaaatataagcggaa

SEQ ID NO: 122392 - DNA, 270 bp, Glycine max
ggtcaagattgtgatgtctgggaatgcagcagtcaaaaggagtgattgggcctcattggtacaagtgtttttaacaaacagcaacagtacagagcattttgatgcatgtaagtggacaaaatcagaaccacattcctgggaattgatcttcccaatagaggtatgtggtcctaataatggttttgaaatgtggagttctgagtgggcaaatcaaacttcatggcatttgagtttccttattgacaatcccaaacagtctacagtttttga

SEQ ID NO: 122393 - DNA, 272 bp, Glycine max
gcggtttcctttgttggtgttgctgggaactgttttcctggcatcagtttgtgtctcattaaaggtgagagaggatgagaataaccctttctacttgagaagctctaacagcttccaaactctctttgagaaccaaaacggtcgcattcgtctcctccagagattcaacaaacgctccccacaacttgagaaccttcgagactaccggattgtccagtttcagtcaaaaccctacacaatccttctcccccaccatgctgacgccgatttcc

SEQ ID NO: 122394 - DNA, 206 bp, Glycine max
ctcgagccgattcggctcgagaagatttgaaattttgataaaccgcgatcacaggttgccgcaccttaaaaccggaaacaatagcaatcgttacttgatttcaagaatttctcaatttctttctacttctttgtgtacgatttcttaagggaaagaaaatcactctctgtgctggccacagacttcgtgaatcattttcttttcca

SEQ ID NO: 122395 - DNA, 266 bp, Glycine max
gaaaagagttggcttcaaagactcaatctcatgcttacctttaccaacatcacccagagatctatgagtactattcactacaactcacatgcaacgaagatagcactggtgatcgatggcagagggcatcttcaaatatcatgcccacacatgtcatcaaggtcgtcacactcgaagcatgataagagtagcccttcataccatagaatcagttccgatttgaagcctggaatggtgtttgttgtccctcccggtcatcccttcgt

SEQ ID NO: 122396 - DNA, 266 bp, Glycine max
catggccaagcttgttctttccctttgtttccttcttttcagtggctgcttcgctctgagagagcaggcacagcaaaatgagtgccagatccaaaagctgaatgccctcaaaccggataaccgtatagagtcggaaggtgggttcattgagacctggaaccctaacaacaagccattccagtgtgccggtgttgccctctctcgctgcacccttaaccgcaatgcccttcgtagaccttcctacaccaacggtccccaggaaatct

SEQ ID NO: 122397 - DNA, 262 bp, Glycine max
  unsure (1)..(262): unsure at all n locations
tgnattcatacatagtagtgtccgtgggttctaagattctcggggtcttctccataggggtcataagataaaagggacagtggtgttgatccgcaagaatgtgttggacgtgaatagcgtaaccagcgttggggctcttattggtcaaggtctcgacttagttggctcaacactcgatactctccctgccttcttgggccgatccgtgtctctccagcttattagtgctaccatagctgatggttccttctcttctttctta

SEQ ID NO: 122398 - DNA, 267 bp, Glycine max
aaggtcgtcacactcgaagcatgataagagtagcccttcataccatagaatcagttccgatttgaagcctggaatggtgtttgttgtccctcccggtcatcccttcgtcaccatagcttccaataaagagaatctcctcatgatttgcttcgaggttaacgctcgagacaacaagaagtttacatttgcagggaaggacaacattgtgagttctctggacaacgttgctaaggagcttgcctttaactatccttctgagatggtgaa

SEQ ID NO: 122399 - DNA, 267 bp, Glycine max
gaggatgagaataaccctttctacttgagaagctctaacagcttccaaactctctttgagaaccaaaacggtcgcattcgtctcctccagagattcaacaaacgctccccacaacttgagaaacatcgagactaccggattgtccagtttcagtcaaaacccaacacaatccttctcccccaccatgctgacgctgatttcctcctctttgtccttagcgggagagccatacttaccttggtgaacaacgacgacagagactcctac

SEQ ID NO: 122400 - DNA, 264 bp, Glycine max
tttgaaattgctggtaatactcttatgccagctttttctgttccacaggctactgccagatcttctgaaaatgcggaatcctctgcatgatctggaatttgtgttttctttcgcttgttcgtttgtttaattcaataaaggaaattaggcatgaccctcttgttgagtatgctctgcctatttgaaaatttccacacctcttttaattgtcgtaatgatgtgtgaagtgtgtgttattttaaaaaaaaaaaaaaaaagggcggc

SEQ ID NO: 122401 - DNA, 263 bp, Glycine max
gttcaatatcctagtacaccgtattaaagaatttaagatatactatgatgagagcgcggttcccattactgttgctgggagttgttttcctggcatcagtttctgtctcatttggcattgcgtattgggaaaagcagaaccccagtcacaacaagtgcctccgaagttgcaatagcgagaaagactcctacaggaaccaagcatgccactctcgttgcaacctccttaaggtggaggaagaagaagaatgcgaagaaggtcaa

SEQ ID NO: 122402 - DNA, 175 bp, Glycine max
attttgataaaccgcgatcacaggttgccgcaccttaaaaccggaaacaaaagcaatcgttacttgatttcaagaatctctcaatttcttcctacttctttgtgtacgatttcttaagggaaagaaaatcactctctgtgctggccacagacttcgtgaatcattttcttttcca

SEQ ID NO: 122403 - DNA, 266 bp, Glycine max
attcaaaccttgctctatactacacagtacacacactagaagaataatggcttccatcctccactactttttagccctctctctttcttgctcttttcttttcttcttatccgactcagtcacccctacaaaaccaataaaccttgttgttctacccgttcaaaatgatggttccacagggctccattggtccaacctccaaaaaagaacccctctaatgcaagtaccagtcctggtggacctcaatggaaatcacttgtgggtta

SEQ ID NO: 122404 - DNA, 272 bp, Glycine max
acttccttagttcaatatggggaagcccttcactctctctctttcttccctttgcttgctactcttgtcgagtgcatgctttgctattagctccagcaagctcaacgagtgccaactcaacaacctcaacgcgttggaacccgaccaccgcgttgagtccgaaggtggtttgattcaaacatggaactctcaacaccctgagctgaaatgcgccggtgtcactgtttccaaactcaccctcaaccgcaatggcctccacttgccatcttact

SEQ ID NO: 122405 - DNA, 277 bp, Glycine max
ttcggctcgagagttcaaatacccttaatggcaaaggaggaaattctgtcttctagtgcaagtgattgcagagcagcaagggtgagtaaaaatagcaacagtcatgctactgcaatgcatgtgggagctatagaaattatcaatgatagttacgcaagtcctgaatgcaccatagttggtgcaatgctaatggttgctagttatcataccaatcttgaaaatgcatttcgtagtatcatggttgcgccttgcagatgcggatggcccattcgggtgg

SEQ ID NO: 122406 - DNA, 275 bp, Glycine max
ggaatttctgaagcgtaccggatttcattgtgatatcatttgtgtcactggatggactgccactccaatgcaggatgttcaggttacaattgattggtttatttcctctcaggaatgtgttcccaggacctattgtgttttaaatccacaatatccttttgtgttaaataggtggatggggaaactgactttcccccagggcacttcccgaagtgtcaaaagaatgcctctttctatagggggaggagctggtgcaaagaatgctattctcatga

SEQ ID NO: 122407 - DNA, 265 bp, Glycine max
tcgacggtgagcttaggaggggacaattgctggtggtaccacagaacttcgtggtggcggacaagccggagaacaaggattcgaatacatagtattcaagacacaccacaacgcagtcactagctacttgaaggatgtgtttagggcaattccctcagaggttcttgcccattcttacaaccttcgacagagtcaagtgtctgagcttaagtatgaaggaaattggggtcctttggtcaaccctgagtctcaacaaggctcaccc

SEQ ID NO: 122408 - DNA, 264 bp, Glycine max
gcaatgttcgagccacactacaacctgaacgcgatcagcatagtatacgcattgaatggacgcgcattgatacaagtggtgcattgcaacggtgagagagtgtttcatggagagctgcaagagggacgggtgctgatcgtgccacaaaactctgtggtggctgcaagatcacagagtgacaacttcgagcatgtgtcattcaagaccaatgatacacccatgatcggcactcttgcaggggcagactcattgtcgaacgcatta

SEQ ID NO: 122409 - DNA, 264 bp, Glycine max
cttattaacactttccttagttcaatatggggaagcccttcttcactctctctctttcttccctttgcttgctactcttgtcgagtgcatgctttgctattacctccagcaagttcaacgagtgccaactcaacaacctcaacgcgttggaacacgaccaccgcgttgagtccgaaggtggtcttattgaaacatggaactctcaacaccctgagctgcaatgcgccggtgtcactgtttccaaacgcaccctcaaccgcaacg

SEQ ID NO: 122410 - DNA, 263 bp, Glycine max
aaataggtctttattctaatcccactttggaagatatcccacattcagcttgggaccttttttgctgggacagtgagaaaactttgccaaataatttttctgcagaattgctctcttgcaaattggatactgttactggccaatattatcctgagtgggctccaattaattgtcgagttcatcgacaaccaattcacatcactgaaggaaattatgtcagaaagcaagatgtcagcattgaatatgacgcatgtacacttcca

SEQ ID NO: 122411 - DNA, 262 bp, Glycine max
gaagttcgatacctcatgcaaacacatcagaagaatcaggtgaaagattccatagatgttgatgaaccagaagagatgggagttccattgactgccgaagagttagaagaaaaggagcagttgctagaggagggattttcatcatggagccggaaggattttaatgctttcattagggcctgtgaaaagtatggccgaaatgatataataggtattgcttctgagatggaaggaaaaacacaagaggaagttgaaagatatg

SEQ ID NO: 122412 - DNA, 264 bp, Glycine max
attgtctttgaacactcatcaccatggccaagcttgttctttccctttgtttccttcttttcagtggctgcttcgctctgagagagcaggcacagcaaaatgagtgccagatccaaaagctgaatgccctcaaaccggataaccgtatagagccggaaggtgggttcattgagacctggaaccctaacaacaagccattccagtgtgccggtgttgccctctctcgctgcacccttaaccgcaatgcccttcgtagaccttcct

SEQ ID NO: 122413 - DNA, 268 bp, Glycine max
gcacgagcagagagaggaacaggaatggcctcgcaaggaggaaaaacgcggagaaaagggaagtgaagaggaagatgaggatgaggatgaggaacaagatgaacgtcaattcccattcccacgcccacctcatcagaaggaagagcgaaagcaagaggaagatgaggatgaggagcagcagcgagagagcgaagaaagtgaagattctgagttacgaagacataagaataagaacccttttctcttcggctctaacaggttcgaaact

SEQ ID NO: 122414 - DNA, 268 bp, Glycine max
agacactcctgttgttgccgtttctattattgacaccaacagcttggagaaccagctcgaccagatgcctaggagattctatcttgctgggaaccaagagcaagagtttctaaaatatcagcagcagcagcaaggaggttcccaaagccagaaaggaaagcaacaagaagaagaaaacgaaggaagcaacatattgagtggcttcgcccctgaattcttgaaagaagcgttcggcgtgaacatgcagatagtgagaaacctacaaggt

SEQ ID NO: 122415 - DNA, 266 bp, Glycine max
ctcgagcgaatcggctcgagattaacacttccttagttcaatctggggaagcccttcactctctctctttcttccctacgcttgctactcttgtcgagtgcatgctttgctattagctccagcaagctcaacgagtgccaactcaacaacctcaacgcgttggaacccgaccaccgcgttgagtccgaaggtggtttgattcaaacatggaactctcaacaccctgagctgaaatgcgccggtgtcactgtttccaaactcaccct

SEQ ID NO: 122416 - DNA, 275 bp, Glycine max
aatattagtgcaggggagaatcatgtagttcaaatacccctaatggcacaggaggaaattctgtcttctagtgcaagtgctttcagaactgcaatggtgagtagaaatagcaagcctcaagctactgcaatgcatgtgggagctatagaaattatcattgatagtttcgcaagtcctgactgcaacatagttggtgcaatgcttttggttgatacttatcataccaatcctgaaaatgcagtccgtagtattttggtcgcgccttccagaggcgg

SEQ ID NO: 122417 - DNA, 264 bp, Glycine max
gaaaaacccaaaaagattgatgccagattgagacaaagaatagatcctcaatacaatgaggttcaggctcagatggaaacaaatttgtttaaattgtctcttgatgatgttgaaactcctaaaggttccatgttggatcttaaaatttctcaatctaaaattgcacttcccaaaaacacagttggaggaaccattctgcgtagtgacctattggcaaattttttgacagagggcaattttagagcaagtgttgatttgcagcgc

SEQ ID NO: 122418 - DNA, 260 bp, Glycine max
ataccttaataaataatttaagatactatgatgagagcacggttcccattactgttgctgggacttgttttcctgacttcagtttctgtctcatttggcattgcttactgggaaaaagagaaccccaaacacaacaagtgtctccagagttgcaatagcgagagagactcgtacaggaaccaagcatgccacgctcgttgcaacctccttaaggtggagaaagaagaatgtgaagaaggtgaaattccacgcccaatacg

SEQ ID NO: 122419 - DNA, 264 bp, Glycine max
cttaattattgttcatgaatacgtcaagccttactttagtggttctaaattgaaaagctttctagctggtcataatatcaccattactgatggttttgacaagactagtgcaactttgcaatttagaaagttagcagattgtgattttctcaagagaaactttaagcagatgtctaatgttttgtgggtagctcctgaggacaaggcgagtttatggtcacaacttcattatgtttcgtgtaataatctggaaatgcaagaagc

SEQ ID NO: 122420 - DNA, 262 bp, Glycine max
gtcatttaatccaaacccgtgttctgatgcgtggagtttggaatttctgaagcgtaccggatttcattgtgatatcatttgtgtcactggatggactgccactccaatgcaggatgttcaggttacaattgattggtttatttcctctcaggaatgtgttcccaggacctattgtgttttaaatccacaaaatccttttgtgttaaataggtggatggggaaactgactttcccccagggcacttcccgaagtgtcaaaaga

SEQ ID NO: 122421 - DNA, 261 bp, Glycine max
agtggacaaaactggagattggatcacacttatacaaaattctccaattagtaacttgttgagagttgctgcttggaagaaaggctgtttaatggtcaagattgtgatgtctgggaatgcagcagtcaaaaggagtgattgggcctcattggtacaagtgtttttaacaaacagcaacagtacagagcattttgatgcatgtaagtggacaaaatcagaaccacattcctgggaattgatcttcccaatagaggtatgtgg

SEQ ID NO: 122422 - DNA, 272 bp, Glycine max
  unsure (1)..(272): unsure at all n locations
cattaacacactacgcgtgcnaagaacctctgctctcctcttgcttttgatagagaagaaagaagcgagaagatgtcagacgcgttctgcagcgactgcaagaggcagacggaggtggtgtttgaccactctgccggcgacacggtgtgctcggagtgcggcctcgtactggagtcccantctatcgacgagacctctgagtggcgtaccttcgccaacgagtccggtgacaacgatcccaatcgtgtcggcgggccctccaaccccctcct

SEQ ID NO: 122423 - DNA, 254 bp, Glycine max
ggctcgacggctcgagctccattggtccttaaacactcatcagtactcaccatggccaagctagttttttccctatgttttctgcttttcagtggctgctgcttcgcttttagttccagagagcagcctcagtaaaacgagtgccagatccaaaaactcaatgccctcaaaccggataaccgtatagagtcagaaggagggctcattgagacatggaaccctaacaacaagccattccagtgtgccggtgttgc

SEQ ID NO: 122424 - DNA, 178 bp, Glycine max; identical to SEQ ID NO: 113204

SEQ ID NO: 122425 - DNA, 258 bp, Glycine max
catatttgtatgctatggtgcatgatagttcagtgtctacaataccaggtgattttgtcattggtgttaagttgacaaccataaacaatatgtgtgcatatgggctcaatcctggtatttcaggttctcgtcttttgggcaccattcctcagtccatgtcacagcaaactgtatggactcaaatggcaacagtgagaacaccattgaattttgactctagcaagcagagcttgtgtcaatactatatcgaccttctcg

SEQ ID NO: 122426 - DNA, 257 bp, Glycine max
attaacactttccttagttcaatatggggaagcccttcttcactctctctctttcttccctttgcttgctactcttgtcgagtgcatgctttgctattacctccagcaagttcaacgagtgccaactcaacaacctcaacgcgttggaacccgaccaccgcgttgagtccgaagtggtcttattgaaacatggaactctcaacaccctgagctgcaatgcgccggtgtcactgtttccaaacgcaccctcaaccgca

SEQ ID NO: 122427 - DNA, 259 bp, Glycine max
ccggaaacaaaagcaatcgttacttgatttcaagaatttctcaatttctttctacttctttgtgtacgatttcttaagggaaagaaaatcactctctgtgctggccacagacttcgtgaatcattttcttttccacacatcatataacataagaacactctcctatttgatataggacttcgtgtcagatttaaacttcttctgtttctttctcagttctctgttcaatttcaagttcaagtgggtgaaatcttggatt

SEQ ID NO: 122428 - DNA, 260 bp, Glycine max
cctcgagccgaatcggctcgagccatggccaagcttgttctttccaattgtttccttctttacagtggctgcttcgatctgagagagcaggcacagcaaaatgagtgccagatccaaaagctgaatgccctcaaaccggataaccgtatagagtcggaaggtgggttcattgagacctggaaccctaacaacaagccattccagtgtgccggtgttgccctctctcgctgcacccttaaccgcaatgcccttcgtagacc

SEQ ID NO: 122429 - DNA, 257 bp, Glycine max
tgatgagagtgcggtttcctttgttggtgttgctgggaactgttttcctggcatcagtttgtgtctcattaaaggtgagagaggatgagaataaccctttctacttgagaagctctaacagcttccaaactctctttgagaaccaaaacggtcgcattcgtctcctccagagattcaacaaacgctccccacaacttgagaaccagcgagactaccggattgtccagtttcagtcaaaacccaacacaatccttctc

SEQ ID NO: 122430 - DNA, 253 bp, Glycine max
aattattaacacttccttagttcaatatggggaagcccttcactctctctctttcttccctttgcttgctactcttgtcgagtgcatgctttgctattagctccagcaagctcaacgagtgccaactcaacaacctcaacgcgttggaacccgaccaccgcgttgagtccgaaggtggtttgtttcaaatatggaactctcaacaccctgagctgaaatgcgccggtgtcactgtttccaaactcaccctcaa

SEQ ID NO: 122431 - DNA, 261 bp, Glycine max
catggatgttgcaaatcagggccaggctatgcttccccactggaagccatttctggtcccagagagtctctcatttatgtaacctctgtctacacagggaccggaatagagaagccagactatttggcgacagtggatgtggatccaaactctccaacttattccaaagtcatccataggcttcctgttccttatttaggtgacgaattgcatcacacaggctggaattcatgcagctcttgccatggagacccctcagca

SEQ ID NO: 122432 - DNA, 262 bp, Glycine max
aatcactggtccacctgttggatcggtatggcctgggcatccctatcggacctgggacaatgggtgctaggcctggattttttcacgatgacaagtcacagaaaaaagatgcaactcgtgacaatgactggacatgtccaaaatgtggcaatgtcaatttttcattcagaactgtctgcaacatgagaaagtgcaacacacccaaacctggatcacaggcctcaaagtcggacaaaaattctaagcaaaagatgcctgaggg

SEQ ID NO: 122433 - DNA, 261 bp, Glycine max
tacaagtacttccttacaatcaaaaccaacaacaactatggcaagttatcaaaagcactacgatgatcagggtcgcaaggttgacgagtatggcaacgttgagaagcaaaccgacgaatacggcaaccctgttcatgctgctagtgtcacctatgtagccaccagaactgctgctggtggttacagtgatgacattaataagcaacatgataccaccaatgcctacggcgtagacactggtagacagcattctagtggtgg

SEQ ID NO: 122434 - DNA, 270 bp, Glycine max
gacaaaactagtgcaactttgcaatttagaaagttagcagattgtgattttctcaagagaaactttaggcagatgtctaatgttttgtgggtggctcctgaggacaaggcgagtttatggtcacaacttcattatgtttcatgtaataatctggaaatgcaagaagcttatcttgtcaatctcgtaaatgtgttacgagaattgtatttgcacagtccagaggaagctcgccaattgagaaggaaagctctctctcgtattgaatggctg

SEQ ID NO: 122435 - DNA, 270 bp, Glycine max
gtgaaaagtcatcaaaaggcttatttgagaactattacatcaaagtttcaaactctagttgacctttcagtgatagagatcttgtcaaggcatgcttctgatgaggtctaccttggccaaagggacaacccacattggacctctgactcaaaagcattacaagcctttcaaaaatttggaaacaagctcaaagaaattgaggaaaaacttgcaaggaagaacaatgatcaaagtctctccaatcgacttgggccggttcaactgccatac

SEQ ID NO: 122436 - DNA, 268 bp, Glycine max; identical to SEQ ID NO: 104924

SEQ ID NO: 122437 - DNA, 260 bp, Glycine max
attggaactgataagtgataaaacagagtttcgttgaatctgcactaaaaccctacgcacacatcttggtgtaagtccaatcgatatagcagcaatgtctacgcttgaaattgaagctcgagatgtcatcaaaattgtgcttcagttttgcaaagagaattcgttgcatcagacttttcagatgctgcagaacgaatgccaggtttctctgaacactgttgacagcattgaaacctttgttgctgatattaatagtggaa

SEQ ID NO: 122438 - DNA, 260 bp, Glycine max
ctccaaacccaacacccctcttctcccccaccatgctgacgacgattacctcatcgttatccttaacgggactgccattcttaccttggtgaacaacgacgaccgagactcttacaaccttcaatctggcgatgccctaagagtccctgcaggaaccacatactatgtggttaaccctgacaacgacgagaatctcagaatgataacactcgccatacccgttaacaaacccggtagatttgagagtttcttcctatcta

SEQ ID NO: 122439 - DNA, 259 bp, Glycine max
  unsure (1)..(259): unsure at all n locations
ggaacaatcatctcgtccccatatcgaatccgttttatcgccgaaggcantcctttgagccttaagttcgattcatttgcagttataatgctgtgtgttggaattcctaccgagtggtctgttgtggaggatctaccagaaggacctgctgttaaaattggtgagaacaaagatgcaatggatggttggtttagacttgagagagtttctgatgatgaattcaataactataagcttgtgttctgtccacagcaagctg

SEQ ID NO: 122440 - DNA, 259 bp, Glycine max
ataaaccgcgatcacaggttgccgcaccttaaaaccggaaacaaaagcaatcgttacttgatttcaagaatctctcaatttcttcctacttctttgtgtacgatttcttaagggaaagaaaatcactctctgtgctggccacagacttcgtgaatcattttcttttccactcttagtttattccatgaacactctcctatttgatataggacttcgtgtcagatttaaacttcttctgtatctttctcagttctctgct

SEQ ID NO: 122441 - DNA, 257 bp, Glycine max
tctcgagccgattcggctcgagggatttcactgtgatatcatttgattcactggatggactgccaccccaatgcaggatgttcaggttacaattgattggtttatttcctctcaggaatgtgttcccaggacttattgtgttttaaatccacaaaatccttttgtgttaaataggtggatggggaaactgactttcccccagggcacttcccgaaatgttaagagaatgcctctttctatagggggaggagctggtg

SEQ ID NO: 122442 - DNA, 253 bp, Glycine max
  unsure (1)..(253): unsure at all n locations
aaacactggagctaatatcccttcactagggctgggaacttggctggctgatcctggtgttgttggtgatgttatagctcatgccgtcgaggttggttatcgccatattgattgtgctcaaatttacggcaatcaggaggagattggtttagcattanagaagttatttgaagagggtgtagtcaagcgagaagatttatggatcacctctaaactctggtgtacagatcatgctccagaagatgtaccagaa

SEQ ID NO: 122443 - DNA, 259 bp, Glycine max
ggaatttactctccacattggaacttgaacgcgaacagtgtgatctatgtgactcgagggaaaggaagagttagagtggtgaactgccaagggaatgcagtgttcgacggtgagctaaggaggggacaattgctagtggtgccgcagaactttgtggtggctgagcaagggggagaacaaggattggaatacgtagtgttcaagacacaccacaacgccgtgagcagctacattaaggatgtgtttagggcaatccctt

SEQ ID NO: 122444 - DNA, 261 bp, Glycine max
aagcccttcactctctctctttcttccctttgcttgctactcttgtcgagtgcatgctttgctattagctccagcaagctcaacgagtgccaacccaacaacctcaacgcgttggaacccgaccaccgcgttgagtccgaaggtggtttgattcaaacatggaactctcaacaccctgagctgaaatgcgccggtgtcactgtttccaaactcaccctcaaacacaatggcctccacttgccatcttactcaccttatccc

SEQ ID NO: 122445 - DNA, 254 bp, Glycine max
ctagtacaccgtattaaagaatttaagatatactatgatgagagcgcggttcccattactgttgctgggagttgttttcctggcatcagtttctgtctcatttggcattgcgtattgggaaaagcagaaccccagtcacaacaagtgcctccgaagttgcaatagcgagaaagactcctacaggaaccaagcatgccacgctcgttgcaacctccttaaggtggaggaagaagaagaatgcgaagaaggtcaaa

SEQ ID NO: 122446 - DNA, 87 bp, Glycine max
atgggagtggaattcctggagcattttatatcaagaattttatgcaaactgagtttttccttgtgagtttgactcttgaagacattc

SEQ ID NO: 122447 - DNA, 256 bp, Glycine max
cttatcttatccctctaatcactctagctgttgcaaatttctactatttttcaatggcttctgcagatgttgagttccgttgctttgttggtgggcttgcttgggtcaccggcaacgatgccctcgagaaagccttttcaatctacggcgacatcgttgaatcgaaggttatcaacgaccgtgagactggaaggtccagaggattcggatttgtgaccttcgcctcagagcagtcaatgaaagatgcgatcgcagg

SEQ ID NO: 122448 - DNA, 247 bp, Glycine max
gttcctcactgaccaagccactgcgatgagaaccaaactttctttagctatctttttcttttatcttttagccttattttcaaacctagcctttggcaaatgtaaagaaaccgaggtagaagaagaagaccctgagctcgtaacatgcaaacaccaatgccaacagccacagcaatacactgagggtgacaagcgggtatgcttgcaaagatgtgacaggtatcatcgtatgaagcaagagcgagag

SEQ ID NO: 122449 - DNA, 253 bp, Glycine max
aagcacaatgcatcatctcaaagaaattaagagagttttttttgttcctcactgaccaagccatggcgatgagaaccaaactttctttagctatctttttcttttttcttttagccttattttcaaacctagcctttggcaaatgtaaagaaaccgaggtagaagaagaagaccctgagctcgtaacatgcaaacaccaatgccaacagccacagcaatacactgagggtgacaagcgggtatgcttgcaaag

SEQ ID NO: 122450 - DNA, 249 bp, Glycine max; identical to SEQ ID NO: 112298

SEQ ID NO: 122451 - DNA, 251 bp, Glycine max
atagtcttccatagccccccaaaaatgaagagcaccatcttctttgctctctttctcttttgtgccttcaccacctcatacctaccttcagccatcgctgatttcgtgctcgataatgaaggtaaccctcttgaaaatggtggcacatattatatcttgtcagacataacagcatttggtggaataagagcagccccaacgggaaatgaaagatgccctctcactgtggtgcaatctcgcaatgagctcga

SEQ ID NO: 122452 - DNA, 252 bp, Glycine max
gaaaaacccaaaaagattgatgccagattgagacaaagaatagatcctcaatacaatgaggttcaggctcagatggaaacaaatttgtttaaattgtctcttgatgatgttgaaactcctaaaggttccatgttggatctgaaaatttctcaatctaaaattgcacttcccaagaacacagttggaggaaccattctgcgtagtgatctattggcaaattttttgacagagggcaattttagagcaagtgtt

SEQ ID NO: 122453 - DNA, 252 bp, Glycine max
tcctcactgacctcaccatggcgaccagagccaagctttctttagctatcttccttttctttcttttagccttgatttcaaacctagccttgggcaaacttaaagaaaccgaggtcgaagaagatcccgagctcgtaacatgcaaacaccagtgccaacagcaacggcaatacactgagagtgacaagcgaacatgcttgcaacaatgtgacagtatgaagcaagagcgagagaaacaagtcgaagaggaaa

SEQ ID NO: 122454 - DNA, 251 bp, Glycine max
ggatatggttacaaaggaagctccttccatcgtataatcaaagatttcatgattcagggaggagactttacagaaggaaatggaactggtggaattagtatctatggtcctagttttaaagatgagagttttgccttaaagcatgtcggtcctggagttctgagcatggcaaatgctggtcctaatactaatgggagtcaatttttcatttgcactgtaaagactccatggctagacaatcgtcacgttgt

SEQ ID NO: 122455 - DNA, 250 bp, Glycine max
cacgcccacaccaacctcatcaaaaggaagaggaaaagcacgaatggcaacacaagcaggaaaagcaccaaggaaaggaaagtgaagaagaagaagaagaccaagaccaggatgaggagcaagacaaagagagccaagaaagtgaaggttctgagtctcaaagagaaccacgaagacataagaataagaacccttttcacttcaactctaaaaggttccaaactctcttcaaaaaccaatatggccacgt

SEQ ID NO: 122456 - DNA, 252 bp, Glycine max
cgaagtctcatggtgcatatggtctcgtcaatgccatctacaaccctcaagccggtagcgtcacaaccgccaccagccttgacttcccagccctctcgtggctcagactcagtgctgagtttggatctctccgcaagaatgcaatgttcgtgccacactacaacctgaacgcgaacagcataatatacgcattgaatggacgggcattgatacaagtggtgaattgcaacggtgagagagtgtttgatggag

SEQ ID NO: 122457 - DNA, 253 bp, Glycine max
tttgactcttgaagccatttcaaaccaaggaaccatccgctttgtttgcaactcatgggtttataacactaaactttacaaaagcgtgcgcattttctttgccaaccatacatatgtacctagtgagacaccagcaccacttgtggagtacagagaagaagaattgaagagtcaaagaggcaatggaacgggagagcgcaaggaatatgataggatctatgattatgatgtctacaatgatttgggcaaccca

SEQ ID NO: 122458 - DNA, 159 bp, Glycine max
ttttgataaaccgctatcacaggttgccgcaccttaaaaccggaaacaaaagcaatcgttacttgatttcaagaatctctcaatttcttcctacttctttgtgtacaatttcttaaggtaaagaaaatcactctctgtgctggccacagacttcgtgaa

SEQ ID NO: 122459 - DNA, 251 bp, Glycine max
ctcgagtcggttcatgtggttggtgcaagcaagttgtctgatcatacgtgttttctggatgttaagggatactgtcgcgaagagaggagccacgaagggcttggacatgggtggttctctggcctaccaaaaatttgccaagacttgtgactgtgcctcacctagatcaactctgaagtgctggaaagaggaagatgaagaagagtagttttcttaagtgtctttattatgtccttgcgaaaataagtccg

SEQ ID NO: 122460 - DNA, 250 bp, Glycine max
agacactcctgttgttgccgtttctattattgacaccaacagcttggagaaccagctcgaccagatgcctaggagattctatcttgctgggaaccaagagcaagagtgtctaaaatctcagcaagagcaaggaggtcatcaaagccagaaaggaaagcatcagcaagaagaagaaaacgaaggaggcagcatattgagtggcttcaccctggaattcttggaacatgcattcagcgtggacaagcagata

SEQ ID NO: 122461 - DNA, 247 bp, Glycine max
cactcatcagtcatcaccatggccaagctagttttttccctttgttttctgcttttcagtggctgctgcttcgctttcagttccagagagcagcctcagcaaaacgagtgccagatccaaaaactcaatgccctcaaaccggataaccgtatagagtcagaaggagggctcattgagacatggaaccctaacaacaagccattccagtgtgccggtgttgccctctctcgctgcaccctcaaccgca

SEQ ID NO: 122462 - DNA, 248 bp, Glycine max
caagcttttctttttcttgttctttaattttctgattttagcaaattaaaatagtagtgttattggtaggtcttggcaaagatgttttcagttccaggggtgtcgggaatgctgaacagaggaggagggcataagataaaagggacagtggtgttgatgaggaagaatgtgttggacttcaacagcgtggctgatcttactaaaggaaatgttgggggactcataggcaccggcctcaacgttgttgg

SEQ ID NO: 122463 - DNA, 250 bp, Glycine max
ctcgagccggaattgctctcttgcaaattggatactgttactggccaatattatcctgagtgggctccaattaattgtcgagttcatcgacaaccaattcacatcactgaaggaaattatgtcagaaagcaagatgtcagtcattgaatatgatgcatgtataattccaaatgattgtggttccttggttgttgccaaggttggaaatcacaaacaaattgttggtttccatgttgctggaagcaaagga

SEQ ID NO: 122464 - DNA, 249 bp, Glycine max
ggattcagcaggaacattttagaggcctcctacgataccaaattcgaggagataaacaaggttctgtttagtagagaggaagggcagcagcaaggggagcagaggctgcaagagagcgtgattgtggaaatctcgaaggaacagattcgggcactgagcaaacgtgccaaatctagttcaaggaaaaccatttcttctgaagataaaccttttaacttgagaagccgcgaccccatctactccaacaag

SEQ ID NO: 122465 - DNA, 238 bp, Glycine max
ctcgagccgccttaaacactcatcagtcatcaccatggccaagctagttttttcccttagttttctgcttttcagtggctgctgcttcgctttcagttccagagagcagcctcagcaaaacgagtgccagatccaaaaactcaatgccctcaaaccggataaccgtatagagtcagaaggagggctcattgagacatggaaccctaacaacaagccattccagtgtgccggtgttgcc

SEQ ID NO: 122466 - DNA, 251 bp, Glycine max
aaattatgtcagaaagcaagatgtcagcattgaatatgatgcatgtacaattccaaatgattgtggttcattggttgttgccaaggttggaaatcacaaacaaattgttggtttccatgttgctggaagcaaaggaagactgggatatgcttcattgataccatatgttgagccagttgtgcaagctcaaagtgctgaagtttactttgacttcttccctgtggaggttgatagtcaagagggagttgctc

SEQ ID NO: 122467 - DNA, 253 bp, Glycine max
ctcagaatgataacactcgccatacccgttaacaaacccggtagatttgagagtttcttcctatctagcactcaagctcaacagtcctacttgcaagggttcagcaagaatattctagaggcctcatacgacaccaaattcgaggagataaacaaggttctgtttggtagagaggaggggcagcaacaaggggaggagaggctgcaagagagtgtgattgtggaaatctcaaagaaacaaattcgggaactga

SEQ ID NO: 122468 - DNA, 251 bp, Glycine max
cattctcttgggaatttctcaagattttgaaattgctggtaatactcttatgccagctttttctgttccacaggctactgccagatcttctgaaaatgcggaatcctctgcatgatctggaatttgtgttttctttcatttgtccgattgtttacattcaataaaggaaattaggcatgaccctcttgttgagtatgctctgcctatttgaaaatttccacacctcttttaattgtcgtaatgatgtgtga

SEQ ID NO: 122469 - DNA, 248 bp, Glycine max
cagacttcaatctggtgatgccctgagagtcccctcaggaaccacatactatgtggtcaaccctgacaacaacgaaaatctcagattaataacactcgccatacccgttaacaagcctggtagatttgagagtttcttcctatctagcactgaagctcaacaatcctacttgcaaggattcagcaggaacattttagaggcctcctacgataccaaattcgaggagataaacaaggttctgtttagta

SEQ ID NO: 122470 - DNA, 247 bp, Glycine max
ctcgagccgtgttactccttctctcgttgattcggatctagagtctttttttcactcttcagttctcgttgttgttcttcgctttcctgaaactagggttttcaatttcgattcattcgttaataattaaagatgtttgggagggcaccgaagaagagcgataatacgaggtactacgaaatcctcggcgtctcgaagaacgcttcgcaggatgatctgaagaaggcttacaagaaagccgccatca

SEQ ID NO: 122471 - DNA, 246 bp, Glycine max
attccattgcccccaagcgggagaagacacatggtgaagttgaaaggaggattgtttcacaacttttgactcttatggatggattaaaatctcgtgctcatgttattgttattggagctactaatcgtccaaatagcattgacccagcattgagaaggtttggtagatttgatagggaaattgatattggtgttcccgatgaagttgggagacttgaagtccttcgcatacatactaaaaacatga

SEQ ID NO: 122472 - DNA, 245 bp, Glycine max
gtgacttcgccaggctcaacttcccaaacctgcgacaccagggttcctccgtcggtggtgatttcggggagtacaagcctcttcattccgctgttgacgccaagcttcaggccatttgcgaaggcctggctgagctgcagaaacaggggaagaccgagaagcctccgaggaagtcgcgttccaaactcgcggagaaggttgtttccgacaaggagaacaacaactcttgtaaggtggaagctgcg

SEQ ID NO: 122473 - DNA, 230 bp, Glycine max
gctgagcatccacaaagtaggaggggaataagggaagaaagggtcctttgtcttcaattttgagggctttttactgaataagtatgtactaaaatgtatgctgtaatagctcatagtgagcgaggaaagtatcgggctatgtaactatgactagagcttcaactatgaataaataaatcgacagcatatgatgcttttgttttgtgtcaaaaaattacacaaagggggcc

SEQ ID NO: 122474 - DNA, 212 bp, Glycine max
gctgagcatccacaaagtaggaggggaataagggaagaaagggtcctttgtcttcaattttgagggctttttactgaataagtatgtactaaaatgtatgctgtaatagctcatagtgagcgaggaaagtatcgggctatgtaactatgactagagcttcaactatgaataaataaatcgacagcatatgatgcttttgttttgtgtcaaaa

SEQ ID NO: 122475 - DNA, 246 bp, Glycine max
tgaaagtggtagtagagtcacatgggaaggttgcatcgtctagctcgatatcaacgatggtgaccgtctcgttttcgctcgtctctccccctctgcgaaattgaagattgggaataagaactgctctctgcaaccgttaatcggtcgtcccttcggtactgcttttcaagtcgatggaccttatctctctcccgcacaagttaatggtactaatggtgaagaattaagagatgttcaagtaagtgt

SEQ ID NO: 122476 - DNA, 247 bp, Glycine max
atcaccattactgatggtattgacaagactagtgcaactttgcaatttagaaagttagcagattgtgatttctcaggacgtacccacaaaagcttagagctctgcttaaagtttctcttgagaaatcacaatctgctaactttctaaagagaaactttaagcagatgtctaatgttttgtgggtagctcctgaggacaaggcgagtttatggtcacaacttcattatgtttcgtgtaataatctgga

SEQ ID NO: 122477 - DNA, 247 bp, Glycine max
gtaaaaatagcaagcctcaagctactgcaatgcatgttggagctatagaaattatcattgatagtttcgcaagtcctgactgcaacatagttggtgcaatgcttttggttgatacttatcataccaatcctgaaaatgcagttcgtagtatttttgttgcgcctttcagaggcggaaggcccattcgggtggttacatttccgaataccattgtgcagattgaaccagacatgaattcaaggtttca

SEQ ID NO: 122478 - DNA, 245 bp, Glycine max
ggcttggcaacaaaccatactggatcatcaagaattcgtggggggagaaatggggagaagatggctattacaagctctgcagagggcatggcatgtgtggaataaacactatggtttctgctgcaatggtgcctcaaccacaaacaacacctacaaagaattatgcttcttattagctatgcacttaaggaaatctaaataaatatttttcattctaggtgatgtatcatgtatgtaccaaaata

SEQ ID NO: 122479 - DNA, 245 bp, Glycine max
attctactaaggttaataagtttgcaaaaattatgaaccttagacaaagtgttgttggtgatcttaaacttcttactgatgggaagttgtatgagggtaagcatattcctgtatctaatattagtgcaggggagaatcatgtagttcaaatacccctaatggcacaggaggaaattctgtcttctagtgcaagtgctttcagaactgcaatggtgagtagaaatagcaagcctcaagctactgca

SEQ ID NO: 122480 - DNA, 244 bp, Glycine max
gttcaatatcctagtacaccgtattaaagaatttaagatatactatgatgagagcgcggttcccattactgttgctgggagttgttttcctggcatcagtttctgtctcatttggcattgcgtattgggaaaagcagaaccccagtcacaacaagtgcctccgaagttgcaatagcgagaaagactcctacaggaaccaagcatgccacgctcgttgcaacctccttaaggtggaggaagaaga

SEQ ID NO: 122481 - DNA, 246 bp, Glycine max; identical to SEQ ID NO: 113697

SEQ ID NO: 122482 - DNA, 244 bp, Glycine max
tgaacactcatcaccatggccaagcttgttctttccctttgtttccttcttttcagtggctgcttcgctctgagagagcaggcacagcaaaatgagtgccagatccaaaagctgaatgccctcaaaccggataaccgtatagagtcggaaggtgggttcattgagacctggaaccctaacaacaagccattccagtgtgccggtgttgccctctctcgctgcacccttaaccgcaatgcccttc

SEQ ID NO: 122483 - DNA, 244 bp, Glycine max
ccttaataaataatttaagatactatgatgagagcacggttcccattactgttgctgggacttgttttcctggcttcagtttctgtctcatttggcattgcttactgggaaaaagagaaccccaaacacaacaagtgtctccagagttgcaatagcgagagagactcgtacaggaaccaagcatgccacgctcgttgcaacctccttaaggtggagaaagaagaatgtgaagaaggtgaaattc

SEQ ID NO: 122484 - DNA, 244 bp, Glycine max
ctggtagacagcattctagtggtggctacgatggtgacactaataaacatcatggaactactggtggctataatgatgacaccaatagacatcatggaactaccggtgtctatggtatagacaccgataggcaacaacatgggactactggtggctatgccggtgacactggtaggcaacatgggaacatcggtggcccttactatggaaccaacaccgcagacaccggtactggtcccagaag

SEQ ID NO: 122485 - DNA, 248 bp, Glycine max
cgagattgaggcgggggttgatttggaagaaacccagctaaggtaattcctcgcaacccctaactaaaccttcaaaggatcatcatgggcagtcacaatgctttggctgccactttcggaatattaggtaacatcatttctgtgatggtgtacttggctccggtgccaacgttttaccggatatacaaaaagaaatgcacggacggtttccactcgctgccatacttgttgtcattaatgagttctat

SEQ ID NO: 122486 - DNA, 221 bp, Glycine max
caaaacttgacccttaaaaagagatagtaactccaactccaagtcacattggtgacaaagttagaaacaaggagaaagaaagaagatggcaggaaagaaaatcccagatgtgttgctgaattcaggacacaaaatgccagttataggcatgggaacttcagtggagaatcgtccatcaaatgagacccttgcttctatctatgttgaagccattgaggtgg

SEQ ID NO: 122487 - DNA, 239 bp, Glycine max
gggaggatctggtgcaaagaatgctattctcatgaatatgccaaatgctgttctttcaatgtggagatattttgttggagatctcgtctttgaagtttctaagatgacttctccctacattaaatgtacagtctctttcttcatagcatttggaaatttggctgatgacaccatcaattttgaggcttttccccacaagctggtgcactttggagagattcaggaaaaagttgtattga

SEQ ID NO: 122488 - DNA, 243 bp, Glycine max
aactgactttcccccagggcacttcccgaaatgttaagagaatgcctctttctatagggggaggagctggtgcaaagaatgctattctcatgaatatgccaaatgctgatctttcaatgtggagatattttgttggagatctcgtctttgaagtttctaagatgacttctccctacattaaatgtacagtctctttcttcatagcatttggaaatttggctgatgacaccatcaattttgagg

SEQ ID NO: 122489 - DNA, 242 bp, Glycine max
  unsure (1)..(242): unsure at all n locations
ggggcaacaccagcagcaggaggaagaaggtggcagtgtgctcagtggcttcagcaaacatttcttagcacaatccttcaacaccaacgaggacaaagctgagaaacttcggtctccagatgacgaaaggaagcagatcgtgacagtggagggaggcctcagcgttatcagccccaagtggcaagaacaataagacgacatcgangatgaagacgaagaatatgaacaaactccctcttatc

SEQ ID NO: 122490 - DNA, 74 bp, Glycine max
gtcagaaggagggctcattgagacatggaaccctaacaacaagccattccagtgtgccggtgttgccctctctc

SEQ ID NO: 122491 - DNA, 242 bp, Glycine max
ttccgttctcaaactcactcacactctctcttctgctagattctacgattcccgaagtgccttcctcctcctcctccttcttcccctctaatcggatcctaatccaaatccaaatccagttcaaagaagatgcaatacaagaacctggggcgatctggcctgaaggtgagccagctctcctacggcgcgtgggtgagcttcgggaaccagctggacgtgaaggaggcgaaggccctcctaca

SEQ ID NO: 122492 - DNA, 238 bp, Glycine max
aacactttccttagttcaatatggggaagcccttcttcactctctctctttcttccctttgcttgctactcttgtcgagtgcatgctttgctattacctccagcaagttcaacgagtgccaactcaacaacctcaacgcgttggaacccgaccaccgcgttgagtccgaagctggtcttattgaaacatggaactctcaacaccctgagctgcaatgcgccggtgtcactgtttccaa

SEQ ID NO: 122493 - DNA, 243 bp, Glycine max
tcctagtataccttaataaataatttaagatactatgatgagagcacggttcccattactgttgctgggacttgttttcctggcttcagtttctgtctcatttggcattgcttactgggaaaaagagaaccccaaacacaacaagtgtctccagagttgcaatagcgagagagactcgtacaggaaccaagcatgccacgctcgttgcaacctccttaaggtggagaaagaagaatgtgaaga

SEQ ID NO: 122494 - DNA, 158 bp, Glycine max
tgaaattttgataaaccgcgatcacaggttgccgcaccttaaaaccggaaacaaaagcaatcgttacttgatttcaagaatctctcaatttcttcctacttctttgtgtacgatttcttaagggaaagaaaatcactctctgtgctggccacagactt

SEQ ID NO: 122495 - DNA, 238 bp, Glycine max
gagacctccttccatagcgaattcgaggagataaacagggttttgtttggagaggaacaggagcagaggcagcaagagggagtgatcgtggaactctcaaaggaacaaattcggcaactgagcagacgtgccaaatctagttcaaggaaaaccatttcctccgaagatgaaccattcaacttgagaagccgcaaccccatctattccaacaactttggaaagttctttgagatcaccc

SEQ ID NO: 122496 - DNA, 237 bp, Glycine max
cttgggcgttggtgcaaatgtttgcttcgttaattttctctggagacgacaggctcactgagaaaacaatttttacttgcagagatttggacatcttggttgtttattatacaatagcaactcaatttagaaaatttctaccgcattacattaggtggcatctgtataccttgttgatctacattctcccatcttttctcactgctgaaattaaatataagcggaatctgagtaata

SEQ ID NO: 122497 - DNA, 240 bp, Glycine max
agaagccacagtgcaagggtaaagacaaacactgccaacgcccccgaggaagccaaagcaaaagcagaagaaatggcattgacgagaccatatgcaccatgagacttcgccacaacattggccagacttcatcacctgacatctacaaccctcaagccggtagcgtcacaaccgccaccagccttgacttcccagccctctcgtggctcagactcagtgctgagtttggatctctccgca

SEQ ID NO: 122498 - DNA, 242 bp, Glycine max
tgtagtagtgtctttgggttgcaaagatgcttgggggtcttctccataggggtcataagataaaagggacagtggtgttgatgcgcaagaatgtgttggacgtgaatagcgtaaccagcgttgggggaattattggtcaaggtctcgacttagttggctcaacactcgatactcttactgccttcttgggccgatccgtgtctctccagcttattagtgctaccaaagctgatgccaacgga

SEQ ID NO: 122499 - DNA, 240 bp, Glycine max
taacactttccttagttcaatatggggaagcccttcttcactctctctctttcttccctttgcttgctactcttgtcgagtgcatgctttgctattacctccagcaagttcaacgagtgccaactcaacaacctcaacgcgttggaacccgaccaccgcgttgagtccgaaggtggtcttattgaaacatggaactctcaacaccctgagctgcaatgcgccggtgtcactgtttccaaa

SEQ ID NO: 122500 - DNA, 240 bp, Glycine max
acagtacacacactagaagaataatggcttccatcctccactactttttagccctctctctttcttgctcttttcttttcttcttatccgactcagtcacccctacaaaaccaataaaccttgttgttctacccgttcaaaatgatggttccacagggctccattgggccaacctccaaaaaagaacccctctaatgcaagtaccagtcctggtggacctcaatggaaatcacttgtggg

SEQ ID NO: 122501 - DNA, 238 bp, Glycine max
agcagaaggagcaaaagcaatggcgccgaagaagccgagaaccacgacaaggaaccctgatttggttagggggattggcaagtattcgaggtcgcagatgtaccacaagaggggcatctgggccatcaaggccaaaaacggtggcgttttgccccgccacgatcccaagcccaagcccgaggccccggcccagaagccgcccaagttctaccccgcggacgatgttaagaagcccctc

SEQ ID NO: 122502 - DNA, 249 bp, Glycine max
cttaattattaacacttccttagttcaatatggggaagcccttcactctctctctttcttccctttgcttgctactcttgtcgagtgcatgctttgctattagctccagcaagctcaacgagtgccaactcaacaacctcaacgcgttggaaccgaccaccgcgttgagtccgaaggtggtttgattcaaacatggaactctcaacaccctgagctgaaatgcgccggtgtcactgtttccaaactcac

SEQ ID NO: 122503 - DNA, 277 bp, Glycine max
tctctggggatggtgaagagatgacactgattccgggaaccagtgttgaagaggcttacaacaagctaatagttgaacttgagaaaagtgttcctacattggttggcattgaatgtcccaaggatgagaaacttcctcgtcgcaaaattttgacaaacctaagacgcgctgcttcactattctccctaatggagtttaatcttgtggtccgtcaaaagtttttaaattttgtgaggttcattatgaagaaaagggacatcttagttgtcaagttgga

SEQ ID NO: 122504 - DNA, 208 bp, Glycine max
taacaattccttcacttgcagcactgttgcatcatcatcttcattgcaaaaccctaaacttcaccttcaaccatgaccacacaagtaccaccacacagtgtccaagtccacacaacaacacaccgctacgaagctggcgtcgtcccccccggagccgtttcgaaccgccgcgttatgaagccggcgtcaaagcgccctccatttacca

SEQ ID NO: 122505 - DNA, 256 bp, Glycine max
ttggcattgcttactgggaaaaagagaaccccaaacacaacaagtgtctccagagttgcaatagcgagagagactcgtacaggaaccaagcatgccacgctcgttgcaacctccttaaggtggagaaagaagaatgtgaagaaggtgaaattccagaccacgaccacgaccacaacacccggagagggaacctcagcaacccggtgagcaggaggaagacgaagatgagcaaccacgtccaatcccattcccaggc

SEQ ID NO: 122506 - DNA, 281 bp, Glycine max
attggtccttaaacactcatcagtcatcaccatggccaagctagttttttccctttgttttctgcttttcagtggctgctgcttcgctttcagttccagagagcagcctcagaaaaacgagtgccagatccaaaaactcaatgccctcaaaccggtaaccgtatagagtcagaaggagggctcattgagacatggaaccctaacaacaagccattccagtgtgccggtgttgccctctctcgctgcaccctcaaccgcaacgcccttcgtagaccttccta

SEQ ID NO: 122507 - DNA, 277 bp, Glycine max
ctaaaccctactcattctccatacctcaacgaagaggttaaagagacggcaacactttgctgtccgccttgaccgagcagagcttcgtcttggccctcgattttgccctaaagtactctcagtcacaacagacaccgtcgtcgtcgtcgtcgtcacaatggcaccgaagcagaccaaggctgagaagaagatcgcttacgatgcgaactgtgcgacctaatggaggagtacggccagatcctcgttgtgaactccgataacgtgggatcgaaccact

SEQ ID NO: 122508 - DNA, 282 bp, Glycine max
taaaccctactcattctccatacctcaacgtagaggttaaagagacggcaacactttgctgtccgccttgaccgagcagagcttcgtcttggccctcgattttgccctaaagtactctcagtcacaacagacaccgtcgtcgtcgtcgtcgtcataatggcaccgaagcagaccaaggctgagaagaagatcgcttacgatgcgaactgtgcgacctaatggaggagtacggccagatcctcgttgtgaactccgataacgtgggatcgaaccagctccaga

SEQ ID NO: 122509 - DNA, 267 bp, Glycine max
ggaaaagatctcgcaatggttaaagttaatgtagcatgtgctgctgttggcttgacatcaagttacactccaactccattgttggaatctggtttgcaaaaagacagagggttaattgtggaatattttggaaggatgtcttacgttgctcataagttaatcagccccatgagaaagatttgttggagggaaatttttcctttgatattaaatctcgctctagattggataaagtatcctcgtacatagcacaatttgttagtggaa

SEQ ID NO: 122510 - DNA, 283 bp, Glycine max
ctcttcctcaccgattgctagaatggaatttcgatgctcagtcatctcttttaccattctcttctctcttgctcttgcaggagagagccatgtccatgcatcgctacctgaggaagattattgggaagctgtttggccaaacactcccattcccatgcactgcgagagcttctaaagcctctccctgcaggtgttgaagtcgatgaactccctaagcaaattgatgatacacagtacccaaaaacattcttctataaagaagaccttcatccaggcaaaacat

SEQ ID NO: 122511 - DNA, 275 bp, Glycine max
cttcgagggtttgggtttctcttcctcccttggagaaaaagaagagccaccgctgcgacgccgttcgtgcatttttgaggtgccgctgtcatgtttgggcgtggtggaccaaggaggagtgataactccaaatattatgatattctcgggatttccaaaatgccagtgaagatgaaatcaagaaggcctatagaaagggcggctatgagaaccatccagataagggaggagatctgaaaagtttaaggagttaggtcaagcatatgaagttttaa

SEQ ID NO: 122512 - DNA, 284 bp, Glycine max
ttcagaactgcaatggtgagtagaaatagcaagcctcaagctactgcaatgcatgtgggagctatagaaattatcattgatagtttcgcaagtcctgactgcaacatagttggtgcaatgcttttggttgatacttatcataccaatcctgaaaatgcattcgtagtatttttgtcgcgcctttcagaggcggaaggctattcgggtggttacattccgaataccattgtgcaaattgaaccagacatgaattcaagggttcagcttttgagtaccactaccat

SEQ ID NO: 122513 - DNA, 264 bp, Glycine max
cattctcttgggaatttctcaagattttgaaattgctggtaatactcttatgccagctttttctgttccacaggctactgccagatcttctgaaaatgcggaatcctctgcatgatctggaatttgtgttttctttcatttgtccgtttgttaattcaataaaggaaattaggcatgaccctcttgttgagtaatgctctgcctatttgaaaatttcaacacctctttaaatggtcgtaatgatgtgtgaagtgggtgtaattt

SEQ ID NO: 122514 - DNA, 276 bp, Glycine max
caatgttatcggactccttaacttcctcaccttcctcttgcgcatcccgatcctggtggccggagtgaggctgagcaagcaaggcgccaccgagtgcgagcggtggctggagaagcccgtcatcgcgctcggcgtcttcctcatgctcgtctactcgccggcctcgtcggcgcgtgctgccgcgtgtcgtggctcctctggctctacctcttcgtcatgtttgtcctcatcgttcttctcttcgccttcaccattttcgctttcgtcgttaccaac

SEQ ID NO: 122515 - DNA, 273 bp, Glycine max
attgtctttgaacactcatcaccatggccaagcttgttctttccctttgtatccttcttttcagtggctgcttcgctctgagagagcaggcacagcaaaatgagtgccagatccaaaagctgaatgccctcaaaccggataaccgtatagagcggaaggtgggttcattgagacctggaaccctaacaacaagccattccagtgtgccggtgttgccctctctcgctgcacccttaaccgcaatgcccttcgtagaccttctacaccaacggt

SEQ ID NO: 122516 - DNA, 275 bp, Glycine max
caaatgctgttctttcaatgtggagatattttgttggagatctcgtctttgaagtttctaagatgacttctccctacattaaatgtacagtctctttcttcatagcatttggaaatttggctgatgataccatcaattttgaggcttttcccacaagctggtgcagtttggagagattcaggaaaaagttgtattgaaattttcacaagaggaatttcttacagcttggtcaactcaggtgcgtcctgcaacaactctgttggctgatgggtgtc

SEQ ID NO: 122517 - DNA, 276 bp, Glycine max
tgctgttgacaagttgtattctactaaggttaataagtttgcaaaaattatgaaccttagacaaagtgttgttggtgatcttaaacttcttactgatgggaagttgtatgagggtaagcatattcctgtatctaatattagtgcaggggaaatcatgtagttcaaatacccctaatggcacaggaggaaattctgtcttctagtgcaagtgatttcagaactgcaatggtgagtaaaaatagcaagcctcaagctactgcaatgcatgtgggagct

SEQ ID NO: 122518 - DNA, 215 bp, Glycine max
ggaggagtttgcattgacatgtcattaatgaaaagagtgacagaattacatgttaatgacatggatgttgttgtagagcctggcataggccataaggttccaaataccttaattattaacacttccttagttcaatatggggtagcccttcatctctctctttcttccctttgcttgctactcttgtcgagtgcatgctttgctattagctccag

SEQ ID NO: 122519 - DNA, 264 bp, Glycine max
cattctcttgggaatttctcaagattttgaaattgctggtaatactcttatgccagctttttctgttccacaggctactgccagatcttctgaaaatgcggaatcctctgcatgatctggaatttgtgttttctttcatttgtccgtttgtttattcaataaaggaaattaggcatgaccctcttgttgagtatgctctgcctatttgaaaatttccacacctcttttaattgtcgtaatgatgtgtgaagtgtgtgttatttt

SEQ ID NO: 122520 - DNA, 281 bp, Glycine max
  unsure (1)..(281): unsure at all n locations
cgtacgtgtgaagtgaagaataatcttgtgaatcgcgtaagctctctcaactcaactggatccgggtcacaaccgtcttgaaattaagaccaactgggtcattgatcacaatctcaattggtagcacaacatcaaggganagtgaaaaagaaaggatatttgatcagggatatggcaactcgaagatatgagtttggaaggatgaatgaggctaagcacccagactccatcagagctgccttggctgaattcctctccacttgcatctttgtctttgctgg

SEQ ID NO: 122521 - DNA, 272 bp, Glycine max
aatgaccaagttcacaatcctcctcatctctcttctcttctgcatcgcccacacttgcagcgcctccaaatggcagcaccagcaagatagctgccgcaagcagctccagggggtgaacctcacgccctgcgagaagcacatcatggagaagatccaagccgcggcgatgacgatgatgatgatgacgacgacaatcacattctcaggaccatgcggggaagaatcaactacataaggaggaacgaaggaaaagacgaagacgaagaagaaga

SEQ ID NO: 122522 - DNA, 278 bp, Glycine max
atttaagatactatgatgagagcacggttcccattactgttgctgggacttgttttcctggcttcagtttctgtctcatttggcattgcttactgggaaaaagagaaccccaaacacaacaagtgtctccagagttgcaatagcgagagaactcgtacaggaaccaagcatgccacgctcgttgcaacctccttaaggtggagaaagaagaatgtgaagaaggtgaaattccacgaccacgaccacgaacacaacacccggagagggaactcagcaac

SEQ ID NO: 122523 - DNA, 189 bp, Glycine max
catctgtatcagaacctagaaatgctcaactcgaagcaccggaactctcacaggctgataagaaatatcaaccatcatcccaggccattgacaaacctgcagatgatggctacaactggcgtaagtatgggcagaagcaggttaagggtatgagtatccacgaagctattacaagtgcacacatctgaa

SEQ ID NO: 122524 - DNA, 264 bp, Glycine max
tattctcttgggaatttctcaagattttgaaattgctggtaatactcttatgccagctttttctgatccacaggctactgccagatcttctgaaaatgcggaatcctctgcatgatctggaatttgtgttttctttcatttgtccgtttgttaattcaataaaggaaattaggcatgaccctcttgttgagtatgctctgcctatttgaaaatttccacacctcttttaattgtcgaaatgatgtgtgaagtgtgggtaatttt

SEQ ID NO: 122525 - DNA, 189 bp, Glycine max
gctgagcatccacaaagtaggaggggaataagggaagaaagggtcctttgtcttcaattttgagggctttttactgaataagtatgtactaaaatgtatgctgtaatagctcatagtgagcgaggaaagtatcgggctatgtaactatgatagagcttcaactatgaataaataaatcgacagcatatg

SEQ ID NO: 122526 - DNA, 207 bp, Glycine max
gctgagcatccacaaagtaggaggggaataagggaagaaagggtcctttgtcttcaattttgagggctttttactgaataagtatgtactaaaatgtatgctgtaatagctcatagtgagcgaggaaagtatcgggctatgtaactatgacagagcttcaactatgaataaataaatcgacagcatatgatgcttttgttttgtgtc

SEQ ID NO: 122527 - DNA, 278 bp, Glycine max
atcaccattactgatggtattgacaagactagtgcaactttgcaatttagaaagttagcagattgtgatttctcaggtgctacccacaaaagcttagagctctgcttaaagtttctcttgagaaatcacaatctgctaactttctaaagagaactttaagcagatgtctaatgttttgtgggtagctcctgaggacaaggcgagtttatggtcacaacttcattatgtttcgtgtaataatctggaaatgcaagaaggggatcttgtcaatctcgtaa

SEQ ID NO: 122528 - DNA, 250 bp, Glycine max
ctctcttcttcagtggtggaagctactagaacactagtttgttgagcactgcgatgaggaagtggacggttgcttccgctctccttcttctctctctcctctttctctttgcagatcaaggtcgaaagtttcaggcgaatgccgagagggattccgacgagcttgtagatccacccaaggtggaggacaagatcggtgctgtgcctcatggcctttcaaccgattcagatgtcgtcaagagggaggcgga

SEQ ID NO: 122529 - DNA, 272 bp, Glycine max
tatatatactatgatgagagtgcggtttcctttgttggtgttgctgggaactgttttcctggcatcagtttgtgtctcattaaaggtgagagaggatgagaataaccctttctacttgagaagctctaacagcttccaaactctcttgagaaccaaaacggtcgcattcgtctcctccagagattcaacaaacgctccccacaacttgagaactatcgagactaccggattgtccagtttcagtcaaaacccaacacaatccttctccccca

SEQ ID NO: 122530 - DNA, 270 bp, Glycine max
cagtgtgggacgtgttggtccacctcttccttgttgctacattaagcttgtttcttgggaagaaggagggtatctgacatcagataaaccaatgccaaggggagagattgtagttggaggatttagtgtgacagctggttactttaagatcaagaaaaaactaacgaagtgttcaaggttgatgagaaaggtatgcgctggttttatactggtgatattgggcaattccaccctgatggatgtcttgaaatcatagataggaagaaagat

SEQ ID NO: 122531 - DNA, 271 bp, Glycine max
aagggagccattgtgacagtgaaaggaggtctgagcgtgataaaaccacccacggacgagcagcaacaaagaccccaggaagaggaagaagaagaagaggatgagaagccacagtgcaagggtaaagacaaacactgccaacgcccccgggaagccaaagcaaaagcagaagaaatggcattgacgagaccatatgcaccatgagacttcgccacaacattggccagacttcatcacctgacatctacaaccctcaagccggtagcgtcac

SEQ ID NO: 122532 - DNA, 279 bp, Glycine max
tacaacctgaacgcgaacagcataatatacgcattgaatggacgggcattgatacaagtggtgaattgcaacggtgagagagtgtttgatggagagctgcaagagggacgggtgctgatcgtgccacaaaactttgtggtggctgcaagatcacagagtgacaacttcgagtatgtgtcattcaagaccaatgatacacccatgatcggcactcttgcaggggcaaactcattgttgaacgcattaccagaggaagtgattcagcacactttcaaccta

SEQ ID NO: 122533 - DNA, 273 bp, Glycine max
ccagttcaatatcctagtacaccgtattaaagaatttaagatatactatgatgagagcgcggttcccattactgttgctgggagttgttttcctggcatcagtttctgtctcatttggcattgcgtattgggaaaagcagaaccccgtcacaacaagtgcctccgaagttgcaatagcgagaaagactcctacaggaaccaagcatgccacgctcgttgcaacctccttaaggtggaggaagaagaagaatgcgaagaaggtcaaattccacg

SEQ ID NO: 122534 - DNA, 266 bp, Glycine max
accaaacgtcttttctttcttatacattttactttagtttgtgaaattctatccaaagattttgagaatgtctagctgtgggtgtggaagcagctgcaactgtggcagcaactgcagttgcaacaagtactcttttgactacgttggaagatcacaaatgagactctagttttgggtgttgggccggtgaaggcccaattcgagggtgctgaaatgggtgttgcagctgagaacggtggctgcaactgtggatcaaactgcacttg

SEQ ID NO: 122535 - DNA, 262 bp, Glycine max
ttcacctcctcagcagtcgtcagaaagactccataacccaaaaatgcctttcaagaggtacgttgagattggaagggttgctcagatcaactatggcaaagagtacgggcggctcgtgatcattgtcgatgtcattgaccagaataggctcttgttgatgctcccgacatggtgaggtcccaagtgaacttcaagaggctctcgctcactgacatcaagattgatattaagaggattcccaagaagaaggatctcattcaag

SEQ ID NO: 122536 - DNA, 271 bp, Glycine max
cttctctctctctcggatttcttgcgcggtttatcatgggggatacgtcagtattcgttttctctcaccacatttagcccttctggaaagcttgttcagattgagcatgctttgacggctgtcgggtctggacaaacgtctttgggattaaagctgcaaatggagttgtcattgctaccgagaagaaattgccatctatattggttgatgaagcatcagtccagaaaattcagttattaacaccaaatataggtgtcgtatatagtggcat

SEQ ID NO: 122537 - DNA, 272 bp, Glycine max
taacaatggcttcaaccgacaagtcaccggacccaacgccggcgaagggtccggatccaactccggggaagccgatgagtgttggtcagcacgtgatcgacaagagtgcaatgatggtgcagtcgctggaccccattaagcagatggtcagcacgtgtgctccttcgctatctacagccatgacatgtctcgccagatagagacacatcactactgctccagactccaccagatattcatacaatgtgctgtctaggattccgatgaatcca

SEQ ID NO: 122538 - DNA, 267 bp, Glycine max
ctctctgctctgcattggtgttcccatctttcagaatcacaacttcagctttctccaaatgtggcatcagggcttccattgccgttgagcaacaaacttcgcagactaaggttgctctcctcaaaattggtaccagaggaagtccatagctctggctcaggcatatgagaccagagacaagctcatggcatcacatccagagctagcggaagaaggggctattcagattgtgataataaaaacaactggtgacaaatactatcacag

SEQ ID NO: 122539 - DNA, 264 bp, Glycine max
caccgtattaaagaatttaagatatactatgatgagagcgcggttcccattactgttgctgggagttgttttcctggcatcagtttctgtctcatttggcattgcgtattgggaaaagcagaaccccagtcacaacaagtgcctccgagttgcaatagcgagaaagactcctacaggaaccaagcatgccacgctcgttgcaacctccttaaggtggaggaagaagaagaatgcgaagaaggtcaaattccacgaccacgacca

SEQ ID NO: 122540 - DNA, 238 bp, Glycine max
atcaaagcagtaagataacagcagattcccttgatctagatgggtacacaatggacgaggcacttggtagtcgaaggttatttatgttagattaccatgatatcttcatgccatatgtgaggcagataaatcagctgaattctgccagacttatgcgacaaggactatcctttttttgagagaagatggaactttaaagccagtggccatcgaattaagtttgccacattctgctggg

SEQ ID NO: 122541 - DNA, 240 bp, Glycine max
taacacttccttagttcaatatggggaagcccttcactctctctctttcttccctttgcttgctactcttgtcgagtgcatgctttgctattagctccagcaagctcaacgagtgccaactcaacaacctcaacgcgttggaaccgaccaccgcgttgagtccgaaggtggtttgattcaaacatggaactctcaacaccctgagctgaaatgcgccggtgtcactgtttccaaactcac

SEQ ID NO: 122542 - DNA, 268 bp, Glycine max
ataagggacaagcttagttgtcaagttggaatcaacccatattctatggaatggactggtttggccaatagattactgagtaagggcaacgatattctgtgttgcgattatgctagttttgatggtttgattaccaagcaagtttgagcaagatggcagaaatgatcaacagtctttgtggtggtgatgaaaaactgatgcgtgaaaggacacacctgctgttggcttgttgttcaaggatggcaatttgtaagaaagatgtttggag

SEQ ID NO: 122543 - DNA, 192 bp, Glycine max
ctgaattggagctgaattatggaaggcgttatggcttactcggattcaatggttgtagaaaatctacactgcttacagccatcggttgtcgggaacttccaattccgaccacatggacatatatcatctaaccagggagttgtgcctctgatatgtctgcattggaagctgtcataagctgtgacgaagaaa

SEQ ID NO: 122544 - DNA, 265 bp, Glycine max
tcgagtttcacagccaagtcgtaaaagggtttcaagggatggaaaacatgcagagcttctggcaattgggtgatgaactccgtgggcactcaaaagcatcggaggatcacaagtggttaatggttgcctcgaaactggccgaacgacaagattgaagggggagcgtgtgaacaaccttgatctttcaaagggacccattgaaacaaggtcaagggatacatttgggttccaggaagagaacaaatttgattctcttaacttgagc

SEQ ID NO: 122545 - DNA, 272 bp, Glycine max
tctcgagccgattcggctcgagaccgattgctagaatggaatttcggtgctcagtcatctcttgtaccattctcttctctctagctcttgcaggagagagccatgtccatgcatcgctacctgaggaagattattgggaagctgttggccaaacactcccattcccactgcactgcgagagcttctaaagcctctccctgcaggtgttgaaatcgatgaactccctaagcaaattgatgatacacagtacccaaaaacattcttctataaag

SEQ ID NO: 122546 - DNA, 266 bp, Glycine max
  unsure (1)..(266): unsure at all n locations
cttaattattaacacttccttagttcaatatggggaagcccttcagtctctctctttcttccctttgcttgctactcttgtcgagtgcatgctttgctattagctccagcaagctcaacgagtgccaactcaacaacctcaacgcttggaacccgaccaccgcgttgagtccgaagtggtttgattcaaacatggaactctcaacaccctgagctgaaatgcgccggtgtcactgtttccanactcaccctcaaccgcaatggcct

SEQ ID NO: 122547 - DNA, 271 bp, Glycine max
gtcatgggaaacaaaactacccttttgcttttgctctttgttctttgccatggagtggccacaacaacaatggccttccatgatgatgagggtggtgataaaaagtcaccaaaaagtttgtttttgatgagcaactccacgagggtttcaagactgatgcaggggaaatgcgtgtgctgaaaagccatggtggtaggatattttataggcacatgcacattggcttcatctctatggaaccaaagtccttgtttgttcctcagtacctcga

SEQ ID NO: 122548 - DNA, 273 bp, Glycine max
gaaaacgagaacgcaagaaaaattgtctacacgcagcagaaggatcttatccctaagtttctcaagaacgacgaagatgacgacgacgtcgtttccgacgacgaagcacagaaacagatcgaggaaacgatgcaggagaccaaggcgctttggagaaaatcgtgaacgttaggttaagcgctgcgcaaccgaagaatgttccgaagcagaactccgatgcgaagtatatacagtacaaaccctcgcagcaatccgatgcgttcaattcgggtg

SEQ ID NO: 122549 - DNA, 191 bp, Glycine max
agcagaaggagcaaaagcaatggcgccgaagaagccgagaaccacgacaaggaaccctgatttggttagggggattggcaagtattcgaggtcgcagatgtaccacaagaggggcatctgggccatcaaggccaaaaactgtggcgtttgccccgccacgatcccaagcccaagcccgaggccccggccca

SEQ ID NO: 122550 - DNA, 157 bp, Glycine max
taaacactcatcagtcatcaccatggccaagctagttttttccctttgttttctgcttttcagtggctgctgcttcgctttcagttccagagagcagcctcagaaaaacgagtgccagattccaaaactcaagtagcctcaaccggtaaccgtatag

SEQ ID NO: 122551 - DNA, 176 bp, Glycine max
ttttgctaaaccgcgatcacaggttgccgcaccttaaaaccggaaacaaaagcaatcgttacttgatttcaagaatctctcaatttcttcctacttctttgtgtacgatttcttaagggaaagaaaatcactctctgtgctggccacagacttcgtgaatcattttctttgccact

SEQ ID NO: 122552 - DNA, 303 bp, Glycine max
atggaatggactggtttggtcaatagattactgagtaagggcaacgatattctgtgttgcgattatgctagttttgatggtttgattaccaagcaagttatgagcaagatggcagatatgatcaacagtctttgtggtggtgatgaaaaactgatgcgtgaaaggacacacctgctgttggcttgttgttcaaggatggcaatttgtaagaaagatgtttggagagttgaatgtggaatcccttctggatttccgctcacagtcatttgcaatagcatttttaatgagatgctcattagatat

SEQ ID NO: 122553 - DNA, 311 bp, Glycine max
aaacacttgtaccaatgaggcccaatcactccttttgactgctgcattcccagacatcacaattttaaccattaaacagcctttcttccaagcagcaactctcaacaagttactaattggagaattttgtataagtgtgatccaatctccagttttgtccactaaaattcctccaccgagaaggtcaatagaaaattgacaaaagctctgcttgctagaatcaaaattcaatggtgttctcactgttgccatttgattccaaacagtttgctgtgaaatagactgaggaatggtgccccaaagacgagaac

SEQ ID NO: 122554 - DNA, 274 bp, Glycine max
caagggtttaacctttctggctgtgttaatatgcgtttcagcactgtcactgagtccttctgttgcgggggaagggcaaaataatggccttgttatgaacttctacaaggaatcatgcctcaggctgaagacatcatcacagaacaagtcaagcttctctacaagcgccacaagaacactgctttctcctggctcaggaacatcttccatgactgtgctgttcagagttgtgatgcttcactgttgctggactccacatagaaggacttgtctg

SEQ ID NO: 122555 - DNA, 243 bp, Glycine max
gagaccaatttcttagctatcttttcgtattctttagccttattttcaaacctagcctttggcaaatgtaaagtaaccgaggtagaagaagaagaccctgagctcgtaacatgcaaacaccaatgccaacagccacagctatacactgagggtgacaagcgggtatgcttgcaaagatgtgacaggtatcatcgtatgaagcaagagcgagagatacaaatccaagaggaaactcgtgagaag

SEQ ID NO: 122556 - DNA, 307 bp, Glycine max
ataaaattcttccaccaagttatgggtttccttgtgttgcttcttttctccctcttaggtctctcttctagttccagcatatcaactcatcgttccatattggaccttgacctaaccaagtttaccacacagaaacaggtgtcttcactgttccaactatggaagagtgagcatggacgtgtctaccataaccacgaagaagaggcaaagagacttgagattttcaagaataacttgaactatatcagggacatgaatgcaaacagagaatcaccccattctcatcgtttaggattgaacaagtttg

SEQ ID NO: 122557 - DNA, 303 bp, Glycine max
agccactcaggcttccattgcaggttgtctacaaaattggtggtattggtaccgtgccagtgggacgtgttgagactggtgtcgtgaagctcggtatggtggtgacttttggtcccactgggctgacaactgaggttaagtctgtttagatgcaccatgaggctctcacagaggctcttccaggtgacgatgttggctttaatgtgaagaatgttgcagtcaaggatctcaagcgtggttttgttgcatccaactccaaggatgactctgccaaggaagctgccagcttcacatctcaagtca

SEQ ID NO: 122558 - DNA, 301 bp, Glycine max
agtggaaggaggtctcagcgttatcagccccaagtggcaagaacaacaagatgaagatgaagatgaagacgaagatgatgaagatgaacaaattccctctcacccacctcgccgaccaagccatggaaagcgtgaacaagacgaggacgaggacgaagatgaagataaacctcgtcctagtcgaccaagccaaggaaagcgtgaacaagaccaggaccaggacgaggacgaagatgaagatgaagatcaacctcgcaagagccgcgaatggagatcgaaaaagacacaacccagaagacct

SEQ ID NO: 122559 - DNA, 264 bp, Glycine max
gagcgcggttcccattactgttgctgggagttgttttcctggcatcagtttctgtctcatttggcattgcgtattgggaaaagcagaaccccagtcacaacaagtgcctccgaagttgcaatagcgagaaagactcctacaggaaccaagcatgccacgctcgttgcaacctccttaaggtggaggaagaagaagaatgcgaagaaggtcaaattccacgaccacgaccacaacacccggagagggaacgtcagcaacacggtg

SEQ ID NO: 122560 - DNA, 288 bp, Glycine max
  unsure (1)..(288): unsure at all n locations
tacgaacagattgacatcttagtgcacatcacgcaatttataggcgtctaactcctcactaccgtgacaccatgagcatcaacgcacttgctaggcaatctctcattaatgctgatggcataatagagaaatcttttttgccctcaaagcattccgttgagatgtcttcagcggtttataagaattgggttttcactgatcaagcactacctgcagatcttatcaagagaggagtggcaatnntttttnancngncccacatggacttcgacttctgatagaggacta

SEQ ID NO: 122561 - DNA, 275 bp, Glycine max
ttctctccattgtctttgaacactcgccaccatggccaagcttgttctttccctttgtttccttcttttcagtggctgcttcgctctgagagagcaggcacagcaaaatgagtgccagatccaaaagctgaatgccctcaaaccggataaccgtatagagtcggaaggtgggttcattgagacctggaaccctaacaacaagccattccagtgtgccggtgttgccctctctcgctgcacccttatacgcaatgcccttcgtagaccttcctaca

SEQ ID NO: 122562 - DNA, 250 bp, Glycine max
cttaattattaacactaccttagctcaatatgggcaagcccttcactctctcactatcatcccattgattgctactcaagtcgagtgcctgcattgctattagctccagcaagctcaacgagtgccaactcaacaacctcaacgcgttagaagccgatcaccgcgttgcagtccgacggtggactcattcaaacatggaactctcaacaccctgagctcaaatgcgccggtgtcactgtatccaaactca

SEQ ID NO: 122563 - DNA, 224 bp, Glycine max
cactgatcaagcactacctgcagatcttatcaagagaggagtggcaattaaggatccatctgccccacatggacttcgacttctgatagaggactacccttatgctgttgatgggctagagatatgggctgcaattaagacatgggtccaagaatatgtgtccttgtactatgcaagagatgatgatgtcaaacctgattctgaactccaacagtggtggaaag

SEQ ID NO: 122564 - DNA, 212 bp, Glycine max
atcgtgtcgagggctcagatggaaacaaatttgtttaaattgtctcttgatgatgttgaaactcctaaaggttccatgttggatcttaaaatttctcagtctaaattgcacttcccaagaacacagtgaggaactattctgcgtagtgatctactgaattctgacagagggcataacatgtattcacgatccgtaagagtaatgtgcaatga

SEQ ID NO: 122565 - DNA, 282 bp, Glycine max
  unsure (1)..(282): unsure at all n locations
ctcaaacatttcaacgttttagagagagagagagagagagatacagagagagaagggttggcttngtgatggggttgaatcaatataatgaatgagctggcgtacgaaacaaatgtaaacttcttactgatgggaagttgtatgagggtaagccatattcctgtatctaatattagtcccggcgagaatcctgtagttcaaataccccaaatggcaccggaggaacttctgtcttctagtgcaattgatttcagaactgccatgggtgagtagaaatagcaa

SEQ ID NO: 122566 - DNA, 93 bp, Glycine max
attctctccattgtctttgaacactcatcaccatggccaagcttgttctttccctttgtttccttcttttcagtggctgcttcgctctgagag

SEQ ID NO: 122567 - DNA, 213 bp, Glycine max
ggtccttaaacactcatcagtcatcaccatggccaagctagttttttccctttgttttctgcttttcagtggctgctgcttcgctttcagttccagagagcagcctcagcccaacgagtgccagatccaaaaactcaatgccctcaaaccggataaccgtatagagtcagaaggagggctcattgagacatggaacctaaacaacaagccatt

SEQ ID NO: 122568 - DNA, 299 bp, Glycine max
agtgcaactttgcaatttagaaagttagcagattgtgattttctcaagagaaactttaggcagatgtctaatgttttgttggtggctcctgaggactaggcgagtttatggtcacaacttcattatgtttcatgtaataatctggaaatgcaagaagcttatcttgtcaatctcgtaaatgtgttacgagaattgtatttgcacagtccagaggaagctcgccaattgagaaggaaagctctctctcgtattgaatggctgcaaaaagctgatgtgcctaccatagcacagattgaaga

SEQ ID NO: 122569 - DNA, 296 bp, Glycine max
agcagcggcagcttcatctgtttttctgcatcggcgtgaacaatggcgacgtacgctgcgatgaagcccaataagcctggcttggaggagtcccaagaacagatccacaagataaggatcaccctttcctccaagcacgtcaaaaatctcgagaaggtttgtggggacttggttcgtggtgcaaaggataagaggctcagggttaagggacctgtcaggatgcccactaaggttcttcacatcactaccaggaagtccccctgtggtgaaggtaccaacacatgggacagatttga

SEQ ID NO: 122570 - DNA, 297 bp, Glycine max
atggaagaacagtaagcattaagattcttcctgttggtattcatataggtcagctccaatctgtcatgagtcatcccgagacagaaagcaaggttgcagagttaaaaaaacagttcagagatcaaactgtgctgctcggggtggatgacatggatatcttcaaaggaatcagcttaaaacttttggccatggaacaattgcttttacaacatcctgataagaggggcagagttgttctggtccaaattgctaaccctgcaagaggccgtggaaaggatgtgcaggaggtacaaagtg

SEQ ID NO: 122571 - DNA, 296 bp, Glycine max
attccttcacttgcagcactgttgcatcatcatcttcattgcaaaaccctaaacttcaccttcaaccatgaccacacaagtaccaccacacagtgtccaagtccacacaacaacacacctctacgaagctggcgtcgtcccccccggagcccgtttcgaaccgccgcgttatgaagccggcgtcaaagcgccctccatttaccattccgagagaggtccaacgacttcccaggtcctcgccgtcctcgccggcctcccggtcggtggcatcctgctcctcctggcgggattgaccc

SEQ ID NO: 122572 - DNA, 294 bp, Glycine max
aaacacttgtaccaatgaggcccaatcactccttttgactgctgcattcccagacatcacaattttaaccattaaacagcctttcttccaagcagcaactctcaacaagttactaattggagaattttgtataagtgtgatccaatctccagttttgtccactagaattcctccaccgagaaggtcaatagaaaattgacaaaagctctgcttgctagaatccaaattcaatggtgttctcactgttgcccattgaatccaaacagtttgctggtgaaatagactgaggaatgg

SEQ ID NO: 122573 - DNA, 285 bp, Glycine max
ccaggctaaagctccaagtatgtttttacaatccttcaaaaattttgtttctttgtgtgtgtatggtgatgataacttaattagtgttcatgaatacgtcaagccttactttagtggttctaaattgaaaagctttctagctggtcataatatcaccattactgatggtattgacaagactagtgcaactttgcaatttagaaagttagcagattgtgattttctcaagagaaactttaagcagatgtctaatgttttgtgggtagctcctgaggacaaggcgag

SEQ ID NO: 122574 - DNA, 273 bp, Glycine max
tggaaatctacatacaacatggtaatggtattcgaggcacgataatctcgggtagtcctagcacttatcaagagccgcaagaatctcagcaacgaggatgatgccagaggccccaagaccgtcaccaaacagtacatcgcttcagagactgtgacttgatcgcagtgcctactggtgttacatggtggatgtacaacgatgacgacactcctgttgttgccgtttctattatcgacaccaacagctatggagaactagctcgaccagatgcct

SEQ ID NO: 122575 - DNA, 300 bp, Glycine max
cgcctttccagagcggtatggccattcaggtcgctacatttccgaataccattgcgcagactgaaccatacatgaattcaaggtttcagcttttcagtaccactaccaatggtgattttgtatcagggaaagatctcgcaatggttaaacgtaatgttgcatgtgccgctgttggcttgacatccagttacactccaactccattgttggaatctggtttgccaaaagacagagggttaattgggcgatattttggaatgatgtcttacgttgctcataacgttaatcagccccaagaga

SEQ ID NO: 122576 - DNA, 294 bp, Glycine max
gcgcgttctacacgtgttgccgatctcagatgttgtaaaattagtttatgatgtgaagctatggagtggaaaatatgtggatgtaggagatttcgggatgaatggcctcaaaacgctttgtcgtttgtggttattgagtcctgagtgatcttgtcatccgacctttgccatgacaggtgcgcttgcatggcaggtcaaaaaatgttaataaaaacagttttattggtttggggagagatgcacgggggttgcccggggtctcttcctcttgtgtggtgtggtgtttgctgtgct

SEQ ID NO: 122577 - DNA, 300 bp, Glycine max
ttttcgtttgcgttgctgttgcgactgagtgagtgaagatggcgtgcttgcacgaccacagttgcgaagaccatgactgttcctctaactggtctctctacaaacacatcgacctctccaaggtaactgctttgaatgaggcaaatccaggaagtgttaagtcagttttcaaagcttgggaagagcgtctggattcttctggggttcacttggaaagcaatgagggtgatcctgagttacttgtcttcattccatttacttcagatgtcaagattaagagcgtatccatagttggtggag

SEQ ID NO: 122578 - DNA, 298 bp, Glycine max
gagagattcaggaaaaagttgtattgaaattttcacaagaggaatttcttacagcttggtcaacccaggtgcgtcctgcaacaactctgttggctgatgggtgtccatatttgtatgctatggtgcatgatagttcagtgtctacaataccaggtgattttgtcattggtgttaagttgacaaccataaacaatatgtgtgcatatgggctcaatcctggtatttcaggttctcgtcttttgggcaccattcctcagtccatttcacagcaaactgtttggaatcaaatggcaacagt

SEQ ID NO: 122579 - DNA, 295 bp, Glycine max
ctcgagccgattcggctcgagggtcaatgtacactgtgtatggtactcgcatgatcccaaaaggggttctgttagcaacattgcacctttggcaattggactcattgttggggcaaacatccttgttggtgggccatttgatggagcctgcatgaaccctgctctagcttttgggccttccttagtgggctggagatggcaccaacactggatcttctgggtgggtccactgattggggctgcactggcagcactggtgtatgaatatgttgtgatcccaactgagctccctcat

SEQ ID NO: 122580 - DNA, 293 bp, Glycine max
tgacggatatgaaactctaataatgtcagatgagagtacagaatcagagacagagcaagcgttcttaagcgccatccttgagcaaccaattagtgtctccattgatgcaaaagattttcatttatacaccgggggaatttatgatggagaaaactgtacaagtccgtatgggattaatcactttgttttacttgtgggttatggttcagcggatggtgtagattactggatagcgaaaaattcatggggagaagattggggagaagatggttacatttggatccaaagaaaca

SEQ ID NO: 122581 - DNA, 295 bp, Glycine max
ggctcgagggagattggatcacacttatacaaaattctccaattagtaacttgttgagagttgctgcttggaagaaaggctgtttaatggtcaagattgtgatgtctgggaatgcagcagtcaaaaggagtgattgggcctcattgcgtacaagtgtttttaacaaacagcaacagtacagagcattttgatgcatgtaagtggacaaaatcagaaccacattcctgggaattgatcttcccaatagaggtatgtggtcctaataatggttttgaaatgtggagttctgagtggg

SEQ ID NO: 122582 - DNA, 283 bp, Glycine max
tgccctctctcgctgcacccttaaccgcaatgcccttcgtagaccttcctacaccaacggtccctcggaaatctacatacaacaaggtaatggtatttttggcatgatattcccgggttgtcctagcacttatcaagagccgcaagaatctcagcaacgaggacgaagccagaggccccaagaccgtcaccaaaaggtacatcgcttcagagagggtgatttgatcgcagtgcctactggtgttgcatggtggatgtacaacaatgaagacactcctgttgtt

SEQ ID NO: 122583 - DNA, 304 bp, Glycine max
agcaaagcaatggctacttcaaagttgaaaacccagaatgtggttgtatctctctccctaaccttaaccttggtactggtgctactgaccagcaaggcaaactcagcggaaactgtttctttcagctggaacaagttcgtggcgaagcaaccaaacatgatcctccaaggagacgctattgtgacctcctcgggaaagttacaactcaataaggttgacgaaaacggcaccccaaaaccctcgtctcttggtcgcgccctctactccacccccatccacatttgggacaaagaaaccggtagcg

SEQ ID NO: 122584 - DNA, 274 bp, Glycine max
cattctcttgggaatttctcaagattttgaaattgctggtaatactcttatgccagctttttctgttccacaggctactgccagatcttctgaaaatgcggaatcctctgcatgatctggaatttgtgttttctttcatttgtccgtttgtttaattcaataaaggaaattaggcatgaccctcttgttgagtatgctctgcctatttgaaaatttccacacctcttttaattgtcgtaatgatgtgtgattcgtgtgttattttaaaaagaga

SEQ ID NO: 122585 - DNA, 246 bp, Glycine max
  unsure (1)..(246): unsure at all n locations
gtaatagaaacctctcagcccctctccgttcacactcgccancgtaatcgacggccaagncgttgcgcaaaccatccgatctgaaatcgccgacgaggtgcgcccctctctcaaaaatacggcaaggttccggcattagcggtggtgatagtagggaacagaaaagattcacagagctatgttggaatgacgagaaaggcatgcgctgaattgggaatcaaatccttcgatgtggaccttcccgaa

SEQ ID NO: 122586 - DNA, 305 bp, Glycine max
caacgacgacagagactcctacagacttcaatctggtgatgccctgagagtcccctcaggaaccacatactatgtggtcaaccctgacaacaacgaaaatctcagattaataacactcgccatacccgttaacaagcctggtagatttgagagtttctacctatctagcactgaagctcaacaatcctacttgcaaggattcagcaggaacattttagaggcctcctaggataccaaattcgaggagataaacagggttctgtttagtagagaggaagggcagcagcaaggggagcagaggctac

SEQ ID NO: 122587 - DNA, 230 bp, Glycine max
tgtttcctttgttggtgttgctgggaactgttttcctggcatcagtttgtgtctcattaaaggtgagagaggatgagaataaccctttctacttgagaagctctaacagcttccaaactctctttgagatccaaaacggtcgcattcgtctcctccagagattcaacaaacgctcccaaaacttggaaatctttcgagattacgggattgtccagtttcagtcaaaaccc

SEQ ID NO: 122588 - DNA, 299 bp, Glycine max
cttcctcaccgattgctagaatggaatttcgatgctcagtcatctcttttaccattctcttctctcttgctcttgcaggagagagccatgtccatgcatcgctacctgaggaagattattgggaagctgtttggccaaacactcccattcccactgcactgcgagagcttctaaagcctctccctgcaggtgttgaaatcgatgaactccctaagcaaattgatgatacacagtacccaaaaacattcttctataaagaagaccttcatccaggcaaaacaatgaaagtacaattcacc

SEQ ID NO: 122589 - DNA, 288 bp, Glycine max
  unsure (1)..(288): unsure at all n locations
catttatcaactcactcatcaatctcgtttgttctcactaactattacttcatcatgtcgtcgagcacagttggtcaagtcatcaaatgcaaagctgcggtttcatgggaggcagggacgccacttgtgattgaagaagtagaggtggcaccaccacaagctggtgaagtgcgtttgaagatcctctacacctctctttgccacactgatgtttacttctgggaagccaagggccanactccattgtttcctcgtatatttggtcatgaagctggagggattgtggag

SEQ ID NO: 122590 - DNA, 310 bp, Glycine max
tgcaattttcacaagaggaatttcttacagcatggtcaactcaggtgcgtcctgcaacaactctgttggctgatgggtgcccatatttgtatgcaatggtgcatgatagttcagtgtctacaataccaggtgattctgtcattggtgtcaagttgacaacccttcacaatatgtgtgcatatgggctcaatcctggtatttcaggttctcgtcttttgggcaccattcctcagtccatttcacagcaaactgtttggactcatctggcaacagtgagaacaccattgagttttgattctagctagcagag

SEQ ID NO: 122591 - DNA, 308 bp, Glycine max
cattggtccttaaacactcatcagtcatcaccatggccacgctagtatgttccctttgtcatctgctgcccagtggctgctgcttcgctttcagttccagagagcagcctcagtcaaacgagtgccagatccaagaactcaatgccctcctaccggatcaccgtatagagtcagaatgagggctcattgcgacatggaaccctaacaacaagccattccagtgtgccggtgttgccctctctcgatgcaccctcaaccgctacgaccctcgtagaacttcctacaccaacggtcgcccggaaatctac

SEQ ID NO: 122592 - DNA, 308 bp, Glycine max
cagaaaagtcatggtggacgcaagcaggggcaacaccagcaggaggaagaggaagaaggtggcagcgtgctcagtggcttcagcaaacacttcttggcacaatccttcaacaccaacgaggacatagctgagaaacttcagtctccagacgacgaaaggaagcagatcgtgacagtggaaggaggtctcagcgttatcagccccaagtggcaagaacaacaagatgaagatgaagatgaagacgaagatgatgaagatgaacaaattccctctcaccctcctcgccgaccaagccatggaaagcgtga

SEQ ID NO: 122593 - DNA, 295 bp, Glycine max
ctcaggtgcgtcctgcaacaactctgttggctgatgggtgcccatatttgtatgctatggtgcatgatagttcagtgtctacaataccaggtgattttgtcattggtgttaagttgacaaccataaacaatatgtgtgcatatgggctcaatcctggtatttcaggttctcgtcttttgggcaccattcctcagtccatttcacagcaaactgtttggaatcaaatggcaacagtgagaacaccattgaattttgattctagcaagcagagcttttgtcaattctctattgatct

SEQ ID NO: 122594 - DNA, 220 bp, Glycine max
  unsure (1)..(220): unsure at all n locations
ataaaattcttccaccaagttatgggtcctcctgtgntgcttctatactccctcttaggtctctcttctagttccagcatatcaagtcatcgttccatattggaccttgacctaaccaagtttaccacacagatacaggcgcctgcactgttccaactatggccgagtgagcatggacgtgtctaccataaccacgaagacgacgcacagagacctgaga

SEQ ID NO: 122595 - DNA, 285 bp, Glycine max
agccactcaggcttccattgcaggatgtctacaaaattggtggtattggtaccgtgccagtgggacgtgttgagactggtgtcgtgaagcccggtatggtggtgacttttggtcccactgggctgacaactgaggttaagtctgttgagatgcaccatgaggctctcacagaggctcttccaggtgacaatgttggctttaatgtgacaaatgttgcagtcaaggatctcaagcgtggttttgttgcatccaactccaaggatgaccctgccagggaagctgcca

SEQ ID NO: 122596 - DNA, 267 bp, Glycine max
agtggaaggaggtctcagcgttatcagccccaagtggcaagaacaacaagatgaagatgaagatggagacgaagatgatgaagatgaacaaattccctctcaccctcctcgccgaccaagccatggaaagcgtgaacaagacgaggtcgatgacgaagatgatgatatacctcgacctagtcgaccaagccaaggaaagcgtgaacaagaccaggaccaggacgaggacgaagatgaggatgaggatcaacctcgcaagagccgcga

SEQ ID NO: 122597 - DNA, 300 bp, Glycine max
gctcgaggcgcgttctacacgtgttgccgatctcggatgttgtaagattagtttatgatgtgaagctatggagtggaaaatatgtggatgtaggagatttcgggatgaatggcctcaaaacgctttgtcgtttgtggttattgagtcctgagtgatcttgtcatccgacctttgccatgacaggtgcgcttgcatggcaggtcaaaaaatgttaataaaaaaagttttattggtttggggagagatcgcacgggggttgcccggggtctcttcctcttgtgtggtgtggtgtttgctgtg

SEQ ID NO: 122598 - DNA, 309 bp, Glycine max
actggtccttaaacactcatcagtcatcaccatggccaagctagttttttccctttgttttctgcttttcagtggctgctgcttcgctttcagttccagagagcagcctcagcaaaacgagtgccagatccaaaaactcaatgccctcaaaccggataaccgtatagagtcagaaggagggctcattgagacatggaaccctaacaacaagccattccagtgtgccggtgttgccctctctcgctgcaccctcaaccgcaacgcccttcgtagaccttcctacaccaacggtccccaggaaatctacat

SEQ ID NO: 122599 - DNA, 316 bp, Glycine max
catagaatcagttccgatttgaagcctggaatggtgtttgttgtccctcccggtcatcccttcgtcaccatagcttccaataaagagaatctcctcatgatttgcttcgaggttaacgctcgagacaacaagaagtttacatttgcagggaaggacaacattgtgagttctctggacaacgttgctaaggagcttgcctttaactatccttctgagatggtgaacggagtattcgaccgaaaggagagtttctttttcccttttgagttgccgagagaggagcgtggtcgtcgcgctgatgcgtgagacgtttaga

SEQ ID NO: 122600 - DNA, 311 bp, Glycine max
ggtcgatggaacaatgtaggcaagggaagtcggcaaaatggatccgtaacctcgggaaaaggattggctctgagggctgggcacgggggtcccagtcccgaacccgtcggctgtcggtggactgctcgagctgcttccgcggcgagagcgggtcgtcgcgtgccggtcgggggacggattgggaacgggcccttcggggcctcttccccgggcgtcgaacagtcaactcagaactggtacggacaaggggaatccgactgtttaattaaaacaaagcattgcgatggtccctgcggatgttgacgcaatgt

SEQ ID NO: 122601 - DNA, 309 bp, Glycine max
atactatgtggtcaaccctgacaacaacgaaaatctcagattaataacactcgccatacccgttaacaagcctggtagatttgagagtttcttcctatctagcactgaagctcaacaatcctacttgcaaggattcagcaggaacattttagaggcctcctacgataccaaattcgaggagatcaacaaggttctgtttagtagagaggaagggcagcagcaaggggagcagaggctgcaagagagcgtgattgtggaaatctcgaaggaacagattcgggcactgagcaaacgtgccaaatctagttc

SEQ ID NO: 122602 - DNA, 309 bp, Glycine max
aaacactcatcagtcatcaccatggccaagctagttttttccctttgtattctgcttttcagtggctgctgcttcgctttcagttccagagagcagcctcagcaaaacgagtgccagatccaaaaactcaatgccctcaaaccggataaccgtatagagtcagaaggagggctcattgagacatggaaccctaacaacaagccattccagtgtgccggtgttgccctctctcgctgcaccctcaaccgcaacgcccttcgtagaccttcctacaccaacggtccccaggaaatctacatccaacaaggt

SEQ ID NO: 122603 - DNA, 283 bp, Glycine max
tgccctctctcgctgcacccttaaccgcaatgcccttcgtagaccttcctacaccaacggtccctaggaaatctacatacaacaaggtaatggtatttttggcatgatattcccgggttgtcctagcacttatcaagagccgcaagaatctcagcaacgaggacgaagccagaggccccaagaccgtcaccaaaaggtacatcgcttcagagagggtgatttgatcgcagtgcctactggtgttgcatggtggatgtacaacaatgaagacactcctgttgtt

SEQ ID NO: 122604 - DNA, 252 bp, Glycine max
tttctgaaaaggaagatcaagaaaaacccaaaaagattgatgccagattgagacaaagaatagatcctcaatacaatgaggttcaggctcagatggaaacaaatttgtctaaattgtctcttgatgatgttgaaactcctaaaggttccatgttggatcttaaaatttctcaatctaaaattgcacttcccaaaaacacagttggaggaaccattctgcgtagtgacctatgggcaaattttttgacagagg

SEQ ID NO: 122605 - DNA, 278 bp, Glycine max
cggctcgacgaaagatgtttggagagttgaatgtggaatcccttctggatttccgctcacagttatttgcaatagcatttttaatgagatgctcattagatatagctatgaaaaattactgcgccaggctaaagctccaagtatgtttttacaatctttcaaaaatttggtttctatgtgtgtgtatggtgatgataacttaattagtgttcatgaatatgtcaagccttactttagtggttctacattgaatagctttctagctggtcataatatca

SEQ ID NO: 122606 - DNA, 295 bp, Glycine max
ctccattggtccttaaacactcatcagtcatcaccatggccaagctagttttttccctttgttttctgcttttcagtggctgctgcttcgctttcagttccagagagcagcctcagtgaaacgagtgccagatccaaaaactcaatgacctcaaaccggataaccgtatagagtcagaaggagggctcattgagacatggaaccctaacaacaagccattccagtgtgccggtgttgccctctctcgctgcaccctcaatggcaacgcccttcgtagaccttcctacaccaacgg

SEQ ID NO: 122607 - DNA, 285 bp, Glycine max
ttcccttaaagggtgtggcagcgtgcaacccttttgcttcacgtcctggaacctcctatacacatcaacgcttcgctttcccaaacatttaccactggattccccttccacttccaggacaaggttggcatttgccccaaaccgcttataacttttgttttaggaggccctggtagtggaaacggtacacagtgtggaaaaattgttgaaacctttggctttaagcatctgagtgctggagatcttttgagaagggagatggtttctgatagtgaatatggctca

SEQ ID NO: 122608 - DNA, 305 bp, Glycine max
  unsure (1)..(305): unsure at all n locations
taataagaaatgaagattaactatcttctttggctcctctttctaagttgttgcttcaacatctccatacctgcttcagccancgctcagttcgtgctcgacactgatgatgatcctcttcaaaacggtggcacatactatatgttgccagttatgagaggaaagggcggtggaatagaagtagattcaactgganaagagatatgccctctcactgttgtgcaatcacccaatgagctcgataaggggatggactagtctntacatctccattacatgctgcttttatcgccgaggctatcctt

SEQ ID NO: 122609 - DNA, 288 bp, Glycine max
ctcgagccgctcgagccgcttaattattaacacttccttagttcaatatggggaagcccttcactctctactctttcttccctttgcttgctactcttgtcgagtgcatgctttgctattagctccagcaagctcaacgagtgccaactcaacaacctcaacgcgttggaacccgaccaccgcgttgagtccgaaggtcgtttgattcaaacatggaactctcaacaccctgagctgaaatgcgccggtgtcactgtttccaaactcaccctcaaccgcaatggcctc

SEQ ID NO: 122610 - DNA, 97 bp, Glycine max
tgaaattttgataaaccgcgatcacaggttgccgcaccttaaaaccggaaacaaaagcaatcgttacttgattacaagaatctctcaattgcttcct

SEQ ID NO: 122611 - DNA, 284 bp, Glycine max
tgagaaaacaatttttacttgcagagatttggacatcttggttgtttattatacaatagcaactcgatttagaaaatttctaccgcattacattaggtggcatctgtataccttgttgatctacattctcccatcttttctcactgctgaaattaaatataagcggaatcagagtaatattcagatttccggcttattttacgacggcagatacaaattctggactaaacacgagaaaaatcttgctttgacagaagaggaaaagatggaagtgattagaaata

SEQ ID NO: 122612 - DNA, 280 bp, Glycine max
aaattatgttccagtttatgtgatgctcccactcggagttgtcaatgttgacaatgtttttgaagacccagatggccttaaagaacagctcttgcagcttcgagctgcgggtgttgacggggttatggttgatgtgtggtgggggatcatagaactgaaggggcctaagcagtatgattggagagcctacaggagtttgtttcagctggttcaagaatgtggcttgacactgcaagctattatgtcattccatcaatgtggagggaacgtaggagatata

SEQ ID NO: 122613 - DNA, 283 bp, Glycine max
attgaaattttcacaagaggaatttcttacagcttggtcaactcaggtgcgtcctgcaacaactctgttggctgatgggtgcccatatgtgtatgctatggtgcatgatagttcagtgtctacaataccaggtgattttgtcattggtgttaagttgacaaccataaacaatatgtgtgcatatgggctcaatcctggtatttcaggttctcgtcttttgggcaccattcctcagtccatttcacagcaaactgtttggaatcaaatggcaacagtgagaaca

SEQ ID NO: 122614 - DNA, 283 bp, Glycine max
caccgatcgaaaagtttccttgacaatctaattctgcaaaaatggcaagcaataaggagtctaagttcccagcacagagccagaaaactcagccaggaaaagaacatgtaatgaatccactcccacaagccacaaatcctgatcacaaggccgccaataaactccagggaaaggtggcgttggtgacaggaggtgactcaggaattggcagagcggtttgcctgtgtttcgcaaaagagggtgcaaccgtggcctttacatacgtaaagggccatgaggacag

SEQ ID NO: 122615 - DNA, 282 bp, Glycine max
aagaagatgggtttgaagaacaacatggtggtgctaaaggtgtgtttggtgctacttttccttgtggggggtactactagtgccagcttgaggctgagtgagcttggcctgctcatgaaaagtgatcatcatcaacactcaaatgatgatgactcttcaaaaccatgctgtgatcaatgcgcatgcacaaagtcaaaccctcctcaatgccgctgttcagatatgaggctgaattcgtgccattcagcttgcaaatcttgtatttgcgcattatcgtatcct

SEQ ID NO: 122616 - DNA, 281 bp, Glycine max
cacatagtagctattatactctctagagtaattgcggaatctgctagaattttctaataatggcgaaagacgttgagcaggtcacagagcaaggtgaatactccgcgaaggactaccatgaccctcctccggcaccgttgatcgacccagatgagctcacaaagtggtccttgtacagagccgccatagctgagttcatagcaacactcctttttctttacatcaccgtgttgaccattattggctacaagagacagagtgacaccaaaatccccggtaac

SEQ ID NO: 122617 - DNA, 283 bp, Glycine max
gcggtttcctttgttggtgttgctgggaactgttttcctggcatcagtttgtgtctcattaaaggtgagagaggatgagaataaccctttctacttgagaagctctaacagcttccaaactctctttgagaaccaaaacggtcgcattcgtctcctccagagattcaacaaacgctccccacaacttgagaaccttcgagactaccggattgtccagtttcagtcaaaacccaacacaatccttctcccccaccatgctgacgccgatttcctcctctttgtc

SEQ ID NO: 122618 - DNA, 287 bp, Glycine max
cttaattattaacacttccttagttcaatatggggaagcccttcactctctctctttcttccctttgcttgctactcttgtcgagtgcatgctttgctattagctccagcaagctcaacgagtgccaactcaacaacctcaacgcgttggaacccgaccaccgcgttgagtccgaaggtggtttgattcaaacatggaactctcaacaccctgagctgaaatgcgccggtgtcactgtttccaaactcaccctcaaccgcaatggcctccacttgccatcttactca

SEQ ID NO: 122619 - DNA, 289 bp, Glycine max
caatatcctagtataccttaataaataatttaagatactatgatgagagcacggttcccattactgttgctgggacttgttttcctggcttcagtttctgtctcatttggcattgcttactgggaaaaagagaaccccaaacacaacaagtgtctccagagttgcaatagcgagagagactcgtacaggaaccaagcatgccacgctcgttgcaacctccttaaggtggagaaagaagaatgtgaagaaggtgaaattccacgaccacgaccacgctcacaacacccgg

SEQ ID NO: 122620 - DNA, 197 bp, Glycine max
caaccttctggaaactcttttcctttcttagagatgctggtaatgggggagtttgtgttggtaatgttgcttcagcattcacaacttcaagtgtgcttgaggcccaaagtagaaagcccaacagctatgaagtttcccaatacagagatcgagatgtggcaataaagcgcagagcatgggttgaaggccagatgtct

SEQ ID NO: 122621 - DNA, 235 bp, Glycine max
cacacaactactacaagtacttccttacaatcaaaaccaacaacaactatggcaagttatcaaaagcactacgatgatcagggtcgcaaggttgacgagtatggcaacgttgagaagcaaaccgacgaatacggcaaccctgttcatgctgctagtgtcacctatgtagccaccagaactgctgctggtggttacagtgatgacattaataagcaacatgataccaccaatgcct

SEQ ID NO: 122622 - DNA, 282 bp, Glycine max
caaaaatatgccactcccatgatgcccctagatgaagaaattctttctaaggttgcacaagatatggttgaggaatggtttgattgtgttgatgaggaggattcctttgaggaagtttctttgagtgcagcactcaatggtgttgagggtttggactatatggaaagaattcctcttgccacatctgagggttttccccatgtgctttcacgcaaaaatggtgaaaaaggcaaaaggagatttgtttctggggatggtgaagagatgacattgattccggga

SEQ ID NO: 122623 - DNA, 281 bp, Glycine max
tcgatttgggggtgccattgatgatgctgctcgctacttcaaggatgctcatgacagggcgcttagtccttatgagtttgttgaaagtatgaagaagaagggaattcgtgtgccaggaatagggcacaggatccagcatagggacaacaaagataagagagttgagctgctacagaagtttgcacgcacacattttcgctctgtgaaatacatggaatatgctgttcaagttgagacctacacgctcacaaaggcaaataatttagttcttaacgtagatg

SEQ ID NO: 122624 - DNA, 279 bp, Glycine max
aaaattcttccaccaagttatgggtttccttgtgttgcttcttttctccctcttaggtctctcttctagttccagcatatcaactcatcgttccatattggaccttgacctaaccaagtttaccacacagaaacaggtgtcttcactgttccaactatggaatagtgagcatggacgtgtctaccataaccacgaagaagaggcaaagagacttgagattgtcaagaataacttgaactatatcagggacatgaatgctaacagacaatcaccccattc

SEQ ID NO: 122625 - DNA, 183 bp, Glycine max
gaaattttgataaaccgcgatcacaggttgccgcaccttaaaaccggaaacaaaagcaatcgttacttgatttcaagaatctctcaatttcttacctacttctttgtgtacgatttcttaagggaaagaaaatcactctctgtgctggccacagacttcgtgaatcattttcttttccacact

SEQ ID NO: 122626 - DNA, 278 bp, Glycine max
caaaagaaggtgctttggccgaagaaaacatgagagccatttgctttgaagtatgtgatgttgttctgcacgctgatgctatccacagaggaggtggtcaaatcatccctactgccaggagagtcttctatgcttcccagattactgccaaacccaggcttcttgagcctgtctacctggttgaaatccaggctcctgagcaagctcttggtggaatctacagtgttcttaaccagaaacgtggacatgtgttcgaggaaatgcagaggcctggtacc

SEQ ID NO: 122627 - DNA, 245 bp, Glycine max
cattctcttgggaatttctcaagattttgaaattgctggtaatactcttatgccagctttttctgttccacaggctactgccagatcttctgaaaatgcggaatcctctgcatgatctggaatttgtgttttctttcatttgtccgtttgtttaattcaataaaggaaattaggcatgaccctcttgttgagtatgctctgcctatttgaaaatttccacacctcttttaattgtcgtaatgatg

SEQ ID NO: 122628 - DNA, 275 bp, Glycine max
tgacattttcacaagaggaatttcttacagcttggtcaactcaggtgcgtcctgcaacaactctgttggctgatgggtgtccatatttgtatgcaatggtgcatgctagttcagtgtctacaataccaggtgattttgtcattggtgtcaagttgacaaccataaacaatatgtgtgcatatgggctcaatcctggtatttcaggttctcgtcttttgggcaccattcctcagtccatttcacagcaaactgtttggaatcaaatggcaacagtg

SEQ ID NO: 122629 - DNA, 283 bp, Glycine max
tgggaatgcagcagtcaaaaggagtgattgggcctcattggtacaagtgtttttaacaaacagcaacagtacagagcattttgatgcatgtaagtggacaaaatcagaaccacattcctgggaattgatcttcccaatagaggtatgtggtcctaataatggttttgaaatgtggagttctgagtgggcaaatcaaacttcatggcatttgagtttccttattgacaatcccaaacagtctacagtttttgatattctcttgggaatctctcaagattttgaa

SEQ ID NO: 122630 - DNA, 283 bp, Glycine max
attttgtgaggttcattatgaagaaaagggacaagcttagttgtcaagttggaatcaacccatactccatggaatggactggtttggccaatagattactgagtaagggcaacgatatcctgtgttgcgattatgctagttttgatggtttgattaccaagcaagttatgagcaaaatggcagaaatgataaacagactttgtggtggtgatgcaaaattgatgcgtgaaaggacacacctgctgttggcttgttgttcaaggatggcaatttgtaagaaaga

SEQ ID NO: 122631 - DNA, 259 bp, Glycine max
cggctcgagtcaatatcctagtataccttaataaataatttaagatactatgatgagagcacggttcccattactgttgctgggacttgttttcctggcttcagtttctgtctcatttggcattgcttactgggagaaagagaaccccagacacaacaagtgtctccagagttgcaatagcgatagagactcgtacaggaaccaagcatgccacgctcgttgcaacctccttaaggtggagaaagaagaatgtgaagaa

SEQ ID NO: 122632 - DNA, 108 bp, Glycine max
aagtgcagaccaagctagctagctagcaagcaagcacagagatggaggcaaagcgaggccatgccctcatgtgcttggcacgtgtttcactcttcctctgcgctgcta

SEQ ID NO: 122633 - DNA, 126 bp, Glycine max
cattctcttgggaatttctcaagatctcgaaattgctggtaatactcttatgccagctttttctgttccacaggctactgccagatctgctgaaaatgcggaatcctctgcatgatctggaagttg

SEQ ID NO: 122634 - DNA, 269 bp, Glycine max
ataggacttcgtgggtagacttttctatttctctccttctttcactctcttcttctcactgatccgcattgccgttcaaagtggtcttatttgaaaaacacttgggcgttggtgcaaatgtttgcttcattaattttctctggagacaacaggctcactgtgataacaatctttacttgcagagatttggacatcttggttgtgtattatacaatagcaactcaatttagaaaatttctaacgcattacattaggtggcatctgtatac

SEQ ID NO: 122635 - DNA, 203 bp, Glycine max
gctgagcatccacaaagtaggaggggaataagggaagaaagggtcctttgtcttcaattttgagggctttttactgaataagtatgtactaaaatgtatgctgtaatagctcatagtgagcgaggaaagtatcgggctatgtaactatgactagagcttcaactatgaataaataaatcgacagcatatgatgcttttgtttt

SEQ ID NO: 122636 - DNA, 279 bp, Glycine max
cactttccttagttcaatatggggaagcccttcttcactctctctctttcttccctttgcttgctactcttgtcgagtgcatgctttgctattacctccagcaagttcaacgagtgccaactcaacaacctcaacgcgttggaacccgaccaccgcgttgagtccgaaggtggtcttattgaaacatggaactctcaacaccctgagctgcaatgcgccggtgtcactgtttccaaacgcaccctcaacggcaacggcctcgacttgccatcttactca

SEQ ID NO: 122637 - DNA, 267 bp, Glycine max
aaataatttaagatactatgatgagagcacggttcccattactgttgctgggacttgttttcctggcttcagtttctgtctcatttggcattgcttactgggaaaaagagaaccccaaacacaacaagtgtctccagagttgcaatagcgagagagactcgtacaggaaccaagcatgccacgctcgttgcaacctccttaaggtggagaaagaagaatgtgaagaaggtgaaattccacgaccacgaccacgacaaaaacacccgg

SEQ ID NO: 122638 - DNA, 234 bp, Glycine max
agccactcaggcttccattgcaggatgtttacaaaattggtggtattggtaccgtgccagtgggacgtgttgagactggtgtcgtgaagcccggtatggtggtgacttttggtcccactgggctgacaactgaggttaagtctgttgagatgcaccatgaggctctcacagaggctcttccaggtgacaatgttggctttaatgtgaagaatgttgcagtcaaggatctcaagc

SEQ ID NO: 122639 - DNA, 184 bp, Glycine max
ctcgagccggataaactgcgatcacaggttgccgcaccttaaaaccggaaacaaaagcaatcgttacttgatttcatgaatttctcaatttctttctacttctttgtgtacgatttcttaagggaaagaaaatcactctctgtgctggccacagacttcgtgaatcattttcttttccacacaa

SEQ ID NO: 122640 - DNA, 275 bp, Glycine max
agaagatctctggagatgctttgaaagatctatacaagtcatttgtgacagagtatccaattgtttcaattgaggatccttttgaccaggatgactgggagcactatgctaagcttactgctgaggttggaaccaatgtacaaattgttggtgatgatctcttggttaccaaccccaagagggttcagaaggcaattgatacaaaagcatgcaatgctcttctccttaaggtcaaccaaattggttctgtgactgagagtattgaagctgtcagg

SEQ ID NO: 122641 - DNA, 274 bp, Glycine max
cttcttcttcaattccacacccatcatggtactcttccgatcctctttctcctcgccaccctcatcaccctcgcctccggtgcccgccacgatattctccggttaccctccgaagcatccacttttttcaaagcacccggtggcgatcaaaacgatgagggcacgaggtgggccgttttaattgccggttccaatggctactggaattacaggcaccagtctgatgtttgccatgcgtatcaactactgaggaaaggtggtctcaaagaagaaa

SEQ ID NO: 122642 - DNA, 272 bp, Glycine max
ggtcgatggaacaatgtaggcaagggaagtcggcaaaatggatccgtaacctcgggaaaaggattggctctgagggctgggcacgggggtcccagtcccgaacccgtcggctgtcggtggactgctcgagctgcttccgcggcgagagcgggtcgtcgcgtgccggtcgggggacggattgggaacgggcccttcggggcctcttccccgggcgtcgaacagtcaactcagaactggtacggacaaggggaatccgactgtttaattaaaac

SEQ ID NO: 122643 - DNA, 266 bp, Glycine max
atggttttgaaatgtggagttctgagtgggcaaatcaaacttcatggcatttgagtttccttattgacaatcccaaacagtctacagtttttgatattctcttgggaatctctcaagattttgaaattgctggtaatactcttatgccagctttttctgttccacaggctactgccagatcttctgaaaatgcggaatcctctgcatgatctggaatttgtgttttctttcgcttgttcgtttgtttaattcaataaaggaaatta

SEQ ID NO: 122644 - DNA, 279 bp, Glycine max
atcgagccgcgctgatgatatcacctcctctctcgcccatgctcacgttgactggcgtgagactgataaagctcatatcttccgtgctgatcttccaggggtgaagaaagaggatctgaaggtgcaggtggaggagaataagatcctgcagataagcggggagagggtgaaggagaaggaggaccagaacgacaagtggcaccgcgtcgagaggcagtgcggaagcttcctccgccgcttccggctgccggaggatgccaaccccaaccagatcagctg

SEQ ID NO: 122645 - DNA, 281 bp, Glycine max
gcaagatggcagaaatgatcaacagtctttgtggtggtgatgaaaaactgatgcgtgaaaggacacacctgctgttggcttgttgttcaaggatggcaatttgtaagaaagatgtttggagagttgaatgtggaatcccttctggatttccgctcacagttatttgcaatagcatttttaatgagatgctcattagatatagctatgaaaaattactgcgccaggctaaagctccaagtatgtttttacaatccttcaaaaattttgtttctttgtgtgtg

SEQ ID NO: 122646 - DNA, 259 bp, Glycine max
atttccgaataccattgtgcagattgaaccagacatgagttcaaggtttcagcttttgagtaccactaccaatggtgcttttgttcaagggaaagatctcgcaatggttaaagttaatgtagcatgtgctgctgttggcttgacatcaagttacactccaactccattgttggaatctggtttgcaaaaagacatagggttaattgtggagtattttgaaaggatgtcttacgttgctcataactttaatcagccccaa

SEQ ID NO: 122647 - DNA, 92 bp, Glycine max
aaggtgaattatggaatcctgcttgcacaaaagcaatgactatgtcatttaatccaaacccgtgttctgatgcgtggagtttgggatttctg

SEQ ID NO: 122648 - DNA, 110 bp, Glycine max
ctccattggtccttaaacagtcatcagtcatcaccatggccaagcgaggattttcccgttgacggctgcgtttcagtggctgctgcttcgctttcagttccagagagcag

SEQ ID NO: 122649 - DNA, 117 bp, Glycine max
caagttatgggtttccttgtgttgcttcttttctccctcttaggtctctcttctagttccagcatatcaactcataggtccatattggaccttgacataaccaagtttaccacacag

SEQ ID NO: 122650 - DNA, 272 bp, Glycine max
gcaaatcaaacttcatggcatttgagtttccttattgacaatcccaaacagtctacagtttttgacattctcttgggaatttctcaagattttgaaattgctggtaatactcttatgccagctttttctgttccacaggctactgccagatcttctgaaaatgcggaatcctctgcatgatctggaatttgtgttttctttcatttgtccgtttgtttaattcaataaaggagattaggcatgaccctcttgttgagtatgctctgcctatt

SEQ ID NO: 122651 - DNA, 269 bp, Glycine max
gtaacagtatcctgagtgggctccaattaattgtcgagttcatcgacaaccaattcacatcactgaaggaaattatgtcagaaagcaagatgtcagcattgaatatgatgcatgtacaattccaaatgattgtggttcattggttgttgccaaggttggaaatcacgaacaaattgttggtttccatgttgctggaagcaaaggaagactgggatatgcttcattgataccatatgttgagccagttgtgcaagctcaaagtgctgaag

SEQ ID NO: 122652 - DNA, 216 bp, Glycine max
gcccttcactctctctctttcttccctttgcttgctactcttgtcgagtgcatgctttgctattagctccagcaagctcaacgagtgccaactcaacaacctcaacgcgttggaacccgaccaccgcgttgagtccgaaggtggtttcattcaaacatggaactctcaacaccctgagctgaaatgcgccggtgtcactgtttccagattcaccct

SEQ ID NO: 122653 - DNA, 260 bp, Glycine max
ccattttctaagctagatcacacacgttcgtgtctcctcgccactttgattccgaggttgactttttcaacatcaaggggcgattcgtacttgggttggtgagtgaagagtgaaacagaggaaatcactcttgaacctggggacatgatacacataccagctggcaccccactgtacatcgttaacagagatgagaatgataagctcttccttgccatgctccatatacctgtctctgtctctactcctggaagatttga

SEQ ID NO: 122654 - DNA, 270 bp, Glycine max
caggagagtgatgtgaagtgggcttcaagatgggatgcctatttgctaatgaatgatgatcaaatccactggttctcaattgttaactcattaatgattgttctcttcctttctggcatggtggcaatgattatgctgaggacactgtaccgtgacattgcaaagtacaatgagcttgagacccaagaagaagcccaagaggagactggttggaagcttgtccatggtgatgtatttaggccccccaacaactcagatttgctgtgtgtt

SEQ ID NO: 122655 - DNA, 273 bp, Glycine max
atccatctgccccacatggacttcgacttctgatagaggactacccttatgctgttgatgggctagagatatgggctgcaattaagacatgggtccaagaatatgtgtccttgtactatgcaagagatgatgatgtcaaacctgattctgaactccaacagtggtggaaagaagctgtagagaaaggtcatggtgatctgaaagacaagccatggtggcctaagttgcaaacaattgaagagcttgttgaaatttgcaccattatcatatgga

SEQ ID NO: 122656 - DNA, 183 bp, Glycine max
ctcgagccgaaccgcgatcacaggttgccgcaccttaaaaccggaaacaaaagcaatcgttacttgatttcaagaatctctcaatttcttcctacttctttgtgtacgatttcttaagggaaagaaaatcactctctgtgctggccacagacttcgtgaatcattttcttttccacacaacat

SEQ ID NO: 122657 - DNA, 176 bp, Glycine max
gaaaaaccttcaaatatgatatagttggtgctggttcacattcttcagaagatttttctgaaaaggaagatcaagaaaaacccaaaaagattgatgccagattgagacaaagaatagatcctcactacaatgaggttcaggctcagatggaaacaaatttgtttaaattgtctctt

SEQ ID NO: 122658 - DNA, 270 bp, Glycine max
gatgacttctccctacattaaatgtacagtctctttcttcatagcatttggaaatttggctgatgacaccatcaattttgaggcttttccccacaagctggtgcagtttggagagattcaggaaaaagttgtattgaaattttcacaagaggaatttcttacagcttggtcaactcaggtgcgtcctgcaacaactctgttggctgatgggtgcccatatttgtatgctatggtgcatgatagttcagtgtctacaataccaggtgattt

SEQ ID NO: 122659 - DNA, 270 bp, Glycine max
atatactatgatgagagtgcggtttcctttgttggtgttgctgggaactgttttcctggcatcagtttgtgtctcattaaaggtgagagaggatgagaataaccctttctacttgagaagctctaacagcttccaaactctctttgagaaccaaaacggtcgcattcgtctcctccagagattcaacaaacgctccgcacaacttgagaactttcgagactaccggattgtccagtttcaagtcagaacccaagacatccttctccccca

SEQ ID NO: 122660 - DNA, 271 bp, Glycine max
tgataacactcgccatacccgttaacaaacccggtagatttgagagtttcttcctatctagcactcaagctcaacagtcctacttgcaagggttcagcaagaatattctagaggcctcatacgacaccaaattcgaggagataaacaaggttctgtttggtagagaggaggggcagcaacaaggggagcgagaggctgcaagagagtgtgattgtggaaatctcaaagaaacaaattcgggaactgagcaaacatgccaaatctagttcaa

SEQ ID NO: 122661 - DNA, 151 bp, Glycine max
taagatttgaaattttgataaaccgcgatcacaggttgccgcaccttaaaaccggaaacaaaagcaatcgctacttgatttcaagaatctctcaatttcttcctacttctttgtgtacgatttcttaacggtaagagaatcactctctgaa

SEQ ID NO: 122662 - DNA, 270 bp, Glycine max
atcataaaattcttccaccaagttatctagctccttgtgttgcttcttttctccctcttaggtctctcttctagttccagcatatcaactcatcgttccatattggaccttgacctaaccaagtttaccacacagaaacaggtgtcttcactgttccaactatggaagagtgagcatggacgtgtctaccataaccacgaagaagaggcaaagagacttgagattttcaagaataacttgaactatatcagggacatgaatgcaaacaga

SEQ ID NO: 122663 - DNA, 266 bp, Glycine max
acttattaacactttccttagttcaatatggggaagcccttcttcactctctctctttcttccctttgcttgctactcttgtcgagtgcatgctttgctattacctccagcaagttcaacgagtgccaactcaacaacctcaacgcgttggaacccgaccaccgcgttgagtccgaaggtggtcttattgaaacatggaactctcaacaccctgagctgcaatgcgccggtgtcactgtttccaaacgcaccctcaaccgcaacgg

SEQ ID NO: 122664 - DNA, 269 bp, Glycine max
ccccaactaacaataattccttcacttgcagaacttagttctctgttgcatcatcatcatcttcattagtgttagccctaaacttcaccttcaaccatgaccacagtgccaccacacagtgtccaagtgcacacaacaacacaccgctacgaagccggcgtcgtcccgccggctcgttttgaggcgccgcgttacgaagccggcatcaaggcgccctcttccatttaccattccgagagaggtccgacgacctctcaggttctcgcagt

SEQ ID NO: 122665 - DNA, 272 bp, Glycine max
catagggacgcttggtgaattgtactttcattgttttgcctggatgaaggtcttctttatagaaggatatagttttgaagagatatgcatcaagaaagaagcgtttgagggagaagagaagttttgtgcaaaatccttgggaacagtaattggttttgccatttcaaagctgggaaagaacattcaagtactttcaagttcctttgtcaataagcaagagcaatacactgtggaaggagtgcagaatcttggagacaaagcagtgatgtgtc

SEQ ID NO: 122666 - DNA, 276 bp, Glycine max
ctacattctcccatcttttctcactgctgaaattaaatataagcggaatctgagtaatattcatatttccggcttattttacgacggcagatacaaattctggactaaacacgagaaaaatcttgctttgacagaagaggaaaagatggaagtgattagaaatagaggcattcctgctgatgttcttgcaaagcgagctcatgaatttgaaaaacatgttgctcatgaaagcctcaaggatcaaattcctgctgttgacaagttgtattctactaa

SEQ ID NO: 122667 - DNA, 267 bp, Glycine max
ttgtctttgaacactcatcaccatggccaagcttgttctttccctttgtttccttcttttcagtggctgcttcgctctgagagagcaggcacagcaaaatgagtgccagatccaaaagctgaatgccctcaaaccggataaccgtatagagtcggaaggtgggttcattgagacctggaaccctaacaacaagccattccagtgtgccggtgttgccctctctggctgcacccttaaccgcaatgcccttcgtagaccttcctacac

SEQ ID NO: 122668 - DNA, 117 bp, Glycine max
tgatggatacacagtggacgaggcactagcaagtcggaggttatttatgttagattaccatgatgtattcatgccatatataaggcggataaatcagacatatgccaaggcttatgc

SEQ ID NO: 122669 - DNA, 246 bp, Glycine max
cctgtatctaatattagtgcaggggaaaatcatgtagttcaaatacccttaatggcacaggaggaaattctgtcttctagtgcaagtgatttcagagctgcaatggtgagtaaaaatagcaaacctcaagctactgcaatgcatgtgggagctatagaaattatcattgatagtttcgcaagtcctgattgcaacatagttggtgcaatgcttttggttgatacttatcataccaatcctgaaaat

SEQ ID NO: 122670 - DNA, 245 bp, Glycine max; identical to SEQ ID NO: 111704

SEQ ID NO: 122671 - DNA, 242 bp, Glycine max
gcaaaggattctacccgccgctcgatgggaattgcgcttcaaggcgtctcgtagggctaatccgcctcacgagggtcaccaacggcacgtgcctttggggggccgaggcccctactgctggtcggcaaacggacggcgggcgcacgcgtcgcttctagcccggattctgacttagaggcgttcagtcataatccaacgcacggtagcttcgcgccactggcacttcaaccaagcgcgatgac

SEQ ID NO: 122672 - DNA, 241 bp, Glycine max
cggatattgctctgaggattgtggccccaggcaagggcattctggctgcagatgagtccgtgggcagcatggccaaaaggctgagccaaattggggtagagaacactgaggagaatcgccgactgtaccgccaggtcctgttcagtgctgatgaccgtgtgaaaaagtgcattgggggggtcatcttcttccacgagacactctaccagaaagatgacaatggtgtcccctttgtccgcac

SEQ ID NO: 122673 - DNA, 210 bp, Glycine max
tgtttttgtgttgacataaccgatttctgctatgaaccttgcaaacccagtgaggatgacaaggaaaactactaatgaacaagtgttatgcatgtaagctctctctccaacggacaaagccccctttatgctttgtttgttatgtaaggaatgactaaataaacttggaataaaacttcctctcttcttcttcttcaaagaatacgtaaa

SEQ ID NO: 122674 - DNA, 244 bp, Glycine max
ggcacttgagtttccttattgacaatcccaaacagtctacagtttttgatattctcttgggaatttctcaagattttgaaattgctggtaatactcttatgccagctttttctgttccacaggctactgccagatcttctgaaaatgcggaatcctctgcatgatctggaatttgtgttttctttcgtttgttcgtttgtttaattcaataaaggaaattagacatgaccctcttgttgagtat

SEQ ID NO: 122675 - DNA, 239 bp, Glycine max
tttagggggcgtgccagttctgatatttacaccatctgctctcaagactgtgaattatggaatcctgcttgcacaaaagcaatgactatgtcatttaatccaaacccgtgttctgatgcatggagtttggaatttttgaagcgtaccggatttcactgtgatatcatttgtgtcactggatggactgccaccccaatgcaggatgttcaggttacaattgattggtttatttcctctca

SEQ ID NO: 122676 - DNA, 182 bp, Glycine max
ctgtattaaagaatgtaagatatactatgatgagagcgcggttgccattactgttgctgggagttgttttcctggcatcagtttctgtctcatttggcattgcgtatttggagaagcagaaccccagtcataataagtgcctccgaagttgcaatagcgagaaagactcctacaggaaccaa

SEQ ID NO: 122677 - DNA, 215 bp, Glycine max
aagcccttcactctctctctttcttccctttgcttgctactcttgtcgagtgcatgctttgctattagctccagcaagctcaacgagtgccagctcaacaacctcaacgcgttggaacccgaccaccgcgttgagtccgaaggtggcttgattcaaacatggaactctcaacaccctgagctgaaatgcgccggtgtcactgtttccaaactcat

SEQ ID NO: 122678 - DNA, 263 bp, Glycine max
gcgtccgtattctcctcattcggctcgaggaattcctcttgccacatctgagggttttcctcatgtgctttcacgcaacaatactgaccaaggcatggcgacaccagtgtctgcgctgctagaagatatgccattggttccgggagccagtgttgaagaggcttacaacaagctaacagttgaacttgagaaaagtgttcctacattggttggcattgaatgtcccaaggatgaaaaacttcctcgtcgcaaagtttttgata

SEQ ID NO: 122679 - DNA, 241 bp, Glycine max
ctttccttagttcaatatggggaagcccttcttcactctctctctttcttccctttgcttgctactcttgtcgagtgcatgctttgctattacctccagcaagttcaacgagtgccaactcaacaacctcaacgcgttggaacccgaccaccgcgttgagtccgaaggtggtcttattgaaacatggaactctcaacaccctgagctgcaatgcgccggtgtcactgtttccaaacgcacc

SEQ ID NO: 122680 - DNA, 238 bp, Glycine max
ctctacaaaagcacaatttgttagtggaaaaaccttcaaatatgatatagttggtgctggttcacattcttcagaagatttttctgaaaaggaagatcaagaaaaacccaaaaagattgatgccagattgagacaaagaatagatcctcaatacaatgaggttcaggctcagatggaaacaaatttgtttaaattgtctcttgatgatgatgaaactcctaaaggttccatgttggat

SEQ ID NO: 122681 - DNA, 239 bp, Glycine max
gtgtcatcagccaaatttgaggcttttccccacaagctggtgcagtttggagagattcaggaaaaagttgtattgaaattttcacaagaggaatttcttacagcttggtcaactcaggtgcgtcctgcaacaactctgttggctgatgggtgcccatatttgtatgctatggtgcatgatagttcagtgtctacaataccaggtgattttgtcattggtgttaagttgacaaccataaa

SEQ ID NO: 122682 - DNA, 237 bp, Glycine max
ctcggtggaggaattttagtggacaaaactggagattggatcacacttatacaaaattctccaattagtaacttgttgagagttgctgcttggaagaaaggctgtttaatggttaagattgtgatgtctgggaatgcagcagtcaaaaggagtgattgggcctcattggtacaagtgtttttaacaaacagcaacagtacagagcattttgatgcatgtaagtggacaaaatcggaa

SEQ ID NO: 122683 - DNA, 240 bp, Glycine max
aacactcatatccttatcctgtttctttcaatggaagtcatttctgcttctagcttgaatcccaacgctccgatgttcgtgccactcgcctatcggacggtggatgatttctccgaccagtggtgggacctcgttcactcctccccctggttccgcgactactggctccgcgagtgcttccaagatccccagttccataacgacgacgctttcgacttcgactttgacctagatctccaa

SEQ ID NO: 122684 - DNA, 186 bp, Glycine max
ggaatttctcaagattttgaaattgctggtaatactcttatgccagctttttctgttccacaggctactgccagatcttctgaaaatgcggaatcctctgcatgatctggaatttgtgttttctttcatttgtccgtttgtttaattcaataaaggaaattaggcatgaccctcttgttgagtatg

SEQ ID NO: 122685 - DNA, 223 bp, Glycine max
gcaaaatgaccaagttcacaatcctcctcatctctcttctcttctgcatcgcccacacttgcagcgcctccaaatggcagcaccagcaagatagctgccgcaagcagctccagggggtgaacctcacgccctgcgagaagcacatcatggagaagatccaaggccgcggcgatgacgatgatgatgatgacgacgacaatcacattctcaggaccatgcgggg

SEQ ID NO: 122686 - DNA, 241 bp, Glycine max
gcaaaatgaccaagttcacaatcctcctcatctctcttctcttctgcatcgcccacacttgcagcgcctccaaatggcagcaccagcaagatagctgccgcaagcagctccagggggtgaacctcacgccctgcgagaagcacatcatggagaagatccaaggccgcggcgatgacgatgatgatgatgacgacgacaatcacattctcaggaccatgcggggaagaatcaactacataag

SEQ ID NO: 122687 - DNA, 238 bp, Glycine max
tctcagtggtgtcatcctctttgaggaaaccctctaccagagcacagctgcaggcaagccctttgtgaatgtcttgaaggaagctggtgtgcttcctggcatcaaggttgacaagggcacagtcgagcttgctggaactaatggagaaaccaccactcagggtctagatggccttggtcagcgttctgccaagtactacgaagctggtgcacgttttgccaaatggcgtgcagtgctg

SEQ ID NO: 122688 - DNA, 233 bp, Glycine max
ctcggtggaggaattttagtggccaaaactggagattggatcacacttatacaaaattctccaattagtaacttgttgagagttgctgcttggaagaaaggctgtttaatggttaagattgtgatgtctgggaatgcagcagtcaaaaggagtgattgggcctcattggtacaagtgtttttaacaaacagcaacagtacagagcatcttgatgcatgtaagtggacaaaatc

SEQ ID NO: 122689 - DNA, 239 bp, Glycine max
ggagagttgaatgtggaatcccttctggatttccgctcacagttatttgcaatagcatttttaatgagatgctcattagatatagctatgaaaaattactgcgccaggctaaagctccaagtatgtttttacaatccttcaaaaattttgtttctttgtgtgtgtatggtgatgataacttaattagtgttcatgaatacgtcaagccttactttagtggttctaaattgaaaagcttt

SEQ ID NO: 122690 - DNA, 238 bp, Glycine max
agctcctgaggacaaggcgagtttatggtcacaacttcattatgtttcgtgtaataatctggaaatgcaagaagcttatcttgtcaatctcgtaaatgtgttacgagaattgtatttgcacagtccagaggaagctcgccaattgagaaggaaagctctctctcgtattgaatggctgcaaaaagctgatgtgcctaccatagcacagattgaagagttccattcgatgcagaggatg

SEQ ID NO: 122691 - DNA, 238 bp, Glycine max
  unsure (1)..(238): unsure at all n locations
aaagaaattaagagagttttttttgttccacactgcatacgattttgngatgagaaccaaactttctttagctatctttttctttttagctttagcggtattttcaaacctagactttggcaaatgtaaagaaaccgaggtagaagaagaagaccctgagctcgtaacatgcaaacaccaatgccaacagccacagcaatacgatgagggtgacaagcgggtatgcttgcaaagatgt

SEQ ID NO: 122692 - DNA, 239 bp, Glycine max
gcatcatcatcttcattgcaaaaccctaaacttcaccttcaaccatgaccacacaagtaccaccacacagtgtccaagtccacacaacaacacacctctacgaagctggcgtcgtcccccccggagcccgtttcgaaccgccgcgttatgaagccggcgtcaaagcgccctccatttaccattccgagagaggtccaacgacttcccaggtcctcgccgtcctcgccggcctcccggtc

SEQ ID NO: 122693 - DNA, 236 bp, Glycine max
aaagtttccttgacaatctaattctgcaaaaatggcaagcaataaggagtctaagttcccagcacagagccagaaaactcagccaggaaaagaacatgtaatgaatccactcccacaagccacaaatcctgatcacaaggccgccaataaactccagggaaaggtggcgttggtgacaggaggtgactcaggaattggcagagcggtttgcctgtgtttcgcaaaagagggtgcaa

SEQ ID NO: 122694 - DNA, 237 bp, Glycine max
attctccaattagtaacttgttgagagttgctgcttggaagaaaggctgtttaatggttaagattgtgatgtctgggaatgcagcagtcaaaaggagtgattgagcctcattggtacaagtgtttttaacaaacagcaacagtacagagcattttgatgcatgtaagtggacaaaatcggaaccacattcctgggaattgatcttcccaatagaggtatgtggtcctaataatggtt

SEQ ID NO: 122695 - DNA, 238 bp, Glycine max
attggtccttaaacactcatcagtcatcaccatggccaagctagttttttccctttgtcttctgcttttcagtggctgctcgttcgctttcagatcgagagagcagcctcagtaaaacgagtgccagatccaaaaactcaatggcctcaaaccggataaccgtatagagtcagaaggatggctcattgagacatggaaccctaacaacaagccattccagtgtgccggtgttgacctc

SEQ ID NO: 122696 - DNA, 237 bp, Glycine max
gcagattgtgattttctcaagagaaactttaagcagatgtctaatgttttgtgggtagctcctgaggacaaggcgagtttatggtcacaacttcattatgtttcgtgtaataatctggaaatgcaagaagcttatcttgtcaatctcgtaaatgtgttacgagaattgtatttgcacagtccagaggaagctcgccaattgagaaggaaagctctctctcgtattgaatggctgcaa

SEQ ID NO: 122697 - DNA, 234 bp, Glycine max
acgcaactgaaaaggaaaaccctaagagatgaagagaactcctatcttgttccctctcttctttcttctttgtgccttcacctcatatctaccttcagccaccgctgatgatgatcatgtgtacgacactgacggcgataagcttcaatacggtgtcaattatttcgtgttgccagtgataagaggaaatggcggtggaatacaagtagcaaaagcaggaaacgaaacttgccc

SEQ ID NO: 122698 - DNA, 230 bp, Glycine max
cacttccttagttcactatgcggaagcccttcactctctctctttcttccctttgcttgctactcttgtcgagtgcatgctttgctattagctccagcaagctcaacgagtgccaacacaacaacctcaacgcgttggaacccgaccaccgcgttgagtccgaaagtggtttgattcaatcatggaactctcaacaccctgatctgtaatgcgccggtgtcactgtttcc

SEQ ID NO: 122699 - DNA, 234 bp, Glycine max
cacctttgttcactcttcttctcttgcggctagggttttagcgcagctcttctagatttaaggaagatgggtaaggaaaaggttcacatcagtattgtggtcattggccatgtcgactctgggaaatccactaccactggtcacctgatttacaagcttggaggcattgacaagcgtgttattgagaggtttgagaaggaagctgctgagatgaacaagaggtctttcaagtat

SEQ ID NO: 122700 - DNA, 232 bp, Glycine max
attgaatatgatgcatgtacaattccaaatgattgtggttcattggttgttgccaaagttggaaatcacaaacaaattgttggtttccatgttgctggaagcaaaggaagactgggatatgcttcattgataccatacgttgagccagttgtgcaagctcaaagtgctgaagtttactttgacttcttccctgtggaggttgctagtcaagagggagttgctcacattggtg

SEQ ID NO: 122701 - DNA, 211 bp, Glycine max
atagtctttgaacactcatcaccatggccaagcttgttctttccctttgtttccttcttgtcagtggctgcttcgctgctgagagagcaggcacagcgaaatgagtgccagatccaaaagctgaatgccctcaaaccggataaccgtatagagtcggaatgtgggttcattgagacctggaaccctaacaacaagccagtccagtgtcccg

SEQ ID NO: 122702 - DNA, 193 bp, Glycine max
aaaattcttccaccaagttatgggatatcctgtgttgcttctgttctccctcttaggtctctctactagttccagcatatcaactcatcgttccatattggaccttgacctaaccaagtgtaccacacagaaacacgtgtcttcactgctccaactatggaagagtgagcatggacgtgtctgacataaccac

SEQ ID NO: 122703 - DNA, 231 bp, Glycine max
ggcgtacacatcgaaagattattaaccctgctttccatttagaaaaattgaaggttatgttaccaatatttcttgaatgttgtgacgatatggtttccaaatgggaaaggttgttgtcttcaaatgacaaatccgaaattgatgtgtggcctttccttcaaaatttaacatgtgatatgatatctagaacagcatttggaagcagttatgaagatgggaaacgtatatttg

SEQ ID NO: 122704 - DNA, 239 bp, Glycine max
agcaaaatgaccaagttcacaatcctcctcatctctcttctcttctgcatcgcccacacttgcagcgcctccaaatggcagcaccagcaagatagctgccgcaagcagctccagggggtgaacctcacgccctgcgagaagcacatcatggagaagatccaaggccgcggcgatgacgatgatgatcatgacgacgacaatcacattctcaggaccatgcggggaagaatcaactacat

SEQ ID NO: 122705 - DNA, 233 bp, Glycine max
gttctgagtctcaaagagaaccacgaagacataagaataagaacccttttcacttcaactctaaaaggttccaaactctcttcaaaaaccaatatggccacgttcgcgtcctccagaggttcaacaaacgctcccaacagcttcagaatctccgagactaccgcattttggagttcaactccaaacccaacacccttcttctcccccaccatgctgacgctgattacctcatc

SEQ ID NO: 122706 - DNA, 217 bp, Glycine max
ctcgagccggatcggctcgtgaaacacgagaacaatcttgctttcacagatgaggaaaagacggaagtgattaggaatagaggcattcctgctgatgttcttgcaaagcgagctcatgaatttgaaaaacatgttgctcatgaaagcctcaaggatcaaattcctgctgttgacaagttgtattctactaaggttaataagtttgcaaaaattatga

SEQ ID NO: 122707 - DNA, 233 bp, Glycine max
tctcgagccgattcggctcgagaccatctttatgtagcaaatgttaggagattctaggactaacatatcaaaagctggtaaggcaaatgctctctctgaggatcataaaccaaatagaagtgatgagcggaagagaatcgagaatgctggtggtgttgtcatgtgggcaggtacttggagggttggaggggtgctagcaatgtctcgtgcctttggtaaccgtatgctgaagc

SEQ ID NO: 122708 - DNA, 232 bp, Glycine max
tagtagtgttggtgggttgcaaagatgcttgggggtcttctccataggggtcataagataaaagggacagtggtgttgatgcgcaagaatgtgttggacgtgaatagcgtaaccagcgttgggggacttattggtcaaggtctcgacttagttggctcaacactcgatactcttactgccttcttgggccgatccgtgtctctccagcttattagtgctaccaaggctgatg

SEQ ID NO: 122709 - DNA, 233 bp, Glycine max
gttcaatatcctagtataccttaataaatattttaagatactatgatgagagcacggttcccattactgttgctgggacttgttttcctggcttcagtttctgtctcatttggcattgcttactgggaaaaagagaaccccaaacacaacaagtgtctccagagttgcaatagcgagagagactcgtacaggaaccaagcatgccacgctcgttgcaacctccttaaggtgga

SEQ ID NO: 122710 - DNA, 231 bp, Glycine max
ctcgagccgtggagaagtacctcaacaaggagctggagctggacaaatttatcactcactctgtcccattctcagagatcaacactgcatttgatcttatgctgaaaggggagggaataaggtgcctcatctgcatggaagagtaaatcaatgatgttctctgctgaacagtgtttgcgtgtaatgtgaaaagagaattgaataaatttggcatgtaattcggttattgga

SEQ ID NO: 122711 - DNA, 234 bp, Glycine max
ataaaattcttccaccaagttatgggtttccttgtgttgcttcttttctccctcttaggtctctcttctagttccagcatatcaactcatcgttccatattggaccttgacctaaccaagtttaccacacagaaacaggtgtcttcactgttccaactatggaagagtgagcatggacgtgtctaccataaccacgaagaagaggcaaagagacttgagattttcaagaataac

SEQ ID NO: 122712 - DNA, 246 bp, Glycine max
cgagtttagggggcgtggcagttctgatatttacaccatctgctctcaagactgtgaattatggaatcctgcttcgacaaaagcaatgactatgtcatttgatccaaacccgtgttctgatgcatggagtttggaatttttgaagcgtaccggatttcactgtgatatcatttgtgtcactggatggactgccaccccaatggcaggatgttcaggttacaattgattggtttatttcctctcagg

SEQ ID NO: 122713 - DNA, 230 bp, Glycine max
tgacaacttcgagtatgtgtcattcaagaccaatgatacacccatgatcggcactcttgcaggggcaaactcattgttgaacgcattaccagaggaagtgattcagcacactttcaacctaaaaagccagcaggccaggcagataaagaacaacaaccctttcaagttcctggttccacctcaggagtctcagaagagagctgtggcttagagccctttttgtatgtgct

SEQ ID NO: 122714 - DNA, 231 bp, Glycine max
gtgcggtttcctttgttggtgttgctgggaactgttttcctggcatcagtttgtgtctcattaaaggtgagagaggatgagaataaccctttctacttgagaagctctaacagcttccaaactctctttgagaaccaaaacggtcgcattcgtctcctccagagattcaacaaacgctccccacaacttgagaaccttcgagactaccggattgtccagtttcagtcaaaa

SEQ ID NO: 122715 - DNA, 235 bp, Glycine max
taaaaggatagaagatgatcagaaatttaaaaacaaaaaaagtaagaaaaggaaaaacttggaggcatcaaatcagttggagaatgatagaaagaaaagtaagaaagaaatgatctctaagacaagagaggaggttgaagctgattacaaggctgcatccttagccccagatgttatggagaagaaacagatgcaaactgaaactctctctgctgtctttgagacatactttcgc

SEQ ID NO: 122716 - DNA, 188 bp, Glycine max
gattcaggaaaaagttgtattgaatctctccaaacttcacatcttgttgggaaaagcctcaaaattgatggtgtcatcagccaaatttgaggcttttccccacaagctggtgagtctgagagattaggacaaagttgtattgaaattttcacaagaggaatttcttacagcttggtcaactcaggtgc

SEQ ID NO: 122717 - DNA, 315 bp, Glycine max
cgcatgcacgcgtcagtcgctgagggagctcttcttctgccacacttcaattcaaaggccatagtggtactagtgattaatgaaggagaagcaaacattgaacttgttggcattaaagaacaacaacagaggcagcaacaggaagagcaacctttggaagtgcggaaatatagagctgaattgtctgaacaagatatatttgtaatcccagcaggttatccagttgtggtcaacgctacctcggatctgaatttctttgcttttggtatcaatgccgagaacaaccagaggaacttccttgcaggtcgaaagaca

SEQ ID NO: 122718 - DNA, 291 bp, Glycine max
ccgattgctagaatggaatttcgatgctcagtcatctcttttaccattctcttctctcttgctcttgcaggagagagccatgtccatgcatcgctacctgaggaagattattgggaagctgtttggccaaacactcccattcccactgcactgcgagagcttctaaagcctctccctgcaggtgttgaaatcgatgaactccctaagcaaattgatgatacacagtacccaaaaacattcttctataaagaagaccttcatccaggcaaaacaatgaaagtaaattcacca

SEQ ID NO: 122719 - DNA, 286 bp, Glycine max
caaagaatagatcctcaatacaatgaggttcaggctcagatggaaacaaatttgtttaaattgtctcttgatgatgttgaaactcctaaaggttccatgttggatcttaaaatttctcagtctaaaattgcacttcccaagaacacagttggaggaactattctgcgtagtgatctattggcaaattttctgacagagggcaattttagagcaagtgttgatttgcagcgcactcatcgtattaaaggaatgattaaaatggtggccacagttggtattccgagaa

SEQ ID NO: 122720 - DNA, 290 bp, Glycine max
aacaattccttcacttgcagcactgttgcatcatcacttcattgcaaaaccctaaacttcaccttcaaccatgaccacacaagtaccaccacacagtgtccaagtccacacaacaacacaccgctacgaagctggcgtcgtcccccccggagcccgtttcgaaccgccgcgttatgaagccggcgtcaaagcgccctccatttaccattccgagagaggtccaacgacttcccaggtcctcgccgtcctcgccggcctcccggtcggtggcatcctgctcccctggcggg

SEQ ID NO: 122721 - DNA, 287 bp, Glycine max
ccaagttcacaatcctcctcatctctcttctcttctgcatcgcccacacttgcagcgcctccaaatggcagcaccagcaagatagctgccgcaagcagctccagggggtgaacctcacgccctgcgagaagcacatcatggagaagatccaaggccgcggcgatgacgatgatgatgatgacgacgacaatcacattctcaggaccatgcggggaagaatcaactacataaggaggaacgaaggaaaagacgaagacgaagaagaagaaggacacatgagaagtgct

SEQ ID NO: 122722 - DNA, 287 bp, Glycine max
cacgtaatcaaaaccatgcagatacgaacctgccactccatcaccacccaaacccttccacaacttccgtgttcttctagaaaagcccaccaccgccaccttcttccgccgttaaacgctgcggtttccgcggcgccgttcaaagcccggaaggcccactcaatgcctccagaaaagaaagaaattttcaagtccttggagggatgggcctcggagtgggtcctaccgctgctgaagcccgtggagcaatgctggcagccacaaaacttcctccctgaccctccctt

SEQ ID NO: 122723 - DNA, 281 bp, Glycine max
gcaccataaaaccggaaacaaaagcaatcgttactgatttcaagaatttctcaatttctttctacttctttgtgtacgatttcttaagggaaagaaaatcactctctgtgctggccacagacttcgtgaatcattttcttttccacttttagtttaccgtcgtgaacactctcctatttgatataggacttcgtgtcagatttaaacttcttctgtttctttctcagtactctgttcaatttcaagttcaaccgggttaaatcttggattagtgttccact

SEQ ID NO: 122724 - DNA, 267 bp, Glycine max
gggagttgctcacattggtgcattgaaatctgtggtctatgttccactgcctacataaactagtttggtggagactcccaaggaatggcaactggatctaccttgtgacagaattcctagtgccttgactacaactgatgcaagattggtaggcacagaacatgatggatatgatccttttcttggtggaattcaaaaatatgccactcccatgatgcccctagatgaagaattctttctaatgttgcacaagatatggttgaggaa

SEQ ID NO: 122725 - DNA, 279 bp, Glycine max
gcgatgaagaggcaatgcaaagttaacctgtacggaactgcttttcccatgaaggaggagcttgacaggcaaatcctgtccaggttccagcggcctcctggaccaattccttcttcaatgctcggtttggagactgttacaggaagtgttgatcactttggttttgaggattgtctaaatgacccccgagagtcagagactttccggccattagacatgcatcatgggatggaagttcgccttggtctatctaagggaccagtgtacccaagtatatat

SEQ ID NO: 122726 - DNA, 231 bp, Glycine max
cttgctcagtcctggatgtggaggtccttgactctctcggcttattccccatgccagctactcttgtcgagtgcatgcttagctatcagctccagcaagctcaacgagtgccaactcaagaacctcaacgcgttggaacccgaccaccgcgctgagtccgaaagtggtttgattcgaacatggtactctcaacaccctgagctgacatgcgccggtgtcactgttcccaaa

SEQ ID NO: 122727 - DNA, 302 bp, Glycine max
tcggctcgagcttagttattatcacttccttagttcaatatggggagcccttcactctctctctttcttccctttgcttgctactcttgtcgagtgcatgctttgctattagctccagcaagctcaacgagtgccaactcaacaacctcaacgcgttggaacccgaccaccgcgttgagtccgaaggtggtttgattcaaacatggaactctcaacaccctgagctgaaatgcgccggtgtcactgtttccaaactcaccctcaactgcaatggcctccacttgccatcttactaccttatc

SEQ ID NO: 122728 - DNA, 288 bp, Glycine max
cttatcttatccctctaatcactctagctgttgcaatttctactatttttcaatggcttctgcagatgttgagttccgttgctttgttggtgggcttgcttgggtcaccggcaacgatgccctcgagaaagccttttcaatctacggcgacatcgttgaatcgaaggttatcaacgaccgtgagactggaaggtccagaggattcggatttgtgaccttcgcctcagagcagtcaatgatagatgcgatcgcaggaatgaacggccaggaccttgacggtcgaacatc

SEQ ID NO: 122729 - DNA, 289 bp, Glycine max
tctgcttaatcgaactattcagattctaaaaaatgagttggtggtgggctggagcaatcggtgctgccaagaagaaattcgaggaagaggaaccgccgcgaagttgccagagcgtgggcctggtgatcggcgtgacgggcatcgtgggcaacagcctcgccgagatcctccctctcgccgacacccccgccggtccatggaaggtctacggcgtcgcacgctgcccccgtccgccgtggaacgccgaccatcctgtcgagtacatccagtgcgacgtctcgatcccgcc

SEQ ID NO: 122730 - DNA, 285 bp, Glycine max
actgataaagctcatatcttccgtgctgatcttcaggggtgaagaaagaggatctgaaggtgcaggtggaggagaataagatcctgcagataagcggggagagggtgaaggagaaggaggaccagaacgacaagtggcaccgcgtcgagaggcagtgcggaagcttcctccgccgcttccggctgccggaggatgccaaccccaaccagatcagctgcacgctcgaaaacggggtgctgaacgtcaccgtgcccaaggtggagaagaagccggagaacagacgtg

SEQ ID NO: 122731 - DNA, 283 bp, Glycine max
agcaaaatgaccaagttcacaatcctcctcatctctcttctcttctgcatcgcccacacttgcagcgcctccaaatggcaacaccagcaagatagctgccgcaagcagctccagggggtgaacctcacgccctgcgagaagcacatcatggagaagatccaaggccgcggcgatgacgatgatgatgatgacgacgacaatcacattctcaggaccatgcggggaagaatcaactacataaggaggaacgaaggataagacgaagacgaagaagaagaggaca

SEQ ID NO: 122732 - DNA, 286 bp, Glycine max
tttgattgcagtgccaaccggttttgcatactggatgtacaacaatgaagacactcctgttgttgccgtttctcttattgacaccaacagcttccagaaccagctcgaccagatgcctaggagattctatcttgctgggaaccaagagcaagagtttctacagtatcagccacagaagcagcaaggaggtactcaaagccagaaaggaaagcgtcagcaagaagaagaaaacgaaggaggcagcatattgagtggcttcgccccggaattcttggaaatgcgttcg

SEQ ID NO: 122733 - DNA, 271 bp, Glycine max
gatgagtgtgcggtttcctttgttggtgttctgggaactgttttcctggcatcagattgtgtctcattaaaggtgcgagaggatgaggataacccttgctacttgagaaactctaagagcttccagactctctttgagaacctacaacggtcgcattcgtctcctccacagattcgacgaacgctctgcagaacttgagaacattcgagactacaggattgtccggtttcagtcaatacccaacaccgtccttctccgcccacgatgctga

SEQ ID NO: 122734 - DNA, 274 bp, Glycine max
tctccttggagctattatatcatggggcttctgtggcctttcgtctctgagcacgctggggactggtatccagctgaccttggtagcaacgatttcaaaggtctttatggatacaaggtattcatatctattgctctgattttaggggatggcatttacaatctgataaagactatactgataaccattgacggagatgtggagggcaagctccagacagcttcctgttgtgacagaggttcaagatgatgagagttctcaactgcaatcaaag

SEQ ID NO: 122735 - DNA, 277 bp, Glycine max
taaaattcttccaccaagttatggaatccctgtgttgcttcttttctccctcttaggtctctcttctatttccagcaattcaactcattgttccatattggaccttgacctaaccaagtttaccacacagaaacaggtcacttcactgttccaactatggaagagtgagcatggacgtgtctaccattaccacgaagaagaggcaaagagacttgagattttcaagaatacttggaactatatcagggacatgaatgcaaacagaaaatcccccatt

SEQ ID NO: 122736 - DNA, 304 bp, Glycine max
tacacgcgcacggaactcggctcgagctcggtggaggaattttagtggacaaaactggagattggatcacacttatacaaaattctccaattagtaacttgttgagagttgctgcttggaagaaaggctgtttaatggttaagattgtgatgtctgggaatgcagcagtcaaaaggagtgattgggcctcattggtacaagtgtttttaacaaacagcaacagtacagagcattttgatgcatgtaagtggacaaaatcggaaccacattcctgggaattgatcttcccaatagaggttgtggt

SEQ ID NO: 122737 - DNA, 290 bp, Glycine max
taagaaatgaagagtactatcttctttgctctcttctagtttgtgccttcaccatctcatacctgccttcagccaccgctcagttcgtgctcgacactgatgatgatcctcttcaaaacggtggcacatactatatgttgccagttatgagaggaaagggcggtggaatagaagtagattcaactggaaaagaaatatgccctctcactgttgtgcaatcacccaatgagctcgataaggggattggactagtctttacatctccattacatgcccttttttcgccgaag

SEQ ID NO: 122738 - DNA, 286 bp, Glycine max
ctcgagccgatttgagtgaactcactttaaacagtggaaaagagttcagggccaaggtacaggagaaagatacttccggaggaaaagtgaaagggcagggaactgggacagtccttgctgtaactcttgttgccgtggatgctgaaatcagcgttaatgctgccatgctacaggaagggcttgctaggacagaaaaaagaaacaggtgggacagaaaagacagacagacagctcttgataatttggagaatttccaggaagaagcaaagaccagcaggccggaatg

SEQ ID NO: 122739 - DNA, 192 bp, Glycine max
gctaaatgaccaagttcacaatcatgctgcgactctcttctcatctgcactgtccacacttgcagcgcctccaaatggcagcactcagcaagatagctgccgcaagcagctccaggaggtgaacctcacgccctgcgatcagcacatcatagagcagatacaacgctgaggcgatgacgatgctgatgatga

SEQ ID NO: 122740 - DNA, 286 bp, Glycine max
aaagaaattaagagagttttttttgttcctcactgaccaagccattgcgatgagaaccaaactttctttagctatctttttcttttgtcttttagccttattttcaaacctagcctttggcaaatgtaaagaaaccgaggtagaagaagaagaccctgagctcgtaacatgcaaacaccaatgccaacagccacagcaatacactgagggtgacaagcgggtatgcttgcaaagatgtgacaggtatcatcgtatgaagcaagagcgagagaaacaatccaagagg

SEQ ID NO: 122741 - DNA, 278 bp, Glycine max
ctcgagccgctcgagccgggacctattgtgtttaaatccacaaaatccttttgtgtcacataggtgatatggggaaaatgactttgccccaaggcacttcccgaagtgtcaaaagagtgcctcattctatagggggaggagctggtgcacagaatgctattctcatgaatatgccagatgctgttctttcaatgtggagatattttgttggagatctcgtctttgaagtttctaagatgacttctccctacattagatgtacagtctctctcttctag

SEQ ID NO: 122742 - DNA, 290 bp, Glycine max
acaaaacccaccgagatcagcagcggcaagtgttcggaggctacaacaagaggttcagacatttcagccctaccctacggctagctccatgcaactatccacatgctacttaccctatcatctccttctccctctcacaaattcccagtcttgtactttctctctggcctcacatgcacggacgagaacttcattttcaagtcgggtgctcaacgcgccgcttccgctgagggagtggccttggcatttcccgacacttctccaagaggcttgaatgtggaagagaagca

SEQ ID NO: 122743 - DNA, 279 bp, Glycine max
tgcaggctgtatatttgctgaacttcttctgcgtcgaccttttttgcagggtacaagtgacattgatcaattaggaaagattttttcagcatttggcactccaacggcttctcagtggcctgatatggtatacctgcctgattatgtcgaataccaatatgttcctgccccccctctgcgttctttatttccgatggtaactgatgatgctttagatctgttgtcaaagatgcttacatatgatccaaaagctagaatttcagtgcagcaggactagag

SEQ ID NO: 122744 - DNA, 278 bp, Glycine max
attaacacttccttagttcaatatggggaagcccttcactctctctctttcttccctttgcttgctactcttgtcgagtgcatgctttgctattagctccagcaagctcaacgagtgccaactcaacaacctcaacgcgttggaacccgaccaccgcgttgagtccgaaggtggtttgattcaaacatggaactctcaacaccctgagctgaaatgcgccggtgtcactgtttccaaactcaccctcaaccgcaatggcctccacttgccacttactc

SEQ ID NO: 122745 - DNA, 275 bp, Glycine max
gttggagatctcgtctttgaagtttctaagatgacttctccctacattaaatgtacagtctctttcttcatagcatttggaaatttggctgatgacaccatcaattttgaggcttttccccacaagctggtacagtttggagagattcaggaaaaagttgtattgaaattttcacaagaggaatttcttacagcttggtcaacccaggtgcgtcctgcaacaactctgttggctgatgggtgtcgatatttgtatgctatggtgcatgtagttca

SEQ ID NO: 122746 - DNA, 273 bp, Glycine max
aaaaccaatggccacgttcgcgtcctccagaggttcaacaaacgctcccaacagcttcagaatctccgagactaccgcattttggagttcaactccaaacccaacacccttcttctcccccaccatgctgacgctgattacctcatcgttatccacaacgggactgccattcttaccttggtgaacaacgacgaccgagactcttacaaccttcaatctggcgatgacctaagagtccctgcaggaaccacatactatgtggttaacccgaca

SEQ ID NO: 122747 - DNA, 270 bp, Glycine max
gtggagttcctgtggaagaggggtattctgtcctgctttggccaaggctgtgaaaacaatgaagaagggagagaaagttctcttgaatgtgaagccacaatatgcatttggtgagagtggaagaccagccttaggagatgaaggtgccgtacctccaaatgcttatcttcaattggatcttgagttggtctcgtggaagaccgtgtctgacattaccaaggatagaaaggttctcaagaagactttgaaggaaagggagggatatgacga

SEQ ID NO: 122748 - DNA, 281 bp, Glycine max
tctcgagccgaatcggctcgagcaggctcgaggcaaagcaatggcaacttcaaagttgaaaacccagaatgtggttgtatatctctccctaaccttaaccttggtactggtgctactgaccagcaaggcaaactcagcggaaactgtttctttcagcttccacaagttcgtgccgaagcaaccaaacatgatcctccaaggagacgctattgtgacctcctcgggaaagttacaactcaataaggttgagaaaacggcaccccaaaacctcgtctctggtc

SEQ ID NO: 122749 - DNA, 283 bp, Glycine max
ctttgaacactcatcaccatggccaagcttgttctttccctttgtttccttcttttcagtggctgcttcgctctgagagagcaggcacagcaaaatgagtgccagatccaaaagctgaatgccctcaaaccggataaccgtatagagtcggaaggtgggttcattgagacctggaaccctaacaacaagccattccagtgtgccggtgttgccctctctcgctgcacccttaaccgcaatgcccttcgtagaccttcctacaccaacggtccctagaaatcta

SEQ ID NO: 122750 - DNA, 280 bp, Glycine max
cacacacacacacacactaagaataatggcttctatcctccactactttttagccctctctctttctttctctttccttttcttcttatccgactccgtccccattccccaacaccacactaaccctacaaaacctataaaccttctggttctacccgttcaaaatgatgcttccacagggctccattggtccaacctccaaaaaaggacccctctaatgcaagtaccagtcctggtggacctcaatggaaaccacttgtgggttaactgtgagaacact

SEQ ID NO: 122751 - DNA, 280 bp, Glycine max
cgaaggagctcttcttctaccacacttaattcaaaggccatagtgatactagtgattaatgaaggagatgcaaacattgaacttgttggcattaaagaacaacaacagaagcagaaacaggaagaggaacctttggaagtgcaaaggtacagagctgaattgtctgaagacgatgtatttgtaattccagcagcttatccatttgtcgtcaacgctacctcaaacctcaatttccttgcttttggtatcaatgctgagaacaaccagaggaattccttgc

SEQ ID NO: 122752 - DNA, 280 bp, Glycine max
ggaagaaggtggcagtgtgctcagtggcttcagcaaacatttcttagcacaatccttcaacaccaacgaggacaaaactgagaaacttcggtctccagatgacgaaaggaagcagatcgtgacagtggagggaggcctcagcgttatcaatcccaagtggcaagacaaggaagacgaagacgaagatgaagacgaagaatatgaacaaactccctcttatcctccacgacgaccaagccatggaaagcatgaagatgacgaggacgaggacgagaagaag

SEQ ID NO: 122753 - DNA, 275 bp, Glycine max
attctctccattgtctttgatcactcatcaccatggccaagcttgttctttccctttgtttccttcttttcagtggctgcttcgctctgagagagcaggcacagcacaatgagtgccagatccacaagctgaatgccctcaaaccggataaccgtatagagtcggaaggtgggttcattgagacctggaacgctaacaacaagccattcgagtgtgccggtgttgcgctctctcgctgcacgcttaactgcaatgcgcttcgtagacttcgtaca

SEQ ID NO: 122754 - DNA, 274 bp, Glycine max
ctcgagccgctcgagccgcaaatttgttaaattgtctcttgatgatgttgaaactcctacaggttccatgttggatcttaaaatttctcagtctaaaattgcacttcccaagaacacagttggaggaactattctgcgtagtgatctattggcaaattttctgacagagggcaattttagagcaagtgttgatttgcagcgcactcatcgtattaaaggaatgattaaaatggtggccacagttggtattcctgagaatacaggtatacattgg

SEQ ID NO: 122755 - DNA, 272 bp, Glycine max
gggatatgatccttttcttggtggaattcaaaaatatgccactcccatgatgcccctagatgaagaaattctttctaaggttgcacaagatatagttgaggaatggtttgattgtgttgatgaggaggattcctttgaggaagtttctttgagtgcagcactcaatggtgttgagggcttggactatatggaaagaattcctcttgccacatctgagggttttcctcatgtgctttcacgcaaaaatggtgaaaaaggcaaaagggtttgtt

SEQ ID NO: 122756 - DNA, 273 bp, Glycine max
ctcctacttctccgcctccttcaaatcgtcatcaatttcgcgtctttctttctcaattctcttagattctcaatttggtcttcaaaaatgcggatgagttgcaatggatgtcgagttctgagaaaaggttgcagtgaaaattgcagcatcagaccctgtttacaatggatcaaaagcccagaatcccaagccaatgctactgtgtttctcgctaagttttatggtcgtgctggtctcatgaacctcgttaacgcaggccccgaaatcttcgtc

SEQ ID NO: 122757 - DNA, 264 bp, Glycine max
cagaagcacaacttttgctcaaagttcagaaactatgctcatgaaagcttatgcttttttgaagtacaacaatgcaaccaatttgattgtcaggacccatttggcagaattggtcaatgaagacttttatgatgaaaaatttaattttattggcacaattgggactccagcttttcatcgacaaattgctgcacacttggagaaaatgccattatggcaaaaagcaattttgtgctgcatgggacattgtctgtctcgggaaaa

SEQ ID NO: 122758 - DNA, 274 bp, Glycine max
aagaggatgagaagccacagtgcaagggtaaagacaaacactgccaacgcccccgaggaagccaaagcaaaagcagaagaaatggcattgacgagaccatatgcaccatgagacttcgccacaacattggccagacttcatcacctgacatctacaaccctcaagccggtagcgtcacaaccgccaccagccttgacttcccagccctctcgtggctcagactcagtgctgagtttggatctctccgcaagaatgcaatgttcgtgccaactac

SEQ ID NO: 122759 - DNA, 272 bp, Glycine max
tttggctcgagctcgtccgtttgatgatgttgagaccctcatggttccatgtcggatcttaccttgtctcgatctacaattggcattcccgaatacacagttgctggaaccattctgcgtagtgacctattggcaaattttttgacagagggcaattttagcgccagtgttgatttgcagcgcactcatcgtatcgaaggaatgattaaaatggtggccacagctggtattcctgaggatacaggtatagcattggcctgttgtatgaatag

SEQ ID NO: 122760 - DNA, 271 bp, Glycine max
aaaaccaaaacagtaaagctaacttcaacacctttaattttctaaaagtaattcagcggctgaataccaagcggagaagatgagtcaggagcagccacggcgtcccaaaggccaaaaccccatcaaatacggcgacgtttttgtcgtctccggcgaccttgcacagaagcccgtcgcaccggaagatgctgccatgatgcaaagcgcggaaactcgagtgctcggacaaacccaacccggcggagcagcttccgtcatgcatctgccgcca

SEQ ID NO: 122761 - DNA, 281 bp, Glycine max
caagaatttccattgcatgcaaagcaatacgcattatattactagttttaatttgttttgtcgtttgcttctttctttgattaatgatgactagctttaaggttgcatgtgtggttgcgatgatgtgcatggttgttgccatgagtgttacacccatggcacaggccgcaatcacgtgcgggcaggtcgccggcgacgtgtctccgtgcctcagttatcttcgaagcggcggaaaaccgtcggacgcctgctgcaacggagtgaagtcgctcagcggcgcg

SEQ ID NO: 122762 - DNA, 281 bp, Glycine max
gatgaacgtcaattcccattcccacgcccacctcatcataaggaagagcgaaagcaagaggaagatgaggatgaggagcagcagcgagagagcgaagaaagtgaagattctgagttacgaagacataagaataagaacccttttctcttcggctctaacaggttcgaaactctcttcaaaaaccaatatggtcgcattcgcgtcctccagaggttcaaccaacgctccccacaacttcagaatctccgagactaccgcattttggagttcaatccaaaccc

SEQ ID NO: 122763 - DNA, 278 bp, Glycine max
tgtgactcgaggacaaggaaaggttagattcacatagatcacactgtttgcattcagattccaatgtggagagtaaattccattcttgtagagatcaacatattgggcactgagttggaattggcggagggctgggagggtgaggctgttgagggtactaatgcgaccagctttagggttgtagaagtcagcgcgtgaagggcgagcaatgttctcgtgaagcttcaaggtgcagatattttcctcaaccccgtttcttgtctcgcatctctttcacg

SEQ ID NO: 122764 - DNA, 278 bp, Glycine max
gggaagacaagggagccattgtgacagtgaaaggaggtctgagcgtgataaaaccacccacggacgagcagcaacaaagaccccaggaagaggaagaagaagaagaagatgagaagccacagtgcaagggtaaagacaaacactgccaacgcccccgaggaagccaaagcaaaagcagaagaaatggcattgacgagaccatatgcaccatgagacttcgccacaacattggccagacttcatcacctgacatctacaaccctcaagccgtagcgtca

SEQ ID NO: 122765 - DNA, 273 bp, Glycine max
gttcagtgtctacaataccaggtgattttgtcattggtgttaagttgacaaccataaacaatatgtgtgcatatgggctcaatcctggtatttcaggttctcgtcttttgggcaccattcctcagtccatttcacagcaaactgtttggaatcaaatggcaacagtgagaacaccattgaattttgattctagcaagcagagcttttgtcaattctctattgatcttcttggtggaggaattttagtggacaaaactggagattggtcacact

SEQ ID NO: 122766 - DNA, 262 bp, Glycine max
aaagtcttccatagccccccaaaatgaagagcaccatcttctttgctctctttctcttttgtgccttcaccatctcatacctaccttcagccatcgctgatttcgtgctcgataatgaaggtaaccctcttgaaaatggtggcacatattatatcttgtcagacataacagcatttggtggaataagagcagccccaacgggaaatgaaagatgccctctcactgtggtgcaatctcgcaatgagctcgacaaagggattgg

SEQ ID NO: 122767 - DNA, 270 bp, Glycine max
atgttctcatcctagtacacgtattagagaatttaagatatactatgatgagagcgcggttcgcattactgttgctgggagttgttttcctggcatcagtttctgtctcatttggcattgcgtattgggacaagcagaaccccagtcacaacaagtgcctccgaagttgcaatagcgagaaagactcctacaggaaccaagcatgccacgctcgttgcaacctccttaaggtggaggaagaagaagaatgcgaagaaggtcaattccacg

SEQ ID NO: 122768 - DNA, 267 bp, Glycine max
taatgatctcgcaatggttaagttaatgtagcatgtgctgctgttggcttgatatcaagctatactccgactccattgttggaatctggtttgcaaaaagacagagggttaattgtggagtattttggaaggatgtcttacgttgctcataacgttaatcatccccaagagaaagatttgttggaaggaaatttttcctttgatattaaatctcgctctagattggaaaaagtttcctctacaaaagcacaatttgttagtgaaaaa

SEQ ID NO: 122769 - DNA, 222 bp, Glycine max
atcaataccaaaatgaccaacttacaattctcctcatcgctcttctcttcatcgcccacacctgctgcgcctccaaatggcaacagcaccagcaagagagctgccgcgagcagctcaaggggctcaacctcaacccctgtgagcacatcatggagaagatccaagctggccgccgcggcgaggacggcagcgacgaagatcacattctcatcaggaccatgc

SEQ ID NO: 122770 - DNA, 270 bp, Glycine max
tagcctcatgctcaacttcgtggattctaccaaatatcaaaactgagcatgattccagtggtttgtgtgatggaatggatacttcacaacaagcactactcaagggaagtgaaaatgtcagtggtggttgtggttattggtgtcggtgtttgcactgtaactgatgtaaaagttaacctcaaaggtttcatgtgtgcctgtatagcagttttgtcaacatctttacagcaaatttcaataggttctccttcaaagaaatatcaattggat

SEQ ID NO: 122771 - DNA, 254 bp, Glycine max
cattcagcgtggacaagcagatagcgaaaaacctacaaggagagaacgaaggggaagacaagggagccattgtgacagtgaaaggaggtctgagcgtgataaaaccacccacggacgagcagcaacaaagaccccaggaagaggaagaagaagaagaggatgagaagccacagtgcaagggtaaagacaaacactgccaacgcccccgaggaagccaaagcaaaagcagaagaaatggcattgacgagaccata

SEQ ID NO: 122772 - DNA, 275 bp, Glycine max
gtttggtttctcagagactggggaatctgtgcttctcattaagggtcctcagggaagaataaatagggctatttggggacctctcaacagaaccattattagtgccggtgaagatgctgttattcgtatttgggattctgagacgggaaaactgcttaaagagtcagacaaggaatctggccataaaaagaccgtgacatcacttgctaagtctgcggatggttcgcatttccttactggctcccttgacaagtctgctaggctttgggtactag

SEQ ID NO: 122773 - DNA, 260 bp, Glycine max
tacaataccaggtgattttgtcattggtgttaagttgacaaccataaacaatatgtgtgcatatgggctcaatcctggtatttcaggttctcgtcttttgggcaccattcctcagtccatttcacagcaaactgtttggaatcaaatggcaacagtgagaacaccattgaattttgattctagcaagcagagcttttgtcaattctctattgatcttcttggtggaggaattttagtggaccaaacgggagatgggtcac

SEQ ID NO: 122774 - DNA, 270 bp, Glycine max
ctgagccgattcggctcgagtgcagatagtgagaaacctacaagatgagaacgaagaggaggatagtgaagccactgtgacagtgaaaggaggtctaagagtcacagctccagccatgaggaagccacagcaagaagaagatgatgatgatgaggaagagcagccacagtgcgtggagacagacaaaggttgccaacgccaaagcaaaaggagcagagatggcattgatgagaccatttgcacaatgagacttcgccaaaacattgtcag

SEQ ID NO: 122775 - DNA, 274 bp, Glycine max
cttaattattaacacttccttagttcaatatgcgggaagcccttcactctctctctttcttccctttgcttgctactcttgtcgagtgcatgctttgctattagctccagcaagctcaacgagtgccaactcaacaacctcaacgcgttggaacccgaccaccgcgttgagtccgaaggtggtttgattcaaacatggaactctcaacaccctgagctgaaatgcgccggtgtcactgtttccaaactcaccctcaaccgcaatgcctccactt

SEQ ID NO: 122776 - DNA, 267 bp, Glycine max
tctcccccaccatgctgcgctgattacctcatcgttatccttaacgggactgccattcttaccttggtgaacaacgacgaccgagactcttacaaccttcaatctggcgatgccctaagagtccctgcaggaaccacatactatgtggttaaccctgacaacgacgagaatctcagaatgataacactcgccatacccgttaacaaacccggtagatttgagagtttcttcctatctagcactcaagctcaacagtctcttgcaagg

SEQ ID NO: 122777 - DNA, 269 bp, Glycine max
actgaccaagccatggcgatgagaaccaaactttctttagctatctttttcttattacttttagccttattttcaaacctagcctttggcaaatgtaaagaaaccgaggtagaagaagaagaccctgagctcgtaacatgcaaacaccaatgccaacagccacagcaatacactgagggtgacaagcgggtatgcttgcaaagatgtgacaggtatcatcgtatgaagcaagagcgagagaaacaaatccaagaggaaatcgtgagaag

SEQ ID NO: 122778 - DNA, 269 bp, Glycine max
aacaactatgcgatgggtctcatgtgatgcaatatggtgataccaacatcacagctgaaaagctttatttataccaaggttttgatcctgccactgtgaacttccctccacaaaacggcaggctagaaactaaaatggaagttgttaaccaaagagatgcagaacttttgttcatgtggcaaatgtatcagagatcaaaccatcagtcagaaaataagacagacatcctcaaacaaattgcggagacagtgaagcataggaaacacata

SEQ ID NO: 122779 - DNA, 250 bp, Glycine max
  unsure (1)..(250): unsure at all n locations
cggctcgagcggctcgatctctagtacaccgtattaaagaatttaagatatactatgatgatagcgcggctcacattactgttgctggtangtgttttcctggcatcaggttctgtctcatttggcattgcgtattgggaaaagcagaaccccagtcacatcaagtgcctgcgaagttgcaatatcgagaaagactcctacaggaaccaagcatgctacgctcgttgctaactccttaaggtggatgaag

SEQ ID NO: 122780 - DNA, 257 bp, Glycine max
  unsure (1)..(257): unsure at all n locations
aatttttgacaaacctangacgcgctgcttcactattctccctatggagtttaatcttgtggttcgtcagaagtttttaaattttgtgaggttcattatgaagaaaagggacaagcttagttgtcaagttggaatcaacccatattctatggaatggactggtttggccaatagattactgagtaagggcaacgatattctgtgttgcgattatgctagttttgatggtttgattaccaagcaagttatgagcaaga

SEQ ID NO: 122781 - DNA, 253 bp, Glycine max
cggctcgagtcaaattccacgaccacgaccacaacacccggagagggaacgtcagcaacacggtgagaaggaggaagacgaaggtgagcagccacgtccattcccattcccacgcccacgccaacctcatcaagaggaagagcacgagcagaaggaggaacacgaatggcatcgcaaggaggaaaaacacggaggaaagggaagtgaagaggaccagatgaacgtgaacacccacgcccacaccaacctcatc

SEQ ID NO: 122782 - DNA, 248 bp, Glycine max
caggacggtggtcatggacgtcgaaatccgctaaggagtgtgtaacaactcacctgccgaatcaactagccccgaaaatggatggcgctaaagcgcgcgacctatacccggccgtcggggcaaggaccaagccccgatgagtaggagggcgcggcggtcgctgcaaaacccaggtcgcgagcctgggcaggagcggtcgtcggtgcagatcttggtggtagtagccaatattcacatgagaactttga

SEQ ID NO: 122783 - DNA, 246 bp, Glycine max; identical to SEQ ID NO: 112088

SEQ ID NO: 122784 - DNA, 261 bp, Glycine max
gctcggccttcggcacaaggatcatacatagtagtgtttgtgggttgcaaagatgcttgggggtcttctccataggggtcataagataaaagggacagtggtgttgatgcgcaagaatgtgttggacgtgaatagcgtaaccagcgttgggggaattattggtcaaggtctcgacttagttggctcaacactcgatactcttactgccttcttgggccgatccgtgtctctccagcttattagtgctaccaaagctgatgc

SEQ ID NO: 122785 - DNA, 246 bp, Glycine max
ccaagttcacaatcctcctcatctctcttctctactgcatcgcccacacttgcagcgcctccaaatggcagcaccagcaagatagctgccgcaagcagctccagggggtgaacctcacgccctgcgagaagcacatcatggagacgatccaaggacacggcgatgacgatgatgatgctgacgacgacaatcacattctcaggaccatgccgggaagaatcaactacataaggaggaacgacacga

SEQ ID NO: 122786 - DNA, 245 bp, Glycine max
cctcgacgaatcgctcgagcggctcgagctctccattgtctttgaacactcagctccatggccaagcttattctttccatttgtttccttcttttcagtggctgcttcgctctgagagagcaggcacagcaaaatgagtgccagatccaaaagctgaatgccctcaaaccggataaccgtatagagtcggaaggtgggttcattgagacctggaaccctaacaacaagccattccagtgtgccgg

SEQ ID NO: 122787 - DNA, 247 bp, Glycine max
tgttaagtaatttcgaaaggcttctgttccttcctatatataaaaccagcctcttgtatctatttgcggaaaacaccctagtttttctcagttgaacctcgatcgcacaccagagagaaaagaaagaataatgccaccttcttactgcgtgaaggagagaaaaccatgtgtgagatgggtcgagaaatatttcaaagattgcctttgcaatttgaaagatgaaatctcgttcagcttcggcctcaca

SEQ ID NO: 122788 - DNA, 244 bp, Glycine max; identical to SEQ ID NO: 113082

SEQ ID NO: 122789 - DNA, 239 bp, Glycine max
gcacaatgatctcgctcacaatcctcctcatctctcatctcttctgcatcgcccacacttgcagcgcctccaaatggtagcaccagcaagattgctgccgcagcagctccagggggctgacctcacgccctacgacaagcacatcatggagcagatccaaggctgcggcgatgctcgatgatgatgatgacgacgacaatcacattctcaggaccctgcggggaagaatcaactacata

SEQ ID NO: 122790 - DNA, 248 bp, Glycine max
aattttcacaagaggaatttcttacagcttggtcaactcaggtgcgtcctgcaacaactctgttggctgatgggtgcccatatttgtatgctatggtgcatgatagttcagtgtctacaataccaggtgattttgtcattggtgttaagttgacaaccataaacaatatgtgtgcatatgggctcaatcctggtatttcaggttctcgtcttttgggcaccattcctcagtccatttcacagcaaact

SEQ ID NO: 122791 - DNA, 246 bp, Glycine max
gcaaaatgaccaagttcacaatcctcctcatctctcttctcttctgcatcgcccacacttgcagcgcctccaaatggcagcaccagcaagatagctgccgcaagcagctccagggggtgaacctcacgccctgcgagaagcacatcatggagaagatccaaggccgcggcgatgacgatgatgatgatgacgacgacaatcacattctcaggaccatgcggggaagaatcaactacataaggagga

SEQ ID NO: 122792 - DNA, 240 bp, Glycine max
ctcggtggaggacttttagtggacaaaactggagattggatcacacttatacaaaattctccaattagtaacttgttgagagttgctgcttggaagaaaggctgtttaatggttaagattgtgatgtctgggaatgcagcagtcaaaaggagtgattaggcctcattggtacaagtgtttgaaacaagcagcaacagtacagagcattctgatgcatgtaagtggacaaaatcggcacca

SEQ ID NO: 122793 - DNA, 246 bp, Glycine max
gcaaaatgaccaagttcacaatcctcctcatctctcttcccttctgcatcgcccacacttgcagcgcctccaaatggcagcaccagcaagatagctgccgcaagcagctccagggggtgcacctcacgccctgcgagaagcacatcatggagaagatccaaggccgcggcgatgacgatgatgatgatgacgacgacaatcacattctcaggaccatgcggggaagaatcaactacataaggagga

SEQ ID NO: 122794 - DNA, 246 bp, Glycine max
gccctaagtgttccagtatgtggagcaactctaggacgaattttcaacgtgcttggagagcccattgataatttcggtcctgtagatactcgcacaacatctcccattcatagatctgcgcctgcctttatacaattagatacaaaattagccacttttgaaacaggaataaaagtagtagatcttttagctccttatcgtcgtggaggaaaaataggacttttcggtggaactggagtgggtaaa

SEQ ID NO: 122795 - DNA, 245 bp, Glycine max
atgaggctagccacccagactccatcagagctgccttggctgaattcctctccacttgcatctttgtctttgctggagaaggctctgcccatgctttgcgacaaatttacaaggaaccagggtcatcagcgggtgagctagtggtaattgcactagctcatgcatttgctctatttgctgctatttctgctagcatgcatgtgtctggtggacacgtcaaccctgccgtcacttttggcgctctt

SEQ ID NO: 122796 - DNA, 249 bp, Glycine max
cttaacacttccttagttcaatatggggaagcccttcactctctctctttcttccctttgcttgctactcttgtcgagtgcatgctttgctattagctccagcaagctcaacgagtgccaactcaacaacctcaacgcgttggaacccgaccaccgcgttgagtccgaagtggtttgattcaaacatggaactctcaacaccctgagctgaaatgcgccggtgtcactgtttccaaactcaccctcaac

SEQ ID NO: 122797 - DNA, 244 bp, Glycine max
tgaaatcgatgaactccctaagcaaattgatgatacacagtacccaaaaacattcttctataaagaagaccttcatccaggcaaaacaatgaaagtacaattcaccaagcgtccctatgcacaaccttatggtgtatatacatggttaacggatattaaagacacctctaaagaaggatatagttttgaagagatatgcataagaaagaagcgtttgagggagaagagaattttgtgcaaaatc

SEQ ID NO: 122798 - DNA, 244 bp, Glycine max
gagaaactttaagcagatgtctaatgttttgtgggtagctcctgaggacaaggcgagtttatggtcacaacttcattatgtttcgtgtaataatctggaaatgcaagaagcttatcttgtcaatttcgtaaatgtgttacgagaattgtatttgcacagtccagaggaagctcgccaattgagaaggaaagctctctctcgtattgaatggctgcaaaaagctgatgtgcctaccatagcacag

SEQ ID NO: 122799 - DNA, 246 bp, Glycine max
gcaaaatgaccaagttcacaatcctcctcatctctcttctcttctgcatcgcccacacttgcagcgcctccaaatggcagcaccagcaagatagctgccgcaagcagctccagggggtgaacctcacgccctgcgagaagcacatcatggagaagatccaaggccgcggcgatgacgacccataatgatgacgacgacaatcacattctcaggaccatgcggggaagaatcaactacataaggagg

SEQ ID NO: 122800 - DNA, 243 bp, Glycine max; identical to SEQ ID NO: 111750

SEQ ID NO: 122801 - DNA, 212 bp, Glycine max
cttatcttgtcaatctcgtaaatgtgttacgagaattgtatttgcacagtccagaggaagctcgccaattgagaaggaaagctctcactcgtattgaatggctgcaaaaagctgatgtgcctaccatagcacagattgaagagttccattcgatgcagaggatgatgaatgctcctgattcaaatgataatatcgatctactgttgagcatt

SEQ ID NO: 122802 - DNA, 242 bp, Glycine max
tcttcatccttctctgttctcctagaacttgattacttgaacattccctatgacagatgaggtggttcttctggatttctggccaagtccatttgggatgagggtcaggattgcacttgctgaaaagggtatcgaatatgagtacaaagaagaggacttgaggaacaagagtcctcttctcttacaaatgaacccggttcacaagaagattccggttctcatccacaatggcaaacccattt

SEQ ID NO: 122803 - DNA, 241 bp, Glycine max
ctccattgtctttgaacactcatcaccatggccaagcttgttctttccctttgtttccttcttttcagtggctgcttcgctctgagagagcaggcacagcaaaatgagtgccagatccaaaagctgaatgccctcaaaccggataaccgtatagagtcggcaggtgggttcattgagacctggaaccctaacaacaagccattccagtgtgccggtgttgccctctctcgctgcaccctta

SEQ ID NO: 122804 - DNA, 242 bp, Glycine max
caaaccaatggccacgttcgcgtcctccagaggttcaacaaacgctcccaacaacttcagaatctccgagactaccgcattttggagttcaactccaaacccaacacccttcttctcccccaccatgctgacgctgattacctcatcgttatccttaacgggactgccattcttaccttggtgaacaacgacgaccgagactcttacaaccttcaatctggcgatgccctaagagtccctgc

SEQ ID NO: 122805 - DNA, 242 bp, Glycine max
ctaaaattcttccaccaagttatgggtttccttgtgttgcttcttttctccctcttaggtctctcttctagttccagcatatcaactcatcgttccatattggaccttgacctaaccaagtttaccacacagaaacaggtgtcttcactgttccaactatggaagagtgagcatggacgtgtctaccataaccacgaagaagaggcaaagagacttgagattttcaagaataacttgaacta

SEQ ID NO: 122806 - DNA, 243 bp, Glycine max
gattcttggttaccaatttttgtgaattgtccctatcctgtaagtcaattaccttcagaagctgtcgttgtaaatgttacatgtggtagtggacgtggtggtttacccaccactgcttggattagttctgcagttaacaatcgctcctcagatatcaacaaaaagattcgcacagcacttgggaaaggtaagaaaattgtttttcttaccagagttgatccttttccagtagctttactggct

SEQ ID NO: 122807 - DNA, 245 bp, Glycine max
ggaaatttttcctttgatattaaatctcgctctagattggaaaaagtttcctctacaaaagcacaatttgttagtggaaaaaccttcaaatatgatatagttggtgctggttcacattcttcagaagatttttctgaaaaggaagatcaagaaaaacccaaaaagattgatgccagattgagacaaagaatagatccacgatacaatgaggttcaggctctgatggaaccaatttgtttaaattg

SEQ ID NO: 122808 - DNA, 245 bp, Glycine max
tgatcatacatagtagtgttggtgggttgcaaagatgcttgggggtcttctccataggggtcataagataaaagggacagtggtgttgatgcgcaagaatgtgttggacgtgaatagcgtaaccagcgttgggggaattattggtcaaggtctcgacttagttggctcaacactcgatactcttactgccttcttgggccgatccgtgtctctccagcttattagtgctaccaaagctgatgcca

SEQ ID NO: 122809 - DNA, 247 bp, Glycine max
caggcccttaagtttcctcctcctaaagtaattcaagtgagtaagtctgcatggatgactgatgaagaatttgcaagagaaatgcttgctggtgtaaatccaaacttgattcgttgtcttaaggatttccctccacgaagcaagctagatagccaagtctatggtgatcatactagtcaaataaccagagaacacctagagcccaacttagaagggctcactgtagatgaggctattcaaaacaaga

SEQ ID NO: 122810 - DNA, 244 bp, Glycine max
ctctatttctcagtctctgtgtttgcggctgaggattccgaacgagtgaccttcttcgtttctcgcaaagtttaagtaatcatgggtaaggaaaaggtagacatcaacattgtcgtcattggacatgtcgactctgggaagtcaactaccactggtcacttgatctacaagcttggtggtattgacaagcgtgtgattgagaggttcgagaaggaggctgccgagatgaacaagaggtcattca

SEQ ID NO: 122811 - DNA, 244 bp, Glycine max
gaccaggaccaggacgaggacgaagatgaagatgaagatcaacctcgcaagagccgcgaatggagatcgaaaaagacacaacccagaagacctagacaagaagaaccacgtgaaagaggatgcgagacaagaaacggggttgaggaaaatatctgcaccttgaagcttcacgagaacattgctcgcccttcacgcgctgacttctacaaccctaaagctggtcgcattagtaccctcaacagcc

SEQ ID NO: 122812 - DNA, 241 bp, Glycine max
taatgtagcatgtgctgctgttggcttgacatcaagctatactccgactccattgttggaatctggtttgcaaaaagacagagggttaattgtggagtattttggaaggatgtcttacgttgctcataatgttaatcagccccaagagaaagatttgttggaaggaaatttttcctttgatattaaatctcgctctagattggaaaaagtttcctctacaaaagcacaatttgttagtgga

SEQ ID NO: 122813 - DNA, 240 bp, Glycine max
caagttatgggtttccttgtgttgcttcttttctctctcttaggtctctcttctagttccagcatatcaactcattcttccatattggaccttgacttaaccaagtttaccacacaaaaaaaaaaataaaaaatgttccaactatggaagagtgtgcatggacgtgtctaccataatcatgaagaagaggcatagagacttgagattttcaagaatatttatgaactatatcagggacat

SEQ ID NO: 122814 - DNA, 241 bp, Glycine max
caaaccttgctctatactacacagtacacacactagaagaataatggcttccatcctccactactttttagccctctctctttcttgctcttttcttttcttcttatccgactcagtcacccctacaaaaccaataaaccttgttgttctacccgttcaaaatgatggttccacagggctccattgccccaacctccaaaaaagaacccctctaatgcaagtaccagtcctggtggacctc

SEQ ID NO: 122815 - DNA, 242 bp, Glycine max
caacatggaactctcaacaccctgagctgaaatgcgccggtgtcactgtttccaaactcaccctcaactgcaatggcctccacttgccatcttactcaccttatccccggatgatcatcatcgcccaagggaaaggagcacttggagttgcaattccaggatgtcctgagacgtttgaggagccacaagaacaatcaaacagaagaggctcaaggtcgcagaagcagcagctacaggacagt

SEQ ID NO: 122816 - DNA, 240 bp, Glycine max
ccattgtctttgaacactcatcaccatggcgcaggctgttctttccctttgtgtccttctagtcagtggctgcttcgctctgagagagcaggcacagcaaaatgagtgccagatccaaaagctgaacgccctcaaaccggataaccgtatagaggcggaaggtgggttcattgagacctggaaccctaacaacaagccattccagtgtgccggtgttacgctctctcgctagcaccttaa

SEQ ID NO: 122817 - DNA, 233 bp, Glycine max
aatcagagtaatattcagattaccggcttattttacgatggcagatacaaattcgagactaaatacgagagaaatcttgcaatgacagaagacgaaaagatggaagtgattagtaatagaggcattcctgctgatggtcttgaaaagcgagctcatgaatttgacatacatgtcgctcatgaaagcctcaaggatcgaattcctgctgttgacacgttgtattctagtaatgt

SEQ ID NO: 122818 - DNA, 238 bp, Glycine max
ataccttaataaatcatttaagatactatgatgagagcacggttcccattactgttgctgggacttgttttcctggcttcagtttctgtctcatttggcattgcttactgggatacagagcaccccaaacacgacaagtgtctccagagttgcaatagcgcgagagactcgtacaggaaccaagcatgccacgctcgttgcaacctccttaaggtggagatagaagaatgtgaagaag

SEQ ID NO: 122819 - DNA, 242 bp, Glycine max
gccaaatgctgttctttcaatgtggagatattttgttggagatctcgtctttgaagtttctaagatgacttctccctacattaaatgtacagtctctttcttcatagcatttggaaatttggctgatgacaccatcaattttgaggcttttccccacaagctggtgctctttggagagattcaggaaaaagttgtattgaaattttcacaagaggaatttcttacagcttggtcaactcagg

SEQ ID NO: 122820 - DNA, 239 bp, Glycine max
gtgcaactttgcaatttagaaagttagcagattgtgattttctcaagagaaactttaagcagatgtctaatgttttgtgggtggctcctgaggacaaggcgagtttatggtcacaacttcattatgtttcgtgtaataatctggaaatgcaagaagcttatcttgtcaatctcgttcctgtgttacgagaattgtatttgcacagtccagaggaagctcgccaattgagaaggaaagct

SEQ ID NO: 122821 - DNA, 240 bp, Glycine max
ctcgagccgctcgagccgccctactcattctccatacctcaacgaagaggttaaagagacggcaccactttgctgtccgccttgaccgagcagagcttcgtcttggccctcgattttgccctaaagtactctcagtcacaacagacaccgtcgtcgtcgtcgtcgtcatcaatggcaccgaagcagaccaaggctgagaagaagatcgcttacgatgcgaactgtgcgacctaatggagg

SEQ ID NO: 122822 - DNA, 240 bp, Glycine max
actgaccaagccatggcgatgagaaccaaactttctttagctatctttttcttttttcttttagccttattttcaaacctagcctttggcaaatgtaaagaaaccgaggtagaagaagaagaccctgatctcgtaacatgcaaacaccaatgccaacagccacagcaatacactgagggtgacaagcgggtatgcttgcaaagatgtgacaggtatcatcgtatgaagcaagagcgagag

SEQ ID NO: 122823 - DNA, 240 bp, Glycine max
attaaaatgcagcaacgaattatctaaccaggactgaatgacctaatggagtctaaaggtgggaaaaagaagtctagtagtagtagtagtaaatcaattttttacgaagctcccctcggatacagcatggaagacgttagaccaaacggtggaatcaagaaattcagatctgctgcttactctaactgttctcgcaaaccatcctgatacacatccggattgatagttcgttgcatgcaa

SEQ ID NO: 122824 - DNA, 241 bp, Glycine max
gccagatccaaaagctgaatgccctcaaaccggataaccgtatagagtcggaaggtgggttcattgagacctggaaccctaacaacaagccattccagtgtgccggtgttgccctctctcgctgcacccttaaccgcaatgcccttcgtagaccttcctacaccaacggtccccaggaaatctacatacaacaaggtaatggtatttttggcatgatattcccgggttgtcctagcactta

SEQ ID NO: 122825 - DNA, 241 bp, Glycine max
ctaaaattcttccaccaagttataagaaatacatgtgttgcttcttttctccctcttaggtctctcttctagttccagcatatcaactcatcgttccatattggaccttgacctaaccaagtttaccacacagaaacaggtgtcttcactgttccaactatggaagagtgagcatggacgtgtctaccataaccacgaagaagaggcaaagagacttgagattttcaagaataacttgaac

SEQ ID NO: 122826 - DNA, 242 bp, Glycine max
cttgactacaactgatgagagattggtaggcacagaacatgagggatatgatccttttcttggtggaattcaaaaatatgccactcccatgatgcccctagatgaagaaattctttctaaggttgcacaagatatggttgaggaatggtttgattgtgttgatgaggaggattcctttgaggaagtttctttaagtgcagcactcaatggtgttgagggtttagactatatggaaagaattc

SEQ ID NO: 122827 - DNA, 243 bp, Glycine max
ctggtttggccaatagattactgagtaagggcaacgatattctgtgttgcgattatgctagttttgatggtttgattaccaagcaagttatgagcaagatggcagaaatgataaacagtctttgtggtggtgatgaaaaattgatgcgtgaaaggacacacctgctgttggcttgttgttcaaggatggcaatttgtaagaaagatgtttggagagttgaatgtggaatcccttctggatttc

SEQ ID NO: 122828 - DNA, 244 bp, Glycine max
cttaattattaacacttccttagttcactatggggaagcccttcactctctctctttcttccctttgcttgctactcttgtcgagtgcctgctttgctattagctccagcaagctcaacgagtgccaactcaacaacctcaacgcgttggacaccgaccaccgcgttgagtccgaagtggtttgattcaaacatggaactctcaacaccctgagctgaaatgcgccggtgtcactgtttccaaa

SEQ ID NO: 122829 - DNA, 242 bp, Glycine max
aataaagatgagtttgaagaacaacatggtggtgctaaaggtgtgtttgttgcttcttttccttgtgggggttacagctgcacgcatggaactgagcttcttcaaaagtgatcagtcatcaagttatgatgatgatgagtattcaaaaccatgctgtgatctctgcatgtgcacacgctcaatgcctcctcaatgcagctgtgaagatattaggctgaattcatgccactcagattgtaaga

SEQ ID NO: 122830 - DNA, 239 bp, Glycine max
gagacctacaaagtgagaacgaagaggaggatagtggagccattgtgacagtgaaaggaggtctaagagtcacagctccagccatgaggaagccacagcaagaagaagatgatgatgactgggaagagcagccacagtgcgtggagacagacaaaggttgctcacgccaaagcaaaaggagcagaaatggcattgatgagaccatttgcacaatgagacttcgccaaaacattggtcag

SEQ ID NO: 122831 - DNA, 234 bp, Glycine max
gtccggtgcgcccccggggcccttgaaaatccggaggaccgagtgcctcccacgcccggtcgtactcataaccgcatcaggtctccaaggtgaacagcctctggtcgatggaacaatgtaggcaagggaagtcggcaaaatggatccgtaacctcgggaaaaggattggctctgagggctgggcacgggggtcccagtcccgaacccgtcggctgtcggtggactgctcgagct

SEQ ID NO: 122832 - DNA, 239 bp, Glycine max
ccttaaacactcatcagtcatcaccatggctccgctagttttttccctttgttttctgcttttcagtggctgctccttcgctttcagttccagagagcagcctcagcaaaacgagtgccagatccaaaaactcaatgccctcaaaccggataaccgtatagagtcagaaggagggctcattgagacatggaaccctaacaacaagccattccagtgtgccggtgttgccctctctcgct

SEQ ID NO: 122833 - DNA, 237 bp, Glycine max
ggaatttactctccacattggaacttgaacgcgaacagtgtgctctatgtgactcgagggaaaggaagagttagagtggtgaactgccaagggaatgcagtgttcgacggtgagctacggaggggacaattgctagtggtgccgcagaactttgtggtggctgatcaagggggagaacacggattggaatacgtagtgttcaagacacaccacaacgccgtgagcagctacattaag

SEQ ID NO: 122834 - DNA, 242 bp, Glycine max
gcaagttgtttgagattaccccagagaaaaaccctcagcttcgggacttggatgtcttcctcagtgccgtggatatgaacgagggagctctttttctgccacacttcaattcaaaggccatagtggtactagtgattaatgaaggagaagcatacattgaacttgttggcattaaagaacaacaacagaggcagcaacaggaagagcaacctttggaagtgcggacatatagagctgaattg

SEQ ID NO: 122835 - DNA, 226 bp, Glycine max
cttattaacactttccttagttcaatatggggaagcccttcttcactctctctctttcttccctttgcttgctactcttgtcgagtgcatgctttgctattacctccagcaagttcaacgagtgccaactcaacaacctcaacgcgttggaacccgaccaccgcgttgagtccgaagtaggtcttattgaaacatggaactctcaacaccctgacctgcaattcgc

SEQ ID NO: 122836 - DNA, 226 bp, Glycine max
ccttagtccaatatggggaagcccttcttcactctctctcttacttccctttgcttgctactcttgtcgagcgcatgctttgctatcacctccagcaagttcaacgagcgccaactcaacaacctcaacgcgttggaacccgaccaccgcgttgagtccgaaggtggtcttattgcaacatggaactctcaacaccctgagctgcaatgcgccggtgtcactgttt

SEQ ID NO: 122837 - DNA, 269 bp, Glycine max; identical to SEQ ID NO: 103791

SEQ ID NO: 122838 - DNA, 258 bp, Glycine max
cttcttcttcttctttattttctcattttgccaaactaaaatagttgtgttggtagctttggcaaagatgttttcagcaggccataagatcaaagggacagtggtgttgatgcccaagaatgagttggaagttaaccctgatggctcagcagttgacaaccttaatgctttcttgggccgtagtgtctcccttcagctcattagtgctaccaaggctgatgcacatggaaaaggaaaagttggaaaggatacgttctt

SEQ ID NO: 122839 - DNA, 267 bp, Glycine max
  unsure (1)..(267): unsure at all n locations
gatcaacagaacgagggaagtattttcgcaataagcagagaacaggtgcgtgcgttggcccctaccaagaaaagctcttggtggccattcggtggcgaatccaagcctcaattcaatattttcagcaagcgtcccactatctccaacggatatggtcgtttaactgaagttggtcctgacgatgatgaaaagaattgngttcaaagactcaatctcatgcttacctttaccaacatcacccagagatctatgagtactattcactac

SEQ ID NO: 122840 - DNA, 267 bp, Glycine max
atatggggaagcccttcactctctctctttcttccctttgcttgctactcttgtcgagtgcatgctttgctattagctccagcaagctcaacgagtgccaactcaacaacctcaacgcgttggaacccgaccaccgcgttgagtccgaaggtggtttgattcaaacatggaactctcaacaccctgagctgaaatgcgccggtgtcactgtttccaaactcaccctcaaccgcaatggcctccacttgccatcttactcaccttatc

SEQ ID NO: 122841 - DNA, 266 bp, Glycine max
tgcgagtccaaattgttacatctgaaaagagttactggcatgtgtatgatcctgacaagtttcagatgtttgacaacagtgaaataggtctttattctaatcccactttggaagatatcccacattcagcttgggaccttttttgctgggacagtgagaaaactttgccaaataatttttctgcagaattgctctcttgcaaattggatactgttactggccaatattatcctgagtgggctccaattaattgtcgagttcatcga

SEQ ID NO: 122842 - DNA, 265 bp, Glycine max
tcctagtataccttaataaataatttaagatactatgatgagagcacggttcccattactgttgctgggacttgttttcctggcttcagtttctgtctcatttggcattgcttactgggaaaaagagaaccccaaacacaacaagtgtctccagagttgcaatagcgagagagactcgtacaggaaccaagcatgccacgctcgttgcaacctccttaaggtggagaaagaagaatgtgaagaaggtgaaattccacgaccacga

SEQ ID NO: 122843 - DNA, 265 bp, Glycine max
cttaattattaacacttccttatttcaatatggggaagcccttcactctctctctgtcttccctttgcttgctactcttgtcgagtgcatgctttgctattagctccagcaagctcaacgagtgccaactcaacaacctcaacgcgttggaacccgaccaccgcgttgagtccgaaggtggtttgattcaaacatggaactctcaacaccctgagctgaaatgcgccggtgtcactgtttccaaactcaccctcaagcgcaatgg

SEQ ID NO: 122844 - DNA, 268 bp, Glycine max
agaagagtgaaactgtggaagcagttgcagaccgagctagctagctagcaagcaagcacagagatggaggcaaagcgaggccatgccctcatgtgcttggcacgtgtttcactcttcctctgcgctctaaccctatccgctgctcacggaagcaccacggttcaagacatcgcgagaaagttgaaactcggggacaacgagcttctgcgcacggagaagaagttcaaggttttcatggagaattacgggaggagctactccacagagg

SEQ ID NO: 122845 - DNA, 265 bp, Glycine max
gtgattgttgtgactcgttcttcttcgtcgttatcttcttcttttgttgtttgtgtgtttgttttttctctcacctgaaaatgtcttgctgcggtggtaactgtggttgcggaagcgcctgcaagtgcggcaacggctgcggaggctgcaagatgtacccagacttgagctacaccgagtcaaccaccaccgagaccttggtcatgggagtcgcaccagttaaggctcaattcgagagtgctgaaatgggtgttcccgctgagaa

SEQ ID NO: 122846 - DNA, 266 bp, Glycine max
acacagtacacacactagaagaataatggcttccatcctccactactttttagccctctctctttcttgctcttttcttttcttcttatccgactcagtcacccctacaaaaccaataaaccttgttgttctacccgttcaaaatgatggttccacagggctccattgggccaacctccaaaaaagaacccctctaatgcaagtaccagtcctggtggacctcaatggaaatcacttgtgggttaactgtgagcagcagtactcat

SEQ ID NO: 122847 - DNA, 263 bp, Glycine max
atcggagtatccagagctgatccatgcaaactgccaacagattattactgtgctgcttcagagcatgaaggatgttccaaatgttgctgagaaggcttgtggtgctctttattttcttgcccaaggctatgaggatgctgcatctgcgtcctctccattgacccccttctttcaagatattgttcatgctcttctcactgtaactcacagagaggatgctggagaatcccgccttagaacagcagcctatgaagccttaaatg

SEQ ID NO: 122848 - DNA, 266 bp, Glycine max
ggtgctaaatctctagtaagtcgccatggtgatgtactcaagggagcctgactatccaaccaagtcttgccatgctagaggcgtcgaccttagggatcattttaagaacactagggagactgcctttgcaatcaggaagttgcccttggttaaagctacaaggtacttggaagactgacttacgcacacgcaggccattccgttcatacgtgtctgtcgaggtgtaggacaggacagctcaagcatggaatagacactcttgtggc

SEQ ID NO: 122849 - DNA, 263 bp, Glycine max
ctacaagtacttccttacaatcaaaaccaacaacaactatggcaagttatcaaaagcactacgatgatcagggtcgcaaggttgacgagtatggcaacgttgagaagcaaaccgacgaatacggcaaccctgttcatgctgctagtgtcacctatgtagccaccagaactgctgctggtggttacagtgatgacattaataagcaacatgataccaccaatgcctacggcgtagacactggtagacagcattctagtggtggc

SEQ ID NO: 122850 - DNA, 269 bp, Glycine max
cactcttcactcaaaactcttgtctttcattttgataattcccacactatggctgagcttcactaccaacaacaacaccaataccctcaccgataccctaatgatccatacgaacaacaaactagctactccactcaggtcgtcaaggcggccaccgccgtcaccgcgggcggctccctcttgatcctcgcctcgttgatccttgccggcaccatcatcgccctcaccatcgtcacaccaccgctcgtcatcttcagtccggttctcgt

SEQ ID NO: 122851 - DNA, 267 bp, Glycine max
ctccagcttcgttcgccaactcaacacctatggtttcagaaaggtggatccggatcggtgggagttcgcgaacgagtggttcctgcgaggacaaaagcacttattgaggaacatcgtgcggaagaagcacggtggagctgggaggaccaattccaattcgcattattcgcatcccttgaagctggaggagttggacgacgaggctatggtgatggagatagcgaggttgaaggaggagcaaaaagcgttggaggaagagcttcatga

SEQ ID NO: 122852 - DNA, 266 bp, Glycine max
ccagaagattcgtcacttcaatgaaggagacgtactagtgattcctcctggtgttccttactggacctataaactggcgatgaaccagttgttgccatcagtcttcttgacacctccaacttcaacaatcagcttgatcaaaaccccagagtattttaccttgctgggaacccagatatagagcacccagagatcatgcaacaacagcagcagcagaagagtcatggtggacgcaagcaggggcaacaccagcagcaggaggaaga

SEQ ID NO: 122853 - DNA, 267 bp, Glycine max
acaatatgtgtgcatatgggctcaatcctggtatttcaggttctcgtcttttgggcaccattcctcagtccatttcacagcaaactgtttggaatcaaatggcaacagtgagaacaccattgaattttgattctagcaagcagagcttttgtcaattttctattgaccttctcggtggaggaattttagtggacaaaactggagattggatcacacttatacaaaattctccaattagtaacttgttgagagttgctgcttggaaga

SEQ ID NO: 122854 - DNA, 264 bp, Glycine max
aaattttccagtggattcttggttaccaatttttgtgaattgtctttatcctgtaagtcaattaccttcagaagctgtcgttgtaaatgttacatgtggtagtggacgtggtggtttacccaccactgcttggattagttctgcagttaacaatcgctcctcagatatcaacaaaaagattcgcacagcacttgggaaaggtaagaaaattgtttttcttaccagagttgatccttttccagtagctttactggctgttctttt

SEQ ID NO: 122855 - DNA, 261 bp, Glycine max
gagaatataggaatataagaactaagatggattggatcggagcgtaccgcggaggccagagaagcagggactggtgcgacccttcatcaccattcactgatttgtgggaccctcgtcgtgtcggtgacgctgatgatatcacctcctctctcgcccatgctcacgttgactggcgtgagactgataaagctcatatcttccgtgctgatcttccaggggtgaagaaagaggatctgaaggtgcaggtggaggagaataaga

SEQ ID NO: 122856 - DNA, 264 bp, Glycine max
gcagaaatgatcaacagtctttgtgggtggctcctgaggataaggcgagtttatggtcacaacttcattatgtttcgtgtaataatctggaaatgcaagaagcttatcttgtcaatctcgtaaatgtgttacgagaattgtatttgcacagtccagaggaagctcgccaattgagaaggaaagctctctctcgtattgaatggctgcaaaaagctgatgtgcctaccatagcacagattgaagagttccattcgatgcagagga

SEQ ID NO: 122857 - DNA, 264 bp, Glycine max
gcaaaatgaccaagttcacaatcctcctcatctctcttctcttctgcatcgcccacacttgcagcgcctccaaatggcagcaccagcaagatagctgccgcaagcagctccagggggtgaacctcacgccctgcgagaagcacatcatggagaagatccaaggccgcggcgatgacgatgatgatgatgacgacgacaatcacattctcaggaccatgcggggaagaatcaactacataaggaggaacgaaggaaaagacgaag

SEQ ID NO: 122858 - DNA, 229 bp, Glycine max
ttaacactctccttagttcaatatggggaagcccttcttcactctctctctgtcttccctttgcttgctactcttgacgagtgcatgctttgctattacctccagcaagttcaacgagcgccaactcaacaacctcaacgcgttggaacccgaccaccgcgttgagtccgaaggtggtcttattgaaacatggaactctcaacaccctgagctgcaatgcgccggtgtc

SEQ ID NO: 122859 - DNA, 259 bp, Glycine max
atcctagtacaccgtattaaagaatttaagatatactatgatgagagcgcggttcccattactgttgctgggagttgttttcctggcatcagtttctgtctcatttggcattgcgtattgggaaaagcagaaccccagtcacaacaagtgcctccgaagttgcaatagcgagaaagactcctacagggaccaagcatgccacgctcgttgcaacctccttaaggtggaggaagaagaagaatgcgaagaaggtcaaatt

SEQ ID NO: 122860 - DNA, 262 bp, Glycine max
ctcaaaagtaaacactcaaaacacttggtattaatttgttcttcttattcttcaatttgttgtgcctctagttcttgtttctaagctaagaatatgtctggggtttgggttttcaagaacggtgtggtgaggctggtggagaaccctggctcagagcgcaaggtgttggttcacactgcaagcaacgaaatcatcacttcctatgcagtgttggagcacaagcttagctcactggggtgggagcgttactatgatgaccctg

SEQ ID NO: 122861 - DNA, 261 bp, Glycine max
cacaaatctgggtatagtggagtagtagggtttttgcgtttgagagagaagaagcatgagcaggagtttgggaattcaggtgaagctgctccacgaggcttcggggcacgtggtgacggtggagctcaagagcggagaactctacagaggaagcatgatcgagtgcgaggacaactggaactgtcaactcgagagcatcacctacactgccaaggatggcaaaacatcgcaacttgagcatgtgtttattcgaggcagcaa

SEQ ID NO: 122862 - DNA, 261 bp, Glycine max
cttccaagtgagacaccagcaccactagtcaaatatagagaagaagagttgcataatttaagaggagatggaactggagaacgcaaagagtgggaaaggatctatgattatgatgtctacaatgatttaggtgatccggataaaggtgaaaatcatgcccgtcctgttcttggaggaaatgacacctttccttatcctcgtagggggagaactggtagaaaaccaacaaggaaagatcctaatagtgagagtaggagcaat

SEQ ID NO: 122863 - DNA, 262 bp, Glycine max
cgacactgatgatgatcctcttcaaaacggtggcacatactatatgttgccagttatgagaggaaagggcggtggaatagaagtagattcaactggaaaagaaatatgccctctcactgttgtgcaatcacccaatgagctcgataaggggattggactagtctttacatctccattacatgccctttttatcgccgaagctatcctttgagcattaagtttggttcatttgcagttataacgctgtgtgccggcatgccta

SEQ ID NO: 122864 - DNA, 257 bp, Glycine max
gaagcaaagcaatggctacttcaaagttgagaacccagaatgtggttgtatctctctccctaaccttaaccttggtactggtgctactgaccagcaaggcaaactcagcggaaactgtttctttcagctggaacaagttcgtgccgaagcaaccaaacatgatcctccaaggagacgctattgtgacctcctcgggaaagttacaactcaataaggttgacgaaaacggcaccccaaaaccctcgtctcttggtcgc

SEQ ID NO: 122865 - DNA, 260 bp, Glycine max
atccaccaaaggatcagttaccaaatatttcttactgtattactagtcctcctacatggcctgaggccatacttcttggttttcaacattttcttgtgatgcttggcacaactgtgttgattcccactgctcttgttccccagatgggaggtggcaataatgagaaggcaagagttatcgaaaccctgctttttgtagctggtattaacacattgttgcaaacaatgtttggaactcgattgcctgcagtaattggaggg

SEQ ID NO: 122866 - DNA, 259 bp, Glycine max
cacaaagttctgcggcaccactagcaattgtcccctccttagctcaccgtcgaacactgcattaaggatgtgtttagggcaatcccttcggaggttctttccaattcttacaaccttggccagagtcaagtgcgtcactcaagtatcaaggaaactccggccctttggtcaacccataaataacaacaagcatatatgaaggtgtggtgaggccatcttatatgaaataatatcaaaatatattttgtgtaataataaa

SEQ ID NO: 122867 - DNA, 262 bp, Glycine max
cgcaatcttcactattttcaccgagcatttgcattccacattgaatatggtctaggctacacaatctaatgctgagttattggagtggcctaagaaagataagcgccgcttcctgcatgttgtgtatcgtgttggtgatcttgatcgcaccattaagttttatactgaatgttttgggatgaagcttttgaggaaaagagatattccagaagagaaatatgccaatgcttttcttggatttggccctgaacaatcccatttt

SEQ ID NO: 122868 - DNA, 264 bp, Glycine max
tttgttcctgagatgggaggcggtaaccagcctgccagggttagtctgattcaaatccccagcaaagaggaactcaggcagaagaaccttttcagtgtcagtgactgcaagatttactggcaaagcaatggagactaccttgctgttaatgtagagaggtacacgaaaacaaaaaaaagcacatacacaggctttgagcttttccgtataaaagaacgggatataccaattgaagttttggagcttgagaataagaatgataag

SEQ ID NO: 122869 - DNA, 257 bp, Glycine max
gctgatgcttatcagcctcatctaatagctccagaacaaggataccgtcgtctaattgaatcttctctaataacacttaggggccctgctgaggcagctgttgatgcggttcactccctgttaaaggacttggttcacaaagctatgagtgtgactttggacttgaagcagtatcctggtctccggcttgaggttggggctgtcactgttgattcactcgcaagaatgagggatgacgccggagagcaacactgcag

SEQ ID NO: 122870 - DNA, 136 bp, Glycine max
tcaactcgagcgaatcggctcgaggttcaatatctgagtataccttaataaataatttaagatactatgagcgagatcacggttcccattactgttgctgggacttggtttcctggcttcagtttctgtagcattt

SEQ ID NO: 122871 - DNA, 260 bp, Glycine max
ctttgctattggtattaatgccgagaacaaccagaggaacttcatcgcaggttcgcaagacaatgtgataagccagatacctagtcaagtgcaggagcttgcattccctgggtctgcacaagctgttgagaagctattaaagaaccaaagagaatcctactttgtggatgctcagcctaagaagaaagaggaggggaataagggaagaaagggtcctttgtcttcaattttgagggctttttactgaataagtatgtact

SEQ ID NO: 122872 - DNA, 250 bp, Glycine max
taacacttaccttagttcaatatggaggaagcccttcttcactctctctctttcttccctttgcttgctactcttgtcgagtgcatgctttgctattacctccagcaagttcaacaagagccaactcaacaacctcaacgcgttggaacccgaccaccgcgttgagtccgaaggtggtcttattgaaacatggaactctcaacaccctgagctgcaatgcgccggtgtcactgtttccaaacgcaccctc

SEQ ID NO: 122873 - DNA, 256 bp, Glycine max
tgaccaagttcacaatcctcctcatctctcttctcttctgcatcgcccacacttgcagcgcctccaaatggcagcaccagcaagatagctgccgcaagcagctccagggggtgaacctcacgccctgcgagaagcacatcatggagaagatccaaggccgcggcgatgacgatgatgatgatgacgacgacaatcacattctcaggaccatgcggggaagaatcaactacataaggaggaacgaaggaaaagacga

SEQ ID NO: 122874 - DNA, 196 bp, Glycine max
ctcatcagtcatcaccatggccaagctagttttttccctttgtattctgcttttcagtggctgctgcttcgctttcagttccagagagcagcctcagtataacgagtgccagatccaaaaactcaatgccctcaaaccggataaccgtatagagtcagaaggagggctcattgagacatggaaccctagcaacaag

SEQ ID NO: 122875 - DNA, 248 bp, Glycine max
gttcaatatcctagtacaccgtattaaagaatttaagatatactatgatgagagcgcggttcccattactgttgctgggagttgttttcctggcatcagtttctgtctcatttggcattgcgtattgggaaaagcagaaccccagtcacaacaattgcctccgaagttgcaatagcgagaaagactcctacaggaaccaagcatgccacgctcgttgcaacctccttaaggtggaggaagaagaagaa

SEQ ID NO: 122876 - DNA, 260 bp, Glycine max
tgtcaggaacaattcctaaggaacgcaaaacaataagatcatctagagacatgtatgctttcagtaggaattgttcctgacaccagctgatattgcgcagcaaccatcaacatcttgagagaagataagcgctgcatctctaagaaaaggtcttccatagccccccaaaaatgaagagcaccatcttctttgctctctttctcttttgtgccttcaccacctcatacctaccttcagccatcgctgatttcgtgctcgat

SEQ ID NO: 122877 - DNA, 125 bp, Glycine max
tctgtataccttgttgatctacattctcccatcttttcgcactgctgaaattaaatataagcggactcagagtaatattcagatttccggcttattgtacgacggcaggtacgaattccgcacaa

SEQ ID NO: 122878 - DNA, 249 bp, Glycine max
gtttgttgttcctcactgacctcaccatggcgaccataaaaaagctttcttagctatcttccttttctgtcttttagacttgatttcaaacctagccttgggcaaacttaaagaaaccgaggtcgaagaagatcccgagctcgtaacatgcaaacaccagtgccaacagcaacggcaatacactgagagtgacaagcgaacatgcttgtaacaatgtgacagtatgaagcatgagcgagatcaacaagt

SEQ ID NO: 122879 - DNA, 257 bp, Glycine max
aacttattaacactttccttagttcaatatggggaagcccttcttcactctctctctttcttccctttgcttgctactcttgtcgagtgcatgctttgctattacctccagcaagttcaacgagagccaactcaacaacctcaacgcgttggaacccgaccaccgcgttgagtccgaaggtggtcttattgaaacatggaactctcaacaccctgagctgcaatgcgccggtgtcactgtttccaaacgcaccctca

SEQ ID NO: 122880 - DNA, 256 bp, Glycine max
ggatttcattgcgatatcatttgtgtcactggatggactgccaccccaatgcaggatgttcaggttacaattgattggtttatttcctctcaggaatgtgttcccaggacctattgtgttttaaatccacaaaatccttttgttttaaataggtggatgggaaaattgactttcccccagggcacttcccgaagtgttaagagaatgcctctttctatagggggaggagctggtgcaaagaatgctattctcatga

SEQ ID NO: 122881 - DNA, 185 bp, Glycine max
gaaattttgataaaccgcgatcacaggttgccgcaccttaaaaccggaaacaaaagcaatcgttacttgatttcaagaatttctcaatttctttctacttctttgtgtacgatttcttaagggaaagaaaatcactctctgtgctggccacagacttcgtgaatcattttcttttccacacaaca

SEQ ID NO: 122882 - DNA, 245 bp, Glycine max
ccatattctatggaatggactggtttggccaatagattactgagtaatggcaacgatattctgtgttgcgattatgctagttttgatggtttgattaccaagcaagttatgagcaagatggcagaaatgatcaacagtctttgtggtggtgatgaaaaactgatgcgtgaaaggacacacctgctgttggcttgttgttcaaggatggcaatttgtaagaaagatgtttggagagttgaatgtgg

SEQ ID NO: 122883 - DNA, 180 bp, Glycine max
tgataaaccgcgatcacaggttgccgcaccttaaaaccggaaacaaaagcaatcgttacttgattacaagaatctctcaatttcttcctacttctttgtgtacaatttcttaagggaaagaaaatcactctctgtgctggccacagacttcgtgaatcattttcttttccacacaacata

SEQ ID NO: 122884 - DNA, 257 bp, Glycine max
cgtcgtcccgccggctcgttttgaggcgccgcgttacgaagccggcatcaaggcgccctcttccatttaccattccgagagaggtccgacgacctctcaggttctcgcagttgtcgccggccttccggtcggcggcatcctcctgctcctggcaggactgaccctggctggaactctcaccgggctggtggtggcaacaccgctcttcatcatcttcagcccgatgctgattccggccacggtcgcaattggcctgg

SEQ ID NO: 122885 - DNA, 257 bp, Glycine max
caaggaaaaccatttcttctgaagataaaccttttaacttgagaagccgcgaccccatctactccaacaagcttggcaagttctttgagatcaccccagagaaaaacccccagcttcgggacttggatatcttcctcagtattgtggatatgaacgagggagctcttcttctaccacacttcaattcaaaggcgatagtgatactggtaattaatgaaggagatgcaaacattgaacttgttggcctaaaagaacaa

SEQ ID NO: 122886 - DNA, 123 bp, Glycine max
tcctagtccaccgtattacagagttcaagatatactatgatgagagcgcggttcccatgactgttgctgcgagttgatcacctggcatccacgtctgtctcatctggcattgcgtattgggaa

SEQ ID NO: 122887 - DNA, 257 bp, Glycine max
gaacagcataatatacgcattgaatgggcgggcattggtacaagtggtgaattgcaatggtgagagagtgtttgatggagagctgcaagagggaggggtgctgatcgttccacaaaactttgcggtggctgcaaaatcccagagcgataactttgagtatgtgtcattcaagaccaatgatagaccctcgatcggaaaccttgcaggggcaaactcattgttgaacgcattgccagacgaagtgattcagcacactt

SEQ ID NO: 122888 - DNA, 254 bp, Glycine max
gctttgtcctcgggcctgtacttcagaaggagaggctcttgaaaagggctcaggcagaggctgaaggcacaactgttgaagctaagaagcctattgttgtgaagtatggtctcaaccatgttacctacctcatcgagcagaacaaagcacagctcgttgtgattgctcacgatgtggaccccattgaattggttgtctggcttcctgctttgtgcaggaagatggaaattccgtactgtattgtgaagggaaag

SEQ ID NO: 122889 - DNA, 244 bp, Glycine max
cttggttaccaatttttgtgaattgtctttatcctgtaagtcaattaccttcagaagctgtcgttgtaaatgttacatgtggtagtggacgtggtggtttacccaccactgcttggattagttctgcagttaataatcgctcctcagatatcaacaaaaagattcgcacagcacttgggaaaggtaagaaaattgtttttcttactagagttgatccttttccagtagctttactggctgttct

SEQ ID NO: 122890 - DNA, 254 bp, Glycine max
actcgagccgaatcggctcagctttgaacactcatcaccatggacaagcttgttctttcactttgtttccttcttttcaacggctgcttcgctctgagagagcaggcacagcaaaatgagtgccagatccaaaagctgaatgccctcaaaccggataaccgtatagagtcggaaggtgggttcattgagacctggaaccctaacaacaagccattccagtgtgccggtgttgccctctctcgctgcacccttaa

SEQ ID NO: 122891 - DNA, 254 bp, Glycine max
aaatgctgttctttcaatgtggagatattttgttggagatctcgtctttgaagtttctaagatgacttctccctacattaaatgtacagtctctttcttcatagcatttggaaatttggctgatgacaccatcaattttgaggcttttccccacaagctggtacagtttggagagattcaggaaaaagttgtattgaaattttcacaagaggaatttcttacagcttggtcaacccaggtgcgtcctgcaacaa

SEQ ID NO: 122892 - DNA, 272 bp, Glycine max
attgtctttgaacactcatcaccatggccaagcttgttctttccctttgtttccttcttttcagtggctgcttcgctctgagagagcaggcacagcaaaatgagtgccagatccaaaagctgaatgccctcaaaccggataccgtatagagtcggaaggtgggttcattgagacctggaaccctaacaacaagccattccagtgtgccggtgttgccctctctcgctgcacccttaaccgcaatgcccttcgtagaccttcctacaccaacg

SEQ ID NO: 122893 - DNA, 106 bp, Glycine max
atatcctagtacaccgtattaaagaatttaagatatactatgatgagagcgcggttcccattactgttactgggagttgttttcctggcatcagtttctgtctcat

SEQ ID NO: 122894 - DNA, 265 bp, Glycine max
gcggtttcctttgttggtgttgctgggaactgttttcctggcatcagtttgtgtctcattaaaggtgagagaggatgagaataaccctttctacttgagaagctctaacagcttccaaactctctttgagaaccaaacggtcgcattcgtctcctccagagattcaacaaacgctccccacaacttgagaaccttcgagactaccggattgtccagtttcagtcaaaacccaacacaatccttctcccccaccatgctgacgccg

SEQ ID NO: 122895 - DNA, 263 bp, Glycine max
tagcaaaatgaccaagttcacaatcctcctcatctctcttctcttctgcatcgcccacacttgcagcgcctccaaatggcagcaccagcaagatagctgccgcaagcagctccagggggtgaacctcacgccctgcagaagcacatcatggagaagatccaaggccgcggcgatgacgatgatgatgatgacgacgacaatattattatcaggaccatgcggggaagaatcaactacataaggaggaacgaaggaaaagacga

SEQ ID NO: 122896 - DNA, 261 bp, Glycine max
aagctttctagctggtcataatatcaccattactgatggtattgacaaaactagtgcaactttgcaatttagaaagttagcagattgtgattttctcaagagaaactttaggcagatgtctaatgttttgtgggtgctcctgaggacaaggcgagtttatggtcacaacttcattatgtttcatgtaataatctggaaatgcaagaagcttatcttgtcaatctcgtaaatgtgttacgagaattgtatttgcacagtcca

SEQ ID NO: 122897 - DNA, 258 bp, Glycine max
gctggtgcagtttggagagattcaggaaaaagttgtattgaaattttcacaagaggaatttcttacagcttggtcaactcaggtgcgtcctgcaacaactctgttggctgatgggtgcccatatttgtatgctatgtgcatgatagttcagtgtctacaataccaggtgattttgtcattggtgttaagttgacaaccataaacaatatgtgtgcatatgggctcaatcctggtatttcaggttctcgtcttttgggc

SEQ ID NO: 122898 - DNA, 257 bp, Glycine max
ctcagtcctacgatacgattctcttccgcctcccttcccttcaactccacggctcagatccgaggagtttgggaaaccctaattcattcctctttgcttcttctatctctattcctctaacaccagtgatggcagtttggctccagaaggatcgcagtttgatgctcggcaatatgattctaagatgaatgaattgctttccgccgatggacaagaatttttcacttcatatgacgaatctatgatagttttgatgc

SEQ ID NO: 122899 - DNA, 259 bp, Glycine max
accattcccacgcccacctcatcagaaggaagagcgaaagcaagaggaagatgaggatgaggagcagcagcgagagagcgaagaaagtgaagattctgagttacgaagacataagaataagaacccttttctcttggctctaacaggttcgaaactctcttcaaaaaccaatatggtcgcattcgcgtcctccagaggttcaaccaacgctccccacaacttcagaatctccgagactaccgcattttggagttcaact

SEQ ID NO: 122900 - DNA, 260 bp, Glycine max
ggtgctaaatccctagtaagccgccatggtgaagtactcaagggagcctgacaatccaaccaagtcttgcaaggctagaggcgccgaccttagggttcattttagagaacactagggaaactgcctttgcaatcagaagttgcccttagttaaagctaaaaggtacttggaagatgttcttgcgcacaagcaggccattccgttcagacgtttctgtcgtggtgttggaacgacagctcaagcatatattagacactcta

SEQ ID NO: 122901 - DNA, 262 bp, Glycine max
taccaagcaagttatgagcaagatggcagaaatgatcaacagtctttgtggtggtgatgaaaaactgatgcgtgaaaggacacacctgctgttggcttgttgttcaaggatggcaatttgtaagaaagatgtttgagagttgaatgtggaatcccttctggatttccgctcacagttatttgcaatagcatttttaatgagatgctcattagatatagctatgaaaaattactgcgtcaggctacagctccaagtatgtttt

SEQ ID NO: 122902 - DNA, 93 bp, Glycine max
ctcgagccgcgcgaacagcataatatacgcattgaatgggcgggcattggtacaagtggtgaattgcaatggtgagagagtgtttgatggaga

SEQ ID NO: 122903 - DNA, 257 bp, Glycine max
gtcctagtcgaccaagccaaggaaagcgtgtacaagaccaggaataggacgaggacgaagatgaagatgaagatgaacctcgcaagagccgcgaatggagatcgaaaaagacacaacccagaagacctagacaaaagaaccacgtgaaagaggatgcgagacaagaaacggggttgaggaaaatatctacaccttgaagcttcacgagaacattgctcgcccttcacgcgctgacttctacaaccctaaagctggtc

SEQ ID NO: 122904 - DNA, 254 bp, Glycine max
cgagaaaaggattaccgttcagaacgaagacagttccaaagatgagtacagagtttggaatcctttccgttcgaagttggccgctgccatccttggtggtgttgacaacatatggattaaacctggtgccagatcctttacctaggagctgcttccggcaccactgtttctcacgtatcagatgtttttggcccaactggagttgtctatgcagtagagttttcccatagaagtggtcgtgacttggtcatatg

SEQ ID NO: 122905 - DNA, 257 bp, Glycine max
atttggtggaaactcctaaggaatggcaactggatctaccttgtgataaaattcctagtgtcttgactataactgatgagagattggtaggcacagaacatgagggatatgatccttttcttggtggaattcaaaatatgtcactcccatgatgcccttagatgaagaaattctttctaaggttgcacaagatatggttgatgaatggtttgattgtgttgatgaggaggattcctttgaggaagtttctttaagtg

SEQ ID NO: 122906 - DNA, 257 bp, Glycine max
caaatgaccaagttcacaatcctcctcatctctcttctcttctgcatcgcccacacttgcagcgcctccaaatggcagcaccagcaagatagctgccgcaagcagctccaggggctgaacctcacgccctgcgaaagcacatcatggagaagatccaaggccgcggcgatgacgatgatgatgatgacgacgacaatcacattctcaggtccatgcggggaagaatcaactacataaggaggaacaaggaaaagacg

SEQ ID NO: 122907 - DNA, 261 bp, Glycine max
aagagccgcaagaatctcagcaacgaggacgaagccagaggccccaagaccgtcaccaaaaggtacatcgcttcagagagggtgatttgatcgcagtgcctactggtgttgcatggtggatgtacaacaatgaaacactcctgttgttgccgtttctattattgacaccaacagcttggagaaccagctcgaccagatgcctaggagattctatcttgctgggaaccaagagcaagagtttctaaaatatcagcagcagca

SEQ ID NO: 122908 - DNA, 93 bp, Glycine max
gtattaaagaatttaagatatactatgatgagagcgcggttcccattactgttgtctgggagttgttttcctggcataagtttctgtctcatt

SEQ ID NO: 122909 - DNA, 258 bp, Glycine max
gtagcttagcaatggctacttcaaagttgaaaacccagagtgtggttgcatctctctgcctaaccttaaccttggtactggtgctactgaccagcaaggcaaactcagcggaaactgtttctttcagctggacaagttcgtgccgaagcaaccaaacatgatcctccaaggagacgctattgtgacctcctcgggaaagttacaactcaataaggttgacgaaaacggcaccccaaaaccctcgtctcttggtcgcgc

SEQ ID NO: 122910 - DNA, 247 bp, Glycine max
cacaaatctgggtatagtggagtagtagggtttttgcgtttgagagagaagaagcatgagcaggagtttgggaattccggtgaagctgctccacgaggcttcggggcacgtggtgacggtggagctcaagacggagaactctacagaggaagcatgatcgagtgcgaggacaactggaactgtcaactcgagagcatcacctacactgccaaggatggcaaaacatcgcaacttgagcatgtgttta

SEQ ID NO: 122911 - DNA, 240 bp, Glycine max
gcgagagaaacaagtcgaagaggaaactcgcgagaaggaagaagaacatcaagagcagcatgaggaggaggaagaccaaaatccctacgtttttgaagaagataaggatttttcgaccagagtcgaaacagaggtggcagcattcgggttctcaagaagttcactgagaaatccaagcttcttcaaggcattgagaatttccgtttggccatcttagaagctagagcacacacgttcgtg

SEQ ID NO: 122912 - DNA, 255 bp, Glycine max
cgacactgatgatgatcctcttcaaaacggtggcacatactatatgttgccagttatgagaggaaagggcggtggaatagaagtagattcaactggaaaagaaatatgccctctcactgttgtgcaatcaccaatgagctcgataaggggattggactagtctttacatctccattacatgccctttttatcgccgaagcgtatcaatgagcattaagtttggttcatttgcagttataacgctgtgtgccggca

SEQ ID NO: 122913 - DNA, 251 bp, Glycine max
tccagtgtctttgaacactcatcaccatggtaaagcttgttctttccctttgtttccttctgttcagcagctacttcgctctgagagagcaggcacagcaaaatgagtgccagatccaaaagctgaatgcctcaaaccggataaccgtatagagtcggaaggtgggttcattgagacctggaaccctaacaacaagccattccagtgtgccggtgctgccctctctcgtttgtaccttaaccgcaatgccc

SEQ ID NO: 122914 - DNA, 259 bp, Glycine max
cttcacgattaggctctgggtgtgtgacacctgatggtctggggctggaatccaggttaggttctggctgtttgacacctgacagtgctgggccaatcaatcaaaacaacatctctgtgcaaaaccagatattaaggaagcaactcttgcagatacggacaatggacattcaagtaatgcaacattgattgatcacagagtttcatttgaattaaccggggaagatgttgcccgctgtcttgctaataaaaccggggta

SEQ ID NO: 122915 - DNA, 252 bp, Glycine max
cttaattattaacacttccttagttcaatatggggaagcccttcactctctctctttcttccctttgcttgctactcttgtcgagtgcatgctttgctattagctccagcaagctcaacgagtgccaactcacaacctcaacgcgttggaacccgaccaccgcgttgagtccgaagtggtttgattcaaacatggaactctcaacaccctgagctgaaatgcgccggtgtcactgtttccaaactgcacctc

SEQ ID NO: 122916 - DNA, 122 bp, Glycine max
caactaacaataattccttcacttgcagaacttagttctctgttgcatcatcatcatcttcattagtgttagccctaaacttcaccttcaaccatgaccacagtgccaccacacagtgtcca

SEQ ID NO: 122917 - DNA, 255 bp, Glycine max
gcaagatagctgccgcaagcagctccagggggtgaacctcacgccctgcgagaagcacatcatggagaagatccaaggccgcggcgatgacgatgatgatgatgacgacgacaatcacattctcaggacatgcggggaagaatcaactacataagggaggaacgaaggaaaagacgaagacgaagaagaagaaggacacatgcagaagtgctgcacagaaatgagcgagctgagaagccccaaatgccagtgcaa

SEQ ID NO: 122918 - DNA, 252 bp, Glycine max
gccaagtgaaagtgagaaaaaataaaaatcaaagagcataatgtcagggatcattcacaagattggggagacccttcatgtgggagggcacaagaaggaggaggagcataagggtgagcaccatgctgagaatacaaaggggagcaccatggtgaacacagtagtgagtacaaaggagagcatcatggtgaacacaaagctggagagtaccatggtgagcacaagccagagcacaaagaggggtcctagaca

SEQ ID NO: 122919 - DNA, 255 bp, Glycine max
gttcaatatcctagtataccttaataagtaatttaggatactatgatgagagcacggtttccattactgttgctgggaattgttttcctgggttcagtttctgtctcatttggcattgcttactggtaaaagagaaccccaaacacaacaagtgtctccagagttgcaatagcgagagagactcgtacaggaaccaagcatgccacgctcgttgcaacctccttaaggtggagaaagaagaatgtgaagaaggtg

SEQ ID NO: 122920 - DNA, 254 bp, Glycine max
gttcaatatcctagtatacctttataaataatttaagatactatgatgagagcacggttcccattactgttgctggtgtttgttttcctggcttcagtttctgtctcatttggcattgcttactgggaaaagagaaccccaaacacaacaagtgttctcagagttgcaatagcgagagaaactcgtacaggaaccaagcattccacgctcgttgcaacttccttaaggtggagaaagaggaatgtgaagaaggt

SEQ ID NO: 122921 - DNA, 254 bp, Glycine max
gttgacaaccataaacaatatgtgtgcatatgggctcaatcctggtatttcaggttctcgtcttttgggcaccattcctcagtccatttcacatcaaactgtttggaatcaaatggcaacagtgagacaccattgaattttgattctagcaagcagagcttttgtcagttttctattgaccttctcggtggaggaatcttagtggacaaaactggagattggatcacacttatacaaaattctccaatgagtaa

SEQ ID NO: 122922 - DNA, 174 bp, Glycine max
gatgagagtgcggtttcctttgttggtgttgctgggaactgttttcctggcatcagtttgtgtctcattaaaggtgagagaggatgagaataaccctttctacttgagaagctctaacagcttccaactctctttgagaaccaaaacggtcgcattcgtctcctccagagattc

SEQ ID NO: 122923 - DNA, 240 bp, Glycine max
caagttattatcaaataattaattaaattcctcgtggaatcttgttgaagccatgtctacagctggtcaggtcatcaagtacagagctgcggtggcatgggaagcagggaagccactatcgatagaaccatagaagtggcaccaccccagaaaggtgaagtgcgtttgaagatcctcttcaactccctttgccgtacagatgtttactggtgggatgctaagggccagactccgctgttt

SEQ ID NO: 122924 - DNA, 252 bp, Glycine max
ggccatagtgatactagtgattaatgaaggagatgcaaacattgaacttgttggcattaaagaacaacaacagaagcagaaacaggaagaggaacctttggaagtgcaaaggtacagagctgaattgctgaagacgatgtatttgtaattccagcagcttatccatttgtcgtcaacgctacctcaaacctcaatttccttgcttttggtatcaatgctgagaacaaccagaggaacttccttgcaggcgag

SEQ ID NO: 122925 - DNA, 252 bp, Glycine max
gatcaacctcgcaagagccgcgaatggagatcgaaaaagacacaacccagaagacctagacaagaagaaccacgtgaaagaggatgcgagacaagaaacggggttgaggaaaatatctgcaccttgagcttcacgagaacattgctcgcccttcacgcgctgacttctacaaccctaaagctggtcgcattagtaccctcaacagcctcaccctcccagccctccgccaattccaactcagtggccaatatg

SEQ ID NO: 122926 - DNA, 253 bp, Glycine max
cccaccccacttacatacacattctcccactcctccgagccggtcgagttgaatcggtgagtcagtgaccgagttgaaccatgtcggacgaagagcaccatttcgaatccaaggccgatgccggagctccaagacctatcctcagcaggccggaaccatccgcaaaaacggctacatcgtcatcaagggtcgtccctgcaaggttgttgaagtttctacttccaagactggtaagcacggccatgctaagtgt

SEQ ID NO: 122927 - DNA, 189 bp, Glycine max
gtgaactcgagccgttgaaattttgataaaccgcgatcacaggttgccgcaccttaaaacctgaaacaaaagcaatcgttacttgatttcaagaatctctcaatttcttcctacttctttgtgtacgatttctaagggaaagaaaatcactctctgtgctggccacagacttcgtgaattcttttcttt

SEQ ID NO: 122928 - DNA, 254 bp, Glycine max
cattgtctttgaacactcatcaccatggccaagcttgttctttccctttgtttccttcttttcagtggctgcttcgctctgagagagcaggcacagcaaaatgagtgccagatccaaaagctgaatgcctcaaaccggataaccgtatagagtcggaaggtgggttcattgagacctggaaccctaacaacaagccattccagtgtgccggtgttgccctctcttgttgcacccttaaccgcaatgcccttcgt

SEQ ID NO: 122929 - DNA, 256 bp, Glycine max
ccgcacgaatatcttgttgtttggagcgatccgagaaaaactctgtaaacatgttggtttaccaggacctccttacaggtgatgagcttctctctgactccttccgttacaaggaaattgagaatggaagctgtgggaagttgaggggaagtgggttgttaaaggagcagttgatgtagacattggtgcaaacccttctgctgagggtggaggagaagatgagggagttgatgatgcagctgttaaggttgttgac

SEQ ID NO: 122930 - DNA, 254 bp, Glycine max
cgcaaagtttttgataaacctaagacgcgctgcttcactattctccctatggagtttaatcttgtggttcgtcagaagtttttaaattttgtgaggttcattatgaagaaaagggacaagcttagtgtcaagttggaatcaacccatattctatggaatggactggtttggccaatagattactgagtaagggcaacgatattctgtgttgcgattatgctagtgttgatggtttgattaccaagcaagttatg

SEQ ID NO: 122931 - DNA, 255 bp, Glycine max
cgtcgtcccgccggctcgttttgaggcgccgcgttacgaagccggcatcaaggcgccctcttccatttaccattccgagataggtccgacgacctctcaggttctcgcagttgttgccggccttccatcggcggcatcctcctgctcctggcaggactgaccctggctggaactctcaccgggctggtggtggcaacaccgctcttcatcatcttcagcccggtgctgattccggccacggtcgcaattggcctg

SEQ ID NO: 122932 - DNA, 240 bp, Glycine max
taatgctgttctttcaatgtggagatattttgttggagatctcgtctttgaagtctctaagatgacttctccctacattaaatgtacagtgctcttgcttcatagcattttgaaattgtgctgatgcaccatcaattttgaggcttttccccacaagctggtacagtttggagagatttagtaaaaagttgtattgaaattttcacaagaggaatttcttacagcttggtcaacccaggt

SEQ ID NO: 122933 - DNA, 247 bp, Glycine max
aattaagcttcctacagaagtaattagcacaattatgcccttaccggtggttaaagaactctttcgtacagatggtgaacaaatcctcaagtttccaccacctcatgtccctcaagtgagtaagttgcatggatgaccgatgaagaatttgcaagagagatggttgcgggtgtaaatccatgcgtaattcgtggtcttcaagagtttcctccaaaaagcaatctggatcctacaatctatggtgagc

SEQ ID NO: 122934 - DNA, 248 bp, Glycine max
gttcccaggacctattgtgttttaaatccacaaaatccttttgtgttaaataggtggatgggaaaattgactttcccccagggcacttcccgaagtgttaagagaatgcctctttctataggggaggagctggtgcaaagaatgctattctcatgaatatgccaaatgctgttctttcaatgtggagatattttgttggagatctcgtctttgaagtttctaagatgacttctccctacattaaatgt

SEQ ID NO: 122935 - DNA, 249 bp, Glycine max
caatacaatgaggttcaggctcagatggaaacaaatttgtttaaattgtctcttgatgatgttgaaactcctaaaggttccatgttggatcttaaaatttctcaatctaaaattgtacttcccaaaacacagttggaggaaccattctgcgtagtgacctattggcaaattttttgacagagggcaattttagagcaagtgttgatttgcagcgcactcatcgtatcaaaggaatgattaaaatggtgg

SEQ ID NO: 122936 - DNA, 244 bp, Glycine max
cacaaacaaattgttggtttccatgttgctggaagcataggaagactgggatatgcttcattgataccatatgttgagccagttgtgcaagctcaaagtgctgcattttacttcgacttcttcctgtggaggttgatagtcaagagggagttgctcacattggtgaattgaaatctggtgtctatgttccactgcctacacaactcaatttggtggaactcccaaggaatggcaactggatcta

SEQ ID NO: 122937 - DNA, 261 bp, Glycine max
agcttagttgtcaagttggaatcaacccatactccatggaatggactggtttggccaatagattactgagtaagggcaacgatattctgtgttgcgattatgctagttttgatggtttgattaccaagcaagttatgagcaaaatggcagaaatgataaacagtctttgtggtggtgatgcaaaattgatgcgtgaaaggacacacctgctgttggcttgttgttcaaggatggcaatttgtaagaaagatgttggagagt

SEQ ID NO: 122938 - DNA, 261 bp, Glycine max
accagtgttgaagaggcttacaacaagctaacagttgaacttgagaaaagtgttcctacattggttggcattgaatgtcccaaggatgaaaaacttcctcgtcgcaaagtttttgataaacctaagacgcgctgcttcactattctccctatggagtttaatcttgtggttcgtcagaagtttttaaattttgtgaggttcattatgaagataagggacaagcttagttgtcaagttggaatcaacccatattctatggaa

SEQ ID NO: 122939 - DNA, 258 bp, Glycine max
ggccagaaaaattcccagtgaaattgataagagtgtaaatggtgaacatcaagcagaagaaaatagtaatgacctcatatgggctgatccagtttcatgctgttatgcactgtatgcaaagttgaaccccgatacagttctcttgcagcaatcacctttagcccttgcaaaagctttaaagaactcggtggagttggatgggttaaaaaaggcacatattcgggatggtgcagcagttgtgcaatatcttgtctggct

SEQ ID NO: 122940 - DNA, 244 bp, Glycine max
ctcagacaaggatattaaagagagagagaaaaaaaatgatggaggttgtgattgttgcaattgctgctacacttgggaatcttctgatgggatgggatagttcaactattgcagcgggtatgacctacatcaagaaggaatttgtcttggatgccacacttgaagggctaatcgtgtccatgtcgtttataaccggcaccattgtgacattattctcagggacagtttctgatttggttggaag

SEQ ID NO: 122941 - DNA, 259 bp, Glycine max
ctacaagtacttccttacaatcaaaaccaacaacaactatgagcagttatcaaaagcactacgatgatcagggtcgcaaggttgacgagtatggcaacgttgagaagcaaaccgacgaatacggcaaccctgttcatgctgctagtgtcacctatgtagccaccagaactgtctgctggtggttacagtgatgacattaataagcaacatgataccaccagtgcctacggcgtagacactggtagacagcatctagtgg

SEQ ID NO: 122942 - DNA, 256 bp, Glycine max; identical to SEQ ID NO: 110922

SEQ ID NO: 122943 - DNA, 255 bp, Glycine max
cattggtccttaaacactcatcagtcatcaccatggccaagctagttttttccctttgttttctgcttttcagtggctgctgcttcgctttcagttccagagagcagcctcagcaaaacgagtgccagatccaaaaactcaatgccctcaaaccggataaccgtatagagtcagaaggagggctcattgagacatggaaccctaacaacaagccattccagtgtgccggtgttgccctctctcgctgcaccctca

SEQ ID NO: 122944 - DNA, 254 bp, Glycine max
acgagtgccaactcaacaacctcaacgcgttggaacccgaccaccgcgttgagtccgaaggtggtcttattgaaacatggaactctcaacaccctgagctgcaatgcgccggtgtcactgtttcacaacgcaccctcaaccgcaacggcctccacttgccatcttactcaccttatccccaaatgatcattgtcgttcaagggaagggagcaattggatttgcatttccgggatgtcctgagacgtttgagaag

SEQ ID NO: 122945 - DNA, 256 bp, Glycine max
gttgtggatatgaacgagggagctctttttctgccacacttcaattcaaaggccatagtggtactagtgattaatgaaggagaagcaaacattgaacttgttggcattaaagaacaacaacagaggcagcaacaggaagagcaacctttggaagtgcggaaatatagagctgaattgtctgaacaagatatatttgtaatcccagcaggttatccagttgtggtcaacgctacctcagatctgaatttctttgctt

SEQ ID NO: 122946 - DNA, 257 bp, Glycine max
ctctgatgttgctttgttttctgtgacttacttgctctaccgtgttgcaactatgaaagggttggtttggctgctatgtgtttatggggtgccattgctcattgtgaacggttttcttgtgaccatcacatatctgcagcacacacactatgccttgcctcactatgattcatcagaatgggattggctgaggggtgctttggcaactatggacagagattatggaattctgaacaaggtgtttcaccacataactg

SEQ ID NO: 122947 - DNA, 260 bp, Glycine max
gcccagagaatcccagctggaaccacttactatttggttaaccctcacgaccaccagaatctcaaaataatcaaacttgccatacccgtcaacaaacctggcagatatgatgatttcttcttatctagcactcaagcccaacagtcctacttgcaaggcttcagccataatattctagagacctccttccatagcgaattcgaggagataaacagggttttgtttggagaggaagaggagcagaggcagcaagagggagt

SEQ ID NO: 122948 - DNA, 258 bp, Glycine max
cgagagttctaaagcctctccctgcaggtgttgaaatcgatgaactccctaagcaaattgatgatacacagtacccaaaaacattcttctataaagaagaccttcatccaggcaaaacaatgaaagtacaattcaccaagcgtccctatgcacaaccttatggtgtatatacatggttaacggatattaaagacacctctaaagaaggatatagttttgaagagatatgcatcaagaaagaagcgtttgagggagaag

SEQ ID NO: 122949 - DNA, 255 bp, Glycine max
  unsure (1)..(255): unsure at all n locations
gaaattttgataaaccgcgatcacaggttgccgcaccttaaaaccggaaacaaaagcaatcgttacttgatttcaagaatttctcaatttctttctacttctttgtgtacgatttcttaagggaaagaaaatcactctctgtgctggccacagacttcgtgaatcattttcttttccactcttcgtttaattttcgnacactctcctatttgatataggacttcgtgtcagatttaaacttcttctgtttctttc

SEQ ID NO: 122950 - DNA, 255 bp, Glycine max
aggccatagtgatactagtgattaatgaaggagatgcaaacattgaacttgttggcattaaagaacaacaacagaagcagaaacaggaagaggaacccttggaagtgcaaaggtacagagctgaattgtctgaagacgatgtatttgtaattccagcagcttatccatttgtcgtcaacgctacctcaaacctcaatttccttgcttttggtatcaatgctgagaacaaccagaggaacttccttgcaggcgaga

SEQ ID NO: 122951 - DNA, 244 bp, Glycine max
ctgatctagcataacgcgcattatagaaccccgccagctacagagcaattgttataccaactaatgcgaacccgtgtactgatgcatgaaatttggactttttgaagcgtaccggatttcactgtgagatcatttgtgtcactgcatggactgccaccccaatggatgaggttcaggttacaaacctttcgttaatttcctctcaggaacttcttcccatgacttgccgagtgttcaatcccca

SEQ ID NO: 122952 - DNA, 222 bp, Glycine max
tgtttttacaatctttcaaaaattttgtttctttgtgtgtgtatggtgatgataacttaattagtgttcatgaatatgtcaagccttactttagtggttctaaattgaaaagctttctagctggtcataatatcaccattactgatggtattgacaaaactagtgcaactttgcaatttagaaagttagcagattgtgattttctcaagagaaactttaggc

SEQ ID NO: 122953 - DNA, 256 bp, Glycine max
gaaacataccgaatgagagcatcaaactcttcttcttcgatttccattgcgaacgttactttttcttcttctttctcttcattttcttcgctcttcgatcttcgtccggggactgctccgaataccaccaccaccactcgccgatggccacgatcggaggcttacacgactcccaaggctctcaaaacagcgtcgaaaccgaagccctcgctcgattcgccgtagacgaacacaacaagaagcagaattcgcttct

SEQ ID NO: 122954 - DNA, 247 bp, Glycine max
tatgccagctttttctgttccacaggctactgccagatcttctgaaaatgcggaatcctctgcatgatctggaatttgtgttttcttttgcttgttcgtttgtttaattcaataaaggaaattaggcatgaccctcttgttgagtatgctctgcctatttgaaaatttccacacctcttttaattatcgtaatgatgtgtgaagtgtgtgttattttaaaaaaaaaaaaaaaaaaaaaaaggggggg

SEQ ID NO: 122955 - DNA, 252 bp, Glycine max
  unsure (1)..(252): unsure at all n locations
tctncaccgattcggctcagagcaaaatgaccaagttcacactcctcctcatctctattctcttctgcatcgcccacacttgcagcgcctccaaatggcagcaccagcaagatagctgccgcaagcagctccagggggtgaacctcacgccctgcgagaagcacatcatggagaagatccaaggccgcggcgatgacgatgatgatgatgacgacgacaatcacattctcaggaccatgcggggaagaatca

SEQ ID NO: 122956 - DNA, 253 bp, Glycine max
actaaggaggagtacaatgaattctacaagaaaacttttaatgaatacctggagccattagcatcatcacactttaccacagagggtgaggtagaatttagatctatactttatgttcctgccttcgctccctctggaaaggatgacataatcaatcccaagaccaagaatataagactttttgtgaagagagtgttcatttcagatgattttgatggagaactgtttccccgatacttaagctttgtcaaag

SEQ ID NO: 122957 - DNA, 252 bp, Glycine max
cgacactgatgatgatcctcttcaaaacggtggcacatactatatgttgccagttatgagaggaaagggcggtggaatagaagtagattcaactggaaaagaaatatgccctctcactgttgtgcaatcacccaatgagctcgataaggggattggactagtctttacatctccattacatgccctttttatcgccgaagctatcctttgagcattaagtttggttcatttgcagttataacgctgtgtgcc

SEQ ID NO: 122958 - DNA, 250 bp, Glycine max
cggagaagtatcagatctggagcaggacaatagcgatgggagcgatcgcgtgtgtacagctgagccgagcggcatcagcagatgacgtcgatgtgctctctgacgacaagttcgagaaggaagttggtcaggacagaggagctctcgtggagttctatgctccttggtgtggacactgcaaaaagcttgctccagaatatgaaaagcttggtagcagcttcaagaaagccaaatctgttttaatcggcaa

SEQ ID NO: 122959 - DNA, 254 bp, Glycine max
attaataaagatgagtttgaagaacaacatggtggtgctaaaggtgtgtttgttgcttcttttccttgtgggggttacagctgcacgcatggaactgagcttcttcaaaagtgatcagtcatcaagttatgatgatgatgagtattcaaaaccatgctgtgatctctgcatgtgcacacgctcaatgcctcctcaatgcagctgtgaagatattaggctgaattcatgccactcagattgtaagagctgtatgt

SEQ ID NO: 122960 - DNA, 236 bp, Glycine max
  unsure (1)..(236): unsure at all n locations
cacacacacacactaagaataatggcttctatcctccactactttttagccctctctctttctttctctttccttttcttcttatccgactccgtccccattccccaacaccacactaaccctacaatacctataaaccttctggttctacccgttcaaaatgatgcttccacagggctccatgctctcnacctccaaaaaaggacccctctaatgcaagtaccagtcctggtgga

SEQ ID NO: 122961 - DNA, 253 bp, Glycine max
cgacactgatgatgatcctcttcaaaacggtggcacatactatatgttgccagttatgagaggaaagggcggtggaatagaagtagattcaactggaaaagaaatatgccctctcactgttgtgcaatcacccaatgagctcgataaggggattggactagtctttacatctccattacatgcccattttatcgtcgaagctatcctttgagcattaagtttggatcatttgcagttataacgctgtgtgccg

SEQ ID NO: 122962 - DNA, 252 bp, Glycine max
ttgggaatctttttcctaacattgagacaaacttatgttaagggtaaggcaagttccatggcagcaccagcccttagccctgaaccaggatgggaggttcttgatgcatgtgcagcaccgggaaacaaaactgttcaccttgctgcccttatgaagagaaagggtaagattatagcatgtgagctgcaaagagaaaggattaagcgtttgaaagacactataaagctatctggtgcttctaacatacaagtc

SEQ ID NO: 122963 - DNA, 270 bp, Glycine max
  unsure (1)..(270): unsure at all n locations
caactttgtttaaattgtctcttgatgatgttgaaactcctaaaggttccatgttggatcttaaactttctcagtctaaaattgcacttcccaagaacacagttggacggaactattctgcgtagnntgatctattggcaaattttgcctgacagagggcaatgtcttagagcaagtgcttgatcttgcagcgcactccatncgtnattaacaggaatgatctaaacatggtggccacagnttggtattcctgcagaatacaggtatatc

SEQ ID NO: 122964 - DNA, 251 bp, Glycine max
atcatacatagtagtgttggtgggttgcaaagatgcttgggggtcttctccataggggtcataagataaaagggacagtggtgttgatgcgcaagaatgtgttggacgtgaatagcgtaaccagcgttgggggaattattggtcaaggtctcgacttagttggctcaacactcgatactcttactgccttcttgggccgatccgtgtctctccagcttattagtgctaccaaagctgatgccaacggaaaa

SEQ ID NO: 122965 - DNA, 248 bp, Glycine max
ggattggatcggagcgtaccgcggaggccagagaagcagggactggtgcgacccttcatcaccattcactgatttgtgggaccctcgtcgtgtcggtgacgctgatgatatcacctcctctctcgcccatgctcacgttgactggcgtgagactgataaagctcatatcttccgtgctgatcttccaggggtgaagaaagaggatctgaaggtgcaggtggaggagaataagatcctgcagataagcg

SEQ ID NO: 122966 - DNA, 252 bp, Glycine max
ctagtataccttaataaataatttaagatactatgatgagagcacggttcccattactgttgctgggacttgttttcctggcttcagtttctgtctcatttggcattgcttactgggaaaaagagaaccccaaacacaacaagtgttctgcagagttgcaatagcgagagagactcgtacaggaaccaagcatgccacgctcgttgcaacctccttaaggtggagaaagaagaatgtgaagaaggtgaaatt

SEQ ID NO: 122967 - DNA, 251 bp, Glycine max
caacatcaagggaaagtgaaaaagaaaggtatatttgatcagggatatggcaactcgaagatatgagtttggaaggatgaatgaggctagccacccagactccatcagagctgccttggctgaattcctctccacttgcatctttgtctttgctggagaaggctctgcccttgctttgcgacaaatttacaaggaaccagggtcatcagcgggtgagctagtggtaattgcactagctcatgcatttgctc

SEQ ID NO: 122968 - DNA, 245 bp, Glycine max
cacttattaacactttccttaggtcaatatggggaagttttcttcactctctctctttcttccctttgcttgctactcttgtcgagtgcatgctttgctattacctccagcaagttcaacgagtgccaactcaacaacctcaacgcgctggaacccgaccaccgcgccgagtccgaagtggtcttattgaaacatggaactctcaacaccctgagctgcaatgcgccggtgtcactgtttccaaa

SEQ ID NO: 122969 - DNA, 252 bp, Glycine max
gaccaagttcacaatcctcctcatctctcttctcttctgcatcgcccaaacttgcagcgccttcaaatggcagcaccagcaagataactgccgcaagcagctccagggggtgaacctcacgccctgcgagaagcacatcatggagaagatccaaggccgcggcgatgacgatgatgatgatgacgacgacaatcacattctcaggaccatgcggggaagaatcaactacataaggaggaacgaaggaaaaga

SEQ ID NO: 122970 - DNA, 251 bp, Glycine max
gttcaatatcctagtacaccgtattaaagaatttaagatatactatgatgagagcgcggttcccattactgttgctggaagttgtcttcctggcatcagattctgtctcatttggcattgcgtattgggaaaagcagaaccacagtcacaacaagtgcaaccgaagttgcaatagcgagaaagactcctacaggaaccaagcatgccacgctcgttgcaacctccttaaggtggaggaagaagaagaatgc

SEQ ID NO: 122971 - DNA, 249 bp, Glycine max
  unsure (1)..(249): unsure at all n locations
aaaccgcgatcacaggttgccgcaccttaaaaccggaaacaaaagcaatcgttacttgatttcaagaatttctcaatttctttctacttctttgtgtacgatttcttaagggaaagaaaatcactctctgtgctggccacagacttcgtgaatcattttcttttccacttttagtttatttcttgaacnactctccaattgatataggacttcgtgtcagatttaaacttcttctgttctttctcaggt

SEQ ID NO: 122972 - DNA, 250 bp, Glycine max
aaaattcttccaccaagttatgggttcccttgtgttgcttcttttctccctcttaggtctctcttctagttccagcatatcaactcatcgttccatattggaccttgacctaaccaagtttaccacacagaaacaggtgtcttcactgttccaactatggaagagtgagcatggacgtgtctaccataaccacgaagaagaggcaaagagacttgagattttcaagaataacttgaactatatcagggac

SEQ ID NO: 122973 - DNA, 232 bp, Glycine max
gtggtagtagacaaggcgagcttatggtcacaacttcattatgtttcgtgtaataatctggaaatgcaagaagcttatcttgtcaatttcgtaaatgtgttacgagaattgtatttgcacagtccagaggaagctcgccaattgagaaggaaagctctctctcgtattgaatggctgcaaaaagctgatgtgcctaccatagcacagattgaagagttccattcgatgcaga

SEQ ID NO: 122974 - DNA, 250 bp, Glycine max
aattaatgttcgagctatctagatcggatccgatgtgaaacaataatttgcgaggtagacagacagaggcggcagcaaataagaatggcttcaaatcccaaacctttgacttttgaggaggtggctaatcacaacaacaaaaaggattgctggattattatcaatggaaaggtgtatgatatcacgccatttctggatgagcatcctggaggagatgaagttttggtaacgtcaacagggaaggatgcca

SEQ ID NO: 122975 - DNA, 250 bp, Glycine max
catcactgaaggaaattatgtcagaaagcaagatgtcagcattgaatatgatgcatgtacaattccaaatgattgtggttcattggttgttgccaaggttggaaatcacaaacaaattgttggtttccatgttgctggaagcaaaggaagactgggatatgcttcattgataccatatgttgagccagttgtgcaagctcaaagtgctgcagtttactttgacttcttccctgtggaggttgatagtcaa

SEQ ID NO: 122976 - DNA, 249 bp, Glycine max
caagattttgaaattgctggtaatactcttatgccagctttttctgttccacaggctactgccagatcttctgaaaatgcggaatcctctgcatgatctggaatttgtgttttctttcatttgtccgtttgtttaattcaataaaggaaattaggcatgaccctcttgttgagtatgctctgcctatttgaaaatttccacacctcttttaattgtcgtaatgatgtgtgaagtgtgtgttattttaaa

SEQ ID NO: 122977 - DNA, 244 bp, Glycine max
aagaatttaagatatactatgatgagagcgcggttcccattactgttgctgggagttgttttcctggcatcagtttctgtctcatttggcattgcgtattgggaaaagcagaaccccagtcacaacaagtgcctccgaagttgcaatagcgagaaagactcctacaggaaccaagcatgccacgctcgttgcaacctccttaaggtggaggaagaagaagaatgcgaagaaggtcaaattccac

SEQ ID NO: 122978 - DNA, 248 bp, Glycine max
aaattcttccaccaagttatgggttcccttgtgttgcttcttttctccctcttaggtctctcttctagttccagcatatcaactcatcgttccatattggaccttgacctaaccaagtttaccacacagaaacaggtgtcttcactgttccaactatggaagagtgagcatggacgtgtctaccataaccacgaagaagaggcaaagagacttgagattttcaagaataacttgaactatatcaggga

SEQ ID NO: 122979 - DNA, 248 bp, Glycine max
cccaccccacttacatacacactctcccactcctccgagccggtcgagttgaatcggtgagtcagtgaccgagttgaaccatgtcggacgaagagcaccatttcgaatccaaggccgatgccggagcctccaagacctatcctcagcaggccggaaccatccgcaaaaacggctacatcgtcatcaagggtcgtccctgcaaggttgttgaagtttctacttccaagactggtaagcacggccatgct

SEQ ID NO: 122980 - DNA, 212 bp, Glycine max
  unsure (1)..(212): unsure at all n locations
cccaaacagtctacagtttttgacattctcttgggaatttctcaagattttgaaattgctggtaatactcttatgccagcattttcagaagatctggcagtagcctgttgaacagaaaaagctggcataagagtattaccagctttttctgttccacaggctactgccagatcttctgaaaatgcggaagtntctgcatgatctggaatttg

SEQ ID NO: 122981 - DNA, 249 bp, Glycine max
taagatttgaaattttgataaaccgcgatcacaggttgccgcaccttaaaaccggaaacaaaagcaatcgttacttgatttcaagaatttctcaatttctttctacttctttgtgtacgatttcttaagggaaagaaaatcactctctgtgctggccacagacttcgtgaatcattttcttttccacacaacatacgatttcagaacactctcctatttgatataggacttcgtgtcagatttaaactt

SEQ ID NO: 122982 - DNA, 246 bp, Glycine max
cgtcgtcccgccggctcgttttgaggcgccgcgttacgaagccggcatcaaggcgccctcttccatttaccattccgagagaggtccgacgacctctcaggttctcgcagttgtcgccggccttccggtcggcggcatcctcctgctcctggcaggactgaccctggctggaactctcaccgggctggtggtggcaacaccgctcttcatcatcttcagcccggtgctgattccggccacggtcgc

SEQ ID NO: 122983 - DNA, 248 bp, Glycine max
agaaagtcttccatagccccccaaaaatgaagagcaccatcttctttgctctctttctcttttgtgccttcaccacctcatacctaccttcagccatcgctgatttcgtgctcgataatgaaggtaaccctcttgaaaatggtggcacatattatatcttgtcagacataacagcatttggtggaataagagcagctccaacgggtaatgaaagatgccctctcactgtggtgcaatctcgcaatgag

SEQ ID NO: 122984 - DNA, 176 bp, Glycine max
aacactttccttagttcaatatggggaagcccttcttcactctctctctttcttccctttgcttgctactcttgtcgagtgcatgctttgctattacctccagcaagttcaacgagtgccaactcatcaacctcaacgcgttggaacccgaccaccgcgttgagtccgaggtggtc

SEQ ID NO: 122985 - DNA, 158 bp, Glycine max
aggctcgaggtggaggcaactccggttgaggcagggcgaacagtgcaattaaggagaatgccataacaataggagaggcattggaggcgacggcacagactgagggtcagaaagcggtggatcagagtgacgcctccgcgattcaggcggcggaggtg

SEQ ID NO: 122986 - DNA, 247 bp, Glycine max
gatcaagatggcagaaatgatcaacagtctttgtggtggtgatgaaaaactgatgcgtgaaaggacacacctgctgttggcttgttgttcaaggatggcaatttgtaagaaagatgtttggagagttgaatgtggaatcccttctggatttccgctcacagttatttgcaatagcatttttaatgagatgctcattagatatagctataaaaaattactgcgccaggctaaagctccaagtatgttt

SEQ ID NO: 122987 - DNA, 247 bp, Glycine max
tagactagttcaatatcctagtataccttaataaataatttaagatactatgatgagagcacggttcccattactgttgctggtacttgttttcctggcttcagtttctgtctcatttggcattgcttactgggaaaaagagaaccccaaacacaacaagtgtcaccagatctgcaatagcgagagagactcgtacaggaaccaagtctgccacgctcgttgcaacctccttaaggtggagaaagaa

SEQ ID NO: 122988 - DNA, 246 bp, Glycine max
aaagaagaaggctaatgatcacccttcaaaagaagggtccaaaccttatagcagatttgaagttgttgctgctcatatatggagatgtgcaactatggctcgtgctgaatctggtgagaattcaaaccaaccaattctagttcggtttagtgttaattttcgcaatagattgaaaccacctctccctcagaattattttgggaatgctttggcaaaagtagcgacacctgaatgttatgagggaga

SEQ ID NO: 122989 - DNA, 245 bp, Glycine max
tctagacaagatctccatatctgttcccaaaagcttgtttgtaagaatggcttccggtgaacagaaattccctcctcaacaacaacaaacacagcctgggaaggagcatgctatgactccagtaccccaattcactagccctgactacaagccttcaaataaacttcaagggaagattgcattagtcactgggggtgattctgggattggacgagcggtgtgtaacttgtttgccttagaaggtg

SEQ ID NO: 122990 - DNA, 246 bp, Glycine max
agccccccaaaaatgaagagcaccatcttctttgctctctttctcttttgtgccttcaccacctcatacctaccttcagccatcgctgatttcgtgctcgataatgaaggtaaccctcttgaaaatggtggcacatattatatcttgtcagacataacagcatttggtggaataagagcagccccaacgggaaatgaaagatgccctctcactgtggtgcaatctcgcaatgagctcgacaaaggg

SEQ ID NO: 122991 - DNA, 246 bp, Glycine max
aacttattaacactttccttagttcaatatggggaagcccttcttcactctctctctttcttccctttgcttgctactcttgtcgagtgcatgctttgctattacctccagcaagttcaacgagtgccaactcaacaacctcaacgcgttggaacccgaccaccgcgttgagtccgaaggtggtcttattgaaacatggaactctcaacaccctgagctgcaatgcgccggtgtcactgtttccaa

SEQ ID NO: 122992 - DNA, 245 bp, Glycine max
aacacttccttagttcaatatggggaagcccttcactctctctctttcttccctttgcttgctactcttgtcgagtgcatgctttgctattagctccagcaagctcaacgagtgccaactcaacaacctcaacgcgttggaacccgaccaccgcgttgagtccgaaggtggtttgattcaaacatggaactctcaacaccctgagctgaaatgcgccggtgtcactgtttccaaactcaccctca

SEQ ID NO: 122993 - DNA, 249 bp, Glycine max
gaagaaagggtcctttgttcccctcctctttctgtggatgctcagcctcagcagaaagaggaggggaacaagggaagaaagggtcctttgtcttcaattttgagggctttttactgaataagtatgtagtactaaaatgtgtgctgtaatagctcatagtgagcgaggaaagtatcgggctatttaactatgacttgagctccatctatgaataaataaatcagcatatgatgcttttgttttgtgtaa

SEQ ID NO: 122994 - DNA, 180 bp, Glycine max
gttggagatctcgtctttgaagtttctaagatgacttctccctacattaaatgtacagtctctttcttcatagcatttggaaatttggctgatgacaccatcaattttgaggcttttccccacaagctggtacagtttggagagattcaggaaaaagttgtattgaaattttcacaagag

SEQ ID NO: 122995 - DNA, 240 bp, Glycine max
ctcgagcgttcctctcaggaatgtgttcccaggacctattgtgttttaaatccacaaaatccttttgtgttaaataggtggatggggaaactgactttcccccagggcacttcccgaagtgttaaaagaatgcctctttcaatagggggaggagctggtgcaaagaatgctattctcatgaatatgccaaatgctgttctttcaatgtggagatattttgttggagactcgtctttgaag

SEQ ID NO: 122996 - DNA, 270 bp, Glycine max
gggaaagatctcgcaatggttaaagttaatgtagcatgtgctgctgttggcttgacatcaagttacactccaactccattgttggaatctggtttgcaaaaagacagagggttaattgtggagtattttggaaggatgtcttacgttgctcataacgttaatcagccccaagagaaagatttgttggagggaaatttttcctttgatattaaatctcgctctagattggaaaaagtttcctctacaaaagcacaatttgttagtggaaaa

SEQ ID NO: 122997 - DNA, 219 bp, Glycine max
tctctccattggtccttaaacactcatcagtcatcaccatggccaagctagttttttccctttgtgttctgcttttcagtggctgctgcttcgctttcagttccagagagcatcctcagtctgacgagtgccagatccaaaaactcaatgccctcaaaccggataaccgtatggagtcagacggagggctcattgagacatggaaccctatacaacaag

SEQ ID NO: 122998 - DNA, 273 bp, Glycine max
ccacaaaatccttttgtgttaaataggtggatggggaaactgactttcccccagggcacttcccgaagtgttaaaagaatgcctctttcaatagggggaggagctggtgcaaagaatgctattctcatgaatatgccaaatgctgttctttcaatgtggagatattttgttggagacctcgtctttgaagtttctaagatgacttctccctacattaaatgtacagtctctttcttcatagcatttggaaatttggctgatgaccttctcaat

SEQ ID NO: 122999 - DNA, 266 bp, Glycine max
cggtgctaaatccctagtaagccgtcatggtgaagtactcaagggagcctgacaatccaaccaagtcttgcaaggctagaggcgacgaccttagggttcattttaagaacactagggaaactgcctttgcaatcaggaagttgcccttggttaaagctatcaggtacttggaagatgttcttgcgcacaagcaggccattccgttcagacgtttctgtcgtggtgttggaaggacagctcaagcaaagaatagacactctaatggc

SEQ ID NO: 123000 - DNA, 272 bp, Glycine max
agcacttctccttttttttttctctgttgaaattgaaagtgttttccgggaaataaataaaataaattaaaatcttacacactctagccccgctgtcccttttaaactcccgagagagtataaaactgcatcgaatattacaagatgcactcttgtcaaatgaagggggggaaatgatactacaagccactaggcatgggtctagcaaaggaaacactaatgggaggtggaggccgtgtggccaaagttgaaattcagcagaagaagcctct

SEQ ID NO: 123001 - DNA, 155 bp, Glycine max
tcaatatggggaagcccttcttcactctctctttcttccctttgcttgctactcttgtcgagtgcatgctttgctattacctccagcaagttcaacgagtgccaactcaacaacctcaacgcgttggaacccgaccaccgcgttgagtccgaagt

SEQ ID NO: 123002 - DNA, 277 bp, Glycine max
aaaccttgctctatactacacagtacacacactagaagaataatggcttccatcctccactactttttagccctctctctttcttgctcttttcttttcttcttatccgactcagtcacccctacaaaaccaataaaccttgttgttctacccgttcaaaatgatggttccacagggctccattggtccaacctccaaaaaagaacccctctaatgcaagtaccagtcctggtggacctcaatggaaatcacttgtgggttaactgtgagcagcagt

SEQ ID NO: 123003 - DNA, 214 bp, Glycine max
cggtgctaaatccctagtaagctgtcatggctaagtactcaagggcgcctgacaatccagccaagtcttgcaaggctagaggcaccgacctgagggttcattttaagaacactagggaaactgcctttgcaatcaggaagttgcccttggttaaagctaagaggtacttggaagatgttcttgcgcacaagcaggccattccgttcagacgttt

SEQ ID NO: 123004 - DNA, 270 bp, Glycine max
gcagaactctgcttcttcggattccgatcgcacgcgccgtcaccatggtgaacgttccgaaaacaaagaagacatactgcaagagtaaggagtgcaggaagcacacgctgcacaaggttacccaatacaagaagggtaaggatagcattgctgcccaaggaaaacgccgttatgatcgcaaacaatccggttatggtggacaaactaagcccgtcttccacaagaaggctaaaaccaccaagaagattgttctgaggttgcaatgccagg

SEQ ID NO: 123005 - DNA, 268 bp, Glycine max
ttaattattaacacttccttagttcaatatggggaagcccttcactctctctctttcttccctttgcttgctactcttgtcgagtgcatgctttgctattagctccagcaagctcaacgagtgccaactcaacaacctcaacgcgttggaacccgaccaccgcgttgagtccgaaggtggtttgattcaaacatggaactctcaacaccctgagctgaaatgcgccggtgtcactgtttccaaactcaccctcaaccgcaatggcctc

SEQ ID NO: 123006 - DNA, 267 bp, Glycine max; identical to SEQ ID NO: 111550

SEQ ID NO: 123007 - DNA, 265 bp, Glycine max
cgacactgatgatgatcctcttcaaaacggtggcacatactatatgttgccagttatgagaggaaagggcggtggtatagaagtagattcaactggatcagaaatatgcgctctcactgttgtgcaatcacccaatgagctcgataaggggattggactagtctttacatctccattacatgcccttcttatcgccgaaggctatcctttgagcattaagtgtggatcatttgcagttataacgctgtatgccggcatgcctact

SEQ ID NO: 123008 - DNA, 261 bp, Glycine max
gagcagcaagcatgtgtcagacatggagctggatgattgtgaggagaccactttgcatgatgtcaactttaaggaggagatgagacgaaagcagcaacagcaatatcgcgaggcatatgatgaagatgatgatgagccatctggtcaacgagtgcaatgtgctcaacagtagtgcaatttatggtagtagaggttctataatttctgcatggtttttatcttttgtttgcataatgcagttataactgcgtgataaattta

SEQ ID NO: 123009 - DNA, 169 bp, Glycine max
aagcctaggccttgagcaaacttaaagaaaccgaggtcgaagaagatcccgagctcgtaacatgcgaacaccagtgccaacagcagcggcaatagcactgagagtggcaagcgaacatgcttgcaacaatgtgacaggataaagcaagagcgagagaaacaagtcgaag

SEQ ID NO: 123010 - DNA, 266 bp, Glycine max
aattccttcacttgcagaacttagttctctgttgcatcatcatcatcttcattagtgttagccctaaacttcaccttcaaccatgaccacagtgccaccacacagtgtccaagtgcacacaacaacacaccgctacgaagccggcgtcgtcccgccggctcgttttgaggcgccgcgttacgaagccggcataaggggcccctttccatttaccattccgaagagaggtccgacgacctctcaggttctcgcagttgtcgccggcc

SEQ ID NO: 123011 - DNA, 182 bp, Glycine max
aagaaagtgaaggttctgagtctcaaagagaaccacgaagacataagaataagaacccttttcacttcaactctaaaaggttccaaactctcttcaaaaaccaatatggccacgttcgcgtcctccagaggttcaacaaacgctcccaacagcttcagaatctccgagactaccgcattttg

SEQ ID NO: 123012 - DNA, 271 bp, Glycine max
gcaaacagccttaaccttcgctgcccccaacgttgtgccattggccccacaaagagtgtctcccatattaccatctttcctaccaaattgaaagccccgcgctcctcacctcgttactctccgattagggttgcaaccgtggagcccgacacttcaactgtcgactacaactctgcgttctcagtgtttcctgcagaagcatgcgaaactgtaggaggggaagcctgcatggcggagatgtaccctgaaacgaagctacagccagaggcta

SEQ ID NO: 123013 - DNA, 220 bp, Glycine max
ctgcaaatcaacacttgctctaaagactgtgaattatggaatcctgcttgcacaaaagcaatgactatgtcatttaatccaaacccgtgttctgatgcgtggagtttggaatttctgaagcgtaccggatttcattgtgatatcatttgtgtcactggatggactgccactccaatgcaggatgttcaggttacaattgattggtttatttcctctcagg

SEQ ID NO: 123014 - DNA, 268 bp, Glycine max
cactcctgttgttgccgtttctattattgacaccaacagcttggagaaccagctcgaccagatgcctaggagattctatcttgctgggaagcaagagcaagagtttctaaaatatcagcagcagcagcaaggaggttcccaaagccagaaaggaaagcaacaagaagaagaaaacgaaggaagcaacatattgagtggcttcgcccctgaattcttgaaagaagcgttcggcgtgaacatgcagatagtgagaaacctacaaggtgag

SEQ ID NO: 123015 - DNA, 265 bp, Glycine max
cagagggcaattttagagcgagtgttgatttgcagcgcactcatcgtattagaggaatgattaaaatggtggccacagttggtattcctgagaatacaggtatatcattggcctgtgctatgaatagttcttttagggggcgcgccagttctgatatttacaccatctgctctcaagactgtgaattgtggaatcctgcttgcacaaaagcaatgactatgtcatttaatccaaacccgtgttctgatgcatggagtttggaatt

SEQ ID NO: 123016 - DNA, 213 bp, Glycine max
accagtgttgaagaggcttacaacaagctaacagttgaacttgagaaaagtgttcctacattggttggcattgaatgtcccaaggatgaaaaacttcctcgtcgcaaagtttttgataaacctaagacgcgctgcttcactattctccctatggagtttaatcttgtggttcgtcagaagtttttaaattttgtgaggttcattatgaggaag

SEQ ID NO: 123017 - DNA, 270 bp, Glycine max
cctagtacaccgtattaaagaatttaagatatactatgatgagagcgcggttcccattactgttgctgggagttgttttcctggcatcagtttctgtctcatttggcattgcgtattgggaaaagcagaaccccagtcacaacaagtgcctccgaagttgcaatagcgagaaagactcctacaggaaccaagcatgccacgctcgttgcaacctccttaaggtggaggaagaagaagaatgcgaagaaggtcaaattccacgaccacgac

SEQ ID NO: 123018 - DNA, 224 bp, Glycine max
ctgcaacaactctgttggctgatgggtgtccatatttgtatgctatggtgcatgatagttcagtgtctacaataccaggtgattttgtcattggtgttaagttgacaaccataaacaatatgtgtgcatatgggctcaatcctggtatttcaggttctcgtcttttgggcacatccccagtccatttcacagcaaactgtttggaatcaaatggcaacagtgag

SEQ ID NO: 123019 - DNA, 275 bp, Glycine max
ttgctagaatggaatttcgatgctcagtcatctcttttaccattctcttctctcttgctcttgcaggagagagccatgtccatgcatcgctacctgaggaagattattgggaagctgtttggccaaacactcccattcccactgcactgcgagagcttctaaagcctctccctgcaggtgttgaaatcgatgaactccctaagcaaattgatgatacacagtacccaaaaacattcttctataaagaagaccttcatccaggcaaaacaatgaaa

SEQ ID NO: 123020 - DNA, 272 bp, Glycine max
cgacactgatgatgatcctcttcaaaacggtggcacatactatatgttgccagttatgagaggaaagggcggtggaatagaagtagattcaactggaaaagaaatatgccctctcactgttgtgcaatcacccaatgagctcgataaggggattggactagtctttacatctccattacatgccctttttatcgccgaagctatcctttgagcattaagtttggttcatttgcagttataacgctgtgtgccggcatgcctactgagtgggc

SEQ ID NO: 123021 - DNA, 269 bp, Glycine max
agaaagtcttccatagccccccaaaaatgaagagcaccatcttctttgctctctttctcttttgtgccttcaccacctcatacctaccttcagccatcgctgatttcgtgctcgataatgaaggtaaccctcttgaaaatggtggcacatattatatcttgtcagacataacagcatttggtggaataagagcagccccaacgggaaatgaaagatgccctctcactgtggtgcaatctcgcaatgagctcgacaaagggattggaaca

SEQ ID NO: 123022 - DNA, 270 bp, Glycine max
gagcagcaagcatgtgtcagacatggagctggatgattgtgaggagaccactttgcatgatgtcaactttaaggaggagatgagacgaaagcagcaacagcaatatcgcgaggcatatgatgaagatgatgatgagccatctggtcaacgagtgcaatgtgctcaacagtagtgcaatttatggtagtagaggttctataatttctgcatggtttttatcttttgtttgcataatgcagttataactgcgtgataaatttaccctttagg

SEQ ID NO: 123023 - DNA, 265 bp, Glycine max
tctcgagcgaatcggctcaggcaaaagcagaagacatggacttgacgagaccatctgcaccatgagacttcgccacaacattggccatacttcatcacctgacatctacaaccctcaagccggtagcgtcacaaccgccaccagccttgacttcccagccctctcgtggctcagactcagtgctgagtttggatctctccgcaagaatgcaatgttcgtgccacactacaacctgaacgcgaacagcataatatacgcattgaat

SEQ ID NO: 123024 - DNA, 259 bp, Glycine max
tcgagctcgacgctctccattgtctttgaacactcatcaccatggccaagcatgttatcttccctttgtttccttcttttcagtggctgcttcgctctgagagagcaggcacagcaaaatgagtgccagatccaaaagctgaatgccctcaaaccggataaccgtatagagtcggaaggtgggttcattgagacctggaaccctaacaacaagccattccagtgtgccggtgttgccctctctcgctgcacccttaacc

SEQ ID NO: 123025 - DNA, 262 bp, Glycine max
ggcaacagtgagaacaccattgaattttgattctagcaagcagagcttttgtcaattttctattgaccttctcggtggaggaattttagtggacaaaactggagattggatcacacttatacaaaattctccaattagtaacttgttgagagttgctgcttggaagaaaggctgtttaatggttaagattgtgatgtctgggaatgcagcagtcaaaaggagtgattgggcctcattggtacaagtgtttttaacaaacagc

SEQ ID NO: 123026 - DNA, 256 bp, Glycine max
cttaattattaacacttccttagttcagtatgtgggaagcccttcactctctctctttcttcgctttgcttgctactcttgtcgagtgcatgctttgctattagctccagcaagctcaacgagtgccaactcaacaacctcaacgcgttggaacgcgaccaccgcgttgagtccgaaggtggtttgattcaaacatggaactctcaacaccctgagctgaaatgcgccggtgtcactgtttccagactcaccctca

SEQ ID NO: 123027 - DNA, 255 bp, Glycine max
gagctcgagcgcaaatggcaacagtgagtacaccattgaattttgattctagctagcagagctttcgtcagtttactattgaccttctcggtggaggaatcttagtggacaaaactggagattggatcacacttatacaaaattctaccaattagtaacttgttgagagttgctgcttggaagacaggctgtttaatggtcaagattgtgatgtctgggaatgcagcagtcaaaaggagtgattgggcctcattg

SEQ ID NO: 123028 - DNA, 266 bp, Glycine max; identical to SEQ ID NO: 110966

SEQ ID NO: 123029 - DNA, 265 bp, Glycine max
ctctgatgttgctttgttttctgtgacttacttgctctcccgtgttgcaactatgaaagggttggtttggctgctatgtgtttatggggtgccattgctcattgtgaacggttttcttgtgaccatcacatatctgcagcacacacactatgccttgcctcactatgattcatcgaatgggattggctgaagggtgctttggcaactatggacagagattatggaattctgaacgtgtttcaccacttaactgcatactcatgtg

SEQ ID NO: 123030 - DNA, 269 bp, Glycine max
catgactcatgagttcagtcttttagctaatctaaatgcattggagtatttgttaaaaaaacataggtttgagccaagcttcttgatagaagactaatagacatttatgaggctatggatgactacctattttctttattttttttccctttaataggcaaggagattcatatatcatcaatgggacaaaatggtggacaagtggtgctatggatccaagatgtagaattctgatagtcatggggaaaactgacttcaatgcagtgaag

SEQ ID NO: 123031 - DNA, 256 bp, Glycine max
agtttgttgttcctcactgagctcaccatggcgaccagagccaagcttactttagctatcttccttaactgtcttttagccttgatttcaaacctagccttgggcaaacttaaagaaaccgaggtcgaagaagatcccgagctcgtaacatgcaaacaccagtgccaacagcaacggcaatacactgagagtgacaagcgaacatgcttgcaacaatgtgacagtatgaagcaagagcgagagatacaagtcgaag

SEQ ID NO: 123032 - DNA, 260 bp, Glycine max
gagaaacctacaaggtgagaacgaagaggaggatagtggagccattgtgacagtgaaaggaggtctaagagtcacagctccagccatgaggaagccacagcaagaagaagatgatgatgatgaggaagagcagccacagtgcgtggagacagacaaaggttgccaacgccaaagcaaaaggagcagaaatggcattggtgagaccatttgcacaatgagacttcgccaaaacattggtcagaattcatcacctgacatct

SEQ ID NO: 123033 - DNA, 235 bp, Glycine max
accgacaccttagtgctcttcacccaatttataagcttctaactcctcactaccgtgacaccatgaacatcaacgcacttgctaggcaatctctcattaatgctgatggcataatagagaaatcttttttgccctcaaagcattccgttgagatgtcttcagcggtttataagaattgggttttcactgatcaagcactacctgcagatcttatcaagagaggagtggcaattaa

SEQ ID NO: 123034 - DNA, 270 bp, Glycine max
ctagttcaatatcctagtataccttaataaataatttaagatactatgatgagagcacggttcccattactgttgctgggacttgttttcctggcttcagtttctgtctcatttggcattgcttactgggaaaaagagaaccccaaacacaacaagtgtctccagagttgcaatagcgagagagactcgtacaggaaccaagcatgccacgctcgttgcaacctccttaaggtggagaaagaagaatgtgaagaaggtgaaattccacga

SEQ ID NO: 123035 - DNA, 269 bp, Glycine max
gattctatcttgctgggaaccaagagcaagagtttctaaaatatcagcagcagcagcaaggaggttcccaaagccagaaaggaaagcaacaagaagaagaaaacgaaggaagcaacatattgagtggcttcgcccctgaattcttgaaagaagcgttacggcgtgaacatgcagatagtgagaaacctacaaggtgagaacgaagaggaggatagtggagccattgtgacagtgaaaggaggtctaagagtcacagctccagccatgag

SEQ ID NO: 123036 - DNA, 274 bp, Glycine max
attttctctggagacgtcaggctcactgagaaaacaatttttacttgcagagatttggacatcttggttgtttattatacaatagcaactcaatttagaaaatttctaccgcattacattaggtggcatctgtataccttgttgatctacattctcccatcttttctcactgctgaaattaaatataagcggaatctgagtaatattcatatttccggcttattttacgacggcagatacaaattctggactaaacacgagagaaatcttgctt

SEQ ID NO: 123037 - DNA, 252 bp, Glycine max
ggaaaagttggaaaggatacgttcttggaagggattaatacttcgttaccaactttgggagcaggagagtctgcattcaatattcattttgaatgggacggaagcatgggaatccccggtgcgttttacataaagaactacatgcaagttgagttcttcctcaagagtttgactcttgaagccatttcaaaccaaggaaccatccgctttgtttgcaactcatgggtttataacactacactatacaaaagc

SEQ ID NO: 123038 - DNA, 245 bp, Glycine max
aacttattaacactttccttagttcaatatggggaagcccttcttcactctctctctttcttccctttgcttgctactcttgtcgagtgcatgctttgctcattacctccagcgagttcaacgagtgccaactcagcaacctcaacgcgttggaacccgaccaccgcgttgagtccgaacgtggtcttattgaaacatggaactctcaacaccctgagctgcaatgcgccggtgtcgatgtttcc

SEQ ID NO: 123039 - DNA, 262 bp, Glycine max
cggctcgaggtggaggcaactccggttgaggcagggcgaagagtgcaattaaggagaatgccataacaataggagaggcattggaggcgacggcacagactgtgggtcagaaagcggtggatcagagtgacgcctccgcgattcaggcggcggaggtgagagcaacgggaagtaacgttataacgccgggtggacttgcggctatggctcaatcagctgctgcttataatgctgactgcaagcttgaccaggacaaggtcaa

SEQ ID NO: 123040 - DNA, 274 bp, Glycine max
ggctaacacacaagaattctttgatggaaattttccagtggattcttggttaccaatttttgtgaattgtctttatcctgtaagtcaattaccttcagaagctgtcgttgtaaatgttacatgtggtagtggacgtggtggtttacccaccactgcttggattagttctgcagttaataatcgctcctcagatatcaacaaaaagattcgcacagcacttgggaaaggtaagaaaattgtttttcttactagagttgatccttttccagtagct

SEQ ID NO: 123041 - DNA, 159 bp, Glycine max
gtggcttagagccctttttgtatgtgctaccccacagctctcttctgagactcatgaggaggaaccaggaacttgaaagggttgttgttctttatctgcctggcctgctggctttttaggttgaaagtgtgctgaatcacttcaagttcctggttccac

SEQ ID NO: 123042 - DNA, 260 bp, Glycine max
tctagttcaatatcctagtataccttaataaataatttaagatactatgatgagagcacggttcccattactgttgctgggacttgttttcctggcttcagtttctgtctcatttggcattgcttatctggtaaaaagagaaccccaaacacaacaagtgtctccagagttgcaatagcgagagagactcgtacaggaaccaagcatgccacgctcgttgcaacctccttaaggtggagaaagagaatgtgaagaaggtg

SEQ ID NO: 123043 - DNA, 255 bp, Glycine max
tgaacactcatcaccatggccaagcttgttctttccctttgtttccttcttttcagtggctgcttcgctctgacagagcaggcacagcaaaatgagtgccagatccaaaagctgaatgccctcaaaccggataaccgtatagagtcggaaggtgggttcattgagacctggaaccctaacaacaagccattccagtgtgccggtgttgacctctctcgctgcacccttaaccgcaatgcccttcgtagaccttcc

SEQ ID NO: 123044 - DNA, 253 bp, Glycine max
agtacaccgtattaaagaatttaagatatactatgtcgagagcgcggttcccattactgttgctgggagttgttttcctggcatcagtttctgtctcatttggcattgcgtattgggaaaagcagaaccccagtcacaacaagtgcctccgaagttgcaatagcgagaaagactcctacaggaaccaagcatgccacgctcgttgcaacctccttaaggtggaggaagaagaagaatgcgaagaaggtcaaat

SEQ ID NO: 123045 - DNA, 253 bp, Glycine max
agaagatcaacctcgtcctgatcaccctccacagcgaccaagcaggcccgaacaacaagaaccacgtggaacaggatgtcagactagaaatggggttgaggaaaatatttgcaccatgaagcttcacgagaacattgctcgcccttcacgtgctgacttctacaacccaaaagctggtcgcattaccaccctcaacagtctcaccctcccagccctccgccaattcggactcagtgcccaatatgttgtcctc

SEQ ID NO: 123046 - DNA, 254 bp, Glycine max
gttgccgtttctattattgacaccaacagcttggagaaccagctcgaccagatgcctaggagattctatcttgctgggaaccaagagcaagagtttctaaaatatcagcaagagcaaggaggtcatcaaagccagaaaggaaagcatcagcaagaagaagaaaacgaaggaggcagcatattgagtggcttcaccctggaattcttggaacatgcattcagcgtggacaagcagatagcgaaaaacctacaagg

SEQ ID NO: 123047 - DNA, 185 bp, Glycine max
ttatgtacaagtacatactcagcctcatatctcggcgctcctgaatcgctcacacttgtagcgtctgccatatagtcgtagtagcatgcttgcttggcgaataagttcaacggggtcaacgtctggcacttcgagaagctcatcgcggtggagatcgaacgccgcggcgattacgatgatggtga

SEQ ID NO: 123048 - DNA, 106 bp, Glycine max
gcaagggtaaagacaaacactgccaacgcccccgaggaagccaaagcaaaagcagaagaaatggcattgacgagaccatatgcaccatgagacttcgacacaacat

SEQ ID NO: 123049 - DNA, 248 bp, Glycine max
cctacctctttttcttctctctcaacaacttcaccttcttcctcctcgatcatgtctcacttcaagggcaagtaccatgatgagcttatcgccaatgctgcgtacattggcactcctggaaagggtattcttgctgctgatgagtcaacagggacaattggcaagcgtttggccagcatcagtgtagagaacattgaatccaacaggcgagctcttagggagctgcttttcactgctcctggtgttct

SEQ ID NO: 123050 - DNA, 244 bp, Glycine max
cacttccttagttcaatatggggaagcccttcactctctctctttcttccctttgcttgctactcttgtcgagtgcatgctttgctattagctccagcaagctcaacgagtcccaactcaacaacctcaacgcgttggaacccgaccaccgcgttgagtccgaaggtggtttgattcaaacatggaactctcaacaccctgagctgaaatgcgccggtgtcactgtttccaaactcaccctcaa

SEQ ID NO: 123051 - DNA, 252 bp, Glycine max
ctttgaacactcatcaccatggccaagcttgttctttccctttgtttccttcttttcagtggctgcttcgctctgagagagcaggcacagcaaaatgagtgccagatccaaaagctgaatgccctcaaaccggataaccgtatagagtcggaaggtgggttcattgagacctggaaccctaacaacaagccattccagtgtgccggtgttgccctctctcgctgcacccttaaccgcaatgcccttcgtaga

SEQ ID NO: 123052 - DNA, 257 bp, Glycine max
gaggactggggaagtactcccgctgcaatagacagttgcttgactgttgctgatcaatacgatatccagattaacatacatacagacaccctaaatgaagctggatttgtcgaacatagcattgcagcatttaaaggaagaactattcatacttaccacagtgaaggtgcaggaggtggtcatactccagatatcatcaaagtatgtggtatgaagaatgttctgccctcatcaacaaacccaacacgccctttaaa

SEQ ID NO: 123053 - DNA, 260 bp, Glycine max
acttaattagtgttcatgaatatgtcaagccttactttagtggttctaaattgaaaagctttctagctggtcataatatcaccattactgatggtattgacaaaactagtgcaactttgcaatttagaaagttagcagattgtgattttctcaagagaaactttaggcagatgtctaatgttttgtgggtggctcctgaggacaaggcgagtttatggtcacaacttcattatgtttcatgtaataatctggaaatgcaa

SEQ ID NO: 123054 - DNA, 250 bp, Glycine max
  unsure (1)..(250): unsure at all n locations
caagtttaccacacaacatacccaatacncanngnnccaactanggatcagngtgcanggacgngggctnnatangtacgaagacgaggcatagagacnngagannnccaagaanaacccgagacanancagggacangaaagcatccagaaaatcaccccatnctcatcgnntaggattgaactagtttgctgacatcactcctcaagagttcagcaaaaagtacttgcaagctcccaaggatgtgtcg

SEQ ID NO: 123055 - DNA, 96 bp, Glycine max
gatcgaaggaagaaagtgtaataagacgactctcactactcgatcgctagtgattgtcattgttatatataataatgttatctttcacaactaaaa

SEQ ID NO: 123056 - DNA, 184 bp, Glycine max
cagctcgagcggctcgacagagaagtgaagctgttgagcttttttgcgagtccatttggcaaaagggagaaatgggcattgaaactgaagggtgtagagtatgagtacatagaacaagatatcttcaacaagactagtctccttctccagttgaacccggttcacaagaaggttccggttcttg

SEQ ID NO: 123057 - DNA, 254 bp, Glycine max
gcaagagggaggggtgctgatcgttccacaaaactttgcggtggctgcaaaatcccagagcgataactttgagtatgtgtcattcaagaccaatgatagaccctcgatcggaaaccttgcaggggcaaactcattgttgaacgcattgccagaggaagtgattcagcacacttttaccctaaagagccagcaggccaggcaggtgaagaacaacaaccctttcaggttcctggttccacctcaggagtctcaga

SEQ ID NO: 123058 - DNA, 282 bp, Glycine max
  unsure (1)..(282): unsure at all n locations
cgtagctcggtattcgagctccgatcgagctagacaattaaatacaatctgcctagatcatagagaggaaaacatataggtannagttcttgctcctccttgtattagcttctgatgtgacagtgaagagagcagaggcgaaagattgctagacaaggaggcacgggttccagggtagatgcttattcgacaggcaataatgtaatgtgtgcaggagcgatggtttcatcggtggtcaatgccgaggccctcttcgcaaatgcttttgcagcaggccatgtt

SEQ ID NO: 123059 - DNA, 273 bp, Glycine max
ctctccgcaagaatgcaatgttcgtgccacactacaacctgaacgcgaacagcataatatacgcattgaatggacgggcattgatacaagtggtgaattgcaacggtgagagagtgtttgatggagagctgcaagagggacgggtgctgatcgtgccacaaaactttgtggtggctgcaagatcacaatgtgacaacttcgagtatgtgtcattcaagaccaatgatacacccatgatcggcactcttgcaggggcaaactcattgttgaacg

SEQ ID NO: 123060 - DNA, 114 bp, Glycine max
gaaaagtcatggtggacgcaagcaggggcaacaccagcaggaggaagaggaagaaggtggcagcgtgctcagtggcttccccaaacacttcttggcacaatccttccacacaac

SEQ ID NO: 123061 - DNA, 93 bp, Glycine max
acaaaggcttagatgccctttgttaagtgtagaataacggcgtatagtaactatgtacccttgtgtaatgagtcactcaagtacctatgcggg

SEQ ID NO: 123062 - DNA, 260 bp, Glycine max
gttcaaggagtactaattccttcgattatgaaccattctacttgagaggctcccaaatctcttccaacaactttggaaagttctatgagatcacccctgagaagaacccccagcttcgggactttgatatcctcctcaatactgtggatatcaacgagggaggtcttcttctgccacactacaattcaaaggccatagtgatactaatggttactgaaggagaagcaaacattgaactcgttggcctaaaagaacagcaa

SEQ ID NO: 123063 - DNA, 261 bp, Glycine max
  unsure (1)..(261): unsure at all n locations
caacaagatgaagatgaagatgaagacgaagatgatgaagatgaacaaattccctctcaccctcctcgccgaccaagccattgaaagcgtgaacaagacgaggacgaggacgaagatgaagataaacctcgtcctagtcgaccaagccaaggaaagcgtgaacaagaccaggaccaggacgaggacngagatgaagatgaagatcaacctcgcaagagccgcgaatggagatcgaaaaagacacaacccagaagacctaga

SEQ ID NO: 123064 - DNA, 265 bp, Glycine max
cacgcccacaccaacctcatcaaaaggaagaggaaaagcacgaatggcaacacaagcaggaaaagcaccaaggaaaggaaagtgaagaagaagaagaagaccaagaccaggatgaggagcaagacaaagagagccaagaaagtgaaggttctgagtctcaaagagaaccacgaagacataagaataagaaccctttcacttcaactctaaaaggttccaaactctcttcaaaaaccaatatggccacgttcgcgtcctccagagg

SEQ ID NO: 123065 - DNA, 267 bp, Glycine max
aaaattcttccaccaagttatgggttcccttgtgttgcttcttttctccctcttaggtctctcttctagttccagcatatcaactcatcgttccatattggaccttgacctaaccaagtttaccacacagaaacaggtgtcttcactgttccaactatggaagagtgagcatggacgtgtctaccataaccacgaagaagaggcaaagagacttgagattttcaagaataacttgaactatatcagggacatgaatgcaaacagaaa

SEQ ID NO: 123066 - DNA, 271 bp, Glycine max
gggaaacaaaactacccttttgcttttgctctttgttctttgccatggagtggccacaacaacaatggccttccatgatgatgagggtggtgataaaaagtcaccaaaaagtttgtttttgatgagcaactccacgagggttttcaagactgatgcaggggaaatgcgtgtgctgaaaagccatggtggtaggatattttataggcacatgcacattggcttcatctctatggaaccaaagtccttgtttgttcctcagtacctcgactcg

SEQ ID NO: 123067 - DNA, 219 bp, Glycine max
ggttgttgccaaggttggaaatcacaaacaaattgtgggtttccatgttgctggaagataggaagactgggatatgcttcattgataccatatgttgagccagttgtgcaagctcaaagtgctgaagtttactttgacttcttccctgtggaggttgatagtcaagagggagttgctcacattggtgaattgaaatctggtgtctatgttccacacaac

SEQ ID NO: 123068 - DNA, 259 bp, Glycine max
gcaaaggattctacccgccgctcgatgggaattgcgcttcaaggcgtctcgtagggctaatccgcctcacgagggtcaccaacggcacgctacctttggggggccgaggcccctactgctggtcggcaaacggacggcgggcgcacgcgtcgcttctagcccggattctgacttagaggcgttcagtcataatccaacgcacggtagcttcgcgccacaggcttttcaaccaagcgcgatgaccaattgtgcgaatcaa

SEQ ID NO: 123069 - DNA, 268 bp, Glycine max
agtttctaagatgacttctccctacattaaatgtacagtctctttcttcatagcattttgaatttggctgatgacaccatcaattttgaggcttttccccacaagctggtgaagttggagagattcaggaaaaagttgtattgaaattttcacaagaggaatttcttacagcttggtcaactgaggtgcgtcctgcaacaactctgttggctgatgggtgcccatatttgtatgctatggtgcatgatagttcagtgtctacaatacc

SEQ ID NO: 123070 - DNA, 248 bp, Glycine max
cgctagctatctagcaagcaagcacagagatggaggcaaagcgaggccatgccctcatgtgcttggcacgtgtttcactcttcctctgcgctctaaccctatccgctgctcacggaagcaccacggttcaatacatcgcgagaaagttgaaactcggggacaacgagcttctgcgcacggagaagaagttcaaggttttcatggagaattacgggaggagctactccacagaggaggagtatttgcgc

SEQ ID NO: 123071 - DNA, 245 bp, Glycine max
gtatttttgctagaggccaaccctcgagcttctcgtacagttccatttgtatcaaaagcaattggccatcccttggctaaatatgctacccttgtcatgtctggaaagaccctctatgatttacagtttacaaaagaagttatccctaaatatgtgtcagtcaaggaagctgttcttccttttttaaagttcccaggctgtgacgtgtttttaagtcctgagatgcgaagtactggtgaggtcat

SEQ ID NO: 123072 - DNA, 254 bp, Glycine max
gttcaatatcctagtataccttaataaataatttaagatactatgatgagagcacggttcccattactgttgctgggacttgttttcctggcttcagtttctgtctcatttggcattgcttactgggaaaaagagaaccccaaacacaacaagtgtcttcagagttgcaatagcgagagagactcgtacaggaaccaagcatgccacgctcgttgcaacctccttaaggtggagaaagaagaatgtgaagaagg

SEQ ID NO: 123073 - DNA, 152 bp, Glycine max
aatatcctagtacaccgtattaaagactttaagatatactatgatgagagcgcggttcccattactgttgctgggagttgttttcctggcatcagtttctgtctcatttggcattgcgtattgggaaaagcagaaccccagtcacaacaagt

SEQ ID NO: 123074 - DNA, 251 bp, Glycine max
tgcgttttgtgggtactggggaggggttaggcctaaggtgccggggatgccggaggcacggtggttccgaccaagttgtctcccggagcggagatgactatgacggaccaggcggtggtgaagatcatggagattggggtggggttggtgccaccgcatcgggcgcatgagttgtacgaggggcttcactctcatctggaatcggtgggaattgatggtgtcaagattgatgtcacgcatattctagagat

SEQ ID NO: 123075 - DNA, 259 bp, Glycine max
ctctaaagaaggatatagttttgaagagatatgcatcaagaaagaagcgtttgagggagaagagaagttttgtgcaaaatccttgggaacagtaattggttttgccatttcaaagctgggaaagaacattcaagtactatcaagttcctttgtcaataagcaagagcaatacactgtggaaggagtgcagaatcttggagacaaagcagtgatgtgtcatgggctaaatttcagaactgcagtattttactgccataaa

SEQ ID NO: 123076 - DNA, 264 bp, Glycine max
atggcataatctctaaagtccgaatcatctcattctcatcaagttattatcaaataattaattaaattcctcgtggaatcttgttgaagccatgtctacagctggtcaggtcatcaagtgcagagctgcggtggcatgggaagcagggaagccactatcgatagaaaccatagaagtggcaccaccccagaaaggtgaagtgcgtttgaagatcctcttcaactccctttgccgtacagatgtttactggtgggatgctaaggg

SEQ ID NO: 123077 - DNA, 184 bp, Glycine max
tgaaattttgataaaccgcgatcacaggttgccgcactttaaaaccggaaacaaaagcaatcgttacttgatttcaagaatctctcaatttcttcctacttctttgtgtacgatttcttaagggaaagaaaatcactctctgtgctggccacagacttcgtgaatcattttcttttccacacaa

SEQ ID NO: 123078 - DNA, 277 bp, Glycine max
cagtgcctactggtgttgcatggtggatgtacaacaatgaagacactcctgttgttgccgtttctattattgacaccaacagcttggagaaccagctcgaccagatgcctaggagattctatcttgctgggaaccaagagcaagagtttctaaaatatcagcagcagcagcaaggaggttcccaaagccagaaaggaaagcaacaagaagaagaaaacgaaggaagcaacatattgagtggcttcgcccctgaattcttgaaagaagcgttcggcgt

SEQ ID NO: 123079 - DNA, 275 bp, Glycine max
cttcactctctctctttctttcctttgcttgctactcttgacgagtgcatgctttgctattagctccagcaagctcaacgagtgccaactcaacaacctcaacgcgttggaacccgaccaccgcgttgagtccgaaggtggtttgattcaaacatggaactctcaacaccctgagctgaaatgcgccggtgtcactgtttccaaactcaccctcaactgcaatggcctccacttgccatcttactcaccttatccccggatgatcatcatcgccc

SEQ ID NO: 123080 - DNA, 276 bp, Glycine max
ccattggtccttaaacactcatcagtcatcaccatggccaagctagttttttccctttgttttctgcttttcagtggctgctgcttcgctttcagttccagagagcagcctcagcaaaacgagtgccagatccaaaaactcaatgccctcaaaccggataaccgtatagagtcagaaggagggctcattgagacatggaaccctaacaacaagccattccagtgtgccggtgttgcgctctctcgctgcaccctcaaccgcaacgcccttcgtaga

SEQ ID NO: 123081 - DNA, 190 bp, Glycine max
taagatttgaaattttgataaaccgcgatcacaggttgccgcaccttaaaaccggaaacaaaagcaatcgttacttgatttcaagaatctctcaatttcttcctacttctttgtgtacgatttcttaagggaaagaaaatcactctctgtgctggccacagacttcgtgaatcattttcttttccacaca

SEQ ID NO: 123082 - DNA, 275 bp, Glycine max
aaccactcttaatttctctctgccttgctcatttacacacctctccaacctttcactttcagctttatttgaatccctctctctcctttccaaatggccagcgttgaggttgcacatcaaacaccaacaacagttccagaaaatgaaacaaccgaggtaatcaagacccaggaaacaaccccggaaccagtatcagccactgaggctcctgcaacagaacaagcagcagctgaggttcctgctcaagaagaacaacaagcaactgaggttcctgc

SEQ ID NO: 123083 - DNA, 150 bp, Glycine max
attcaatatcctagtataccataataaataatttaagatactatgatgagagcacggttcccattactgttgctgggacttgtttacctggcttcagtttctgtctcattttgcattgcttactgggaaaaagagaaccccagacacaac

SEQ ID NO: 123084 - DNA, 274 bp, Glycine max
tatcgagcgattcggctcaggtagattcctctcctatatacacctcccatctctcactaaacaaacacacagcgacatagcaaaatactaaaaaatgtcaaaggacaaagtttccggtgatccaagacgcgcagtgtgcacaggcatcaccatcttcctcctcttagccggcgtcactctcctagtcctctggctggtctaccgtccccacaagccgcgcttcacagtaatcggcgccgccgtctacgacctaaacaccaccaccccaccgctg

SEQ ID NO: 123085 - DNA, 262 bp, Glycine max
agatttgtatctggagatggtgaagagatgacattgattccgggaaccagtgttgaagaggcttacaacaagctaacagttgaacttgagaaaagtgttcctacattggttggcattgaatgtcccaaggatgaaaaacttcctcgtcgcaaagtttttgataaacctaagacgcgctgcttcactattctccctatggagtttaatcttgtggttcgtcagaagtttttaaattttgtgagtgtcattatgaagaaaaggg

SEQ ID NO: 123086 - DNA, 271 bp, Glycine max
tgggtttccttgtgttgcttcttttctccctcttaggtctctcttctagttccagcatatcaactcatcgttccatattggaccttgacctaaccaagtttaccacacagaaacaggtgacttcactgttccaactatggaagagtgagcatggacgtgtctaccataaccacgaagaagaggcaacgagacttgagattttcaagaataacttgaactatatcagggacatgaatgcaaacagaaaatcaccccattctcatcgtttagg

SEQ ID NO: 123087 - DNA, 272 bp, Glycine max
agaatgcaatgttcgtgccacactacaacctgaacgcgatcagcataatatacgcattgaatggacgggcattgatacaagtggtgaattgcaacggtgagagagtgtttgatggagagctgcaagagggacgggtgctgatcgtgccacaaaactttgtggtggctgcaagatcacagagtgacaacttcgagtatgtgtcattcaagaccaatgatacacccatgatcggcactcttgcaggggcaaactcattgttgaacgcattacca

SEQ ID NO: 123088 - DNA, 271 bp, Glycine max
ttgtctttgaacactcatcaccatggccaagcttgttctttccctttgtttccttcttttcagtggtacgttcgctctgagagatcaggcacagcaaaatgagtgccagatccaaaagctgaatgccctcaaaccggataaccgtatagagtcggaaggtgggttcattgagacctggaaccctaacaacaagccattccagtgtgccggtgttgccctctctcgctgcacccttaaccgcaatgcccttcgtagaccttcctacaccaac

SEQ ID NO: 123089 - DNA, 275 bp, Glycine max
gcaaagcaatggctacttcaaagttgaaaacccagaatgtggttgtatctctctccctaaccttaaccttggtactggtgctactgaccagcaaggcaaactcagcggaaactgtttctttcagctggaacaagttcgtgccgaagcaaccaaacatgatcctccaaggagacgctattgtgacctcctcgggaaagttacaactcaataaggttgacgaaaacggcaccccaaaacccgcgtctcttggtcgcgccctctactccacccccatc

SEQ ID NO: 123090 - DNA, 110 bp, Glycine max
ttccttcacttgcagcactgttgcatcatcatcttcattgcaaaaccctaaacttcaccttcaaccatgaccacacaagtaccaccagacagtgtccaagttcacacaac

SEQ ID NO: 123091 - DNA, 273 bp, Glycine max
atcggtgatggtttgatgcctattctgcataaatctgcaccacaggtagcattattctctgctcgagggccaaatataaaggacttcagcttccaagaggcagatcttctcaaaccagatatattagctcctggttcattgatttgggctgcttggtgtccaaatggaactgatgagccaatttatgttggtgaagcgtttgccatgatatctggaaccagcatggctgcaccacatatagctggaattgctgctcttataaagcagaagcat

SEQ ID NO: 123092 - DNA, 185 bp, Glycine max
attgtggttactcagaagttgtgaaattttgtgaggttcattatgaagaaaagggacaagcttagttgtcaagttggaatcaacccatattctatggaatggactggttcggccaatagattactgagtaagggcaacgatattctgtgttgcgattatgctacttttgatggtttgattaccac

SEQ ID NO: 123093 - DNA, 274 bp, Glycine max
  unsure (1)..(274): unsure at all n locations
tncaatcgagcggctcgaggtgaatagaaagaaagcctcgtctagtaaacccagtttttacaaagttaacataacaaaataaatcaccaaccatgtctatcatcccaaacttgttcggtggtcgacgaagcaacgtcttcgacccagtttctctggacgtgtgggacccattggaagggtttccgttttccacagccaacgctggcgaaagtagtgccatagccaacactcgcgtggactggaaggagacaccgcaggctcacgtgttcagcgt

SEQ ID NO: 123094 - DNA, 142 bp, Glycine max
tcaggcaaatggtgcttggagggtcattgtaaacaatgtgtctggtcatacatgcactgtacatctataccgagaaaaggaggataccatcactcataaagtggtatacagttcagtatcggttaagggtccacacaacata

SEQ ID NO: 123095 - DNA, 149 bp, Glycine max
ttctctccattggtccttaaacactcatcagtcataaccatggccaagcaagttgtttccctttgttgtctgcttatcagtagctgctgcttcgctataagtaccagagagcagcctcagagagaagagtgccagatccaaaaactcaa

SEQ ID NO: 123096 - DNA, 174 bp, Glycine max
gaaattctttctaaagttgcacaagatatggttgatgaatggtttgattgtgttgatgaggaggattcctttgaggaagtttctttaagtgcagcacttaatggtgttgagggtttggactatatggaaagaattcctcttgccacatctgagggttttcctcatgtgcttcca

SEQ ID NO: 123097 - DNA, 161 bp, Glycine max
tgaaattttgataaaccgcgatcacaggttgccgcaccttaaaaccggaaacaaaagcaatcgttacttgatttcaagaatctctcaatttcttcctacttctttgtgtacggtttcttaagggaaagaaaatcactctctgtgctggccacagacttcgt

SEQ ID NO: 123098 - DNA, 271 bp, Glycine max
ggaatttcttacagcttggtcaactcaggtgcgtcctgcaacaactctgtttgctgatgggtgcccatatttgtatgctatggtgcatgatagttcagtgtctacaataccaggtgattttgtcattggtgttaagttgacaaccataaacaatatgtgtgcatatgggctcaatcctggtatttcaggttctcgtcttttgggcaccattcctcagtccatttcacagcaaactgtttggaatcaaatggcaacagtgagaacaccattg

SEQ ID NO: 123099 - DNA, 270 bp, Glycine max
  unsure (1)..(270): unsure at all n locations
gcaatggctacttcaaagttgaaaacccagaatgtggttgtatctctctccctaaccttaaccttggtactggtgncactgaccagcaaggcaaactcagcggaaactgtttctttcagctggaacaagttcgtgccgaagcaaccaaacatgatcctccaaggagacgctattgtgacctcctcgggtttgttacaactcaataaggttgacgaaaacggcaccccaaaaccctcgtctcttggtcgcgccctctactccacccccatc

SEQ ID NO: 123100 - DNA, 271 bp, Glycine max
aaattcgggaactgagcaaacatgccaaatctagttcaaggaaaaccatttcttctgaagataaacctttcaacttgagaagccgcgaccccatctattccaacaagcttggcaagttgtttgagattaccccagagaaaaaccctcagcttcgggacttggatgtcttcctcagtgttgtggatatgaacgagggagctctttttctgccacacttcaattcaaaagccatagtggtactagtgattaatgaaggagaagcaaacattga

SEQ ID NO: 123101 - DNA, 270 bp, Glycine max
gcattcacaacttcaagtgtgcttgaggcccaaagtagaaagcccaacagatatgaagtttcccaatacagatatcgcaatgtgccaataaagcgcagagcatgggttgaaggccagatgtctttcgatcagtctgtagtagcaattatgtctaaatgcaaagccagcatgagaatgggaaacactgatgctcaaattttgatggttccagggcgcagattcatagctcatggacattttttcaaaaatctgactcagaaagtgcgagtc

SEQ ID NO: 123102 - DNA, 267 bp, Glycine max
aagcctggtagatttgagagtttcttcctatttagcactgaagctcaacaatcctacttgcaaggattcagcaggaacattttagaggcctcctacgataccaaattcgaggagataaacaaggttctgtttagtagagaggaagggcagcagcaaggggagcagaggctgcaagagagcgtgattgtggaaatctcgaaggaacagattcgggcactgagcaaacgtgccaaatctagttcaaggaaaaccatttcttctgaagat

SEQ ID NO: 123103 - DNA, 266 bp, Glycine max
tgcgtctcttcctcttctctttcgatccatccctcattcctactcctccaatccaaccacctcatcctcacactcacatatacatatatctgaacgcgtatcgtccctcctatggcttcaaagcgcatcctcaaggagctcaaggacttgcagaaagacccaccaacttcttgcagcgctggtccagtagctgaggacatgttccattggcaagcaacaataatgggtcctacaaatagtccttatgctggaggtgtattcctagt

SEQ ID NO: 123104 - DNA, 265 bp, Glycine max
attgatacaagtggtgaattgcaacggtgagagggtgtttgatggagagctgcaagagggacgggtgctgatcgtgccacaaaactttgtggtagctgcaagatcacagagtgacaacttcgagtatgtgtcattcaagaccaatgatacacccatgatcggcactcttgcaggggcaaactcattgttgaacgcattaccagaggaagtgattcagcacactttcaacctaaaaagccagcaggccaggcagataaagaacaac

SEQ ID NO: 123105 - DNA, 244 bp, Glycine max
  unsure (1)..(244): unsure at all n locations
agtttctaagatgacttctccctacattaaatgtaaagtctctttcttcatagcatttggaaatttggctgatgacaccatcaattttgaggcttttccccacaagctggtgcattttggagagattcaggaaaaagttgtattgaaattttcacaagaggaatttcctacagcttggtcaactcaggtgttcggngcaacaactctnntggctgatgggtgcccatatttgtatgctatggtg

SEQ ID NO: 123106 - DNA, 110 bp, Glycine max
gttcaatatcctagtacaccgtattagagaatttaagatatactatgatgagagcgcggttcccattactgttgctgggagttgttttcctggcatcagtttctgtctca

SEQ ID NO: 123107 - DNA, 266 bp, Glycine max
  unsure (1)..(266): unsure at all n locations
gttcaatatcctagtataccttaataaataatttaagatactatgatgagagcacggttcccattactgttgctggcacttgttttcctggcttcagtttctgtcttatttggcattgcttactgggaaaaagagaaccccaaacacaacaagtgtctccagagttgcaatagcgagagagactcgtacaggtaccaagcatgccacgctcgttgcaacctccttaaggtggagaaagaagaatgtgagaagtgtanaattccacg

SEQ ID NO: 123108 - DNA, 265 bp, Glycine max
ccaaaaagcaatctggatcctacaatctatggtgagcaaaccagtaagataacagcagatgcccttgatctagatggatacacagtggacgaggcactagcaagtcggaggttatttatgttagattaccatgatgtattcatgccatatataaggcggataaatcagacatatgccaaggcttatgcgacaaggactatcctttttctgagagaaaatggaaccttaaagccagtggccatcgaattaagtttgccacatcctg

SEQ ID NO: 123109 - DNA, 265 bp, Glycine max
aactcgagcgaatcggctcgagagcaaaatgaccaagttcacaaccctcctcatctctcacctcttctgcatcgcccaaacttgcagcgcctacaaatggcagcaccagcaagatagctgccgcaagcagctccagggggtgaacctcacgccctgcgagaagcacatcatggagtagatccaaggccgcggcgatgacgatgatgatgatgacgacgacaatcacattctcaggaccatgcggggaagaatcaactacataagg

SEQ ID NO: 123110 - DNA, 179 bp, Glycine max
aaaccttgctctatactacacagtacattcactagaagaattatggcttccatcctccactactttttagtcctctctctttcttgctctttacttttcttcttatccgactcagtcacccctacaaaaccaatataccttgttgttctacccgttcaaaatgatggttccacagggca

SEQ ID NO: 123111 - DNA, 266 bp, Glycine max
tcaatatcctagtataccgtattaaataatttaagatatactatgatgagagcgcggttcccattactgttgctggaagttgttttcctggcatcagtttctgtctcatttggcattgcgtattgggaaaagcagaaccccagtcacaacaagtgcatccgaagttgcaatagcgagaaagactcctacaggaaccaagcatgccacgctcgttgcaacctccttaaggtggaggaagaagaagaatgcgaagaaggtcaaattcc

SEQ ID NO: 123112 - DNA, 162 bp, Glycine max
agcagcagcgagagagcgaagaaagtgaagattctgagttacgaagacataagaataagaacccttttctcttcggctctaacaggttcgaaactctcttcaaaaaccaatatggtcgcattcgcgtcctccagaggttcaaccaacgctccacacaacata

SEQ ID NO: 123113 - DNA, 265 bp, Glycine max
ttgtctttgaacactcatcaccatggccaagcttgttctttccctttgtttccttctgttcagtggctgcttcgctctgagagagcaggcacagcaaaatgagtgccagatccaaaagctgaatgccctcaaaccggataaccgtatagagtcggaaggtgggttcattgagacctggaaccctaacaacaagccattccagtgtgccggtgttgccctctctcgctgcacccttaaccgcaatgcccttcgtagaccttcctac

SEQ ID NO: 123114 - DNA, 257 bp, Glycine max
tggtgatgataacttaattagtgttcatgaatacgtcaagccttactttagtggttctaaattgagaagctttctagctggtcataatatcaccattactgatggtattgacaagactagtgcaactttgcaatttagaaagttagcagattgtgattttctcaagagaaactttaagcagatgtctaatgttttgtgggtagctcctgaggacaaggcgagtttatggtcacaacttcattatgtttcgtgtaata

SEQ ID NO: 123115 - DNA, 250 bp, Glycine max
gctggttcacattcttcagaagatttttctgaaaaggaagatcaagaaaaacccaaaaagattgatgccagattgagacaaagaatagatcctcaatacaatgaggttcaggctcagatggaaacaaatttgtttaaattgtctcttgatgatgttgaaactcctaaaggttccatgttggatcttaaaatttctcaatctaaaattgcacttcccaataggtcactacgcagaatggttcctccaactg

SEQ ID NO: 123116 - DNA, 263 bp, Glycine max
gaaaaacccaaaaagattgatgccagattgagacaaagaatagatcctcaatacaatgaggttcaggctcagatggaaactaatttgtttaaattgtctcttgatgatgttgaaactcctaaaggttccatgttggatctgaaaatttctcaatctaaaattgcacttcccaagaacacagttggaggaaccattctgcgtagtgatctattggcaaattttttgacagagggcaattttagagcaagtgttgatttgcagcg

SEQ ID NO: 123117 - DNA, 268 bp, Glycine max
atatcctagtacaccgtattaaagaatttaagatatactatgatgagagcgcggttcccattactgttgctgggagttgttttcctggcatcagtttctgtctcatttggcattgcgtattgggaaaagcagaaccccagtcacaacaagtgcctccgaagttgcaatagcgagaaagactcctacatgtaccaagcatgccacgctcgttgcaacctccttaaggtggaggaagaagaagaatgcgaagaaggtcaaattccacgac

SEQ ID NO: 123118 - DNA, 264 bp, Glycine max
cactcatcagtcatcaccatggccaagctagttttttccctttgttttctgcttttcagtggctgctgcttcgctttcagttccagagagcagcctcagcaaaacgagtgccagatccaaaaactcaatgccctcaaaccggataaccgtatagagtcagaaggagggctcattgagacatggaaccctaacaacaagccattccagtgtgccggtgttgccctctctcgctgcaccctcaaccgcaacgcccttcgtagacct

SEQ ID NO: 123119 - DNA, 265 bp, Glycine max
gtacaccgtattaaagaatttaagatatactatgatgagagcgcggttcccattatgaaatgctgggagttgttttcctggcatcagtttctgtctcatttggcattgcgtattgggaaaagcagaaccccagtcacaacaagtgcctccgaagttgcaatagcgagaaagactcctacaggaaccaagcatgccacgctcgttgcaacctccttaaggtggaggaagaagaagaatgcgaagaaggtcaaattccacgaccacg

SEQ ID NO: 123120 - DNA, 261 bp, Glycine max
  unsure (1)..(261): unsure at all n locations
cttccctgtggaggttgatattcaagagggagttgctcacattggtgaattgaaatctggtgtctatgttccactgcctacaaaaacccanatngtngaaactcccaaggaatggcaactggatctaccttgtgacaaaattcctagtgtcttgaccacaactgatgagagattggttagcacagaacatgagggctatgatccttttcttggtggaattcaaaaatatgccactcccatgatgcccctagatgaagaaat

SEQ ID NO: 123121 - DNA, 266 bp, Glycine max
gttcaatatcctagtataccttaataaataatttaagatactatgatgagacaacggttcccattactgttgctgggacttgttttcctggcttcagtttctgtctcattgggcattgcttactgggaaaaagagaaccccaaacacaacaagtgtctccagagttgcaatagcgagagagactcgtacaggaaccaagcatgccacgctcgttgcaacctccttaaggtggagaaagaagaatgtgaagaaggtgaaattccacg

SEQ ID NO: 123122 - DNA, 261 bp, Glycine max
ttggtccttaaacactcatcagtcatcaccatggccaagctagttttttccctttgttttctgcttttcagtggctgctgcttcgctttcagttccagagagcagcctcagcaaaacgagtgccagatccaaaaactcaatgccctcaaaccggataaccgtatagagtcagaaggagggctcattgagacatggaaccctaacaacaagccattccagtgtgccggtgttgccctctctcgctgcaccctcaaccgcaac

SEQ ID NO: 123123 - DNA, 250 bp, Glycine max
aaagaatttaagatatactatgatgagagcgcggttcccattactgttgctgggagttgttttcctagcatcagtttctgtctcatttggcattgcgtattgggaaaagcagaaccccagtcacaacaagtgcttccgaagttgctatagcgagaaagactcctacaggaaccaagcatgccacgctcgttgcaacctccttaaggtggaggaagaagaagaatgcgaagaaggtcaaattccacgacca

SEQ ID NO: 123124 - DNA, 258 bp, Glycine max
  unsure (1)..(258): unsure at all n locations
attgctggtaatactcttatgtcagctttgatcgantccacggctactgccagatcttctgaaaatgcggaatcctctgcatgatctggaatttgtgttttctttcatttgtccgtttgtttaattcaataaaggaaattagggttgaccctcttgttgagtatgctctgcctatttgaaaatttccacacctcttttaattgtcgtaatgatgtgtgaagtgtgtgttattttaaatcggcactcttaaaggggcgg

SEQ ID NO: 123125 - DNA, 266 bp, Glycine max
gattttagcaaattaaaatagtagtgttattggtaggttttggcaaagatgttttcagttccaggggtgtcgggaattctgaacagaggaggagggcataagataaaagggacagtggtgttgatgaggaagaatgtgttggaactcaacagcgtggctgatcttactaaaggaaatgttgggggactcataggcaccggcctcaacgttgttggctcaacacttgataacctcactgctttcttgggccgaagtgtcgccctaca

SEQ ID NO: 123126 - DNA, 270 bp, Glycine max
gtgtccatatttgtatgcaatggtgcatgatagttcagtgtctacaataccaggtgattttgtcattggtgtcaagttgacaaccataaacaatatgtgtgcatatgggctcaatcctggtatttcaggttctcgtcttttgggcaccattcctcagtccatttcacagcaaactgtttggaatcaaatggcaacagtgagaacaccattgaattttgattctagcaagcagagcttttgtcagttttctattgaccttctcggtggagg

SEQ ID NO: 123127 - DNA, 178 bp, Glycine max
tactatgatgagagtgcggtttcctttgttggtgttgctgggaactgttttcctggcatcagtttgtgtctcattaaaggtgagagaggatgagaataaccctttctacttgagaagctctaacagcttccaaactctctttgagaaccaaaacggtcgcattcgtctcctccagaga

SEQ ID NO: 123128 - DNA, 272 bp, Glycine max
gttcaatatcctagtataccttaataaataatttaagatagtatgatgagagcacggttcccattactgttgctgggacttgttttcctggcttcagtttctgtctcatttggcattgcttactgggaaaaagagaaccccaaacacaacaagtgtctccagagttgcaatagcgagagagactcgtacaggaaccaagcatgccacgctcgttgcaacctccttaaggtggagaaagaagaatgtgaagaaggtgaaattccacgaccacg

SEQ ID NO: 123129 - DNA, 263 bp, Glycine max
  unsure (1)..(263): unsure at all n locations
atactatgatgagagtgcggtttcctttgttggtgttgctgggaactgttttcctggcatcagtttgtgtctcattaaaggtgagagaggatgagaataaccctttctacttgagaagctctaacagcttccaaactctctttgagaaccaaaacggtcgcattcgtctcctccagagattcaacaaacgctccccacaacttgagaatcacngagactaccggattgtccagtttcagtcaaaacccaacacaatccttctc

SEQ ID NO: 123130 - DNA, 263 bp, Glycine max
ccattgtctttgaacactcatcaccatggccaagcttgttctttccctttatttccttcttttcagtggctgcttcgctctgagagagcaggcacagcaaaatgagtgccagatccaaaagctgaatgccctcaaaccggataaccgtatagagtcggaaggtgggttcattgagacctggaaccctaacaacaagccattccagtgtgccggtgttgccctctctcgctgcacccttaaccgcaatgcccttcgtagacctt

SEQ ID NO: 123131 - DNA, 250 bp, Glycine max
gtaacttgttgagagttgctgcttggaagaaaggctgtttaatggttaagattgtgatgtctgggaatgcagcagtcaaaaggagtcattgggccttattggtacaagtgtttgtatttaacagcaacagtattgagcattttgatgcatgtaagtggacaaaatcggaaccacattcctgggaattgatcttcccaatagaggtatgtggtcctaataatggttttgaaatgtggagttctgagtgggc

SEQ ID NO: 123132 - DNA, 119 bp, Glycine max
caccaagttatgggtttccttgtgttgcttcttatctccctcttaggtctcgcttctagttccagcatatcaactcatgcgttccatattggaccttgacgtaaccaagtttaccacac

SEQ ID NO: 123133 - DNA, 266 bp, Glycine max
cttcaacaccaacgaggacagagctgagaaacttcggtctccagatgacgaaaggaagcagatcgtgacagtggagggaggcctcagcgttatcagccccaagtggcatgcacaagaagacgaagacgaagatgaagacgaagaatatgaacaaactccctcttatcctccacgacgaccaagccatggaaagcatgaagatgacgaggacgaggacgaagaagaagatcaacctcgtcctgatcaccctccacagcgaccaagca

SEQ ID NO: 123134 - DNA, 265 bp, Glycine max
atcaacatagtcgtcattggacatgtcgactctgggaagtcaactaccactggtcacttgatctacaagcttggaggtattgacaagcgtgtgattgagaggttcgagaaggaggctgccgagatgaacaagaggtcattcaagtatgcctgggtgctcgacaagctcaaagctgagcgtgaaagaggaattaccattgatattgcttggtggaagtttgaaaccaccaagtactactgcacggtcattgatgctcctggacatt

SEQ ID NO: 123135 - DNA, 266 bp, Glycine max
gaaagtcttccatagccccccaaaaatccagagcaccatcttctttgctctctttctcttttgtgccttcaacacctcatacctaccttcagccatcgctgatttcgtgctcgataatgaaggtaaccctcttgaaaatggtggcacatattatatcttgtcagacataacagcatttggtggaataagagcagccccaacgggaaatgaaagatgccctctcactgtggtgcaatctcgcaatgagctcgacaaagggattggaa

SEQ ID NO: 123136 - DNA, 106 bp, Glycine max
acacatacccccaactagcaataattccttcacttgcaggacttagttctctgttgcatcatcatcatcttcattagtgttagccctaaacttcaccttcaaccat

SEQ ID NO: 123137 - DNA, 269 bp, Glycine max
tagaagttgcagtgtcatgtgctgttattagcgtggttgcagttgtcaagttcggtgttatgaagccttgtttttagggactggctgtggcagcaagttatacaggtctgccataaccacgaccttttttcccctttgggaagggttgtgtttttttaccaagtcctagtttttttaaggcttcattctttttgaacttggcactgcacctccttattgtctaatgatattcatacctgcccttgtgctgtatgttatgaaatgtaatg

SEQ ID NO: 123138 - DNA, 260 bp, Glycine max
gcgcagagcagagcagcagagaagagagaaaacggcactgcagccgtagaaggaaaaccgaccatggtgcacgtctccttttacaggaactatggtaagacgtttaatgagccccgccgtccgtacgagaaggagcgtctagacgcggagctgaagctggtgggggagtacgggctgcggtgcaagagggagctgtggagggtgcagtacgcgctcagccgcatccgcaacaacgcgcggaatctccttaccctcgacga

SEQ ID NO: 123139 - DNA, 264 bp, Glycine max
cgcatgagagcatcaaactcttcttcttcgatttccactgcgaacgttactctttcttcttctttctcttcattttcttcgctcttcgatcttcgtccggggactgctccgaataccaccaccaccactcgccgatggccacgatcggaggcttacacgactcccaaggctctcaaaacagcgtcgaatccgaagccctcgctcgattcgccgtagacgaacacaacaagaagcagaattcgctctctggagtttgctagggtg

SEQ ID NO: 123140 - DNA, 264 bp, Glycine max
gtcgctcatcaacagaagcttaagtgaccggactcctcattgctgcactttttgccggtcaacacacaagttcatattcctcctcttgtactggtgcatatctgctgtctgacaacctgtgcctttctgctgtgcaggaggagcagaagatgttaatagaaaagcatggggacagagttgatcatgatgttttggctgatatggatgtgctgtataggtgcatcaaagaagccttgagactccatcctcctctcattatgctga

SEQ ID NO: 123141 - DNA, 282 bp, Glycine max
atttcggctcgatggagttctgagtgggcaaatcaaacttcatggcatttaagtttccttattgacaatcccaaacagtctacagtttttgatattctacttgggaatttctcaagattttgagattgctggtaatactcttatgccagctttttctgttccacaggctactgccagatcttctgaaaatgcggaatcctctgcatgatctggaatttgtgttttcttttgcttgttcgtttgtctaattcaataaaggaaattaggcatgaccctcttgtt

SEQ ID NO: 123142 - DNA, 261 bp, Glycine max
tgatcttctgaaaatgcggaatcctctgcatgatctggaatttgtgttttctttcgcttgttacgttgtttaattcaataaaggaaattaggcatgaccctcttgttgagtatgctctgcctatttgaaaatttccacacctcttttaattgtcgtaatgatgtgtgaagtgtgtgttattttaaaaaaaagagaagtattacaagttgaatgtatctaaatgtgtcagaaatcaagaatcaggggggcgctgcacaaatt

SEQ ID NO: 123143 - DNA, 260 bp, Glycine max
cccaaaaatgaagagcaccatcttctttgctctctttctcttttgtgccttcaccacctcatacctaccttcagccatcgctgatttcgtgctcgataatgaaggtaaccctcttgaaaatggtggcacatattatatcttgtcagacataacagcatttggtggaataagagcagccccaacgggaaatgaaagatgccctctcactgtggtgcaatctcgcaatgagctcgacaaagggattggaacaatcatctcgt

SEQ ID NO: 123144 - DNA, 262 bp, Glycine max
cactcttcactcaaaactcttgtctttcattttgctaattcccacactatggctgatacacagtaccaacaacaacaccaataccctcaccgataccctaatgatccatacgaacaacaaactagctactccactcaggtcgtcaaggcggccaccgccgtcaccgcgggcggctccctcttgatcctcgcctcgttgatccttgccggcaccatcatcgccctcaccatcgtcacaccaccgctcgtcatcttcagtccgg

SEQ ID NO: 123145 - DNA, 264 bp, Glycine max
gcagcattcactgaaagcactcagtagggtttgcgcgtttcagagtttgtgacgcacgcatccatggccaccaccaccaacgccgccgcagccccgccgcgccagctctcccagaaggaagccgacatccagatgatgttagccgccgacgtccacctcggcaccaaaaactgcgacttccaaatggaacgttacatcttcaagcgccgcaacgacgggatttacattattaaccttgggaagacatgggagaagcttcagtta

SEQ ID NO: 123146 - DNA, 175 bp, Glycine max
aaaccgcgatcacaggttatagcaccttaaaaccggaaacaaaagcaatcgttacttgatttcaagaatctctcaatttcttcctacttctttgtgtacgatttcttaagggatagaaaatcactctctgtgctggccacagacttcgtgaatcattttcttttccacacaacat

SEQ ID NO: 123147 - DNA, 257 bp, Glycine max
gcaatggctacttcaaagttgaaaacccagaatgtggttgtatctctcaccctaaccttaaccttggtactggtgctactgaccagcaaggcaaactcagcggaaactgtttctttcagctggaacaagttcgtgccgaagcaaccaaacatgatcctccaaggagacgctattgtgacctcctcgggaaagttacaactcaataaggttgacgaaaacggcaccccaaaaccctcgtctcttggtcgcgccctcta

SEQ ID NO: 123148 - DNA, 119 bp, Glycine max
aaaggagtgattgggcctcattggtacaagtgtttttaacaaacagcaacagtacagagcattttgatgcatgtaagtggacaaaatcggaaccacattcctgggaattgatcttccca

SEQ ID NO: 123149 - DNA, 90 bp, Glycine max
acactttccttagttcaatatggggaagcccttcttcactctctctctttcttccctttgcttgctactcttgtcgagtgcatgctttgc

SEQ ID NO: 123150 - DNA, 263 bp, Glycine max
gtaaaatactgcagttctgaaatttagcccatgacacatcacatgcttcatgaactcatgggagttgatcctggaactaaccctgtttgccatttccttggaagcaaggccattttatgggtacccaatttatctatggacactgcctatcagactaacgttgttgtttaattagtccatgcatctgcatcttgggcaccataagattgtatataaaataaattatggtgtgttgtgtatgttgtgcaagacctggaacttca

SEQ ID NO: 123151 - DNA, 260 bp, Glycine max
  unsure (1)..(260): unsure at all n locations
ctccattggtccttaaacattcatcagtcatcaccatggccaagctagttttttccctttattttctgcttttcagtggctgctgcttcgcttttagttccagagagcagcctcaatanaacgagtgccagatccaaaaactcaatgccctcaaaccggataaccgtatagagtcataaggagggctcattgagacatggaaccctaacaacaagccattaagtgtgncggtgttgcctctctcgctgcacctcaacgca

SEQ ID NO: 123152 - DNA, 254 bp, Glycine max
cttacattactagcacttccttagttcaatatggggaagcccttcactctctcgctgtcttccctttgcttgctactcttgtcgagtgcatgctttgctatgagctccagcaagctcaacgagcgccaacccaacaacctcaacgcgttggtccccgaccaccgcgttgagtccgaagccggtttgattcaaacatggaactctctaacaccctgagctgaaatgcgccggtgtcactgtttccaaactcaccc

SEQ ID NO: 123153 - DNA, 198 bp, Glycine max
cacaactgtatggaatgtcagaggcactttcctttggtttgagcaatgcagggtttcaagttagcaagtatatgccatttgggccggtagatatggttatgccttaccttctgagaagggctgaagaaaatagagggcttttggctgcatcaggttttgataggcaattgatgagaaaggagttgggaagaagattaa

SEQ ID NO: 123154 - DNA, 258 bp, Glycine max
cttgaccaagattgacaggcgatctggtaaggagcttgagaaggagcccaaattattgaagaatggtgatgcaggtatggttaagatgattccaaccaagcccatggtggttgaaactttctctgagtatcctccccttggtcgttttgctgtgagggacatgcgtcaaactgtggctgtcggagtcatcaagagtgttgagaagaaagaccccaccggagccaaggtcaccaaggccgctgccaagaagaagtgatt

SEQ ID NO: 123155 - DNA, 257 bp, Glycine max
gtagaatactgcagttctgaaatttagcccatgacacatcacatgcttcatgaactcatgggagttgatcctggaactaaccctggtttgccatttccttggaagcaaggccattttatgggtacccaatttatctatggacactgcctatcagactaacgttgttgtttaattagtccatgcatctgcatcttgggcaccataagattgtatatacaataaattatggtgtgttctgtatgttgtgcaagacctgg

SEQ ID NO: 123156 - DNA, 261 bp, Glycine max
atgagagtgcggtttcctttgttggtgttgctgggaactgttttcctggcatcagtttgtgtctcattaaaggtgagagaggatgagaataaccctttctacttgagaagctctaacagcttccaaactctctttgagaaccaaaacggtcgcattcgtctcctccagagattcaacaaacgctccccacaacttgagttacttcgagactaccggattgtccagtttcagtcaaaacccaacacaatccttctcccccac

SEQ ID NO: 123157 - DNA, 261 bp, Glycine max
tggaagatatcgcacattcagcttgggacctaatttgctgggacagtgagaaaaccttgccagataatttttctgcagaattgctctcttgcaaattagatactgttactggccaatattatcctgagtgggctccaattaattgtcgagttcatcgacaaccaattcacatcactgaaggaaattatgtcagaaagcaagatgtcagcattgaatatgatgcatgtaccattccaaatgattgtgggtcacatggtgttg

SEQ ID NO: 123158 - DNA, 272 bp, Glycine max
cgacgggaacttcatgaatggactaacaacacttgttgggaaggcaatgcccagtttagtgacacaaataatttagcttctccactagtcgtctgtagctctgtggatcagagaatggaactccatctgcggtcaacttgatccctggctccataggggtttcacatggtttggctcccatcaaacctgtctcattcaacaagtccaaaacatacttcctttgtgataggaagatccccttctttgagtacataacctcaatacccaagaag

SEQ ID NO: 123159 - DNA, 279 bp, Glycine max
attcggctcgagcttaattattaacacttccttagttcaatatggggaagcccctcactctctctctttcttccctttgcttgctactcttgtcgagtgcatgctttgctattagctccagcaagaccaacgagtgccaactcaacaacctcaacgcgttggaacccgaccaccgcgttgagtccgaaggtggtttgattcaaacatggaactctcaacaccctgagctgaaatgcgccggtgtcactgtttccaaactcaccctcaaccgcaatggcc

SEQ ID NO: 123160 - DNA, 267 bp, Glycine max; identical to SEQ ID NO: 101696

SEQ ID NO: 123161 - DNA, 264 bp, Glycine max
actcgagcgaatcggctcgagaagcagaagaggctcaaggaccgcagcagcaactacaagacagtcaccagaagactcgtcacttcaatgaaggagacgtactagtgattcctcctggtgttccttactggacctataacactggcgatgaaccagttgttgccatcagtcttcttgacacctctaacttcaacaatcatcttgatcaaaaccccagagtattttaccttgctgggaacccagatatagagcacccagagacca

SEQ ID NO: 123162 - DNA, 146 bp, Glycine max
caggttgccgcaccttaaaaccggaaacaaaagcaatcgttacttgatttcaagaatctctcaatttcttcctacttctttgtgaacgatttcttaagggaaagaaaatcactctctgtgctggccacagacttcgtgaatcattt

SEQ ID NO: 123163 - DNA, 266 bp, Glycine max
agatgtttgacagcagtgagataggtctttattctaatcccactttggaagatatcccacattcagcttgggaccttttttgctgggacagtgagaaaactttgccaaataattttgctgcagaattgctctcttgcaaattggatactgtcactggccaatattatcctgagtgggctccaattaattgtcgagttcatcgacaaccagttcacatcactgaaggaaattatgtcagaaagcaagatgtcagcattgaatatgat

SEQ ID NO: 123164 - DNA, 267 bp, Glycine max
agcgtgaaaggacacacctgctgttggcttgttgttcaaggatggcaatttgtaagaaagatgtttggagagttgaatgtggaatcccttctggatttccgctcacagttatttgcaatagcatttttaatgagatgctcattagatatagctatgaaaaattactgcgccaggctaaagctccaagtatgtttttacaatccttcaaaaattttgtttctttgtgtgtgtatggtgatgataacttaattagtgttcatgaatacg

SEQ ID NO: 123165 - DNA, 227 bp, Glycine max
cagatggaaacaaatttgtttaaatgtccctgatgatgttgaaactctaaaggttccatgttgggatcttaagatttctcaatctaaaattgcacttcccaaaaacacagttggtaagaaccattctgcgtagtgacctattggcaaatttttgacagagggcaattttagagcaggtgttgatttgcagcgcattcatcgtatcaaaggaatgattaaaatggtgg

SEQ ID NO: 123166 - DNA, 265 bp, Glycine max
actctccgcaagaatgcaatgttcgtgccacactacaacctgaacgcgaacagcataatatacgcattgaatggacgggcattgatacaagtggtgaattgcaacggtgagagagtgtttgatggagagctgcaagagggacgggtgctgatcgtgccacaaaactttgtggtggctgcaagatcacagagtgacaacttcgagtatgtgtcattcaagaccaatgatacacccatgatcggcactcttgcaggggcaaactcat

SEQ ID NO: 123167 - DNA, 104 bp, Glycine max
agcgaggaaagtatcgggctatgtaactatgactagagcttcaactatgaataaataaatcgacagcatatgatgcttttgtttacaaaaaaaaaacaaagaaa

SEQ ID NO: 123168 - DNA, 266 bp, Glycine max
cattgtctttgaacactcatcaccatggccaagcttgttctttccctttgtttccttcttttcagtggctgcttcgctctgagagagcaggcacagcaaaatgagtgccagatccaaaagctgaatgccctcaaaccggataaccgtatagagtcggaaggtgggttcattgagacctggaaccctaacaaacagccattccagtgtgccggtgttgccctctctcgctgcacccttaaccgcaatgcccttcgtagaccttccta

SEQ ID NO: 123169 - DNA, 210 bp, Glycine max
  unsure (1)..(210): unsure at all n locations
aaaatggccaacaagaaaatgaagaaggaacaatattnctgtgaccatccacctgcatcatgggattggaggaaaaaaggtgtcatcacccaagtaaagtaccaagggggctgtggaagcggttgggcgttttctgccacgggagccatagaagcagcacatgcaatagcaacaggagaccttgttagcctttctgaacaagaactcgta

SEQ ID NO: 123170 - DNA, 264 bp, Glycine max
cctcaggaaccacatactatgtggtcaaccctgacaacaacgaaaatctcagattaataacactcgccatacccgttaacaagcctggtagatttgagagtttcttcctatctagcactgaagctcaacaatcctacttgcaaggattcagcaggaacattttagaggcctcctacgataccaaattcgaggagataaacaaggttctgtttagtagagaggaagggcagcagcaaggggagcagaggctgcaagagagcgtga

SEQ ID NO: 123171 - DNA, 156 bp, Glycine max
cgaacagcataatatacgcattgaatggacgggcattgatacaagtggtgaattgcaacggtgagagagtgtttgatggagagctgcaagagggacgggtgctgatcgtgccacgaaactcttgtggtggctgcaagatgcacagagtgcacaact

SEQ ID NO: 123172 - DNA, 264 bp, Glycine max
attgctggtaatactcttatgccagctttttctgttccacaggctactgccagatcttctgaaaatgcggaatcctctgcatgatctggaatttgtgttttctttcatttgtccgtttgtttaattcaataaaggaaattaggcatgaccctcttgttgagtatgctctgcctatttgaaaatttccacacctcttttaattgtcgtaatgatgtgtgaagtgtgtgttattttaaaaaaaaaaaaaaaaaagggcggccgccg

SEQ ID NO: 123173 - DNA, 143 bp, Glycine max
ctcgagcgtctcgagccgcttccagcaagttatgggtttccttgtgttgcttcttttctccctcataggtctctcttctagttccagcatatcaactcattgttccatattggaccttgacttaaccaagtttaccacacagc

SEQ ID NO: 123174 - DNA, 264 bp, Glycine max
attctctccattggtccttaaacactcatcagtcatcaccatggccaagctagttttttccctttgttttctgcttttcagtggctgctgcttcgctttcagttccagcgagcagcctcagcaaaacgagtgccagatccaaaaactcaatggcctcaaaccggataagcgtatagagtcagaaggagggctcactgagacatggaaccctaacaacaagccattccagtgtgccggtgttgccctctctcgctgcaccctcaa

SEQ ID NO: 123175 - DNA, 261 bp, Glycine max
gcaacagtgagaacaccattgaattttgattctagcaagcagagcttttgtcaattttctattgaccttctcggtggaggaattttagtggacaaaactggagattggatcacacttatacaaaattctccaattagtaacttgttgagagttgctgcttggaagaaaggctgtttaatggttaagattgtgatgtctgggaatgcagcagtcaaaaggagtgattgggcctcattggtacaagtgtttttaacaaacagc

SEQ ID NO: 123176 - DNA, 257 bp, Glycine max
gttcaatatcctagtataccttaataaatagtttaagatactatgatgagagcacggttcccattactgttgctgggacttgttttcctggcttcagtttctgtctcatttggcattgcttactgggaaaaagagaaccccaaacacaacaagtgtacccagagttgcaatatcgagagagactcgtacaggaaccaagcatgccacgctcgttgcaacctccttaaggtggagaaagaagaatgtgaagaaggtga

SEQ ID NO: 123177 - DNA, 205 bp, Glycine max
ctctccgcaagaatgcaatgttcgtggcacactacaacctgcacgggaacagcttatatacgcattgaatcgacgggcattgataccagtggtgaattgcaacggtgacagaatgtttgatagagagctgcagagggacgggtgctgatcgtgccacaaaactttgtggtggctgcaagatcacagagtgacaacttcgagtatg

SEQ ID NO: 123178 - DNA, 264 bp, Glycine max
ataaagatgagtttgaagaacaacatggtggtgctaaaggtgtgtttgttgcttcttttccttgtgggggttacagctgcacgcatggaactgagcttcttcaaaagtgatcagtcatcaagttatgatgatgatgagtattcaaaaccatgctgtgatctctgcatgtgcacacgctcaatgcctcctcaatgcagctgtgaagatattaggctgaattcatgccactcagattgtaagagctgtatgtgcacacgctcacag

SEQ ID NO: 123179 - DNA, 115 bp, Glycine max
ccatggccaagctagttttgacccggtgttttctgcttttcagtggctgctgcatcgctttaagttccagagagcagcctcagacaaacgagtgccagatccaaaaactcaatgc

SEQ ID NO: 123180 - DNA, 148 bp, Glycine max
acacatacccccaactaacaataattccttcacttgcagaacttagttctctgttgcatcatcatcatcttcattagtgttagccctaaacttcaccttcaaccattaccacagtgccaccacacagtgtccaagtgcacacaacaac

SEQ ID NO: 123181 - DNA, 255 bp, Glycine max
  unsure (1)..(255): unsure at all n locations
gttccacactgcatacgattctccgntgagaaccaaactttctttagctatctttttctttattcttttagctntattttcaaacctagcctttggcaaatgtaaagaaaccgaggtagaagaagaagaccctgagctcgtaacatgcaaacaccaatgccaacagccacagcaatacactgagggtgacaagcgggtatgcttgcaaagatgtgacaggtatcatcgtatgaagcaagagcgagagaaacaaat

SEQ ID NO: 123182 - DNA, 263 bp, Glycine max
ctgacgctgattacctcatcgttatccttaacgggactgccattcttaccttggcgaacaacgacgaccgagactcttacaaccttcaatctggcgatgccctaagagtccctgcaggaaccacatactatgtggttaaccctgacaacgacgagatcctcagaatgataacactcgccatacccgttaacaaacccggtagatttgagagtttcttcctatctagcactcaagctcaacagtcctacttgcaagggttcagc

SEQ ID NO: 123183 - DNA, 181 bp, Glycine max
tattttgataaaccgcgatcacaggttgccgcaccttaaaaccggaaacaaaagcaatcgttacttgatttcaagaatctctcaatttcttcctacttctttgtgtacggtttcttaagggaaagaaattcactctctgtgctggccacagacttcgtgaattatcatctattccacacaa

SEQ ID NO: 123184 - DNA, 260 bp, Glycine max
ggagttctgagtgggcaaatcaaacttcatggcatttgagtttccttattgacaatcccaaacagtctacagtttttgatattctcttgggaatttctcaagattttgagattgctggtaatactcttatgccagctttttctgttccacaggctactgccagatcttctgaaaatgcggaatcctctgcatgatctggaatttgtgttttcttttgcttgttcgtttgtttaattcaataaaggaaattaggcatgacc

SEQ ID NO: 123185 - DNA, 261 bp, Glycine max
ccttagttcaatatggggaatcccttcattctctctctttcttccctttgcttgctactcttgtacagtgcatgctttgctattagctccagcaagctcaacgagtgccaactcaacaacctcaacgcgttggaacccgaccaccgcgttgagttcgaaggtggtttgattcaaacatggaactctcaacaccctgagctgaaatgcgccggtgtcactgtttccaaactcaccctcactctcaatggcctccacttgcca

SEQ ID NO: 123186 - DNA, 262 bp, Glycine max
cttcagagagggtgatttgatcgcagtgcctactggtgttgcatggtggatagataacaaagaagacactcctgatgttgccgtttctattattgacaccaacagcttggtgaaccagctcgaccagatgcctaggaagattctatcttgctgggtaccaagagcaagagtttctagaatatcagcagcagcagcaaggaggttcccaaagccagagaggagagcaacaagaagaagataacgaaggaagctacatattgag

SEQ ID NO: 123187 - DNA, 263 bp, Glycine max
ggcaacagtgagaacaccattggattttgattacagcaagcagagcttttgtcaattttctattgaccttctcggtggaagaattttagtggacaaaactggagattggatcacacttatacaaaattcttccatttagtaacttgttgagagttgctgcttggaagaaaggctgtttaatggttaagattgtgatgtctgggaatgcagcagtcaataggagtgattgggcctcattggtacaagtgtttttaacaaacagc

SEQ ID NO: 123188 - DNA, 261 bp, Glycine max
ggcaacagttagaacaccattgaattttgattctagcaagcagagcttttgtcaattctctattgatcttcttggtggaggaattttagtggacaaaactggagattggatcacacttatacaaaattctccaattagtaacttgttgagagttgctgcttggaagaaaggctgtttaattgttaaccgtgagatgtctgggaatgcagcagtcaaaaggagtgattgggcctcattggtacaagtgtttttaacaaacag

SEQ ID NO: 123189 - DNA, 260 bp, Glycine max
ggcaacagtgagaacaccattgaattttgattctagcaagcagagcttttgtcaattctctattgatcttcttggtggaggaattttagtggacaaaactggagattggatcacacttatacaaaattctccaattagtaacttgttgagagttgctgcttggaagaaaggctgtttaatggttaagattgtgatgtctgggaatgcagcagtcaaaaggagtgattgggcctcattggtacaagtgtttttaacaaaca

SEQ ID NO: 123190 - DNA, 260 bp, Glycine max
cttgaatacaatactcagcatggctaagcttgttctttccctttgttttctgcttttcagtggctgctgcttcgcttccagtttcagagagcagccacagcaaaacgagtgccagatccaacgcctcaatgccctcaaaccggatatacgtatagagtcagaaggtggcttcattgagacatgtaaccctaccaacaagccattccagtgtgccggtgttgccctctctcgctgcaccctcaaccgcaacgcccttcgca

SEQ ID NO: 123191 - DNA, 163 bp, Glycine max
actagttcaatatcctagtatgccttaatgcataatttgagatactatgatgatagcacggatcccattactgttgctgggacttgtttgcctggctgcagtttctgtctcatttggcattgcttactgggcaaaagaggaccccttacactacaagtgtctc

SEQ ID NO: 123192 - DNA, 166 bp, Glycine max
gcgggatggtctggtgccgttggcccatctggggcccaagacactcggaaaactgggtttaacatcatgtctggaactttcatgtcctgtccccaaaaaagtggtttgcgtgcggttatgaaagctgcgaatccagatcggagtccaagtgctatcaaatctgcac

SEQ ID NO: 123193 - DNA, 165 bp, Glycine max
tatacactcatcagtcatcaccatggccaatctagttgtgtcccaatgttgtctgcttatcagtggctgctgcatcgctttcagttccagagagtattcgcagtaagacgagtgacaggatccaagtactcaatgccctcaaaccggataaccgtatagagtcag

SEQ ID NO: 123194 - DNA, 260 bp, Glycine max
tgtttttgatattctcttgagagattcccaagagaatatcaaaaactgtagactgtttgggaatctctcaagattttgaaattgctggtaatactcttatgccacctttttctgttccacaggctactgccagatcttctgaaaatgcggaatcctctgcatgatctggaatttgtgttttctttcgcttgttcgtttgtttaattcaataaaggaaattaggcatgaccctcttgttgagtatgctctgcctatttgaa

SEQ ID NO: 123195 - DNA, 246 bp, Glycine max
ctttccttagttcaatatggggaagcccttcttcactctctctctttcttccctttgcttgctactcttgtcgagtgcatgctttgctattacctccagcaagttcaacgagtcccaactcaacaacctcaacgcgttggaacccgaccaccgcgttgagtccgaaggtggtcttattgaaacatggaactctcaacaccctgagctgcaatgcgccggtgtcactgtttccaaacgcactctcaa

SEQ ID NO: 123196 - DNA, 259 bp, Glycine max
agaaaagggaagtgaagaggaagatgaggatgaggatgaggaacaagatgaacgtcaattcccattcccacgcccacctcatcagaaggaagagcgaaagctagaggaagatgaggatgaggagcagcagcgagagagcgaagaaagtgaagattctgagttacgaagacataagaataagaacccttttctcttcggctctaacaggttcgaaactctcttcaaaaaccaatatggtcgcattcgcgtcctccagagg

SEQ ID NO: 123197 - DNA, 253 bp, Glycine max
cactaataatgacacttccttagttcaatatgggggaacccttcactctctctctttcttccctttgggtgctaactcctgtcgagtggcatgccttggtagtaactccagcaagctcaacgatcggcaactcaacaacctcaacgcgttggaacccgaccagcggcgtgagtccgaagtggttttgattcaacatggaactctcaacaccctgagctgaaatgcgccggtgtcaatgttgcaaactcacctc

SEQ ID NO: 123198 - DNA, 243 bp, Glycine max
gtcctacttgctgggcttcagccataatattctagagacctccttccatagcgaattcgaagagataaacagggttttgtatggagaggaagaggagcagaggcagcaagagggagtgatcgtggaactctcaaaggaacaaattcggcaactgagcagacgtgcccaaatctagttcaagggaaaccatttcctccgaagatgaaccattcaacttgagaagcgcaacccatctattccaac

SEQ ID NO: 123199 - DNA, 257 bp, Glycine max
ccattggtccttaaacactcatcagttctcaccatggccaagctagttttttccctttgttttctgcttttcagtggctgctgcttcgctttcagttccagagagcagcctcagttaaacgagtgccagatccaaaaactcaatgccctcaaaccggataaccgtatagagtcagaaggagggctcattgagacatggaaccctaacaacaagccattccagtgtgccggtgttgccctctctcgctgcaccctcaa

SEQ ID NO: 123200 - DNA, 245 bp, Glycine max
ataaaattcttccaccaagttatgggtcttcttgtgttgcttcttttctccctcttaggtctctcttctagttccagcatatcaactcatcgttccatattggaccttgacctaaccaagtttaccacacagaaacaggtgtcttcactgttccaactatggaagagtgagcatggacgtgtctaccataaccacgaagaagaggcaaagagacttgagattttcaagaataattggactatatc

SEQ ID NO: 123201 - DNA, 260 bp, Glycine max
tagttcaatatcctagtataccttaataaataatttaagatactatgatgagagcacggttcccattactgttgctggtacttgttttcctggcttcagtttctgtctcattttgcattgcttactgggaaaaagagaaccccaaacacaacaagtgtctccagagttgcaatagcgagagagactcgtacaggaaccaagcatgccacgctcgttgcaacctccttaatgtgtagagagaagaatgtgaagaaggtgat

SEQ ID NO: 123202 - DNA, 261 bp, Glycine max
tgaccaagttcacaatcctcctcatctctcgtctcttctgcatcgcccacacttgcagcgcctccaaatggcagcaccagcaagatagctgccgcaagcagctccagggggtgaacctcacgccctgcgagaagcacatcatggagaagatccaaggccgcggcgatgacgatgatgatgatgacgacgacaatcacattctcaggaccatgcggggaagaatcaactacataaggaggaacgaaggaaaagacgaggacg

SEQ ID NO: 123203 - DNA, 285 bp, Glycine max
tgaccaagttcacaatcctcctcatctctcttctcttctgcatcgcccacacttgcagcgcctccaaatggcagcaccagcaagatagctgccgcaagcagctccagggggtgaacctcacgccctgcgagaagcacatcatggagaagatccaaggccgcggcgatgacgatgatgatgatgacgacgacaatcacattctcaggaccatgcggggaagaatcaactacataaggaggaacgaaggaaaagacgaagacgaagaagaagaaggacacatgcaga

SEQ ID NO: 123204 - DNA, 282 bp, Glycine max
tgtcagcttgggatgtcccagtaatcatattcttaatgaaatccctatgtccaggcgcatcaataagaatatgattactgggacatcccaagctgactgtgctgttcttatcattgattcgaccactggtggttttgaagctgctatttccaaggatggacacactcgtgaacatgctctgctttcattcacccttggtgtgaaacagatgatttgctgctgtaacaaaatggatgctactacacccaagtattccaaggccaggtatgatgaaattgtgaa

SEQ ID NO: 123205 - DNA, 281 bp, Glycine max
atcgttttctttgaaacgcacagcttcaatcaccgaccacaccacccatcaacgacatgcttcctctttcccttctcaagactgcccaaggccaccctatggcaactcacttttcattctcttctcttttatttctaacttattattattatgatggtgatggtgatgttgatgatgatgtaacagttggtggaactgaaaaatggggagacatataacgggcatttggttaattgcgacacatggatgaacatccatctgcgagaagtcatttgtacatc

SEQ ID NO: 123206 - DNA, 285 bp, Glycine max
gccaggaggaaaaacacggaggaaagggaagtgaagaggaacaagatgaacgtgaacacccacgcccacaccaacctcatcaaaaggaagaggaaaagcacgaatggcaacacaagcaggaaaagcaccaaggaaaggaaagtgaagaagaagaagaagaccaagacgaggatgaggagcaagacaaagagagccaagaaagtgaaggttctgagtctcaaagagaaccacgaagacataagaataagaacccttttcacttcaactctaaaaggttccaaactc

SEQ ID NO: 123207 - DNA, 283 bp, Glycine max
gaagaggggtgccctgctttctctttgatcaacaaggccactggtgaagccttgaagcactccatcggtgccactcatcctgttcggctgataccttacaagcccgactatcttgatgagtctattctatggactgaaagccgtgacttaggagatggccacagagctataaggatggtcaacaatgttcatcttaatgtggatgcttttcacggtgacaagaattctggaggtgttcgtgatggcactacaatagtcctctgggactggaacaaaggtgata

SEQ ID NO: 123208 - DNA, 283 bp, Glycine max
aaacttattaacacttgccttagttcaatatggggaagcccttcttcactctctctctttcttccctttgcttgctactcttgtcgagtgcatgctttgctattacctccagcaagttcaacgagtgccaactcaacaacctcaacgcgttggaacccgaccaccgcgttgagtccgaaggtggtcttattgaaacatggaactctcaacaccctgagctgcaatgcgccggtgtcactgtttccaaacgcaccctcaactgcaacggcctccacttgccatc

SEQ ID NO: 123209 - DNA, 263 bp, Glycine max
attttcttttccttcactttcccgagaaaaaaataacacttttcactttcttcactacgttctcacttcgatatggctcgtacgaagcaaaccgctcgcaagtccaccggtggcaaggcgccacgtaagcagctcgccaccaaggccgctcggaagtccgctccggcgaccggaggagtgaagaagccccaccgcttcaggccgggaaccgtggcgctgagggaaatcagaaagtaccagaagagcaccgagcttctcatcag

SEQ ID NO: 123210 - DNA, 284 bp, Glycine max
atcttgcaacgattaacaatggcttcaaccgacaagtcaccggacccaacgccggcgaagggtccggatccaactccggggaagccgatgagtgttggtcagcacgtgatcgacaagagtgcaatgatggtgcagtcgctggaccccattaagcagatgagtcagcacgtgtgctccttcgctatctacagccatgacatgtctcgccagatagagacacatcactactgctccagactccaccagaacttcatacaatgtgctgtctatgattccgatgaatc

SEQ ID NO: 123211 - DNA, 285 bp, Glycine max
aaaattcttccaccaagttatgggtttccttgtgttgcttcttttctccctcttaggtctctcttctagttccagcatatcaactcatcgttccatattggaccttgacctaaccaagtttaccacacagaaacaggtgtcttcactgttccaactatggaagagtgagcatggacgtgtctaccataaccacgaagaagaggcaaagagacttgagattttcaagaataacttgaactatatcagggacatgaatgcaaacagaaaatcaccccattctcatcg

SEQ ID NO: 123212 - DNA, 175 bp, Glycine max
taaacctcgatcacaggttgccgcaccttaaaaccggaaacaaaagcaatcggtacttgatttcaagaatctctcaatttcttcctacttctttgtgtacgatttcttaagggagagaaaatcactctctgtgctggccacagacttcgtgaatcattttctgttccactcttag

SEQ ID NO: 123213 - DNA, 291 bp, Glycine max
ttgtctttgagcactcatcaccatggccaagcttgttctttccctttgtttccttcttttcagtggctggcttcgctctgagagagcaggcacagcaaaatgagtgccagatccaaaagctgaatgccctcaaaccggataaccgtatagagtcggaaggtgggttcattgagacctggaaccctaacaacaagccattccagtgtgccggtgttgccctctctcgctgcacccttaaccgcaatggccttcgtagaccttcctacaccaacggtcccaaggaaatctaca

SEQ ID NO: 123214 - DNA, 283 bp, Glycine max
gacagttaggcagttggaggcattaatcagactgtcagaggccattgcacggtgtcatttggacaatgaggtacaacctcgtcatgttcgtctagcagtaaaactgctgaaaacttccataataagtgtggaatccagtgagattgatctgtctgagtttcaagaacaaaaccacaatgatggtgcaggtggtggcaatgaaaatgataataatagagatgctaattatcaagaggggaatgatacagcgcacaagctgccggaaatggtaatgatcaagtgg

SEQ ID NO: 123215 - DNA, 289 bp, Glycine max
tctctgaattcggctcaaggtctttgaacactcatcaccatagccaagcttattctctccctttgtttcctgctttgcagtggctgcttcgctgctgagatagcaggcacagcaaaatgagtgccagatccaaaagctgaatgccctcaaaccggataaccgtatagagtcggaaggtgggttcagtgagacctggaaccctaacaacaatccattccagtgtgccggtggttgccctctctcgctgcacgcttaaccgcaatgcccttcgtagaccttcctacaccaa

SEQ ID NO: 123216 - DNA, 278 bp, Glycine max
attttatatcaagaattttatgcaaactgagtttttccttgtgagtttgactcttgaagacattccaaaccatggaagcattgtatttgtttgcaatttctggatttacaatgccaaactcttcaaaagtgaccgcattttctttgccaaccagacatatcttccaagtgagacaccagctccactagtcaaatatacagaagaagagttgcataatttaagaggagatggaactggagaacgcaaagagtgggaaaggatctatgattatgatgtct

SEQ ID NO: 123217 - DNA, 276 bp, Glycine max; identical to SEQ ID NO: 102836

SEQ ID NO: 123218 - DNA, 88 bp, Glycine max
atactcgatcgctagtgattgtcattgttatatataataatgttatctttcacaacttatcgtaatgcatgtgaaactataacacatt

SEQ ID NO: 123219 - DNA, 280 bp, Glycine max
ctcaggatagctggagcccgcgggcgagttctatcgggtaaaaccaatgattagaggcatcgggggcgcaacgccctcgacctattctcaaactttaaataggtaggacggtgcggctgctctgttgagccgcgccatggaatcgagagctccaagtgggccatttttggtaagcagaactggcgatgcgggatgagccggaagctgggttacggtgcccaactgcgcgctaacctagaccccacaaagggtgttggtcgattaagacagcaggacggtg

SEQ ID NO: 123220 - DNA, 183 bp, Glycine max
attttgataaaccgcgatcacaggttgccgcaccttaaaaccggaaacaatagcaatcgttacttgatttcaagaatttctcaatttctttctacttctttgtgtacgatttcttaagggaaagaaaatcactctctgtgctggccacagacttcgtgaatcattgtcttttccacattaagt

SEQ ID NO: 123221 - DNA, 282 bp, Glycine max
acggtttccttctaaagcacaacactaaagttcagcaatcagtactctcaagaagaaaattacaagatcatcatcacaataacaatatgagttcaggaattagagcatggagtgtggcaactagcgttggagttgtggaggccttaaaagaccaaggtatatgtaggtggaatcatgctttaagatcagctcaacaccatctcaaaaaccatgttggttcattctctcaggctaacaagctttcttcttctgctatgagctccacaacactaaaacatggga

SEQ ID NO: 123222 - DNA, 280 bp, Glycine max
acgagattatgatgctctgtctggctcaaaacgttcttatgctgctatagatgatgttcctccacgatatgctgatactggtgctcgccaatcaagagctcgactggactatgactatggcggtagtgcttcacagtatggagatgcttatggtgatagacttggaagatctagtatgggatatggtggtggcagcagaagttctatttccagtcaagattcacatgggttgtatagcagtcggcagggcatgagttatggaggaggttcttttggtagt

SEQ ID NO: 123223 - DNA, 232 bp, Glycine max
aacaattccttcacttgcagcactgttgcatcatcatcttcattgcaaaaccctaaacttcaccttcaaccatgaccacacaagtaccaccacacagtgtccaagtccacacaacaacacacccctacgaagctggcgtcgtcccccccggagcccgtttcgaaccgccgcgttatgaagccggcgtcaaagcgccctccatttaccattccgagagaggtccaacgacttc

SEQ ID NO: 123224 - DNA, 277 bp, Glycine max
ggctgtttctttttcttcttcttcttcttctttattttctcattttgccaaactaaaatagttgtgttggtagctttggcaaagatgttttcagcaggccataagatcaaagggacagtggtgttgatgcccaagaatgagttggaagttaaccctgatggctcagcagttgacaaccttaatgctttcttgggccgtagtgtctcccttcagctcattagtgctaccaatgctgatggttaattaatttcttcatcgtgtcacttttttccatcat

SEQ ID NO: 123225 - DNA, 280 bp, Glycine max
tctccattgtctttgaacactcatcaccatggccaagcttgttctttccctttgtttccttcttttcagtggctgcttcgctctgagagagcaggcacagcaaaatgagtgccagatccaaaagctgaatgccctcaaaccggataaccgtatagagtcggaaggtgggttcattgagacctggaaccctaacaacaagccattccagtgtgccggtgttgccctctctcgctgcacccttaaccgcaatgcccttcgtagaccttcctacaccaacggt

SEQ ID NO: 123226 - DNA, 275 bp, Glycine max
gcgcgttctacacgtgttgccgatctcggatgttgtaaaattagtttatgatgtgaagctatggagtggaaaatatgtggatgtaggagatttcgggatgaatggcctcaaaacgctttgtcgtttgtggttattgagtcctgagtgatcttgtcatccgacctttgccatgacaggtgcgcttgcatggcaggtcaaaaaatgttaataaaaaaagttttattggtttggggagagatcgcacgggggttgcccgggtctcttcctcttgtgtg

SEQ ID NO: 123227 - DNA, 180 bp, Glycine max
tgataaaccgcgatcacaggttgccgcaccttaaaaccggaaacaaaagcaatcgttacttgatttcaagaatctctcaatttcttcctacttctttgtgtacgatttcttaagggaaagaaaatcactctctgtgctggccacagacttcgtgaatcattttcttttccacacaacata

SEQ ID NO: 123228 - DNA, 277 bp, Glycine max
caacgaagatctcagattaataacactctccatagccgttaacaaacctggtcagattgtgagagtttcttcctgtcgagcactgaagctcaacaatcctacttgcaaggattcagcaggaacattttagaggcctcctacgataccaaattcgaggagataaacaaggttctgtttagtagagaggaagggcagcagcaaggggagcagaggctgcaagagagcgtgattgtggaaatctcgaaggaacagattcgggcactgagcaaacgtgcca

SEQ ID NO: 123229 - DNA, 257 bp, Glycine max
cttattaacactttccgtactgcaatatggtggaagcccttcttcactctctctcttgcttccctttgcttgctactcttgtcgagtgcatgctgtgctatgacctccagcgagttcaacgagtgccaactcaacaacctcaactcgttggaacccgaccaccgcgttgagtccgatagtggtcttattgagacatggaactctcaacaccctgagctgcaatgcgccggtgtcactgtttccaaacgcaccctcaa

SEQ ID NO: 123230 - DNA, 200 bp, Glycine max
atgacattgattccgggaaccagtgttgaagatggtgacaacaagctaacagttgaacttgagaagagtgttcctacattggttggcattgaatgtcccaaggatgaaaaacttcctcgtcgcaaagtttttgataaacctaagacgcgctggttcacaattctccctatggagttcatcttgggggtccgccagaagtt

SEQ ID NO: 123231 - DNA, 277 bp, Glycine max
agacgacgaaaggaagcagatcgtgacagtggaaggaggtctcagcgttatcagccccaagtggcaagaacaacaagatgaagatgaagatgaagacgaagatgatgaagatgaacaaattccctctcaccctcctcgccgaccaagccatggaaagcgtgaacaagacgaggacgaggacgaagatgaagataaacctcgtcctagtcgaccaagccaaggaaagcgtgaacaagaccaggaccaggacgaggacgaagatgaagatgaagatcaa

SEQ ID NO: 123232 - DNA, 276 bp, Glycine max
gactgttgatggaccatcagccaaggactggagaggtggaagagctgcttcatttaacatcattcctagcagcactggagctgccaaggctgttgggaaagtcctccctgctttgaatggaaaattgactggtatggcattccgtgttcccaccgtggatgtctctgttgttgacctcacagtgaggctggagaaagaagcttcctacgatgaaattaaaaatgctatcaaggaggaatcagagggcaagttgaagggaattcttggttacactga

SEQ ID NO: 123233 - DNA, 184 bp, Glycine max
gaaattttgataaaccgcgatcacaggttgccgcaccttaaaaccggaaacaaaagcaatcgttacttgatttcaagaatctctcaatttcttcctacttctttgtgtacgatttcttaagggaaagaaaatcactctctgtgctggccacagacttcgtgaatcattttcttttccacacaac

SEQ ID NO: 123234 - DNA, 276 bp, Glycine max
gaaaacctatggattcctgacaccagaattctggaaggagactcgcttctccaaatctccattccaagagtacacagatctactggcaaaaccaacaggaaagactctaatcttggaggaggaaagggtggatgcttgatttgctagttttgctttatggatgttttaggaactttattactttacatactttgttggttctgtgctttacttttggttttgatagacggtatgtctctgtatgcattttgattgtttccaagttttaattgactg

SEQ ID NO: 123235 - DNA, 274 bp, Glycine max
aaaccccacaacaacggctatttttgcactcttgtcgttttcgaaggtataaagatgaatctgaagaacatgaaggttccgaacgttccaggtggcggggggaaatctgcgctgctgaagcttgggattgttggtggaattggtttgtatgcagctggtaacagtctctacaatgttgatggaggtcaccgagccattgtgttcaaccgtctagttggtgtcaaagacaaggtctatcctgaaggaactcacttcataattccgtggtttgaga

SEQ ID NO: 123236 - DNA, 270 bp, Glycine max
tgccagttctgatatttacaccatctgctctcaagactgtgaattatggaatcctgcttacacaaaagcaatgactatgtcatttagtccaaacccgtgttctgatgcgtggagtttggaatttctgaagcgtaccggatttcattgtgatatcatttgtgtcactggatggactgccactccaatgcattatgtgcaggttacaattgattggtttatttcctctcaggaatgtgttcccaggacctattgtgtttgaaatccacaaaa

SEQ ID NO: 123237 - DNA, 91 bp, Glycine max
gcaagaatctcagcaacgaggacgaagccagaggccccaagacggtcaccataaggtacatcgcttcagagagtgtgatttgatcgcagtg

SEQ ID NO: 123238 - DNA, 276 bp, Glycine max
caacggagttacggttggaagcgttttctccttggtatcttgagcctggattctctagcgtgcgtcccacaatagtgtttcctgcgtcccaaacaaaactcaagtacggtcagacgttgaggcttcggtttgaggtgatgagcgcgactttggttggggattcggtgtcggttacgatgctgtcgccgccatttaacacgcactcgttctccatgaatcagaggatgctggtgctggagccacacgatttgagtaaggttggggaatcgacgtacg

SEQ ID NO: 123239 - DNA, 275 bp, Glycine max
ctcgagccgcttctcttcttcaattcattctagttctggattccgactcgccgcattgactaggtccgggttggggtcgactcagttcggtttttcattctctcgcgaatctaatctataggaaaagctaagggcacatcacaatgaaggcattgattctggttggggggtttggaacaaggctgaggccactgacactcagttttcctaagcctcttgttgattttgctaacaaacctatgattctgcatcagatagaggcccttaaggccatt

SEQ ID NO: 123240 - DNA, 275 bp, Glycine max
gcgagaagcacatcatggagaagatccaaggccgcggcgatgacgatgatgatgatgacgacgacaatcacattctcaggaccatgcggggaagaatcaactacataaggaggaacgaaggaaaagacgaagacgaagaagaagaaggacacatgcagaagtgctgcacagagatgagcgagctgagaagccccaaatgccagtgcaaagcgctgcagaagataatggagaaccagagcgaggaactggaggagaagcagaagaagaaaatggag

SEQ ID NO: 123241 - DNA, 271 bp, Glycine max
agcagatgtctaatgttttgtgggtagctcctgaggacaaggcgagtttatggtcacaacttcattatgtgtcgtgtaataatctggaaatgcaagaagcttatcttgtcaatctcgtaaatgtgttacgagaattgtatttgcacagtccagaggaagctcgccaattgagaaggaaagctctctctcgtattgaatggctgcaaaaagctgatgtgcctaccatagcacagattgaagagttccattcgatgcagaggatgatgaatgc

SEQ ID NO: 123242 - DNA, 273 bp, Glycine max
cattggtccttaaacactcatcagtcatcaccatggccaagctagttttttccctttgttttctgcttttcagtggctgctgcttcgctttcagttccagagagcagcctcagtaaaacgagtgccagatccaaaaacttaatgccctcaaaccggataaccgtatagagtcagaaggagggctcattgagacatggaaccctaacaacaagccattccagtgtgccggtgttgccctctctcgctgcaccctcaaccgcaacgcccttcgta

SEQ ID NO: 123243 - DNA, 268 bp, Glycine max
cttcctcagtattgtggatatgaacgagggagctcttcttctaccacacttcaattcaaaggcgatagtgatactggtaattaatgaaggagatgcaaacattgaacttgttggcctaaaagaacaacaacaggagcagcaacaggaagagcaacctttggaagtgcggaaatatagagccgaattgtctgaacaagatatatttgtaatcccagcaggttatccagttgtggtcaacgctacctcaaatctgaatttctttgctatt

SEQ ID NO: 123244 - DNA, 267 bp, Glycine max
gttctttaattttctgattttagcaaattaaaatagtagtgttattggtaggttttggcaaagatgttttcagttccaggggtgtcgggtatcctgaacagaggaggagggcataagataaaagggacagtggtgttgatgaggaagaatgtgttggacttcaacagcgtggctgatcttactaaaggaaatgttgggggactcataggcaccggcctcaacgttgttggctcaacacgtgataacctcactgctttcttgggccga

SEQ ID NO: 123245 - DNA, 271 bp, Glycine max
caaacccgtgttctgatgcatggagtttggaattttttgaagcgtaccggatttcactgtgatatcatttgtgtcactggatggactgccaccccaatgcaggatgttcaggttacaattgattggtttatttcctctcaggaatgtgttcccaggacttattgtgttttaaatccacaaaatccttttgtgttaaataggtggatggggaaactgactttcccccagggcacttcccgaaatgttaagagaatgcctctttctatagggg

SEQ ID NO: 123246 - DNA, 272 bp, Glycine max
accattcctcagtccatttcacagcaaactgtttggaatcaaatggcaacagtgagaacaccattgaattttgattctagcaagcagagcttttgtcaattctctattgatcttcttggtggaggaattttagtggacaaaactggagattggatcacacttatacaaaattctccaattagtaacttgttgagagttgctgcttggaagaaaggctgtttaatggttaagattgtgatgtctgggaatgcagcagtcaaaaggagtgattg

SEQ ID NO: 123247 - DNA, 273 bp, Glycine max
ataatgactgggataaacttaagaattcaattattgaaattgtataagtaaacaatttaattggattggtcgaatggtatcataaaaatggagtactaactcccatttcttatttattattgaattaaccgatcaacttgctttgttatcgaacatttctttttgatttcaaaaattttccggataaaatttgaatctatgtttatatgcgaatcaatcctactacttctggtccctaggtttctgcgcttgaaaaaaagaatctgggacgtt

SEQ ID NO: 123248 - DNA, 276 bp, Glycine max
attccatccgaatttgaataaaaaacaaaagaaaagaaaggtgacatggcaaagtgataataatagctttcttctccgtctcaattcatctcttctctgagtctcaacctaattccccaatcaatcatctttacgtgtttgttcgagaccatggccaaaagccccttcaagcttgaacatcccttggaaagaaggcaggctgagtctgctcgcattagagacaagtatcctgatagaatacctgtgattgttgagaaagctgaaagaagtgacatc

SEQ ID NO: 123249 - DNA, 269 bp, Glycine max
ctcgagccgaatcggctcgagatatactatgatgagagtgcggtttactttgttggtgttgctgggaactgttttcctggcatcagtttgtgtctcattaaaggtgagagaggatgagaataaccctttctacttgagaagctctaacagcttccaaactctctttgagaaccaaaacggtcgcattcgtctcctccagagattcaacaaacgctccccacaacttgagattcatcgagactaccggattgtccagtttcagtcaaaac

SEQ ID NO: 123250 - DNA, 82 bp, Glycine max
cttaattattaacacttccttagttcaatatggggaagcccttcactctctctcattcgtccctttggctgctactcttgtc

SEQ ID NO: 123251 - DNA, 185 bp, Glycine max
cagtgagaatacaggtatagcattggcctgtgctatgaatagttcttttagggaggcgtgccagttctgatatttacaccatctgctctcaagactgtgaattatggaatcctgcttgcacaaaagcaatgactatgtcatttaatccaaacccgtgttccgatgcatggagttgggaattttgg

SEQ ID NO: 123252 - DNA, 197 bp, Glycine max
caaagagtggcttgcagagttagacattctcggtgaccttgtccatccaaatctggtcaaattggttggtttctgtattgaagatgaccaaagattattggtttatgaatgtatgccccgtggaagtttggagaaccacctcttcagaaaagggtcgttgcctcttccttggtctatcagaatgaaaatggcacttg

SEQ ID NO: 123253 - DNA, 281 bp, Glycine max
tttttctgccacacttcaattcaaaggccatagtggtactagtgattaatgaaggaggagcaaacattgaacttgttggcattaaagaacaacaacagaggcagcaacaggaagagcaacctttggaagtgcggaaatatagagctgaattgtctgaacaagatatatttgtaatcccagcaggttatccagttgtggtcaacgctacctcagatctgaatttctttgcttttggtatcaatgccgagaacaacagaggaacttcttgcaggttcgaaaga

SEQ ID NO: 123254 - DNA, 268 bp, Glycine max
caaatatgatataattggtgctggttcacattcttcagatgattttcctgaaaaggaagatcaagaaaaacccaaaaagattgatgccagattgagacaaagaatagatcctcaatacaatgaggttcaggctcagatggaaacaaatttgtttaaattgtctcttgatgatgttgaaactcctaaaggttccatgttggatcttaaattttctcagtctaaaattgcacttcccaggaacacagttggtggaactattctgcgtagt

SEQ ID NO: 123255 - DNA, 249 bp, Glycine max
gcaaagcaatggctacttcaaagttgaaaacccagaatgtggttgtatctctctccctaaccttaaccttggtactggtgctactgaccagcaaggcaaactcagcggaaactgtttctttcagctggaacaagttcgtgccgaagcaaccaaacatgatcctccaaggagacgctattgtgacctcctcgggaaagttacaactcaataaggttgacgaaagcggcacccaaaaaccctcgtctcttg

SEQ ID NO: 123256 - DNA, 83 bp, Glycine max
ctctccataggtccttaaacactcataagtcataaccatggccaagcaagttttttcccattgttttctgcttttcagtggct

SEQ ID NO: 123257 - DNA, 289 bp, Glycine max
tggttaccaatttttgtgaattgtctttatcctgtaagtcaattaccttcagaagctgtcgttgtaaatgttacatgtggtagtggacgtggtggtttacctaccactgcttggattagttctgcagttaacaatcgctcctcagatatcaacaaaaagattcgcacagcacttgggaaaggtaagaaaattgtttttcttactagagttgatccttttccagtagctctactggctgttctttttggcgttaagaatgaaattctgagttccaacgccactaacccta

SEQ ID NO: 123258 - DNA, 284 bp, Glycine max
gtgcggtttcctttgttggtgttgctgggaactgttttcctggcatcagtttgtgtctcattaaaggtgagagaggatgagaataaccctttctacttgagaagctctaacagcttccaaactctctttgagaaccaaaacggtcgcattcgtctcctccagagattcaacaaacgctccccacaacttgagaatcttcgagactaccggattgtccagtttcagtcaaaacccaacaaaatccttctcccccaccatgctgacgcggatttcctcctctttgt

SEQ ID NO: 123259 - DNA, 284 bp, Glycine max
gatccggataaaggtgaaaatcatgcccgtcctgttcttggaggaaatgacacctttccttatcctcgtagggggagaactggtagaaaaccaacaaggaaagatcctaatagtgagagtaggagcaatgatgtttatcttccaagagatgaggcttttggacacttgaagtcatctgactttcttacttatggactaaaatccgtatctcaaaatgttcttccattattgcaatctgcttttgatttgaatttcacaccccgtgagtttgatagctttgatga

SEQ ID NO: 123260 - DNA, 127 bp, Glycine max
acttattaacactttccttagttcaatatggggaagcccttcttcactctctctctttcttccctttgcttgctactcttgtcgagtgcatgctttgctattacctccagcaagttcaacgagtgcc

SEQ ID NO: 123261 - DNA, 178 bp, Glycine max
cctttgttcactcttcttctcttgcggctagggttttagcgcacttccatctagatttaaggaagatgggtaaggaaaaggttcacatcagtattgtggtcattggccatgtcgactctgggaaatccactaccactggtcacttgatttacaagctggaagccttgacaaacgtgtt

SEQ ID NO: 123262 - DNA, 284 bp, Glycine max
gctcctactctcactattaggatcaatgatgtttatcttccaagagatgaggcttttggacacttgaagtcatctgactttcttacttatggactaaaatccgtatctcaaaatgttcttccaagtcctgcaatctgcttttgatttgaatttcacaccccgtgagtttgatagctttgatgaagttcatggactctattcaggcggaattaagctgccaacagatataatcagcaagattagtccactacccgtgcttaaggaaatcttccgaactgatggtg

SEQ ID NO: 123263 - DNA, 271 bp, Glycine max
aaacccaatttggaagctgatcacattccaacctggttgaaggcatacaaggatggtcatgttgcaccatttgttaagtctgaacccattcccgagactaacgatgaacctgttaaagtggtagttggggccagtcttgaggacattgttttcaaatctgggaagaatgttctgctggagttttatgctccctggtgtggtcattgcaaacagttggctccaatattggatgaagttgctatctcatatcaaaatgaagctgatgttgtta

SEQ ID NO: 123264 - DNA, 162 bp, Glycine max
ggttgccgcaccttaaaaccggaaacaaaagcaatcgttacttgatttcaagaatctctcaatttcttcctacttctttgtgtacggtttcttaagggaaagaaaatcactctctgtgctggccacagacttcgtgaatcattttcttttccacacaacata

SEQ ID NO: 123265 - DNA, 137 bp, Glycine max
  unsure (1)..(137): unsure at all n locations
accatgcaacaacaacaaccccagnaaagtcatggtggacgcaagcaggggcaacaccagcaggaggaagaggaagaaggtggcagcgtgctcagtggcttcagcaaacacttcttggcacaatccttcaacacaac

SEQ ID NO: 123266 - DNA, 215 bp, Glycine max
gaattctccagagagaagaagaaacttaatcgatcatcacttcacttcactaatacatcatggcagacgagacccagaacaagtatgagagctctgaggttgaggtccaggatcgtggtgtttttgactttctcggtaagaaaaaggataaagaagacaagcctcatcctcaggaggaggtcatcgcccaccgagtttcaaaaagtcactgtctc

SEQ ID NO: 123267 - DNA, 123 bp, Glycine max
ctcgagccgcttaattattaacacttccttagttcaatatggggaagcccttcactctcactctttcttcactttgcttgctactcttgtcgagtgcatgctttgctattagctccagcaagc

SEQ ID NO: 123268 - DNA, 89 bp, Glycine max
gcatggccttgcctctgttttgagacttttgtaatgttttcgagtttaaatctttgcctttgcgaaaaaaaaaaaaaaaaagggcggcc

SEQ ID NO: 123269 - DNA, 90 bp, Glycine max
cttattaacactttccttagttcagtatggggaagcccttcttcagtgtctctctttcttgcctttgcgtgctactcttgtcgagtgcat

SEQ ID NO: 123270 - DNA, 274 bp, Glycine max
ctttccttagttcaatatggtgaagcccttcttcactctctctctttcttccctttgcttgctactcttgtcgagtgcatgctttgctattacctccagcaagttcaacgagtgccaactcaacaacctcaacgcgttggaacccgaccaccgcgttgagtccgaaggtggtcttattgagacatggaactctcaacaccctgagctgcaatgcgccggtgtcactgtttccaaacgcaccctgaatcccaacggcctcctattgccatcttac

SEQ ID NO: 123271 - DNA, 281 bp, Glycine max
gcaatggctacttcaaagttgaaaacccagaatgtggttgtatctctctccctaaccttaaccttggtactggtgctactgaccagcaaggcaaactcagcggaaactgtttctttcagctggaacaagttcgtgccgaagcaaccaaacatgatcctccaaggagacgctattgtgacctcctcgggaaagttacaactcaataaggttgacgaaaacggcaccccaaaaccctcgtctcttggtcgcgccctctactccacccccatccacatttggga

SEQ ID NO: 123272 - DNA, 280 bp, Glycine max
aaagaagcgttcggcgtgaacatgcagatagtgagaaacctacaaggtgagaacgaagaggaggatagtggagccattgtgacagtgaaaggaggtctaagagtcacagctcgagccatgaggaagccacagcaagaagaagatgatgatgatgaggaagagcagccacagtgcgtggagacagacaaaggttgccaacgccaaagcaaaaggagcagaaatggcattgatgagaccatttgcacaatgagacttcgccaaaacattggtcagaattcat

SEQ ID NO: 123273 - DNA, 127 bp, Glycine max
gtttccttgtgttgcttcttttctccctcttaggtctctcttctagttccagcatatcaactcattgttccatattggaccttgacctaaccaagtttaccacacagcatcaggttccgtcactgtt

SEQ ID NO: 123274 - DNA, 133 bp, Glycine max
atcatacatagtagtgttggtgggttgtaaagatgcttgggggtcttctccataggggtcataagatagaagggacagtggtgttgatgcgcaagaatgtgttggacgtgaatagcgtaaccagcgttggggg

SEQ ID NO: 123275 - DNA, 124 bp, Glycine max
caacaacaccagaaaagtcatggtggacgcaagcaggggcaacaccagcaggaggaagaggaagaaggtggcagcgtgctcagtggcttcagcaaacacttcttggcacaatccttccacacaa

SEQ ID NO: 123276 - DNA, 274 bp, Glycine max
atcagtcatcaccatggccaagctagttttttccctttgttttctgcttttcagtggctgctgcttcgctttcagttccagagagcagcctcagcaaaacgagtgccagatccaaaaactcaatgccctcaaaccggataaccgtatagagtcagaaggagggctcattgagacatggaaccctaacaacaagccattccagtgtgccggtgttgccctctctcgctgcaccctcaaccgcaacgcccttcgtagaccttcctacaccaacggt

SEQ ID NO: 123277 - DNA, 214 bp, Glycine max
gaaattttgataaaccgcgatcacaggttgccgcaccttaaaaccggaaacaaaagcaatcgttacttgatttcaagaatttctcaatttctttctacttctttgtgtacgatttcttaagggaaagaaaatcactctctgtgctggccacagacttcgtgaattattttcttttccacacaacatacgagtcttcgacacgcggatgtgctat

SEQ ID NO: 123278 - DNA, 107 bp, Glycine max
ggtccttaaacactcatcagtcatcaccatggccaagctagttttttcccattgttttctgcttttcagtggctgctgcttcgctttcagttccagagagcagcctc

SEQ ID NO: 123279 - DNA, 127 bp, Glycine max
caacttggcccattggtcacagtcccacaattcctcttttcatgtgcacaatccttccttgttcaaaagggtcttcctagaaacactcaaggtgtggctgggttaggccatgcaccaatttctcttc

SEQ ID NO: 123280 - DNA, 285 bp, Glycine max
aatttttgtgaattgtctttatcctgtaagtcaattaccttcagaagctgtcgttgtaaatgttacatgtggtagtggacgtggtggtttacctaccactgcttggattagttctgcagttaacaatcgctcctcagatatcaacaaaaagattcgcacagcacttgggaaaggtatgaaaattgtttttcttactagagttgatccttttccagtagctctactggctgttctttttggcgttaagaatgaaattctgagttccaacgccactaaccctatgct

SEQ ID NO: 123281 - DNA, 117 bp, Glycine max
gcggaatcctctgcatgatctggaatttgtgttttcttttgcttgttcgtttgtttaattcaataaaggaaattaggcatgaccctcttgttgagtatgctctgcctatttgaaaat

SEQ ID NO: 123282 - DNA, 179 bp, Glycine max
ctcgagccgatgccatatataaggcggataaatcagacatatgccaaggcttatgcgacaaggactatcctttttctgagagaaaatggaaccttaaagccagtggccatcgaattaagtttgccacatcctgctggggacctgtcaggtgctgtcagtcaagtcatcttacctgcaaa

SEQ ID NO: 123283 - DNA, 175 bp, Glycine max
gtgatgccctgagagtcccctcaggaaccacatactatgtggtcaaccctgataacaacgaaaatctcagattaataatactcgccatacccgttaacaagcctggtagatttgagagtttcttcctatctagcactgaagctcaacaatcctacttgcaaggattcagcaggaa

SEQ ID NO: 123284 - DNA, 99 bp, Glycine max
cttaaacactcatcagtcatcaccatggccaagctagttttttccctttgttttctgcttttcagtggctgctgcttcgctttcagttccagagagcag

SEQ ID NO: 123285 - DNA, 214 bp, Glycine max
cagaataccatcaagagacattggaaaatttgagagttgctatcaaaagtaccaagaaactctgtgcggttatgctagatactgtgggtcctgaattacagattgagaataagacagatcacccaatcacccttgaagcagacacattagttgtcttaactccagatcaaaccaaagaagctggttcaaatctcttaccagtaaattttaacgg

SEQ ID NO: 123286 - DNA, 272 bp, Glycine max
ggagagttgaatgtggaatcccttctggatttccgctcacagttatttgcaatagcatttttaatgagatgctcattagatatagctatgaaaaattactgcgccaggctaaagctccaagtatgtttttacaatccttcaaaaattttgtttctttgtgtgtgtatggtgatgataacttaataagtgtccatgaatacgtcaagccttactttagtggttctaaattgaaaagctttctagctggtcataatatcaccattactgatggt

SEQ ID NO: 123287 - DNA, 270 bp, Glycine max
gccaaccatacatatgttccaagtgagacaccagcagcacttgtggggtacagagaagaagaattgaagaatttaagaggagatggaaaaggagagcgcaaagaacatgataggatctatgattatgatgtctacaatgatttgggcaatccagatcacggtgaaaattttgctcgcccaattcttggagggtctagcactcatccctaccctcgtaggggaagaactggtcgatatccaacaaggaaagatcagaattctgagaagcca

SEQ ID NO: 123288 - DNA, 273 bp, Glycine max
cttgctctatactacacagtacacacactagaagaataatggcttccatcctccactactttttagccctctctctttcttgctcttttcttttcttcttatccgactcagtcacccctacaaaaccaataaaccttgttgttctacccgttcaaaatgatggttccacagggctccattgggccaacctccaaaaaagaacccctctaatgcaagtaccagtcctggtggacctcaatggaaatcacttgtgggttaactgtgagcagcagt

SEQ ID NO: 123289 - DNA, 274 bp, Glycine max
tgggtgcccatatttgtatgctatggtgcatgatagttcagtgtctacaataccaggtgattttgtcattggtgttaagttgacaaccataaacaatatgtgtgcatatgggctcaatcctggtatttcaggttctcgtcttttgggcaccattcctaagtccatttcacagcaaactgtttggaatcaaatggcaacagtgagaacaccattgaattttgattctagcaagcagagcttttgtcaattctctattgatcttcttggtggagga

SEQ ID NO: 123290 - DNA, 272 bp, Glycine max
taggggaaacaaaactacccttttgcttttgctctttgttctttgccattcagtggccacaacaacaatggccttccatgatgatgagggtggtgataaaaagtcaccaaaaattttgtttttgatgagtaactccacgagggttttcaagactgatgcaggggacatgcgtgtgctgaaaagccatggtggtaggatattttataggcacatgcacattggcttcatctctatggaaccaaagtccttgtttgttcctcagtacctcgact

SEQ ID NO: 123291 - DNA, 277 bp, Glycine max
gtttgaagaacaacatggtggtgctaaaggtgtgtttgttgcttcttttccttgtgggggttacagctgcacgcatggaactgagcttcttcaaaagtgatcagtcatcaagttatgatgatgatgagtattcaataccatgctgtgatctctgcatgtgcacacgctcaatgcctcctcaatgcagctgtgaagatattaggctgaattcatgccactcagattgtaagagctgtatgtgcacacgctcacagccaggacagtgtcgttgtcttga

SEQ ID NO: 123292 - DNA, 196 bp, Glycine max
tgtgcaccttccttccttcttcaaaagggtctccctagaaacattcaaggagtggctgggttaggccatgcaccaatttctcttccaaaccaacttgcctcccactttggcctacaacaccaattcaccacttgcctctctcgctaccctacctcaaagggtgctctaatcttcggggatgcaccaaacaacatgc

SEQ ID NO: 123293 - DNA, 144 bp, Glycine max
cacacacaactactacaagtacttccttacaatcaaaaccaacaacaactatggcaagttatcaaaagcactacgatgatcagggtcgcaaggttgacgagtatggcaacgttgagaagcaaaccgacgaatacggcaacctgt

SEQ ID NO: 123294 - DNA, 274 bp, Glycine max
catttgtccttgaatataatactcagcatggctaagcttgttctttccctttgttttctgcttttcagtggctgctgcttcgctttcagtttcagagagcagccacagcaaaacgagtgccagatccaacgcctcaatgccctcaaaccggataaccgtatagagtcagaaggtggcttcattgagacatggaaccctaacaacaagccattccagtgtgccggtgttgccctctctcgctgcaccctcaaccgcaacgcccttcgcagacctt

SEQ ID NO: 123295 - DNA, 162 bp, Glycine max
gaagaggggtgccctgctttctctttgatcaacaaggccactggtgaagccttgaagcactccatcggtgccactcatcctgttcggctgataccttacaagcccgactatcttgatgagtctattctatggactgaaagccgtgacttaggagatggccac

SEQ ID NO: 123296 - DNA, 186 bp, Glycine max
gtgcatgctttgctattagctccagcaagctcaacgagtgccaactcaacaacctcaacgcgttggaacccgaccaccgcgttgagtccgaaggtggtttgattcaaacatggaactctcaacaccctgagctgaattgcgccggtgtcactgtttccaaactcagcctcatcttcaatggcctcc

SEQ ID NO: 123297 - DNA, 272 bp, Glycine max
cacatctgagggttttcctcatatgctttcacgcaaaaatggtgaaaaaggcaaaaggagatttgtttctggggatggtgaagagatgacattgattccgggaaccagtgttgaagaggcttacaacaagctaatagttgaacttgagaaaagtgttcctacattggttggcattgaatgtcccaaggatgagaaacttcctcgtcgcaaaatttttgacaaacctaagacgcgctgcttcactattctccctatggagtttaatcttgtgg

SEQ ID NO: 123298 - DNA, 119 bp, Glycine max
ggagaaccagctcgaccagatgcctaggagattctatcttgctgggaaccaagagcaagagtttctaaaatatcagcaagagcaaggaggtcatcaaagccagaaaggaaagcatcagc

SEQ ID NO: 123299 - DNA, 269 bp, Glycine max
gcaagcagagcttttgtcaattctctattgatcttcttggtggaggaattttagtggacaaaactggagattggatcacacttatacaaaattctccaattagtaacttgttgagagttgctgcttggaagaaaggctgtttaatggttaagattgtgatgtctgggaatgcagcagtcaaaaggagtgattgggcctcattggtacaagtgtttttaacaaacagcaacagtacagagcattttgatgcatgtaagtggacaaaatcg

SEQ ID NO: 123300 - DNA, 273 bp, Glycine max
gtttccttgacaatctaattctgcaaaaatggcaagcaataaggagtctaagttcccagcacagagccagaaaactcagccaggaaaagaacatgtaatgaatccactcccacaagccacaaatcctgatcacaaggccgccaataaactccagggaaaggtggcgttggtgacaggaggtgactcaggaattggcagagcggtttgcctgtgtttcgcaaaagagggtgcaccgtggcctttacatacgtaaagggccatgaggacagggat

SEQ ID NO: 123301 - DNA, 273 bp, Glycine max
ctacatcaggaagaaggaaggaaaagaagaagaagaagaaggacacatgcagaagtgctgcagcgaaatgagcgagctgaaaagccccatatgccagtgcaaagcgctacagaagataatggataaccagagcgagcaactggaggggaaggagaagaagcagatggagagagagctcatgaacttggctattaggtgcaggttgggacccatgatagggtgcgacttgtcctccgatgactgaaaaaaaagtactactaacacatatatgtg

SEQ ID NO: 123302 - DNA, 273 bp, Glycine max
ccgaaagggaatcgggttaaaattcctgaatccggacgtggcggctgacggcaacgttagggagtccggagacgtcggcgggggccccggaaagagttatcttttctgtttaacagcctgcccaccctggaaacggctcagccggaggtagggtccagcggctggaagagcaccgcacgtcgcgtggtgtccggtgcgcccccggcggcccttgaaaatccggaggaccgagtgcctcccacgcccggtcgtactcataaccgcatcaggtct

SEQ ID NO: 123303 - DNA, 271 bp, Glycine max
acagatttgtgtaaattgtctcttgatgatgttgaaactcctaaaggttccatgttggatcttaaaatttctcagtctaaaattgcactatgcagaatagtatctccaactgtgttccctggaagtgcaattttagactgagaacacagttggaggaactattctgcgtagtgatctattggcaaattttctgacagagggcaattttagagcaagtgttgatttgcagcgcactcatcgtattaaaggaatgattacaatggtggcacag

SEQ ID NO: 123304 - DNA, 273 bp, Glycine max
  unsure (1)..(273): unsure at all n locations
ctcgagtcgctccattggtccttaaacactcattcgtcattaccatggccaagctagtgtattccctttgttttctgcttttcagtggctgctgcttcgctccaagttccagagagcagcctcccaaaaacgagtgccagatccaaaaactcaatgccctcaaaccggataaccgtatagagtcagaaggagggctgcttgagacatggaaccctaacaacaagcgactagnatgtgccggtgttgccctctctggctgcaccctcaatgcaa

SEQ ID NO: 123305 - DNA, 261 bp, Glycine max
tacacacacttatcctcgaaggtcatgagaggagactggcatccaaaaaattggttctaaaactaatgcttcgggccatagagcacgaaagccgctgtcaatatttgctgtgcttggtctttgctgtttcttttatcttttgggagcatggcaaagaagtggatctgggaagggctttaaccttgcattgaaagttaataacctgatgactgactgcactgttttacccaatttgagttttgaatctcatcacaatgatgt

SEQ ID NO: 123306 - DNA, 271 bp, Glycine max
aattaagaaatccttctccggagctatggcagatctcaagtccacattcttgaacgtctattctgttctcaaatctgaactcctccacgaccctgcttttgagttctccgatgatgctcgtaattgggtcgaccggatgctggactacaatgtgccgggaggaaagttgaaccggggactgtcagtaattgatagctacagattgttaaaagaaggacaggcattaaatgatgacgaaatttttcatgccagtgctcttggttggttattg

SEQ ID NO: 123307 - DNA, 273 bp, Glycine max
gacaagatctccatatctgttcccaaaagcttgtttgtaagaatggcttccggtgaacagaaattccctcctcaacaacaacaaactcagcctgggaaggagcatgctatgactccagtaccccaattcactagccctgactacaagccttcaaataaacttcaagggaagattgcattagtcactgggggtgattctgggattggacgagcggtgtgtaacttgtttgccttagaaggtgctaccgtggccttcacgtatgtgaagggcatg

SEQ ID NO: 123308 - DNA, 275 bp, Glycine max
caacgagtgccaactcaacaacctcaacgcgttggaacccgaccaccgcgttgagtccgaaggtggtcttattgaaacatggaactctcaacaccctgagctgcaatgcgccggtgtcactgtttccaaacgcaagtctcaaccgcaacggcctccacttgccatcttactcaccttatccccaaatgatcattgtcgttcaagggaagggagcaattggatttgcatttccgggatgtcctgagacgtttgagaagccacaacagcatcaagca

SEQ ID NO: 123309 - DNA, 270 bp, Glycine max
cataaacaatatgtgtgcatatgggctcaatcctggtatttcaggttctcgtcttttgggcaccattcctcagtccatttcacagcaaactgtttggaatcaaatggcaacagtgagaacaccattgaattttgattctagcaagcagagcttttgtcaattttctattgaccttctcggtggaggaattttagtggacaaaactggagattggatcacacttatacaaaatctccaattagtaacttgttgagagttgctgctggaaga

SEQ ID NO: 123310 - DNA, 273 bp, Glycine max
  unsure (1)..(273): unsure at all n locations
aatctttatctcaatatgtcttaccggcgttcgaatctgttttcgatttgaacttcacgccaaatgagtttgatagcttccaagatgtgcgtgacctccacgacggtggaattaagcttcccacagaagtaattagcacaattatgcccttaccggtggtcaaagaactctttcgtacagatggtgaacaagtcctcaagtttccaccacctcagcaatcgctcgtgagtacgtctgcatggatgnacgatgaagaatttgcaagaagatggt

SEQ ID NO: 123311 - DNA, 273 bp, Glycine max
ctcctaaaggttccatgttggatctgaaatttctcaatctaaaattgcacttcccaagaacacagttggaggaaccattctgcgtagtgatctattggcaaattttttgacagagggcaattttagagcaagtgttgatttgcagcgcactcatcgtattagaggaatgattaaaatggtggccacagttggtattcctgagtctacaggtatctacttggcctgtgctatgaatagttcttttagggggcgcgccagttctgattttacacc

SEQ ID NO: 123312 - DNA, 269 bp, Glycine max
actgatgctcaaattttgatggtccagggcgcagattcatagctcatggacattttttcaaaaatctgactcagaaagtgcgagtccaaattgttacatctgaaaagagttactggcatgtgtatgatcctgacaagtttcagatgtttgacaacagtgaaataggtctttattctaatcccactttggaagatatcccacattcagcttgggaccttttttgctgggacagtgagaaaatttgccaaataatttttctgcagatgctc

SEQ ID NO: 123313 - DNA, 284 bp, Glycine max
tcggctcgaggcaatttagaaagttagcagattgtgcatttctcaagagaaactttaagcagatgtctaatgttttgtgggtagctcctgaggacaaggcgagtttatggtcacaacttcattatgtttcgtgtaataatctggaaatgcaagaagcttatcttgtcaatctcgtaaatgtgttacgagaattgtatttgcacagtccagaggaagctcgtacattgagaaggaaagctctctctcgtattgaatggctgcaaaaagctgatgtgcctccatag

SEQ ID NO: 123314 - DNA, 269 bp, Glycine max
atttgagcttaaaccctagccgctcatctcttcattcttcactttggaaacaatcataatggcgttctgtaataaggttgcacatgtcttgaggcagggtgctgctcgcagcacacatgcccctgttgcgtccatgcttaattacatccgctgcatgtcttcaagcaagcttttcattggaggcctttcatatggagttgatgaccagtctcttaaggatgcattttctggctttggagatgtggttgatgcaaagttataacgataga

SEQ ID NO: 123315 - DNA, 245 bp, Glycine max
attctctccattggtccttaaacatcatcagtcatcaccatggccaagctagttttttccctttgttttctgcttttcagtggctgctgcttcgcttccagttccagagagcagcctccccaaaacgagtgccagatccaaaaactcaatgccctcaaaccggataaccgtatagagtcagaaggagggctcattgagacatggaaccctaacaacaagccacgccagtgtgccggtgttgccct

SEQ ID NO: 123316 - DNA, 256 bp, Glycine max
ggctcgagctaaattctcaaaggcaccaatcatattgctcagagttcggaaattctccccaagagataaaatgtctctaatcccaaacttcttcggtggccggagaaacaatgtgttcgatcctttctcactggacgtgtgggatcccttcaaggattttcctttcccaaatacgctttcttcagcttccttccctgaattttctcgggaaaattcagcatttgtgagcaccgtgtggactggaaggaaccccaca

SEQ ID NO: 123317 - DNA, 240 bp, Glycine max
gtcaaagaaacaaattcgggaacgagcaaacatgccaaatctagttcaaggaaaaccatttcttctgaagataaacctttcaacttgagaagccgcgaccccatctattccaacaagcttggcaagttgtttgagattaccccagagaaaaaccctcagcttcgggacttggatgtcctcctcagtgttgtggatatgaacgagagagctccttttctgccacacttcaattcaaaggcc

SEQ ID NO: 123318 - DNA, 278 bp, Glycine max
  unsure (1)..(278): unsure at all n locations
attcgagccagcaaagcactggctacttcagagttgaaaacccagcatgtggttatatctctttcctaaccttaaccttggtactgatgctactgacaatcagggcaactcagcggaaactgtttcttttcagctaggaacaagtttcgtgaccgaagccaaccagaccatgantcctccaaggaagacgcctattgtgcactccctcgggaacaattaccaactcaataaggttgacgacaacggcaccccaaaacctcgtctcttggtcggcctct

SEQ ID NO: 123319 - DNA, 248 bp, Glycine max
ggattaatagccaacaacattctcatctgtcgggtcagattggtatgcaccaagtgaatcacactggttgaatgacttcagaggggtgatgaagaatgtttgtggaccatttacagctgcaaaaactgtttatgaggacgaacaaggtttcttgatcattatcagtctgccattcgtggatcttcctagtgtgaaagtttcatggcggaacactgttactcatggtatcataaaggtttcttgtgtga

SEQ ID NO: 123320 - DNA, 260 bp, Glycine max
tagtcaatggatcctctgtatctgtgtaaatgaggtcctttggctttgacacgtgttggaagtagagggtgtctaatacctagcggatttatgattttcttttcaattcttggacaatttggagcagtttttgcctctatcccacctcccattattgctgccttgtactgcttgttctttgcttatgttggtgctggtggtcttagttttcttcagttctgcaacctcaacagttttagaacaaagttcttttaggctct

SEQ ID NO: 123321 - DNA, 272 bp, Glycine max
gaggaggaaagattgggttgtttggtggtgctggtgtaggaaaaactgtgcttattatggaacttattaacaatgttgcaaaagctcatggtggtttctctgtgtttgctggtgttggagagcgaacccgagagggtaatgacttgtacagagaaatgattgagagtggtgtcattaagcttggtgataagcagagtgaaagcaaatgtgctcttgtgtatggtcaaatgaatgagccccctggtgctcgtgcccgtgttggtctactgggc

SEQ ID NO: 123322 - DNA, 268 bp, Glycine max
cggctcgaggcggatacagtcggtgccgctcgtcattggccagttcatggagctggttgaccaatacaacggcatcgtcggatccaccaccggatccaactactacgtcaagatcctcagtaccatcaaccgcgagcttctcaagccctccgcctccgtcgcactccaccgccactccaacgcgctcgtcgacgttcttccgccggaggcgactccagcatctcgctcctcagccagtccgagaagcctgacgtcacttatatgacat

SEQ ID NO: 123323 - DNA, 265 bp, Glycine max
aattttgtttctttgtgtgtgatggtgatgataacttaattagtgttcatgaatatgtcatagcctactttagtggttctaaattgaaaagctttctagctggtcataatatcaccattactgatggtattgacaaaactagtgcaactttgcaatttagaaagttagcagattgtgattttctcaagagaaactttaagcagatgtctaatgttttgtgggtggctcctgaggacaaggcgagtttatggtcacaactcatatg

SEQ ID NO: 123324 - DNA, 268 bp, Glycine max
gaatatgtcttgctgcggtggaactgtggttgcggaagcgcctgcaagtgcggcaacggctgcggaggctgcaagatgtacccagacttgagctacaccgagtcaaccaccaccgagaccttggtcatgggagtggcaccagttaaggctcaattcgagagtgctgaaatgggtgttcccgctgagaacgatggctgcaaatgttcctctaactgcacctgcaacccctgcactatgcaagtgaggtgttggagagctaagcttcaag

SEQ ID NO: 123325 - DNA, 268 bp, Glycine max
atccttttgtgttaaataggtggatgggcaaattgactttcccccagggcacttcccgaagtgttaagagaatgcctctttctatagggggaggagctggtgcaaagaatgctattctcatgaatatgccaaatgctgttctttcaatgtggagatattttgttggagatctcgtctttgaagtttctaagatgacttctctctacattaaatgtacagtctctttcttcatagcatttggaaatttggctgatgatacctcaatttg

SEQ ID NO: 123326 - DNA, 266 bp, Glycine max
atcggaatcgatctcggaacacgtactcgtgcgtcggtgtctggcaacacgatcgcgtcgagatcttcgccatcgaccaaggtaacagaacgacgccgtcttacgtcgggttcaccgacaccgagcgtctcattggtgatgccgcaaaaaatcaggtcgccatgaaccccatcaacaccgtctttgatgccaagagattgattggtcgtagattcagtgatgcctctgttcagagtgatattaaactgtggccttttaagttttgt

SEQ ID NO: 123327 - DNA, 268 bp, Glycine max
tacacacacacacactaagaataatggcttctatcctccactactttttagccctctctctttctttctctttccttttcttcttatccgactccgtccccattccccaacaccacactaaccctacaaaacctataaaccttctggttctacccgttcaaaatgatgcttccacagggctccattcacccaacctccaaaaaaggacccctctaatgcaagtaccagtcctggtggacctcaatggaaaccacttgtggttaactgt

SEQ ID NO: 123328 - DNA, 267 bp, Glycine max
cattcggctcgtcttgcaacacggactaaggagtctgacatgtgtgcgagtcaacgggcgagtaaacccgtaaggcgcaaggaagctgattggtgggatccccctgtgggttgcaccgccgaccgaccctgatcttctgtgaagggttcgagtgagagcatacctgtcgggacccgaaagatggtgaactatgcctgagcggggcgaagcagaggaaactctggtggaggcccgcagcgatactgacgtgcaaatcgttgtctgact

SEQ ID NO: 123329 - DNA, 267 bp, Glycine max
ataaaattcttccaccaagttacgggcgaaattgtgttgcttcttttctccctcttaggtctctcttctagtatcagcatatcaactcatcgttccatattggaccttgacttaaccaagtttaccacacagaaacaggccacttcactgttccaactatggaagagtgagcatggacgtgtctaccataaccacgaagaagaggcaaagagacttgagattttcaagaataattggaactatatcagggacatgaatgcaacagaa

SEQ ID NO: 123330 - DNA, 85 bp, Glycine max
agcaagctcaacgagtgccaatcaacaacctcaacgcgttggaacccgaccaccgcgttgagtccgaaggtggtttgattcaaac

SEQ ID NO: 123331 - DNA, 266 bp, Glycine max
cccatttttgtactaagaagcatttgttacatttatgtaaccaaaggaaaatcaaaagtacgcaggaggtgaagctcggtggcgaaatcaacatgcaacgcagtgcaagcatgcgactaaaggagaagaaggtgaaggatttgatggttgacaagaagaggctagtggaggtgccgtacatggcgtccctggcccacacaatgactacatcggtggcgaacaagttgtggcggtgccggtggctgcgccgccggggcatggatcgg

SEQ ID NO: 123332 - DNA, 264 bp, Glycine max
tctcgagccgaatcggctcgggcaaaggattctacccgccgctcgatgggaattgcgcttcattgcgtctcgtagggctaaaccgcctcacgagggtcaccaacggcacgtgcctttggtgggccgaggccccctactgctggtcggcaaacggacggcgggcgcacgcgtcgcttctagcccggattctgacttagaggcgttcagtcataatccaacgcacggtagcttcgcgccactggcttttcaaccaagcgcgtgacc

SEQ ID NO: 123333 - DNA, 264 bp, Glycine max
ctgattgctagaatggaattcgatgctcagtcatctcttttaccattctcttctctcttgctcttgcaggagagagccatgtccatgcatcgctacctgaggaagattattgggaagctgtttggccaaacactcccattcccactgcactgcgagagcttctaaagcctctccctgcaggtgtagtaatcgatgaactccctaagcaaattgatgatacacagtacccaaaaacattcttctataaagaagacctcatccagg

SEQ ID NO: 123334 - DNA, 266 bp, Glycine max
  unsure (1)..(266): unsure at all n locations
gagagtgcggtttcctttgttggtgttgctgggaactgttttcctggcatcagtttgtgtctcattaaaggtgagagaggatgagaataaccctttctacttgagaagctctaacagcttccaaactctctttgagaaccaaaacggtcgcattcgtctcctccagagattcaacaaacgctccccacaacttggccgagtccgngactaccggattgtccagattcagtcaaaacccaacacaatccttctcccccacatgctga

SEQ ID NO: 123335 - DNA, 262 bp, Glycine max
ggggaagcccttcactcttctctttcttccctttgcttgctactcttgtcgagtgcatgctttgctattagctccagcaagctcaacgagtgccaactcaacaacctcaacgcgttggaacccgaccaccgcgttgagtccgaaggtggtttgattcaaacatggaactctcaacaccctgagctgaaatgcgctggtgtcactcgttccaaactcaccctcaaccgcaatggcctccacttgccatcttactcacgtatcc

SEQ ID NO: 123336 - DNA, 265 bp, Glycine max
aggagacgtactagtgattctcctggtgttagttactggacctataatactggcgatgaaccagttgttggcatcagtcttcttgacacctccaacttcaacaatccctttgatcaaaaccccagagtattttaccttgctgggaacccagatatagagcacccagagaccatgcaacaacagccacagcagaagagtcatggtggacgcaagcaggggcaacacagcagcaggaggaagaaggtggcagtgtgctcatggcttc

SEQ ID NO: 123337 - DNA, 263 bp, Glycine max
taaacactcatcagtcacatcatggccaagctagttttttccccttgttttctgcttttcagtggctgctgcttcggtttcagttccagagagcagcctcacttaaacgagtgccagatccaaaaactcaatgccctcaaaccggataaccgtatagagtcagaaggagggctcattgagacatggaaccctaacaacaagccatttcagtgtgccggtgttgccctctctcgctgcaccctcaaccgcaacgccctcgtaga

SEQ ID NO: 123338 - DNA, 259 bp, Glycine max
taactgatgagagatggtaggcacagaacatgagggatatgatccttttcttggtggaattcaaaaatatgccactcccatgatgcccctagatgaagaaattctttctaaggttgcacaagatatagttgaggaatggtttgattgtgttgatgaggaggattcctttgaggaagtttctttgagtgcagcactcaatggtgttgagggcttggactatatggaaagaattcctcttgccacatctgagggtttcctc

SEQ ID NO: 123339 - DNA, 154 bp, Glycine max
atttgaaattttgataaaccgcgatcacaggttgccgcaccttaaaaccggaaacaaaagcaatcgttacttgatttcaagaatttctcaatttctttctacttctttgtgtacgatttcttaagggaaagaaaatcactctctgtgctggcca

SEQ ID NO: 123340 - DNA, 262 bp, Glycine max
ggaactctcaacacctgagctgcaatgcgccggtgtcactgtttccaaacgcaccctcaactgcaacggcctccacttgccatcttactcaccttatccccaaatgatcattgtcgttcaagggaagggagcaattggatttgcatttccgggatgtcctgagacgtttgagaagccacaacagcaatcaagcagaagaggctcaaggtcgcagcagcaactacaagacagtcaccagaagattcgtcacttcaatgaggag

SEQ ID NO: 123341 - DNA, 170 bp, Glycine max
taagatttgaaattctgataaaccgcgatcacaggttgccgcaccttaaaaccggaaacaaaagcaatcgttacttgatttcaagaatttctcaatttctttctacttctttgtgtacgatttcttaagggaaagaaaatcactctctgtgctggccacagacttcgtga

SEQ ID NO: 123342 - DNA, 261 bp, Glycine max
cactttccttagtcaatatggggaagcccttcttcactctctctctttcttccctttgcttgctactcttgtcgagtgcatgctttgctattacctccagcaagttcaacgagtgccaactcaacaatcctcaacgcgttggaacccgaccaccgcgttgagtccgaaggtggtcttattgaaacatggaactctcaacaccctgagctgcaatgcgccggtgtcactgtttccaaacgcaccctcaactgcaacgcctcc

SEQ ID NO: 123343 - DNA, 260 bp, Glycine max
ggcgtcacagtcaagaaactaaagtccctggaagacgcattataaccgaggctgttggtggccaggttgtggagcagtatgtggaggcaactccggttgaggcagggcgaacagtgcaattaaggagaatgccataacaataggagaggcattggaggcgacggcacagactgtgggtcagaaagcggtggatcagagtgacgcctccgcgattcaggcggcggaggtgagagcaacgggaagtaacgttatacgccggg

SEQ ID NO: 123344 - DNA, 263 bp, Glycine max
agaacggctaccataacttatctgcagcctctctatgggattccttatggattgaaggacataatatcagtagacaaatacaaaacgacctggggatcaaaatcattcaaaaatcaagttattgacgtagaagcttgggtctataaaaggctgaagtccgctggggcagttcttgttgcaaagcttgtttctggatcattggcataatatgatatttggtttggtggtagaatcacgaacccatggaatattgaggattttct

SEQ ID NO: 123345 - DNA, 259 bp, Glycine max
cttcacttgcagactgttgcatcatcatcttcattgcaaaaccctaaacttcaccttcaaccatgaccacacaagtaccaccatacagtgtccaagtccacacaacaacacacccatacgaagctggcgtcgtcccccccggagcccgtttcgaaccgccgcgttatgaagccggcgtcaaagcgccctccatttaccatccgaagaggttccaacgacttcccaggtcctcgccgtcctcgccggcctcccgtcggtg

SEQ ID NO: 123346 - DNA, 259 bp, Glycine max
caaggtagacgtgaagatctccgtggagcagaacactctcattatcaaaggtgaaggtgctaaagaaggcgatgaagaagagagcgctcgtcgctacactagcaggattgacttgccggacaagctctacaagattgaccagatcagagctgagatgaagaacggtgtgctcaaggtcgttgtgccgaaaatgaaggaggaagagaggaaagacgtgatcagtgttaaggttgagtagaacaacccaagctatttggcc

SEQ ID NO: 123347 - DNA, 259 bp, Glycine max
cggctcgagcttatttgcttcttcgagtttcacagccaagtcgtaaaagggtttcaagggatggaaaacatgcagagcttctggcaattgggtgatgaactccgtgggcactcaaaagcatcggaggatcacaagtggttaatggttgcctcgaaactggccgaacagacaatcttgaagggggagcgtgtgaacaaccttgatctttcaaagggacccattgaaacaaggtcaagggataaatttgggttcaggaaga

SEQ ID NO: 123348 - DNA, 260 bp, Glycine max
acaaaagcacaattgttagtggaaaaaccttcaaatatgatataattggtgctggttcacattcttcagaagatttttgtgaaaaggcagatcaagataaaactcaaaaagattgataccagattgagacaaagaatagatcctcaatacaatgaggttcaggctcagatggaaacaaatttgtttaaattgtctcttgatgatgctgaaactcctacaggttccatgttggatcttacaatttctcaatctaaattgca

SEQ ID NO: 123349 - DNA, 262 bp, Glycine max
taaacagcaacagtacagagcattttgatgcatgtaagtggacaaaatcagaaccacattcctgggaattgatcttcccaatagtggtatgtggtcctaataatggttttgaaatgtggagttctgagtgggcaaatcaaacttcatggcatttgagtttccttattgacaatcccaaacagtctacagtttttgatattctcttgggaatctctcaagattttgaaattgctggtaatactcttatgccagcttttctgtt

SEQ ID NO: 123350 - DNA, 254 bp, Glycine max
gttcaatatcctagtatactttaataaataatttaagatactatgatgagagcacggttcccattcatgctactgctacttgttttcctggcttcagtttctgtctcatttggcattgcttactgggaaaaagagaaccccaaacacaacaagtgtctccagagttgcaatagcgagagagactcgtacaggaaccaagcatgccacgctcgttgcaacctccttaaggtggagaaagaagaatgtgaagaagt

SEQ ID NO: 123351 - DNA, 270 bp, Glycine max
caaagatgcaatggatggttggtttagacttgagagagtttctgatgatgaattcaataactataagcttgtgttctgtccacagcaagctgaggatgacaaatgtggggatattgggattagtattgatcatgatgatggaaccaggcgtttggtggtgtctaagaacaaaccgttagtggttcagtttcaaaaacttgataaagaatcactggccaagaaaaatcgggtcctttctcgcagtgagtgagacacaagtgtgatagtact

SEQ ID NO: 123352 - DNA, 211 bp, Glycine max
cttaattattaacacttccttagttcaatatggggaagccctacactctctctctttcttccctttgcttgctactcttgtcgagtgcatgctttgctattagctccagcaagctcaacgagtgccaactcaacaacctcaacgcgttggaacccgaccaccgcgttgagtccgaaggtggtttgattcaaacatggaactctcaccacct

SEQ ID NO: 123353 - DNA, 270 bp, Glycine max
caataaatgatgagggaatgccacaacacaataggccattcatgaagggtcgcctttacatccagtttaatgttgatttcccagactcagggtttctttcccctgaccaatgccagttactggaaaaggtgttacctcaaaagagcagcaagcatgtgtcagacatggagctggatgattgtgaggagaccactttgcatgatgtcaactttaaggaggagatgagacgaaagcagcaacagcaatatcgcgaggcatatgatgaagatg

SEQ ID NO: 123354 - DNA, 259 bp, Glycine max
ggatgagaagccacagtgcaagggtaaagacaaacactgccaacgcccccgaggaagccaaagcaaaagcagaagaaatggcattgacgagaccatatgcaccatgagacttcgccacaacattggccagacttcatcacctgacatctacaaccctcaagccggtagcgtcacaaccgccaccagccttgacttcccagccctctcgtggctcagactcagtgctgagtttggatctctccgcaagaatgcaatgttc

SEQ ID NO: 123355 - DNA, 271 bp, Glycine max
cttaattattaacacttccttagttcaatatggggaagcccttacactctctctctttcttccctttgcttgctactcttgtcgagtgcatgctttgctattagctccagcaagctcaacgagtgccaactcaacaacctcaacgcgttggaacccgaccaccgcgttgagtccgaaggtggtttgattcaaacatggaactctcaacaccctgagctgaaatgcgccggtgtcactgtttccaaactcaccctcaaccgcaatggcctcc

SEQ ID NO: 123356 - DNA, 270 bp, Glycine max
ggcggaaggcccattcgggtggttacatttccgaataccattgtgcagattgaaccagacatgaattcaaggtttcagcttttgagtaccactaccaatggtgattttgttcaaggaaaagatctcgcaatggttagggttaatgtagcatgtgctgctgttggcttgacatcaagctatactccgactccattgttggaatctggtttgcaaaaagacagagggttaattgtggagtattttggaaggatgtcttacgttgctcataac

SEQ ID NO: 123357 - DNA, 258 bp, Glycine max
taaattcctcgtggaatcttgttgaagccatgtctacagctggtcaggtcatcaagtgcagagctgcggtggcatgggaagcagggaagccactatcgatagaaaccatagaagtggcaccaccccagaaaggtgaagtgcgtttgaagatcctcttcaactccctttgccgtacagatgtttactggtgggatgctaagggccagactccgctgtttcctcgtatcttaggccacgaagcttcggggattgtggaga

SEQ ID NO: 123358 - DNA, 269 bp, Glycine max
cttaattattaacacttccttagttcaatatggggaagcccttcactctctctctttcttccctttgcttgctactcttgtcgagtgcatgctttgctattagctccagcaagctcaacgagtgccaactcaacaacctcaacgcgttggaacccgaccaccgcgttgagtccgaaggtggtttgattcaaacatggaactctcaacaccctgagctgaaatgcgccggtgtcactgtttccaaactcaccctcaaccgcaatggcctc

SEQ ID NO: 123359 - DNA, 268 bp, Glycine max
  unsure (1)..(268): unsure at all n locations
ccctcactttctcgctcgccaaacgcccctctctctcctccaatggccgaccagctcaccgacgaccagatcgccgagttcaaggaggccttcagcctcttcgacaaggacggcgatggttgtattactactaaggaacttgggactgtgatgcggtcactagggcaaaacccaactgaggcagaactgcaggatatgattaatgaggttgatgctgatggcatggcccancancgacttcccagagttcctcaacctgatggctcgc

SEQ ID NO: 123360 - DNA, 182 bp, Glycine max
gaaattttgataaaccgcgatcacaggttgccgcaccttaaaaccggaaacaaaagcaatcgttacttgatttcaagaatctctcaatttcttcctacttctttgtgtacgatttcttaagggaaagaaaatcactctctgtgctggccacagacttcgtgaatcattttcttttccacaca

SEQ ID NO: 123361 - DNA, 266 bp, Glycine max
ttccttagttcaatatggggaagcccttcactctctctctttcttccctttgcttgctactcttgtcgagtgcatgctttgctattagctccagcaagctcaacgagtgccaactcaacaacctcaacgcgttggaaccggcacaccgcgttgagtccgaagtggtttgattcaaacatgacactctcaacaccctgagctgaaatgcgccggtgtcactgtttccaaactcaccctcaaccgcaatggcctccacttgccatctt

SEQ ID NO: 123362 - DNA, 210 bp, Glycine max
ctagttcaatatcctagtataccttaataaataatttaagatactatgatgagagcacggttcccattactgttgctgggacttgttttcctggcttcagtttctgtctcatttggcattgcttactgggaaaaagagaaccccaaacacaacaagtgtctccagagttgcaatagcgagagagactcgtacaggaaccaagcttgcaac

SEQ ID NO: 123363 - DNA, 207 bp, Glycine max
gattcaggtaaaagttgtattgaaattttcacaagaggaatttcttacagcttggtcaactcaggtgcgtcctgcaacaactctgtttgctgatgggtgctcatatttgtatgctatggtgcatgttagttcagtgtctacaataccaggtgattttgtcattggtgttaagttgacaaccataaacaatatgtgtgcatatgggct

SEQ ID NO: 123364 - DNA, 218 bp, Glycine max
gccaaatgctgttctttcaatgtggagatattttgttggagatctcgtctttgaagtttctaagatgacttctccctacattaaatgtacagtctctttcttcatagcatttggaaatttggctgatgacaccatcaattttgaggctttttcccacaagctggtacagtttggagagattcaggaaaaagttgtattgaaattttcacatgaggaat

SEQ ID NO: 123365 - DNA, 267 bp, Glycine max
atttgatcgcagtgcctactggtgttgcatggtggatgtacaacaatgaagacactcctgttgttgccgtttctattattgacaccaacagcttcgagaaccagctcgaccagatgcctaggagattctatcttgctgggaaccaagagcaagagtttctaaaatatcagcaagagcaaggaggtcatcaaagccagagaggatagcatcagcaagaagaagaaaacgaaggaggcagcatattgagtggcttcaccctggaattct

SEQ ID NO: 123366 - DNA, 267 bp, Glycine max
gaactgagaaagaaacagaagaagtttaatttcaagttcaagctggtgaaatcttggattagtgctctcactcttctatctggtataggacttcgtgggtagacttttccatttctctcctttctttcactctcttcttctcactgatccgcattgccgttcaaagtggtcttatttgaaaaacacttgggcgttggtgcaaatgtttgcttcgttaattttctctggagacgacaggctcactgagaaaacaatttttacttgcag

SEQ ID NO: 123367 - DNA, 269 bp, Glycine max
  unsure (1)..(269): unsure at all n locations
tcaatttccaatttccttaatcttgttgtgttgatgtacatggagagaattagagtgaaggaggaagaagcagtgacatgtggtggtggtnnnnnnnnnnnnnnnnnnnnnnnnnnnagcttttctccacagcctatggaagggttgcacgaggtgggtccccctccgtttctgagcaagatctttgacatggtanaagattcttccacggactccattgtgnccatggagcatggctcgcaacagctttgtggtgtgggattctcaca

SEQ ID NO: 123368 - DNA, 198 bp, Glycine max
accgggtgaagagtgtgacaaagtgttcactgctttgtgccaagggaagatcatcgatccacttttggaatgccttggggagtggaatggggcacctcttccaatatgttagttttccttattttctgttttcttgaagagtggtttcttttctgtacacgtgtttgtgttgatattaagcatttggttgtctatata

SEQ ID NO: 123369 - DNA, 279 bp, Glycine max
attcggctcgagctcgagccgcattgtctttgaacactcatcaccatggccaagcttgtgctatccctttgattccttctattcagtggctgcttcgctctgagagagcaggcacagcaaaatgagtgccagatccaaaagctgaatgccctcaaaccggataaccgtatagagtcggaaggtgggttcattgagacctggaaccctaacaacaagccattccagtgtgccggtgttgccctctctcgctgcacccttaaccgcaatgcccttcgtaga

SEQ ID NO: 123370 - DNA, 203 bp, Glycine max
agtatctaaaatatcagcagcagcagcaaggaggttcccaaagtcagaaaggatagtaacaagaagaagacaacgaaggaagctacatattgagtggcttcgcccctgaattcttgaaagaagcgttcggcgtgaacatgcagatagtgagaaacctacaaggtgagaacgaagaggaggatagtggagccattgtgacagtg

SEQ ID NO: 123371 - DNA, 255 bp, Glycine max
atgatgaggccatgtcaaaacacaataggccatccatgaacggtcgccttaacatccagtttaatgttgatttcccagactcagggtttccaaccctgaccaatgccagttactggaaaaggtgttacctcaaaagagcagcaagcatgtgtcagacatggagctggatgattgtgaggagaccactttgcatgatgtcaactttaaggaggagatgagacgaaagccccaacagcaatatcgcgaggcatatga

SEQ ID NO: 123372 - DNA, 264 bp, Glycine max
cacacaactacaagaaagaacttccttataaccaaaaccaacaacaactatggcaagttatcagaagcactacgatgatcagggtcgcaaggtcgacgagtatggcaatgttgagaggcaaactgacgaatatggcaacccggttcatgccactagtgtcacttatgtagccaccaaaagtgttggtggctacaatgatgacgctaataagcaacatgatattactggtgtctatcccgagaaagacaccggtagacatcattt

SEQ ID NO: 123373 - DNA, 260 bp, Glycine max
cacacctgctgttggcttgttgttcaagaatggcaatttgtaagaaagatgtttggagagttgaatgtggaatcccttctggattcccgctcacagttatttgtaatagcatttttaatgagatgctcattagatatagctatgaaaaattactgcgccaggctaaagctccaagtatgtttttacaatccttcaaaaattttgtttctttgtgtgtgtatggtgatgataacttaattagtgttcatgaatatgtcaag

SEQ ID NO: 123374 - DNA, 264 bp, Glycine max
aaataattaattaaattcctcgtggaatcttgttgaagccatgtctacagctggtcaggtcatcaagtgcagagctgcggtggcatgggaagcagggaagccactatcgatagaaaccatagaagtggcaccaccccagaaaggtgaagtgcgtttgaagatcctcttcaactccctttgccgtacagatgtttactggtgggatgctaagggccagactccgctgtttcctcgtatcttaggccacgaagcttcggggattgt

SEQ ID NO: 123375 - DNA, 85 bp, Glycine max
acaattccttcacttgcagcactgttgcatcatcatcttcattgcaaaaccctaaacttcaccgtcaaccatgaccacacaagta

SEQ ID NO: 123376 - DNA, 263 bp, Glycine max
gctcaatcctggtatttcaggttctcgtcttttgggcaccattcctcagtccatttcacagcaaactgtttggaatcaaatggcaacagtgagaacaccattgaattttgattctagcaagcagagcttttgtcagttttctattgaccttctcggtggaggaatcttagtggacaaaactggagattggatcacacttatacaaaattctccaattagtaacttgttgagagttgctgcttggaagaaaggctgtttaatgg

SEQ ID NO: 123377 - DNA, 262 bp, Glycine max
aaataaccaaagaacacctagagcccaacttagaagggctcactgtagatgaggcaattcaaaacaagaaattgttcctactagatcatcatgacccaatcatgccatatttgaggcgaataaatgcaacctccacaaaggcttatgctaccagaaccatccttttcctgaaaaatgacggaactttaaggccacttgccatagagttgagtttgccacatcctcagggagatcaatctggtgcttttagtcaagtttttct

SEQ ID NO: 123378 - DNA, 168 bp, Glycine max
acaaggtgagaacgaagaggaggatagtggagccattgtgacagtgaaaggaggtctaagagtcacagctccagccatgaggaagccacagcaagaagaagatgatgatgatgaggaagagcagccacagtgcgtggagacagacaaaggttgccaacgccaaagcaa

SEQ ID NO: 123379 - DNA, 208 bp, Glycine max
cccacattcagcttgggaccttttttgctgggacagtgagaaaactttgccaaataatttttctgcagaattgctctcttgcaaattggatactgttactggccaatattatcctgagtgggctccaattaattgtcgagttcatcgacaaccaattcacatcactgaaggaaattatgtcagaaagcaagatgtcagcattgattat

SEQ ID NO: 123380 - DNA, 256 bp, Glycine max
actttccttagttcaatatggggaagcccttcttcactctctctctttcttccctttgcttgctactcttgtcgagtgcatgctttgctattacctccagcaagttcaacgagtgccaactcaacaacctcaacgcgttggaacccgaccaccgcgttgagtccgaaggtggtcttattgaaacatggaactctcaacacctgagctgtatgtgcgggggatgtttgaaaggtctctcagcctcaaccgcaacggc

SEQ ID NO: 123381 - DNA, 260 bp, Glycine max
ctagttcaatatcctagtataccttaataaataatttaagatactatgatgagagcacggttcccattactgttgctggtacttgttttcctggcttcagtttctgtctcatttggcattgcttactgggaaaaagagaaccccaaacacaacaagtgtcttcagagttgcaatagcgagagagactcgtacaggaaccaagcatgccacgctcgttgcaacctccttaaggtggagaaagaagtatgtgaagaaggtga

SEQ ID NO: 123382 - DNA, 259 bp, Glycine max
aaaaggcaaaaggagatttgtctctggggatggtgaagagatgacactgattccgggaaccagtgttgaagaggcttacaacaagctaatagttgaacttgagaaaagtgttcctacattggttggcattgaatgtcccaaggatgagaaacttcctcgtcgcaaaatttttgacaaacctaagacgcgctgcttcactattctccctatggagtttaatcttgtggtccgtcaaaagtttttaaattttgtgaggttc

SEQ ID NO: 123383 - DNA, 260 bp, Glycine max
gagaaactttaagcagatgtctaatgttttgtgggtagctcctgaggacaaggcgagtttatggtcacaacttcattatgtttcgtgtaataatctggaaatgcaagaagcttatcttgtcaatctcgtaaatgtgttacgagaattgtatttgcacagtccagaggaagctcgccaattgagaaggaaagctctctctcgtattgaatggctgcaaaaagctgatgtgcctaccatagcacagattgaagagttccatt

SEQ ID NO: 123384 - DNA, 263 bp, Glycine max
attcaaaccttgctctatactacacagtacatacactagaagaatactggcttccatcctccactactttttagccctctctctttcttgctcttttctttacttcttatccgactcagtcacccctacaaaaccaataaaccttgttgttctacccgttcaaaatgatggttccacagggctccattttcgcaacctccaaaaaagaacccctctaatgcaagtaccagtcctggtggacctcaatggaaatcacttgtggg

SEQ ID NO: 123385 - DNA, 205 bp, Glycine max
tctcgagcgattcggctcgagcttaattattaacacttccttagctcaatatggggaagactttcactctctctctttcgtccctttgcttgctactcttgtcgagtgcatgctttgctattagctccagcaagctcaacgagtgccaactcaacaacctcaacgcgttggaacccgaccaccgcgttgagtccgaagtggtttg

SEQ ID NO: 123386 - DNA, 260 bp, Glycine max
gcgaagagaatggctcccaagggtttaatctttttggctgtgttatgcttctcagcactgtcactgagtcgttgtcttgcggaggataatggacttgttatgaacttctacaaggaatcatgccctcaggctgaagacatcatcaaagaacaagtcaagcttctctacaagcgccacaagaacactgctttctcctgactcagaaacatcttccatgactgtgctgttcagagttgtgatgcttcactgttgctggactc

SEQ ID NO: 123387 - DNA, 114 bp, Glycine max
cttaattactaacacttccgtagtgcaatatggggaagcccttcactcactctcgtgcatcccggtgcttgctactcttgtcgagtgcatgctttgctagtagctccagcaagc

SEQ ID NO: 123388 - DNA, 195 bp, Glycine max
gatgagagtgcggtttcctttgttggtgttgctgggaactgttttcctggcatcagtttgtgtctcattaatggtgagagaggatgagaataaccctttctacttgagaagctctaacagcttccaaactctctttgagaaccaaaacggtcgcattcgtctcctccagagattcaacaaacgctccacacaaca

SEQ ID NO: 123389 - DNA, 250 bp, Glycine max
gttcaatatcctagtataccttaataaataatttaagatactatgatgagatcacggttcccattactgttgctggtacttgttttcctggcttcagtttctgtctcatttggcattgcttactgggaaaaagagaaccccaaacacaacaagtgttctcagagttgcaatagcgagagagactcgtacaggaaccaagcatgccacgctcgttgcaacctccttaaggtggagaaagaagatgtgagaa

SEQ ID NO: 123390 - DNA, 258 bp, Glycine max
ttttgacagagggcaattttagagcaagtgttgatttgcagcgcactcatcgtattaaaggaatgattaaaatggtggccacagttggtattcctgagaatacaggtatagcattgtcctgtgctatgaatagttcttttagggggcgtgccagttctgatatttacaccatctgctctcaagactgtgaattatggaatcttgcttgcacaaaagcaatgactatgtcatttaatccaaacccgtgttctgatgcat

SEQ ID NO: 123391 - DNA, 96 bp, Glycine max
aaacactcatcagtcatcacgatggccaagctagttagttccctttgtgttctgcatttcagtggctgctgcttcgctaggagttccagagagcag

SEQ ID NO: 123392 - DNA, 178 bp, Glycine max
acattctcttgggattgtcaataactgtagactgtttgggattgtcaataaggaaactcaaatgccatgaagtttgatattccttattgacaatcccaaacagtctacagtttttgacattctcttgggaatttctcaagatttggaaattgctggtaatactctaatgcagtttttc

SEQ ID NO: 123393 - DNA, 259 bp, Glycine max
gggagtttcttcttggatcttaccctcttgtttgctaatattctcattcttctgtctctgcttcttctccttctgaactaagagatggggttgtctttcaccaagctttttagccggctctttgctaagaaagagatgcgtattctcatggtaggtcttgatgctgctggtaagactaccatcttgtacaagctcaagctgggagaaattgtcacaaccattcccacaattggattcaatgtggagactgtggaatata

SEQ ID NO: 123394 - DNA, 263 bp, Glycine max
caataaatgatgagggaatgccacaacacaataggccattcatgaagggtcgcctttacatccagtttaatgttgatttcccagactcagggtttctttcccctgaccaatgccagttactggaaaaggtgttacctcaaaagagcagcaagcattcgtcagacatggagctggatgattgtgaggagaccactttgcatgatgtcaactttaatgaggagatgagacgaaagcagcaacagcaatatcgcgaggcatatgat

SEQ ID NO: 123395 - DNA, 256 bp, Glycine max
tacatgtggtagtggacgtggtggtttacccaccactgtatggattagttctgcagttaataatcgctcctcagatatcaacaaaaagattcgcacagcacttgggaaaggtaagaaaattgtttttcttactagagttgatccttttccagtagctttactggctgttctttttggcgttaagaatgaaattctgagttctaacgccactaaccctatgctgacgcgacttcttgagaactgtaagagtctcaaa

SEQ ID NO: 123396 - DNA, 258 bp, Glycine max
cacctaagtactggcttgcatttacagtttctgtaccgccacttggttttagcacatacactgtctcaactgccaaaaggacagggtccacaagatcatcagtaaatatatatatgagtagtgaaaagtctaaatttgatgttggtcaaggaaatttgaagcttacattttctatggatcaagataagtgtaccaattatgttaatataagaaacctggtcgaggaacaggttgaactaagttacctatactattctg

SEQ ID NO: 123397 - DNA, 253 bp, Glycine max
agcatttggaaatttggctgatgacaccatcaattttgaggctttttcctgaatctctccaaactgcaccaggttgtcgggaaaagcctcaaaattggatggtgtcatcagccaaatttgaggcttttccccacaagctggtgcagtttggagagattcaggaaaaagttgtattgaaattttcacaagaggactttcttacagcttggtcaactcaggtgcgtcctgcaacaactctgttggctgatgggtg

SEQ ID NO: 123398 - DNA, 223 bp, Glycine max
cgacgaaaggaagcagatcgtgacagtggaaggagactgaagtttctcagctatgtactcgttggtgttgaaggattgtgccaagaagtgtttgctgaagccactgagcacgctgccaccttcaacaccaacgaggacaaagctgagaaacttcagtctccagacgacgacaggaagcagatcgtgacagtggaaggaggtctcagcgttatcagccccaagt

SEQ ID NO: 123399 - DNA, 244 bp, Glycine max
caatatcctagtataccttaataaataatttaagatactatgatgagagtactgttcccattactgttgctgggacttgttttcctggcttcagtttctgtctcatttggcattgcttactgggaaaaagagaaccccaaacacaacaagtgtctccagagttgcaatagcgagagagactcgtacaggaaccaagcatgccacgctcgttgcaacctccttaaggtggagaaagaagaatgtg

SEQ ID NO: 123400 - DNA, 256 bp, Glycine max
ggtggccacagttggtattcctgagaatacaggtatatcattggcctgtgctatgaatagttcttttagggggcgtgccagttctgatatttacaccatctgctctcaagactgtgaattatggaatcctgcttgcacaaaagcaatgactatgtcatttaatccaaacccgtgttctgatgcgtggagtttggaatttctgaagcgtaacggatttcactgggtgacatcatttgtgtcactggatggactgcca

SEQ ID NO: 123401 - DNA, 175 bp, Glycine max
  unsure (1)..(175): unsure at all n locations
ctcgagccgaaagatattgagaacctaataaagagccaaagtgagtcctactttgtggatactcagcctcagcagaaagaggaggggaacaagggaagaaagggtcctttgtcttcaattttgagggctttttactgaataagtatgtagtactanaatgtatgctgtaatagct

SEQ ID NO: 123402 - DNA, 256 bp, Glycine max; identical to SEQ ID NO: 113235

SEQ ID NO: 123403 - DNA, 257 bp, Glycine max
cttattaacactttccttagttcaatatggggaagcccttctttcatctctctctttcttccctttgcttgctactcttgtcgagtgcatgctttgctattacctccagcaagttcaacgagtgccaactcaacaacctcaacgcgttggaacccgaccaccgcgttgagtccgaagtggtcttattgaaacatggaactctcaacaccctgagctgcaatgcgccggtgtcactgtttccaaacgcaccctcaacc

SEQ ID NO: 123404 - DNA, 287 bp, Glycine max
aaataatttaagatactatgatgagagcacggttcccattactgttgctgggacttgttttcctggcttcagtttctgtctcatttggcattgcttactgggaaaaagagaaccccaaacacaacaagtgtctccagagttgcaatagcgagagagactcgtacaggaaccaagcatgccacgctcgttgcaacctccttaaggtggagacagaagaatgtgaagaaggtgaaattccacgaccacgaccacgtacacaacacccggagagggaactcagcaaccgg

SEQ ID NO: 123405 - DNA, 206 bp, Glycine max
tgaagctcaacaatcctacttgcaaggattcagcaggaacattttagaggcctcctacgataccaaattcgaggagataaacaaggttctgtttagtagagaggaagggcagcagcaaggggagcagaggctgcaagagagcgtgattgtggaaatctcgaaggaacagattcgggcactgagcaaacgtgccatatctagttcaa

SEQ ID NO: 123406 - DNA, 274 bp, Glycine max
gcagaagggtgcttggtatgttttggatgagtagtgttgctcacagttaacccaatgctccagagccaacactcaccaatgcctcagttgcccagcggcatcaaggccagggtgccacaaaaacacgtgtggcctcatgtccaccaaccccatcacccaacaaaccggtttgggtgaactaggccaagatgtgcttgcaatccacgctactcaaggctccacccaacaacttggtccattggtcacagtccctcagttcctcttttcttgtgca

SEQ ID NO: 123407 - DNA, 281 bp, Glycine max
gcgatgcggatgaggcgccactcgatgtttccatttgcctgcatgcctttggtattgtggggtgtggttcgtttagtggtgtcaagtcttgcgaacgtgagggtgcatgagtggtaatcgggatgtttttgttgcacggctccatgcttgcgcatgcaacgtgtgacatgcatccttttcattgtcaccttagccttcgtggcttaggtgctgacgattggttgctgtgttgcctacctaccaaacggtattcgtgtggctagtcagacccattccatcca

SEQ ID NO: 123408 - DNA, 107 bp, Glycine max
tgttcttggaggaaatgacacctttccttatcctcgtagggggagaactggtagaaaaccaacaaggaaagatcctaatagtgagtctaggagcaatgatgtttatc

SEQ ID NO: 123409 - DNA, 284 bp, Glycine max
cataaaattcttccaccaagttatgggtttccttgtgttgcttcttttctccctcttaggtctctcttctagttccagcatatcaactcatcgttccatattggaccttgacctaaccaagtttaccacacagaaacaggtgtcttcactgttccaactatggaagagtgagcatggacgtgtctaccataaccacgaagaagaggcaaagagacttgagattttcaagaataacttgaactatatcagggacatgaatgctaacagaaaatcaccccattctc

SEQ ID NO: 123410 - DNA, 261 bp, Glycine max
aagaaaatcctcacccattttcttcgtagccaaacactctgaaattctcagttatgtcgtggcaagcgtatgtggatgatcacctactgtgtgaaatcgaaggtaaccacctcactcacgccgctatcatcggccaagacggaagcgtttgggctcagagcaccaacttccctcagttcaaacctgaggaaataactgccatcaataatgactttaatgagcctggatcacttgctccaactggattgtatatgggtggca

SEQ ID NO: 123411 - DNA, 261 bp, Glycine max
ggaagatatcccacattcagcttgggaccttttttgctgggacagtgagaaaactttgccaaataattttactgcagaattgctctcttgcaaattggatactgttactggccaatattatcctgagtgggctccaattaattgtcgagttcatcgacaaccaattcacatcactgaaggagattatgtcagatagcaagatgtcagcattgaatatgatgcatgtacaattccaaatgattgtggttcattggttgttgc

SEQ ID NO: 123412 - DNA, 216 bp, Glycine max
tcaatatcctagtacaccgtattaaagaatttaagatgtactatgatgagagcgcggttcccattactgttgctgggagttgttttcctggcatcagtttctgtctcatttggcattgcgtattgggaaaagcagaaccccagtcacaacaagtgcctccgaagttgcaatagcgagatagactcctacaggaaccaagcatgccacggtcgttgc

SEQ ID NO: 123413 - DNA, 280 bp, Glycine max
tatcctagtacaccgtattaaagaatttaagatatactatgatgagagcgcggttcccattactgttgctgggagttgttttcctggcatcagtttctgtctcatttggcattgcgtattgggaaaagcagaaccccagtcacaacaagtgcctccgaagttgcaatagcgagaaagactcctacaggaaccaagcatgccacgctcgttgcaacctccttaaggtggaggaagaagaagaatgcgaagaaggtcaaattcgacgactacgaccacaaca

SEQ ID NO: 123414 - DNA, 276 bp, Glycine max
gggaaaaggatgttcaggtgatgaatgaaggacctggacacatcccaatgcacaagattcctgatcacatgcagaaacagttagaatggtgtagtgaagcgcctttttacactcttggtcctttaacaactgatattgcccccggctatgatcacatcacctctgcaattggtgctgccaatattggggcacttggtactgctcttctctgttatgtgactccaaaggaacatcttgggttgccaaaccgggatgacgtgaaggctggagttatag

SEQ ID NO: 123415 - DNA, 281 bp, Glycine max
agaaagtcttccatagccccccaaaaatgaagagcaccatcttctttgctctctttctcttttgtgccttcaccacctcatacctaccttcagccatcgctgatttcgtgctcgataatgaaggtaaccctcttgaaaatggtggcacatattatatcttgtcagacataacagcatttggtggaataagagcagccccaacgggaaatgaaagatgccctctcactgtggtgcaatctcgcaatgagctcgacaaagggattggaacaatcatctcgtcc

SEQ ID NO: 123416 - DNA, 274 bp, Glycine max
ctcgagccgtccttttgtgttaaataggtggatggggaaactgactttccttcagggcacttcccgaagtgtcaaaagaatgcctctttctatagggggaggagctggtgcaaagaatgctattctcatgaatatgccaaatgctgttctttcaatgtggagatattttgttggagatctcgttcttgaagtttctaagatgacttgcccctacattaaatgtacagtctctttcttcatagcatttggaaatttggctgatgacaccatcaat

SEQ ID NO: 123417 - DNA, 280 bp, Glycine max
tgaaaaattactgcgccaggctaaagctccaagtatgtttttacaatccttcaaaaattttgtttctatgtgtgtgtatggtgatgataacttaattagtgttcatgaatacgtcaagccttactttagtggttctaaattgaaaagctctctagctggtcataatatcaccattactgatgggtatgacaagaccaattccatctttgcaatttagaaagttagcagattgtgattttctcaagagaaactttaagcagatgtctaatgttttgtgggt

SEQ ID NO: 123418 - DNA, 281 bp, Glycine max
cagaggttcaacaaacgctcccaacagcttcagaatctccgagactaccgcattttggagttcaactccaaacccaacacccttcttctcccccaccatgctgacgctgattacctcatcgttatccttaacgggactgccattcttaccttggtgaacaacgacgaccgagactcttacaaccttcaatctggcgatgccctaagagtccctgcaggaaccacatactatgtggttaaccctgacaacgacgagaatctcagaatgataacactcgccat

SEQ ID NO: 123419 - DNA, 147 bp, Glycine max
ggagaagcaaacattgaacttgttggcattaaagaacaacaacagaggcagcaacaggaagagcaacctttggaagtgcggaaatatagagctgaattgtctgaacaagatatatttgtaatcccagcaggttatccagttgtggtc

SEQ ID NO: 123420 - DNA, 218 bp, Glycine max
ctccattggtccttaaacactcatcagtcatcaccatggccaagctagtcttttccctttgttttctgcttttcagtggctgctgcttcgctttcagttccagactgcagcctcagcaaaacgagtgccagatccaaaaactcaatgccctcaaaccggatacccgtatagagtcagaaggagggctcattgacccatggaaccctaacaacaagcca

SEQ ID NO: 123421 - DNA, 286 bp, Glycine max
tgtgccaataaagcgcagagcatgggttgaaggccagatgtctttcgatcagtctgtagtagcaattatgtctaaatgcaaagccagcatgagaatgggaaacactgatgctcaaattttgatggttccagggcgcagattcatagctcatggacattttttcaaaaatctggactcagaaagtgcgagtccaaattgttacatctgaaaagagttactggcatgtgtatgatcctgacaagtttcagatgtttgacaacagtgaaatagggctttattctaatcc

SEQ ID NO: 123422 - DNA, 285 bp, Glycine max
  unsure (1)..(285): unsure at all n locations
atatactatgatgagagtgcggtttcctttgttggtgttgctgggaactgttttcctggcatcagtttgtgtctcattaaaggtgagagaggatgagaataaccctttctacttgagaagctctaacagcttccaaactctctttgagaaccaaaacggtcgcattcgtctcctccagagattcaacaaacgctccccacaacttcaattgtgacgagnataccggattgtccagtttcagtcaaaacccaacacaatccttctcccccaccatgctgacgccga

SEQ ID NO: 123423 - DNA, 281 bp, Glycine max
gctgatgttcttgcaaagcgagctcatgaatttgaaaaacatgttgctcatgaaagcctcaaggatcaaattcctgctgttgacaagttgtatactactaaggttaataagtttgcaaaaattatgaaccttagacaaagtgttgttggtgatcttaaacttcttactgatgggaagttgtatgagggtaagcatattcctgtatctaatattagtgcaggggagaatcatgtagttcaaatacccctaatggcacaggaggaaattctgtcttctagtgc

SEQ ID NO: 123424 - DNA, 120 bp, Glycine max
cacaggttgccgcaccttaaaaccggaaacagaagccatacgttactggatttcaagaatgtctcaatttctttctacttctttgtgtacgatgtcttaagggaaagaaaatcactctct

SEQ ID NO: 123425 - DNA, 255 bp, Glycine max
ggctcgagacttattaacactttccttagtacaatatggggaagccattcttcactctctctctttcatccctttgcttgctactcttgtcgagtgcatgctttgctattacctccagcaagttcaacgagtgccaactcaacaacctcaacgcgttggaacccgaccaacgcgttgagtccgaaggtgggtctaatgaaacaatggactctccaaaacctgagctgcaatgcgccggtgtcactgtttccaaac

SEQ ID NO: 123426 - DNA, 276 bp, Glycine max
ctagttcaatatcctagtataccttaataaataatttaagatactatgatgagagcacggttcccattactgttgctgggacttgttttcctggcttcagtttctgtctcatttggcattgcttactgggaaaaagagaaccccaaacacaacaagtgtctccagagttgcaatagcgagagagactcgtacaggaaccaagcatgccacgctcgttgcaacctccttaaggtggagatagaagaatgtgaagaaggtgagattccacgaccacga

SEQ ID NO: 123427 - DNA, 276 bp, Glycine max
atcttgctgggaaccaagagcaagagtttctaaaatatcagcagcagcagcaaggaggttcccaaagccagaaaggaaagcaacaagaagaagaaaacgaaggaagcaacatattgagtggcttcgcccctgaattcttgaaagaagcgttcggcgtgaacatgcagatagtgagaaacctacaaggtgagaacgaagaggaggatagtggagccattgtgacagtgaaaggaggtctaagagtcacagctccagccatgaggaagccacagcaag

SEQ ID NO: 123428 - DNA, 272 bp, Glycine max
atcctagtacaccgtattaaagaatttaagatatactatgatgagagcgcggttcccattactgttgctgggagttgttttcctggcatcagtttctgtctcatttggcattgcgtattgggacaagcagaaccccagtcacaacaagtgcctccgaagttgcaatagcgagaaagactcctacaggaaccaagcatgccacgcacgttgcaacctccttaaggtggaggaagaagaagatgcgaagaaggtcaaattccacgaccacgacc

SEQ ID NO: 123429 - DNA, 271 bp, Glycine max
gtttcgcaagtcctgattgcaacatagttggtgcaatgcttttggttgatacttatcataccaatcctgaaaatgcagttcgtagtatttttgttgcgcctttcagaggcgtaaggcccattcgggtggttacatttccgaataccattgtgcagattgaaccagacatgaattcaaggtttcagcttttgagtaccactaccaatggtgattttgttcaagggaaagatctcgcaatggttaaagttaatgtagcatgtgctgctgttgg

SEQ ID NO: 123430 - DNA, 275 bp, Glycine max
gcgatgcggatgaggcgccactcgatgtttccatttgcctgcatgcctttggtattgtggggtgtggttcgtttagtggtgtcaagtcttgcgaacgtgagggtgcatgagtggtaatcgggatgtttttgttgtcacggctccatgcttgcgcatgcaacgtgtgacatgcatccttttcattgtcaccttagccttcgtggcttaggtgctgacgattggttcctgtgttgcctacctaccaaacggtattcgtgtggctagtcagacccatt

SEQ ID NO: 123431 - DNA, 193 bp, Glycine max
gttgttattaagtatgtgccttacgtaggggacagcaacatggtctggatgttcaccaggctcatagtggatggcattgctgttgaccatatcatcaacaatgccatcctctatgagcctggtgaacatccagaccatgtcgtggtgcttaagtatgtgacttacgtaggggacagcaagagagccatggatg

SEQ ID NO: 123432 - DNA, 276 bp, Glycine max
gctttgcaagagcattaacccagatgaagctgttgcctatggtgcagcagtgcaggttgccattctcagtggcgatggtaatgagaaagtgcaggatctattgttgttggatgttactcctctctcccttgggttggagaccgcgggaggagtcatgactgtgttgattcccagaaacacaaccattcccaccaagaaggagcaggtattttcgacctattccgacaaccagcctggtgtgttgattcaggtctatgaaggtgaacgtacgaggtt

SEQ ID NO: 123433 - DNA, 181 bp, Glycine max
atcacacacaactactacaagtacttccttacaatcaaaaccaacaacaactatggcaagttatcaaaagcactacgatgatcagggtcgcaaggttgacgagtatggcaacgttgagaagcaaaccgacgaatacggcaaaccttgtccatgtgctagtgtccacttatgtagccaccag

SEQ ID NO: 123434 - DNA, 272 bp, Glycine max
gaaattgctggtaatactcttatgccagctttttctgttccacaggctactgccagatcttctgaaaatgcggaatcctctgcatgatctggaatttgtgttttctttcatttgtccgtttgtttaattcaataaaggaaattaggcatgaccctcttgttgagtatgctctgcctatttgaaaatttccacacctcttttaattatcgtaatgatgtgtgaagtgtgtgttattttaaaaaaaaaaaaaaaaaaaaaaaggggggccgccg

SEQ ID NO: 123435 - DNA, 284 bp, Glycine max
ctccattggtccttaaacactcatcagtcatcaccatggccaagctagttttttccctttgttttctgcttttcagtggctgctgcttcgctttcagttccagagagcagcctcagcaaaacgagtgccagatccaaaaactcaatgccctcaaaccggtaaccgtatagagtcagaaggagggctcattgagacatggaaccctaacaacaagccattccagtgtgccggtgttgccctctctcgctgcaccctcaaccgcaacgcccttcgtagaccttcct

SEQ ID NO: 123436 - DNA, 276 bp, Glycine max
atggtgatgataacttaattagtgttcatgaatacgtcaagccttactttagtggttctaaattgaaaagctttctagctggtcataatatcaccattactgatggtattgacaagactagtgcaactttgcaatttagaaagttagcagattgtgattttctcaagagaaactttaagcagatgtctaatgttttgtgggtagctcctgaggacaaggcgagtttatggtcacaacttcattatgtttcgtgtaataattcggaaatgcaagaag

SEQ ID NO: 123437 - DNA, 272 bp, Glycine max
atcctggtctctgtctactcttcaattattcccaacctctcacctcttcatcttcttcttccttacctttgaccagagacagagcagcactcacattcacaacgaaggtttcctattcatcagacatggtgaaggcaatcagagttcacgaactcggtggccctcaagttctgaagtgggaggatgtggaaattggagatccaaaagaaggcgaggtccgtgtgaggaacaaagccattggggttaatttcattgatgtctactttcgcaaa

SEQ ID NO: 123438 - DNA, 141 bp, Glycine max
tatatatactatgatgagagtgcggtttcctttgttggtgttgctgggaactgttttcctggcatcagtttgtgtctcattaaaggtgagagaggatgagaataaccctttctacttgagaagctctaacagcttccaaat

SEQ ID NO: 123439 - DNA, 186 bp, Glycine max
gttcaatatcctagtataccttaataaataatttaagatactatgatgagagcacggttcccattactgttgctgggacttgttttcctggcttcagtttctgtctcatttggcattgcttactgggaaaaagagaaccccaaacacaacaagtgtctccagagttgcaatagcgagagagactcg

SEQ ID NO: 123440 - DNA, 258 bp, Glycine max
tttagctttctcttccttcataatttctcacctttcaaatctccattcagcttcattttctgcatagaaaaaacccttttctggagaaagaatatagtcttcagctggacaaggatcattcatcttgaaagaagagtttgtgtgtgacaatctttatagttctaaggagggtgcaagagagaactgaatttgctgtgatggcaactcgtagatatgcttttggaagagctgatgaggccactcatccagactccatga

SEQ ID NO: 123441 - DNA, 237 bp, Glycine max
aacttattaacactttccttagttcaatatggggaagcccttcttcactctctctctttcttccctttgcttgctactcttgtcgagtgcatgctttgctattacctccagcaagttcaacgagggagaactcaacaacctcaacgcgttgaaacccgaccaccgcgttgagtccgaaggtggtcttattgaaacatggaactctcaacagcctgagcttcaattctacggtgtcac

SEQ ID NO: 123442 - DNA, 281 bp, Glycine max
ctaaacaattcaattcaatctgcctggatcatggagaggaaaacatttggggttttagtcctgcctcctccttgccttagcttctgatgtgacggtgaagagagcagaggcgaaagattgctttgacaggaggcacgggttccagggtaaatgcttattcgacaggcaatgtgcacaatgtttcaagaacgatgggttccaccgtgggcaattccgaaggccttctcggcaattcctttgcagcaggccatgttgatcgaaattactactgccaaagaggc

SEQ ID NO: 123443 - DNA, 167 bp, Glycine max
aagaggagagtgatcaactctttgagccgtaaaggttcaatacaacgagtgcttgttttcttagggacaagcattgtacttatgtatgattctgtgtaaccatgagtcttccacgttgtactaatgtgaagggcaaaaataaaacacagaacaagttcgtttttctc

SEQ ID NO: 123444 - DNA, 169 bp, Glycine max
cccacatttagcttgggatcttttctgctgggacagtgagaaaactttgccaaataatttttctgcagaattgctctcttgcaaattggatactgttactggccaatattatcctgagtgggctccaattaattgtcgagttcatcgacaaccaattcacatcactgaa

SEQ ID NO: 123445 - DNA, 143 bp, Glycine max
gaggaagaggagcagaggcagcaagatggagtgatcgttgaactctcaaagggacaaattcggcaactgagcagacgtgcaaatctaggtccagggaaaccatttccttcgaagatgaaccattcaacttgagaagccgcaac

SEQ ID NO: 123446 - DNA, 187 bp, Glycine max
ctcgagccgttttgataaaccgcgatcacaggttgccgcaccttaaaacctgaaacaaaagcaatcgttactttatttcaagaatctctcaatttcttcctacttctttgtgtacgatttcttaatggaaagaaaatcactctctgtgctggccacagacgtcgtgaatcatgttcttctccacaca

SEQ ID NO: 123447 - DNA, 268 bp, Glycine max
gacagagcaagcgttcttaagcgccatccttgagctaccaattagtgtctccattgatgcaaaagattttcatttatacaccgggggaatttatgatggagataactgtacaagtccgtatgggattaatcactttgttttacttgtgggttatggttcagcggatggtgtagattactggatagcgataaattcatggggagaagattggggagaagatggttacatttggatccaaagaaacacgggtaatttattaggagtgtgt

SEQ ID NO: 123448 - DNA, 167 bp, Glycine max
cttcccaaaaacacagttggaggaaccattctgcgtagtgacctattggcaaattttttgacagagggcaattttagagcaagtgttgatttgcagcgcactcatcgtatcaaaggaatgattaaaatggtggccacagttggtattcctgagaatacaggtatagc

SEQ ID NO: 123449 - DNA, 269 bp, Glycine max
caatctcgtaaatgtgttacgagaattgtatttgcacagtccagaggaagctcgccaattgagaaggaaagctctctctcgtattgaatggctgcaaaaagctgatgtgcctaccatagcacagattgaagagttccattcgatgcagaggatgatgaatgctcctgattcaaatgataatatcgatctactgttgagcattgatttgttgggtttacaaggagcaggtaaagcttttccaaacaagattgtttttgatgataagcttg

SEQ ID NO: 123450 - DNA, 273 bp, Glycine max
catggtgtcttcctcccaacacattctgttcaccggtggtgccggtttcattggcacccacaccgtcgttcagcttctcaaagctggcttcagcgtttcaataatcgacaatttcgataactccgtcatggaagcagtggaccgcgtccgccaagtggttggccctctgctttctcagaacctccaattcacccagggcgatctccggaatagggatgacttggagaaactcttctccaaaacaacatttgatgccgtgatccactttgctgg

SEQ ID NO: 123451 - DNA, 274 bp, Glycine max
aacttattaacactttccttagttcaatatggggaagcccttcttcactctctctctttcttccctttgcttgctactcttgtcgagtgcatgctttgctattacctccagcaagttcaacgagtgccaactcaacaacctcaacgcgttggaacccgaccaccgcgttgagtccgaaggtggtcttattgaaacatggaactctcaacaccctgagctgcaatgcgccggtgtcactgtttccaaacgcaccctcaaccgcaacggcctccat

SEQ ID NO: 123452 - DNA, 265 bp, Glycine max
ggaaaagcatttcttctgaagataaacctttcaacttgagaagccgcgaccccatctattccaacaagcttggcaagttgtttgagattaccccagagaaaaaccctcagcttcgggactggatgcctcctcaatggtgtggatatgaacgaaggagctctttttctgcaaacttcaattcaaaggcatagtggtactcatgataatgaaggaggagaaacattgaattgttggcattaagaaaacaacagggcagcaacagaag

SEQ ID NO: 123453 - DNA, 275 bp, Glycine max
agttatttgcaatagcatttttaatgagatgctcattagatatagctatgaaaaattactgcgctaggctaaagctccaagtatgtttttacaatctttcaaaaattttgtttctttgtgtgtgtatggtgatgataacttaattagtgttcatgaatatgtcaagccttactttagtggttctaaattgaaaagctttctagctggtcataatatcaccattactgatggtattgacaaaactagtgcaactttgcaatttagaaagttagcag

SEQ ID NO: 123454 - DNA, 179 bp, Glycine max
gaaattttgataaaccgcgatcacaggttgccgcaccttaaaaccggaaacaagagcaatcgttacttgatttcaagaatctctcaatttcttcctacttctttgtgtacgatttcttaagggaaagaaaatcactctctgtgctggccaagacttcgtgaatcattttcttttccaca

SEQ ID NO: 123455 - DNA, 272 bp, Glycine max
cgcaaaatgagtgccagatccaaaagctgaatgccctcaaaccggataaccgtatagagtcggaaggtgggttcattgagacctggaaccctaacaacaagccattccagtgtgtcggtgttgccctctctcgctgcatccttaaccgcaatgcccttcgtagaccttcctacaccaacggtccccaggaaatctacatacaacaaggtaatggtatttttggcatgatattcccgggatgtcctagcacttatcatgagccgcaagaatct

SEQ ID NO: 123456 - DNA, 103 bp, Glycine max
ggacaaaagatacaaaggcttagatgccctttgttaagtgtagaataacgggtatagtaactatgtacccttctgtaatgagtcactcaagtacctatgcggg

SEQ ID NO: 123457 - DNA, 274 bp, Glycine max
gttatatgctatctgaagatagagacgatgatgtagctgttgaattgcattctaagcttctaaaggagttcccaagagatctgctttctctaaagagagcacaagtcttatgcttctacatgggtctgcctggtctttctttatctcttattcagcagattctgcctcacaatgaaggagaaaattatatataacgcatgcttgcttttcctttgttggagcttggacggatggaggaagctgaggaagctgccaaaaggggatttgaaatcaa

SEQ ID NO: 123458 - DNA, 269 bp, Glycine max
ctagttcaatatcctagtataccttaataaataatttaagatactatgatgagagcacggttcccattactgttgctgggacttgttttcctggcttcagtttctgtctcatttggcattgcttactgggaaaaagagaaccccagacacaacaagtgtctccagagttgcaatagcgagagagactcgtacaggaaccaagcatgccacgctcgttgcaacctccttaaggtggagatagacgaatgtgaagaaggcgtaattccacg

SEQ ID NO: 123459 - DNA, 276 bp, Glycine max
cttgtctttgaacactcatcaccatggccaagcttgttctatccctgtgtttccttcttatcagtggctgcttcgctctgagagagcaggcacagcaaaatgagtgccagatccaaaagctgaatgccctcaaaccggataaccgtatagagtcggaaggtgggttcattgagacctggaaccctaacaacaagccattccagtgtgccggtgttgccctctctcgctgcacccttaaccgcaatgcccttcgtagaccttcctacaccaacggtc

SEQ ID NO: 123460 - DNA, 276 bp, Glycine max
gcaaaaagaaagaatcccaggcgaggagaaagatggaggggaaggagcaggatgtgtcgttgggagcgaacaagttccccgagagacagccgattgggacggcggcgcagagccaagacgacggcaaggactaccaggagccggcgccggcgccgctggttgacccgacggagtttacgtcatggtcgttttacagagcagggatagcagagtttgtggccacttttctgtttctctacatcaccgtcttaaccgttatgggagtcgccggggcta

SEQ ID NO: 123461 - DNA, 265 bp, Glycine max
atcctagtacaccgtattaaagaatttaagatatactatgatgagagcgcggttcccattactgttgctgggagttgttttcctggcatcagtttctgtctcatttggcattgcgtattgggaaaagcagaaccccagtcacaacaagtgcctccgaagttgcaatagcgagaaagactcctacaggaaccaagcatgccacgctcgttgcaacctccttaaggtggaggaagaagaagaatgcgaagaaggtcaaattccacga

SEQ ID NO: 123462 - DNA, 280 bp, Glycine max
cagaaggtgaaattccacgaccacgaccacgaccacaacacccggagagggaacctcagcaacccggtgagaaggaggaagacgaagatgagcaaccacgtccaatcccattcccacgcccacaacctcgtcaagaagaagagcacgagcagagagaggaacaggaatggcctcgcaaggaggaaaaacgcggagaaaagggaagtgaagaggaagatgaggatgaggatgaggaacaagatgaacgtcaattcccattcccacgcccacctcatcagaa

SEQ ID NO: 123463 - DNA, 278 bp, Glycine max
agattacacgctttttgtcatccaatttctctctcccgtgtcgtgtcgtgtcttcttctctaaaataaaaaaccctaacttctgaacctttcaccgcatcgccaccgattccctatctccactaatcaaagaaaagaaaatgagtagacgctcgagcagaactgtctacgttgggaatctacccggtgatatccgtgaaagagaagttgaagatctgtttctgaagtacggacacataacacacatcgacctaaaggttcccccaagaccacctggtt

SEQ ID NO: 123464 - DNA, 250 bp, Glycine max
cgaaggcactctcctgggcatgggtaaccctctcctcgacatctccgccgtcgtcgatgaagacttcttaaaaaaatatgatatcacctcgaacaatgcgattcttgcggaggacaagcacaagcctatgtatcaagaattggctgagaaatataatgtggagtacattgctggaggtgccactcagaattcaatcaaggttgctcaatggatgctccaagttcctggtgcaacaggttacatgggtggc

SEQ ID NO: 123465 - DNA, 270 bp, Glycine max
aattagtaacttgttgagagttgctgcttggaagaaaggctgtttaatggttaagattgtgatgtctgggaatgcagcagtcaaaaggagtgattgggcctcattggtacaagtgtttttaacaaacagcaacagtacagagcattttgatgcatgtaagtggacaaaatcggaaccacattcctgggaattgatcttcccaatagaggtatgcggtcctaataatggttttgaaatgtggagttctgagtgggcaaatcaaacttcatg

SEQ ID NO: 123466 - DNA, 272 bp, Glycine max
aagagttgcagctattcttggtgaaattgcagctgagatggtctcagatagacagaagaaagaatctgcccctccagtaggtatttctgatcatggcacagagaaaacaatgtacttcttggctgaagcaacgcatcccttcagtggtgaatcagaaaaggaactgagcttttctaagggtgattttgtcgttgtgcgaaaggtgagccaatcaggatggtcagaaggcgaatgcaatggcaaagcaggatggtttccttctgcatatgtgg

SEQ ID NO: 123467 - DNA, 271 bp, Glycine max
tatcgagcgaatcggctcgaggtgggtagctcctgaggacacggcgagtttatggtcacaacttcattatgtttcgtgaaataatctggaaatgcaagaagcttatcttgccaatctcgtaaatgtgttacgagaattgtatttgcacagtccagaggaagctcgccaattgagaacgaaagctctctctcgtattgaatggctgcaaaaagctgatgtgcctaccatagcacagattgaagagttccattcgatgcagaggatgatgaat

SEQ ID NO: 123468 - DNA, 266 bp, Glycine max
caatatcctagtacaccgtattacagaatttaagatgtactaggatgagagcgcggttcccattactgttgctgggagtctgtgtcctggcatcagtttctgtctcatttggcattgcgtattgcgaaaaggagaaccccagtcacaagaagtgcctccgaagttgcaatagcgagaaagactcctacaggaaccaagcatgccacgctcgttgcaacctccttaaggttgaggaagaagaagaatgcggagatggtcaaattcca

SEQ ID NO: 123469 - DNA, 111 bp, Glycine max
attcaataaaggaaattaggcatgaccctcttgttgagtatgctctgcctatttgaaaatttccacacctcttttaattgtcgtaatgatgtgtgaagtgtgtgttatttt

SEQ ID NO: 123470 - DNA, 272 bp, Glycine max
ttcgagcgaatcggctcgagcaatatcctagtataccttactaaataatttaagatcctatgatgagagcacggatcccattactgttgctgggacttgttttcctggcttcagtttctgtctcatttggcattgcttactgggaaaaagagaaccccaaacacaacaagtgtctccagagttgcaatagcgagagagactcgtacaggaaccaagcatgccacgctcgttgcaacctccttaaggtggagaaagaagaatgtgaagaaggt

SEQ ID NO: 123471 - DNA, 276 bp, Glycine max
aagcaaagcaatggctacttcaaagttgaaaacccagaatgtggttgtatctctctccctaaccttaaccttggtactggtgctactgaccagcaaggcaaactcagcggaaactgtttctttcagctggaacaagttcgtgccgaagcaaccaaacatgatcctccaaggagacgctattgtgacctcctcgggaaagttacaactcaataaggttgacgaaaacggcaccccaaaaccctcgtctcttggtcgcgccctctactccacccccat

SEQ ID NO: 123472 - DNA, 271 bp, Glycine max
aagattttgaaattgctggtaatactcttatgccagctttttctgttccacaggctactgccagatcttctgaaaatgcggaatcctctgcatgatctggaatttgtgttttctttcatttgtccgtttgtttaattcaataaaggaaattaggcatgaccctcttgttgagtatgctctgcctatttgaaaatttccacacctcttttaattgtcgtaatgatgtgtgaagtgtgtgttattttaaaaaaaaaaaaaaaagggcggccgc

SEQ ID NO: 123473 - DNA, 286 bp, Glycine max
tcgagttcggctctatcttttccaaacaagattgtcaatatggggaagcccttcactctctctctttcttccctttgcttgctactcttgtcgagtgcatgctttgctattagctccagcaagctcaacgagtgccaactcaacaacctcaacgcgttggaacccgaccaccgcgttgagtccgaaggtggtttgattcaaacatggaactctcaacaccctgagctgaaatgcgccggtgtcactgtttccaaactcaccctcaaccgcaatggcctccacttgg

SEQ ID NO: 123474 - DNA, 156 bp, Glycine max
cttagacctcatcatcataaaccccctccagagaacaagaaacatccgaatggcaactatgactggtgtgagcctttcaagccccagggttttcttcaacgcatcaccctcaccgcaaaacacgtacgccgtaaagttcgcagttccactcagcca

SEQ ID NO: 123475 - DNA, 269 bp, Glycine max
gtctctccgcagcagccacacttcttcgccgtttcagctgaagagccatccgcaggtaagcaatggttaagcataataatgttatccctcatgggcacttccggaaacactggcaaaactatgtgaagacttggtttaatcaaccagcccgaaagaccagaagacggttggctcggcagaagaaggctgtcaagattttccccaggcctactgctggatctctcaggcctattgttcatggccagactctgaaatacaacatgaaagtc

SEQ ID NO: 123476 - DNA, 271 bp, Glycine max
tgctcttagagaagctatctcatgaatcatgactgattccaaggtaaagaacaggaaatttgtggagaccattggagactccaaattcgtgctgaaaaactatgatctccagaaggacaagcgatttagtggctctgttaagttgcctcacattcctcgtcccaagatgaagatttgtatgcttggagatgcccaacacgttgaagcaggctcagaagataggatttgactacatggatgttgagtccttggagagtcttattacaaacaa

SEQ ID NO: 123477 - DNA, 274 bp, Glycine max
tgcgattatgctagttttgatggtttgattaccaagcaagttatgagcaagatggcagaaatgatcaacagtcttcgtggtggtgatgcaaaactgatgcgtgaaaggacacacctgctgttggctctgttgttcaaggatggcaatttgtaagaaagatgtttggagagctgcatgtggaatcccttctggatttccgctcacagttatttgcaatagcatttttcatgagatgctcattagctatagctatgaaaacttactgcgccaggcc

SEQ ID NO: 123478 - DNA, 272 bp, Glycine max
ggagacaacaggtttactgagaaaacaatttttacttgcagagatttggtcatcttggttgtttattatacaatagcaactcgatttagaaaatttctaccgcattacattaggtggcatctgtataccttgttgatctacattctcccatcttttctcactgctgaaattaaatataagcggaatcagagtaatattcagatttccggcttattttacgacggcagatacaaattctggactaaacacgagaaaaatcttgctttgacaga

SEQ ID NO: 123479 - DNA, 270 bp, Glycine max
aaataatttaagatactatgatgagagcacggttcccattactgttgctgggacttgttttcctggcttcagtttctgtctcatttggcattgcttactgggaaaaagagaaccccaaacacaacaagtgtctccagagttgcaatagcgagagagactcgtacaggaaccaagcatgccacgctcgttgcaacctccttaaggtgaagaaagaagaatgtgaagaaggtgaaattccacgaccacgaccattcccacaacacccggaga

SEQ ID NO: 123480 - DNA, 270 bp, Glycine max
gagaacagatttttgagaagataatttctggtatgtatttgggtgaaattgtaaggagagttttgttgaagttggctgaagaagttgacttctttggagatactgttcctccaaaattgagaattcctttcgtacttaggacacctgacatgtctgcaatacatcaagatacatcttcagatctgaaggtggttggaaacaaattgaaggatatattagagatcaataacacatccctgaaaatgaggaagattgttgtggaactctgtg

SEQ ID NO: 123481 - DNA, 273 bp, Glycine max
aaaattcttccaccaagttatgggtttccttgtgttgcttcttttctccctcttaggtctctcttctagttccagcatatcaactcatcgttccatattggaccttgacctaaccaagtttaccacacagaaacaggtgtcttcactgttccaactatggaagagtgagcatggacgtgtctaccataaccacgaagaagaggcaaagagacttgagattttcaagaataacttgaactatatcagggacatgaatgcaaacagaaaatcacc

SEQ ID NO: 123482 - DNA, 283 bp, Glycine max
ttcaggttctcgtcttttgggcaccattcctcagtccatttcacagcaaactgtttggaatcaaatggcaacagtgagaacaccattgaattttgattctagcaagcagagcttttgtcaattctctattgatcttcttggtggaggaattttagtggacaaaactggagattggatcacacttatacaaaattctccaattagtaacttgttgagagttgctgcttggaagaaaggctgtttaatggttaagattgtgatgtctgggaatgcagcagtcaaa

SEQ ID NO: 123483 - DNA, 272 bp, Glycine max
tttggttccaaagctttctagttgcatatacaatggaaggctagaaatattgccctctaaggactgggatctagagtctattcacagcatggaggttttggatatcataaggaaacacgtcagtaccgtgacaggtttgagatcaaatcctagtgtaagggagagttgggaaacgactcctattcgacaattctggcttgcccgagtctatgtcgcctccatattatatggctactttttgaagtcagtttcattgaggtacaacctagagc

SEQ ID NO: 123484 - DNA, 263 bp, Glycine max
gtttatggttgtcaacttaacaccaatgacaatatgcacacatattgtttatggttgtcaacttaacaccaatgacaatatgtgtgcatatgggctcaatcctggtatttcaggttctcgtcttttgggcaccattcctcagtctatttcacagctaactgttttggatcaaatggcaatagtgagtactccattgaattttgattctagctagcagtgcttttgtcaatatgctattgaccttctcggtggatgaatcttag

SEQ ID NO: 123485 - DNA, 269 bp, Glycine max
gttcaatatcctagtacaccgtattaaagaatttaagatatactatgatgagagcgcggttcccattactgttgctgggagttgttttcctggcatcattttctgtctcatttggcattgcgtattgggaaaagcagaaccccagtcacaacaagtgcctccgaagttgcaatagcgagaatgactcctacaggaaccaagcatgccacgctcgttgcaacctccttaaggtggaggaagaagaagaatgcgaagaaggtcaaattcca

SEQ ID NO: 123486 - DNA, 268 bp, Glycine max
atcgagcgaatcggctcagtggatctaccttgtgacacaattcctagtgtcttgactacaactgatgagagattacgtaggcacagaacatgagggatatgatccttttcttggtggaattcaaaaatatgccactcccatgatgcccctagatgaagaaattctttctaaggttgcacaagatatggttgaggaatggttcgattgtgttgatgaggaggattcctttgaggaagtttctttaagtgcagcacttaatggtgttgag

SEQ ID NO: 123487 - DNA, 269 bp, Glycine max
cattggtgtcaagttgacaaccataaacaatatgtgtgcatatgggctcaatcctggtatttcaggttctcgtcttttgggcaccattcctcagtccatttcacagcaaactgtttggaatcaaatggcaacagtgagaacaccattgaattttgattctagcaagcagagcttttgtcagttttctattgaccttctcggtggaggaatcttagtggacaaaactggagattggatcacacttatacaaaattctccaattagtaact

SEQ ID NO: 123488 - DNA, 269 bp, Glycine max; identical to SEQ ID NO: 121511

SEQ ID NO: 123489 - DNA, 269 bp, Glycine max
ggcaatctttcactggataaagtgatgactgaatttatgctccgccttgatgccacaccggcttgtataaagaatatgcctctagatgacgatgatccagccagaggactgaccttcgtaatgacaaaacttaaatatgaactgtgttacagtaggggcaagcaaaagtatacttttgaaagtaagcgtgacattcttgatcttgtttaccaaggtcttgatcttcatatgatcaaggctttcctaaataaaaaagaatgtgccagtgt

SEQ ID NO: 123490 - DNA, 201 bp, Glycine max
aaaccctaatccctatttttcttcctcagtagtgtcatttacgcttctcttctctgcagcaactatgcctaaccctaaggtcttcttcgacatgaccatcggcggtcaatctgctggccgcatcgtgatggagctctacgccgacgtcactccccgcaccgccgagaacttccgcgcgctttgcaccggcgagaagggcgt

SEQ ID NO: 123491 - DNA, 264 bp, Glycine max
caataaccagcttgatcaaacccctagggtattttaccttgctgggaacccagatatagagtacccagagaccatgcaacaacaacaacagcagaaaagtcatggtggacgcaagcaggggcaacaccagcaggaggaagaggaagaaggtggcagcgtgctcagtggcttcagcaaacacttcttggcacaatccttcaacaccaacgaggacatagctgagaaacttcagtctccagacgacgaaaggaagcagatcgtgac

SEQ ID NO: 123492 - DNA, 253 bp, Glycine max
gcgtcgtcccccccggagcccgtttcgaaccgacgcgttatgtagccggcgtcaaagcgccctccatttaccattccgagagaggtccaacgacttcccaggtcctcgccgtcctcgccggcctcccggtcggtggcatcctgctcctcctggcgggattgaccctggcaggaaccctcaccggtctcgcagttgccacgccgctcttcgtcctcttcagcccggtgctggttccagccacggtcgccatcgg

SEQ ID NO: 123493 - DNA, 265 bp, Glycine max
tcaatatcctagtataccttaataaataatttaagatactatgatgagagcacggttcccattactgttgctgggacttgtgttcctggcttcagtttctgtctcatttggcattgcttactgggaaaaagagaaccccaaacacaataagtgtctccagagttgcaatagcgatagagattcgtacagggaccaagcatgccaggctcgttgcaacctccttaaggtggagaaagaagaatgtgaggttggtgaaattccacga

SEQ ID NO: 123494 - DNA, 268 bp, Glycine max
ctccgcactccgtcttcatcaatcagcatcaccaccgctccaacacaggggaaaatgagggagatccttcacgttcagggagggcaatgcgggaaccagatcggttcgaagttctgggaagtggtgtgcgacgagcacggcatagatccgacggggaagtacgtcggaaactcagatctacaactcgagcgcgtgaacgtgtactacaacgaagcttcctgcgggcggtttgtcccacgcgcagtgctgatggacctggagcccggaa

SEQ ID NO: 123495 - DNA, 263 bp, Glycine max
ctcgagccttcctagtacatcgtattaaagaatttaagatatactatgatgagagcgcggttcccattactgttgctgggagttgttttcctggcatcagtttctgtctcatttggcattgcgtattgggaaaagcagaaccccagtcacaacaagtgcttccgaagttgcaatagcgagaaagactcctacaggaaccaagcatgccacgctcgttgcaacctccttaaggtggaggaagaagaagtgtgcgaagaaggtca

SEQ ID NO: 123496 - DNA, 265 bp, Glycine max
tttcataattcccacacattatggctgagcttcactaccaaccacaacaccaataccccctccgctaccctaacgatccacaccaacaaacccgttcctccacccaccaggtcgtcaaggccgccaccgccgtcacagcgggcggctccctcttgatcctcgcctcgttgatcctcgccgccaccgtcattgccctcaccatcgtcaccccgctgttcgtcattttcagtccggttctcgtccccgccgtaatcaccgttgcgct

SEQ ID NO: 123497 - DNA, 268 bp, Glycine max
gaggattagagggtcgccacgtttagcaataaccaaaccctctctactcttttttcttctccttctcttcgctagggttttagcttcttcctcttcacttcgttctttttcgcctctacaatgagcaacgacaaggacacattcaacgtcgccgatctcacttctgctctcaacgaggacaatagagcagaccttgtcaatgctcttaagagcaagatacagagtttggctggacaacactcggatattctagagtctctgtcgccca

SEQ ID NO: 123498 - DNA, 267 bp, Glycine max
attttcccctcattccatccttcaaagactcgaccttgtctccgctctatatgtagctgaaagaagaagctatgaaatggttaggatgatattatatataatttaagaaaagaagctacactctaacaagttgtaaggaaagtatcatgcctggtcattctccaacagaaccttccaattatgcatctcaacaagagcctttgctgcacggtaagaaagggctatccggtaatttaaatcccccagccaaattattcgactacacca

SEQ ID NO: 123499 - DNA, 267 bp, Glycine max
atggggaagcccttcactctctctctttcttccctttgcttgctactcttgtcgagtgcatgctttgctattagctccagcaagctcaacgagtgccaactcaacaacctcaacgcgttggaacccgaccaccgcgttgagtccgaaggtggtttgattcaaacatggaactctcaacaccctgagctgaaatgcgccggtgtcactgtttccaaactcaccctcaaccgcaatggcctccacttgccatcttactcaccttatccc

SEQ ID NO: 123500 - DNA, 260 bp, Glycine max
ggctcccaagggtttaacctttctggctgtgttaatatgcgtttcagcactgtcactgagtccttctgttgcgggggaagggcaaaataatggccttggtatgaacttctacaaggaatcatgccctcaggctggagacatcatcacaggacaagtcaagcttctctacaagcgccacaagaacactgctttctcctggctcaggaacatcttccatgactgtgctgttcagagttgtgatgcttcactgttgctggact

SEQ ID NO: 123501 - DNA, 260 bp, Glycine max
gcttttctttttcttgctctttaattttctgattttagcaaattaaaatagtagtgttattggtaggttctcggcaagaacttttcagttccaggggtgtcgggaaccctgaacagaggaggagggcataagataaaagggacagtggtgttgatgaggaagaatgtgttggacttcaacagcgtggctgatcttactaaaggaaatgttgggggactcataggcaccggcctcaacggtcttggctcaacacttgataa

SEQ ID NO: 123502 - DNA, 262 bp, Glycine max
gccaaatgctgttctttcaatgtggagatattttgttggagatctcgtctttgaagtttctaagatgacttctccctacattaaatgtacagtctctttcttcatagcatttggaaatttggctgatgataccatcaattttgaggcttttccccacaagctggtgcagtttggagagatttacttgccagaagaatacgttagttccaagaggacttaaatggagcaaatcagttggaagaacttggagctagcttcccaa

SEQ ID NO: 123503 - DNA, 263 bp, Glycine max
ctcttcctcaccgattgctagaatggaatttcgatgctcagtcatctcttttaccattctcttctctcctgctcttgcaggagagagccatgtccatgcatcgctacctgaggaagattattgggaagctgtttggccaaacactcccattcccactgcactgcgagagcttctaaagcctctccctgcaggtgttgaactcgatgaactccctaagcaaattgatgatacacagtacccaaaaacattcttctataaagaag

SEQ ID NO: 123504 - DNA, 265 bp, Glycine max
ctcgagcgaacaagatgaacgtgaacacccacgcccacaccaacctcatcaaaaggaagcggaaaagcacgaatggcaacacaagcaggaaaagcaccaaggaaaggaaagtgaagaagaagaagaagaccaagacgaggatgaggagcaagacaaagagagccaagaaagtgaaggttctgagtctcaaagagaaccacgaagacataagaataagaacccttttcacttcaactctaaaaggttccaaactctcttcaaaaac

SEQ ID NO: 123505 - DNA, 263 bp, Glycine max
taaacactcatcagtcatcaccatggccaagctagttttttccctttgttttctgcttttcagtggctgctgcttcgctttcagttccagagagcagcctcagcaaaacgagtgccagatccaaaaactcaatgccctcaaaccggataaccgtatagagtcagaaggagggctcattgagacatggaaccctaacaacaagccattccagtgtgccggtgttgccctctctcgctgcaccctcaaccgcaacgcccttcgta

SEQ ID NO: 123506 - DNA, 264 bp, Glycine max
ctttccttagttcaatatggggaagcccttcttcactctctctctttcttccctttgcttgctactcttgtcgagtgcatgctttgctattacctccagcaagttcaacgagtgccaactcaacaacctcaacgcgttggaacccgaccaccgcgttgagtccgaaggtggtcttattgaaacatggaactctcaacaccctgagctgcaatgcgccggtgtcactgtttccaaacgcaccctcaaccgcaacggcctccactt

SEQ ID NO: 123507 - DNA, 264 bp, Glycine max
ctgacatcactcctcaagagttcagcaaaaagtacttgcaagctcccaaggatgtgtcgcagcaaatcaaaatggccaacaagaaaatgaagaaggaacaatattcttgtgaccatccacctgcatcatgggattggaggaaaaaaggtgtcatcacccaagtaaagtaccaagggggctgtggaagcggttgggcgttttctgccacgggagccatagaagcagcacatgcaatagcaacaggagaccttgttagcctttctg

SEQ ID NO: 123508 - DNA, 263 bp, Glycine max
cgatttcttaagggaaagaaaatcactctctgtgctggccacagacttcgtgaatcattttcctttccactcttagtttatcatatgaacactctcctatttgatataggacttcgtgtcagattttaaacttcttctgtttctttctcagttctctgtttaatttcaagttcaagctggtgaaatcttggattagtgctcccactttcctatctggtataggacttcgtgggtagacttttctatttctctcctttctttca

SEQ ID NO: 123509 - DNA, 258 bp, Glycine max
tgagagtgcggtttcctttgttggtgttgctgggaactgttttcctggcatcagtttgtgtctcattaaaggtgagagaggatgagaataaccctttctacttgagaagctctaacagcttccaaactctctttgagaaccaaaacggtcgcattcgtctcctccagagattcaacaaacgctccccacaacttgagaaatatcgagactaccggattgtccagtttcagtcaaaacccatcataatccttctatccc

SEQ ID NO: 123510 - DNA, 264 bp, Glycine max
tggaaagaattcctcttgccacatctgagggttttccccatgtgctttcacgcaaaaatggtgaaaaaggcaaaaggagatttgtttctggggatggtgaagagatgacattgattccgggaaccagtgttgaagaggcttacaataagctaatagttgaacttgagaaaagtgttcctacattggttgattctgaatgtcccaaggatgagaaacttcctcgtcgcaaaatttttgacaaacctaagacgcgctgcttcacta

SEQ ID NO: 123511 - DNA, 285 bp, Glycine max
tgatttgaggccaggcaagccccactcaaccaccacacctctcctcgttcacgctacccctttctgctcttcttctacctttcaagttttaaaagtataaagatggcagagacattcctatttacctcagagtcggtgaacgagggacaccctgacaagctctgcgaccaaatctccgatgctgtcctcgacgcttgcctcgagcaggacccagacagcaaagttgcctgcgaaacatgcaccagaaccaacttggtcatggtcttcggagaaatcacgaccaag

SEQ ID NO: 123512 - DNA, 281 bp, Glycine max
cttcctccaacccggtctctctctctctgcatttttgctgcttagagtgtgtgttgttctgtgctttttgtggaccgaattgcccctactcaggtaaagagaatgattctcacaaagcagtatcgatgcgtacattcagctagctgtcaatgcaccaagggtcatttaagtgaagatgtgatattcttggtgtttcagcatttgaattggaacccgaagctaattgctgctctgtcatgtgtgtgcaaatggtttgacgatctttcaaagcaagttctatg

SEQ ID NO: 123513 - DNA, 281 bp, Glycine max
cttcagatgattctcctgaaaaggaagatcaagaaaaacccaaaaagattgatgccagattgagacaaagaatagatcctcaatacaatgaggttcaggctcagatggaaacaaatttgtttaaattgtctcttgatgatgttgaaactcctaaaggttccatgttggatcttaaaatttctcagtctaaaattgcacttctagagaacacagttggaggaactattctgcgtagtgatctattggcaaattttctgacagagggcaattttagagcaagt

SEQ ID NO: 123514 - DNA, 200 bp, Glycine max
tagtgctgctccttgcagctctaattctatcccctcaagttcttgcaaactatgagaatcccccagtgtacaagcctcccactgagaaaccaccagtttataagcccccagttgagaagcctcctgtttacaaacctccagttgaaaagcctccagtttataagcctccagtagagaagccaccagtgtacaagccccca

SEQ ID NO: 123515 - DNA, 278 bp, Glycine max
cccagatatagagtacccagagaccatgcgacaacaacaacagcagaaaagtcatggtggacgcaagcaggggcaacaccagcaggaggaagaggaagaaggtggcagcgtgctcagtggcttcagcaaacacttcttggcgaaatccttcaacaccaacgaggacatagctgagaaacttcagtctccagacgacgaaaggaagcagatcgtgacagtggaaggaggtctcagcgttatcagccccaagtggcaagaacaacaagatgaagatgaag

SEQ ID NO: 123516 - DNA, 278 bp, Glycine max
ataaaattcttccaccaagttatgggtttccttgtgttgcttcttttctccctcttaggtctctcttctagttccagcatatcaactcatcgttccatattggaccttgacctaaccaagtttaccacacagaaacaggtgtcttcactgttccaactatggaagagtgagcatggacgtgtctaccagcaccacgaagaagaggcaaagagacttgagattttcaagaataacttgaactatatcagggacatgaatgcaaacagaaaatcacccca

SEQ ID NO: 123517 - DNA, 221 bp, Glycine max
gtggcttcagcaaacacttcttggcacaatccttcaacaccaacgacgacaaagctgagaaacttcagtctccagacgacgaaaggaagcagatcgtgacagtggaaggaggtctcagcgttatcagccccaagtggcaagaacaacaagatgaagatgctgatgaagacgaagatgatgaagatgaaccaattacctctcaccctcctcgccgaccaagc

SEQ ID NO: 123518 - DNA, 209 bp, Glycine max
  unsure (1)..(209): unsure at all n locations
cacacacactaagaataatggcttctatcctccactactttttagtcctctctctttctttctctttccttttcttcttatccgactccgtccccattccccaacaccacactaatcctacattacctataaaccttctggttctacccgttcaaaatgatgcttccacacggctccattgtgtcaanctccanaaaaggacccctcta

SEQ ID NO: 123519 - DNA, 275 bp, Glycine max
cctgcttgcacaaaagcaatgactatgtcatttaatccaaacccgtgttctgatgcatggagtttggaatttttgaagcgtaccggatttcactgtgatatcatttgtgtcactggatggactgccaccccaatgcaggatgttcaggttacaattgattggtttatttcctctcaggaatgtgttcccaggacttattgtgttttaaatccacaaaatccttttgtgttaaataggtggatggggaaactgactttcccccagggcacttcccg

SEQ ID NO: 123520 - DNA, 276 bp, Glycine max
  unsure (1)..(276): unsure at all n locations
cttaattattaacacttccttagttcaatatnggggaagcccttcactctctctctttcttccctttgcttgctactcttgtcgagtgcatgctttgctattagctccagcaagctcaacgagtgccaactcaacaacctcaacgcgttggaacccgaccaccgcgttgagtccgaaggtggtttgattcaaacatggaactctcaacaccctgagctgaaatgcgccggtgtcactgtttccaaactcaccctcaaccgcaatggcctccacttg

SEQ ID NO: 123521 - DNA, 273 bp, Glycine max
aacttattaacactttccttagttcaatatggggaagccttcttcactctctctctttcttccctttgcttgctactcttgtcgagtgcatgctttgctattacctccagcaagttcaacgagtgccaactcaacaacctcaacgcgttggaacccgaccaccgcgttgagtccgaaggtggtacaattgaaacatggaactctcaacaccctgagctgcaatgcgccggtgtcactgtttccaaacgcaccctcaaccgcaacggcctccac

SEQ ID NO: 123522 - DNA, 280 bp, Glycine max
ttttcctgaaaaggaagatcaagaaaaacccaaaaagattgatgccagattgagacaaagaatagatcctcaatacaatgaggttcaggctcagatggaaacaaatttgtttaaattgtctcttgatgatgttgaaactcctaaaggttccatgttggatcttaaaatttctcagtctaaaattgcacttcccaagaacacagttggaggaactattctgcgtagtgatctattggcaaattttctgacagagggcaattttagagcaagtgttgatttg

SEQ ID NO: 123523 - DNA, 273 bp, Glycine max
aatatcctagtacaccgtattaaagaatttaagatatactatgatgagagcgcggttcccattactgttgctgggagttgttttcctggcatcagtttctgtctcatttggcattgcgtattgggaaaagcagaaccccagtcacaacaagtgcctccgaagttgcaatagcgagaaagactcctacaggaaccaagcatgccacgctcgttgcaacctccttaaggtggaggaagaagaagaatgcgaagaagtcaaattccacgaccacga

SEQ ID NO: 123524 - DNA, 277 bp, Glycine max
agctctaacagcttccaaactctctttgagaaccaaaacggtcgcattcgtctcctccagagattcaacaaacgctccccacaacttgagaactctcgagactaccggattgtccagtttcagtcaaaacccaacacaatccttctcccccaccatgctgacgccgatttcctcctctttgtccttagcgggagagccatacttaccttggtgaacaacgacgacagagactcctacaaccttcaccctggcgatgcccagagaatcccagctggaa

SEQ ID NO: 123525 - DNA, 276 bp, Glycine max
aaaaagtttcctctacaaaagcacaatttgttagtggaaaaaccttcaaatatgatataattggtgctggttcacattcttcagatgattttcctgaaaaggaagatcaagaaaaacccaaaaagattgatgccagattgagacaaagaatagatcctcaatacaatgaggttcaggctcagatggaaacaaatttgtttaaattgtctcttgatgatgttgaaactcctaaaggttccatgttggatcttaaaatttctcagtctaaaattgcac

SEQ ID NO: 123526 - DNA, 275 bp, Glycine max
tctcgagccgattcggctcgagggaaaatcttgtattgaaattttcacaagaggaatttcttacagcttggtcaactcagatgcgtcctgcaacaactctgttggctgatgggtgtccatatttgtatgcaatggtgcatgatagttcagtgtctacaataccaggtgattttgtcattggtgtcaagttgacaaccataaacaatatgtgtgcatatgggctcaatcctggtatttcaggttctcgtcttttgggcaccattcctcagtccatt

SEQ ID NO: 123527 - DNA, 274 bp, Glycine max
cacacttttaacctaaagagccagcaggccaggcaggtgaagaacaacaaccctttcagcttcctggttccacctcaggagtctcagaggagagctgtggcttagagagccctttttgcatgtgctaccacacttttgtccttttgggctctagctagtgctggtagcagtaaataagaatgaataagagaaacaaaggcttagatgccctttgttaagtgtagaataacgggtatagtaactatgtacccttgtgtaatgagtcactcaagta

SEQ ID NO: 123528 - DNA, 277 bp, Glycine max
cacagtgccaccacacagtggtcatggttgaaggtgaagtttagggctaacactaatgaagatgatgatgatgcaaccatgaccacagtgccaccacacagtgtccaagtgcacacaacaacacaccgctacgaagccggcgtcgtcccgccggctcgttttgaggcgccgcgttacgaagccggcatcaaggcgccctcttccatttaccattccgagagaggtccgacgacctctcaggttctcgcagttgtcgccggccttccggtcggcggca

SEQ ID NO: 123529 - DNA, 277 bp, Glycine max
ctgatggtaagaaaggtggacatacagcaactcctcaccctgcaaagaaaggcggaaagactcccaacagcgaagccaaagccaagactcccaacagtgaagccaaagccaagactcctaagtctggtggactctcttgcaaaacctgcagcaagtctttcaccaatgaaagtggtctgcaacaacataacaaggcaaagcatggtggtcagtgatatttttgctgttggttatgactcattcatgtattatttttggcttatgtaatagagtgagt

SEQ ID NO: 123530 - DNA, 276 bp, Glycine max
aacgtgaacacccacgcccacaccaacctcaacgtagaggaagaggaaaagcacgaatggcaacacaagcaggaaaatcaacaaggaaaggaaagtgaagaagaagaagaagaccaagacgaggatgaggagcaagacaaagagagccaagaaagtgaaggttctgagtctcaaagagaaccacgaagacataagaataagaacccttttcacttcaactctaaaaggttccaaactctcttcaaaaaccaatatggccacgttcgcgtcctccag

SEQ ID NO: 123531 - DNA, 274 bp, Glycine max
gaaaaacccaaaaagattgatgccagattgagacaaagaatagatcctcaatacaatgaggttcaggctcagatggaaacaaatttgtttaaattgtctcttgatgatgttgaaactcctaaaggttccatgttggatcttaaaatttctcaatctaaaattgcacttcccaaaaacacagttggaggaaccattctgcgtagtgacctattggcaaattttttgacagagggcaattttagagcaagtgttgatttgcagcgcactcatcgta

SEQ ID NO: 123532 - DNA, 274 bp, Glycine max
aactactacaagtacttccttacaatcaaaaccaacaacaactatggcaagttatcaaaagcactacgatgatcagggtcgcaaggttgacgagtatggcaacgttgagaagcaaaccgacgaatacggcaaccctgttcatgctgctagtgtcacctatgtagccaccagaactgctgctggtggttacagtgatgacattaataagcaacatgataccaccaatgcctacggcgtagacactggtagacagcattctagtggtggctacgat

SEQ ID NO: 123533 - DNA, 277 bp, Glycine max
cgagttcatcgacaaccaattcacatcactgaaggaaattatgtcagaaagcaagatgtcagcattgaatatgatgcatgtacaattccaaatgattgtggttcattggttgttgccaaggttggaaatcacaaacaaattgttggtttccatgttgctggaagcaaaggaagactgggatatgcttcattgataccatatgttgagccagttgtgcaagctcaaagtgctgaagtttacttcgacttcttccctgtggaggttgatagtcaagagg

SEQ ID NO: 123534 - DNA, 279 bp, Glycine max
tgttctagatcgcgatctagaactagtcagttcaatatcctagtataccttaataaataatttaagatactatgatgagagcacggttcccattactgttgctgggacttgttttcctggcttcagtttctgtctcatttggcattgcttactgggaaaaagagaaccccaaacacaacaagtgtctccagagttgcaatagcgagagagactcgtacaggaaccaagcatgccacgctcgttgcaacctccttaaggtggagaaaaagaatgtgaaga

SEQ ID NO: 123535 - DNA, 246 bp, Glycine max
ggctcgagcatcagtcatcaccatggccaagctagtgtactccctttgttttctgcttttcagtggctgctgctacgctttcagttccagagagcagcctcaggtaaacgagtgccagatccaaaaactcaatgcccttaaaccggataaccgtatagagtcagaaggagggctcattgagacatggaaccctaacaacaagccattgcagtgtgccggtgttggcctctctcgctgcaccctcaa

SEQ ID NO: 123536 - DNA, 274 bp, Glycine max
acttattaacactttccttagttcaatatggggaagccctcttcactctctctctttcttccctttgcttgctactcttgtcgagtgcatgctttgctattacctccagcaagttcaacgagtgccaactcaacaacctcaacgcgttggaacccgaccaccgcgttgagtccgaaggtggtcttattgaaacatggaactctcaacaccctgagctgcaatgcgccggtgtcactgtttccaaacgcaccctcaaccgcaacggcctccactt

SEQ ID NO: 123537 - DNA, 150 bp, Glycine max
tgataaaccgcgatcacaggttgccgcaccttaaaaccggaaacaaaagcaatcgttacttgatttcaagaatttctcaatttctttctacttctttgtgtacgatttcttaagggaaagaaaatcactctctgtgctggccacagactt

SEQ ID NO: 123538 - DNA, 274 bp, Glycine max
taaaattcttccaccaagttatgggtttccttgtgttgcttcttttctccctcttaggtctctcttctagttccagcatatcaactcatcgttccatattggaccttgacctaaccaagtttaccacacagaaacaggtgtcttcactgttccaactatggaagagtgagcatggacgtgtctaccataaccacgaagaagaggcaaagagacttgagattttcaagaataacttgaactatatcagggacatgaatgcaaacagaaaatcacc

SEQ ID NO: 123539 - DNA, 274 bp, Glycine max
catatatacgagagagtgagtaatcgagaaagagaagaagcatatatatcaaaatggctgcagagatggagagggagtcattgataactgaagctcctaatgcaccagttactgcacagagaagggtcagaaatgacttagaaaattctctaccaaaaccatacttgccaagagcattgaaagctcctgatacgggtcacccaaatggaacagcaggccacaggcaccacaacttatctgttcttcagcagcattgtgctttttttgatcaaga

SEQ ID NO: 123540 - DNA, 272 bp, Glycine max
gagcttaaccaattgtatgagaaatacaaagggaaaggacttgaaattctggcattcccatgcaatcagtttggggctcaggagccaggaactaatgaagagattgtggagtttgcttgtactcgcttcaaagctgagtttcccattttcgacaaggtggatgtgaatggtgacaatgctgctccactgtacaagtttctgaaatcaagcaaaggtggactctttggggatagtatcaaatggaacttctccaaattccttgttgataagga

SEQ ID NO: 123541 - DNA, 197 bp, Glycine max
taagatttgaaattttgataaaccgcgatcacaggttgccgcaccttaaaaccggaaacaaaagcaatcgttacttgatttcaagaatctctcaatttcttcctacttctttgtgtacgatttcttaagggaaagaaaatcactctctgtgctggccacagacttcgtgaatgattttcttttccacacaacatacg

SEQ ID NO: 123542 - DNA, 270 bp, Glycine max
gaagtgttgatgatgttgtccttgttggtggttctaccagaattcccaaggttcaacaacttgtgcaggacttctttaatggaaaggagctgtgcaagagcatcaatcctgatgaagctgttgcatatggtgctgctgttcaggctgcaattttaagtggtgagggcaatgagaaggttcaggatcttctcctccttgatgtcacccctctatctcttggtttggagactgctggcggtgtgatgactgtcttgatccctaggaacacta

SEQ ID NO: 123543 - DNA, 269 bp, Glycine max
gtgagaacaccattgaattttgattctagcaagcagagcttttgtcaattctctattgatcttcttggtggaggaattttagtggacaaaactggagattggatcacacttatacaaaattctccaattagtaacttgttgagagttgctgcttggaagaaaggctgtttaatggttaagattgtgatgtctgggaatgcagcagtcaaaaggagtgattgggcctcattggtacaagtgtttttaacaaacagcaacagtacagagca

SEQ ID NO: 123544 - DNA, 272 bp, Glycine max
gttcaatatcctagtataccttaataaataatttaagatactatgatgagagcacggttcccattactgttgctgggacttgttttcctggcttcagtttctgtctcatttggcattgcttactgggaaaaagagaaccccaaacacaacaagtgtctccagagttgcaatagcgagagagactcgttcaggaaccaagcatgccacgctcgttgcaacctccttaaggtggagaaagaagaatgtgaagaaggtgaaattccacgaccacg

SEQ ID NO: 123545 - DNA, 273 bp, Glycine max
caagaacacagttggaggaactattctgcgtagtgatcttgggaagtgcgattttagactgagaaattttaagatccaacatggaacctttaggagtttctcagtctaaaattgcacttcccaagaacacagttggaggaactattctgcgtagtgatctattggcaaattttctgacagagggcaattttagagcaagtgttgatttgcagcgcactcatcgtattaaaggaatgattaaaatggtggccacagttggtattcctgagaata

SEQ ID NO: 123546 - DNA, 273 bp, Glycine max
attgtctttgaacactcatcaccatggccaagcttgtactttccctttgtgtccttcttttcagtggctgcttcgctctgagagagcaggcacagcaaaatgagtgccagatccaaaagctgaatgccctcaaaccggataaccgtatagagtcggaaggtgggttcattgagacctggaaccctaacaacaagccattccagtgtgccggtgttgccctctctcgctgcacccttaaccgcaatgcccttcgtagaccttcctacaccaacg

SEQ ID NO: 123547 - DNA, 272 bp, Glycine max
cggctcgagattctctccattgtctttgaacactcatcaccatggccaagcttgttctttccctatgtttccttcttttcagtggctgcttcgctctgagagagcaggcacagcaaaatgagtgccagatccaaaagctgaatgccctcaaaccggataaccgtatagagtcggaaggtgggttcattgagacctggaaccctaacaacaagccattccagtgtgccggtgttgccctctctcgctgcacccttaaccgcaatgcccttcgt

SEQ ID NO: 123548 - DNA, 272 bp, Glycine max
ctcttatcctccacgacgaccaagccatggaaagcatgaagatgacgaggacgaggacgaagaagaagatcaacctcgtcctgatcaccctccacagcgaccaagcaggcccgaacaacaagaaccacgtggaagaggatgtcagactagaaatggggttgaggaaaatatttgcaccatgaagcttcacgagaacattgctcgcccttcacgtgctgacttctacaacccaaaagctggtcgcattagcaccctcaacagtctcaccctcc

SEQ ID NO: 123549 - DNA, 271 bp, Glycine max
ggaactgcagaggagggtgctgctgctgttgctgtggaagaagccaaaaagagtaatcatctgcagagaaaattggagaagcgccagaaagatcgtaagcttgatgctcacattgaggagcagtttggtggtgggcgtttgcttgcttgcatttcctctcggcctggtcaatgtggcagagctgacggctacattttggaaggtaaggagttggagttttacatgaaaaaactccagaaaaagaagggaaagggtgctgcttgattttagt

SEQ ID NO: 123550 - DNA, 270 bp, Glycine max
atcgagaaagagaagaagcatatatatcaaaatggctgcagagatggagagggagtcattgataactgaagctcctaatgcaccagttactgcacagagaagggtcagaaatgacttagaaaattctctaccaaaaccatacttgccaagagcattgaaagctcctgatacgggtcacccaaatggaacagcaggccacaggcaccacaacttatctgttcttcagcagcattgtgctttttttgatcaagatgacaatggaatcattta

SEQ ID NO: 123551 - DNA, 269 bp, Glycine max
cccaaggttcagcaactcttgcaggatttcttcaatgggaaagagctttgcaagagcattaaccccgatgaagctgttgcatacggtgcttcagttcaagctgccatcttgagcggtgaaggagacgagaaggttcaggatttgttgctgctggatgttacacctctcagtctcgggctcgaaactgcgggtggtgttatgactgtactaattccgcggaacactacaattcccaccaagaaggagcagattttctcaacctattccga

SEQ ID NO: 123552 - DNA, 269 bp, Glycine max
gtcttggctcgctccctctcggatcagatctgcgctctccgttttcagatcgcgttttgtttcaattcgacactttcctcgcttcaaagattaagcgaacaatatggttgtccttgctgcatccattgtgagcaaatctggcaaagtgctagtttctagacagtttgtggatatgactcgcataagaattgagggtcttctagcagcatttcccaagttggtagggactggaaaacagcacacgtatgttgaaactgagaatgtgcgct

SEQ ID NO: 123553 - DNA, 267 bp, Glycine max
gaggttcaacaaacgctcccaacagcttcagaatctccgagactaccgcattttggagttcaactccaaacccaacacccttcttctcccccaccatgctgacgatgattacctcatcgttatccttaacgggactgccattcttaccttggtgaacaacgacgaccgagactcttacaaccttcaatctggcgatgccctaagagtccctgcaggaaccacatactatgtggttaaccctgacaacgacgagatcctcagaatgat

SEQ ID NO: 123554 - DNA, 186 bp, Glycine max
gaattttgataaaccgcgatcacaggttgccgcaccttaaaaccggaaacaaaagcaatcgttacttgatttcaagaatctctcaatttcttcctacttctttgtgtacgatttcttaagggaaagaaaatcactctctgtgctggccacagacttcgtgaatcattttcttttccacacaacata

SEQ ID NO: 123555 - DNA, 274 bp, Glycine max
tggtgatattatgaccagctagtgcaactttgcaatttagaaagttagcagattgtgattttctcaagagaaactttaagcagatgtctaatgttttgtgggtagctcctgaggacaaggcgagtttatggtcacaacttcattatgtttcgtgtaataatctggaaatgcaagaagcttatcttgtcaatctcgtaaatgtgttacgagaattgtatttgcacagtccagaggaagctcgccaattgagaaggaaagctctctctcgtattga

SEQ ID NO: 123556 - DNA, 254 bp, Glycine max
ggctcgagctgtaccacttgcagcacaaatgactgatgtgagaagatatcaaaaacttcaaataattgacgaattaagaactgagaggggacgatttgagcttgaggttgagattggtaaatctccacctctttctgatgatgaggtttggtgggaattaaggcataaagcattagagttgagagaagagtggagactggaaaatcgcagagcatttgccaacatatggtcagatacagtttacgggatctctt

SEQ ID NO: 123557 - DNA, 269 bp, Glycine max
gggagctctgccgcctccaacaaaacagagttcagaacacaaaccctcgaaccgaacgtttctgagggttgatagagcacgatggttcagtacaattttaagaagattaccgtggtgccaaatgggaaggatgtggtcgagattatcctctctcgcacccagcgtcagacaccaaccgttgtgcacaaaggatatgcgatttcacggctgcgccaattctacatgcgcaaagtgaagtatactcagcagaattttcacgacaagctctc

SEQ ID NO: 123558 - DNA, 270 bp, Glycine max
cttcaattcaaaggccatagtggtactagtgattaatgaaggagaagcaaacattgaacttgttggcattaaagaacaacaacagaggcagcaacaggaagagcaacctttggaagtgcggaaatatagagctgaattgtctgaacaagatatatttgtaatcccagcaggttatccagttgtggtcaacgctacctcagatctgaatttctttgcttttggtatcaatgccgagaacaaccagaggaacttccttgcaggttcgaaaga

SEQ ID NO: 123559 - DNA, 268 bp, Glycine max
acttcctcgtcgcaaaattcttgacaaacctaagacgcgctgcttcactattctccctatggagtttaatcttgtggttcgtcagaagtttttaaattttgtgaggttcattatgaagaaaagggacaagcttagttgtcaagttggaatcaacccatactccatggaatggactggtttggccaatagattactgagtaagggcaacgatattctgtgttgcgattatgctagttttgatggtttgattaccaagcaagttatgagc

SEQ ID NO: 123560 - DNA, 270 bp, Glycine max
attttctcacttctcagcactcagcagcgatatcagttgaagaaacagaaacaaacaaaagaggcagaagatgttgtgggtggacaaatatcgtcccaaaaccctcgaccaggttatggtccacaccgacatcgctcacaatctcaagaaattggtaacggaacaggattgcccccatttaaccttctatggcccatctggctccggcaagaaaaccctaatcatggctctgctccgccaaatgttcggacctggtgccgaaaaggtgaa

SEQ ID NO: 123561 - DNA, 120 bp, Glycine max
ttcaaacttaattattaacacttccttagttcaatatagggtgatagccttcactctctctacatcgtcccgttgctagcgactcttgtcgattgtatgctttgctataatctccagcaa

SEQ ID NO: 123562 - DNA, 268 bp, Glycine max
caaccaattcacatcactgaaggaaattatgtcagaaagcaagatgtcagcattgaatatgatgcatgtacaattccaaatgattgtggttcattggttgttgccaaggttggaaatcacaaacaaattgttggtttccatgttgctggaagcaaaggaagactgggatatgcttcattgataccatatgttgagccagttgtgcaagctcaaagtgctgaagtttactttgacttcttccctgtggaggttgatagtcaagagggag

SEQ ID NO: 123563 - DNA, 265 bp, Glycine max
cgatcgaaaagtttccttgacaatctaattctgcaaaaatggcaagcaataaggagtctaagttcccagcacagagccagaaaactcagccaggaaaagaacatgtaatgaatccactcccacaagccacaaatcctgatcacaaggccgccaataaactccagggaaaggtggcgttggtgacaggaggtgactcaagaattggcagagcggtttgcctgtgtttcgcaaaagagggtgcaaccgtggcctttacatacgtaaa

SEQ ID NO: 123564 - DNA, 265 bp, Glycine max
cgttacagttttcgttctccattctctccattccttcgccatgtccgatctcggctccgatcttcctgctgccgccgccgctcttagtgctgaggatcgtgctggtctcgtgaatgcactcaaggacaagctccagctcctcgctgggcaacatgtggacatcctggagacactgccacccaaagtcaggcaacgcgtggaaattctcagagatctgcagagtcaacatgatgaggtggaggctaaatttttagaggagcgatca

SEQ ID NO: 123565 - DNA, 267 bp, Glycine max
ttcgtattgtcgcagagaaagaaaaccctagctcaccgtttcaagatgcaaatcttcgttaagaccctcactggtaagaccatcactctcgaagtcgagagttcagataccatagacaatgtaaaggccaaaattcaagacaaggaagggatcccaccagatcagcaacggctcatttttgctggcaagcagcttgaggatggacgtacccttgctgattataacatccaaaaggagtccactctccacttggttcttcgtctccgt

SEQ ID NO: 123566 - DNA, 269 bp, Glycine max
tgaggattagagggtcgccacgtttagcaataaccaaaccctctctactcttttttcttctccttctcttcgctagggttttagcttcttcctcttcacttcgttctttttcgcctctacaatgagcaacgacaaggacaacattcaacgtcgccgatctcacttctgctctcaacgaggacaatagagcagaccttgtcaatgctcttaagagcaagatacagagtttggctggacaacactcggatattctagagtctctgtcgccc

SEQ ID NO: 123567 - DNA, 265 bp, Glycine max
taaaattcttccaccaagttatgggtcaccttgtgttgcttcttttctccctcttaggtctctcttctagttacagcatatcaactcatcgttccatattggaccttgacctaaccaagtttaccacacagaaacaggtgtcttcactgttccaactatggaagagtgagcatggacgtgtctaccataaccacgaagaagaggcaaagagacttgagattttcaagaataacttgaactatatcagggacatgaatgcaaacag

SEQ ID NO: 123568 - DNA, 268 bp, Glycine max
agcaaagcaatggctacttcaaagttgaaaacccagaatgtggttgtatctctctccctaaccttaaccttggtactggtgctactgaccagcaaggcaaactcagcggaaactgtttctttcagctggaacaagttcgtgccgaagcaaccaaacatgatcctccaaggagacgctattgtgacctcctcgggaaagttacaactcaataaggttgacgaaaacggcaccccaaaaccctcgtctcttggtcgcgccctctactcca

SEQ ID NO: 123569 - DNA, 270 bp, Glycine max
ttcctagtgtcttgaccacaactgatgagagattggtaggcacagaacatgagggatatgatccttttcttggtggaattcaaaaatatgccactcccatgatgcccctagatgaagaaattctttctaaggttgcacaagatatagttgaggaatggtttgattgtgttgatgagtcggattcctttgaggaagtttctttgagtgcagcactcaatggtgttgagggtttggactatatggaaagaattcctcttgccacatctgagg

SEQ ID NO: 123570 - DNA, 264 bp, Glycine max
aagggcttggagactcatctgaatcagcccctattgcctttcctcaagacatacaaatggaggaaaggcctgaacctgttaggaacaacccacctcacggtactcggcgctaccaggatcagatggtcccaagtattacttcttcccatgtgagagtggaagaggaagaaacatcttcagaccttcgaaactcggctgcagacagcagagccgaagtgcctataaatgtaaccacacaacaaaatgcaagagagacagtgaatc

SEQ ID NO: 123571 - DNA, 268 bp, Glycine max
  unsure (1)..(268): unsure at all n locations
accaaaatgaccaagnccacaattctcctcatcgctcttctcttcatcgcccacacctgctgcgcctccaaatggcaacagcaccagcaagagagctgccgcgagcagctcaaggggatcaacctcaacccctgtgagcacatcatggagaagatccaagctggccgccgcggcgaggacggcagcgacgaagatcacattctcatcaggaccatgccgggaagaatcaactacatcaggaagaaggaaggaaaagaagaagaagaag

SEQ ID NO: 123572 - DNA, 269 bp, Glycine max
aatcagaaaattcttccaccaagttatgggtttccttgtgttgctatcttttctccctcttaggtctctcttctagttccagcatatcaactcatcgttccatattggaccttgacctaaccaagtttaccacacagaaacaggtgtcttcactgttccaactatggaagagtgagcatggacgtgtctaccataaccacgaagaagaggcaaagagacttgagattttcaagactaacttgaactatatcagggacatgaatgcgaac

SEQ ID NO: 123573 - DNA, 265 bp, Glycine max
cttaattattaacacttccttagttcaatatggggaagcccttcactctctctctttcttccctttgcttgctactcttgtcgagtgcatgctttgctattagctccagcaagctcaacgagtgccaactcaacaacctcaacgcgttggaacccgaccaccgcgttgagtccgaaggtggtttgattcaaacatggaactctcaacaccctgagctgaaatgcgccggtgtcactgtttccaaactcaccctcaaccgcaatgg

SEQ ID NO: 123574 - DNA, 265 bp, Glycine max
ctccattggtccttaaacactcatcagtcatcaccatggccaagctagttttttccctttgttttctgcttttcagtggctgctgcttcgctttcagttccagagagcagcctcagcaaaacgagtgccagatccaaaaactcaatgccctcaaaccggataaccgtatagagtcagaaggagggctcattgagacatggaaccctaacaacaagccattccagtgtgccggtgttgccctctctcgctgcaccctcaaccgcaa

SEQ ID NO: 123575 - DNA, 262 bp, Glycine max
actcgagccgaatcggctcgagcggctcgagcggctcgagaaactacagccatcgaattccctgcaattaacataagcataacccctttccaacctttctcctcttcagatcggatcagatcagatccaccgccatggatttcatgaaggtcttcgatcaaaccgttcgagaaataaagagagaggtgaatctgaaggtgctcaagattccggaaatcgaacagaaggtgctggatgctactgataatgaaccttggggtcc

SEQ ID NO: 123576 - DNA, 264 bp, Glycine max
tctctccattgtctttgaacactcatcaccatggccaagcttgttctttccctttgtttcctacttttcagtggctgcttcgctctgagagagcaggcacagcaaaatgagtgccagatccaaaagctgaatgccctcaaaccggataaccgtatagagtcggaaggtgggttcattgagacctcgaatcctaacatcatcccattccagtgtgccggtgttgccctctctcgctgcacccttaaccgcaatgcccttcgtaga

SEQ ID NO: 123577 - DNA, 264 bp, Glycine max
taaacactcatcagtcatcaccatggccaagctagttttttccctttgttttctgcttttcagtggctgctgcttcgctttcagttccagagagcagcctcagcaaaacgagtgccagatccaaaaactcaatgccctcaaaccggataaccgtatagagtcagaaggagggctcattgaacaatggaaccctaacaacaagccattccagtgtgccggtgttgccctctctcgctgcaccctcaaccgcaacgcccttcgtag

SEQ ID NO: 123578 - DNA, 177 bp, Glycine max
tcgcacgctcgcgaagcggctcgagcactcatcaccatggccaagcttgttctttccctttgtttccttcttttcagtggctgcttcgctctgagagagcaggcacagcaaaatgagtgccagatccaaaagctgaatgccctcaaaccggataaccgtatagagtcggaaggtggg

SEQ ID NO: 123579 - DNA, 151 bp, Glycine max
gtttccaaactcaccctcaaccgcaatggcctccacttgccatcttactcaccttatccccggatgatcatcatcgcccaagggaaaggagcacttggagttgcaattccaggatgtcctgagacgtttgaggagccacaagaacaatcaa

SEQ ID NO: 123580 - DNA, 149 bp, Glycine max
gcgcctttcagaggcggaaggcctattcgggtggttacatttccgaataccattgtgcagattgaaccagacatgaattcaaggtttcagcttttgagtaccactaccaatggtgattttgttcaaggaaaagatctcgcaatggttaa

SEQ ID NO: 123581 - DNA, 147 bp, Glycine max
ctcgagccgattcggctcgagaaacttaattattaacacttccttagttcaatatggggaagcccttcactctctctctatcttccctttgcttgctactcttgtcgagtgcatgctttgctattagctccagcaagctcaacgagt

SEQ ID NO: 123582 - DNA, 148 bp, Glycine max
ggttttctggtaattctggtgttattgttttggctgccactaacagaccggatgttcttgattcggcgttgttgaggcctggccggttcgataggcaagttactgtggatagacctgatgttgccggcagagttaaaatccttcaggt

SEQ ID NO: 123583 - DNA, 157 bp, Glycine max
agctcgagaagctagctagctagcaagcaagcacagagatggaggcaaagcgaggccatgccctcatgtgcttggcacgtgtttcactcttcctctgcgctctaaccctatccgctgctcacggaagcaccacggttcaagacatcgcgagaaagtt

SEQ ID NO: 123584 - DNA, 103 bp, Glycine max
ggacaaaagaaacaaaggcttagatgccctttgttaagtgtagaataacgggtatagtaactatgtacccttgtgtaatgagtcactcaagtacctatgcggg

SEQ ID NO: 123585 - DNA, 148 bp, Glycine max
cagagattgattgacaagtttgcccagttttataccccaggcgttgtaatcatatcagctcttgtagcggtgattccacttgcgctaaaacaacataaccataaactttggcttcagttttcgctggttgttttagtaagtgcatgtc

SEQ ID NO: 123586 - DNA, 148 bp, Glycine max
gggcaacgatattctgtgttgcgattatgctagttttgatggtttgattaccaagcaagttatgagcaagatggcagaaatgataaacagtctttgtggtggtgatgaaaaattgatgcgtgaaaggacacacctgctgttggcttgt

SEQ ID NO: 123587 - DNA, 151 bp, Glycine max
aaattgtctcttgatgatgttgaaactcctaaaggttccatgttggatcttaaaatttctcagtctaaaattgcacttcccaagaacacagttggaggaactattctgcgtagtgatctattggcaaattttctgacagagggcaatttta

SEQ ID NO: 123588 - DNA, 147 bp, Glycine max
aggacttcgtgggtagacttttccatttctctcctttctttcactctcttcttctcactgatccgcattgccgttcaaagtggtcttatttgaaaaacacttgggcgttggtgcaaatgtttgcttcgttaattttctctggagacg

SEQ ID NO: 123589 - DNA, 146 bp, Glycine max
accggatttcattgtgatatcatttgtgtcactggatggactgccactccaatgcaggatgttcaggttacaattgattggtttatttcctctcaggaatgtgttcccaggacctattgtgttttaaatccacaaaatccttttgt

SEQ ID NO: 123590 - DNA, 147 bp, Glycine max
gaagagatgacattgattccgggaaccagtgttgaagaggcttacaacaagctaatagttgaacttgagaaaagtgttcctacattggttggcattgaatgtcccaaggatgagaaacttcctcgtcgcaaaatttttgacaaacct

SEQ ID NO: 123591 - DNA, 148 bp, Glycine max
aggcgacgtcaccatcacgaacgatggagccacgatccttgaccagatggacgtggacaaccaaatcgcgaactggatggtggagctctcgcggagtcaggactacgaaatcggcgacggaaccaccggcgtcgtcgtcatggccggc

SEQ ID NO: 123592 - DNA, 143 bp, Glycine max
agtacaccgtattacagaatttaagatatactatgatgagagcgcggttgccattactgttgctgggagttgttttcctggcatcagtttctgtctcatttggcattgcgtattgggagaagcagaaccccagtcacaacaag

SEQ ID NO: 123593 - DNA, 143 bp, Glycine max
gtgctgcacttaatggggttgagggtgtggactatatggaaagaattcctcttgccacatctgagggatttcctcatgtgctttcacgcaaaaatggtgaagaaggcaaaaggagatttgtctctggggatggtgaagagatg

SEQ ID NO: 123594 - DNA, 144 bp, Glycine max
caaatcagatgacacacttagagaagatcctgaagtccaagcctgctggaaagaactcgtagaggtgggtcatggagacaagaaaaatgagccatggtggcctaagatgcaaactcgtgaagagctagttgaagcttgcgctat

SEQ ID NO: 123595 - DNA, 147 bp, Glycine max
ataaaaatgtaaattatgtcagccccagggcagatgtacttctccccagaccactggaatccagcgtagttttagatgtacatcatatagcatgtggtgttagacatgcttctctagtcactaggcaaggtgaagtttttacatggg

SEQ ID NO: 123596 - DNA, 149 bp, Glycine max
caatgaccaagcttacaattctcctcatcgctcttctcttcatcgcccacacctgctgcgcctccaaatggcaacagcaccagcaagagagctgccgcgagcagctcaaggggatcaacctcaacccctgtgagcacatcctggggaga

SEQ ID NO: 123597 - DNA, 147 bp, Glycine max
ggaagcccttcttcactctctctctttcttccctttgcttgctactcttgtcgagtgcatgctttgctattacctccagcaagttcaacgagtgccaactcaacaacctcaacgcgttggaacccgaccaccgcgttgagtccgaag

SEQ ID NO: 123598 - DNA, 144 bp, Glycine max
gttcaatatcctagtacaccgtattaaagaatttaagatatactatgatgagagcgcggttcccattactgttgctggtagttgttttcctggcatcagtttctgtcgcatttagcattgcgtagtgggaaaagcagaacccca

SEQ ID NO: 123599 - DNA, 146 bp, Glycine max
  unsure (1)..(146): unsure at all n locations
ttccacctcacccctttttntcaacgccatgaaaatagatatcagcaattgatcaaaggtcattttgtttttgtggctctgagaggggagtgattctaaactaaaatatatgggggctggggaagagagtacagctaaatcttcta

SEQ ID NO: 123600 - DNA, 145 bp, Glycine max
ggtggccacagttggtattcctgagaatacaggtatatcattggcctgtgctatgaatagttcttttagggggcgtgccagttctgatatttacaccatctgctctcaagactgtgaattatggaatcctgcttgcacaaaagca

SEQ ID NO: 123601 - DNA, 145 bp, Glycine max
taagatttgaaattttgataaaccgcgatcacaggttgccgcaccttaaaaccggaaacaaaagcaatcgttacttgatttcaagaatctctcaatttcttcctacttctttgtgtacgatttcttaagggaaagaaaatcactc

SEQ ID NO: 123602 - DNA, 145 bp, Glycine max
aaattcttccaccaagttatggggtaccttgtgttgcttcttttctccctcttaggtctctcttctagttccagcatatcaactcatcgttccatattggaccttgacctaaccaagtttaccacacagaaacaggtggcttcac

SEQ ID NO: 123603 - DNA, 145 bp, Glycine max
gttcaatatcctagtataccttaataaataatttaagatactatgatgagagcacggttcccattactgttgctgggacttgttttcctggcttcagtttctgtctcatttggcattgcttactgggaaaaagagaaccccaaac

SEQ ID NO: 123604 - DNA, 145 bp, Glycine max
attccttcacttgcagcactgttgcatcatcatcttcattgcaaaaccctaaacttcaccttcaaccatgaccacacaagtaccaccacacagtgtccaagtccacacaacaacacaccgctacgaagctggcgtcgtccccccc

SEQ ID NO: 123605 - DNA, 145 bp, Glycine max
gaaaattcttcgtcggtggcaactggaaatgcaatgggaccactgaggaggtaaagaagattgttactactttgaatgaggctaaagtccctggagaagatgtcgtagaagttgttgtgagccctccttttgtgttccttcctgt

SEQ ID NO: 123606 - DNA, 145 bp, Glycine max
attttgataaaccgcgatcacaggttgccgcaccttaaaaccggaaacaaaagcaatcgttacttgatttcaagaatctctcaatttcttcctacttctttgtgtacgatttcttaagggaaagaaaatcactctctgtgctggc

SEQ ID NO: 123607 - DNA, 145 bp, Glycine max
ctcgagccgctcgagccgtccattggtccttaaacactcatcagtcatcaccatggccaagctagttttcaccctttgttttctgcttttcagtggctgctgcttcgctttcagttccagagagcagcctcagcaaaacgagtgc

SEQ ID NO: 123608 - DNA, 143 bp, Glycine max
tgggaccgtgaaccggggtagtgaagtaatagcggctggaatgacagttaatgattggaccgcattttgtggttccgacaccaccgcaacggagctatctgtgattgagagtgttttcaagctgagagaagcacagcctagtg

SEQ ID NO: 123609 - DNA, 141 bp, Glycine max
cttaattattaacacttccttagttcaatatggggaagcccttcactctctctctttcttccctttgcttgctactcttgtcgagtgcatgctttgctattagctccagcaagctcaacgagtgccaactcaacaacctca

SEQ ID NO: 123610 - DNA, 143 bp, Glycine max
ttcaaggaaaagatctcgcaatggttaaagttaatgtagcatgtgctgctgttggcttgacatcaagttacactccaactccattgttggaatctggtttgcaaaaagacagagggttaattgtggaatattttggaaggatg

SEQ ID NO: 123611 - DNA, 142 bp, Glycine max
tgaactcgttgccgttaacgaccctttcatcaccaccgattacatgacatacatgtttaaatacgacagtgttcatggacactggaagcatcacgatgtcaccgttaaggacgagaagacccttctcttcggtgacaagcca

SEQ ID NO: 123612 - DNA, 143 bp, Glycine max
gtgacctcatataggtatgagggtgatgagatcaatgtaaaattttcacaaactgaagctaatgttcttcatgaatctgtcaaggagaagaaaggcaacagtgaagaagtcatcaggatccttactacaagaagcaaaactca

SEQ ID NO: 123613 - DNA, 145 bp, Glycine max
gttctgctgagtatgaggagctgaggaagaatccccagaaggcttacttgaagactattacaccaaagtttcagacccttattgacctttctgttatagaaatcttgtcaaggcatgcatctgatgaggtgtaccttggggagag

SEQ ID NO: 123614 - DNA, 143 bp, Glycine max
cacacacaactactacaagtacttccttacaatcaaaaccaacaacaactatggcaagttatcaaaagcactacgatgatcagggtcgcaaggttgacgagtatggcaacgttgagaagcaaaccgacgaatacggcaaccct

SEQ ID NO: 123615 - DNA, 140 bp, Glycine max
caacagtgagaacaccattgaattttgattctagcaagcagagcttttgtcagttttctattgaccttctcggtggaggaatcttagtggacacaactggagattggatcacacttatacaaaattctccaattagtaac

SEQ ID NO: 123616 - DNA, 138 bp, Glycine max
catatttgtatgctatggtgcatgatagttcagtgtctacaataccaggtgattttgtcattggtgttaagttgacaaccataaacaatatgtgtgcatatgggctcaatcctggtatttcaggttctcgtcttttgg

SEQ ID NO: 123617 - DNA, 140 bp, Glycine max
aattttctgattttagcaaattaaaatagtagtgttattggtaggttttggcaaagatgttttcagttccaggggtgtcgggaatactgaacagaggaggagggcataagataaaagggacagtggtgttgatgaggaag

SEQ ID NO: 123618 - DNA, 139 bp, Glycine max
ctcgagccgaatcggctcgagccacaagctggtgcagtttggagagcttcaggaaaaagttgtattgaaattttcacaagaggaatttcttacagcttggtcaactcaggtgcgtcctgcaacaactctgttggctgat

SEQ ID NO: 123619 - DNA, 139 bp, Glycine max
aaaaataataccataagcgccttttggctggtccctcaattttttctggtgggtgctggggaagcatttgcctatgttggacaactagaatttttcattagggaggcaccagagagaatgaaatctatgagcactggac

SEQ ID NO: 123620 - DNA, 141 bp, Glycine max
tgcatttgtatcaaccgaggcagagacagatcagccagcaattgaactaaaacctggaattgaccttctaggacctgttgatgagatattttttgatatctatgacagatatgaaccggtcaatgaacccactttggacaa

SEQ ID NO: 123621 - DNA, 133 bp, Glycine max
ggttaaagttaatgtagcatgtgctgctgttggcttgacatcaagttacactccaactccattgttggaatctggtttgcaaaaagacagagggttaattgtggagtattttggaaggatgtcttacgttgct

SEQ ID NO: 123622 - DNA, 139 bp, Glycine max
taaaattcttccatcaagttatgggtctccttgtgttgcgtcttctctccctcttaggtctctcttctaggtctagcatttcaactcatcgtgccatattggaccttgaccttaccaagtttaccacacagatacaggt

SEQ ID NO: 123623 - DNA, 139 bp, Glycine max
agcaaaccaatggctacttcaaagttgaaaacccagaatgtggttgtatctctctccctaaccttaaccttggtactggtgctactgaccagcaaggcaaactcagcggaaactgtttctttcagctggaacaagttcg

SEQ ID NO: 123624 - DNA, 137 bp, Glycine max
cttactggacctataacactggcgatgaaccagttgttgccatcagtcttcttgacacctccaacttcaacaatcagcttgatcaaaaccccagagtattttaccttgctgggaacccagatatagagcacccagag

SEQ ID NO: 123625 - DNA, 138 bp, Glycine max
taagatttgaaattttgataaaccgcgatcacaggttgccgcaccttataacctgaaacaaaagcaatcgttacttgatttcaagaatctctcaatttcttcctacttctttgtgtacgatttcttaagggaaagaaa

SEQ ID NO: 123626 - DNA, 139 bp, Glycine max
ctcgagccgattcggctcgagtcaaaagtgaccgcattttctttgccaaccagacatatcttcgaagtgagacaccagcgccactagtcaaatatagggaagaagagttgcataatttaagaggagatggaactggaga

SEQ ID NO: 123627 - DNA, 140 bp, Glycine max
cggctcgagcttgctctatactacacagtacacacactagaagaataatggcttccatcctccactactttttagccctctctctttcttgctcttttcttttcttcttatccgactcagtcacccctacaaaaccaata

SEQ ID NO: 123628 - DNA, 140 bp, Glycine max
caaagttgaaaacccagaatgtggttgtatctctctccctaaccttaaccttggtactggtgctactgaccagcaaggcaaactcagcggaaactgtttctttcagctggaacaagttcgtgccgaagcaaccaaacatg

SEQ ID NO: 123629 - DNA, 260 bp, Glycine max
caaaaatgaagagcaccatcttctttgctctctttctcttttgtgccttcaccacctcatacctaccttcagccatcgctgatttcgtgctcgataatgaaggtaaccctcttgaaaatggtggcacatattatatcttgtcagacataacagcatttggtggaataagagcagccccaacgggaaatgaaagatgccctctcactgtggtgcaatctcgcaatgagctcgacaaagggattggaacaatcatctcgtcc

SEQ ID NO: 123630 - DNA, 256 bp, Glycine max
cgaactcgagcgacaaccaatatggtcgcattcgcgtcctccagaggttcaaccaacgctccccacaacttcagaatctccgagactaccgcattttggagttcaactccaaacccaacaccctccttctccccaaccatgctgacgctgattacctcatccttatccttaacgggactgccattctttccttggtgaacaacgacgacagagactcctacagacttcaatctggtgatgccctgagagtccctca

SEQ ID NO: 123631 - DNA, 252 bp, Glycine max; identical to SEQ ID NO: 104244

SEQ ID NO: 123632 - DNA, 251 bp, Glycine max
cacagtacacacactagaagaataatggcttccatcctccactactttttagccctctctctttcttgctcttttcttttcttcttatccgactcagtcacccctacaaaaccaataaaccttgttgttctacccgttcaaaatgatggttccacagggctccattgggccaacctccaaaaaagaacccctctaatgcaagtaccagtcctggtggacctcaatggaaatcacttgtgggttaactgtga

SEQ ID NO: 123633 - DNA, 251 bp, Glycine max
tctgattttagcaaattaaaatagtagtgttattggtaggttttggcaaagatgttttcagttccaggggtgtcgggaatcctgaacagaggaggagggcataagataaaagggacagtggtgttgatgaggaagaatgtgttggacttcaacagcgtggctgatcttactaaaggaaatgttgggggactcataggcaccggcctcaacgttgttggctcaacacttgataacctcactgctttcttggg

SEQ ID NO: 123634 - DNA, 181 bp, Glycine max
tgaaattttgataaaccgcgatcacaggttgccgcaccttaaaaccggaaacaaaagcaatcgttacttgatttcaagaatctctcaatttcttcctacttctttgtgtacgatttcttaagggaaagaaaatcactctctgtgctggccacagacttcgcgaatcattttcttttccaca

SEQ ID NO: 123635 - DNA, 253 bp, Glycine max
ccaattagtaacttgttgagagttgctgcttggaagaaaggctgtttaatggttaagattgtgatgtctgggaatgcagcagtcaaaaggagtgattgggcctcattggtacaagtgtttttaacaaacagcaacagtacagagcattttgatgcatgtaagtggacaaaatcggaaccacattcctgggaattgatcttcccaatagaggtatgcggtcctaataatggttttgaaatgtggagttctgagt

SEQ ID NO: 123636 - DNA, 245 bp, Glycine max
cgatttagaaaatttctaccgcattacattaggtgccatctgtataccttgttgatctacattctcccatcttttctcactgctgaaattaaatataagcggaatcacagtaatattcagatttccggcttattttacgaccgcagatacaaattctggactacacacgatttccaatcttgctttgacagaagaggaaaagatggaagtgattagaaatagaggcattcctgctgatgttcttg

SEQ ID NO: 123637 - DNA, 250 bp, Glycine max; identical to SEQ ID NO: 112685

SEQ ID NO: 123638 - DNA, 252 bp, Glycine max
attaaggagaaagaagaagctgttcgcaaccaagactttgaaaaggctggagagctacgtgatagagagatggatcttaaggcacagatctcaacacttgtagagaaaggcaaggagatgagcaaggcagagactgaggcaggggatgaaggtcctattgtgactgaagctgacatacagcatattgtctcatcctggactggtattcctgttgagaaagtctcaacagatgaatctgatcgcctcctgaag

SEQ ID NO: 123639 - DNA, 90 bp, Glycine max
ttgaaattttgagaaaccgcgatcacaggttgccgcaccttaaaaccggaaacaaaagcaatcgttacttgatttcaagaatctctcaat

SEQ ID NO: 123640 - DNA, 243 bp, Glycine max
attcggggatgcacctaacaacatgcgacagtttcaaaaccaagatattttccacgatttggccttcaccccattaaccatcaccctgcagggagagtacaacgtgagagtcaactcaataagaatcaaccagcacagtgtgttcccactgaacaagatatcatccaccatcgtagggtcgacctctggaggaaccatgattagcacctcaactcctcacatggttctccagcaatccgtgta

SEQ ID NO: 123641 - DNA, 256 bp, Glycine max
cgaggaagatcctcgaaactatctgacattcttctgccttggcaaccgggaagtgaagaaaccaggagaatatgagccttctgaacaaccagatcccgattcagattatcagagagcccaagaggcccgacgattcatgatttatgttcataccaagatgatgatagttgatgacgaatacataatcgttggatctgccaacatcaaccaaaggtcaatggatggtgctagggactctgagattgccatgggtgct

SEQ ID NO: 123642 - DNA, 248 bp, Glycine max
agacaacaggctcacttagaaaacaatctttacttgcagagatttggacatcttggttgtttattatacaatagcaactcaatttagaaaatttctaccgcattacattaggtggcatctgtataccttgttgatctacattctcccatcttttctcactgctgaaattaaatataagcggaatctgagtaatattcatatttccggcttattctacgacggcagatacaaattctggactaaacacg

SEQ ID NO: 123643 - DNA, 250 bp, Glycine max; identical to SEQ ID NO: 111312

SEQ ID NO: 123644 - DNA, 250 bp, Glycine max
cttattaacactttccttagttcaatatggggaagcccttcttcactctctctctttcttccctttgcttgctactcttgtcgagtgcatgctttgctattacctccagcaagttcaacgagcgccaactcaacaacctcaacgcgttggaacccgaccaccgcgttgagtccgaaggtggtcttattgaaacatggaactctcaacaccctgagctgcaatgcgccggtgtcactgtttccaaacgcac

SEQ ID NO: 123645 - DNA, 248 bp, Glycine max
taggaatataagaactaagatggattggatccgagcgtaccgcggaggccagagaagcagggactggtgcgacccttcatcaccattcactgatttgtgggaccctcgtcgtgtcggtgacgctgatgatatcacctcctctctcgcccatgctcacgttgactggcgtgagactgataaagctcatatcttccgtactgatcttccaggggtgaagaaagaggatctgaaggtgcaggtggaggaga

SEQ ID NO: 123646 - DNA, 225 bp, Glycine max
  unsure (1)..(225): unsure at all n locations
gtacaccgtattaaagaatttaagatatactatgatgagagcgcggttcccattgctgttgctgggagtcgtgttcctagcatcagtttctgtctcatttggcattgcgtattgggcaaagcagaaccccagtcagaacaagtgtgtccgaagttgtacntagcgagaaagattcctacaggaagcaagcatggcacgctcgtctgcaactcccttaaggtggag

SEQ ID NO: 123647 - DNA, 247 bp, Glycine max
cgatatcctagtataccttaatcagtcattcaagagactatgctgagagcacggttcccattactgttgctgggacttgtcttcctggcttcagtttctgtctcatttggcattgcttactgggaacgagagaaccccaaacacaacacgtgtctccagagttgcaatagcgagagagaatcgtacaggaagcaagcatgccatgctcgttgggacctccttaaggtggagagagtcgaatgtgaag

SEQ ID NO: 123648 - DNA, 247 bp, Glycine max
gaagagcacgagcagagagaggaacaggaatggcctcgcaaggaggaaaaacgcggagaaaagggaagtgaagaggaagatgaggatgaggatgaggaacaagatgaacgtcaattcccattcccacgcccacctcatcagaaggaagagcgaaagccagaggaagatgaggatgaggagcagcagcgagagagcgaagaaagtgaagattctgagttacgaagacataagaataagaaccttttct

SEQ ID NO: 123649 - DNA, 248 bp, Glycine max
ttataaactccttcaccctcactatcgtgacaccatgaacataaatggccttgctcggttatcactggtcaacgacggtggcgttatagaacaaacatttttgtggggaaggtattctgtggaaatgtctgctgtagtttacaaggattgggtttttacagatcaagcattgcctgctgatcttataaaaagaggaatggcaattgaggatccatcgtgccctcatggcattcgccttgtgatagagg

SEQ ID NO: 123650 - DNA, 249 bp, Glycine max
actagttcaatatcctagtataccttaataaataatttaagatactatgatgagagcacggttcccattactgttgctgggacttgttttcctggcttcagtttctgtctcatttggcattgcttactgggaaaaagagaaccccaaacacaacaagtgtctccagagttgcaatagcgagagagactcgtacaggaaccaagcatgccacgctcgttgcaacctccttaaggtggagaaagaagaatg

SEQ ID NO: 123651 - DNA, 248 bp, Glycine max
aagagttctcccttccatgaacttcctggtgttgtggagaagtacctcaacaaggagctggagctggacaaatttatcactcactctgtcccattctcagagatcaacactgcatttgatcttatgctgaaaggggagggaataaggtgcctcatctgcatggaagagtaaatcaatgatgttctctgctgaacagtgtttgcgtgtaatgtgaaaagagaattgaataaatttggcatgtaattcgg

SEQ ID NO: 123652 - DNA, 255 bp, Glycine max
aacaataattccttcacttgcagaacttagttctctgttgcatcatcatcatcttcattagtgttagccctaaacttcaccttcaaccatgaccacagtgccaccacacagtgtccaagtgcacacaacaacacaccgctacgaagccggcgtcgtcccgccggctcgttttgaggcgccgctttacgaagccggcatcaaggcgccctcttccatttaccattccgagagaggtccgacgacctctcaggttct

SEQ ID NO: 123653 - DNA, 256 bp, Glycine max
acgaggacatagctgagaaacttcagtctccagacgacgaaaggaagcagatcgtgacagtggaaggaggtctcagcgttatcagccccaagtggcttggtcgactaggacgaggtttatcttcatcttcgtcctcgtcctcgtcttgttcacgctttccatggcttggtcggcgaggagggtgagagggaatctgttcatcttcatcatcttcgtcttcatcttcatcttcatcttgttgttcttgccctcgagc

SEQ ID NO: 123654 - DNA, 256 bp, Glycine max
  unsure (1)..(256): unsure at all n locations
gggatgangaggagtgctgggggtgagattgcgcccaccactaggcactataggagtgtctccatggatagtttcattgggaagttgatttnngannaggagtcgcccaagctgcctccttcccccgggcagagaagtgctctgatgtcncctgnggggggaattgatgggaatncggcggccttcagcttggagtttggaaatggggagttcagtgggcctgaactgaagaaaattatggccatgaaaagcttgc

SEQ ID NO: 123655 - DNA, 201 bp, Glycine max
gaacagattcgggcactgagcaaacgtgccaaatctagttcaaggaaaaccatttcttctgaagataaaccttttaacttgagaagccgcgaccccatctactccaacaagcttggcaagttctttgagatcaccccagagaaaaacccccagcttcgggacttggatatcttcctcagtattgtggatatgcacgaggga

SEQ ID NO: 123656 - DNA, 143 bp, Glycine max
ctccattggtccttaaacactcatcagtcatcaccatggccaagctagttttttccctttgtgtgctgcttttcagtggctgctgcttcgctttcagttccagagcgcagcctcagcaaaacgagtgccagatccaaaaactc

SEQ ID NO: 123657 - DNA, 243 bp, Glycine max
gtggtccgtcaaaagtttttaaattttgtgaggttcattatgaagaaaagggacaaacttagttgtcaagttggaatcaacccatactccatggaatggactggtttggccaatagattactgagtaagggcaatgatattctgtgttgcgattatgctagttttgatggtttgattaccaagcaattgctgagcaagatggcagatctgataaacagtctttgtggtggtgatgaaaaattg

SEQ ID NO: 123658 - DNA, 245 bp, Glycine max
cagaattgcaatagcgagagagactcgtacaggaaccaagcatgccacgctcgttgcaacctccttaaggtggagaaacgaagaatgtgaagaaggtcaaattccacgaccacgaccacgaccacaacacccggagagggcacctcagcaacccggtgagaacgaagtcgacgaagatgagcaaccacgtccaatcccattcccacgcccacaatctcgtccagaagatgagcacgagcagagcc

SEQ ID NO: 123659 - DNA, 247 bp, Glycine max
caagtacttccttacaatcaaaaccaccaacaactatggcaagttatcaaaagcactacgatgatcagggtcgcaaggttgacgagtatggcaacgttgagaagcaaaccgacgaatacggcaaccctgttcatgctgctagtgtcacctatgtagccaccagaactgctgctggtggttacagtgatgacattaataagcaacatgataccaccaatgcctacggcgtagacactggtagacagca

SEQ ID NO: 123660 - DNA, 250 bp, Glycine max
  unsure (1)..(250): unsure at all n locations
ccccttttccctcattgcatggccaatctattgggttctccaaggttgcattcttactggcgtgtgggtgattgctcacgagtgtggtcaccatgccttcagcaagtacccatgggttgatgatgttatgggtttgaccgttcactcagcacttttagtcccttatttctcatggaaaataagccatcgccgccaccactccaacacgggttcccttgaccgtgatgaagtgtnntgtcccaaaaccaaa

SEQ ID NO: 123661 - DNA, 241 bp, Glycine max
cgcatgaccctcttgttgagtatgctctgcctatttgaaaatttccacacctcttttaattgtcgtaatgatgtgtgaagtgtgtgttattttaaaaaaacaaaaaaaaaaaaaaaaaaaaaaaaaaaacaaaaaaaaaaaacaaaaaaaaaaaaaaaacgcacaccccccgtaaaggcccccgaccccccggaaaaatttccccggagagtttcacaaggggaaccacttcccccctagt

SEQ ID NO: 123662 - DNA, 245 bp, Glycine max
gttcaatatcctagtataccttactaaataatttaagatactatgatgagagcactgttcccattactgttgcggggacttgttgtcctggcttcagtttctgtctcatttggcattcgcttactgggaaaaagagaaccctaaacactagaagtgtgttgattgttggaatagcgagagagactcgtacaggaaccaaacatgccacgctcgttgcaacctccttaatgtggagaaagaagaat

SEQ ID NO: 123663 - DNA, 242 bp, Glycine max
tgaggccaggcaagccccactcaaccaccacacctctcctcgttcacgctacccctttctgctcttcttctacctttcaagttttaaaagtataaagatggcagagacattcctatttacctcagagtcggtgaacgagggacaccctgacacgctctgcgaccaaatctccgatgctgtcctcgacgcttgcctcgagcaggacccagacagcaaagttgcctgcgaaacatgcaccaaaa

SEQ ID NO: 123664 - DNA, 244 bp, Glycine max
aacaagcctcaggtaagccaaaaccatggttaagcataacaatgttatcccaaacggacacttccgtaagcactggcagaactatgtgaagacttggttcaatcagccagcacggaagacaaggagacgattggctcgtcagaagaaagctgtgaagatattccccagacctacggctggacctctcaggcccattgtacatggtcaaactttgaaatacaacatgaaagtgagaggtggaagg

SEQ ID NO: 123665 - DNA, 245 bp, Glycine max
ctcactcatcaatctcgtttgttctcactaactattacttcatcatgtcgtcgagcacagttggtcaagtcatcaaatgcaaagctgcggtttcatgggaggcagggaagccacttgtgattgaagaagtagaggtggcaccaccacaagctggtgaagtgcgtttgaagatcctctacacctctctttgccacactgatgtttacttctgggaagccaagggccaaactccattgtttcctcgt

SEQ ID NO: 123666 - DNA, 242 bp, Glycine max
aaacgaaggtacaatgtgaggctttggaaagtgttcacggaatgtttcaactgcttgccagtggcagctctaattgatgaaaagatactttgtatgcatggtggactctctcctgagttacacaatctgaatcagataaagagtttgccgcgtcctattgaagtgcctgaaactggtctactatgtgacctcctttggtctgatcctagtagtgacattcggggttggggagagaatgaccg

SEQ ID NO: 123667 - DNA, 243 bp, Glycine max
taaacactcatcagtcatcaccatggcgaagctagtttttttcctttgttgttctgcttctcaatggctgctgcttcgctttcagttccagagatcagcctcagtaaaacgagtgccagatccaaaaactcaatgccctcaaaccggataaccgtatagagtcagaaggatggctcattgagacatggaagcctaacaacaagccagggagtgtgccggtgtagccctctctcgctggcacct

SEQ ID NO: 123668 - DNA, 117 bp, Glycine max
atatcctactacaccgtattaaagaacttaagatagactatcatgagaacgcggtccccattactgttacgaggaagtgattacctggcatcagttgctctcgcatccagcattccg

SEQ ID NO: 123669 - DNA, 186 bp, Glycine max
gggcacttcccgaaatgttaagagaatgcctctttctatagggggaggagctggtgcaaagaatgctattctcatgaatatgccaaatgctgttctttcaatgtggagatattttgttggagatctcgtctttgaagtttctaagatgacttctccctacattaaatgtacagtcaccttcttcat

SEQ ID NO: 123670 - DNA, 234 bp, Glycine max
ggctcgaggtttagactatatggaaagaactcctcttgccacatcagagggttttcctcatgtgcattcacgcaaaaattgtgacaaaggcaaaaggagatttgtttctggggatggtgaagagatgacattgattccggaaccatgtttgaagaggcttacaacaagctaatagttgaacttgagaaaagtgttcctacattggttggcattgaatgtcccaaggatgagaaa

SEQ ID NO: 123671 - DNA, 246 bp, Glycine max
agagaatggctcccaagggtttaacctttctggctgtgttaatatgcgtttcagcactgtcactgagtccttctgttgcgggggaagggcaaaataatggccttgttatgaacttctacaaggaatcatgccctcaggctgaagacatcatcacagaacaagtcaagcttctctacaagcgccacaagaacactgctttctcctggctcaggaacatcttccatgactgtgctgttcagagttgtg

SEQ ID NO: 123672 - DNA, 242 bp, Glycine max
ttggtccttaaacactcatcagtcatcaccatggccaagctagttttttccctttgttttctgcttttcagtggctgctgcttcgctttcagttccagagagcagcctcagcaaaacgagtgccagatccaaaaactcaatgccctcaaaccggataaccgtatagagtcagaaggagggctcattgagacatggaaccctaacaacaagccattccagtgtgccggtgttgccctctctcg

SEQ ID NO: 123673 - DNA, 242 bp, Glycine max
attggtccttaaacactcatcagtcatcaccatggccaagctagttttttccctttgttttctgcttttcagtggctgctgcttcgctttcagttccagagagcagcctcagcaaaacgagtgccagatccaaaaactcaatgccctcaaaccggataaccgtatagagtcagacggagggctcattgagacatggaaccctaacaacaagccattccagtgtgccggtgttgccctctctc

SEQ ID NO: 123674 - DNA, 186 bp, Glycine max
caggaatgtgttcccaggacctattgtgttttaaatccacaaaatccttttgttttaaataggtggatgggaaaattgactttcccccagggcacttcccgaagtgttaagagaatgcctctttctatagggggaggagctggtgcaaagaatgctattctcatgaatatgccaaatgctgttctt

SEQ ID NO: 123675 - DNA, 216 bp, Glycine max
ttcggtcagtcgcgctcgagccgctagaatggaatttcgatgcccagtcatctcttttaccagtctcttctctcttgctcttgcaggagagagccatgtccatgcatcgctacctgcggaagattattgggaagctgtttggccaaacactcccattcccactgcactgcgagagcttctaaagcctctccctgcaggtgttgaaatcgatgaact

SEQ ID NO: 123676 - DNA, 175 bp, Glycine max
ggaagaaagggtcctttgtcttcaattttgagggctttttactgaataagtatgtagtactaaaatgtatgctgtaatagctcatagtgagcgaggaaagtatcgggctatttaactatgacttgagctccatctatgaataaataaatcagcatatgatgcttttgttttgtgt

SEQ ID NO: 123677 - DNA, 243 bp, Glycine max
gtactatcttctttgctctctttctagtttgtgccttcaccatctcatacctgccttcagccaccgctcagttcgtgctcgacactgatgatgatcctcttcaaaacggtggcacatactatatgttgccagttatgagaggaaagggcggtggaatagaagtagattcaactggaaaagaaatatgccctctcactgttgtgcaatcacccaatgagctcgataaggggattcgactagtct

SEQ ID NO: 123678 - DNA, 244 bp, Glycine max
cggctcgaggatgcaaactcgtgaagagctagttgaagcttgcgctatcatcatatggactgcttcagcacttcatgcagctgttaattttggacagtatccctatggaggtttaatcttaaaccgtccaactcttagtaggcgattcatgcctgagaaaggttctgctgagtatgaggagctgaggaagaatccccagaaggcttacttgaagactattacaccaaagtttcagaccttattg

SEQ ID NO: 123679 - DNA, 247 bp, Glycine max
ctccattgtctttgaacactcatcaccatggccaagcttgttctttccctttgtttccttcttttcagtggctgcttcgctctgagagagcaggcacagcaaaatgagtgccagatccaaaagctgaatgccctcaaaccggataaccgtatagagtcggaaggtgggttcattgagacctggaaccctaacaacaagccattccagtgtgccggtgttgccctctctcgctgcacccttaaccgca

SEQ ID NO: 123680 - DNA, 251 bp, Glycine max
aattattaacacttccttagttcaatatggggaagccccgcactctctctctttcttccctttgcttgctactcttgtcgagtgcatgctttgccattagctccagcaagctcaacgagtgccaactcacaagcttcaacgcgttgcgaacccgaacaaccgcgttgagtccgaagtggtttgattcaaacatggaactctcaacaccctgagctgaaatgcgccggtgtcactgtttccaaactcaccct

SEQ ID NO: 123681 - DNA, 241 bp, Glycine max
tgccaaatgctgttctttcaatgtggagatattttgttggagatctcgtctttgaagtttctaagatgacttctccctacattaaatgtacagtctctttcttcatagcatttggaaatttggctgatgacaccatcaattttgaggcttttccccacaagctggtgcagtttggagagattcaggaaaaagttgtattgaaattttcacaagaggaatttcttacagcttggtcaactca

SEQ ID NO: 123682 - DNA, 240 bp, Glycine max
  unsure (1)..(240): unsure at all n locations
cttacaccaagttatgggtatccttgtgttgcttcttatctccactcttagtctnctctctagttccagcatatcaactcatcgtgccatattggaccttgacctaaccaagtttaccacacagaaacaggtgtcttcactgtcccaactatggacagagtgagcatagaccaaatancataaccacgaagaagaggcaaagagacttgagattttcaagaataacttgaactatatcag

SEQ ID NO: 123683 - DNA, 237 bp, Glycine max
  unsure (1)..(237): unsure at all n locations
tctctccattggtccttanacactcatcagtcatcaccatggccaagctagttttttccctttgttttctgctcttcagtggctgctgcttcgctttcagttccagagagcagcctcagctaaacgagtgccagatccaaaaactcaatgccctcaaaccggataaccgtataaattcagaaggagggctcattgagacatggaaccctaacaacaagccattccagtgtgccggtg

SEQ ID NO: 123684 - DNA, 240 bp, Glycine max
ggcaacagtgagaacaccattgaattttgattctagcaagcagagcttttgtcaattctctattgatcttcttggtggaggaattttagtggacaaaactggagattggatcacacttatacaaaattctccaattagtaacttgttgagagttgctgcttggaagaaaggctgtttaatggttaagattgtgatgtctgggaatgcagcagtcaaaaggagtgattgggcctcattggt

SEQ ID NO: 123685 - DNA, 235 bp, Glycine max
  unsure (1)..(235): unsure at all n locations
tgagagtgcggtttcctttgttggtgttgctgggaactgttttcctggcatcagtttgtgtctcattaaaggtgagagaggatgagaataaccctttctacttgagaagctctaacagcttccaaactctctttgagaaccaaaacggtcgcattcgtctcctccagagattcaacaaacgctccaaacaacttagaaacaatcaagactancggantgnccagtttcagtcaaa

SEQ ID NO: 123686 - DNA, 203 bp, Glycine max
gctcagcctaagaagaaagaggaggggaataagggaagaaagggtcctttgtcttcaattttgagggctttttactgaataagtatgtactaaaatgtatgctgtaatagctcatagtgagcgaggaaagtatcgggctatgtaactatgactagagcttcaactatgaataaataaatcgacagcatatgatgcttttgttt

SEQ ID NO: 123687 - DNA, 227 bp, Glycine max
gctcagcctaagaagaaagaggaggggaataagggaagaaagggtcctttgtcttcaattttgagggctttttactgaataagtatgtactaaaatgtatgctgtaatagctcatagtgagcgaggaaagtatcgggctatgtaactatgactagagcttcaactatgaataaataaatcgacagcatatgatgcttttgtttaaaaaaaaaaagaaagggcggccg

SEQ ID NO: 123688 - DNA, 183 bp, Glycine max
ggcaaaaggagatttgtctctggggatggtgaagagatgacactgattccgggaaccagtgttgaagaggcttacaacaagctaatagttgaacttgagaaaagtgttcctacattggttggcattgaatgtcccaaggatgagaaacttcctcgtcgcaaaatttttgacaaacctaagacg

SEQ ID NO: 123689 - DNA, 241 bp, Glycine max; identical to SEQ ID NO: 122686

SEQ ID NO: 123690 - DNA, 165 bp, Glycine max
aaacttaattatgaacacttccttagttcaatatggggaagtcttcactcactctctgtcttcccgtgcttagtatcttgtcgagtgcatgttgctattagctcagcaagtcacgagtggcactaacaactcgagcgtgaacgacacgcgtagtcgaagtggtga

SEQ ID NO: 123691 - DNA, 246 bp, Glycine max
gttctcgtgtcaatttctaaatccaccaccacaccctctcttctattctctattattattatctccacacccttcactctctctcactcttctctcaatccttcaaccgcaatggccaccgctgccgagaaactctccgctctcaaatccgccgtcgccggattgaacgaaatccgtgagaatgagaagaacggattcatcagcctcgtcggccgctatctcagtggcgaacgcagcatgtggaat

SEQ ID NO: 123692 - DNA, 255 bp, Glycine max
gttcagtgtctacaataccaggtgattttgtcattggtgtcaagttgacaaccataaacaatatgtgtgcatatgggctcaatcctggtatttcaggttctcgtcttttgggcaccattcctcagtccatttcacagcaaactgtttggaatcaaatggcaacagtgagaacaccattgaattttgattctagcaagcagagcttttgtcagttttctattgaccttctcggtggaggaatttagtggacaaact

SEQ ID NO: 123693 - DNA, 268 bp, Glycine max
tcttacttgagtacaacactacggttgttttgttctgtcatcttaaagcaagatatgagttcatcaggaattagagcatggagtggtggaggccttgaaagaccagggcatatgcaggtggaaccatgctttaagatcagctcaacaccatctcaaaacccattttggctcattctctcaggctaacaggctttctgcttctgctatgctctccacaacactaaaacatgagaagccaaagcaatcagaggagtccttcagaaatgtc

SEQ ID NO: 123694 - DNA, 266 bp, Glycine max
cattgtctttgaacactcatcaccatggccaagcttgttctttccctttgtttccttcttttcagtggctgcttcgctctgagagagcaggcacagcaaaatgagtgccagatccaaaagctgaatgccctcaaaccggataaccgtatagagtcggaaggtgggttcattgagacctggaaccctaacaacaagccattccagtgtgccggtgttgccctctctcgctgcacccttaaccgcaatgcccttcgtagaccttccta

SEQ ID NO: 123695 - DNA, 266 bp, Glycine max
caaactttctttagctatctttttcttttttcttttagccttattttcaaacctagcctttggcaaatgtaaagaaaccgaggtagaagaagaagaccctgagctcgtaacatgcaaacaccaatgccaacagccacagcaatacactgagggtgacaagcgggtatgcttgcaaagatgtgacaggtatcatcgtatgaagcaggaccgagagaaacaaatccaagaggaaactcgtgagaagaaagaggaggaaagccgtgaaa

SEQ ID NO: 123696 - DNA, 265 bp, Glycine max
ttctctccattggtccttaaacactcatcagtcatcaccatggccaagctagtttctcccctttgtcttctggctgatcagtggctgctgcttcgctttcagttccagagagcggcctcagcaaaacgagtgccagatccaggaactcaatgccctcagaccggataaccgtatagagtcagaaggagggctcattcagtacatggaaccctaacgacaagccattccagggtgccggtattgacctctctcgctgcaccctcaa

SEQ ID NO: 123697 - DNA, 264 bp, Glycine max
ctgagggttttccccatgtgctttcacgcaaaaatggtgaaaaaggcaaaaggagatgtgtttctggggatggtgaagagatgacattgattccgggaaccagtgttgaagaggcttacaataagctaatagttgaacttgagaaaagtgttcctacattggttggcattgaatgtcccaaggatgagaaacttcctcgtcgcaaaatttttgacaaacctaagacgcgctgcttcactattctccctatgggatttaatcttg

SEQ ID NO: 123698 - DNA, 267 bp, Glycine max
gagctccttcaaacttaattattaacacttccttagtgcaatatggggaagcccttcactctctctctttcttccctttgcttgctactcttgtcgagtgcatgctttgctattagctccagcaagctcaacgagtgccaactcaacaacctcaacgcgttggaacccgaccaccgcgttgagtccgaaggtggtttgattcaaacatggaactctcaacaccctgagctgaaatgcgccggtgtcactgtttccaaactcaccctc

SEQ ID NO: 123699 - DNA, 261 bp, Glycine max
gttgaagaggcttacaacaagctaacagttgaacttgagaaaagtgttcctacattggttggcattgaatgtcccaaggatgaaaaacttcctcgtcgcaaagtttttgataaacctaagacgcgctgcttcactattctccctatggagtttaatcttgtggttcgtcagaagtttttaaattttgtgaggttcattatgaagaaaagggacaagcttagttgtcaagttggaatcaacccatattctatggaatggact

SEQ ID NO: 123700 - DNA, 262 bp, Glycine max
gcgaagagaatggctcccaagggtttaatctttttggctgtgttatgcttctcagcactgtcactgagtcgttgtcttgcggaggataatggacttgttatgaacttctacaaggaatcatgccctcaggctgaagacatcatcaaagaacaagtcaagcttctctacaagcgccacaagaacactgctttctcctggctcagaaacatcttccatgactgtgctgttcagagttgtgatgcttcactgttgctggactcca

SEQ ID NO: 123701 - DNA, 262 bp, Glycine max
cctcgagccgaatcggctcgagggagaatcatgtagttcaaatacccctaatggcacaggaggaaattctgtcttctagtgcaagtgatttcagaactgcaatggtgagtagaaatagcaagcctcaagctactgcaatgcatgtgggagctatagaaattatcattgatagtttcgcaagtcctgactgcaacatagttggtgcaatgcttttggttgatacttatcataccaatcctgaaaatgcagttcgtagtatttt

SEQ ID NO: 123702 - DNA, 250 bp, Glycine max
gttcctcactgaccaagccatggcgatgagaaccaaactttctttagctatctttttcttttttcttttagccttattttcaaacctagcctttggcaaatgtaaagaaaccgaggtagaagaagaagaccctgagctcgtaacatgcaaacaccaatgccaacagccacagcaatacactgagggtgacaagcgggtatgcttgcaaagatgtgacaggtatcatcgtatgaagcaagagcgagagaaa

SEQ ID NO: 123703 - DNA, 219 bp, Glycine max
gaactgagcagcacggttgtgtttgagaggccacatgatgaggaatttatacgcaagtggcagttagcatgcaaagggaatatcgcacatgtggtggtgatgccaaacatcactattgagaagcttgatgattttctgaacgagcttctggacaagcgtgctacctggtttcaagatggaaaggatcaaccttactgtatatcatcagatgtaggtgaa

SEQ ID NO: 123704 - DNA, 264 bp, Glycine max
gattaatgaaggagatgcaaacattgaacttgttggcattaaagaacaacaacagaagcagaaacaggaagaggaacctttggaagtgcaaaggtacagagctgaattgtactgaagacgatgtatttgtaattccagcagcttatccatttgtcgtcaacgctacctcaaacctcaatttccttgcttttggtatcaatgctgagaacaaccagaggaacttccttgcaggcgagaaagacatgtggtaaggcagatagaaac

SEQ ID NO: 123705 - DNA, 262 bp, Glycine max
gacaaaactggagattggatcacacttatacaaaattctccaattagtaacttgttgagagttgctgcttggaagaaaggctgtttaatggtcaagattgtgatgtctgggaatgcagcagtcaaaaggagtgattgggcctcattggtacaagtgtttttaacaaacagcaacagtacagagcattttgatgcatgtaagtggacaaaatcagaaccacattcctgggaattgatcttcccaatagaggtatgtggtccta

SEQ ID NO: 123706 - DNA, 260 bp, Glycine max
gttgaagcttggactgatcattgacgaggatgcaggtgaagctgatgctgaaatgcacccactggaggaggccgaggctgatgctgagggcagcaagatggaggaggttgattaaaattaaatatgatgcgtatcttgttagtagcgtctctaatgcctcagacggctatgtgtaggtctcctatgatgatctgggattgatgaaagtgttcattggatgtatggctaattagctataatttcgcgggtctatttttgag

SEQ ID NO: 123707 - DNA, 174 bp, Glycine max
ctcagttctctgcttaatttcaagttcaagctggtgaaattaagaatagaactgagaaagaaacagaagaagtttaaatctgacacgaagtcctatatcaaataggagagtgttcaacaaatagactaagcgtggaaaagaaaatgattcacgaagtctgtggccagcacagag

SEQ ID NO: 123708 - DNA, 251 bp, Glycine max
gttggaggaaccattctgcgtagtgatctattggcaaattttttgacagagggcaattttagagcaagtgttgatttgcagcgcactcatcgtattagaggaatgattaaaatggtggccacagttggtattcctgagaatacaggtatatcattggcctgtgctatgaatagttcttttagggggcgcgccagttacgatatttacaccatctgctctcaagactgtgaattgtggaatcctgcttgcac

SEQ ID NO: 123709 - DNA, 258 bp, Glycine max
ctttggaagtgcggaaatatagagccgaattgtctgaacaagatatatttgtaatcccagcaggttatccagttgtggtcaacgctacctcaaatctgaatttctttgctattggtattaatgccgagaacaaccagaggaacttcctcgcaggttcgcaagacaatgtgataagccagatacctagtcaagtgcaggagcttgcattccctgggtctgcacaagctgttgagaagctattaaagaaccaaagagaat

SEQ ID NO: 123710 - DNA, 164 bp, Glycine max
gtctcatttggcattgcttactgggaaaaagagaaccccaaacacaacaagtgtgctcagagttgcaatagcgagagagactcgtacaggaaccaagcatgccacgctcgttgcaacctccttaaggtggagaaagaagaatgtgaagaaggtgaaattccacg

SEQ ID NO: 123711 - DNA, 262 bp, Glycine max
ggaatggcaactggatctaccttgtgacaaaattcctagtgtcttgactacaactgatgaaagattggtaggcacagaacatgagggatatgatccttttcttggtggaattcaaaaatatgccactcccatgatgcccctagatgaagaaattctttctaaggttgcacaagatatggttgaggaatggtttgattgtgttgatgaggaggattcctttgaggaagtttctttgagtgcagcactcaatggtgttgagggt

SEQ ID NO: 123712 - DNA, 187 bp, Glycine max
gcggtttcctttgttggtgttgctgggaactgttttcctggcatcagtttgtgtctcattaaaggtgagagaggatgagaataaccctttctacttgagaagctctaacagcttccaaactctctttgagaaccaaaacggtcgcattcgtctcctccagagattcaacaaacgctccacacaacat

SEQ ID NO: 123713 - DNA, 213 bp, Glycine max
gagaccgctacgaagctggcgtcgtctccctcggaggacgtgtagaaccggcgcgttgatgaagccggcgtcaaagcgccctccatttaccattccgagacatgtccaacgacttcccaggtcctcgcagtactcgccggcctcccggtcggtggcatcctgctcctcctggcgggattgctcctggcaggaacccgtacaggactggcagtt

SEQ ID NO: 123714 - DNA, 263 bp, Glycine max
caacagtacagagcattttgatgcatgtaagtggacaaaatcggaaccacattcctgggaattgatcttcccaatagaggtatgcggtcctaataatggttttgaaatgtggagttctgagtgggcaaatcaaacttcatggcatttgagtttccttattgacaatcccaaacagtctacagtttttgacattctcttgggaatttctcaagattttgaaattgctggtaatactcttatgccagctttttctgttccacagg

SEQ ID NO: 123715 - DNA, 247 bp, Glycine max
tttccttagttcaatatggggaagcccttcttcactctctctctttcttccctttgcttgctactcttgtcgagtgcatgctttgctattacctccagcaagttcaacgagtgccaactcaacaacctcaacgcgttggaacccgaccaccgcgttgagtccgaaggtggtcttattgaaacatggaactctcaacaccctgagctgcatgcggcggtgtactgttccaaaggcccctcaaccgaaa

SEQ ID NO: 123716 - DNA, 260 bp, Glycine max
gaagaaagaatatagtcttcagctggacaaggatcatttattttgaaagacaagtttgtgtgacaatcttatagttctaagaagggtgcaagtgagagctttgctgtgatggcaacccgtagatattcttttggaagggctgatgaggccactcatccagactccatgagggccactttggctgaatttgcatccactttcatctttgtctttgctggagaaggctctagccttgctttggttaagatttaccaggattc

SEQ ID NO: 123717 - DNA, 259 bp, Glycine max
ctcgagccgtctctccattggtccttaaacactcatcagtcatcaccatggccaagctagtactttccctttgttttctgcttttcagtggctgctgcttcgctttcagttccagagagcagcctcagcaaaacgagtgccagatccaaaaactcaatgccctcaaaccggataaccgtatagagtcagaaggaggcgtcattgagacatggaaccctaacaacaagccattccagtgtgccggtgttgccctctctcg

SEQ ID NO: 123718 - DNA, 257 bp, Glycine max
ctcgagccgtcttcttctcttgcggctagggttttagcgcacttcttctagatttaaggaagatgggtaaggaaaaggttcacatcagtattgtggtcattggccatgtcgactctgggaaatccactaccactggtcacctgatttacaagcttggaggcattgacaagcgtgttattgagaggtttgagaaggaagctgctgagatgaacaagaggtctttcaagtatgcctgggtgctggacaaacttaaggct

SEQ ID NO: 123719 - DNA, 256 bp, Glycine max
agaagccgcgaccccatctattccaacaagcttggcaagttgtttgagattaccccagagaaaaaccctcagcttcgggacttggatgtcttcctcagtgttgtggatatgaacgagggagctctttttctgccacacttcaattcaaaggccatagtggtactagtgattaatgaaggagaagcaaacattgaacttgttggcattaaagaacaacaacagaggcagcaacaggaatagcaacctttggaagtgc

SEQ ID NO: 123720 - DNA, 259 bp, Glycine max
gaagaaaagggacaagcttagttgtcaagttggaatcaacccatatactatggaatggactggtttggccaatagattactgagtaagggcaacgatattctgtgttgcgattatgctagttttgatggtttgattaccaagcaagttatgagcaagatggcagaaatgatcaacagtctttgtggtggtgatgaaaaactgatgcgtgaaaggacacacctgctgttggcttgttgttcaaggatggcaatttgtaag

SEQ ID NO: 123721 - DNA, 265 bp, Glycine max
gctattctcatgaatatgccaaatgctgttctttcaatgtggagatattttgttggagatctcgtctttgaagtttctaagatgacttctccctacattaaatgtacagtctctttcttcatagcatttggaaatttggctgatgataccatcaattttgaggcttttccccacaagctggtgcagtttgcagagattcaggaaaaagttgtattgaaattttcacaagaggaatttcttacagcttggtcaactcaggtgcgtc

SEQ ID NO: 123722 - DNA, 262 bp, Glycine max
cattgtctttgaacactcatcaccatggccaagcttgttctttccctttgtgtccttgcttttcagtggctgcttcgctctgagagagcaggcacagcaaaatgagtgccagatccaaaagctgaatgccctcaaaccggataaccgtatagagtcggaaggtgggttcattgagacctggaaccctaacaacaagccattccagtgtgccggtgttgccctctctcgctgcacccttaaccgcaatgcccttcgtagacct

SEQ ID NO: 123723 - DNA, 210 bp, Glycine max
ctggcgatgaaccagttgttgccatcagtcttcttgacacctctaccttcaataaccagcttgatcaaacccctagggtattttaccttgctgggaacccagatatagagtacccatagaccatgcaacaacaacaacagcagaaaagtcatggtggacgcaagcaggggcaacaccagcaggaggaagaggaaaaaggtggcgagcgtg

SEQ ID NO: 123724 - DNA, 263 bp, Glycine max
catcaccatggccaagcttgttctttccctttgtttccttcttttcagtggctgcttcgctctgagagagcaggcacagcaaaatgagtgccagatccaaaagctgaatgccctcaaaccggataaccgtatagagtcggaaggtgggttcattgagacctggaaccctaacaacaagccattccagtgtgccggtgttgccctctctcgctgcacccttaaccgcaatgcccttcgtagaccttcctacaccaacggtcccc

SEQ ID NO: 123725 - DNA, 256 bp, Glycine max
ggacaagcttagttgtcaagttggaatcaacccatactccatggaatggactggtttggccaatagattactgagtaagggcaacgatattctgtgttgcgattatgctagttttgatggtttgattaccaagcaagttatgagcaagatggcagaattgttaaccagtcttggtggtggtgatgaaaaattgatgcgtgaaaggacacacctgctgttggcttgttgttcaaggatggcaatttgtaagaaagat

SEQ ID NO: 123726 - DNA, 255 bp, Glycine max
attttctgattttagcaaattaaaatagtagtgttattggtaggttttggcaaagatgttttcagttccaggggtgtcgggaatactgaacagaggaggagggcataagataaaagggacagtggtgttgatgaggaagaatgtgttggacttcaacagcgtggctgatcttactaaaggaaatgttgggggactcataggcaccggcctcaacgttgttggctcaacacttgataacctcactgctttcttggg

SEQ ID NO: 123727 - DNA, 250 bp, Glycine max
tcaccattactgatggtattgacaaaactagtgcaactttgcaatttagaaagttagcagattgtgattttctcaagagaaactttaagcagatgtctaatgttttgtgggtggctccttaggacaaggcgagtttatggtcacaacttcattatgtttcgtgtaataatctggaaatgcaagaagcttatcttgtcaatctcgtaaatgtgttacgagaattgtatttgcacagtccagaggaagctcg

SEQ ID NO: 123728 - DNA, 256 bp, Glycine max
cactgaactatcatgcaccattgcatacaaatatggacacccatcatccaacagagttgttgcaggacgcacctgagttgaccaagctgtaagaaattccaggtgattttgtcattggtgtcaagttgacaaccataaacaatatgtgtgcatatgggctcaatcctggtatttcaggttctcgtcttttgggcacaattcctcagtccatttcacagcaaactgtttggaatcaaatggcaacagtgagaacacc

SEQ ID NO: 123729 - DNA, 263 bp, Glycine max
ctacaataccaggtgattttgtcattggtgttaagttgacaaccataaacaatatgtgtgcatatgggctcaatcctggtatttcaggttctcgtcttttgggcaccattcctcagtccatttcacagcaaactgtttggaatgaaatggcaacagtgagaacaccattgaattttgattctagcaagcagagcttttgtcaatttgctattgaccttctcggtggaggaatttagtggacaaaactggagttggatcacact

SEQ ID NO: 123730 - DNA, 263 bp, Glycine max
gtgagtagaaggcagagagactagagcggagatagcaatctcatctcattcatttcaatggcaactcaaggtcaagtcattacctgcaaagctgcggtggcctgggaacccaacaagcccttaactgtccaagacgttcaggtggctccgcctcaggccggcgaggtccgtgtccaaatcctcttcaccgctctctgccacaccgatgcttacacttggggcggcaaggatcccgaaggtctcttcccctgtattcttggcca

SEQ ID NO: 123731 - DNA, 175 bp, Glycine max; identical to SEQ ID NO: 123676

SEQ ID NO: 123732 - DNA, 256 bp, Glycine max
ccaaagtttcagacccttattgacctttctgttatagaaatcttgtcaaggcatgcatctgatgaggtgtaccttggggagagggacaatccaaattggacatctgatacaagagcattagaggcttttaaaaggtttggaaataaactggcacaaattgagaataaactctcagagagaaacaacgatgagaaactgagaaaccgttgtggaccagttcaaatgccttatactctgcttttgccttctagtaagg

SEQ ID NO: 123733 - DNA, 258 bp, Glycine max
cactgaaagcactcagtagggtttgcggtttcagagtttgtgacgcacgcatccatggccaccaccaccaacgccgccgcagccccgccgcgccagctctcccagaaggaagccgacatccagatgatgttagccgccgacgtccacctcggcaccaaaaactgcgacttccaaatggaacgttacatcttcaagcgccgcaacgacgggatttacattattaaccttgggaagacatgggagaagcttcagttagca

SEQ ID NO: 123734 - DNA, 256 bp, Glycine max
cttcccgaagtgttaagagaatgcctctttctatagggggaggagctggtgcaaagaatgctattctcatgaatatgccaaatgctgttctttcaatgtggagatattttgttggagatctcgtctttgaagtttctaagatgacttctccctacattaaatgtacagtctcttccttcatagcatttggaaatttggctgatgataccatcaattttgaggcttttccccacaagctggtgcaatttggagagat

SEQ ID NO: 123735 - DNA, 117 bp, Glycine max
tctctccattggtccttaaacactcatcagtcatcaccatggccaagctagttttttccctttgttttctgcttttcagtggctgctgcttcgctttcagttccagagagcagcctc

SEQ ID NO: 123736 - DNA, 257 bp, Glycine max
ggcaacagtgagaacaccattgaattttgattctagcaagcagagcttttgtcaattctctattgatcttcttggtggaggaattttagtggacaaaactggagattggatcacacttatacaaaattctccaattagtaacttgttgagagttgctgcttggaagaaaggctgtttaatggttaagattgtgatgtctgggaatgcagcagtcaaaaggagtgattgggcctcattggtacaagtgtttttaacaa

SEQ ID NO: 123737 - DNA, 256 bp, Glycine max
gtactatcttctttgctctctttctagtttgtgccttcaccatctcatacctgccttcagccaccgctcagttcgtgctcgacactgatgatgatcctcttcaaaacggtggcacatactatatgttgccagttatgagaggaaagggcggtggaatagaagtagattcaactggaaaagaaatatgccctctcactgttgtgcaatcacccaatgagctcgataaggggattggactagtctttacatctccatt

SEQ ID NO: 123738 - DNA, 189 bp, Glycine max
gattttgaaattgctggtaatactcttatgccagctttttctgttccacaggctactgccagatcttctgaaaatgcggaatcctctgcatgatctggaatttgtgttttctttcatttgtcagtttgtttaattcaataaaggaaattaggcatgaccctcttgttgagtatgctctgcctatttgaa

SEQ ID NO: 123739 - DNA, 243 bp, Glycine max
ctcgagcctctcgagccgattcggctcgatgaagtttgcaaaaattatgagtcttagacaaagtgttgttggtgatcttaaacttcttactgatgggaagttatatgagggtaagcagattcctgtatctgatattagtgcaggggtgaatcatgtagttcaaatacccctaatggcacatgaggagattctgtcttctagtgcaagtgatttcagaactgcaatgttgagtagaagtggcaa

SEQ ID NO: 123740 - DNA, 257 bp, Glycine max
gtttggagagattcaggaaaaagttgtattgaaattttcacaagaggaatttcttacagcttggtcaactcaggtgcgtcctgcaacaactctgttggctgatgggtgcccatatttgtatgctatggtgcatgatagttcagtgtctacaataccaggtgattttgtcattggtgttaagttgacaaccataaacaatatgtgtgcatatgggctcaatcctggtatttcaggttctcgtcttttgggcaccattc

SEQ ID NO: 123741 - DNA, 259 bp, Glycine max
atggagacaaatttgtttaaattgtctcttgatgatgttgaaactcctaaaggttccatgttggatcttaaaatttctcagtctaaaattgcacttcccaagaacacagttggaggaactattctgcgtagtgatctattggcaaattttctgacagagggcaattttagagcaagtgttgatttgcagcgcactcatcgtattaaaggaatgattaaaatggtggccacagttggtattcctgagaatacaggtatat

SEQ ID NO: 123742 - DNA, 256 bp, Glycine max
taaagatgagtttgaagaacaacatggtggtgctaaaggtgtgtttgttgcttcttttccttgtgggggttacagctgcacgcatggaactgagcttcttcaaaagtgatcagtcatcaagttatgatgatgatgagtattcaaaaccatgctgtgatctctgcatgtgcacacgctcaatgcctcctcaatgcagctgtgaagatattacgctgaattcatgccactcagattgtaagagctgtatgtgcacacg

SEQ ID NO: 123743 - DNA, 249 bp, Glycine max
gcggtttcctttgttggtgttgctgggaactgttttcctggcatcagtttgtgtctcattaaaggtgagagaggatgagaataaccctttctacttgagaagctctaacagcttccaaactctctttgagaaccaaaacggtcgcattcgtctcctccagagattcaacaaacgctccccacaacttgagaaccttcgagactaccggattgtccagtttcagtcaaaacccaacacaatccttctccc

SEQ ID NO: 123744 - DNA, 180 bp, Glycine max
gtataccttaatagataatttaagatactatgatgagagcacggttcccattactgttgctgggacttgtgttcctggcttcagtttctgtctcatttggcattgcttactgggaaaaagagaaccccaaacacaacaagtgtctccagagttgcaatagcgagagagactcgtacagga

SEQ ID NO: 123745 - DNA, 176 bp, Glycine max
caactgagccatcgcagggcaactcatttgctctcaaacactctttattacaaacggttctttccttattatgctttcaatgttttgggtggccttgacaatgaaggaaagggatgtgtcttcacatatgatgctgttggttcttatgagatggttggatatagctctcagggttc

SEQ ID NO: 123746 - DNA, 115 bp, Glycine max
aattccttcacttgcagcactgttgcatcatcatcttcattgcaaaaccctaaacttcaccttcaaccatgaccacacaagtaccaccacacagtgtccaagtccacacaacaaa

SEQ ID NO: 123747 - DNA, 246 bp, Glycine max
ggtccttaaacactcatcagtcatcaccatggccaagctagttttttccctttgttttctgcttttcagtggctgctgcttcgctttcagttccagagagcagcctcagcaaaacgagtgccagatccaaaaactcaatgccctcaaaccggataaccgtatagagtcagaaggagggctcattgagacatggaaccctacaaacaagccattccattgtgccggtgttgccctctctggttgaac

SEQ ID NO: 123748 - DNA, 263 bp, Glycine max
atgtctttgaacactcatcaccatggccaagcttgttctttccctttgtttccttcttttcagtggctgcttcgctctgagagagcaggcacagcaaaatgagtgccagatccaaaagctgaatgccctcaaaccggataaccgtatagagtcggaaggtgggttcattgagacctggaaccctaacaacaagccattccagtgtgccggtgttgccctctctcgctgcacccttaaccgcaatgcgcttcgtagacttccta

SEQ ID NO: 123749 - DNA, 262 bp, Glycine max
tgggaaacaaaactacccttttgcttttgctctttgttctttgccatggagtggccacaacaacaatggccttccatgatgatgagggtggtgataaaaagtcaccaaaaagtttgtttttgatgagcaactccacgagggttttcaagactgatgcaggggaaatgcgtgtgctgaaaagccatggtggtaggatattttataggcacatgcacattggcttcatctctatggaaccaaagtccttgtttgttcctcagta

SEQ ID NO: 123750 - DNA, 264 bp, Glycine max
ctcgagcgcttattaacactttccttagttcaatatggggaagcccttcttcagtctcactctttcttccctttgcttgctactcttgtcgagtgcatgctttgctattacctccagcaagttcaacgagtgccaactcaacaacctcaacgcgttggaacccgaccaccgcgttgagtccgaaggtggtcttattgaaacatggaactctcaacaccctgagctgcaatgcgccggtgtcactgtttccaaacgcaccctcaa

SEQ ID NO: 123751 - DNA, 263 bp, Glycine max
gaggcttttccccacaagctggtacagtttggagagattcaggaaaaagttgtattgaaattttcacaagaggaatttcttacagcttggtcaacccaggtgcgtcctgcaacaactctgttggctgatgggtgtccatatttgtatgctatggtgcatgatagttcagtgtctacaataccaggtgattttgtcattggtgttaagttgacaaccataaacaatatgtgtgcatatgggctcaatcctggtatttcaggttc

SEQ ID NO: 123752 - DNA, 172 bp, Glycine max
taaatcgcgatcacaggttgccggaccttaaaaccggaaacaaaagcaatcgttacttgatttcaagaatctctcaatttcttcctacttctttgtgtacgatttcttaagggaaagaaaatcactctctgtgctggccacagacttcgtgaatcattttcttttccactct

SEQ ID NO: 123753 - DNA, 261 bp, Glycine max
cggctcgagtccgagaatgacaagagcggaatctccgtcgatgccgccgcgcacggggtgaaaagacggtgtccaacgctgaaccttccggtagcgatcctcagaagtctctggagttggcgaacgagctgatggaaaaaggaaacaaggcaattaaggagaacgattttggagaagcagctgataacttcagccgtgctctcgaaatcagagtggcacattatggtgaacttgctcctgagtgtgtgcacacatattaca

SEQ ID NO: 123754 - DNA, 259 bp, Glycine max
gaaattttgataaaccgcgatcacaggttgccgtaccttaaaaccggaaacaaaagcaatcgttacttgatttcaagaatttctcaatttctttctacttctttgtgtacgatttcttaagggaaagaaaatcactctctgtgctggccacagacttcgtgaatcattttcttttccacttttagtttattccctgaacactctcctatttgatataggacttcgtgtcagatttaaacttcttctgtttctttctcag

SEQ ID NO: 123755 - DNA, 262 bp, Glycine max
gttcaatatcctagtataccttaataaataatttaagatactatgatgagagcacggttcccattactgttgctgggacttgttttcctggcttcagtttctgtctcatttggcattgcttactgggaaaaagagaaccccaaacacaacaagtgtctccagagttgcaatagcgagagagactcgtacaggaaccaagcatgccacgctcgttgcaacctccttaaggtggagaaagaagaatgtgaagaagtgaaattcc

SEQ ID NO: 123756 - DNA, 265 bp, Glycine max
aatttaagatactatgatgatagcacggttcccattactgttgctgggacttgttttcctggcttcagtttctgtctcatttggcattgcttactgggaaaaagagaaccccaaacacaacaagtgtctccagagttgcaatagcgagagagactcgtacaggaaccaagcatgccacgctcgttgcaacctccttaaggtggagaaagaagaatgtgaagaaggtgaaattccacgaccacgaccatttgcgaaacacccggag

SEQ ID NO: 123757 - DNA, 262 bp, Glycine max
gctgctcttgccatattatctctcaatggaaggcatctatttgggcagcctatcaaagttaattgggcatatgctagtggtcagagagaggatacgtcaggtcactacaatatatttgttggcgatctaagtcctgaggttactgatgctacgttgtttgcatgcttttctgtctatcccagttgttcagatgcaaaggttatgtgggatcagaagactgggcgttcaaggggatttggctttgtttcattccgtaaccaac

SEQ ID NO: 123758 - DNA, 263 bp, Glycine max
cttaaggtggagaaagaagaatgtgaagaaggtgaaattccacacacacgaccacgagcacaacacacggagagggaacctcagcaacccggtgcgaaggaggaagacgaggataagcaaccacgtcgaatcccattcccacgcccacaacctcgtcaagacgaagagcacgagcagagagaggaacaggagtggcctcgcaagggagaaaaaagcggagaaaagggacgtgaagaggaagatgaggatgaggatgaggacaa

SEQ ID NO: 123759 - DNA, 268 bp, Glycine max
cccatctattccaacaactttggaaagttctttgagatcacccctgagaaaaacccacagcttcgggacttggatatcttcctcagttctgtggatatcaacgaaggagctcttcttctaccacacttcaattcaaaggccatagtgatactagtgattaatgaaggagatgcaaacattgaacttgttggcattaaagaacaacaacagaagcagaaacaggaagaggaacctttggaagtgcaaaggtacagagctgaattgtctg

SEQ ID NO: 123760 - DNA, 266 bp, Glycine max
gttcaatatcctagtacaccgtattaaagaatttaagatatactatgatgagagcgcggttcccattactgttgctgggagttgttttcctggcatcagtttctgtctcatttggcattgcgtattgggaaaagcagaaccccagtcacaacaagtgcctccgaagttgcaatagcgagaaagactcctacaggaaccaagcatgccacgctcgttgcaacctccttaaggtggaggaagaagaagaatgcgaagaggtcaaattc

SEQ ID NO: 123761 - DNA, 266 bp, Glycine max
ttcaatatcctagtataccttaataaataatttaagatactatgatgagagcacggttcccattactgttgctgggacttgttttcctggcttcagtttctgtctcatttggcattgcttactgggaaaaagagaaccccaaacacaacaagtgtctccagagttgcaatagcgagagagactcgtacaggaaccaagcatgccacgctcgttgcaacctccttaaggtggagaaagaagaatgtgaagaaggtgaaattccacga

SEQ ID NO: 123762 - DNA, 264 bp, Glycine max
gttatgggtttccttgtgttgcttcttttctccctcttaggtctctcttctagttccagcatatcaactcatcgttccatattggaccttgacctaaccaagtttaccacacagaaacaggtgtcttcactgttccaactatggaagagtgagcatggacgtgtctaccataaccacgaagaagaggcaaagagacttgagattttcaagaataacttgaactatatcagggacatgaatgcttacagagaatcccccattctc

SEQ ID NO: 123763 - DNA, 183 bp, Glycine max
aattttgataaaccgcgatcacaggttgccggaccttaaaaccggaaacaacagcaatcgttacttgatttcaagaatgtctcaatttcttcctacttctttgtgtacgatttcttaaggggaagagaatcactctctgtgctggccacagacttcgtgaatcattgtcttttccacacaaca

SEQ ID NO: 123764 - DNA, 269 bp, Glycine max
agcaactaacaataattccttcacttgcagaacttagttctctgttgcatcatcatcatcttcattagtgttagccctaaacttcaccttcaaccatgaccacagtgccaccacacagtgtccaagtgcacacaacaacacaccgctacgaagccggcgtcgtcccgccggctcgttttgaggcgccgcgttacgaagccggcatcaaggcgccctcttccatttaccattccgagagaggtccgacgacctctcaggttctcgcagtt

SEQ ID NO: 123765 - DNA, 265 bp, Glycine max
caacaaaccgacaccttagtgctcttcacccaatttataagcttctaactcctcactaccgtgacaccatgaacatcaacgcacttgctaggcaatctctcattaatgctgatggcataatagagaaatcttttttgccctcaaagcattccgttgagatgtcttcagcggtttataagaattgggttttcactgatcaagcactacctgcagatcttatcaagagaggagtggcaattaaggatccatctgccccacatggact

SEQ ID NO: 123766 - DNA, 265 bp, Glycine max
cactcatcaccatggccaagcttgttctttccctttgtttccttcttttcagtggctgcttcgctctgagagagcaggcacagcaaaatgagtgccagatccaaaagctgaatgccctcaaaccggataaccgtatagagtcggaaggtgggttcattgagacctggaaccctaacaacaagccattccagtgtgccggtgttgccctctctcgctgcacccttaaccgcaatgcccttcgtagaccttcctacaccaacggtcc

SEQ ID NO: 123767 - DNA, 263 bp, Glycine max
gtccacagcaagctgaggatgacaaatgtggggatattgggattagtattgatcatgatgatggaaccaggcgtttggaggtgtctaagaacaaaccgttagtggttcagtttcaaaaacttgataaagaatcactggccaagaaaaatcatggcctttctcgcagtgagtgagacacaagtgtgagagtactaaataaatgctttggttgtacgaaatcattacactaaataaaataatcaaagcttatatatgccttccgc

SEQ ID NO: 123768 - DNA, 264 bp, Glycine max
cattgttggaatctggtttgcaaaaagacagagggttaattgtggagtattttggaaggatgtcttacgttgctcataacgttaatcagccccaagagaaagatttgttggagggaaatttttcctttgatattaaatctcgctctagattggaaaaagtttcctctacaaaagcacaatttgttagtggaaaaaccttcaaatatgatataattggtgctggttcacattcttcagaagattttcctgaaaaggaagatcaag

SEQ ID NO: 123769 - DNA, 263 bp, Glycine max
attgtctttgaacactcatcaccatggccaagcttgttctttccctttgtatccttcttatcagtggctgcttcgctctgagagagcaggcacagcaaaatgagtgccagatccaaaagctgaatgccctcaaaccggataaccgtatagagccggaaggtgggttcattgagacttggaaccctaacaacaagccattccagtgtgccggtgttgccctctctcgctgcacccttaaccgcaatgcccttcgtagaccttcc

SEQ ID NO: 123770 - DNA, 265 bp, Glycine max
actcgagccgaatcggctcgaggcacaagtgagagaggttgaagacggcgtgagaatgttgcacatcaacctattcagagaggagaagggccacaaccctgaactcatacgcgaatcccaacgccgtcgtttcgccagcgtcgaaatcgtcgacgaggtcatcaatctcgacaaagaatggcgagaacgtcaattcgagttggaaaatctccgcaaggaattcaacaagatcaacaaggaagtctccaaactcaagcgtgctggg

SEQ ID NO: 123771 - DNA, 266 bp, Glycine max
tccatttgtccttgaatataatactcagcatggctaagcttgttctttccctttgttttctgcttttcagtggctgctgcttcgctttcagtttcagagagcagccacagcaaaacgagtgccagatccaacgcctcaatgccctcaaaccggataaccgtatagagtcagaaggtggcttcattgagacatggaaccctaacaacaagccattcacatgtgccggtgttgccctctctcgctgcaccctcaaccgcaacgccctt

SEQ ID NO: 123772 - DNA, 267 bp, Glycine max
gtctttgaacactcatcaccatggccaagcttgttctttccctttgtttccttcttttcagtggctgcttcgctctgagagagcaggcacagcaaaatgagtgccagatccaaaagctgaatgccctcaaaccggataaccgtatagagtcggaaggtgggttcattgagacctggaaccctaacaacaagccattccagtgtgccggtgttgccctctctcgctgcacccttaaccgcaatgcccttcgtagactacctacaccaa

SEQ ID NO: 123773 - DNA, 270 bp, Glycine max
cacacaactactacaagtacttccttacaatcaaaaccaacaacaactatggcaagttatcaaaagcactacgatgatcagggtcgcaaggttgacgagtatggcaacgttgagaagcaaaccgacgaatacggcaaccctgttcatgctgctagtgtcacctatgtagccaccagaactgctgctggtggttacagtgatgacattaataagcaacatgataccaccaatgcctacggcgtagacactggtagacagcatctagtggtg

SEQ ID NO: 123774 - DNA, 263 bp, Glycine max
tgcggtgattcactcgtactttgcttaatatggcggttgagaagttgagcattgcaaaagatgtgactgaattaattggcaaaactccattggtatatctcaaccgcatcgtggatggctgtgttgccaaagttgctgcgaactagaaatgatggaaccttgctccagtgtcaaagacaggatagggtatagcatgattgtagatgctgaggagaaaggactcatcacaccgggtgaaagtgtcctcattgagcctactagtg

SEQ ID NO: 123775 - DNA, 261 bp, Glycine max
gatgccgccaacaactttgcccgtggccattataccattgggaaagagattgttgatctgtgcttggaccgcatcagaaagcttgctgacaattgcactggactccaagggtttttggtcttcaatgccgttggtggaggaactggttctggacttggttcccttctcttggagcgtctctccgttgattatggcaagaaatcaaagcttggtttcacagtctacccctctcctcaggtgtccacctctgttgttgagcca

SEQ ID NO: 123776 - DNA, 262 bp, Glycine max
cttgcaacgattaacaatggcttcaaccgacaagtcaccggacccaacgccggcgaagggtccggatccaactccggggaagccgatgagtgttggtcagcacgtgatcgacaagagtgcaatgatggtgcagtcgctggaccccattaagcagatgagtcagcacgtgtgctccttcgacatctacagccatgacatgtctcgccagatagagacacatcactactgctccagactccaccagaacttcatacaatgtgct

SEQ ID NO: 123777 - DNA, 263 bp, Glycine max
gttttgtgggtagctcctgaggacaaggcgagtttatggtcacaacttcattatgtttcgtgtaataatctggaaatgcaagaagcttatcttgtcaatctcgtaaatgtgttacgagaattgtatttgcacagtccagaggaagctcgccaattgagaaggaaagctctctctcgtattgaatggctgcaaaaagctgatgtgcctaccatagcacagattgaagagttccattcgatgcagaggatgatgaatgctcctga

SEQ ID NO: 123778 - DNA, 188 bp, Glycine max
agaaattttgataaaccgcgatcacaggttgccgcaccttaaaaccggaaacaaaagcaatgcgttacttgatttcaagaatctctcaatttcttcctacttctttgtgtacgatttcttaagggatagaaaatcactctctgtgctggccacagacttcgtgaatcattttcttttccacacaacat

SEQ ID NO: 123779 - DNA, 266 bp, Glycine max
attgattccgggaaccagtgttgaagaggcttacaacaagctaacagttgaacttgagaaaagtgttcctacattggttggcattgaatgtcccaaggatgaaaaacttcctcgtcgcaaagtttttgataaacctaagacgcgctgcttcactattctccctatggagtttaatcttgtggttcgtcagaagtttttaaattttgtgaggttcattatgaagaaaagggacaagcttagttgtcaagttggaatcaacccatatt

SEQ ID NO: 123780 - DNA, 204 bp, Glycine max
caaagccataaaggaaagcatcagcaagaagaagaaaacgaaggaggcagcatattgagtggcttcaccctgggattcttggaacatgcattcagcgtggacaagcagatagcgaaaaacctacaaggagagaacgaaggggaagacaagggagccattgtgacagtgaaaggaggtctgagcgtgataaaaccacccacggac

SEQ ID NO: 123781 - DNA, 137 bp, Glycine max
aaaattcttccaccaagttatggggcaccttgtgttgcttcttttctccctcttaggtctctcttctagttccagcatatcaactcatcgttccatattggaccttgacctaaccaagtttaccacacagaaacagg

SEQ ID NO: 123782 - DNA, 261 bp, Glycine max
gaggctacagtgcttgattttgggttttgtacacaagagctttaaagcccggttgatgatgtaatatttctctattgcattctgcctactggtttctgctgcttgtgtcaaattttctctaaactagagtagcccaatagcatacgtgttatgtgcattggtcatgtatacaagtgtaatactaaaaccttctacataatataagattagttagtttacttgtctctattttcttaaactccgctccttcaaatcaagaag

SEQ ID NO: 123783 - DNA, 262 bp, Glycine max
ctttgaacactcatcaccatggccaagcttgttctttccctttgattccttcttttcagtggctgcttcgctctgagagagcaggcacagcaaaatgagtgccagatccaaaagctgaatgccctcaaaccggataaccgtatagagtcggaaggtgggttcattgagacctggaaccctaacaacaagccattccagtgtgccggtgttgccctctctcgctgcacccttaaccgcaatgcccttcgtagaccttcctaca

SEQ ID NO: 123784 - DNA, 258 bp, Glycine max
cagcgaccaagcaggcccgaacaacaagaactctgtggaagatgatgtcagactagaaatggggttgaggaaaatatttgcaccatgaagcttcacgagaacattgctcgcccttcacgtgctgacttctacaacccaaaagctggtcgcattagcaccctcaacagtctcaccctcccagccctccgccaattcggactcagtgcccaatatgttgtcctctacaggaatggaatttactctccacattggaacttg

SEQ ID NO: 123785 - DNA, 266 bp, Glycine max
aaaaaagtatctcttgaactcggcggcaatgcaccttgcatagtttttgatgatgctgacctggatgttgcagtaaaaggaactcttgcagcaaagttccgtaacagtggacaaacatgtgtttgtgcaaatagaattattgtgcaagaaggtatatatgagaagtttgcaaatgctttacgtgatactgttcagaatatgaaagttggggatggtttcagtgaaggtgtggcacagggtcctctaatcaatgaagctgctgtcaa

SEQ ID NO: 123786 - DNA, 265 bp, Glycine max
tcaactacaagaaagaacttccttataaccaaaaccaacaacaactatggcaagttatcagaagcactacgatgatcagggtcgcaaggtcgacgagtatggcaatgttgagaggcaaactgacgaatatggcaacccggttcatgccactagtgtcacttatgtagccaccaaaagtgttggtggctacaatgatgacgctaataagcaacatgatattactggtgtctatcccgagaaagacaccggtagacatcatttggtc

SEQ ID NO: 123787 - DNA, 147 bp, Glycine max
attgattccgggtaccagtgttgaagaggcttacaacaagctaacagttgaacttgagaaaagtgttcctacattggttggcattgaatgtcccaaggatgaaaaacttcctcgtcgcaaagtttttgataaacctaagacgcgctg

SEQ ID NO: 123788 - DNA, 264 bp, Glycine max
ggagactgaaggaagcagatcgtgacagtggaaggaggtctcagcgttatcagccccaagtggcaagaacaacaagatgaagatgaagatgaagacgaagatgatgaagatgaacaaattccctctcaccctcctcgccgaccaagccatggaaagcgtgaacaagacgaggacgaggacgaagatgaagataaacctcgtcctagtcgaccaagccaaggaaagcgtgaacaagaccaggaccaggacgaggacgaagatgaa

SEQ ID NO: 123789 - DNA, 135 bp, Glycine max
ggaagaaagggtcctttgtcttcaattttgagggccttttactgaatcagtatgtagtactaaaatgtatgctgtaatagctcatagtgagcgaggaaagtatcgggctatttaactatgacttgagctccatct

SEQ ID NO: 123790 - DNA, 179 bp, Glycine max
tgataaaccgcgatcacaggttgccgcaccttaaaaccggaaacaaaagcaatcgttacttgatttcaagaatttctcaatttctttctacttctttgtgtacgatttcttaagggaaagaaaatcactctctgtgctggccacagacttcgtgaatcattttcttttccacttttagt

SEQ ID NO: 123791 - DNA, 258 bp, Glycine max
cttggatatcttcctcagtattgtggatatgaacgagggagctcttcttctaccacacttcaattcaaaggcgatagtgatactggtaattaatgaaggagatgcaaacattgaacttgttggcctaaaagaacaacaacaggagcagcaacaggaagagcaacctttggaagtgcggaaatatagagccgaattgtctgaacaagatatatttgtaatcccagcaggttatccagttgtggtcaacgtacctcaaat

SEQ ID NO: 123792 - DNA, 258 bp, Glycine max
cagaaaacagcatcgaacccgtcgtagcagaaaaacttgtcaccatggtttcttccgacaaggatccacgagaggatgtccttcaagcctggtacatggatgatagtgatgaagatcaaagactcccccaccacaaagaacccaaggagtttgtctcgttggaccaacttgctgaacttggagtccttagctggaaactagatgctgataaccatgaaaatgatccagagctgaagaagattcgtgaagagctggtta

SEQ ID NO: 123793 - DNA, 262 bp, Glycine max
aatcagagtaatattcagatttccggcttattttacgacggcagatacaaattctggactaaacacgagaaaaatcttgctttgacagaagaggaaaagatggaagtgattagaaatagaggcattcctgctgatgttcttgcaaagcgagctcatgaatttgaaaaacatgttgctcatgaaagcctcaaggatcaaattcctgctgttgacaagttgtattctactaaggttaataagtttgcaaaaattatgaacctta

SEQ ID NO: 123794 - DNA, 263 bp, Glycine max
cgcattcgtctcctccagagattcaacaaacgctccccacaacttgagaactttcgagactaccggattgtccagtttcagtcaaaacccaacacaatccttctcctcccaccatgctgacgccgatttcctcctctttgtccttagcgggagatccatacttaccttggtgaacaacgacgacagagactcctacaaccttcaccctggcgatgcccagagaatcccagctggaaccacttactatctggataacctcacga

SEQ ID NO: 123795 - DNA, 255 bp, Glycine max
tgggttttagaacatggtgggatttccatccattgtaacaaccttcgttttctgccacgggagccatagaagcagcacatgcaatagcaacaggagaccttgttagcctttctgaacaagaactcgtagactgtgtggaagaaagcgaaggttgttacaatggatggcactatcaatcgttcgaatgggttttagaacatggtgggattgccactgatgatgattatccttacagagctaaagagggtagatgca

SEQ ID NO: 123796 - DNA, 259 bp, Glycine max
gtttcaaatttcaacccaaggagcttgggaacaaactcctgctccttcttctccttggtcataggcaatgggaggtgcactgggaaagagtgaatcacctagaaagggatcgatgccagaaactaagctcgaggctaaaatggttgaagcaatgcagcggagggaatctcaaggaagttccgtgaaatcattcaacactataatcttgaaattcccaaagattgatgagagccttagaaaatgcaaagccatatttgag

SEQ ID NO: 123797 - DNA, 258 bp, Glycine max
cttaattattaacacttccttagttcaatatggggaagcccttcactctctctctttcttccctttgcttgctactcttgtcgagtgcatgctttgctattagctccagcaagctcaacgagtgccaactcaacaacctcaacgcgttggaacccgaccaccgcgttgagtccgaagctggtttgattcaaacatggaactctcaacaccctgagctgaaatgcgccggtgtcactgtttccaaactcaccctcaacc

SEQ ID NO: 123798 - DNA, 260 bp, Glycine max
ctagttcaatatcctagtataccttaataaataatttaagatactatgatgagagcacggttcccattactgttgctgggacttgttttcctggcttcagtttctgtctcatttggcattgcttactgggaaaaagagaaccccaaacacaacaagtgtctccagagttgcaatagcgagagagactcgtacaggaaccaagcatgccacgctcgttgcaacctccttaaggtggagaaagaagaatgtgaagaaggtga

SEQ ID NO: 123799 - DNA, 189 bp, Glycine max
accaaaaaaatggctttggaaactctcaactcaccaacaacaaccgccccatctttccccttcgacgacccaactattccatgggccaaaagaaaacgttcaaagcgttgttcacgcgaccacccttcggaggaagagtacctcgctctctgcctcatcatgctcgctcgcggcggcaccacccgccgt

SEQ ID NO: 123800 - DNA, 259 bp, Glycine max
gaattgctctcttgcaaattggatactgttactggccaatattatcctgagtgggctccaattaattgtcgagttcatcgacaaccaattcacatcactgaaggaaattatgtcagaaagcaagatgtcagcattgaatatgatgcatgtacaattccaaatgattgtggttcattggttgttgccaaggttggaaatcacaaacaaattgttggtttccatgttgctggaagcaaaggaagactgggatatgcttcat

SEQ ID NO: 123801 - DNA, 259 bp, Glycine max
gtataccttaataaataatttaagatactatgatgagagcacggttcccattactgttgctgggacttgttttcctggcttcagtttctgtctcatttggcattgcttactgggaaaaagagaaccccaaacacaacaagtgtctccagagttgcaatagcgagagagactcgtacaggaaccaagcatgccacgctcgttgcaacctccttaaggtggagaaagaagaatgtgaagaaggtgaaattccacgaccacg

SEQ ID NO: 123802 - DNA, 259 bp, Glycine max
aacactttccttagttcaatatggggaagcccttcttcactctctctctttcttccctttgcttgctactcttgtcgagtgcatgctttgctattacctccagcaagttcaacgagtgccaactcaacaacctcaacgcgttggaacccgaccaccgcgttgagtccgaaggtggtcttattgaaacatggaactctcaacaccctgagctgcaatgcgccggtgtcactgtttccaaacgcaccctcaacctcaacgg

SEQ ID NO: 123803 - DNA, 187 bp, Glycine max
gaaattttgataaaccgcgatcacaggttgccgcaccttaaaaccggaaacaaaagcaatcgttacttgatttcaagaatctctcaatttcttcctacttctttgtgtacgatttcttaagggaaagaaaatcactctctgtgctggccacagacttcgtgaatcattttcttttccacacaacata

SEQ ID NO: 123804 - DNA, 263 bp, Glycine max
gcattcacaggggtgaagcctcccaatggcataagcttctttggaagcctctcaggaagggcctctgatggtcgtctcatcatagattttatgactgaagagttgaagctgccatacctgaatgcatatttggactcggttggatcgaattacaggcatggtgcaaactttgcagtaggtcgctcctccattcggcctggtggttttagtccattccctcttggccttcaagtagctcagttcctactgttcagtttcacaca

SEQ ID NO: 123805 - DNA, 264 bp, Glycine max
gttctttcaatgtggagatattttgttggagatctcgtctttgaagtttctaagatgacttctccctacattaaatgtacagtctctttcttcatagcatttggacatttggctgatgacaccatcaattttgaggcttttccccacaagctggtacattttggagagattcaggaagaagttgtattgaaattttcacaagaggaatttcttacagcttggtcaaaccaggtgcgtcctgcaacaactctggttgctgatggg

SEQ ID NO: 123806 - DNA, 261 bp, Glycine max
ctttaattttctgattttagcaaattaaaatagtagtgttattggtaggttttggcaaagatgttttcagttccaggggtgtcgggaatgcctgaacagaggaggagggcataagataaaagggacagtggtgttgatgaggaagaatgtgttggacttcaacagcgtggctgatcttactaaaggaaatgttgggggactcataggcaccggcctcaacgttgttggctcaacacttgataacctcactgctttcttggg

SEQ ID NO: 123807 - DNA, 246 bp, Glycine max
  unsure (1)..(246): unsure at all n locations
gttaccatttgctcccagcactgagcttaaccgagcttcacaaagatgaatcgggaaaaattgatgaagatggccggttcggttagaactgggggaaagggcaccgtgagaagaaagaagaaggctgtccacaagacaacaaccacagatgacaaaaggcttcagagcaccctgaaganctaggggtgaatgccatcccggctattgaggaggtcaatatctttaaggatgacgtattatccattt

SEQ ID NO: 123808 - DNA, 256 bp, Glycine max
gaaactcctaaaggttccatgttggatcttaaaatttctcaatctaaaattgcacttcccaaaaacacagttggaggaaccattctgcgtagtgatctattggcaaattttttgacagagggcaattttagagcaagtgttgatttgcagcgcactcatcgtattaaaggaatgattaaaatggtggccacagttggtattcctgagaatacaggtatagcattggcctgtgctatgacaagttcttttagggggc

SEQ ID NO: 123809 - DNA, 255 bp, Glycine max
ggccagatgtctttcgatcagtctgtagtagcaattatgtctaaatgcaaagctagcatgagaatgggaaacactgatgctcaaattttgatggttccagggcgtagattcatagctcatggacattttttcaaaaatctgactcagaaagtgcgagtccaaattgttacatctgaaaagagttactggcatgtgtatgatcctgacaagtttcagatgtttgacaacagtgagataggtctttattctaatccc

SEQ ID NO: 123810 - DNA, 255 bp, Glycine max
tcaaatatgatatagttggtgctggttcacattcttcagaagatttttctgaaaaggaagatcaagaaaaacccaaaaagattgatgccagattgagacaaagaatagatcctcaatacaatgaggttcaggctcagatggaaacaaatttgtttaaattgtctcttgatgatgttgaaactcctaaaggttccatgttggatcttaaaatttctcaatctaaaattgcacttcccaaaaacacagttggaggaa

SEQ ID NO: 123811 - DNA, 252 bp, Glycine max
agaagattcgtcacttcaatgaaggagacgtactagtgattcctcctggtgttccttactggacctataacactggcgatgaaccagttgttgccatcagtcttcttgacacctccaacttcaacaatcagtttgatcaaaaccccagagtattttaccttgctgggaacccagatatagagcacccagagaccatgcaacaacagcagcagcagaagagtcatggtggacgcaagcaggggcaacaccagc

SEQ ID NO: 123812 - DNA, 247 bp, Glycine max
gctggtgcaaagaatgctattctcatgaatatgccaaatgctgttctttcaatgtggagatattttgttggagatctcgtctttgaagtttctaagatgacttctccctacattaaatgtacagtctctttcttcatagcatttggaaatttggctgatgataccatcaattttgaggcttttccccacaagctggtgcagtttggagagattcaggaaaaagttgtattgaaattttcacaagagg

SEQ ID NO: 123813 - DNA, 250 bp, Glycine max
gacatcttggttgtttattatacaatagcaactcgatttagaaaatttctaccgcattacattaggtggcatctgtataccttgttgatctacattctcccatcttttctcactgctgaaattaaatataagcggaatcagagtaatattcagatttccggcttattttacgacggcagatacaaattctggactaaacacgagaaaaatcttgctttgacagaagaggaaaagatggaagtgattagaa

SEQ ID NO: 123814 - DNA, 252 bp, Glycine max
ttgtctttgaacactcatcaccatggccaagcttgttctttccctttgtttccttcttttcattggctgcttcgctctgagagagcaggcacagcaaaatgagtgccagatccaaaagctgaatgccctcaaaccggataaccgtatagagtcggaaggtgggttcattgagacctggaaccctaacaacaagccattccagtgtgccggtgttgccctctctcgctgcacccttaaccgcaatgcccttcg

SEQ ID NO: 123815 - DNA, 256 bp, Glycine max
gacgccgcagagtcagagagagagattcactgatacagagcgcagaagaaaatacataaactaatccagaaaatgagcagcggcgctggaaaggtggtgtgtgtcaccggcgcttccggttacattgcttcctggatagtcaaattcctcctcaatcgcggctacaccgttaaggccaccgttcgcgacacaagtgatccgaaaaaaataaaccacttggttggcctcgacggtgctaaggagaggctgcacctct

SEQ ID NO: 123816 - DNA, 260 bp, Glycine max
aaacactcatcagtcatcaccatggccaagctagttttttccctttgttttctgcttttcagtggctgctgcttcgctttcagttccagagagcagcctcagcaaaacgagtgccagatccaaaaactcaatgccctcaaaccggataaccgtatagagtcagaaggagggctcattgagacatggaaccctaacaacaagccattccagtgtgccggtgttgccctctctcgctgcaccctcaaccgcaacgcccttcg

SEQ ID NO: 123817 - DNA, 254 bp, Glycine max
ccattgtctttgaacactcatcaccatggccaagcttgttctttccctttgtttccttcttttcagtggctgcttcgctctgagagagcaggcacagcaaaatgagtgccagatccaaaagctgtatgccctcaaaccggataaccgtatagagtcggaaggtgggttcattgagacctggaaccctaacaacaagccattccagtgtgccggtgttgccctctctcgctgcacccttaaccgcaatgcccttc

SEQ ID NO: 123818 - DNA, 253 bp, Glycine max
agagattcaggaaaaagttgtattgaaattgatggtgtcatcagctaaatttccaaatgctaagatgacttctccctacattaaatgtacagtctctttcttcatagcatttggaaatttggctgatgaattcatcaattttgaggcttttccccacaagctggtgcagtttggagagattcaggaaaaagttgtattgaaattttcacaagaggaatttcttacagcttgagcaactcaggtgcgtcctgca

SEQ ID NO: 123819 - DNA, 248 bp, Glycine max
aacactttccttagttcaatatggggaagcccttcttcactctctctctttcttccctttgcttgctactcttgtcgagtgcatgctttgctattacctccagcaagttcaacgagtgccaactcaacaacctcaacgcgttggaacccgaccaccgcgttgagtccgaaggtggtcttattgaaacatggaactctcaacaccctgagctgcaatgcgccggtgtcactgtttccaaacgcaccctc

SEQ ID NO: 123820 - DNA, 248 bp, Glycine max
attgtctttgaacactcatcaccatggccaagcttgttctttccctttgtttccttcttatcagtggctgcttcgctctgagagagcaggcacagcaaaatgagtgccagatccaaaagctgaatgccctcaaaccggataaccgtatagagacggaaggtgggttcattgagacctggaaccctaacaacacgccattccagtgtgccggtgttgccctctctcgctgcacccttaaccgcaatgcc

SEQ ID NO: 123821 - DNA, 252 bp, Glycine max
cactcatcagtcatcaccatggccaagctagttttttccctttgttttctgcttttcagtggctgctgcttcgctttcagttccagagagcagcctcagcaaaacgagtgccagatccaaaaactcaatgccctcaaaccggataaccgtatagagtcagaaggagggctcattgagacatggaaccctaacaacaagccattccagtgtgccggtgttgccctctctcgctgcaccctcaaccgcaacgcc

SEQ ID NO: 123822 - DNA, 249 bp, Glycine max
aagggagccattgtgacagtgaaaggaggtctgagcgtgataaaaccacccacggacgagcagcaacaaagaccccaggaagaggaagaagaagaagaggatgagaagccacagtgcaagggtaaagacaaacactgccaacgcccccgaggtagccaaagcaaaagcagaagaaatggcattgacgagaccatatgcaccatgagacttcgccacaacattggccagacttcatcacctgacatctac

SEQ ID NO: 123823 - DNA, 177 bp, Glycine max
gataaaccgcgatcacaggttgccgcaccttaaaaccggaaacaaaagcaatcgttacttgatttcaagaatctctcaatttcttcctacttctttgtgtacgatttcttaagggaaagaaaatcactctctgtgctggccacagacttcgtgaatcattttcttttccacacaaca

SEQ ID NO: 123824 - DNA, 250 bp, Glycine max
ctcgagccgcttaagcttgctactgagtttccacactgcataccttatgtcttccgaattcgaagttaatttgcaagatggctaaggaaaaggctcagatcaacattgtggtggttggtcatgtggaccctgaggaggcaaccaccattaacgagctgaagaagcctgttgtggagaaagaagctccagggcatgccatatgagggcatgcacgtacggcctcggaggggaaccagaaaattatgttaac

SEQ ID NO: 123825 - DNA, 242 bp, Glycine max
cttccttagttcaatatggggaagcccttcactctctctctttcatccctttgcttgctactcttgtcgagtgcatgctttgctattagctccagcaagctcaacgagtgccaactcaacaacctcaacgcgttggaacccgaccaccgcgttgagtccgaaggtggtttgattcaaacatggaactctcaacaccctgagctgaaatgcgccggtgtcactgtttccaaactcaccctcaa

SEQ ID NO: 123826 - DNA, 242 bp, Glycine max
gttctaaggagggtgcaagagagaactataaagattgtgacacacaaactcttctttcaagatgaatgatccttgtccagctgaagactatattctttcatcttgaaagaagagtttgtgtgtgacaatctttatagttctaaggagggtgcaagagagaactgaatttgctgtgatggcaactcgtagatatgcttttggaagagctgatgaggccactcatccagagtccatgagggcca

SEQ ID NO: 123827 - DNA, 248 bp, Glycine max
aagcaaagcaatggctacttcaaagttgaaaacccagaatgtggttgtatctctctccctaaccttaaccttggtactggtgctactgaccagcaaggcaaactcagcggaaactgtttctttcagctggaacaagttcgtgccgaagcaaccaaacatgatcctccaaggagacgctattgtgacctcctcgggaaagttacaactcaataaggttgacgaaaacggcaccccaaaaccctcgtctc

SEQ ID NO: 123828 - DNA, 244 bp, Glycine max
tgcggtgattcactcgtactttgcttaatatggcggttgagaagttgagcattgcaaaagatgtgactgaattaattggcaaaactccattggtatatctcaaccgcatcgtggatggctgtgttgccaaagttgctgcgaagctagaaatgatggaaccttgctccagtgtcaaagacaggatagggtatagcatgattgtagatgctgaggagaaaggactcatcacaccgggtgaaagtgt

SEQ ID NO: 123829 - DNA, 244 bp, Glycine max
cttccttagttcaatatgggtaagcccttcactctctctctttcttcccattgcttgctactcttgtcgagtgcatgctttgctattagctccagcaagctcaacgagtgccaactcaacaacctcaacgcgttggaacccgaccaccgcgatgagtccgaagtagtttgattcaaacatgggactctcaacaccctgagctgaaatgcgccggtgtcactgtttccaaactcacgctcaaccg

SEQ ID NO: 123830 - DNA, 250 bp, Glycine max
tctctccattgtctttgaacactcatcaccatggccaagcttgttctttccctttgtttccttcttttcagtggctgcttcgctctgagagagcaggcacagcaaaatgagtgccagatccaaaagctgaatgccctcaaaccggataaccgtatagagtcggaaggtgggttcattgagacctggaaccctaacaacaagccattccagtgtgccggtgttgccctctctcgctgcacccttaaccgca

SEQ ID NO: 123831 - DNA, 252 bp, Glycine max
caacaaacgctccccacaacttgagactcctcgagactaccggattgtccagtttcagtcaaaacccaacacaatcgctctcccccaccatgctgatgccgatttcctcctctttgtccttagcgggagagccatacttaccttggtgaacaacgacgacagagactcctacaaccttcaccctggcgatgcccagagaatcccagctggaaccacttactatttggttaaccctcacgaccaccagaatct

SEQ ID NO: 123832 - DNA, 253 bp, Glycine max
gaatgattaaaatggtggccacagttggtattcctgagaatacaggtatagcattggcctgtgctatgaatagttcttttagggggcgtgccagttctgatatttacaccatctgctctcaagactgtgaattatggaatcctgcttgcacaaaagcaatgactatgtcatttaatccaaacccgtgttctgatgcatggagtttggaatttctgaagcgtaccggatttcattgtgatatcatttgtgtcac

SEQ ID NO: 123833 - DNA, 178 bp, Glycine max
tggaaataatatctaccaatataaataaagcatccagccactgtaatctgcaatgctgataataatgccatgaagtagcactgcctaaacatctacaaagtactctcgtgtactttttatgtgtgtattcctatcacgaagttaataaactattttatcaaatgaatatcgcaatacc

SEQ ID NO: 123834 - DNA, 247 bp, Glycine max
agttcaatatcctagtacactgtattaaagaatttaagatatactatgatgagagcgcggttcccattactgttgctgggagttgttttcctggcatcagtttctgtctcatttggcattgcgtattgggaaaagcagaaccccagtcacaacaagtgcatccgaagttgcaatagcgagaaagactcctacacgaaccaagcatgcctcgctcgttgcaacctccttaaggtggaggaagaagaag

SEQ ID NO: 123835 - DNA, 247 bp, Glycine max
gttttgtgggtagctcctgaggacaaggcgagtttatggtcacaacttcattatgtttcgtgtaataatctggaaatgcaagaagcttatcttgtcaatctcgtaaatgtgttacgagaattgtatttgcacagtccagaggaagctcgccaattgagaaggaaagctctctctcgtattgaatggctgcaaaaagctgatgtgcctaccatagcacagattgaagagttccattcgatgcagagga

SEQ ID NO: 123836 - DNA, 236 bp, Glycine max
caaagaatcaaagaaaggggtggtggctgcttcgaaagcttaataattggttaatttccagaacatcatagttttcgcagcagcaaactaacaaattactcatatcatataataagatggcccgttctctctcgcaagccaaacgtattggtgtccttgttgctcaatctatctccctaattcccgttcatcggcgaggttacgcagtggcatccgatgtatcggtaagagttgga

SEQ ID NO: 123837 - DNA, 248 bp, Glycine max
cccaactaacaataattccttcacttgcagaacttagttctctgttgcatcatcatcatcttcattagtgttagccctaaacttcaccttcaaccatgaccacagtgccaccacacagtgtccaagtgcacacaacaacacaccgctacgaagccggcgtcgtcccgccggctcgttttgaggcgccgcgttacgaagccggcatcaaggcgccctcttccatttaccattccgagagaggtccgacg

SEQ ID NO: 123838 - DNA, 174 bp, Glycine max
attttgataaaccgcgatcacaggttgccgcaccttaaaaccggaaacaaaagcaatcgttacttgatttcaagaatctctcaatttcttcctacttctttgtgtacgatttcttaagggaaagaaaatcactctctgtgctggccacagacttcgtgaataattttcttttcc

SEQ ID NO: 123839 - DNA, 241 bp, Glycine max
gaggctacagtgcttgattttgcggcttgtactcaaaagctttaaagcccggttgatgatgtaatatttctctattgcattctgcctactggtttctgctgcttgtgtcaaattttctctaaactagagtagcccaatgtcatacgtgttatgtgcattggtcatgtatacaagtgtaatactaaaaccttctacataatataagattagttagtttacttgtctctatttcccccccccc

SEQ ID NO: 123840 - DNA, 240 bp, Glycine max
gaggctacagtgcttgattttgggttttgtacacaaaagctttaaagcccggttgatgatgtaatatttctctattgcattctgcctactggtttctgctgcttgtgtcaaattttctctaaactagagtagcccaatagcatacgtgttatgtgcattggtcatgtatacaagtgtaatactaaaaccttctacataatataagattagttagtttacttgtctctattttcttaaact

SEQ ID NO: 123841 - DNA, 244 bp, Glycine max
caaagaatcaaagaaaggggtggtggctgcttcgaaagcttaataatttgtttatttccagaacatcatagttttcgcagcagcaaactaacaaattactcatatcatataataagatggcccgttctctctcgcaagccaaacgtattggtgtccttgttgctcaatctatctccctaattcccgttcatcggcgaggttacgcagtggcatccgatgtatcggtaagagttggattgggtaa

SEQ ID NO: 123842 - DNA, 248 bp, Glycine max
ggcactggtttcaccgcacaagtttatgaactctctccccacttccttcacaaggaatggattatggaacagtgggagaagaattattacattagtgccatagccggggctaataatggatcctcattggttgtaatgtctaaaggtacccagtacttacagcaatcctataaagtcagtgattcgtttccatttaagtggatcaacaaaaaatggagagaaggattttatgtcactgctatggccac

SEQ ID NO: 123843 - DNA, 235 bp, Glycine max
cattgtctttgaacactcatcaccatggccaagcttgttctttccctttgtttccttcttttcagtggctgcttcgctctgagagagcaggcacagcaaaatgagtgccagatccaaaagctgaatgccctcaaaccggataaccgtatagagtcggaaggtgggttcattgagacctggaaccctaacaacaagccattccagtgtgccggtgttgcctctctcgctgaaccct

SEQ ID NO: 123844 - DNA, 248 bp, Glycine max
gtcttattgaaacatggaactctcaacaccctgagctgcaatgcgccggtgtcactgtttccaaacgcaccctcaactgcaacggcctccacttgccatcttactcaccttatccccaaatgatcattgtcgttcaagggaagggagcaattggatttgcatttccgggatgtcctgagacgtttgagaagccacaacagcaatcaagcagaagaggctcaaggtcgcagcagcaactacaagacagt

SEQ ID NO: 123845 - DNA, 248 bp, Glycine max
gtcctgcaacaactctgttggctgatgggtgtccatatttgtatgctatggtgcatgatagttcagtgtctacaataccaggtgattttgtcattggtgttaagttgacaaccataaacaatatgtgtgcatatgggctcaatcctggtatttcaggttctcgtcttttgggcaccattcctcagtccatttcacagcaaactgtttggaatcaaatggcaacagtgagaacaccattgaattttgat

SEQ ID NO: 123846 - DNA, 239 bp, Glycine max
tacatagtagtgttggtgggttgcaaagatgcttgggggtcttctccataggggtcataagataaaagggacagtggtgttgatgcgcaagaatgtgttggacgtgaatagcgtaaccagcgttgggggaattattggtcaaggtctcgacttagttggctcaacactcgatactcttactgccttcttgggccgatccgtgtctctccagcttattagtgctaccaaagctgatgcca

SEQ ID NO: 123847 - DNA, 244 bp, Glycine max
ggagactgaaggaagcagattgtgacagtggaaggaggtctcagcgttatcagccccaagtggcaagaacaacaagatgaagatgaagatgaagacgaagatgatgaagatgaacaaattccctctcaccctcctcgccgaccaagccatggaaagcgtgaacaagacgaggacgaggacgaagatgaagataaacctcgtcctagtcgaccaagccaaggaaagcgtgaacaagaccaggacc

SEQ ID NO: 123848 - DNA, 94 bp, Glycine max
gtcgggagtctttgggctcacggcgctgtcgtccttctcctggatcctgaactacatccgggagacccaaccggcgttcggagaatctggccgc

SEQ ID NO: 123849 - DNA, 230 bp, Glycine max
caaactccctcttatcctccacgacgaccaagccatggaaagcatgaagatgacgaggacgaggacgaagaagaagatcaacctcgtcctgatcaccctccacagcgaccaagcaggcccgaacaacaagaaccacgtggaagaggatgtcagactagaaatggggttgaggaaaatatttgcaccatgaagcttcacgagaacattgctcgcccttcacgtgctgactt

SEQ ID NO: 123850 - DNA, 245 bp, Glycine max
caaataatttttctgcagaattgctctcttgcaaattggatactgttactggccaatattatcctgagtgggctccaattaattgtcgagttcatcgacaaccaattcacatcactgaaggaaattatgtcagaaagcaagatgtcagcattgaatatgatgcatgtacaattccaaatgattgtggttcattggttgttgccaaggttggaaatcacaaacaaattgttggtttccatgttgct

SEQ ID NO: 123851 - DNA, 249 bp, Glycine max
ctcgagccggtggtttgattcaaacatggaactctcaacaccctgagctgaaatgcgccggcgtcactgtttccaaactcaccctcaactgcaatggcctccacttgccatcttactcaccttatccccggatgatcatcatcgcccaagggaaaggagcacttggagttgcaattccaggatgtcctgagacgtttgaggagccacaagaacaatcaaacagaagaggctcaaggtcgcagaagcagc

SEQ ID NO: 123852 - DNA, 246 bp, Glycine max
catttaatccaaacccgtgttctgatgcatggagtttggaatttttgaagcgtaccggatttcactgtgatatcatttgtgtcactggatggactgccaccccaatgcaggatgttcaggttacaattgattggtttatttcctctcaggaatgtgttcctcaggacttattgtgttttaaatccacaaaatccttttgtcttaaataggtggatggggaaactgactttcccccagggcacttcc

SEQ ID NO: 123853 - DNA, 244 bp, Glycine max
gagaatataggaatataagaactaagatggattggatcggagcgtaccgcggaggccagagaagcagggactggtgcgacccttcatcaccattcactgatttgtgggaccctcgtcgtgtcggtgacgctgatgatatcacctcctctctcgcccatgctcacgttgactggcgtgagactgataaagctcatatcttccgtgctgatcttccaggggtgaagaaagaggatctgaaggtgca

SEQ ID NO: 123854 - DNA, 242 bp, Glycine max
aatttggtggaaactcccaaggaatggcaactggatctaccttgtgacaaaattcctagtgtcttgaccacaactgatgagagattggtaggcacagaacatgagggatatgatccttttcttggtggaattcaaaaatatgccactcccatgatgcccctagatgaagaaattctttctaaggttgcacaagatatagttgaggaatggtttgattgtgttgatgaggaggattcctttga

SEQ ID NO: 123855 - DNA, 240 bp, Glycine max
ggtatatcattggcctgtgctatgaatagttcttttagggggcgcgccagttctgatatttacaccatctgctctcaagactgtgaattgtggaatcctgcttgcacaaaagcaatgtctatgtcatttaatccaaacccgtgttctgatgcatggagtttggaatttctgaagcgtactggatttcattgcgatatcatttgtgtcactggatggactgccaccccaatgcaggatgtt

SEQ ID NO: 123856 - DNA, 235 bp, Glycine max
gtgtctacaataccaggtgattttgtcattggtgttaagttgacaaccataaacaatatgtgtgcatatgggctcaatcctggtatttcaggttctcgtcttttgggcaccattcctcagtccatttcacagcaaactgtttggaatcaaatggcaacagtgagaacaccattgaattttgattctagcaatcagagcttttgtcaattttctattgaccttctcggtggaggaa

SEQ ID NO: 123857 - DNA, 240 bp, Glycine max
ctcgagccgtttaaattttgtgaggttcattatgaagaaaagggacaagcttagttgtcaagttggaatcaacccatactccatggaatggactggtttggccaatagattactgagtaagggcaacgatattctgtgttgcgattatgctagttttgatggtttgattaccaagcaagttatgagcaagatggcagaaatgataaacagtctttgtggtggtgatgaaaaattgatgcg

SEQ ID NO: 123858 - DNA, 242 bp, Glycine max
caactgagccatcgcagggcaactcatttgctctcaaacactctttattacaaacggttctttccttattatgctttcaatgttttgggtggacttgacaatgaaggaaagggatgtgtcttcacatatgatgctgttggttcttatgagagggttggatatagctctcagggttctggatccacacttattatgccatttcttgataaccagctgaagtctcctagcccactcctgttacc

SEQ ID NO: 123859 - DNA, 268 bp, Glycine max
cggctcgagctcgagccgaatcggctcgacggctcgaggcaagagggacgggtgctgatcatctcaataaactttgtggtggctgcaagatcacagagtgacaacttcgagtatgtgtcattcaagaccaatgatacacccatgatcggcactcttgcaggggcaaactcattgttgaacgcattaccagaggaagtgattcagcacactttcaacctaaaaagccagcaggccaggcagataaagaacaacaaccctttcagttcct

SEQ ID NO: 123860 - DNA, 268 bp, Glycine max
gtcagaaagcaagatgtcagcattgaatatgatgcatgtacaattccaaatgattgtggttcattggttgttgccaaggttggaaatcacaaacaaattgttggtttccatgttgctggaagcaaaggaagactgggatatgcttcattgataccatatgttgagccagttgtgcaagctcaaagtgctgaagtttactttgacttcttccctgtggaggttgatagtcaagagggagttgctcacattggtgaattgaatctggtgt

SEQ ID NO: 123861 - DNA, 267 bp, Glycine max
caaaggccatagtgatactagtgattaatgaaggagatgcaaacattgatatccacagatctgatgaagatatccaagctccgattctgtgggtttttctcaggagtgatcgtggaactctcataggaacatattcggcaactgagcagacgtgccaaatctagttcaaggataaccatttcctccgaagatgaaccattcaacttgagactccgcaaccccatctattccaacaactttggaaagttctttgagatcaccctgaga

SEQ ID NO: 123862 - DNA, 263 bp, Glycine max
ggctcccaagggcttaatctttttggctgtgttatgcttcttagcactgtcactgagtcgttgtcttgcggaggataatggacttgttatgaacttctacaaggaatcatgccctcaggctgaagacatcatcaaagaacaagtcaagcttctctacaagcgccacaagaacactgctttctcctggctcagaaacatcttccatgactgtgctgttcagagttgtgatgcttcactgttgctggactccacaagaagagctt

SEQ ID NO: 123863 - DNA, 262 bp, Glycine max
cgcagagcatgggttgaaggccagatgtctttcgatcagtctgtagtagcaattatgtctaaatgcaaagccagcatgagaatgggaaacactgatgctcatattttgatggttccagggcgcagattcatagctcatggacattttttcaaaaatctgactcagaaagtgcgagtccaaattgttacatctgaaaagagttactggcatgtgtatgatcctgacaagtttcagatgtttgacaacagtgaaataggcttta

SEQ ID NO: 123864 - DNA, 262 bp, Glycine max
gttaaagttaatgtagcatgtgctgctgttggcttgacatcaagttacactccaactccattgttggaatctggtttgcaaaaagacagagggttaattgtggaatattttggaaggatgtcttacgttgctcataacgttaatcagccccaagagaaagatttgttggagggaaatttttcctttgatattaaatctcgctctagattggaaaaagtttcctctacaaaagcacaatttgttagtggaaaaacctcaaata

SEQ ID NO: 123865 - DNA, 175 bp, Glycine max
gaaattttgataaaccgcgatcacaggttgccgcaccttaaaaccggaaacaaaagcaatcgttacttgatttcaagaatctcttaatttcttcctacttctttgtgtacgatttcttaagggaaagaaaatcactctctgtgctggccacagacttcgtgaatcattttctttt

SEQ ID NO: 123866 - DNA, 107 bp, Glycine max
tttagatggaaggaagaaagtgtaataagacgactctcactactcgatcgctagtgattgtcattgttatatataataatgttatctttcacaacttatcgtaatgc

SEQ ID NO: 123867 - DNA, 265 bp, Glycine max
ggaaccacatactatgtggtcaacctgacaacaacgaaaatctcagattaataacactcgccatacccgttaacaagcctggtagatttgagagtttcttcctatctagcactgaagctcaacaatcctacttgcaaggattcagcaggaacattttagaggcctcctacgataccaaattcgaggagataaacaaggttctgtttagtagagaggaagggcagcagcaaggggagcagaggctgcaagagagcgtgattgtgga

SEQ ID NO: 123868 - DNA, 263 bp, Glycine max
attatggtggcgagagttggtatacctgagcatacaggtatatcagtggcctgtgctatgaatagttcttttacaggggcgtgccagttctgatatttacagcatctgctctcaagactgtggattatggaatcctgcttgcacaaaagcaatgactatgtcatgtaatccagacccgtgttctgatgcgtggagtttggtatttctgaagcgtaccggatttcagtgtgatatcatttgtgtcactggatggacgtgactcc

SEQ ID NO: 123869 - DNA, 262 bp, Glycine max
acgtttgagggagaagagaagttttgtgcaaaatccttgggaacagtaattggttttgccatttcaaagctgggaaagaacattcaagtactttcaagttcctttgtcaataagcaagagcaatacactgtggaaggagtgcagaatcttggagacaaagcagtgatgtgtcatgggctaaatttcagaactgcagtattttactgccataaagtccgtgaaacaacagctttcatggttccattggtggctggtgaggaac

SEQ ID NO: 123870 - DNA, 267 bp, Glycine max
attgtctttgaacactcatcaccatggccaagcttgttctttccctttgtttccttcttttcagtggctgcttcgctctgagagagcaggcacagcaaaatgagtgccagatccaaaagctgaatgccctcaaaccggataaccgtatagagtcggaaggtgggttcattgagacctggaaccctaacaacaagccattccagtgtgccggtgttgccctctctcgctgcacccttaaccgcaatgcccttcgtagacctcctacac

SEQ ID NO: 123871 - DNA, 268 bp, Glycine max
cggtgcaagaaattctccactttatctaaaaaaattcggtgagtttgtgaagacaaaaaatcactagctactcaaaaatggccacagtaggaaggaacgttgcagctcctttgctgtttcttaacttgatcatgtattttattgttcttggctttgctagttggtgcctcaacaggttcatcaatggccaaacttaccaccctagttttggtggaaatggtgcaacatgtttttcttaaccttctccatactagcagctgtctgggca

SEQ ID NO: 123872 - DNA, 273 bp, Glycine max
tctacgagccgattcggctcgagtatacacacacacacacacactatgaataatggcttctatcctccactactttttagacctctctctttctttctctttccttttcttcttatccgactccgtccccattccccaacaccacactaaccctacaaaacctataaaccttctggttctacccgttcaaaatgatgcttccacagggctccattgggccaacctccaaaaaaggacccctctaatgcaagtaccagtcctggtggcctcaat

SEQ ID NO: 123873 - DNA, 254 bp, Glycine max
gcaatggttaaagttaatgtagcatgtgctgctgttggcttgacatcaagttacactccaactccattgttggaatctggtttgcacaaagacagagggctaattgtggaatattttggaaggatgtcttacgttgctcataacgttaatcagccccaagagaaagatttgttggagggaaatttttcctttgatattagatctcgctctagactggtacaagtttcctctacaatagcacaatttgttagtgg

SEQ ID NO: 123874 - DNA, 259 bp, Glycine max
acggtttcctttgttggtgttgctgggaactgttctcctggcatcagtttgtgactcattaaaggtgagagaggatgagaataaccctttctacttgagaagctctaacagcttccaaactctctttgagaaccaaaacggtcgcattcgtctcgtccagagattcaacaaacgctgcccacaacttgagaaccttcgagactaccggattgtccagtttcagtcaaaaccgaacagaatccttctcccccaccatgtg

SEQ ID NO: 123875 - DNA, 263 bp, Glycine max
aacttattaacactttccttagttcaatatggggaagcccttcttcactctctctctttcttccctttgcttgctactcttgtcgagtgcatgctttgctattacctccagcaagttcaacgagtgccaactcaacaacctcaacgcgttggaacccgaccaccgcgttgagtccgaaggtggtcttattgaaacatggaactctcaacaccctgagctgcaatgcgccggtgtcactgtttccaaacgcaccctaaccgcaa

SEQ ID NO: 123876 - DNA, 264 bp, Glycine max
aaaggattctacccgccgctcgatgggaattgcgcttcaaggcgtctcgtagggctaatccgcctcacgagggtcaccaacggcacgtgcctttggggggccgaggccccctactgctggtcggcaaacggacggcgggcgcacgcgtcgcttctagcccggattctgacttagaggcgttcagtcataatccaacgcacggtagcttcgcgccactggcatttcaaccaagcgcgatgaccaattgtgcgaatcaacggttcc

SEQ ID NO: 123877 - DNA, 262 bp, Glycine max
tacacacacacacacacactaagaataatggcttctatcctccactactttttagccctctctctttctttctctttccttttcttcttatccgactcattccccattccccaacaccacactaaccctacaaaacctataaaccttctggttctacccgttcaaaatgatgcttccacagggctccattgggccaacctccaaaaaaggacccctctaatgcaagtaccagtcctggtggacctcaatggaaacacttgtg

SEQ ID NO: 123878 - DNA, 256 bp, Glycine max
cattaataagcaacatgataccaccaatgcctacggcgtagacactggtagacagcattctagtggtggctacgatggtgacactaataaacatcatggaactactggtggctataatgatgacaccaatagacatcatggaactaccggtgtctatggtatagacaccgataggcaacaacatgggactactggtggctatgccggtgacactggtaggcaacatgggaacatcggtggcccttactatggacca

SEQ ID NO: 123879 - DNA, 263 bp, Glycine max
aaagaatttaagatatactatgatgagagcgcggttcccattactgttgctgggagttgttttcctggcatcagtttctgtctcatttggcattgcgtattgggaaaagcagaaccccagtcacaacaagtgcctccgaagttgcaatagcgagaaagactcctacaggaaccaagcatgccacgctcgttgcaacctccttaaggtggaggaagaagaagaatgcgaagaaggtcaaattccacgaccacgacccaacaccc

SEQ ID NO: 123880 - DNA, 261 bp, Glycine max
gtgtatggtgatgataacttaattagtgttcatgaatatgtcaagccttactttagtggttctaaattgaaaagctttctagctagtcataacatcaccattactgatggtattgacaaaactagtgcaactttgcaatttagaaagttagcagattgtgattttctcaagagaaactttaagcagatgtctaatgttttgtgggtggctcctgaggacaaggcgagtttatggtcacaacttcattatgttcgtgtaata

SEQ ID NO: 123881 - DNA, 260 bp, Glycine max; identical to SEQ ID NO: 108312

SEQ ID NO: 123882 - DNA, 162 bp, Glycine max
gaaattttgataaaccgcgatcacaggttgccgcaccttataaccggaaacaaaagcaatcgttacttgatttcaagaatctctcaatttcttcctacttctttgtgtacaatttcttaagggaaagaaaatcactctctgtgctggccacagacttcgtga

SEQ ID NO: 123883 - DNA, 260 bp, Glycine max
  unsure (1)..(260): unsure at all n locations
atttgaaattttgataaaccgcgatcacaggttgccgcaccttaaaaccggaaacaaaagcaatcgttacttgatttcaagaatctctcaatttcttcctacttctttgtgtacgatttcttaagggaaagaaaatcactctctgtgctggccacagacttcgtgaatcattttcttttccacacaacatacgatttcanaacactcncctanntgatataggacttcgtgtcagatttaaacttcttctgttttttctc

SEQ ID NO: 123884 - DNA, 265 bp, Glycine max
gcggtttcctttgttggtgttgctgggaactgttttcctggcatcagtttgtgtctcattaaaggtgagagaggatgagaataaccctttctacttgagaagctctaacagcttccaaactctctttgagaaccaaaacggtcgcattcgtctcctccagagattcaacaaacgctccccacaacttgagaactatcgagactaccggattgtccagtttcagtcaaaacccaacacaatccttctcccccaccatgtgacgccg

SEQ ID NO: 123885 - DNA, 267 bp, Glycine max
gtccaatcccattcccacgccacaacctcgtcaagaagaagagcacgagcagagagaggaacaggaatggcctcgcaaggaggaaaaacgcggagaaaagggaagtgaagaggaagatgaggatgaggatgaggaacaagatgaacgtcaattcccattcccacgcccacctcatcagaaggaagagcgaaagcaagaggaagatgaggatgactagcagcagcgagagagcgaagaaagtgaagatactgagttacgaagacataa

SEQ ID NO: 123886 - DNA, 268 bp, Glycine max
agaggttcaacaaacgctcccaacagcttcagaatctccgagactaccgcattttggagttcaactccaaacccaacacccttcttctcccccaccatgctgacgctgattacctcatcgttatccttaacgggactgccattcttaccttggtgaacaacgacgaccgagactcatacaaccttcaatctggcgatgccctaagagtccctgcaggaaccacatactatgtggttaaccctgacaacgacgagaatctcgaatgata

SEQ ID NO: 123887 - DNA, 269 bp, Glycine max
ctcgagccgtgaagagcgaagagaatggctcccaagggtttaatctttttggctgtgttatgcttctcagcactgtcactgagtcgttgtcttgcggaggataatggacttgttatgaacttctacaaggaatcatgccctcaggctgaagacatcatcaaagaacaagtcaagcttctctacaagcgccacaagactactgctttctcctggctcagaaacatcttccatgactgtgctgttcagagttgtgatgcttcacgttgctg

SEQ ID NO: 123888 - DNA, 263 bp, Glycine max
gttcaatatcctagtataccttaataaataatttaagatactatgatgagagcacggttcccattactgttgctgggacttgttttcctggcttcagtttctgtctcatttggcattgcttactgggaaaaagagaaccccaaacacaacaagtgtctccagagttgcaatagcgagagagtctcgtacaggaaccaagcatgccacgctcgttgcaacctccttaaggtggagaaagaagaatgtgaagaaggtaaattcca

SEQ ID NO: 123889 - DNA, 260 bp, Glycine max
gttcaatatcctagtacacgtattaaagaatttaagatatactatgatgagagcgcggttcccattactgttgctgggagttgttttcctggcatcagtttctgtctcatttggcattgcgtattgggaaaagcagaaccccagtcacaacaagtgcctccgaagttgcaatagcgagaaagactcctacaggaaccaagcatgccacgctcgttgcaacctccttaaggtggaggaagaagaagaatgcgagaaggtca

SEQ ID NO: 123890 - DNA, 114 bp, Glycine max
cttaataaataatttaagatactatgatgagagcacggttcccattactgttgcggggacttgttttcctggctgcagtttctgtctcatttggcattgcttactgggaaaaag

SEQ ID NO: 123891 - DNA, 259 bp, Glycine max
gttctacatagcatctcctttaccaccattctagatatcagagaactttgcagctctcttaggtttttaaaaaacaccacgcaaacagcaagatggccacttccgacagtaacatgctactaaattatgttccagtttatgtgatgctcccactcggagttgtcaatgttgacaatgtttttgaagatccagatggccttaaagaacagctcttgcagcttcgagctgcgggtgttgacggggttatggttatgtgtgg

SEQ ID NO: 123892 - DNA, 260 bp, Glycine max
ctcgagccggaagttttgtggtgtggtttagtgtcaaatggcggcgagtagaagcacttttcctctgatgaaatacttgagagtgcgcgtcgacgctcttccccgcaacactcccttaaccctcgctcccaactttttgattcgccgcttctgtgaagaggttaggggttgttttctcgacaagtctgaggtcacagatcgcgtcatttcctgcgtcaaaaacttccagaaagttgatccttcaaaggttaacctaatgc

SEQ ID NO: 123893 - DNA, 260 bp, Glycine max
ctcagatggaaacaaatttgtttaaattgtctcttgatgatgttgaaactcctaaaggttccatgttggatctgaaaatttctcaatctaaaattgcacttcccaagaacacagttggaggaaccattctgcgtagtgatctattggcaaattttttgacagagggcaattttagagcaagtgttgatttgcagcgcactcatcgtattagaggaatgattaaaatggtggccacagttggtattcctgagatacaggta

SEQ ID NO: 123894 - DNA, 257 bp, Glycine max
acttattaacactttccttagttcaatatggggaagcccttcttcactctctctctttcttccctttgcttgctactcttgtcgagtgcatgctttgctattacctccagcaagttcaacgagtgccaactcaacaacctcaacgcgttggaacccgaccaccgcgttgagtccgaaggtggtcttattgaaacatggaactctcaacaccctgagctgcaatgcgccggtgtcactgtttccaaacgcacctcaac

SEQ ID NO: 123895 - DNA, 258 bp, Glycine max
gacttcttccctgtggaggttgatagtcaagagggagttgctcacattggtgaattgaaatctggtgtctatgttccactgcctacaaaaactaatttggtggaaactcccaaggaatggcaactggatctaccttgtgacaaaattcctagtgtcttgaccacaactgatgagagattggtaggcacagaacatgagggatatgatccttttcttggtggaattcaaaaatatgccactcccatgatgccctagatg

SEQ ID NO: 123896 - DNA, 262 bp, Glycine max
taaacactcatcagtcatcaccatggctaagctagttttttccctttgttttctgcttttcagtggctgctgcttcgctttcagttccagagagcagcctcagtaaaacgagtgccagatccaaaaactcaatgccctcaaaccggataaccgtatagagtcagaaggagggctcattgagacatggaaccctaacaacaagccattccagtgtgccggtgttgccctctctcgctgcacgctcaaccgcaacgtcttcgta

SEQ ID NO: 123897 - DNA, 261 bp, Glycine max
agcaaaatgaccaagttcacaatcctcctcatctctcttctcttctgcatcgcccacacttgcagcgcctccaaatggcagcaccagcaagatagctgccgcaagcagctccagggggtgaacctcacgccctgcgagaagcacatcatggagaagatccaaggccgcggcgatgacgatgatgatgatgacgacgacaatcacattctcaggaccatgcggggaagaatcaactacataaggaggaacgaaggaaagacg

SEQ ID NO: 123898 - DNA, 244 bp, Glycine max
tgcagagaaagaaaaccctagctcaccgtttcaagatgcaaatcttcgttaagaccctcactggtaagaccatcactctcgaagtcgagagttcagataccatagacaatgtaaaggccaaaattcaagacaaggaagggattccaccagatcagcaacggctcatttttgctggcaagcagcttgaggatggacgtacccttgctgattataacatccaaaaggagtcaaccctcaacttggt

SEQ ID NO: 123899 - DNA, 260 bp, Glycine max
ataaaattcttccaccaagttatgggcctccttgtgttgcttcttttctccctcttaggtctctcttctagttccagcatatcaactcatcgttccatattggaccttgacctaaccaagtttaccacacagaaacaggtgtcttcactgttccaactatggaagagtgagcatggacgtgtctaccataaccacgaagaagaggcaaagagacttgagattttcaagaataacttgaactatatcagggactgaatgca

SEQ ID NO: 123900 - DNA, 260 bp, Glycine max
taattattaacacttccttagttcaatatggggaagcccttcactctctctctttcttccctttgcttgctactcttgtcgagtgcatgctttgctattagctccagcaagctcaacgagtgccaactcaacaacctcaacgcgttggaacccgaccaccgcgttgagtccgaaggtggtttgattcaaacatggaactctcaatcccctgagctgaaatgcgccggtgtcactgtttccaaactcaccctcaactgcaa

SEQ ID NO: 123901 - DNA, 258 bp, Glycine max
ctcgagccggaagttttgtggtgtggtttagtgtcaaatggcggcgagtagaagcacttttcctctgatgaaatacttgagagtgcgcgtcgacgctcttccccgcaacactcccttaaccctcgctcccaactttttgattcgccgcttctgtgaagaggttaggggttgttttctcgacaagtctgtcgtcacagatcgcgtcatttcctgcgtcaaaaacttccagaaagttgatccttcaaaggtaaccctaat

SEQ ID NO: 123902 - DNA, 255 bp, Glycine max
ataagaactaagatggattggatcggagcgtaccgcggaggccagagaagcagggactggtgcgacccttcatcaccattcactgatttgtggtaccctcgtcgtgtcggtgacgctgatgatatcacctcctctctcgcccatgctcacgttgactggcgtgagactgataaagctcatatcttccgtgctgatcttccaggggtgaagaaagaggatctgaaggtgcaggtggaggagaataagacctgcaga

SEQ ID NO: 123903 - DNA, 257 bp, Glycine max
caggttcgaaactctcttcaaaaaccaatatggtcgcattcgcgtcctccagaggttcaaccaacgctccccacaacttcagaatctccgagactaccgcattttggagttcaactccaaacccaacaccctccttctccccaaccatgctgacgctgattacctcatcgttatccttaacgggactgccattctttccttggtgaacaacgacgacagagactcctacagacttcaatctggtgatgcctgagagt

SEQ ID NO: 123904 - DNA, 257 bp, Glycine max
  unsure (1)..(257): unsure at all n locations
ctcaattgaatcaaatgatggctgggaattttaatgctcaagcaagggttccttgtctagatctcggtaatgaagactcatcatcaattcatgcagatgagcggaagcccaaaaaaagaggtaggaaacctgccaatgggagagaggagccgctgaaccatgttgaagctgagagacaaagacgtganaagcttaatcagaggttttatgccttgagagctgttgtccctaatatatctaaaatggacaggcatctt

SEQ ID NO: 123905 - DNA, 258 bp, Glycine max
atccttttatgttaaataggtggatggggaaactgactttaccccagggcacttcccgaaatgttaagagattgcctctttctatagggggaggagctggtgcaaagaatgctattctcatgaatatgccaaatgctgttctttcaatgtggagatattttgttggagatctcgtctttgaagtttctaagatgacttctccctacattaaatgtacagtctccttcttcacagcacttggacatttggctatgtcac

SEQ ID NO: 123906 - DNA, 172 bp, Glycine max
gaaattttgataaaccgcgatcacaggttgccgcaccttaaaaccggaaacaaaagcaatcgttacttgatttcaagaatctctcaatttcttcctacttctttgtgtacgatttcttaagggaaagaaaatcactctctgtgctggccacagacttcgtgaatcattttct

SEQ ID NO: 123907 - DNA, 258 bp, Glycine max
gaaaagctttctagctagtcataacatcaccattactgatggtattgacaaaactagtgcaactttgcaatttagaaagttagcagattgtgattttctcaagagaaactttaagcagatttctaatgttttgtgggtggctcctgaggacaaggcgagtttatggtcacaacttcattatgtttcgtgtaataatctggaaatgcaagaagcttatcttgtcaatctcgtaaatgtgttacgagaattgatttgcac

SEQ ID NO: 123908 - DNA, 166 bp, Glycine max
cgcgatcacaggttgccgtactttaaaaccggaaacaaaagcaatcgttacttgatttcaagaatttctcaatttctttctacttctttgtgtacgatttcttaagggaaagaaaatcactctctgtgctggccacagacttcgtgaatcattttcttttccacac

SEQ ID NO: 123909 - DNA, 257 bp, Glycine max
attctgctaccataagagatagctaacaatacaagtggccattttattccattagcatccctgcatttagatacacataaactccatctggctaatttaaagaactagtaacatataacacaaaatacagaaaatttaatttaaagagtctctgaagcttaatacattccccgtgatcttcagccacatgcacaccttttcttgattgttctaaacctctcacgcatcagcgcgacgaccacgctccttctcggcaa

SEQ ID NO: 123910 - DNA, 254 bp, Glycine max
tctcgagccgaatcggctcgagggaaaaaccttcaaatatgatatacttggtgctggttcaatttcttcagatgattttccagaaaaggaagatcaagaaaaacccaaaaagattgatgccagattgagacaaagaatagatcctcaatacaatgaggttcaggctcagatggaaacaaatttgtttaaattgtctcttgatgatgttgaaactcctaaaggttccatgttggatcttaaaatttctcatctaa

SEQ ID NO: 123911 - DNA, 164 bp, Glycine max
attttgataaaccgcgatcacaggttgccgcaccttaaaaccggaaacaaaagcaatcgttacttgatttcaagaatttctcaatttctttctacttctttgtgtacgatttcttaagggaaagaaaatcactctctgtgctggccacagacttcgtgaatcat

SEQ ID NO: 123912 - DNA, 256 bp, Glycine max
gtttttaacaaacagcaacagtacagagcattttgatgcatgtaagtggacaaaatcggaaccacattcctgggaattgatcttcccaatagaggtatgtggtcctaataatggttttgaaatgtggagttctgagtgggcaaatcaaacttcatggcatttgagtttccttattgacaatcccaaacagtctacagtttttgatattctcttgggaatttctcaagattttgagattgctggtaatatcttatgc

SEQ ID NO: 123913 - DNA, 189 bp, Glycine max
actatgatgagagtgcggtttcctttgttggtgttgctgggaactgttttcctggcatcagtttgtgtctcattaaaggtgagagaggatgagaataaccctttctacttgagaagctctaacagcttccaaactctctttgagaaccaaaacggtcgcattcgtctcctccagagattcaacaaacgc

SEQ ID NO: 123914 - DNA, 260 bp, Glycine max
caggtttactgagacaacaatttttacttgcagagatttggacatcttggttgtttattatacaatagcaactcgatttagaaaatttctaccgcattacattaggtggcatctgtataccttgttgatctacattctcccatcttttctcactgctgaaattaaatataagcggaatcagagtaatattcagatttccggcttattttacgacggcagatacaaattctggactaaacacgagataaatcttctttgac

SEQ ID NO: 123915 - DNA, 255 bp, Glycine max
aaaattcttccaccaagttatggagctccttgtgttgcttcttttctccctcttaggtctctcttctagttccagcatatcaactcatcgttccatattggaccttgacctaaccaagtttaccacacagaaacaggtgtcttcactgttccaactatggaagagtgagcatggacgtgtctaccataaccacgaagaagaggcaaagagacttgagattttcaagaataacttgaactatatcagggacatgaa

SEQ ID NO: 123916 - DNA, 187 bp, Glycine max
taagatttgacattttgataaaccgcgatcacaggttgccgcaccttaaaaccggaaacaaaagcaatcgttacttgatttcaagaatctctcaatttcttcctacttctttgtgtacgatttcttaagggaaagaaaatcactctctgtgctggccacagacttcgtgaatcattttcttttccac

SEQ ID NO: 123917 - DNA, 253 bp, Glycine max
ataaaattctgccaccaagttatgggtttcttgtgttgcttcttttctccctcttatgtctctcttctagttctcagcatatcatctcatcgttccatattggaccttgacctaaccaagtttaccacacagaaacaggtctcttcactgttccaactatggaagagtgagcatggacgtgtctaccataaccacgaagaagaggcaaagagacttgagattttcaagaataacttgaactatatcagggaca

SEQ ID NO: 123918 - DNA, 253 bp, Glycine max
cttaattattaacacttcctgagttcaatatggcaaagcccttcactctctctctttcttcccattgcttgctactcttgtcgagtgcatgctttgctattagctccagcaagctcaacgagtgccaactcaacaacctcaacgcgttggaacccgaccaccgcgttgagtccgaaggtggtttgattcaaacatggaactctcaacaccctgagctgaaatgcgccggtgtcactgtttccaaatcaccctc

SEQ ID NO: 123919 - DNA, 251 bp, Glycine max
ttgtctttgaacactcatcaccatggccaagcttgttctttccctttgtttccttcttttcagtggctgcttcgctctgagagagcaggcacagcaaaatgagtgccagatccaaaagctgaatgccctcaaaccggataaccgtatagagtcggaaggtgggttcattgagacctggaaccctaacaacaagccattccagtgtgccggtgttgccctctctcgctgcacccttaaccgcaagcccttcg

SEQ ID NO: 123920 - DNA, 254 bp, Glycine max
gaatttcattgcagagtgttattttgagtatcagcatcaatggctccaattgcagtgggaaacgtgattccagacggcattttggcttacttggatgaagaaaacaaaccccaaactgtctccattcactctctcgccaccggcaagaaagtcatcatctttggggttcccggtgccttcactcctacttgcagcttgaagcacgttcctggcttcattgagagagcagaagagctgaaagggaaggtgtggac

SEQ ID NO: 123921 - DNA, 258 bp, Glycine max
taaaattcttccaccaagttatgggcctccttgtgttgcttcttttctccctcttaggtctctcttctagtaccagcatatcatctcatcgttccatattggaccttgacctaaccaagtttaccacacagaaacaggtctcttcactgttccaactatggaagagtgagcatggacgtgtctaccataaccacgaagaagaggcaaagagacttgagattttcaagaataacttggaactatatcagggcatgaatg

SEQ ID NO: 123922 - DNA, 261 bp, Glycine max
accttcaaatatgatataattggtgctggttcacattcttcagatgattttcctgaaaaggaagatcaagaaaaacccaaaaagattgatgccagattgagacaaagaatagatcctcaatacaatgaggttcaggctcagatggaaacaaatttgtttaaattgtctcttgatgatgttgaaactcttcaaggttccatgttggatcttaaaatttctcagtctaaaattgcacttcccaagaacacagttggaggaact

SEQ ID NO: 123923 - DNA, 254 bp, Glycine max
cttaattattaacacttccttagttcaatatggggaagcccttcactctctctctttcttccctttgcttgctactcttgtcgagtgcatgctttgctattagctccagcaagctcaacgagtgccaactcaacaacctcaacgcgttggaacccgaccaccgcgttgagtccgaaggtggtttgattcaaacatggaactctaaaaaccctgagctgaaatgcgccggtgtcactgtttccaaactcaccctc

SEQ ID NO: 123924 - DNA, 163 bp, Glycine max
ctttgaacactcatcaccatggccaagcttgtactatcgctttgattccttcttatcagtggctgcttcgctctgagagagcaggcacagcacaatgagtgcgagatccaaaagctgaatgccctcataccggataaccgtatagagtcggaaggtgggttca

SEQ ID NO: 123925 - DNA, 200 bp, Glycine max
aaaattcttccaccaagttatgggtttccttgtgttgcttcttttctccctcttaggtctctcttctagttccagcatatcaactcatcgttccatattggaccttgacctaaccaagtttaccacacagaaacaggtgtcttcactgttccaactatggaagagtgagcatggacgtgtctaccatacccacgagaaga

SEQ ID NO: 123926 - DNA, 129 bp, Glycine max
tacatagtagtgttggtgggttgcaaagatgcttgggggtcttctccataggggtcataagataaaagggacagtggtgttgatgcgcaagaatgtgttggacgtgaatagcgtaaccagcgttggggg

SEQ ID NO: 123927 - DNA, 260 bp, Glycine max
aggcaactcaaggtgatgctataagaaactattaccatgaaatgcatgtcatccaggacatgcttgttcctttgtacaaggtgggagatgctttagaatgggttcaccgtgagatggaggtataccccatttggctctgcccacacaaattgttcaagctgcctgtcaaaactatgatttaccccgagccaggattcgaactacaccgcaggcaaggagacacccaaactgctcaaatgtacacagatgttggagtttat

SEQ ID NO: 123928 - DNA, 167 bp, Glycine max
cactcactcactcactcactcgcaagcaaaaagaaagaatcccaggcgaggagaaagatggaggggaaggagcaggatgtgtcgttgggagcgaacaagttccccgagagacagccgattgggacggcggcgcagagccaagacgacggcaaggactacaaggagcc

SEQ ID NO: 123929 - DNA, 251 bp, Glycine max
aattggaaggaactacactactcaaatataagatcccaacccgtggccttcttggattgcggaattcaattttaactgcctcccgagggactgctattctcaacactgtttttgatagctatgggccttgggctggtgaaattagtactcgggatcaaggctcattggttgcttttgaggatggaacaagtacttcttatgcaatctctagttcacaggagaggggacaagatgtttattggtcctggagt

SEQ ID NO: 123930 - DNA, 138 bp, Glycine max
aaaacacagttggaggaaccattctgcgtagtgacctattggcaaattttttgacagagggcaattttagagcaagtgttgatttgcagcgcactcatcgtatcaaaggaatgattaaaatggtggccacagttggta

SEQ ID NO: 123931 - DNA, 255 bp, Glycine max
gtctacaatgatttgggcaacccagataagagtgaaaagttagctcgtccagttcttggagggtctagcacctttccctaccctcgtaggggaagaactggtcgaggtccaacagttacagacccgaatactgagaaacaaggcgaagtattttatgttccaagagatgaaaatttaggtcacttgaagtctaaggatgctcttgagattggaacaaaatctttatctcaaattgtccagcgggcgttcgaatct

SEQ ID NO: 123932 - DNA, 116 bp, Glycine max
caaggaactggtatgaaggtttctataagacatcttggcccatccatgattcagcagatgcagcatgcctgcaatgaatgtaagggtactggagaaactatcaatgacagagatcg

SEQ ID NO: 123933 - DNA, 258 bp, Glycine max
caacaacagcagaaaagtcatggtggacgcaagcaggggcaacaccagcaggaggaagaggaagaaggtggcagcgtgctcagtggcttcagcaaacacttcttggcacaatccttcaacaccaacgaggacatagctgagaaacttcagtctccagacgacgaaaggaagcagatcgtgacagtggaaggaggtctcagcgttatcagccccaagtggcaagaacaacaagatgaagatgaagatgaagacgaagat

SEQ ID NO: 123934 - DNA, 114 bp, Glycine max
tctctccattggtccttaaacactcatcagtcatcaccatggccaagctagttttttccctttgtgttctgcttttcagtggctgctgcttcgctttcagttccagagagcagc

SEQ ID NO: 123935 - DNA, 257 bp, Glycine max
tgctgctgttgctgttggtactaatcagcgtaaaagtggttatccttgtccaccatttaagattattgttctagacgaggcagattcaatgactgaagatgctcagaatgccctgaggcgtacaatggaaacttactctaaagttacgtggttcttttttatatgcaactatgttagcaggattatagaaccacttgcttcaaggtgtgcaaaattcaggttcaaaccattatcagaagaaatcatgagcagccgga

SEQ ID NO: 123936 - DNA, 252 bp, Glycine max
aaaggattctaaccgccgctcgatcgggcttgcgcttcaaggcgtctcgtaaggtcaatccagtccaagagggtcagcaacgaaatttgcctctgaagggccgaagctcctactgctggtcggcaaacggacggcgggcgcacgcgtcgcttctagcccggattctgacttagaggcgttcagtcataatccaacgcacggtagcttcgcgccactggcttttcaaccaagcgcgatggccaattgtgcgaa

SEQ ID NO: 123937 - DNA, 143 bp, Glycine max
ggagattggtttagcattaaagaagttatttgaagagggtgtagtcaagcgagaagatttatggatcacctctaaactctggtgtacagatcatgctccagaagatgtaccagaagctctggacagaacattgagagacttgc

SEQ ID NO: 123938 - DNA, 148 bp, Glycine max
atcgagccgcaatatcctagtataccttaataaataatttaagatactatgatgagaacacggttcccattactgttgctgggacttgttttcctggcttcagtttctgtctcatttggcattgcttactgggaaaaagagaacccca

SEQ ID NO: 123939 - DNA, 244 bp, Glycine max
tctagttcaatatcctagtataccttaataaataatttaagatactatgatgagagcacggttcccattactgttgctgggacttgttttcctggcttcagtttctgtctcatttggcattgcttactgggaaaaagagaaccccaaacacaacaagtgtctccagagttgcaatagcgagaggagactcgtacaggaacaaggcatgcaacgtccgttgaacctccttaaggtggagaaagag

SEQ ID NO: 123940 - DNA, 157 bp, Glycine max
cggctcgagggctacttcaaagttgaaaacccagaatgtggttgtatctctctccctaaccttaaccttggtactggtgctactgaccagcaaggcaaactcagcggaaactgtttctttcagctggaacaagttcgtgccgaagcaaccaaacatg

SEQ ID NO: 123941 - DNA, 256 bp, Glycine max
ggcaacagtgagaacaccattgaattttgattctagcaagcagagcttttgtcaattctctattgatcttcttggtggaggaattttagtggacaaaactggagattggatcacacttatacaaaattctccaattagtaacttgttgagagttgctgcttggaagaaaggctgtttaatggttaagattgtgatgtctgggaatgcagcagtcaaaaggagtgattgggcctcattggtacaagtgtttttaaca

SEQ ID NO: 123942 - DNA, 114 bp, Glycine max
gccaactcaacaacctcaacgcgttggaacccgaccaccgcgttgagtccgaacgtggtcttattgaaacatggaactctcaacaccctgagctgcaatgcgccggtgtcactg

SEQ ID NO: 123943 - DNA, 138 bp, Glycine max
aacttattaacactttccttagttcaatatggggaagcccttcttcactctctctctttcttccctttgcttgctactcttgtcgagtgcatgctttgctattacctccagcaagttcaacgagtgccaaatcaacaa

SEQ ID NO: 123944 - DNA, 257 bp, Glycine max
aagataaaccttttaacttgagaagccgcgaccccatctactccaacaagcttggcaagttctttgagatcaccccagagaaaaacccccagcttcgggacttggatatcttcctcagtattgtggatatgaacgagggagctcttcttctaccacacttcaattcaaaggcgatagtgatactggtaattaatgaaggagatgcaaacattgaacttgttggcctaaaagaacaacaacaggagcagcaacaggaa

SEQ ID NO: 123945 - DNA, 249 bp, Glycine max
cttccttagttcaatatggggaagcccttcactctctctctgtcttccctttgcttgctactcttgtcgagtgcatgctttgctattagctccagcaagctcaacgagtgccaactcaacaacctcaacgcgttggaacccgaccaccgcgttgagtccgaaggtggtttgattcaaacatggaactctcaacaccctgagctgaaatgcgccggtgtcactgtttccaaactcaccctcaaccgcaat

SEQ ID NO: 123946 - DNA, 176 bp, Glycine max
attcaaaccttgctctatactacacagtacatacactagaagaataatggcttccatcctccactactttttagccctatctctttcttgctcttttctattcttcttatccgactcagtcacccctacaaaaccaataaaccttgttgttctacccgttcagaatgatggttcca

SEQ ID NO: 123947 - DNA, 197 bp, Glycine max
ccttcgttcactcttcttctcttgcggctagggttttagcgcagttcttctagatttaaggtagatgggtaaggaaaaggttcacatcagtattgtggttattggccatgttgactctgggaagtccactaccactggccatgtgatctacaagtttggaggcattgacaagcgtgttattgagagattggagaagg

SEQ ID NO: 123948 - DNA, 199 bp, Glycine max
ctccaattagtaacttgttgagagttgctgcttggaagaaaggctgtttaatggttaagattgtgatgtctgggaatgcagcagtcaaaaggagtgattgggcctcattggtacaagtgtttttaacaaacagcaacagtacagagcattttgatgcatgtaagtggacaaaatcggaaccacattcctgggaattgat

SEQ ID NO: 123949 - DNA, 252 bp, Glycine max
gttcaatatcctagtacaccgtattagagaatttaagatatactatgatgagagcgcggttcccattactgtggctgggagttgttttcctggcatcagtttctgtctcatttggcattgcgtattgggaaaagcagaaccccagtcacaacaagtgcctccgaagttgcaatagcgagaaagactcctacaggaaccaagcatgccacgctcgttgcaacctccttaaggtggaggaagaagaagattgcg

SEQ ID NO: 123950 - DNA, 131 bp, Glycine max
cagaataatcaaacttgccatacccgtcaacaaacctggcagatatgatgatttcttcttatctagcactcaagcccaacagtcctacttgcaaggcttcagccataatattctagagacctccttccata

SEQ ID NO: 123951 - DNA, 212 bp, Glycine max
gcgaatcggctcagcttattaacactttccttagagcaatatggggaagcgcttcttcactctctctctagcttccctttgcttgctactcttgtcgagtgcatgctttgctattacctccagcaagttcaacgagtgccaactcaacaacctcacggcgttggaacccgaccaccgcgttgagtccgaaggtggtcttattgaaacatgga

SEQ ID NO: 123952 - DNA, 236 bp, Glycine max
ggaggcaacaactaacagaaaagtcagatgtgtattcatttggggtagttctgtttgaagttctttgcgcaaggcccgtcatagatccaacacttcctagagaaatggtaaacttggcggaatgggcgttgaaatggcagaagaaaggacagttggagcaaatcatagatcaaacacttgcaggacgaatcagaccagattctctgaggaagtttggagaaactgctgagaaatgc

SEQ ID NO: 123953 - DNA, 252 bp, Glycine max
gtcgttcaagggaagggagcaattggatttgcatttccgggaagacctgagacgtttgagaagccacgacagccatcaagcagaagaggctcaaggtagcagcagcaactacaagacagtcaccacaagattcgtcgcttcaatgaaggagacgtactagtgatacctcctggcgttccttaatggaactataacactggcgatgaaccagttgtagccatcagacttcttgaaaccacccgcttcaacaat

SEQ ID NO: 123954 - DNA, 167 bp, Glycine max
atttgggattctgagacgggaaaactgcttaaagagtcagacaaggaatctggccataaaaagaccgtgacatcacttgctaagtctgcggatggttcgcatttccttactggctcccttgacaagtctgctaggctttgggatactagaacattgactcttatcag

SEQ ID NO: 123955 - DNA, 250 bp, Glycine max
cattagcatgggataacaccacaggattctgatcctattgtgttggccttcgggatcggagtaatgattaacagggacagtcgggggcattcgtatttcatagtcagaggtgaaattcttggatttatgaaagacgaacaactgcgaaagcatttgccaaggatgttttcattaatcaagaacgaaagttgggggctcgaagacgatcagataccgtcctagtctcaaccataaacgatgccgaccaggg

SEQ ID NO: 123956 - DNA, 204 bp, Glycine max
tcacaaacaaattgttggtttccatgttgctggaagcaaaggaagactgggatatgcttcattgataccatatgttgagccagttgtgcaagctcaaagtgctgaagtttactttgacttcttccctgtggaggttgatagtcaagagggagttgctcacattggtgaattgaaatctggtgtctatgttccactgcctacaaa

SEQ ID NO: 123957 - DNA, 223 bp, Glycine max
tctctccattgtctttgaacactcatcaccatggccaagcttgttctttccctttgtgtccttcttttcaagtggctgcttcgctctgagagagcaggcacagcaaaatgagtgccagatccaaaagctgaatgccctcaaaccggataaccgtatagagacggaaggtgggttcattgagacctggaatgctaacaacaagccattccagtgtgccggtgtt

SEQ ID NO: 123958 - DNA, 125 bp, Glycine max
cttccatagccccccaaaaatgaagagcaccatcttctttgctgtctttctcttttgtgccttcaccacctcatacctaccttcagccatcgctgatttcgtgctcgataatgaaggtaaccctc

SEQ ID NO: 123959 - DNA, 236 bp, Glycine max
ctctcttgcaaattggatactgttactggccagtattatcctgagtgggctccaattaattgtcgagttcatcgacaaccaattcacatcactgaaggaaattatgtcagaaagcaagatgtcagcattgaatatgatgcatgtacaattccaaatggattgtggttcattggttgttgccaaggttggaaatcacaaacaaattgttggtttccatgttgctggaaccaaaggaa

SEQ ID NO: 123960 - DNA, 147 bp, Glycine max
aaaagatcatacatagtagtgttggtgggttgcaaagatgcttgggggtcttctccataggggtcataagataaaagggacagtggtgttgatgcgcaagaatgtgttggacgtgaatagcgtaaccagcgttggggggaattattg

SEQ ID NO: 123961 - DNA, 223 bp, Glycine max
ttgtctttgaacactcatcaccatggccaagcttgttctttccctttgtttccttcttttcagtggctgcttcgctctgagagagcaggcacagcaaaatgagtgccagatccaaaagctgaatgccctcaaaccggataaccgtatagagtcggaaggtgggttcattgagacctggaaccctaacaacaagccattccagtgtgccggtgttgccctctct

SEQ ID NO: 123962 - DNA, 244 bp, Glycine max
caattagtaacttgttgagagttgctgcttggaagaaaggctgtttaatggttaagattgtgatgtctgggaatgcagcagtcaaaaggagtgattgggcctcattggtacaagtgtttttaacaaacagcaacagtacagagcattttgatgcatgtaagtggacaaaatcggaaccacattcctgggaattgatcttcccaatagaggtatgtggtcctaataatggttttgaaatgtggag

SEQ ID NO: 123963 - DNA, 181 bp, Glycine max
gttcaatatcctagtataccttaataaataatttaagatactatgatgagagcacggttcccattactgttgctgggacttgttttcctggcttcagtttctgtctcatttggcattgcttactgggaaaaagagaaccccaaacacaacaagtgtctccagagttgcaatagcgagagag

SEQ ID NO: 123964 - DNA, 237 bp, Glycine max
cttaatttaacacttccttagttcaatatggggaagcccttcactctctctctttcttccctttgcttgctactcttgtcgagtgcatgctttgctattagctccagcaagctcaacgagtgccaactcaacaacctcaacgcgttggaacccgaccaccgcgttgagtccgaaggtggtgtgattcaaacatggaactctcaacaccctgagctgaaatgcgccggcgtcactgtt

SEQ ID NO: 123965 - DNA, 185 bp, Glycine max
gaaatttgtaaaccgcgatcacaggttgccgcaccttaaaaccggaaacaaaagcaatcgttacttgatttcaagaatttctcaatttctttctacttctttgtgtacgatttcttaagggaaagaaaatcactctctgtgctggccacagacttcgtgaatcattttcttttccacttttagtt

SEQ ID NO: 123966 - DNA, 274 bp, Glycine max
cttaattaaacacttccttagttcaatatggggaagcccttcactctctctctttcttccctttgcttgctactcttgtcgagtgcatgctttgctattagctccagcaagctcaatgagtgccaactcaacaacctcaacgcgttggaacccgaccaccgcgttgagtccgaaggtggtttgattcaaacatggaactcttcaacaccctgagctgaaatgcgccggtgtcactgcttccaaactcaccctcaaccgcaatggcctccacttg

SEQ ID NO: 123967 - DNA, 274 bp, Glycine max
caagaaggaaaacgaaggaagcaacatattgagtggcttcgcccctgaattcttgaaagaagcgttcggcgtgaacatgcagatagtgagaaacctacaaggtgagaacgaagaggaggatagtggagccattgtgacagtgaaaggaggtctaagagtcacagctccagccatgaggaagccacagcaagaagaagatgatgatgatgaggaagagcagccacagtgcgtggagacagacaaaggttgccaacgccaaagcaaaaggagcaga

SEQ ID NO: 123968 - DNA, 272 bp, Glycine max
ctcacggtgtgatagctttgatgaagttcatggactctattcaggcggaattaagctgccaacagatataatcagcaagattagtccactacccgtgcttaaggaaatcttccgaactgatggtgaacaggcccttaagtttcctcctcctaaagtaattcaagtgagtaagtctgcatggatgactgatgaagaatttgcaagagaaatgcttgctggtgtaaatccaaacttgattcgttgtcttaaggatttccctccacgaagcaagc

SEQ ID NO: 123969 - DNA, 271 bp, Glycine max
cagaagtttaaattttgtgaggttcattatgaagaaaagggacaagcttagttgtcaagttggaatcaacccatactccatggaatggactggtttggccaatagattactgagtaagggcaacgatattctgtgttgcgattatgctagttttgatggtttgattaccaagcaagttatgagcaagatggcagaaatgataaacagtctttgtggtggtgatgaaaaattgatgcgtgacaagacacacctgcggttggcttgttgttca

SEQ ID NO: 123970 - DNA, 267 bp, Glycine max
  unsure (1)..(267): unsure at all n locations
cagatagaaaaacctacaaggagagaacgaaggggaagacaagggagccattgtgacagtgaaaggaggtctgagcgtgataaaaccacccacggacgagcagcaacaaagaccccaggaagaggaagaagaagaagaggatgagaagccacagtgcaagggtanagacaacactgccaacgcccccgaggaagccaaagcaaaagcagaagaaatggcattgacgagaccatatgcaccatgagacttcgccacaacattggccag

SEQ ID NO: 123971 - DNA, 271 bp, Glycine max
gtgaaaaggtctaagagtcacagctccagccatgaggaagccacagcaagaagaagatgatgatgatgaggaagagcagccacagtgcgtggagacagacaaaggttgccaacgccaaagcaaaaggagcagaaatggcattgatgagaccatttgcacaatgagacttcgccaaaacattggtcagaattcatcacctgacatctacaaccctcaagctggtagcatcacaaccgccaccagccttgacttcccagccctctggcttctc

SEQ ID NO: 123972 - DNA, 268 bp, Glycine max
gttcaatcctagtataccttaataaataatttaagatactatgatgagagcacggttcccattactgttgctgggacttgttttcctggcttcagtttctgtctcatttggcattgcttactgggaaaaagagaaccccaaacacaacaagtgtctccagagttgcaatagcgagagagactcgtacaggaaccaagcatgccacgctcgttgcaacctccttaaggtggagaaagaagaatgtgaagaaggtgaaattccacgacca

SEQ ID NO: 123973 - DNA, 270 bp, Glycine max
ttctgactcaaagagaaccacgaagacataagaataagaacccttttcacttcaactctaaaaggttccaaactctcttcaaaaaccaatatggccacgttcgcgtcctccagaggttcaacaaacgctcccaacagcttcagaatctccgagactaccgcattttggagttcaactccaaacccaacacccttcttctcccccaccatgctgacgctgattacctcatcgttatccttaacgggactgccattcttaccttggtgaaca

SEQ ID NO: 123974 - DNA, 269 bp, Glycine max
caattctcacttgcagcactgttgcatcatcatcttcattgcaaaaccctaaacttcaccttcaaccatgaccacacaagtaccaccacacagtgtccaagtccacacaacaacacacctctacgaagctggcgtcgtcccccccggagcccgtttcgaaccgccgcgttatgaagccggcgtcaaagcgccctccatttaccattccgagagaggtccaacgacttcccaggtcctcgccgtcctcgccggcctcccggtcggtggca

SEQ ID NO: 123975 - DNA, 269 bp, Glycine max
gacaaccaaacaatatgtgtgcatatgggctcaatcctggtatttcaggttctcgtcttttcgggcaccattcctcagtccatttcacagcaaactgtttggaatcaaatggcaacagtgagaacaccattgaattttgattctagcaagcagagcttttgtcaattctctattgatcttcttggtggaggaattttagtggacaaaactggagattggatcacacttatacaaaattctccaattagtaacttgttgagagttgctgc

SEQ ID NO: 123976 - DNA, 272 bp, Glycine max
acacaatctacaagtacttccttacaatcaaaaccaacaacaactatggcaagttatcaaaagcactacgatgatcagggtcgcaaggttgacgagtatggcaacgttgagaagcaaaccgacgaatacggcaaccctgttcatgctgctagtgtcacctatgtagccaccagaactgctgctggtggttacagtgatgacattaataagcaacatgataccaccaatgcctacggcgtagacactggtagacagcattctagtggtggcta

SEQ ID NO: 123977 - DNA, 240 bp, Glycine max
agcgtcctagtacaccgtattaaagaatttaagatatactatgatgagagcgcggctcccattactgttgctgggagttgttttcctggcatcagtttctgtctcatttggcattgcgtattgggaaaagcagaaccccagtcacaacaagtgcctccgaagttgcaatagcgagaaagactcctacaggaaccaagcatgccacgctcgttgcaacctccttaaggtggaggaagaaga

SEQ ID NO: 123978 - DNA, 262 bp, Glycine max
gtatcttaataaataatttaagatactatgatgagagcacggttcccattactgttgctgggacttgttttcctggcttcagtttctgtctcatttggcattgcttactgggaaaaagagaaccccaaacacaacaagtgtctccagagttgcaatagcgagagagactcgtacaggaaccaagcatgccacgctcgttgcaacctccttaaggtggagaaagaagaatgtgaagaaggtgaaattccacgaccacgaccac

SEQ ID NO: 123979 - DNA, 231 bp, Glycine max
gttcatatcctagtataccttaataaataatttaagatactatgatgagagcacggttcccattactgttgctgggacttgttttcctggcttcagtttctgtctcatttggcattgcttactgggaaaaagagaaccccaaacacaacaagtgtctccagagttgcaatagcgagagagactcgtacaggaaccaagcatgccacgctcgttgcaacctccttaaggtgg

SEQ ID NO: 123980 - DNA, 269 bp, Glycine max
gaaaggcattctcttaacatttcgggggaggagctggtgcaaagaatgctattctcatgaatatgccaaatgctcgttctttcaatgtggagatattttgttggagatctcgtctttgaagtttctaagatgacttctccctacattaaatgtacagtctctttcttcatagcatttggaaatttggctgatgacaccatcaattttgaggcttttccccacaagctggtacagtttggagagattcaggaaaaagttgtattgaaatt

SEQ ID NO: 123981 - DNA, 268 bp, Glycine max
cgcagttgacgagtatggcaacgttgagaagcaaaccgacgactacggcaaccctgttcatgctgctagtgtcacctatgtagccaccagaactgctgctggtggttacagtgatgacattaataagcaacatgataccaccaatgcctacggcgtagacactggtagacagcattctagtggtggctacgatggtgacactaataaacatcatggaactactggtggctataacgatgacaccaatagacatcatggaactaccggt

SEQ ID NO: 123982 - DNA, 266 bp, Glycine max
atactgtggttaaccctgacaacgacgagaatctcagaatgataacactcgccatacccgttaacaaacccggtagatttgagagtttcttcctatctagcactcaagctcaacagtcctacttgcaagggttcagcaagaatattctagaggcctcatacgacaccaaattcgaggagataaacaaggttctgtttggtagagaggaggggcagcaacaaggggaggagaggctgcaagagagtgtgattgtggaatctcaaaga

SEQ ID NO: 123983 - DNA, 266 bp, Glycine max
cgtagaggaagggcagctgctgtacattttcaagacttcaatgctgaggtcctacgtttcctcacaattcctaatttaaatgctaatctttctagagatactcaactatcgtcattcaactccacaatttgtgacaaggcagaagtttgcttttttgctggtgactggagtggaattgataaactgctccctcatgtcagtacagatgcaaaaaataatcaaggtgatggttatgactttattcttatggctgagacagtttactc

SEQ ID NO: 123984 - DNA, 264 bp, Glycine max
cggacagtgcccaatatgttgtcctctacaggaatggaatttactctccacattggaacttgaacgcgaacagtgtgatctatgtgactcgagggaaaggaagagttagagtggtgaactgccaagggaatgcagtgttcgacggtgagctaaggaggggacaattgctagtggtgccgcagaactttgtggtggctgagcaagggggagaacaaggattggaatacgtagtgttcaagacacaccacaacgccgtgagcagct

SEQ ID NO: 123985 - DNA, 267 bp, Glycine max
tctctcattgtctttgaacactcatcaccatggccaagcttgttctttccctttgtttccttcttttcagtggctgcttcgctctgagagagcaggcacagcaaaatgagtgccagatccaaaagctgaatgccctcaaaccggataaccgtatagagtcggaaggtgggttcattgagacctggaaccctaacaacaagccattccagtgtgccggtgttgccctctctcgctgcacccttaaccgcaatgcccttcgtagacctt

SEQ ID NO: 123986 - DNA, 222 bp, Glycine max
acgttcaatatcctagtacaccgtattaaagaatttaagatatactatgatgagagcgcggttcccattactgttgctgggagttgttttcctggcatcagtttctgtctcatttggcattgcgtattgggaaaagcagaaccccagtcacaacaagtgcctccgaagttgcaatagcgagaaagactcctacaggaaccaagcatgccacgctcgttgcaa

SEQ ID NO: 123987 - DNA, 267 bp, Glycine max
ctattgtctttgaacactcatcaccatggccaagcttgttctttccctttgtttccttcttttcagtggctgcttcgctctgagagagcaggcacagcaaaatgagtgccagatccaaaagctgaatgccctcaaaccggataaccgtatagagtcggaaggtgggttcattgagacctggaaccctaacaacaagccattccagtgtgccggtgttgccctctctcgctgcacccttaaccgcaatgcccttcgtagaccttccta

SEQ ID NO: 123988 - DNA, 266 bp, Glycine max
ggtgttgagcttgagtgctagaggcctcatacgacaccaaattcgaggagataaacaaggttctgtttggtagagaggaggggcagcaacaaggggaggagaggctgcaagagagtgtgattgtggaaatctcaaagaaacaaattcgggaactgagcaaacatgccaaatctagttcaaggaaaaccatttcttctgaagataaacctttcaacttgagaagccgcgaccccatctattccaacaagcttggcaagttgtttgag

SEQ ID NO: 123989 - DNA, 259 bp, Glycine max
ctagttcaatatggggaagcccttcttcactctctctctttcttccctttgcttgctactcttgtcgagtgcatgctttgctattacctccagcaagttcaacgagtgccaactcaacaacctcaacgcgttggaacccgaccaccgcgttgagtccgaaggtggtcttattgaaacatggaactctcaacaccctgagctgcaatgcgccggtgtcactgtttccaaacgcaccctcaaccgcaacggcctccacttg

SEQ ID NO: 123990 - DNA, 261 bp, Glycine max
tagaaatgaagagtactatcttctttgctctctttctagtttgtgccttcaccatctcatacctgccttcagccaccgctcagttcgtgctcgacactgatgatgatcctcttcaaaacggtggcacatactatatgttgccagttatgagaggaaagggcggtggaatagaagtagattcaactggaaaagaaatatgccctctcactgttgtgcaatcacccaatgagctcgataaggggattggactagtctttacat

SEQ ID NO: 123991 - DNA, 263 bp, Glycine max
caacaaagaggacaaagcagcagaccacaagaccgtcaccagaagatctataacttcagagagggtgatttgatcgcagtgcctactggtgttgcatggtggatgtacaacaatgaagacactcctgttgttgccgtttctattattgacaccaacagcttggagaaccagctcgaccagatgcctaggagattctatcttgctgggaaccaagagcaagagtttctaaaatatcagcaagagcaaggaggtcatcaaagcca

SEQ ID NO: 123992 - DNA, 259 bp, Glycine max
ttgttgttcctcactgacctcaccatggcgaccagagccaagctttctttagctatcttccttttctttcttttagccttgatttcaaacctagccttgggcaaacttaaagaaaccgaggtcgaagaagatcccgagctcgtaacatgcaaacaccagtgccaacagcaacggcaatacactgagagtgacaagcgaacatgcttgcaacaatgtgacagtatgaagcaagagcgagagaaacaagtcgaagaggaaa

SEQ ID NO: 123993 - DNA, 253 bp, Glycine max
ctaattattaacacttccttagttcaatatgggtaagcccttcactctctctctttcttccctttgcttgctactcttgtcgagtgcatgctttgctattagctccagcaagctcaacgagtgccaactcaacaacctcaacgcgttggaacccgaccaccgcgttgagtccgaaggtggtttgattcaaacatggaactctcaacaccctgagctgaaatgcgccggtgtcactgtttccaaactcaccctc

SEQ ID NO: 123994 - DNA, 255 bp, Glycine max
ttatattcttcattcctctggggtgctgcacaacgaaactcacagaagaaagaagaaaaagaagcgaaactaaagtcagtattcgaaaaagatgagtagcatcggtacaggttacgatctatcggtcaccatttctcccctgatggccgcgttttccagatcgagtatgccgctaaagccgtcgacaacagcgggactgttattgggatcaagtgcaaagatggggttgtgttgggcgttgagaagcttattccg

SEQ ID NO: 123995 - DNA, 268 bp, Glycine max
tgcttcagcattcacaacttcaagtgtgcttgaggcccaaagtagaaagcccaacagatatgaagtttcccaatacagatatcgcaatgtgccaataaagcgcagagcatgggttgaaggccagatgtctttcgatcagtctgtagtagcaattatgtctaaatgcaaagccagcatgagaatggggaaacactgatgctcaaattttgatggttccagggcgcagattcatagctcatggacattttttcaaaaatctgactcagaa

SEQ ID NO: 123996 - DNA, 110 bp, Glycine max
ttattcagtaatagctcatagtgagcgaggaaagtatcgggctcatttaactatgacttgagctccatctatgaataaataaatcagcatatgatgcttttgttttgtgt

SEQ ID NO: 123997 - DNA, 267 bp, Glycine max
aaaaaagagaagaagatgggtttgaagaacaacatggtggtgctaaaggtgtgtttggtgctacttttccttgtggggggtactactagtgccaacttgaggctgagtaagcttggcctgctcatgaaaagtgatcatcatcaacactcaaatgatgatgagtcttcaaaaccatgctgtgatcaatgcgcatgcacaaagtcaaaccctcctcaatgccgctgttcagatatgaggctgaattcgtgccattcagcttgcaaatct

SEQ ID NO: 123998 - DNA, 260 bp, Glycine max
ttcctcactgacctcaccatggcgaccagatccaagctgtgttagacctatcatccgtatctatcttctagccgtgagttcaaacctagccttgggcaaacttaaagaaaccgaggtcgaagaagatcccgagctcgtaacatgcaaacaccagtgccaacagcaacggcaatacactgagagtgacaagcgaacatgcttgcaacaatgtgacagtatgaagcatagcgagagaaacaagtcgaagaggaaactcgcga

SEQ ID NO: 123999 - DNA, 263 bp, Glycine max
aaggtggcagcgtgctcagtggcttcagcaaacacttcttggcacaatccttcaacaccaacgaggacatagctgagaaacttcagtctccagacgacgaaaggaagcagatcgtgacagtggaaggaggtctcagcgttatcagccccaagtggcaagaacaacaagatgaagatgaagatgaagacgaagatgatgaagatgaacaaattccctctcaccctcctcgccgaccaagccatgcgaaagcgtgaacaagacga

SEQ ID NO: 124000 - DNA, 263 bp, Glycine max
caaagcaatggctacttcaaagttgaaaacccagaatgtggttgtatctctctccctaaccttaaccttggtactggtgctactgaccagcaaggcaaactcagcggaaactgtttctttcagctggaacaagttcgtgccgaagcaaccaaacatgatcctccaaggagacgctattgtgacctcctcgggaaagttacaactcaataaggttgacgaaaacggcaccccaaaaccctcgtctcttggtcgcgccctctact

SEQ ID NO: 124001 - DNA, 259 bp, Glycine max
tggtgatgaaaaattgatgcgtgaaaggacacacctgctgttggcttgttgttcaaggatggcaatttgtaagaaagatgtttggagagttgaatgtggaatcccttctggatttccgctcacagttatttgcaatagcatttttaatgagatgctcattagatatagctatgaaaaattactgcgccaggctaaagctccaagtatgtttttacaatctttcaaaaattttgtttctttgtgtgtgtatggtgatgat

SEQ ID NO: 124002 - DNA, 260 bp, Glycine max
tcggaaccacattcctgggaattgatcttcccaatagaggtatgtggtcctaataatggttttgaaatgtggagttctgagtgggcaaatcaaacttcatggcatttgagtatccttattgacaatcccaaacagtctacagtttttgatattctcttgggaatttctcaagattttgagattgctggtaatactcttatgccagctttttctgttccacaggctactgccagatcttctgaaaatgcggaatcctctgc

SEQ ID NO: 124003 - DNA, 261 bp, Glycine max
atacaatgaggttcaggctcagatggaaacaaatttgtttaaattgtctcttgatgatgttgaaactcctaaaggttccatgttggatcttaaaatttctcaatctaaaattgcacttcccaaaaacacagttggaggaaccattctgcgtagtgacctattggcaaattttttgacagaggcaaattttagagcaagtgttgatttgcagcgcactcatcgtatcaaaggaatgattaaaatggtggccacagttggtat

SEQ ID NO: 124004 - DNA, 260 bp, Glycine max
agaaagtcttccatagccccccaaaaatgaagagcaccatcttctttgctctctttctcttttgtgccttcaccacctcatacctaccttcagccatcgctgatttcgtgctcgataatgaaggtaaccctcttgaaaatggtggcacatatcatatcttgtcagacataacagcatttggtggaataagagcagccccaacgggaaatgcaagatgccctctcactgtggtgcaatctcgcaatgagctcgacaaaggg

SEQ ID NO: 124005 - DNA, 256 bp, Glycine max
tctggtcatcgttgggatctccatacgccggatctgctaaaatacgcttgatccatatgggcctcctcgaccacttgtgggacgacaccgtcgccggcccaaggccggaaaacggtctcggcaagctccgaaaacaccacaccttcactttccgacctagctccggcaaggaaacggagggcgttagcgtgagatcgtacggagacgaatcgtcggaggaagcgacgagagtgacgcgtagtatcatgatcgtgaa

SEQ ID NO: 124006 - DNA, 191 bp, Glycine max
gagaaaggattctacccgccgctcgatgggaattgcgcttcaaggcgtctcgtagggctaatccgcctcacgagggtcaccaacggcacgtgcctttggggggccgaggccccctactgctggtcggcaaacggacggcgggcgcacgcgtcgcttctagcccggattctgacttagaggcgttcagtcat

SEQ ID NO: 124007 - DNA, 236 bp, Glycine max
gagctgaagcaaagcaatggctacttcaaagttgaaaacccagaatgtggttgtatctctctccctaaccttaaccttggtactggtgctactgaccagcaaggcaaactcagcggaaactgtttctttcagctggaacaagttcgtgccgaagcaaccaaacatgatcctccaaggagacgctattgtgacctcctcgggaaagttacaactcaataaggttgacgaaaacggaa

SEQ ID NO: 124008 - DNA, 259 bp, Glycine max
gagggagagctgtggcttagagagccctttttgcatgtgctaccacacttttgtccttttgggctctagctagtgctggtagcagtaaataagaatgaataaaagaaacaaaggcttagatgccctttgttaagtgtagaataacgggtatagtaactatgtacccttgtgtaatgagtcactcaagtacctatgcgggaaaagcataaataaaagaagaaattccaataaaaaaaaaaaaaaaaaaagggcggccgcc

SEQ ID NO: 124009 - DNA, 264 bp, Glycine max
gaggtttttaacaaacagcaacagtacagagcattttgatgcatgtaagtggacaaaatcggaaccacattcctgggaattgatcttcccaatagaggtatgtggtcctaataatggttttgaaatgtggagttctgagtgggcaaatcaaacttcatggcatttgagtttccttattgacaatcccaaacagtctacagtttttgatattctcttgggaatttctcaagattttgagattgctggtaatactcttatgccagc

SEQ ID NO: 124010 - DNA, 266 bp, Glycine max
tgagtggagatattttgttggagatctcgtctttgaagtttctaagatgacttctccctacattaaatgtacagtctctttcttcatagcatttggaaatttggctgatgacaccatcaattttgaggcttttccccacaagctggtgcatcttggagagattcaggaaaaagttgtattgaaattttcacaagaggaatttcttacagcttggtcaactcaggtgcgtcctgcaacaactctgttggctgatgggtgcccatatt

SEQ ID NO: 124011 - DNA, 263 bp, Glycine max
gagcaccaattaagctttcaagagacaaactgctttgaaaaatgggatccaaggttgttgcatccgttgcccttctcctctccatcaacattcttttcatttccatggttagctccagcagccactacgatccacagccccaaccttctcacgtcactgctcttattacacgacctagttgtccggatctgagtatttgccccatattttaggcgggtctctaggaaccgtggatgattgttgtgccctcatcggtggtcttg

SEQ ID NO: 124012 - DNA, 261 bp, Glycine max
agctcgagccgcgtcaccagaagatctataacttcagagagggtgatttgatcgcagtgcctactggtgttgcatggtggatgtacaacaatgaagacactcctgttgttgccgtttctattattgacaccaacagcttggagaaccagctcgaccagatgcctaggagattctatcttgctgggaaccaagagcaagagtttctaaaatatcagcaagagcaaggaggtcatcaaagccagaaaggaaagcatcagcaag

SEQ ID NO: 124013 - DNA, 263 bp, Glycine max
gagtttctggggatggtgaagagatgacattgattccgggaaccagtgttgaagaggcttacaacaagctaatagttgaacttgagaaaagtgttcctacattggttggcattgaatgtcccaaggatgagaaacttcctcgtcgcaaaatttttgacaaacctaagacgcgctgcttcactattctccctatggagtttaatcttgtggttcgtcagaagtttttaaattttgtgaggttcattatgaagaaaagggacaag

SEQ ID NO: 124014 - DNA, 261 bp, Glycine max
gagtggagatattttgttggagatctcgtctttgaagtttctaagatgacttctccctacattaaatgtacagtctctttcttcatagcatttggaaatttggctgatgacaccatcaattttgaggcttttccccacaagctggtgcagtttggagagattcaggaaaaagttgtattgaaattttcacaagaggaatttcttacagcttggtcaactcaggtgcgtcctgcaacaactctgttggctgatgggtgccca

SEQ ID NO: 124015 - DNA, 261 bp, Glycine max
gagggcttttccccacaagctggtgcattttggagagattcaggaaaaagttgtattgaaattttcacaagaggaatttcttccagcttggtcaactcaggtgcgtcctgcaacaactctgttggctgatgggtgcccatatttgtatgctatggtgcatgatagttcagtgtctacaataccaggtgattttgtcattggtgttaagttgacaaccataaacaatatgtgtgcatatgggctcaatcctggtatttcagg

SEQ ID NO: 124016 - DNA, 260 bp, Glycine max
gggagcattggttcttttcaatgtttggcaagtaggaagggaccccaaatactgggacagaccatcagaattccgtcccgagaggttcttagaaactggtgctgaaggggaagcagggcctcttgatcttaggggccagcatttccaactcctcccatttgggtctgggaggagaatgtgccctggtgtcaatttggctacttcaggaatggcaacacttcttgcatctcttatccaatgctttgacctgcaagtgctgg

SEQ ID NO: 124017 - DNA, 249 bp, Glycine max
gtcgagctgagaataccagttgctccagtagccggcactaaacaacatggcggacaatgcagtcagcatccgaaccaggaagtttatgacaaacaggcttctctccagaaagcagttcgtcgttgatgtccttcatccagggagggctaatgtttccaaggctgaactgaaggagaagctgggaagaatgtatgacgtgaaagacaccaacactgtatgtgtcttcaagttccgaactcatttgggtgg

SEQ ID NO: 124018 - DNA, 257 bp, Glycine max
agcaaaatgaccaagttcacaatcctcctcatctctcttctcttctgcatcgcccacacttgcagcgcctccaaatggcagcaccagcaagatagctgccgcaagcagctccagggggtgaacctcacgccctgcgagaagcacatcatggagaagatccaaggccgcggcgatgacgatgatgatgacgccgacgacaatcacattctcaggaccatgcggggaagaatcaactacataaggaggaacgaaggaaa

SEQ ID NO: 124019 - DNA, 256 bp, Glycine max
tctcgagccgaatcggctcgagtacaaaagcacaatttgttagtggtaaaaccttcaaataacatataattggtgctggttcacattcttcagatgattttcctgaaaaggaagatcaagaaaaacccaaaaagattgatgccagattgagacaaagaatagatcctcaatacaatgaggttcaggctcagatggaaacaaatttgtttaaattgtctcttgatgatgttgaaactcctaaaggttccatgttgga

SEQ ID NO: 124020 - DNA, 257 bp, Glycine max
gctatgaaaaattactgcgccaggctaaagctccaagtatgtttttacaatctttcaaaaattttgtttctttgtgtgtgtatggtgatgataacttaattagtgttcatgaatatgtcaagccttactttagtggttctaaattgaaaagctttctagctggtcataatatcaccattactgatggtattgacaaaactagtgcaactttgcaatttagaaagttagcagattgtgattttctcaagagaaacttt

SEQ ID NO: 124021 - DNA, 252 bp, Glycine max
  unsure (1)..(252): unsure at all n locations
ggaagcaaaggaagactgggttatgcttcattgataccatatgttgagccagttgtgcaagctcaaagtgctgaagtttactttgacttcttccctgtggaggttgatagtcaagagggagttgctcacattggtgaattgaaatctggtgtctatgttccactgactatacgaattagannggtggaaactcccaaggaatggcaactggatctaccttgtgacaaaattcctagtgtcttgaccacaact

SEQ ID NO: 124022 - DNA, 254 bp, Glycine max
ggctcgaggaagaggaaaagatggaagtgattagaaatagaggcattcctgctgatgttcttgcaaagcgagctcatgaatttgaaaaacatgttgctcatgaaagcctcaaggatcaaattcctgctgttgacaagttgtattctactaaggttaataagtttgcaaaaattatgaaccttagacaaagtgttgttggtgatcttaaacttcttactgatgggaagttgtatgagggtaagcatattcctgta

SEQ ID NO: 124023 - DNA, 275 bp, Glycine max
gaacaatttccactcgaagcaaagcgaatcagagatccaaactcagttctccaactctctgatctcaacttccacttcagcttcacgacccatggccaacgacgattgctgcgccacgcaactcatcgacggcgacggcgagttcaacgtcgccggcctcgacaactttatcagaaccgtcaatctcgcctcctgcggcctctcctatgccgtcgtcgcaatcatgggacctcagagtagcgggaagagcacgttaatgaatcatcttttccaca

SEQ ID NO: 124024 - DNA, 282 bp, Glycine max
ttcggctcgagcagattgagacaaagaatagatcctcaatacaatgaggttcaggctcagatggaaacaaatttgtttaaattgtctcttgatgatgttgaaactcctaaaggttccatgttggatcttaaaatttctcaatctaaaattgcacttcccaaaaacacagttggaggaaccattctgcgtagtgacctattggcaaattttttgacagagggcaattttagagcaagtgttgatttgcagcgcactcatcgtatcaaaggaatgattaaaatg

SEQ ID NO: 124025 - DNA, 271 bp, Glycine max
gggaagttgtatgagggtaagcatattcctgtatctaatattagtgcaggggaaaatcatgtagttcaaatacccctaatggcacaggaggaaattctgtcttctagtgcaagtgatttcagaactgcaatggtgagtaaaaatagcaagcctcaagctactgcaatgcatgtgggagctatagaaattatcattgatcgtttcgcaagtcctgactgcaacatagttggtgcaatgcttttggttgatacttatcataccaatcctgaaa

SEQ ID NO: 124026 - DNA, 258 bp, Glycine max
tcctagtacaccgtattaaagaatttaagatatactatgatgatagcgcggttcccattactgttgctggtagttgttttcctggcatcagtttctgtctcatttggcattgcgtattgggaaaagcagaaccccagtcacaacaagtgcctccgaagttgcaatagcgagaaagactcctacaggaaccaagcatgccacgctcgttgcaacctccttaaggtggaggaagaagaagaatgcggaaaaggtcaaatt

SEQ ID NO: 124027 - DNA, 271 bp, Glycine max
aagaaagtgaaggttctgagtctcaaagagaaccacgaagacataagaataagaacccttttcacttcaactctaaaaggttccaaactctcttcaaaaaccaatatggccacgttcgcgtcctccagaggttcaacaaacgctcccaacagcttcagaatctccgagactaccgcattttggagttcaactccaaacccaacacccttcttctcccccaccatgctgacgctgattacctcatcgttatccttaacgggactgccattct

SEQ ID NO: 124028 - DNA, 271 bp, Glycine max
aagatttgaaattttgataaaccgcgatcacaggttgccgcaccttaaaaccggaaacaaaagcaatcgttacttgatttcaagaatttctcaatttctttctacttctttgtgtacgatttcttaagggaaagaaaatcactctctgtgctggccacagacttcgtgaatcattttcttttccacttttagtttatttactgaacactctcctatttgatataggacttcgtgtcagatttaaacttcttctgtttctttctcagttctc

SEQ ID NO: 124029 - DNA, 270 bp, Glycine max
ccttaataaataatttaagatactatgatgagagcacggttcccattactgttgctgggacttgttttcctggcttcagtttctgtctcatttggcattgcttactgggaaaaagagaaccccaaacacaacaagtgtctccagagttgcaatagcgagagagactcgtacaggaaccaagcatgccacgctcgttgcaacctccttaaggtggagaaagaagaatgtgaagaaggtgaaattccacgaccacgaccactaacacaacac

SEQ ID NO: 124030 - DNA, 265 bp, Glycine max
cttgagaagccgcgaccccatctattccaacaagcttggcaagttgtttgagattaccccagagaaaaaccctcagcttcgggacttggatgtcttcctcagtgttgtggatatgaacgagggagctctttttctgccacacttcaattcaaaggccatagtggtactagtgattaatgaaggagaagcaaacattgaacttgttggcattaaagaacaacaacagaggcagcaacaggaagagcaacctttggaagtgcggaaa

SEQ ID NO: 124031 - DNA, 268 bp, Glycine max
tgataacttaattagtgttcatgaatacgtcaagccttactttagtggttctaaattgaaaagctttctagctggtcataatatcaccattactgatggtattgacaagactagtgcaactttgcaatttagaaagttagcagattgtgattttctcaagagaaactttaagcagatgtctaatgttttgtgggtagctcctgaggacaaggcgagtttatggtcacaacttcattatgtttcgtgtaataatctggaaatgcaagaa

SEQ ID NO: 124032 - DNA, 266 bp, Glycine max
gtcaagccttactttagtggttctaaattgaaaagctttctagctggtcataatatcaccattactgatggtattgacaaaactagtgcaactttgcaatttagaaagttagcagattgtgattttctcaagagaaactttaggcagatgtctaatgttttgtgggtggctcctgaggacaaggcgagtttatggtcacaacttcattatgtttcatgtaataatctggaaatgcaagaagcttatcttgtcaatctcgtaaatgt

SEQ ID NO: 124033 - DNA, 267 bp, Glycine max
atacccccaactaacaataattccttcacttgcagaacttagttctctgttgcatcatcatcatcttcattagtgttagccctaaacttcaccttcaaccatgaccacagtgccaccacacagtgtccaagtgcacacaacaacacaccgctacgaagccggcgtcgtcccgccggctcgttttgaggcgccgcgttacgaagccggcatcaaggcgccctcttccatttaccattccgagagaggtccgacgacctctcaggttct

SEQ ID NO: 124034 - DNA, 267 bp, Glycine max
taacacacaagaattctttgatggaaattttccagtggattcttggttaccaatttttgtgaattgtctttatcctgtaagtcaattaccttcagaagctgtcgttgtaaatgttacatgtggtagtggacgtggtggtttacccaccactgcttggattagttctgcagttaacaatcgctcctcagatatcaacaaaaagattcgcacagcacttgggaaaggtaagaaaattgtttttcttaccagagttgatccttttccagt

SEQ ID NO: 124035 - DNA, 268 bp, Glycine max
  unsure (1)..(268): unsure at all n locations
aattttgataaaccgcgatcacaggttgccgcaccttaaaaccggaaacaaaagcaatcgttacttgatttcaagaatctctcaatttcttcctacttctttgtgtacgatttcttaagggaaagaaaatcactctctgtgctggccacagacttcgtgaatcattttcttttccactcttcgtacaaccctagnanactctgctatttgatataggacttcgtgtcagatttaaacttcttctgtttctttctcagttctctgctta

SEQ ID NO: 124036 - DNA, 270 bp, Glycine max
accttgctctatactacacagtacacacactagaagaataatggcttccatcctccactactttttagccctctctctttcttgctcttttcttttcttcttatccgactcagtcacccctacaaaaccaataaaccttgttgttctacccgttcaaaatgatggttccacagggctccattgggccaacctccaaaaaagaacccctctaatgcaagtaccagtcctggtggacctcaatggaaatcacttgtgggttaactgtgagca

SEQ ID NO: 124037 - DNA, 268 bp, Glycine max
aacgcattgccagaggaagtgattcagcacacttttaacctaaagagccagcaggccaggcaggtgaagaacaacaaccctttcagcttcctggttccacctcaggagtctcagaggagagctgtggcttagagagccctttttgcatgtgctaccacacttttgtccttttgggctctagctagtgctggtagcagtaaataagaatgaataaaagaaacaaaggcttagatgccctttgttaagtgtagaataacgggtatagtaa

SEQ ID NO: 124038 - DNA, 266 bp, Glycine max
aatttttgaagcgtaccggatttcactgtgatatcatttgtgtcactggatggactgccaccccaatgcaggatgttcaggttacaattgattggtttatttcctctcaggaatgtgttcccaggacttattgtgttttaaatccacaaaatccttttgtgttaaataggtggatggggaaactgactttccccaagggcacttcccgaaatgttaagagaatgcctctttctatagggggaggagctggtgcaaagaatgctatt

SEQ ID NO: 124039 - DNA, 268 bp, Glycine max
ggaagatgaggatgaggatgaggaacaagatgaacgtcaattcccattcccacgcccacctcatcagaaggaagagcgaaagcaagaggaagatgaggatgaggagcagcagcgagagagcgaagaaagtgaagattctgagttacgaagacataagaataagaacccttttctcttcggctctaacaggttcgaaactctcttcaaaaaccaatatggtcgcattcgcgtcctccagaggttcaaccaacgctccccacaacttcag

SEQ ID NO: 124040 - DNA, 266 bp, Glycine max
tacagattggccagtaccactgaaaatcatttctggaaccattcttgcaacaattttgcggaacaaccttctggaaactcttttcctttcttagagatgctggtaatgggggtgtttttgttggtaatgttgcttcagcattcacaacttcaagtgtgcttgaggcccaaagtagaaagcccaacagatatgaagtttcccaatacagatatcgcaatgtgccaataaagcgcagagcatgggttgaaggccagatgtctttcgat

SEQ ID NO: 124041 - DNA, 268 bp, Glycine max
aagttatgggtttccttgtgttgcttcttttctccctcttaggtctctcttctagttccagcatatcaactcatcgttccatattggaccttgacctaaccaagtttaccacacagaaacaggtgtcttcactgttccaactatggaagagtgagcatggacgtgtctaccataaccacgaagaagaggcaaagagacttgagattttcaagaataacttgaactatatcagggacatgaatgcaaacagaaaatcaccccattctca

SEQ ID NO: 124042 - DNA, 269 bp, Glycine max
aaccgcaacggcctccacttgccatcttactcaccttatccccaaatgatcattgtcgttcaagggaagggagcaattggatttgcatttccgggatgtcctgagacgtttgagaagccacaacagcaatcaagcagaagaggctcaaggtcgcagcagcaactacaagacagtcaccagaagattcgtcacttcaatgaaggagacgtactagtgattcctcctggtgttccttactggacctataacactggcgatgaaccagttgt

SEQ ID NO: 124043 - DNA, 265 bp, Glycine max
acgcgagggacacgttggaaatgatcaagagggctaagacttcggatgctaaagatccaatggcggtaccagctgatttgggttacgacgagaattgcaagagagtggttgatgaggtcgtgaatgcttatggttgtattgacattctggtcaacaatgcagctgagcaatacgagtgtggaacagtggaggacattgatgagcctaggcttgagagggtctttcgtacaaatatcttctcctatttcttcatgaccaggcatgc

SEQ ID NO: 124044 - DNA, 266 bp, Glycine max
aaccaaagaacacctagagcccaacttagaagggctcactgtagatgaggcaattcaaaacaagagattgttcctactagatcatcatgacccaatcatgccatatttgaggcgaataaatgcaacctccacaaaggcttatgctaccagaaccatccttttcctgaaaaatgacggaactttaaggccacttgccactgagttgagtttgccacatcctcagggagatcaatctggtgcttttagtcaagtttttctgcctgcag

SEQ ID NO: 124045 - DNA, 265 bp, Glycine max
ctccattggtccttaaacactcatcagtcatcaccatggccaagctagttttttccctttgttttctgcttttcagtggctgctgcttcgctttcagttccagagagcagcctcagtaaaacgagtgccagatccaaaaactcaatgccctcaaaccggataaccgtatagagtcagaaggagggctcattgagacatggaaccctaacaacaagccattccagtgtgccggtgttgccctctctcgctgcaccctcaaccgcaa

SEQ ID NO: 124046 - DNA, 262 bp, Glycine max
attcttccaccaagttatgggttaccttgtgttgcttcttttctctctcttaggtctctcttctagttccagcatatcaactcatcgttccatattggaccttgacctaaccaagtttaccacacagaaacaggtgtcttcactgttccaactatggaagagtgagcacggacgtgtctaccataaccacgaagaagaggcaaagagacttgagattttcaagaataacttgaactatatcagggacatgaatgcaaacaga

SEQ ID NO: 124047 - DNA, 265 bp, Glycine max
  unsure (1)..(265): unsure at all n locations
gggatggtgaagagatgacattgattccgggaaccagtgttgaagaggcttacaacaagctaacagttgaacttgagaaaagtgttcctacattggttggcattgaatgtcccaaggatgaaaaacttcctcgtcgcaaagtttttgataaacctaagacgcgctgcttcactattctccctatggagtttaatcttgtggttcgtcagaagtttttaaattttgtgaggttcattatgnatgaaagggacaagcttagttgtca

SEQ ID NO: 124048 - DNA, 264 bp, Glycine max
caatacaatgaggttcaggctcagatggaaacaaatttgtttaaattgtctcttgatgatgttgaaactcctaaaggttccatgttggatcttaaaatttctcaatctaaaattgcacttcccaaaaacacagttggaggaaccattctgcgtagtgacctattggcaaattttttgacagagggcaattttagagcaagtgttgatttgcagcgcactcatcgtatcaaaggaatgattaaaatggtggccacagttggtatt

SEQ ID NO: 124049 - DNA, 264 bp, Glycine max
gtggaggagacataatttaaccgctctctatcacagatatttgcaaatgggttccaagaggccgttgtggaacattggaagtctgcctttaggctggctcactttctataacaagactaaggttttggacagacggtggcacattcttggccttggttatgactcaggtgtcgataaaaacgagattgaaggggctgccgttatacactacgatggaattaggaaaccatggttggacattgcaatgggaagatacagaagtta

SEQ ID NO: 124050 - DNA, 268 bp, Glycine max
ttcttccaccaagttatgggtttccttgtgttgcttcttttctccctcttaggtctctcttctagttccagcatatcaactcatcgttccatattggaccttgacctaaccaagtttaccacacagaaacaggtgtcttcactgttccaactatggaagagtgagcatggacgtgtctaccataaccacgaagaagaggcaaagagacttgagattttcaagaataacttgaactatatcagggacatgaatgcaaacagaaaatcac

SEQ ID NO: 124051 - DNA, 267 bp, Glycine max
caaacaaccagctcctggcgattggttcctccaactccaccgcgtcctcctggatcgaccgaaacgtcgtcgcttactacccccaaaccctcgtcagcggaatctccgtcggcgacgaggttctgaccagcgtcccctcctccgcccccctcattctccctgccctcgagtccctctacaacgccctcgtcgcctccaacctccaccaacaaatcaaggtctcaacccctcacgctgcttccatcattctcgaccctatccctccct

SEQ ID NO: 124052 - DNA, 264 bp, Glycine max
tgaaattttgataaaccgcgatcacaggttgccgcaccttaaaaccgtaaacataagcaatcgttacttgatttcaagaatttctcaatttctttctacttctttgtgtacgttttcttaagggatagagaatcactctctgtgctggccacagacttcgtgaatcattttcttttccacatctcgtacgattcttgcacacgctcttatttgatattggactgcgcgatagatttagactacatctgtcacactctcagtgct

SEQ ID NO: 124053 - DNA, 261 bp, Glycine max
caacaatgaagacactcctgttgttgccgtttctattattgacaccaacagcttggagaaccagctcgaccagatgcctaggagattctatcttgctgggaaccaagagcaagagtttctaaaatatcagcagcagcagcaaggaggttcccaaagccagaaaggaaagcaacaagaagaagaaaacgaaggaagcaacatattgagtggcttcgcccctgaattcttgaaagaagcgttcggcgtgaacatgcagatagt

SEQ ID NO: 124054 - DNA, 262 bp, Glycine max
ttcgtattgtcgcagagatagataaccctagctcaccgattcaatatgcaaatcgtcgttaagaccctcactggtaagaccatcactctcgatgtcgagatgtcatacaccgtagtcaatgtagaggccaaaattcaatactaggaagggattccactatatcagcatcggctcatatatgctggcaagcagcttgaggatggacgtacccttgatgattataacatccaaaaggagtccactctccactttgtttttcgtc

SEQ ID NO: 124055 - DNA, 262 bp, Glycine max
tgcagatgagcttatcgccaatgctgcgtacattggcactcctggaaagggtattcttgctgctgatgagtcaacagggacaattggcaagcgtttggccagcatcagtgtagagaacattgaatccaacaggcgagctcttagggagctgcttttcactgctcctggtgttcttcaatatctcagtggtgtcatcctctttgaggaaaccctctaccagagcacagctgcaggcaagccctttgtgaatgtcttgaaggaa

SEQ ID NO: 124056 - DNA, 263 bp, Glycine max
acttattaacactttccttagttcaatatggggaagcccttcttcactctctctctttcttccctttgcttgctactcttgtcgagtgcatgctttgctattacctccagcaagttcaacgagtgccaactcaacaacctcaacgcgttggaacccgaccaccgcgttgagtccgaaggtggtcttattgaaacatggaactctcaacaccctgagctgcaatgcgccggtgtcactgtttccaaacgcaccctcaaccgcaa

SEQ ID NO: 124057 - DNA, 254 bp, Glycine max
ggccgatccgtgtctctccagcttattagtgtcaccaaagctgatgccaacggaaaagggaaacttggaaaggctacctttttggaaggtatcattacttcattgccaactttgggagcaggccaatctgcattcaaaattaattttgaatgggatgatgggagtggaattcctggagcattttatatcgagaactttatgcaaactgagtttttccttgtgagtttgactcttgaagacattccaaaccatgg

SEQ ID NO: 124058 - DNA, 265 bp, Glycine max
ctcgagccgctcttcttctaccacacttcaattcaaaggcgatagtgatactggtaattaatgaaggagatgcaaacattgaacttgttggcctaaaagaacaacaacaggagcagcaacaggaagagcaacctttggaagtgcggaaatatagagccgaattgtctgaacaagatatatttgtaatcccagcaggttatccagttgtggtcaacgctacctcaaatctgaatttctttgctattggtattaatgccgagaacaa

SEQ ID NO: 124059 - DNA, 264 bp, Glycine max
ctcgagccgctcgagccgtcctcactgaccaagccatggcgatgagaaccaaactttctttagctatctacttcttttttcttttagccttattttcaaacctagcctttggcaaatgtaaagaaaccgaggtagaagaagaagaccctgagctcgtaacatgcaaacaccaatgccaacagccacagcaatacactgagggtgacaagcgggtatgcttgcaaagatgtgacaggtatcatcgtatgaagcaagagcgagaga

SEQ ID NO: 124060 - DNA, 264 bp, Glycine max
cctcgagccgattcggctcgaggcctccacttgccatcttactcagcttatccccggatgatcatcatcgcccaagggaaaggagcacttggagttgcaattccaggatgtcctgagacgtttgaggagccacaagaacaatcaaacagaagaggctcaaggtcgcagaagcagcagctacaggacagtcaccagaagattcgtcacttcaatgaaggagacgtactcgtgattcctcctggtgttccttactggacctataac

SEQ ID NO: 124061 - DNA, 261 bp, Glycine max
ctagtacaccgtattaaagaatttaagatatactatgatgagagcgcggttcccattactgttgctgggagtcgttcacctggcatcagtttctgtctcatttggcattgcgtattgggaaaagcagaaccccagtcacaacaagtgcctccgaagttgcaatagcgagaaagactcctacagccaccaagcatgccacgctcgttgcaacctccttaaggtggaggaagaagaagaatgcgaagaaggtcaaattccacg

SEQ ID NO: 124062 - DNA, 264 bp, Glycine max
ctcgagccgctcgagccgaatcggctcgagtctgtgttgcgattatgctagttttgatggactgattacacagcaagttatgagcaagatggcagaaatgatcaacagtctttgtggtggtgatgaaaaactgatgcgtgaaaggacacacctgctgttggcttgttgttcaaggatggcaatttgtaagaaagatgtttggagagttgaatgtggaatcccttctggatttccgctcacagttatttgcaatagcatttttaa

SEQ ID NO: 124063 - DNA, 106 bp, Glycine max
aattttgataaaccgcgatcacaggttgccgcaccttaaaaccggaaacaagagcaatcgttagcttgatttcaagaatctctcaatttcttcctacttctttgtg

SEQ ID NO: 124064 - DNA, 261 bp, Glycine max
atgggagggtccagtggtagcaccatcacgccacaacctcaagctttttgctgataaggagacatatgaagcaatggatgaaatagcaaagcttcaaaacaagaatgctcatcagttggccatggaagttatccgtaattatgttgctaccaaccaaaatggaaagggtgaataattccatttacttagcgaaggaagatgtatgtgatgctgctttatggttgacaggaagggtggataggctactgaacacaactctgt

SEQ ID NO: 124065 - DNA, 262 bp, Glycine max
ctcttgcaaattggatactgttactggccaatattatcctgagtgggctccgattaattgtcgagttcatcgacaaccaattcacatcactgaaggaaattatgtcagaaagcaagatgtcagcattgaatatgatgcatgtacaattccaaatgattgtggttcattggttgttgccaaggttggaaatcacaaacaaattgttggtttccatgttgctggaagcaaaggaagactgggatatgcttcattgataccatat

SEQ ID NO: 124066 - DNA, 265 bp, Glycine max
tctcgagctgctcgagccgctcgagcggtccaaggccgtcggctgctcctccaccggcgatacttcctccggtctctccgcctactgcgcttcctccggaatcccctccatcgtcttcctccccgccaacaagatcttcaccgcgcaactaatccaatcggtttcaaacggctctttagtcttaagcatcaacaccgattttgacggctgcatgaagctgattcgtgaaatcaccgccgaattacccatctatttggcgaattcg

SEQ ID NO: 124067 - DNA, 261 bp, Glycine max
ctctccattgtctttgaacactcatcaccatggccaagcttgttctttccctttgtatccttcttttcagtggctgcttcgctctgagagagcaggcacagcaaaatgagtgccagatccaaaagctgaatgccctcaaaccggataaccgtatagagacggaaggtgggttcattgagacctggaaccctaacaacaagccattccagtgtgccggtgttgccctctctcgctgcacccttaaccgcaatgcccttcgta

SEQ ID NO: 124068 - DNA, 250 bp, Glycine max
attttgataaaccgcgatcacaggttgccgcaccttaaaaccggaaacaaaagcaatcgttacttgatttcaagaatttctcaatttctttctacttctttgtgtacgatttcttaagggaaagaaaatcactctctgtgctggccacagacttcgtgaatcattttcttttccacatgacgtacaaccctagatcactctcctatatgatatatgacttcgtttcagatttatacttcttctgtacctt

SEQ ID NO: 124069 - DNA, 260 bp, Glycine max
cttcgagccgattcggctctactagtacaccttattatagaattaaagatatactatgatgagagcgcggttcccattacagttgctgggagttgttttcctggcatcagtttctgtctcatttggcattgcgtattgggaaaagcagaaccccagtcacatcaagtgcctccgaagttgcaatagcgagaaagactcctacaggaaccaagcatgccacgctcgttgcaacctccttaaggtggaggaagaagaagaat

SEQ ID NO: 124070 - DNA, 260 bp, Glycine max
gtctgaaggatgcaataacggggcaaatcagagctgcaaacaagagtttgggggaagaggattgctttggtgctaaaattgaagggtctaggctcaaatatgtggatcatcatctaaggcaacagagagctattcaacaattgggaatgatcaatcacaatgcttggagaccccagagaggattgcctgagagatcggtttctgttctgcgtgcttggctctttgaacactttctccacccttatcccaaggactcggac

SEQ ID NO: 124071 - DNA, 260 bp, Glycine max
ttccttgtgttgcttcttttctccctcttaggtctctcttctagttccagcatatcaactcatcgttccatattggaccttgacctaaccaagtttaccacacagaaacaggtgtcttcactgttccaactatggaagagtgagcatggacgtgtctaccataaccacgaagaagaggcaaagagacttgagattttcaagaataacttgaactatatcagggacatgaatgcaaacagaaaatcaccccattctcatcg

SEQ ID NO: 124072 - DNA, 262 bp, Glycine max
caagctggtgcagtttggagagattcaggaaaaagttgtattgaaattttcacaagaggaatttcttacagcttggtcaactcaggtgcgtcctgcaacaactctgttggctgatgggtgcccatatttgtatgctatggtgcatgatagttcagtgtctacaataccaggtgattttgtcattggtgttaagttgacaaccataaacaatatgtgtgcatatgggctcaatcctggtatttcaggttctcgtcttttgggc

SEQ ID NO: 124073 - DNA, 260 bp, Glycine max
ctcgagccgccctgtcattctcaagttggctgatgctcttgacatagctgtgaaatctgtgacggtacactcgtggaagcttcattttccctggggcacagtcttttcctcaccgcagtttttccgaggaggtttctgttcttgacagctatttcagcaaccttggttctggtagcaaagcatatgttacgggtgacccttcaaagtcacagatttggcacatctactctgcaagtgcacagaccaaaggatcatctgaa

SEQ ID NO: 124074 - DNA, 258 bp, Glycine max
gagccgcaagaatctcagcaacgaggacgaagccagaggccccaagaccgtcaccaaaaggtacatcgcttcagagagggtgatttgatcgcagtgcctactggtgttgcatggtggatgtacaacaatgaagacactcctgttgttgccgtttctattattgacaccaacagcttggagaaccagctcgaccagatgcctaggagattctatcttgctgggaaccaagagcaagagtttctaaaatatcagcagcag

SEQ ID NO: 124075 - DNA, 259 bp, Glycine max
gtggcatctgtataccttgttgatctacattctcccatcttttctcactgctgaaattaaatataagcggaatctgagtaatattcatatttccggcttattttacgacggcagatacaaattctggactaaacacgagaaaaatcttgctttgacagacgaggaaaagatggaagtgattagaaatagaggcattcctgctgatgttcttgcaaagcgagctcatgaatttgaaaaacatgttgctcatgacagcctc

SEQ ID NO: 124076 - DNA, 103 bp, Glycine max
ctccattggtccttaaacattcatcagtcatcaccatggccaagctagttttttccctttgttatctgcttatcagtggctgctgcttcgctttcagttccag

SEQ ID NO: 124077 - DNA, 257 bp, Glycine max
aaattatgaaccttagacatagtgttgttggtgatcttgaacttcttactgatgggaagttgtatgagggtaagcatattcctgtatctaatataagtgcaggggagaatcatgtagttcaaatacccctaatggcacaggaggaaattctgtcttctagtgcaagtgatttcagaactgcaatggtgagtagaaatagcaagcctcaagctactgcaatgcatgtgggagctatagatattatcattgatagtttc

SEQ ID NO: 124078 - DNA, 102 bp, Glycine max
ctcgagccgttgaaattttgataaaccgcgatcacaggttgccgcaccttaaaaccggaaacaaaagcaatcgttacttgatttcaagaatctctcaatttg

SEQ ID NO: 124079 - DNA, 252 bp, Glycine max
cagatatagagcacccagagaccatgcaacaacagcagccggagaagagtcatggtggacgcaagcaggggcaacaccagcagcaggaggaagaaggtggcagtgtgctcagtggcttcagcaaacatttcttagcacaatccttcaacaccaacgaggattgtgctgagaaacttcggtctccagatgacgaaaggaagcagatcgtgacagtggagggaggcctcagcgttatcagccccaagtggcaag

SEQ ID NO: 124080 - DNA, 258 bp, Glycine max
aagccttactttagtggttctaaattgaaaagctttctagctggtcataatatcaccattactgatggtattgacaagactagtgcaactttgcaatttagaaagttagcagattgtgattttctcaagagaaactttaagcagatgtctaatgttttgtgggtagctcctgaggacaaggcgagtttatggtcacaacttcattatgtttcgtgtaataatctggaaatgcaagaagcttatcttgtcaatctcgta

SEQ ID NO: 124081 - DNA, 257 bp, Glycine max
caggtttactgagaaaacaatttttacttgcagagatttggacatcttggttgtttattatacaatagcaactcgatttagaaaatttctaccgcattacattaggtggcatctgtataccttgttgatctacattctcccatcttttctcactgctgaaattaaatataagcggaatcagagtaatattcagatttccggcttattttacgacggcagatacaaattctggactaaacacgagataaatcttgctt

SEQ ID NO: 124082 - DNA, 256 bp, Glycine max
cttaattattaacacttcctgagttcaatatggggaagcccttcactctctctcaatcttccctttgcttgctactcttgtcgagtgcatgctttgctattagctccagcaagctcaacgagtgccaactcaacaacctcaacgcgttggaacccgaccaccgcgttgagtccgaaggtggtttgattcaaacatggaactctcaacaccctgagctgaaatgcgccggtgtcactgtttccagactcaccctcaa

SEQ ID NO: 124083 - DNA, 259 bp, Glycine max
cacacaactactacaagtacttccttacaatcaaaaccaacaacaactatggcaagttatcaaaagcactacgatgatcagggtcgcaaggttgacgagtatggcaacgttgagaagcaacccgacgaatacggcaaccctgttcatgctgctagtgtcacctatgtagccaccagaactgctgctggtggttacagtgatgacattaataagcaacatgataccaccaatgcctacggcgtagacactggtagacagc

SEQ ID NO: 124084 - DNA, 251 bp, Glycine max
ttgcagaccgagctagctagctagcaagcaagcacagagatggaggcaaagcgaggccatgccctcatgtgcttggcacgtgtttcactcttcctctgcgctctaaccctatccgctgctcacggaagcaccacggttcaatacttcgcgagaaatttgaaactcggggacaacgagcttctgcgcacggagaagaagttcaaggttttcatggagaattacgggaggagctactccacagaggaggagta

SEQ ID NO: 124085 - DNA, 256 bp, Glycine max
tctctccattgtctttgaacactcatcaccatggccaagcttgttctttccctttgtttccttcttttcagtggctgcttcgctctgagagagcaggcacagcaaaatgagtgccagatccaaaagctgaatgccctcaaaccggataaccgtatagagtcggaaggtgggttcattgagacctggaaccctaacaacaagccattccagtgtgccggtgttgccctctctcgctgcacccttaaccgcaatgccc

SEQ ID NO: 124086 - DNA, 259 bp, Glycine max
agcaaaatgaccaagttcacaatcctcctcatctctcttctcttctgcatcgcccacacttgcagcgcctccaaatggcagcaccagcaagatagctgccgcaagcagctccagggggtgaacctcacgccctgcgagaagcacatcatggagaagatccaaggccgcggcgatgacgatgatgatgatgacgacgacaatcacattctcaggaccatgcggggaagaatcaactacataaggaggaacgaaggaaaag

SEQ ID NO: 124087 - DNA, 256 bp, Glycine max
ggaagcactgcctgtgttgccgttattagaaacaaccaacttgttgttgcaaatgctggtgattcgcgttgtgtgatatctcggaagggccaggcatacaatttgtctagagaccacaaacctgatcttgagattgagaaggacagaatcttaaaagctggtggttttattcatgcaggacgagttaatggaagtttaaatcttgcaagagctattggtgacatggaatttaaacagaataagtttcttcctgctg

SEQ ID NO: 124088 - DNA, 257 bp, Glycine max
atcaatagcaaaatgaccaagttcacaatcctcctcatctctcttctcttctgcatcgcccacacttgcagcgcctccaaatggcagcaccagcaagatagctgccgcaagcagctccagggggtgaacctcacgccctgcgagaagcacatcatggagaagatccaaggccgcggcgatgacgatgatgatgatgacgacgacaatcacattctcaggaccatgcggggaagaatcaactacataaggaggaacga

SEQ ID NO: 124089 - DNA, 256 bp, Glycine max
gacatagaaaccggtagcgtagccagcttcgccgcttccttcaacttcaccttctatgcccctgacacaaaaaggcttgcagatgggcttgccttctttctcgcaccaattgacactaagccactaacacatgcaggttatcttggtcttttcaacgcaaacgagtctggtgatcaagtcgtcgctgatgagtttgacactttccggaaatcttgggatccaccacatccacacatcggaattaacgtgaattcta

SEQ ID NO: 124090 - DNA, 255 bp, Glycine max
aattcataattcctcaccttcaaatctccattctgcttcattttctgcaaagaacaaacccctttctgaagaaagaatatagtcttcagctggacaaggatcatttattttgaaagacaagtttgtgtgacaatcttatagttctaagaagggtgcaagtgagagctttgctgtgatggcaacccgtagatattcttttggaagggctgatgaggccactcatccagactccatgagggccactttggctgaatt

SEQ ID NO: 124091 - DNA, 255 bp, Glycine max
ccaaccatgctgacgctgattacctcatcgttatccttaacgggactgccattctttccttggtgaacaacgacgacagagactcctacagacttcaatctggtgatgccctgagagtcccctcaggaaccacatactatgtggtcaaccctgacaacaacgaaaatctcagattaataacactcgccatacccgttaacaagcctggtagatttgagagtttcttcctatctagcactgaagctcaacaatcct

SEQ ID NO: 124092 - DNA, 256 bp, Glycine max
ctcgagccgctcgagccgcgagcagagagaggaacaggaatggcctcgcaaggaggaaaaaagcggagaaaagggaagtgaagaggaagatgaggatgaggatgaggaacaagatgaacgtcaattcccattcccacgcccacctcatcagaaggaagagcgaaagcaagaggaagatgaggatgaggagcagcagcgagagagcgaagaaagtgaagattctgagttacgaagacataagaataagaaccctttt

SEQ ID NO: 124093 - DNA, 237 bp, Glycine max
cttaattattaacacttccttagttcaatatggggaagcccttcagtctctctctttcttcgctttgcttgctactcttgtcgagtgcatgcttcactattagctccaacaagctcaacgagtgccaactcaaccacctcaacgcgttgcaacccgaccaccgcgttgagtccgaagtgcgtttgattcaaacatgcagctctacaacaccctgagctgaaatgcgctggagtcact

SEQ ID NO: 124094 - DNA, 246 bp, Glycine max
gaaagatttgttggagggaaatttttcctttgatattaaatctcgctctagattggaaaaagtttcctctacaaaagcacaatttgttagtggaaaaaccttcaaatatgatataattggtgctggttcacattcttcagatgattttcctgaaaaggaagatcaagaaaaacccaaaaagattgatgccagattgagacaaagaatagatcctcaatacaatgaggttcaggctcagatggaaac

SEQ ID NO: 124095 - DNA, 283 bp, Glycine max
ctgggaatgcagcagtcaaaaggagtgattgggcctcattggtacaagtgtttttaacaaacagcaacagtacagagcattttgatgcatgtaagtggacaaaatcggaaccacattcctgggaattgatcttcccaatagaggtatgtggtcctaataatggttttgaaatgtggagttctgagtgggcaaatcaaacttcatggcatttgagtttccttattgacaatcccaaacagtctacagtttttgatattctcttgggaatttctcaagattttga

SEQ ID NO: 124096 - DNA, 289 bp, Glycine max
gttgaaactcctaaaggctccatgttggatctgaaaatttctcaatctaaaattgcacttcccaagaacacagttggaggaaccattctgcgtagtgatctattggcaaattttttgacagagggcaattttagagcaagtgttgatttgcagcgcactcatcgtattagaggaatgattaaaatggtggccacagttggtattcctgagaatacaggtatatcattggcctgtgctatgaatagttcttttagggggcgcgccagttctgatatttacaccatctgct

SEQ ID NO: 124097 - DNA, 190 bp, Glycine max
atttgaaattttgataaaccgcgatcacaggttgccgcaccttaaaaccggaaacaaaagcaatcgttacttgatttcaagaatctctcaatttcttcctacttctttgtgtacaatttcttaagggaaagaaaatcactctctgtgctggccacagacttcgtgaatcattttcttttccacacaacat

SEQ ID NO: 124098 - DNA, 290 bp, Glycine max
acacgtccaatcccattcccacgcccacaacctcgtccagaagaagagcacgagcagagagaggaacaggaatggcctcgcaaggaggaaaaacgcggagaaaagggaagtgaagaggaagatgaggatgaggatgaggaacaagatgaacgtcaattcccattcccacgcccacctcatcagaaggaagagcgaaagcaagaggaagatgaggatgaggagcagcagcgagagagcgaagaaagtgaagattctgagttacgaagacataagaataagaacccttttct

SEQ ID NO: 124099 - DNA, 286 bp, Glycine max
gtgaatcgcgtaactctctcaactcaactggatccgggtcacaaccgtcttgaaattaagaccaactgggtcattgatcacaatctcaattggtagcacaacatcaagggaaagtgaaaaagaaaggtatatttgatcagggatatggcaactcgaagatatgagtttggaaggatgaatgaggctagccacccagactccatcagagctgccttggctgaattcctctccacttgcatctttgtctttgctggagaaggctctgcccttgctttgcgacaaattt

SEQ ID NO: 124100 - DNA, 285 bp, Glycine max
tctctccattggtccttaaacactcatcagtcatcaccatggccaagctagttttttccctttgttttctgcttttcagtggctgctgcttcgctttcagttccagagagcagcctcagcaaaacgagtgccagatccaaaaactcaatgccctcaaaccggataaccgtatagagtcagaaggagggctcattgagacatggaaccctaacaacaagccattccagtgtgccggtgttgccctctctcgctgcaccctcaaccgcaacgcccttcgtagacctt

SEQ ID NO: 124101 - DNA, 287 bp, Glycine max
accaaggctgatgcacatggaaaaggaaaagttggaaaggatacgttcttggaagggattaatacttcgttaccaactttgggagcaggagagtctgcattcaatattcattttgaatgggacggaagcatgggaatccccggtgcgttttacataaagaactacatgcaagttgagttcttcctcaagagtttgactcttgaagccatttcaaaccaaggaaccatccgctttgtttgcaactcatgggtttataacactaaacttacaaaagcgtgcgcattttc

SEQ ID NO: 124102 - DNA, 283 bp, Glycine max
caagtcctgactgcaacatagttggtgcaatgcttttggttgatacttatcataccaatcctgaaaatgcagttcgtagtatttttgtcgcgcctttcagaggcggaaggcctattcgggtggttacatttccgaataccattgtgcagattgaaccagacatgaattcaaggtttcagcttttgagtaccactaccaatggtgattttgttcaaggaaaagatctcgcaatggttaaagttaatgtagcatgtgctgctgttggcttgacatcaagttacac

SEQ ID NO: 124103 - DNA, 283 bp, Glycine max
gttagggaggacaaataccgcccctttatgcgcgaagacagtgagaagaacatcagatggagatatggtgctcctccatattatgacgttgtcaacaaattatttgatgaaggcagaaccaaggtatggcctccgggttcacttcgaagaaaaggtgcagactttagtgcagaattgggagatggaaatgttccacaaggaggatttcaaggataacagatcagtggacccagagaaatacactttcagcctaaacggaaggaagtctattagtttggaagag

SEQ ID NO: 124104 - DNA, 221 bp, Glycine max
aagatcatacatagtagtgatggtgggttgcaaagatgcttgggggtcttctccataggggtcataagataaaagggacagtggtgttgatgcgcaagaatgtgttggacgtgaatagcgtaaccagcgttgggggaattattggtcaaggtctacgattagttggctcaacactcgatactcttactgccttcttgggccgatccgtgtctctccagctt

SEQ ID NO: 124105 - DNA, 186 bp, Glycine max
aattttgataaaccgcgatcacaggttgccgcaccttaaaaccggaaacaacagctatcgttacttgatttcaagaatctctcaatttcttcctacttctttgtgtacgatttcttaagggaaagaaaatcactctctgtgctggccacagacttcgtgaatcattttcttttccactcttagttt

SEQ ID NO: 124106 - DNA, 283 bp, Glycine max
gggtacagctcacgctcgagccgaagttattatcaaataattaattaaattacgcgtggaatcttgttgaagccatgtctacagctggtcaggtcatcaagtgcagagctgcggtggcatgggaagcagggaagccactatcgatagaaaccatagaagtggcaccaccccagaaaggtgaagtgcgtttgaagatcctcttcaactccctttgccgtacagatgtttactggtgggatgctaagggccagactccgctgtttcctcgtatcttaggccacga

SEQ ID NO: 124107 - DNA, 287 bp, Glycine max
gagtctttgtggtggtgatgaaaaattgatgcgtgaaaggacacacctgctgttggcttgttgttcaaggatggcaatttgtaagaaagatatttggagagttgaatgtggaatcccttctggatttccgctcacagttatttgtaatagcatttttaatgagatgctcattagatatagctatgaaaaattactgcgccaggctaaagctccaagtatgtttttacaatccttcaaaaattttgtttctttgtgtgtgtatggtgatgataacttaattagtgttc

SEQ ID NO: 124108 - DNA, 287 bp, Glycine max
cttgcaacgattaacaatggcttcaaccgacaagtcaccggacccaacgccggcgaagggtccggatccaactccggggaagccgatgagtgttggtcagcacgtgatcgacaagagtgcaatgatggtgcagtcgctggaccccattaagcagatgagtcagcacgtgtgctccttcgctatctacagccatgacatgtctcgccagatagagacacatcactactgctccagactccaccagaacttcatacaatgtgctgtctatgattccgatgaatccaaag

SEQ ID NO: 124109 - DNA, 287 bp, Glycine max
atttcagtgagtgatcggtgttcacttgatctcatcataatcgtcagcgtcaattgaagaagatgccgatcagaaacatcgccgtcggaaggcctgaagaggcgactcaccccgacacgttgaaggcggctttggctgagttcatctcaaccttcatcttcgtgttcgccggctcaggctccggcatcgcctacaacaagctcaccgacaacggcgctgccacccctgccggcctcatctccgcctccatcgcccatgcattcgccctcttcgtcgccgtctccgtc

SEQ ID NO: 124110 - DNA, 285 bp, Glycine max
cacacacaactactacaagtacttccttacaatcaaaaccaacaacaactatggcaagttatcaaaagcactacgatgatcagggtcgcaaggttgacgagtatggcaacgttgagaagcaaaccgacgaatacggcaaccctgttcatgctgctagtgtcacctatgtagccaccagaactgctgctggtggttacagtgatgacattaataagcaacatgataccaccaatgcctacggcgtagacactggtagacagcattctagtggtggctacgatggtg

SEQ ID NO: 124111 - DNA, 283 bp, Glycine max
gaaagatttgttggagggaaatttttcctttgatattaaatctcgctctagattggaaaaagtttcctctacaaaagcacaatttgttagtggaaaaaccttcaaatatgatataattggtgctggttcacattcttcagaagattttcctgaaaaggaagatcaagaaaaacccaaaaagattgatgccagattgagacaaagaatagatcctcaatacaatgaggttcaggctcagatggaaacaaatttgtttaaattgtctcttgatgatgttgaaact

SEQ ID NO: 124112 - DNA, 281 bp, Glycine max
ggatggccttcggcgataaaacggattcgatatggggacgagatgattgttggaattcctaccgagtggtctgttgtggaggatctaccagaaggacctgctgttaaaattggtgagaacaaagatgcaatggatggttggtttagacttgagagagtttctgatgatgaattcaataactataagcttgtgttctgtccacagcaagctgaggatgacaaatgtggggatattgggattagtattgatcatgatgatggaaccaggcgtttggtggtgtc

SEQ ID NO: 124113 - DNA, 278 bp, Glycine max
ggtggaataagagcagccccaacgggaaatgaaagatgccctctcactgtggtgcaatctcgcaatgagctcgacaaagggattggaacaatcatctcgtccccatatcgaatccgttttatcgccgaaggcatcctttgagccttaagttcgattcatttgcagttataatgctgttcgttggaattcctaccgagtggtctgttgtggaggatctaccagaaggacctgctgttaaaattggtgagaacaaagatgcaatggatggttggtttaga

SEQ ID NO: 124114 - DNA, 272 bp, Glycine max
caatatcctagtataccttaatagataatttaagatactatgatgagagcacggttcccattactgttgctgggacttgttttcctggcttcagtttctgtctcatttggcattgcttactgggaaaaagagaaccccaaacacaacaagtgtctccagagttgcaatagcgagagagactcgtacaggaaccaagcatgccacgctcgttgcaacctccttaaggtggagaaagaagaatgtgaagaaggtgaaattccacgaccacgacc

SEQ ID NO: 124115 - DNA, 273 bp, Glycine max
aggcattcctgctgatgttcttgcaaagcgagctcatgaatttgaaaaacatgttgctcatgaaagcctcaaggatcaaattcctgctgttgacaagttgtattctactaaggttaataagtttgcaaaaattatgaaccttagacaaagtgttgttggtgatcttaaacttcttactgatgggaagttgtatgagggtaagcatattcctgtatctaatattagtgcaggggagaatcatgtagttcaaatacccctaatggcacaggagga

SEQ ID NO: 124116 - DNA, 279 bp, Glycine max
atcgatttggttacataaaaagagctatgcatggcaccaaaatgttatctactcgagctgttagtgagatgtatgggagagaactggtggacctgcgaaaggagagtcgatgggagtttctcaatacactgttttctgtgtctgaagctgtggcctacatgcagatggttgacagattggatgatgaaactataccagcagatcttgctcttgattataaagggctatataaggctgttggaaaagctctcttctgggcacatgttgaaggtcgtctta

SEQ ID NO: 124117 - DNA, 274 bp, Glycine max
  unsure (1)..(274): unsure at all n locations
aggaaccaagcatgccacgctcgttgcaacctccttaaggtggaggaagaagaagaatgcgaagaaggtcaaattccacgaccacgaccacaacacccggagagggaacgtcagcaacacggtgagaaggaggaagacgaaggtgagcagccacgtccattcccattcccacgcccacgccaacctcatcaagaggaagagcacgagcagaaggaggaacacgaatggcatcgcaaggaggaaaaacacggagganagggaagtgaagaggaac

SEQ ID NO: 124118 - DNA, 246 bp, Glycine max
caatatgttgtcctctacaggaatggaatttactctccacattggaacttgaacgcgaacagtgtgatctatgtgactcgagggaaaggaagagttagagtggtgaactgccaagggaatgcagtgttcgacggtgagctaaggaggggacaattgctagtggtgccgcagaactttgtggtggctgagcaagggggagaacaaggattggaatacgtatgttcaagacacaccacaacccgtgag

SEQ ID NO: 124119 - DNA, 283 bp, Glycine max
ctcgaccgcacttatacaaaattctccaattagtaacttgttgagagttgctgcttggaagaaaggctgtttaatggttaagattgtgatgtctgggaatgcagcagtcaaaaggagtgattgggcctcattggtacaagtgtttttaacaaacagcaacagtacagagcattttgatgcatgtaagtggacaaaatcggaaccacattcctgggaattgatcttcccaatagaggtatgtggtcctaataatggttttgaaatgtggagttctgagtgggca

SEQ ID NO: 124120 - DNA, 284 bp, Glycine max
ctaacctaactcctctcgtcgtcacaaaaagtcttcttctccgatcgttacgatgttggaactccgtctcgtgcaaggttcccttctgaagaaggttctggaatcgatcaaggagctcgtaaacgacgcgaacttcgactgctcctccaccgggttctccctccaggccatggattccagccacgtcgccatcgttgcgctcctcctccggtccgagggctttgagcactaccgctgcgaccgcaatacctccatgggcatgaacctcaacaacatggccaaga

SEQ ID NO: 124121 - DNA, 264 bp, Glycine max
gagaaactttaagcagatgtctaatgttttgtgggtagctcctgaggacaaggcgagtttatggtcacaacttcattatgtttcgtgtaataatctggacatgcaagaagcttatcttgtcaatctcgtaaatgtgttacgagaattgtatttgcacagtccagaggaagctcgccaattgaggaggaaagctctctctcgtattgaatggctgcaaaaagctgatgtgcctaccatagcacagattgaagagttccattcgat

SEQ ID NO: 124122 - DNA, 282 bp, Glycine max
ataaaattcttccaccaagttatgggtttccttgtgttgcttcttttctccctcttatgtctctcttctagttccagcatatcaactcatcgttccatatcggaccttgacctaaccaagtttaccacacagaaacaggtgtcttcactgttccaactatggaagagtgagcatggacgtgtctaccataaccacgaagaagaggcaaagagacttgtagattttcaagaataacttgaactatatcagggacatgaatgccaacagaaaatcaccccattc

SEQ ID NO: 124123 - DNA, 272 bp, Glycine max
cggctcgaggtgcgatcacacagtatggccagggattttaggagcaccacagctaggaagcacaggttttgaacttgtgaagggaggttctaaaagcttccaggctccgaccggttggtccggtagattctggggcagaaccggttgccaattcgacggttcgggaaaaggaacgtgcgccaccgccgactgctgctccggcgaggtcaactgcaacggtgccggagcctctccgccggccacgctcgccgagttcacgcttggcaacggct

SEQ ID NO: 124124 - DNA, 244 bp, Glycine max
tgccctcaggctgaagacatcatcaaagaacaagtcaagcttctctacaagcgccacaagaacactgctttctcctggctcagaaacatcttccatgactgtgctgttcagagttgtgatgcttcactgttgctggactccacaagaaggagcttgtctgagaaggaaacagatagaagctttgggttgagaaatttcaggtacattgagaccatcaaagaagctttggaaagggaatgcccag

SEQ ID NO: 124125 - DNA, 276 bp, Glycine max
cccttttattgaaatcctgagcttccattgtgctcactcatctcttacaacgaaaccctcttcatcttgttctatctgtgacgagcatcatggcctcaagagcagtgttattgttggctatgtgtgtgcttccggcgatggttgtggccattcgcccagcaaagaaccctttttgcgtgaagggtcgtgtctactgtgacccttgccgtgctggttttgagtactcagctaccacctacattgctggtgctgagattatgttgcaatgcaagagca

SEQ ID NO: 124126 - DNA, 233 bp, Glycine max
acttattaacactttccttagttcaatatggggaagcccttcttcactctctctctttcttccctttgcttgctactcttgtcgagtgcatgctttgctattacctccagcaagttcaacgagtgccaactcaacaacctcaacgcgttggaacccgaccaccgcgttgagtccgaagtggtcttattgaaacatggaactctcaacaccctgagctgcaatgcgccggtgtc

SEQ ID NO: 124127 - DNA, 285 bp, Glycine max
aggctcgagggcaaaaggagatttgtttctggggatggtgaagagatgacattgattccgggaaccagtgttgaagaggcttacaacaagctaatagttgaacttgagaaaagtgttcctacattggttggcattgaatgtcccaaggatgagaaacttcctcgtcgcaaaatttttgacaaacctaagacgcgctgcttcactattctccctatggagtttaatcttgtggttcgtcagaatttttaaattttgtgaggttcattatgaagaaaagggacaagc

SEQ ID NO: 124128 - DNA, 275 bp, Glycine max
atgatatagttggtgctggttcacattcttcagaagatttttctgaaaaggaagatcaagaaaaacccaaaaagattgatgccagattgagacaaagaatagatcctcaatacaatgaggttcaggctcagatggaaacaaatttgtttaaattgtctcttgatgatgttgaaactcctaaaggttccatgttggatcttaaaatttctcaatctaaaattgcacttcccaaaaacacagttggaaagaaccattctgcgtagtgacctattggc

SEQ ID NO: 124129 - DNA, 249 bp, Glycine max
taacactttccttagttcaatatggggaagcccttcttcactctctctctttcttccctttgcttgctactcttgtcgagtgcatgctttgctattacctccagcaagttcaacgagagccaactcaacaacctcaacgcgttggaacccgaccaccgcgttgagtccgaaggtggtcttattgaaacatggaactctcaacaccctgagctgcaatgcgccggtgtcactgtttccaaacgcaccctc

SEQ ID NO: 124130 - DNA, 280 bp, Glycine max
agtttgttgttcctcactgacctcaccaaggcgaccagagccaagctttctttagctatcttccatttctaacttttagccttgatttcaaacctagccttgggcaaacttaaagaaaccgaggtcgaagaagatcccgagctcgtaacatgcaaacaccagtgccaacagcaacggcaatacactgagagtgacaagcgaacatgcttgcaacaatgtgacagtatgaagcaagagcgagagaaacaagtcgaagaggaaactcgcgagaaggaagaag

SEQ ID NO: 124131 - DNA, 280 bp, Glycine max
gaaccagtgttgaagaggcttacaacaagctaacagttgaacttgagaaaagtgttcctacattggttgtcactgaatgtcccaaggatgaaaaacttcctcgtcgcaaagtttttgataaacctaagacgcgctgcttcactattctccctatggagtttaatcttgtggttcgtcagaagtttttaaattttgtgaggttcattctgaagaaaagggacaagcttagttgtcaagttggaatcaacccatattctatggaatggactggtttggccaa

SEQ ID NO: 124132 - DNA, 277 bp, Glycine max
atcaaaaccccagagtattttaccttgctgggaacccagatatagagcacccagagaccatgcaacaacagcagcagcagaagagtcatggtggacgcaagcaggggcaacaccagcagcaggaggaagaaggtggcagtgtgctcagtggcttcagcaaacatttcttagcacaatccttcaacaccaacgaggacaaagctgagaaacttcggtctccagatgacgaaaggaagcagatcgtgacagtggagggaggcctcagcgttatcagccc

SEQ ID NO: 124133 - DNA, 269 bp, Glycine max
cactcatcaccatggccaagcttgttctttccgtttgtttccttcttttcagtggctgcttcgctctgagagagcaggcacagcaaaatgagtgccagatccaaaagctgaatgccctcaaaccggataaccgtatagagtcggaaggtgggttcattgagacctggaaccctaacaacaagccattccagtgtgccggtgttgcactctctcgctgcacccttaaccgcaatgcccttcgtagaccttcctacaccaacggtcccagg

SEQ ID NO: 124134 - DNA, 280 bp, Glycine max
ctcgagccgcttattaacactttccttagttcaatatggggaagcccttcttcactctctctctttcttccctttgcttgctactcttgtcgagtgcatgctttgctattacctccagcaagttcaacgagtgccaactcaacaacctcaacgcgttggaacccgaccaccgcgttgagtccgaaggtggtcttattgaaacatggaactctcaacaccctgagctgcaatgcgccggtgtcactgtttccaaacgcaccctcaactgcaacggcctcca

SEQ ID NO: 124135 - DNA, 279 bp, Glycine max
attttgataaaccgcgatcacaggttgccgcaccttaaaaccggaaacaaaagcaatcgttacttgatttcaagaatttctcaatttctttctacttctttgtgtacgatttcttaagggaaagaaaatcactctctgtgctggccacagacttcgtgaatcattttcttttccacttttagtttatttgctgaacactctcctatttgatataggacttcgtgtcagatttaaacttcttctgtttctttctcagttctctgttcaatttcaagttca

SEQ ID NO: 124136 - DNA, 261 bp, Glycine max
gatagaccctcgatcggaaaccttgcaggggcaaactcattgttgaacgcattgccagaggaagtgattcagcacacttttaacctaaagagccagcaggccaggcaggtgaagaacaacaaccctttcagcttcctggttccacctcaggagtctcagaggagagctgtggcttagagagccctttttgcatgtgctaccacacttttgtccttttgggctctagctagtgctggtagcagtacataagaatgaataaaa

SEQ ID NO: 124137 - DNA, 277 bp, Glycine max
ctctccattgtctttgaacactcatcaccatggccaagcttgttctttccctttgtttccttcttttcagtggctgcttcgctctgagagagcaggcacagcaaaatgagtgccagatccaaaagctgaatgccctcaaaccggataaccgtatagagtcggaaggtgggttcattgagacctggaaccctaacaacaagccattccagtgtgccggtgttgcactctctcgctgcacccttaaccgcaatgcccttcgtagaccttcctacaccaa

SEQ ID NO: 124138 - DNA, 269 bp, Glycine max
agtcgacgattcggtcggttatcaaactaggagtggcaattaaggatacgtcaaccccacatggagttcgtcttctgatagaggactatccttatgccgctgatggactggagatatgggctgcaattaagacatgggttcaagaatatgtgcccttgtactatgcaagagatgatgatgtcaaaaatgattctgaactccaacattggtggaaagaagctgtagagaaaggccatggtgatttgaaagacaagcctggtggcctaagt

SEQ ID NO: 124139 - DNA, 276 bp, Glycine max
ctcgagccgtaaaattcttccaccaagttatgggtttccttgtgttgcttcttttctccctcttaggtctctcttctagttccagcatatcaactcatcgttccatattggaccttgacctaaccaagtttaccacacagaaacaggtgtcttcactgttccaactatggaagagtgagcatggacgtgtctaccataaccacgaagaagaggcaaagagacttgagattttcaagaataacttgaactatatcagggacatgaatgcgaacagaa

SEQ ID NO: 124140 - DNA, 261 bp, Glycine max
gttaaatcaaaatacttaatagcatggcgatacatttatacaaaacttctaccccaagcacacgcaatggagccgtagacagtcaagtaaaatccaatccacgaaatcatttgatctatggacagcatcgttgtggtaaaggccgtaatgccagaggaatcattaccgcaggcatagagggggaggtcataagcgtctataccgtaaaattgattttcgacggaatgaaaaaaacatatatggtagaatcgtaaccataga

SEQ ID NO: 124141 - DNA, 170 bp, Glycine max
  unsure (1)..(170): unsure at all n locations
ctcttcttctcttgcggctanggttttagcgccgtcttctagatttaaggtagatgggtaaggaaaaggttcacatcagtattgtggtcattggccatgtcgactctgggaaatccactacgactggtcacctgatttacaagcttggaggcattgacaagcgtgttatt

SEQ ID NO: 124142 - DNA, 277 bp, Glycine max
ctcgacgaattcggctcggtctcttaacgtagttcacgacctctcctttcaagatgcagatcttcgtcaagaccctcaccggaaagaccatcacccttgaggtggaaagctctgacaccatcgacaacgtcaaggccaagatccaggacaaggaaggaattcccccggatcagcaacgtctcatcttcgccggaaagcagctcgaggacggccgtaccctcgccgactacaacatccagaaggagtcaacccttcaccttgtccttcgtctccgtgg

SEQ ID NO: 124143 - DNA, 232 bp, Glycine max
gaacttcagaatctccgagactaccgcattttggagttcaactccaaacccaacaccctccttctccccaaccatgctgatcctgattacctcatcgttatccttaacgggactgccattctttccttggtgaacaacgacgacagagactcctacagacttcaatctggtgatggcctgagagtcccctcaggaaccacatactatgtggtcaaccctgacaacaacgaaa

SEQ ID NO: 124144 - DNA, 259 bp, Glycine max
ttttgtcaattctctattgatcttcttggtggaggattttagtggacaaaactggagattggatcacacttatacaaaattctccaattagtaacttgttgagagttgctgcttggaagaaaggctgtttaatggttaagattgtgatgtctgggaatgcagcagtcaaaaggagtgattgggcctcattggtacaagtgtttttaacaaacagcaacagtacagagcttttgatgcatgtagtggacaaatcggaaca

SEQ ID NO: 124145 - DNA, 276 bp, Glycine max
  unsure (1)..(276): unsure at all n locations
gccggctggtcatggtttgagatcccgcaccagagattccttctctcgtcctttcaggaagaagggaaccatcgccctcaccacatacctgagaacctaccacgtcggcgactatgttgacgtcaaggttaacggtgccgttcacaagggaatgccccacaaattctaccatggccgcaccggacgcgtctggaatgtcaccanacgtgctgttggcgtcgaagtcaacaagcaggttggcaacagaattataaggaagaggattcatgtgcgggt

SEQ ID NO: 124146 - DNA, 270 bp, Glycine max
cacacaagatgcttgtactgggagggaaagcttatcctcccatttgctgatcaattttggtttaggtatctgtatggctggttgatgccacccaaggtttctctcctcaaggcaactcaaggtgatgctataagaaactattaccatgaaatgcatgtcatccaggacatgcttgttcctttgtacaaggtgggagaggctttagaatgggttcaccgtgagatggaggtataccccatttggctctgcacacacaaattgttcaagctg

SEQ ID NO: 124147 - DNA, 259 bp, Glycine max
tcaatatcttagtataccttaataaataatttaagatactatgatgagagcacggttcccattactgttgctgaaacttgttttcctggcttcagtttctgtctcatttggcaatgcttactgggaaaaagagaaccccaaacacaacaagtgtctccagagttgcaatagcgagagagactcgtacaggataccagcatgccacgctcgttgcaacctccttaaggtggagaaagaggatgtgaagaggtgaattcca

SEQ ID NO: 124148 - DNA, 177 bp, Glycine max
aaaaggtacatcgcttcagagagggtgatttgatcgcagtgcctactggtgttgcatggtggatgtacaacaatgaagacactcctgttgttgccgtttctattattgacaccaacagcttggagaacccactcgaccagatgcctaggagattctatcttgctgggaaccaagagc

SEQ ID NO: 124149 - DNA, 270 bp, Glycine max
cacacaagatgcttgtactgggagggaaagcttatcctcccatttgctgatcaattttggtttaggtatctgtttggctggttgatgccacccaaggtttctctcctcaaggcaactcaaggtgatgctataagaaactattaccatgaaatgcatgtcatccaggacatgcttgttcctttgtacaaggtgggagaggctttagaatgggttcaccgtgagatggaggtataccccatttggctctgcccacacaaattgttcaagctg

SEQ ID NO: 124150 - DNA, 274 bp, Glycine max
gctggttcacattcttcagaagattattctgaacaggaagatcaagaaaaacccaaaaagattgatgccagattgagacaaagaatagatcctcaatacaatgaggttcaggctcagatggaaacaaatttgtttaaattgtctcttgatgatgttgaaactcctaaaggttccatgttggatcttaaaatttctcaatctaaaattgcacttcccaataggtcactacgcagaatggttcctccaactgtgtttttgggaaattttttgacag

SEQ ID NO: 124151 - DNA, 267 bp, Glycine max
cttcaaatatgatataattggtgctggttcacattcttcagaagattttcctgaaaaggaagatcaagataaacccaaaaagattgatgccagattgagacaaagaatagatcctcaatacaatgaggttcaggctcagatggaaacaaatttgtttaaattgtctcttgatgatgttgaaactcctaaaggttccatgttggatctgaaaatttctcaatctaaaattgcacttcccaagaacacagttggaggaaccattctgcg

SEQ ID NO: 124152 - DNA, 275 bp, Glycine max
gtggtagtggacgtggtggtttacctaccactgcttggattagttctgcagttaacaatcgctcctcagatatcaacaaaaagattcgcacagcacttgggaaaggtaagaaaattgtttttcttactagagttgatccttttccagtagctctactggctgttctttttggcgttaagaatgaaattctgagttccaacgccactaaccctatgctgacgcgacttcttgagaactgtaagagtctcaaatatctggttgatgagtgtcctttt

SEQ ID NO: 124153 - DNA, 274 bp, Glycine max
aaaattcttccaccaagttatgggtttccttgtgttgcttcttttctccctcttaggtctctcttctagttccagcatatcaactcatcgttccatattggaccttgacctaaccaagtttaccacacagaaacaggtgtcttcactgttcgaactatggaagagtgagcatggacgtgtctgccataaccacgaagaagaggcaaagagacttgagattttcaagaataacttgaactatatcagggacatgaatgcaaacagaaaatcaccc

SEQ ID NO: 124154 - DNA, 187 bp, Glycine max
ctcatagtgagcgaggaaagtatcgggctatttaactatgacttgacgtccatctatgaataaataaatcagcatatgatgcttatgttttacacaaaacaaaagcatcatatgctgatttatttattcatagatggagctcaagtcatagttaaataaatcagcatatgatgcttttgttttgtgt

SEQ ID NO: 124155 - DNA, 275 bp, Glycine max
cacaggttgccgcaccttaaaaccggaaacaaaagcaatcgttacttgatttcaagaatctctcaatttcttcctacttctttgtgtacgatttcttaagggaaagaaaatcactctctgtgctggccacagacttcgtgaatcattttcttttccactcttagtttattagatgaacactctcctatttgatataggacttcgtgtcagatttaaacttcttctgtttctttctcagttctctgtttaatttcaagttcaactgggtgaaatct

SEQ ID NO: 124156 - DNA, 273 bp, Glycine max
tgcttcaacttgctccctcagaagcgaagaagaagccacagagaaccagtctcctactctctctcacccacaagaaaaatggcatctcacatcgttggatacccccgcatgggtcccaagagagagctcaagttcgctctcgagtctttctgggatggcaagagcagcgccgaggatttgcagaaggtggctgctgatctcaggtcatccatctggaagcagatggctggtgctgggatcaagtacatccccagcaacactttctcgttctat

SEQ ID NO: 124157 - DNA, 264 bp, Glycine max
gaccaccgcgttgagtccgaagtggtcttattgaaacatggaactctcaacaccctgagctgcaatgcgccggtgtcactgtttccaaacgcaccctcaaccgcaacggcctccacttgccatcttactcaccttatccccaaatgatcattgtcgttcaagggaagggagcaattggatttgcatttccgggatgtcctgagacgtttgagaagccacaacagcaatcaagcagaagaggctcaaagtcgcagcagcaactac

SEQ ID NO: 124158 - DNA, 265 bp, Glycine max
  unsure (1)..(265): unsure at all n locations
atcccaaacagtctacagtttttgatattctcttgggaatttctcaagattttgaaattgctggtaacactcttatgccagctttttctgttccacaggctactgccagatcttctgaaaatgcggaatcctctgcatgatctggaatttgtgttttcttttgcttgttcgtttgtttaattcaataaaggaaattaggcatgacgctcttgttgagtatgctctgcctatttgaaaatttccacactcttntaattgtcgtaat

SEQ ID NO: 124159 - DNA, 174 bp, Glycine max
gaataagaacccttttctcttcggctctaacaggttcgaaactctcttcaaaaaccaatatggtcgcattcgcgtcctccagaggttcagccaacgctccccacaacttcagaatgcccgagactaccgcattttggagttcaactccaaacccaacaccctccttctccccaa

SEQ ID NO: 124160 - DNA, 261 bp, Glycine max
gaacacagttggaggaactattctgcgtagtgcaattttagattgagacaaagaatagatcctcaatacaatgaggttcaggctcagatggaaacaaatttgtttaaattgtctcttgatgatgttgaaactcctaaaggttccatgttggatcttaaaatttctcagtctaaaattgcacttcccaagaacacagttggaggaactattctgcgtagtgatctattggcaaattttctgaccaaggggcaattttagagc

SEQ ID NO: 124161 - DNA, 235 bp, Glycine max
gagcgatttagaagtgagagaagatggggttgtcgttcacgaagctgttcagcaggttgtttgcgaagaaggaaatgaggattctgatggtaggtctcgatgctgctggtaagacaaccatcttgtacaagctcaagcttggagaaatcgtcaccactatccccaccatcggatttaatgttgagactgtggagtacaagaacatcagcttcactgtgtgggatgttggtggtca

SEQ ID NO: 124162 - DNA, 192 bp, Glycine max
tctcgagccgaatcggctcgacttattaacactttccttagttacatatggggaagcccagtcttcactctctctctttactccctttgcttgctactcttgtcgagtgcatgctttgctattacctccagcaagttcaacgagtgccaactcaacaacctcaacgcgttggaacccgaccaccgcgttgag

SEQ ID NO: 124163 - DNA, 179 bp, Glycine max
gaaattttgataaaccgcgatcacaggttgccgcaccttaaaaccggaaacaaaagcaatcgttacttgatttcaagaatttctcaatttctttctacttctttgtgtacgatttcttaagggaaagacaatcactctctgtgctggccacagacttcgtgaatcattttcttttccac

SEQ ID NO: 124164 - DNA, 198 bp, Glycine max
agacttattaacactttccttagttcaatatggggaagcccttcttcactctctctctttctaccctttgcttgatactcttgtcgagtgcatgctttgctattacctccagcaagttcaacgagtgccaagtcaacaacctcaacgcgttgtaacacgaccaccgcgttgagtccgaagtgggtcttattgaaacat

SEQ ID NO: 124165 - DNA, 177 bp, Glycine max
  unsure (1)..(177): unsure at all n locations
atttgaaattttgataaaccgctatcacaggttgccgcaccttaaaaccggaaacaaaagcaatcgttacttgatttcaagaatctctcaatttcttcctacttctttgtgtacgatttcttaagggaaaganaatcactctctgtgctggccacagacttcgtgaatcattttctt

SEQ ID NO: 124166 - DNA, 245 bp, Glycine max
acaccaacgaggacacagctgagaaacttcggtctccagatgacgaaaggaagcagatcgtgacagtggagggaggcctcagcgttatcagccccaagtggcaagaacaagaagacgaagacgaagatgaagacgaagaatatgaacaaactccctcttatcctccacgacgaccaagccatggaaagcatgaagatgacgaggacgaggacgaagaagaagatcaacctccgtctgatcaccct

SEQ ID NO: 124167 - DNA, 271 bp, Glycine max
tagtagtgttggtgggttgcaaagatgcttgggggtcttctccataggggtcataagataaaagggacagtggtgttgatgcgcaagaatgtgttggacgtgaatagcgtaaccagcgttgggggaattattggtcaaggtctcgacttagttggctcaacactcgatactcttactgccttcttgggccgatccgtgtctctccagcttattagtgctaccaaagctgatgccaacggaaaagggaaacttggaaaggctacctttttgg

SEQ ID NO: 124168 - DNA, 205 bp, Glycine max
cactcatcaccatggccaagcttgttctttccctttgtttccttcttttcagtggctgcttcgctctgagagagcaggcacagcaaaatgagtgccagatccaaaagctgaatgccctcaaaccggataaccgtatagagtcggaaggtgggttcattgagacctggaaccctaacaacaagcaattccagtgtgccggtgttgc

SEQ ID NO: 124169 - DNA, 220 bp, Glycine max
ctcgtctttgaagtttctaagatgacttctccctacattaaatgtacagtctctttcttcatagcatttggaaatttggctgatgacaccatcaattttgaggcttttccccacaagctggtgcagtttggagagattcaggaaaaagttgtattgaaattttcacaagaggaatttcttacagcttggtcaactcaggtgcgtcctggaaacaactctg

SEQ ID NO: 124170 - DNA, 203 bp, Glycine max
gtaagggcaacgatattctgtgttgcgattatgctagttttgatggtttgattaccaagcaagttatgagcaagatggcagaaatgataaacagtctttgtggtggtgatgaaaaattgatgcgtgaaaggacacacctgctcttggcttgttgttcaaggatggcaatttgtaagaaagatgtttggagaattgaatgtgga

SEQ ID NO: 124171 - DNA, 180 bp, Glycine max
gtaattaacctcactcaaactcgggatcacagaaaccaacaacagttcttgcactgaggtttcacgatgttgctggaacttgcacttggtttgtttgtgttagctttgtttctgcacttgcgtcccacaccaagtgcaaaatcaaaagcactgcgcaacctcccaaaccctccagcccaa

SEQ ID NO: 124172 - DNA, 236 bp, Glycine max
ctccattgtctttgaacactcatcaccatggccaagcttgttctttccctttgtttccttcttttcagtggctgcttcgctctgagagagcaggcacagcaaaatgagtgccagatccaaaagctgaatgccctcaaaccggataaccgtatagagtcggaaggtgggttcattgagacctggaaccctaacaacaagccattccagtgtgcgggtgtggccctctctggctgaac

SEQ ID NO: 124173 - DNA, 270 bp, Glycine max
aacttattaacactttccttagttcaatatggggaagcccttcttcactctctctctttcttccctttgcttgctactcttgtcgagtgcatgctttgctattacctccagcaagttcaacgagtgccaactcaacaacctcaacgcgttggaacccgaccaccgcgttgagtccgaaggtggtcttattgaaacatggaactctcaacaccctgagctgcaatgcgccggtgtcactgtttccaaacgcaccctcaaccgcaacggcct

SEQ ID NO: 124174 - DNA, 211 bp, Glycine max
gagcaagatggcagaaatgatcaacagtctttgtggtggtgatgaaaaactgatgcgtgaaaggacacacctgctgttggcttgttgttcaaggatggcaatttgtaagaaagatgtttggagagttgaatgtggaatcccttctggatttccgctcacagttatttgcaatagcatttttaatgagatgctcattagatatagctatgaa

SEQ ID NO: 124175 - DNA, 271 bp, Glycine max
gctaaacgaagaaaatcattccaatacacatggcttccgaaaggcaagcgttaatgcttattctcttaacaacattcttcttcaccataaagccttcacaggccagtactactggtggcataacaatctactggggccaaaacattgacgacggcaccttgacttccacatgcgacactggaaacttcgagattgtcgacctagctttcctcaatgcgtttggttgcggcataactccatcatggaatttcgctggccactgtggggactg

SEQ ID NO: 124176 - DNA, 215 bp, Glycine max
ctttgaacactcatcaccatggccaagcttgttctttccctttgtttccttcttttcagtggctgcttcgctctgagagagcaggcacagcaaaatgagtgccagatccaaaagctgaatgccctcaaaccggataaccgtatagagtcggaaggtgggttcattgagacctggaaccctaacaacaagccattccagtgtgccggtgttgccct

SEQ ID NO: 124177 - DNA, 260 bp, Glycine max
ctcgagccggccaaggttctcattacctatgatgcctccaccagcctcttggttgcttcattggtctacccttcacagagaaccagcaatatcctctccgatgtggtcgatttgaagacttctcttcccgagtgggtgaggatagggttctctgctgccacgggactcgacatacctggggaatcgcatgacgtgctttcttggtcttttgcttccaatttgccacacgctagcagtaacattgatcctttggatcttac

SEQ ID NO: 124178 - DNA, 243 bp, Glycine max
acaagatctccatatctgttcccaaaagcttgtttgtaagaatggcttccggtgaacagaaattccctcctcaacaacaacaaacacagcctgggaaggagcatgctatgactccagtaccccaattcactagccctgactacaagccttcaaataaacttcaagggaagattgcattagtcactgggggtgattctgggattggacgaccggtgtgtaacttgtttgcctaagaaggtgcta

SEQ ID NO: 124179 - DNA, 195 bp, Glycine max
cagctcaattctgtggattgttttgattgccttgttagggagtatctttacatctgcctatattgttgtgcaatttctgaagttgtcatctcaagaatcttcacaggatcctatgtattatgttctgttgcggcatccaaacaagaatggcacagcaccacaaagacagcgttcatctgttgtgactctaagaat

SEQ ID NO: 124180 - DNA, 220 bp, Glycine max
tctcgagccgaatcggctcgagcggctcgagtatcaccattactgaaggtattgacaaaactagtgcaactttgcaatttagaaagttagcagattgtgattttctcaagagaaactttaggcagatgtctaatgttttgtgggtggctcctgaggacaaggcgagtttatggtcacaacttcattatgtttcatgtaataatcctggaatgcaagaggc

SEQ ID NO: 124181 - DNA, 231 bp, Glycine max
gcgttatcagccccaagtggcaagaacaataagatgaagatgaagatgaagacgaagatgatgaagatgaacaaattccctctcaccctcctcgccgaccaagccatggaaagcgtgaacaagacgaggacgaggacgaagatgaagataaacctcgtcctagtcgaccaagccaaggaaagcgtgaacaagaccaggaccaggacgaggacgaagatgaagatgaggatc

SEQ ID NO: 124182 - DNA, 249 bp, Glycine max
caagttattatcaaataattaattaaattcctcgtggaatcttgttgaagccatgtctacagctggtcaggtcatcaagtgcagagctgcggtggcatgggaagcagggaagccactatcgatagaaaccatagaagtggcaccaccccagaaaggtgaagtgcgtttgaagatcctcttctactccctttgccgtacagatgtttactggtgggatgctaagggccagactccgctgtttcctcgtat

SEQ ID NO: 124183 - DNA, 207 bp, Glycine max
gcagcaaacatctttaccttaaacgacaacaatggccgatgccgaggatattcaacccctcgtttgcgataatggaaccggaatggtcaaggctggttttgccggagatgatgcgccgagggcggtgttccccagcattgtggggcgtccacgtcacacgggagtgatggttgggatggggcagaaggatgcgtatgttggggacga

SEQ ID NO: 124184 - DNA, 247 bp, Glycine max
ggctcgagaagtcttccatagccccccaaaaatgaagagcaccatcttctttgctctctttctcttttgtgccttcaccacctcatacctaccttcagccatcgctgatttcgtgctcgataatgaaggtaaccctcttgaaaatggtggcacatattatatcttgtcagacataacagcatttggtggaataagagcagcaccaacggtaaatgaaagatgccctctcactgtggtgcaatctcgc

SEQ ID NO: 124185 - DNA, 109 bp, Glycine max
gttcaatatcctagtacaccgtattaaagaatttaagatatactatgatgagagcgcggttcccattactgttgctgggagttgttttcacggcatcagtttctgtctc

SEQ ID NO: 124186 - DNA, 163 bp, Glycine max
aaccttgctctatactacacagtacacacactagaagaataatggcttccatcctccactactttttagccctctctctttcttgctcttttcttttcttcttatccgactcagtcacccctacaaaaccaataaaccttgttgttctacccgttcaaaatga

SEQ ID NO: 124187 - DNA, 229 bp, Glycine max
cgtgaaggaagtctcttcttacttgaagaaggttggttacaacccagacaagattccctttgttcccatctctggttttgagggtgacaacatgattgagaggtccaccaaccttgactggtacaagggaccaactctccttgaggctcttgaccaaatcaatgagcccaagaggccctccgacaagcctctaaggctccattgcaggatgcctaaagattggtggtat

SEQ ID NO: 124188 - DNA, 222 bp, Glycine max
agtttatggtatttgcatgctcagattcgagagtttgtccatctcatattctggatttccaaccgggtgaggcctttatggtccgaaacattgccaacatggttcccccatatgacaagacgaagtattcaggagcaggggctgccatagaatatgcagtgttgcatttaaaggtggagaatattgtagttattggacacagttgctgtggaggtataaagg

SEQ ID NO: 124189 - DNA, 161 bp, Glycine max
tgaaattttgataaaccgcgatcacaggttgctgcaccttaaaaccggaaacaacatccatcgttatttgatttcaagaatttctcaatttctttctacttctttgtgtacgatttcttcagggaaagcaaatcactctctgtgctggccacagacttcgt

SEQ ID NO: 124190 - DNA, 263 bp, Glycine max
gtgaattgtggaatcctgcttgcacaaaagcaatgactatgtcatttaatccaaacccgtgttctgatgcatggagtttggaatttctgaagcgtactggatttcattgcgatatcatttgtgtcactggatggactgccaccccaatgcaggatgttcaggttacaattgattggtttatttcctctcaggaatgtgttcccaggacctattgtggtttaaatccacaaaatccttttgtgttaaataggtggatggggaaa

SEQ ID NO: 124191 - DNA, 199 bp, Glycine max
taaacactcatcagtcatcaccatggccaagctagttttttccctttgttttctgcttttcagtggctgctgcttcgacttcagttccagagagcagcctcagtaaaacgagtgccagatccaaaaactcaatgccctcaaaccggataaccgtatagagtcagaaggagggctcattgagacatggaaccctaacaac

SEQ ID NO: 124192 - DNA, 229 bp, Glycine max
ttttaaattttgtgaggttcattatgaagaaaagggacaagcttagttgtcaagttggaatcaacccatattctatggaatggactggtttggccaatagattactgagtaagggcaacgatattctgtgttgcgattatgctagttttgatggtttgattaccaagcaagttatgagcaagatggcagaaatgatcaacagtctttgtggtggtgatgaaaaatgatg

SEQ ID NO: 124193 - DNA, 241 bp, Glycine max
tagatcctcaatacaatgaggttcaggctcagatggaaacaaatttgtttaaattgtctcttgatgatgttgaaactcctaaaggttccatgttggatctgaaaatttctcaatctaaaattgcacttcccaagaacacagttggaggaaccattctgcgtagtgatctattggcaaattttttgacagagggcaattttagagcaagtgttgatttgcagcgcactcatcgtattagagg

SEQ ID NO: 124194 - DNA, 194 bp, Glycine max
tctcgagccgattcggctcgagaaagaattcctcttgccacatctgagggttttcctcatgtagtttcacgcaaaaatggtgctaaaggcaaaaggagatttgtttctggggatggtgaagagatgacattgattccgggaaccagtgttgaagaggcttacaacaagctaatagttgaacttgagaaaagtgt

SEQ ID NO: 124195 - DNA, 231 bp, Glycine max
atcggaaaccttgcaggggcaaactcattgttgaacgcattgccagaggaagtgattcagcacacttttaacctaaagagccagcaggccaggcaggtgaagaacaacaaccctttcagcttcctggttccacctcaggagtctcagaggagagctgtggcttagagagccctttttgcatgtgctaccacacttttgtccttttgggctctagctagtgctggtagcagt

SEQ ID NO: 124196 - DNA, 213 bp, Glycine max
gtctttgaacactcatcaccatggccaagcttgttctttccctttgtttccttcttttcagtggctgcttcgctctgagagagcaggcacagcaaaatgagtgccagatccaaaagctgaatgccctcaaaccggataaccgtatagagtcggaaggtgggttcattgagacctggaaccctaacaacaagccattccagtgtgccggtgttg

SEQ ID NO: 124197 - DNA, 148 bp, Glycine max
aaaattcttccaccaagttatgggtttccttgtgttgcttcttttctccctcttaggtctctcttctagttccagcatatcaactcatcgttccatattggaccttgacctaaccaagtttaccacacagaaacaggtgtcttcactg

SEQ ID NO: 124198 - DNA, 254 bp, Glycine max; identical to SEQ ID NO: 103230

SEQ ID NO: 124199 - DNA, 148 bp, Glycine max
atttgtccttgaatataatactcagcatggctaagcttgttctttccctttgttttctgcttttcagtggctgctgcttcgctttcagtttcagagagcagccacagcaaaacgagtgccagatccaacgcctcaatgccctcaaacc

SEQ ID NO: 124200 - DNA, 171 bp, Glycine max
aaaccgcgatcacaggttgccgcaccttaaaaccggaaacaaaagcaatcgttacttgatttcaagaatctctcaatttcttcctacttctttgtgtacgatttcttaagggaaagaaaatcactctctgtgctggccacagacttcgtgaatcattttcttttccacaca

SEQ ID NO: 124201 - DNA, 189 bp, Glycine max
tgctcattagatatagctatgaaaaattactgcgccaggctaaagctccaagtatgtttttacaatctttcaaaaattttgtttctttgtgtgtgtatggtgatgataacttaattagtgttcatgaatatgtcaagccttactttagtggttctaaattgaaaagctttctagctggtcataatatca

SEQ ID NO: 124202 - DNA, 207 bp, Glycine max
tgctcagtagatatagctatgacaaattactgcgccaggctaaagctccaagtatgtgttgacaatctttcaaaaattttgtgtctttgtgtgtgtatggtgatgataacttaattagtgttcatgcatatgtcaagccttactttagtggttctaaattgaaaagctttctagctggtcataatatcaccattactgatggtattg

SEQ ID NO: 124203 - DNA, 193 bp, Glycine max
ctcattctccatacctcaacgaagaggttaaagagacggcaacactttgctgtccgccttgaccgagcagagcttcgtcttggccctcgattttgccctaaagtactctcagtcacaacagacaccgtcgtcgtcgtcgtcgtcatcaatggcaccgaagcagaccaaggctgagaagaagatcgcttacgat

SEQ ID NO: 124204 - DNA, 192 bp, Glycine max
gttcaatatcctagtataccttaataaataatttaagatactatgatgagagcacggttcccattactgttgctgggacttgttttcctggcttcagtttctgtctcatttggcattgcttactgggaaaaagagaaccccaaacacaacaagtgtctccagagttgcaatagcgagagagactcgtacagg

SEQ ID NO: 124205 - DNA, 188 bp, Glycine max
attcaaaccttgctctatactacacagtacacacactagaagaataatggcttccatcctccactactttttagccctctctctttcttgctcttttcttttcttcttatccgactcagtcacccctacaaaaccaataaaccttgttgttctacccgttcaaaatgatggttccacagggctccatt

SEQ ID NO: 124206 - DNA, 176 bp, Glycine max
gggtttccttgtgttgcttcttttctccctcttaggtctctcttctagttccagcatatcaactcatcgttccatattggaccttgacctaaccaagtttaccacacagaaacaggtgtcttcactgttccaactatggaagagtgagcatggacgtgtctaccataaccacgaag

SEQ ID NO: 124207 - DNA, 239 bp, Glycine max
cactcctgttgttgccgtttctattattgacaccaacagcttggagaaccagctcgaccagatgcctaggagattctatcttgctgggaaccaagagcaagagtttctaaaatatcagcaagagcaaggaggtcatcaaagccagaaaggaaagcatcagcaagaagaagaaaacgaaggaggcagcatattgagtggcttcaccctggaattcttggaacatgcattcagcgtggaca

SEQ ID NO: 124208 - DNA, 238 bp, Glycine max
tatcgagcgattcggctcgagccaaggatgaaaaacttcctcatcgcaaagtttttgataaacctaagacgcgctgcttcactattctccctatggagtttaatcttgtggttcgtcagaagtttttaaattttgtgaggttcattatgaagaaaagggacaagcttagttgtcaagttggaatcaacccatattctatggaatggactggtttggcaatagattactgagtaagggc

SEQ ID NO: 124209 - DNA, 235 bp, Glycine max
attggtccttaaacactcatcagtcatcaccatggccaagctagttttttccctttgttttctgcttttcagtggctgctgcttcgctttcagttccagagagcagcctcagcaaaacgagtgccagatccaaaaactcaatgccctcaaaccggataaccgtatagagtcagaaggagggctcattgagacatgagcctaataaaagccattccagtgttgcccgttgtttgcc

SEQ ID NO: 124210 - DNA, 240 bp, Glycine max
ctcgagcgtggaaagcgtgaacaagacgaggacgaggacgaagatgaagataaacctgcgtcctagtcgaccaagccaaggaaagcgtgaacaagaccaggaccaggacgaggacgaagagaaagatgaagatcaacctcgcaagagccgcgaatggagatcgaaaaagacacaacccagaagacctagacaagaagaaccacgtgaaagaggatgcgagacaagaaacggggttgagga

SEQ ID NO: 124211 - DNA, 239 bp, Glycine max
atacaagtcatttgtgacagagtatccaattgtttcaattgaggatccttttgaccaggatgactgggagcactatgctaagcttactgctgaggttggaaccaatgtacaaattgttggtgatgatctcttggttaccaaccccaagagggttcagaaggcaattgatacaaaagcatgcaatgctcttctccttaaggtcaaccaaattggttctgtgactgagagtattgaagctg

SEQ ID NO: 124212 - DNA, 239 bp, Glycine max
aattaagctttcaagagacaaactgctttgaaaaatgggatccaaggttgttgcatccgttgcccttctcctctccatcaacattcttttcatttccatggttagctccagcagccactacgatccacagccccaaccttctcacgtcactgctcttattacacgacctagttgtccggatctgagtatttgcctcaatattttaggcgggtctctaggaaccgtggatgattgttgtg

SEQ ID NO: 124213 - DNA, 240 bp, Glycine max
gaaaaacccaaaaagattgatgccagattgagacaaagaatagatcctcaatacaatgaggttcaggctcagatggaaacaaatttgtttaaattgtctcttgatgatgttgaaactcctaaaggttccatgttggatcttaaaatttctcagtctaaaattgcacttcccaagaacacagttggaggaactattctgcgtagtgatctattggcaaattttctgacagagggcaatttt

SEQ ID NO: 124214 - DNA, 241 bp, Glycine max
taccagttcaatatcctagtacaccgtattaaagaatttaagatatactatgatgagagcgcggttcccattactgttgctgggagttgttttcctggcatcagtttctgtctcatttggcattgcgtattgggaaaagcagaaccccagtcacaacaagtgcctccgaagttgcaatagcgagaaagactcctacaggaaccaagcatgccacgctcgttgcaacctccttaaggtggag

SEQ ID NO: 124215 - DNA, 243 bp, Glycine max
gctttgctcagggatgtgatggttcaattctgattgagaatggtccacaatcggagagacatgcatttggacatcagggggttagagggtttgaagtgatagaaagagcaaaggcacaattggaaggctcttgccccggcttggtttcttgtgcagacatagtggctttggcagccagagacgctgtagtcatggcaaatgggccagcatatcaagttccaacagggaggagagatgggttgg

SEQ ID NO: 124216 - DNA, 242 bp, Glycine max
ggactggtctggccaatagattactgagtaagggcaatgatattctgtgttgcgattatgctagttttgatggtttgattaccaagcaagttatgagcaagatggcagaaatgataaacagtctttgtggtggtgatgaaaaattgatgcgtgaaaggacgcacctgctgttggcttgttgttcaaggatggcaatttgtaagaaagatgtttggagagttgaatgtggaatcccttctgga

SEQ ID NO: 124217 - DNA, 237 bp, Glycine max
atgaagagtactatcttctttgctctctttctagtttgtgccttcaccatctcatacctgccttcagccaccgctcagttcgtgctcgacactgatgatgatcctcttcaaaacggtggcacatactatatgttgccagttatgagaggaaagggcggtggaatagaagtagattcaactggaaaagaaatatgccctctcactgttgtgcaatcacccaatgagctcgataagggg

SEQ ID NO: 124218 - DNA, 236 bp, Glycine max
tctagacaagatctccatatctgttcccaaaagcttgtttgtaagaatggcttccggtgaacagaaattccctcctcaacaacaacaaacacagcctgggaaggagcatgctatgactccagtaccccaattcactagccctgactacaagccttcaaataaacttcaagggaagattgcattagtcactgggggtgattctgggattggacgagcggtgtgtaacttgtttgcct

SEQ ID NO: 124219 - DNA, 238 bp, Glycine max
actagttcaatatcctagtataccttaataaataatttaagatactatgatgagagcacggttcccattactgttgctgggacttgttttcctggcttcagtttctgtctcatttggcattgcttactgggaaaaagagaaccccaaacacaacaagtgtctccagagttgcaatagcgagagagactcgtacaggaaccaagcatgccacgctcgttgcaaactccttaaggtggag

SEQ ID NO: 124220 - DNA, 239 bp, Glycine max
tctcgagccgaatcggctcgagcttctctctcaacaacttcaccatcttcctcctcgatcatgtctcacttcaagggcaagtaccatgatgagcttatcgccaatgctgcgtacattggcactcctggaaagggtattcttgctgctgatgagtcaacagggacaattggcaagcgtttggccagcatcagtgtagagaacattgaatccaacaggcgagctcttagggagctgctttt

SEQ ID NO: 124221 - DNA, 235 bp, Glycine max
tgaacactcatcaccatggccaagcttgttctttccctttgtttccttcttttcagtggctgcttcgctctgagagagcaggcacagcaaaatgagtgccagatccaaaagctgaatgccctcaaaccggataaccgtatagagtcggaaggtgggttcattgagacctggaaccctaacaacaagccattccagtgtgccggtgttgccctctctcgctgcacccttaaccgca

SEQ ID NO: 124222 - DNA, 239 bp, Glycine max
caaagggttaatcaatggaatcttgatttcatggagcatagtgaacagggagacaggtaccgtgaattagcccatagagtggatgaggctcttggcttcatgaatgttgctgggctcacagccgaccatcccatcatgagtacaacagacttttggacctcccatgagtgtttgcttctcccttatgagcaagcacttactagggaggattctactactgggcttcattatgattgctc

SEQ ID NO: 124223 - DNA, 238 bp, Glycine max
ccaggatgtcctgagacgtttgaggagccacaagaacaatcaaacagaagaggctcaaggtcgcagaagcagcagctacaggacagtcaccagaagattcgtcacttcaatgaaggagacgtactcgtgattcctcctggtgttccttactggacctataacactggcgatgaaccagttgttgccatcagtcttcttgacacctctaacttcaataaccagcttgatcaaaccccta

SEQ ID NO: 124224 - DNA, 240 bp, Glycine max
ataatttaagatactatgatgagagcacggttcccattactgttgctgggacttgttttcctggcttcagtttctgtctcatttggcattgcttactgggaaaaagagaaccccaaacacaacaagtgtctccagagttgcaatagcgagagagactcgtacaggaaccaagcatgccacgctcgttgcaacctccttaaggtggagaaagaagaatgtgaagaaggtgaaattccacga

SEQ ID NO: 124225 - DNA, 237 bp, Glycine max
gcaaatggtctcatcaatgccatttacaaccctcaagctggtagcatcacaaccgccaccagccttgacttcccagccctctggcttctcaaactcagtgcccagtatggatcactccgcaagaatgctatgttcgtgccacactacaccctgaacgcgaacagcataatatacgcattgaatgggcgattagtacagtggtgaattgaccatggttgaaaagagtgtttgatggag

SEQ ID NO: 124226 - DNA, 234 bp, Glycine max
tgaccactcatcaccatggacaagcttgtacgtccccattgtttccttcttttcagtggctgcatcgctctgagagagcaggcacagcacaatgagtgacagatccagaagctgaatgccctcacaccggacagccgtatagagtcggaaggtgggttcattgagacctggagccctaacaacaagccattccagtgtgccggtgttgcactctctcgctgcacgcttaaccgc

SEQ ID NO: 124227 - DNA, 236 bp, Glycine max
caaaaagattgatgccagattgagacaaagaatagatcctcaatacaatgaggttcaggctcagatggaaacaaatttgtttaaattgtctcttgatgatgttgaaactcctaaaggttccatgttggatcttaaaatttctcaatctaaaattgcacttcccaaaaacacagttggaggaaccattctgcgtagtgacctattggcaaattttttgacagagggcaattttagag

SEQ ID NO: 124228 - DNA, 232 bp, Glycine max
gtttttacaatccttcaaaaattttgtttctttgtgtgtgtatggtgatgataacttaattagtgttcatgaatatgtcaagccttactttagtggttctaaattgaaaagctttctagctggtcataatatcaccattactgatggtattgacaaaactagtgcaactttgcaatttagaaagttagcagattgtgattttctcaagagaaactttaagcagatgtctaat

SEQ ID NO: 124229 - DNA, 235 bp, Glycine max
tgaacactcatcaccatggccaagcttgttctttccctttgtttccttcttttaagtggctgcttcgctctgagagagcaggcacagcaaaatgagtgccagatccaaaagctgaatgccctcaaaccggataaccgtatagagtcggaaggtgggttcattgagacctggaaccctaacaacaagccattccagtgtgccggtgttgccctctctcgctgcacccttaaccgca

SEQ ID NO: 124230 - DNA, 236 bp, Glycine max
agcttttctttttcttgttctttaattttctgattttagcaaattacaatagtagtgttattggtaggttttggtaaagatgttttcagttccaggggtgtcgggaattctgaacagaggaggagggcataagataaaagggacagtggtgttgatgaggaagaatgtgttggacttcaacagcgtggctgatcttactaaaggaaatgttgggggactcataggcaccggcctca

SEQ ID NO: 124231 - DNA, 237 bp, Glycine max
ctgctgttagatctgtacccgcctagccattgatttggaaaagtccaacttcaaggatgagtaagcttcagagtgatgctctaagagaagctatctcaggaatcatggctgattccaaggaaaagaacaggaaatttgtggagaccattgaactccaaattgggttgaaaaattatgatccccagaaggacaagcgtttcagtggctctgttaagttgcctcatattcctcgcccca

SEQ ID NO: 124232 - DNA, 237 bp, Glycine max
cttaattattaacacttccttagttcaatatggggaagcccttcactctctctctttcttccctttgcttgctactcttgtcgagtgcatgctttgctattagctccagcaagctcaacgagtgccaactcaacaacctcaacgcgttggaacccgaccaccgcgttgagtccgaaggtggtttgattcaaacatggaactctcaacaccctgagctgaaatgcgccggtgtcactg

SEQ ID NO: 124233 - DNA, 236 bp, Glycine max
gtttgatagctttgatgaagttcatggactctattcaggcggaattaagctgccaacagatataatcagcaagattagtccactacccggcctaagggaatcttccgaactgatggtggacaaggccctaaagttccttcttccaaaagtatttcaggtgattaagtctgcatggatgactgatgaggaatttgcaggagaaatgcttgctggtgtaaatccaaacttgattcgtt

SEQ ID NO: 124234 - DNA, 223 bp, Glycine max
ttgaggccaggcaagccccactcaaccaccacacctctcctcgttcacgctacccctttctgctcttcttctacctttcaagttttaaaagtataaagatggcagagacattcctatttacctcagagtcggtgaacgagggacaccctgacaagctctgcgaccaaatctccgatgctgtcctcgacgcttgcctcgcgggcccaacagcaaagtttgcctg

SEQ ID NO: 124235 - DNA, 122 bp, Glycine max
ctagttcaatatcctagtataccttaataaataatttaagctactatgatgagagcacggttcccattactgttgctgggacttgttttcctggcttcagtttctgtctcatttggcattgc

SEQ ID NO: 124236 - DNA, 233 bp, Glycine max
gccaaccatacatatgttccaagtgagacaccagcagcacttgtggggtacagagaagaagaattgaagaatttaagaggagatggacaaggagagcgcaaagaacatgataggatctatgattatgatgtctacaatgatttgggcaatccagatcacggtgaaaattttgctcgcccaattcttggagggtctagcactcatccctaccctcgtaggggaagaactggtcg

SEQ ID NO: 124237 - DNA, 233 bp, Glycine max
cattcttgcaacaattttgggaacaaccttctggaaactcttttcctttcttagagatgctggtaatggaggagtttttgttggcaatgttgcttcagcattcacaacttcaagtgtgcttgaggcccaaagtagaaagcccaacagatatgaagtttcccaatacagatatcgcaatgtgccaataaagcgcagagcatgggttgaaggccagatgtctttcgatcagtctg

SEQ ID NO: 124238 - DNA, 235 bp, Glycine max
ggctatgaggagagccgagaaggagagactgaaggaaggtgcagcagctgacgaggaacaaaagaaaatgaagaaagagactaagaagaaaagctcgtccacttccaaggatgagaccacaaagttgacctctacaaagaagaaagccagtggctctgatgaagatcatcgatctccagctcacagtcaagttgatgagaaagaagaggctcctgatgaagatgatgatgatggt

SEQ ID NO: 124239 - DNA, 234 bp, Glycine max
gcaagttatgagctaaatggcagaaatgataaacagtctttgtggtggtgatgcaaaattgatgcgtgaaaggacacacctgctgttggcttgttgttcaaggatggcaatttgtaagaaagatgtttggagagttgaatgtggaatcccttctggatttccgctcacagttatttgcaatagcatttttaatgagatgctcactatatatagctatgaaaaattactgcgcca

SEQ ID NO: 124240 - DNA, 89 bp, Glycine max
agaacagtcgtcggctcctcgctcgcccttcgctgctgcgccatcaccgtgcccttctcaaagcgattttaaactaaccgcgttctttt

SEQ ID NO: 124241 - DNA, 237 bp, Glycine max
cttattaacactttccttagttcaatatggggaagcccttcttcactctctctctttcttccctttgcttgctactcttgtcgagtgcatgctttgctattacctccagcaagttcaacgagtgccaactcaacaacctcaacgcgttggaacccgaccaccgcgttgagtccgaaggtggtcttattgaaacatggaactctcaacaccctgagctgcaatgcgccggtgtcactg

SEQ ID NO: 124242 - DNA, 161 bp, Glycine max
gaaaaaaggtgtcatcacccaagtaaagtaccaagggggctgtggaagcggttgggcgttttctgccacgggagccatagaagcagcacatgcaatagcaacaggagaccttgttagcctttctgaacaagaactcgtagactgtgtggaagaaagcgaag

SEQ ID NO: 124243 - DNA, 232 bp, Glycine max
tgctactcttgtcgagtgcatgctttgctattacctccagcaagttcatcgagtgccaactcaacaacctcaacgcgttggaacccgaccaccgcgttgagtccgaaggtggtcttattgaaacatggaactctcaacaccctgagctgcaatgcgccggtgtcactgtttccaaacgcaccctcaactgcaacggcctccacttgccatcttactcaccttatccccaaat

SEQ ID NO: 124244 - DNA, 232 bp, Glycine max
ctgaagcaaagcaatggctacttcaaagttgaaaacccagaatgtggttgtatctctctccctaaccttaaccttggtactggtgctactgaccagcaaggcaaactcagcggaaactgtttctttcagctggaacaagttcgtgccgaagcaaccaaacatgatcctccaaggagacgctattgtgacctcctcgggaaagttacaactcaataaggttgacgaaaacggc

SEQ ID NO: 124245 - DNA, 232 bp, Glycine max
ccgggaaccagtgttgaagaggcttacaacaagctaacagttgaacttgagaaaagtgttcctacattggttggcattgaatgtcccaaggatgaaaaacttcctcgtcgcaaagtttttgataaacctaagacgcgctgcttcactattctccctatggagtttaatcttgtggttcgtcagaagtttttaaattttgtgaggttcattatgaagaaaagggacaagctta

SEQ ID NO: 124246 - DNA, 233 bp, Glycine max
ctatatttccatgattttgttgccaagtgcctaacaaaagaaccacgtctccgccctactgcttctgagatgttgaagcacaaattctttgaaaagtggaaaagtggatctgctgcaatgttgccaaaactagaaaaggcgaggcaaatcagggcttcaatggctttgcaggcacaagctcttccagctgcatcagaagatcaggagttagattcaaaactaaatgatgaata

SEQ ID NO: 124247 - DNA, 232 bp, Glycine max
ctcgagccgtgaacactcatcaccatggccaagcttgttctttccctttgtatccttcttatcagtgagtgcttcgctctgagagagcaggcacagcacaatgagtgccagatccaaaagctgaatgccctcaaaccggataaccgtatagagtcggaaggtgggttcattgagacctggaaccctaacaacaagccattccagtgtgccggtgttgccctctctcgctgca

SEQ ID NO: 124248 - DNA, 189 bp, Glycine max
tgaaattttgataaaccgcgatcacaggttgccgcaccttaaaaccggaaacaaaagcaatcgttacttgatttcaagaatctctcaatttcttcctacttctttgtgtacgatttcttaagggaaagagaatcactctctgtgctggccacagacttcgtgaatcattttcttttccacacaacatac

SEQ ID NO: 124249 - DNA, 225 bp, Glycine max
attaacacttccttagttcaatatggggaagcccttcactctctctctttcttccctttgcttgctactcttgtcgagtgcatgctttgctattagctccagcaagctcaacgagtgccaactcaacaacctcaacgcgttggaacccgaccaccgcgttgagtccgaaggtggtttgatccaaacatggtctcaacacctgagctgaaatggcggtgtcactgt

SEQ ID NO: 124250 - DNA, 166 bp, Glycine max
atacacacacacacacacactaagaataatggcttctatcctccactactttttagccctctctctttctttctctttccttttcttcttatccgactccgtccccattccccaacaccacactaaccctacaaaacctataaaccttctggttctacccgttaaa

SEQ ID NO: 124251 - DNA, 224 bp, Glycine max
cggctcgagccgaggttgtcttgttcaacattaaggggagagccgtacttgggttggtgagggacagtgaaacagaaaaaatcaccctagaacctggagacatgatacacataccagcaggcacaccactgtacatcgttaacagagatgagaatgagaagctcctccttgccatgctccatatacctgtctctactcctggaaaatttgaggaatttttcggg

SEQ ID NO: 124252 - DNA, 228 bp, Glycine max
atagagctgaattgtctgaacaagatatatttgtaatcccagcaggttatccagttgtggtcaacgctacctcagatctgaatttctttgcttttggtatcaatgccgagaacaaccagaggaacttccttgcaggttcgaaagacaatgtgataagccagatacctagtcaagtgcaggagcttgcgttccctgggtctgcaaaagatattgagaacctaataaaga

SEQ ID NO: 124253 - DNA, 229 bp, Glycine max
cttgctctatactacacagtacacacactagaagaataatggcttccatcctccactactttttagccctctctctttcttgctcttttcttttcttcttatccgactcagtcacccctacaaaaccaataaaccttgttgttctacccgttcaaaatgatggttccacagggctccattgggccaacctccaaaaaagaacccctctaatgcaagtaccagtcctggt

SEQ ID NO: 124254 - DNA, 228 bp, Glycine max
ctagttcaatatcctagtataccttaataaataatttaagatactatgatgagagcacggttcccattactgttgctgggacttgttttcctggcttcagtttctgtctcatttggcattgcttactgggaaaaagagaaccccaaacacaacaagtgtctccagagttgcaatagcgagagagactcgtacaggaaccaagcatgccacgctcgttgcaacctcctt

SEQ ID NO: 124255 - DNA, 230 bp, Glycine max
ccattgtctttgaacactcatcaccatggccaagcttgttctttccctttgtttccttcttttcagtggctgcttcgctctgagagagcaggcacagcaaaatgagtgccagatccaaaagctgaatgccctcaaaccggataaccgtatagagtcggaaggtgggttcattgagacctggaaccctaacaacaagccattccagtgtgccggtgttgccctctctcgct

SEQ ID NO: 124256 - DNA, 229 bp, Glycine max
cttaattattaacacttccttagttcaatatggggaagcccttcactctctctctttcttccctttgcttgctactcttgtcgagtgcatgctttgctattagctccagcaagctcaacgagtgccaactcaacaacctcaacgcgttggaacccgaccaccgcgttgagtccgaaggtggtttgattcaaacatggaactctcaacaccctgagctgaaatgcgccgg

SEQ ID NO: 124257 - DNA, 228 bp, Glycine max
cgtgaacatgcagatagtgagaaacctacaaggtgagaacgaagaggaggatagtggagccattgtgacagtgaaaggaggtctaagagtcacagctccacgcactgtggctgctcttcctcatcatcatcatcttcggaacattttagaggcctcctacgataccaaattcgaggagataaacaaggttctgtttagtagagaggaagggcagcagcaaggggagca

SEQ ID NO: 124258 - DNA, 226 bp, Glycine max
agaagtttttaaattttgtgaggttcattatgaagaaaagggacaagcttagttgtcaagttggaatcaacccatattctatggaatggactggtttggccaatagattactgagtaagggcaacgatattctgtgttgcgattatgctagttttgatggtttgattaccaagcaagttatgagcaagatggcagaaatgatcaacagtctttgtggtggtgatga

SEQ ID NO: 124259 - DNA, 201 bp, Glycine max
ctcgagccgattcggctcgagtgaaattttgataaaccgcgatcacaggttgccgcaccttaaaaccggaaacaaaagcaatcgttacttgatttcaagaatctctcaatttcttcctacttctttgtgtacgatttcttaagggaaagaaaatcactctctgtgctggccacagacttcgtgaatcattttcttttccac

SEQ ID NO: 124260 - DNA, 229 bp, Glycine max
gaaacctacaaggtgagaacgaagaggaggatagtggagccattgtgacagtgaaaggaggtctaagagtcacagctccagccatgaggaagccacagcaagaagaagatgatgatgatgaggaagagcagccacagtgcgtggagacagacaaaggttgccaacgccaaagcaaaaggagcagaaatggcattgatgagaccatttgcacaatgagacttcgccaaaa

SEQ ID NO: 124261 - DNA, 230 bp, Glycine max
gatgattttcctgaaaaggaagatcaagaaaaacccaaaaagattgatgccagattgagacaaagaatagatcctcaatacaatgaggttcaggctcagatggaaacaaattggttaaaattgcctccttgatgatgttgaaactcctaaaggttccatgttggatcttaaaatttctcagtctaaaattgcacttcccaagaacacagttggaggaactattctgcgta

SEQ ID NO: 124262 - DNA, 232 bp, Glycine max
aatcaaccaatatactacgtactacatgtatgatcctcatcaagcaaaacctaaagtcccaggctatcaaatggactggaatgcaggatttgcttatgcaaagaacggagtgcctattggtccaagggcttattcttattggctttacaacgtaccatggggcatgtacaaatcattgatgtacataaaggaacgttatggaaacccaactgtgttcttatccgaaaatggc

SEQ ID NO: 124263 - DNA, 276 bp, Glycine max
aaacactcatcagtcatcaccatggccaagctagttttttccctttgttttctgcttttcagtggctgctgcttcgctttcagttccagagagcagcctcagcaaaacgagtgccagatccaaaaactcaatgccctcaaaccggataaccgtatagagtcagaaggagggctcattgagacatggaaccctaacaacaagccattccagtgtgccggtgttgccctctctcgctgcaccctcaaccgcaacgcccttcgtagaccttcctacacc

SEQ ID NO: 124264 - DNA, 272 bp, Glycine max
gagaagaagatgggtttgaagaacaacatggtggtgctaaaggtgtgtttggtgctacttttccttgtggggggtactactagtgccaacttgaggctgagtaagcttggcctgctcatgaaaagtgatcatcatcaacactcaaatgatgatgagtcttcaaaaccatgctgtgatcaatgcgcatgcacaaagtcaaaccctcctcaatgccgctgttcagatatgaggctgaattcgtgccattcagcttgcaaatcttgtatttgcgc

SEQ ID NO: 124265 - DNA, 271 bp, Glycine max
atttgacattttgataaaccgcgatcacaggttgccgcaccttaaaaccggaaacaaaagcaatcgttacttgatttcaagaatctctcaatttcttcctacttctttgtgtacgatttcttaagggaaagaaaatcactctctgtgctggccacagacttcgtgaatcattttcttttccactcttagtttattctctgaacactctcctatttgatataggacttcgtgtcagatttaaacttcttctgtttctttctcagttctctgc

SEQ ID NO: 124266 - DNA, 270 bp, Glycine max
agacaccatcttctttgctctctttctcttttgtgccttcaccacctcatacctactctcagccatcgctgatttcgtgctcgataatgaaggtaaccctcttgaaaatggtggcacatattatatcttgtcagacataacagcatttggtggaataagagcagccccaacgggaaatgaaagatgccctctcactgtggtgcaatctcgcaatgagctcgacaaagggattggaacaatcatctcgtccccatatcgaatccgttttat

SEQ ID NO: 124267 - DNA, 269 bp, Glycine max
cgcctgagaaacggctaccacatccaaggaaggcagcaggcgcgcaaattacccaatcctgacacggggaggtagtgacaataaataacaataccgggctcattgagtctggtaattggaatgagtacaatctaaatcccttaacgaggatccattggagggcaagtctggtgccagcagccgcggtaattccagctccaatagcgtatatttaagttgttgcagttaaaaagctcgtagttggaccttgggttgggtcgatcggtccg

SEQ ID NO: 124268 - DNA, 267 bp, Glycine max
taaaattcttccaccaagttatgggtttccttgtgttgcttcttttctccctcttaggtctctcttctagttccagcatatcaactcatcgttccatattggaccttgacctaaccaagtttaccacacagaaacaggtgtcttcactgttccaactatggaagagtgagcatggacgtgtctaccataaccacgaagaagaggcaaagagacttgagattttcaagaataacttgaactatatcagggacatgaatgcaaacagaa

SEQ ID NO: 124269 - DNA, 272 bp, Glycine max
aacttattaacactttccttagttcaatatggggaagcccttcttcactctctctctttcttccctttgcttgctactcttgtcgagtgcatgctttgctattacctccagcaagttcaacgagtgccaactcaacaacctcaacgcgttggaacccgaccaccgcgttgagtccgaaggtggtcttattgaaacatggaactctcaacaccctgagctgcaatgcgccggtgtcactgtttccaaacgcaccctcaaccgcaacggcctcc

SEQ ID NO: 124270 - DNA, 274 bp, Glycine max
agcgctgcttcactattctccctatggagtttaatcttgtggttcgtcagaagtttttaaattttgtgaggttcattatgaagaaaagggacaagcttagttgtcaagttggaatcaacccatattctatggaatggactggtttggccaatagattactgagtaagggcaacgatattctgtgttgcgattatgctagttttgatggtttgattaccaagcaagttatgagcaagatggcagaaatgatcaacagtctttgtggtggtgatga

SEQ ID NO: 124271 - DNA, 274 bp, Glycine max
caaacccctagggtattttaccttgctgggaacccagatatagagtacccagagaccatgcaacaacaacaacagcagacaagtcatggtggacgcaagcaggggcaacaccagcaggaggaagaggtagaaggtggcagcgtgctcagtggcttcagcaaacacttcttggcacaatccttcaacaccaacgaggacatagctgagaaacttcagtctccagacgacgacaggaagcagatcgtgacagtggaaggaggtctcagcgttatca

SEQ ID NO: 124272 - DNA, 274 bp, Glycine max; identical to SEQ ID NO: 103940

SEQ ID NO: 124273 - DNA, 272 bp, Glycine max
gttgccatcagtcttcttgacacctctaacttcaataaccagcttgatcaaacccctagggtattttaccttgctgggaacccagatatagagtacccagagaccatgcaacaacaacaacagcagaaaagtcatggtggacgcaagcaggggcaacaccagcaggaggaagaggaagaaggtggcagcgtgctcagtggcttcagcaaacacttcttggcacaatccttcaacaccaacgaggactccgctgagaaacttcagtctccaga

SEQ ID NO: 124274 - DNA, 271 bp, Glycine max
ggctacttcaaagttgaaaacccagaatgtggttgtatctctctccctaaccttaaccttggtactggtgctactgaccagcaaggcaaactcagcggaaactgtttctttcagctggaacaagttcgtgccgaagcaaccaaacatgatcctccaaggagacgctattgtgacctcctcgggaaagttacaactcaataaggttgacgaaaacggcaccccaaaaccctcgtctcttggtcgcgccctctactccacccccatccacatt

SEQ ID NO: 124275 - DNA, 270 bp, Glycine max
actttgtaaaagatgaagtatggtatgccttagttgttgtgataagcaatgcttctgagcttcatggatatacagtaagagcattatacagagcatttcaaacgtcagctgaacaggagactctagttcgagttacagtgtggtgcattggggagtatggtgacatgttagtcaataatgttggaatgctagacatagaagatccaataacagtgactgagtccgatgcagttgatgtcatagagattgctataaaacgccatgcatcag

SEQ ID NO: 124276 - DNA, 271 bp, Glycine max
actcgccatacccgttaacaagcctggtagatttgagagtttcttcctatctagcactgaagctcaacaatcctacttgcaaggattcagcaggaacattttagaggcctcctacgataccaaattcgaggagataaacaaggttctgtttagtagagaggaagggcagcagcaaggggagcagaggctgcaagagagcgtgattgtggaaatctcgaaggaacagattcgggcactgagcaaacgtgccaaatctagttcaaggaaaacc

SEQ ID NO: 124277 - DNA, 265 bp, Glycine max
caaataattaattaaattcctcgtggaatcttgttgaagccatgtctacagctggtcaggtcatcaagtgcagagctgcggtggcatgggaagcagggaagccactatcgatagaaaccatagaagtggcaccaccccagaaaggtgaagtgcgtttgaagatcctcttcaactccctttgccgtacagatgtttactggtgggatgctaagggccagactccgctgtttcctcgtatcttaggccacgaagcttcggggattgt

SEQ ID NO: 124278 - DNA, 176 bp, Glycine max
atatgcaggagaatggcatggttcccattgttgagcctgagatccttgttgatggacctcatgacattcacaagtgtgccgccgtcaccgagcgtgtgcttgcagcatgctacaaggctttgaatgatcaccatgtccttcttgagggtaccctattgaagccaaacatggtcacc

SEQ ID NO: 124279 - DNA, 264 bp, Glycine max
ggtggaataagagcagccccaacgggaaatgaaagatgccctctcactgtggtgcaatctcgcaatgagctcgacaaagggattggaacaatcatctcgtccccatatcgaatccgttttatcgccgaaggcatcctttgagccttaagttcgattcatttgcagttataatgctgtgtgttggaattcctaccgagtggtctgttgtggaggatctaccagaaggacctgctgttaaaattggtgagaacaaagatgcaatgg

SEQ ID NO: 124280 - DNA, 255 bp, Glycine max
gctgatgttcttgcaagcgagctcatgaatttgaaaaacatgttgctcatgaaagcctcaaggatcaaattcctgctgttgacaagttgtattctactaaggttaataagtttgcaaaaattatgaaccttagacaaagtgttgttagtgatcttaaacttcttactgatgggaagttgtatgagggtatacatattcctgtatctaatattagtgcaggggagaatcatgtagttcaaatacgcctaatggcac

SEQ ID NO: 124281 - DNA, 265 bp, Glycine max
tctgacgtgagagtgcggtttcctttgttggtgttgctgggaactgttttactggcatcagtttgtgtctcattaaaggtgagagaggatgagaataaccctttctacttgagaagctctaacagcttccaaactctctttgagaaccaaaacggtcgcattcgtctcctccagagattcaacaaacgctccccacaacttgagaaccttcgagactaccggattgtccagtttcagtcaaaacccaacacaatccttctccccc

SEQ ID NO: 124282 - DNA, 266 bp, Glycine max
cgctctctaataacatttctaatctcattctccttctgttcaaacactctctctcatggcatcagataagaagattaggatcggcatcaacgggtttggaaggattggccgtttggtggccagggttgcccttcaaaggaatgatgttgaacttgttgctgtcaacgatcttttcatcaccactgattacatgacatacatgttcaagtacgacaccgttcatggccagtggaagcattttgatgtgaaggtgaaggactctaaga

SEQ ID NO: 124283 - DNA, 265 bp, Glycine max
gcaaatggtctcatcaatgccatttacaaccctcaagctggtagcatcacaaccgccaccagccttgacttcccagccctctggcttctcaaactcagtgcccagtatggatcactccgcaagaatgctatgttcgtgccacactacaccctgaacgcgaacagcataatatacgcattgaatgggcgggcattggtacaagtggtgaattgcaatggtgagagagtgtttgatggagagctgcaagacggatcggtgctgatcg

SEQ ID NO: 124284 - DNA, 266 bp, Glycine max
ctcagtttcctttgttacattaaacaaggttggtggatttcttcagaggatggacctggctcgcaagtatgcgtttggaaagatgctggtgattggatcacaggcaccatttaaggtgaaggggttgtggctcttccgcggccaagagattccacaatttgtgattgatgaatgctatgatatggagctctatgactggaccaaggttgatatctctgatgaaactcagaaagagcgcgtcaatcagatgatcgaggattatgaac

SEQ ID NO: 124285 - DNA, 154 bp, Glycine max
ttcaaacttaattattaacacttccttagttcaatatgggaaagcccttcacactctctctttcttccctttgcttgctactcttgtcgagtgcatgctttgctattagctccagcaagctcaacgagagccaactcaacaacctcaacgcgtt

SEQ ID NO: 124286 - DNA, 262 bp, Glycine max
cgcccacctcatcagaaggaagagcgaaacaagaggaagatgaggatgaggagcagcagcgagagagcgaagaaagtgaagattctgagttacgaagacataagaataagaacccttttctcttcggctctaacaggttcgaaactctcttcaaaaaccaatatggtcgcattcgcgtcctccagaggttcaaccaacgctccccacaacttcagaatatccgagactaccgcattttggagttcaactccaaacccaacac

SEQ ID NO: 124287 - DNA, 264 bp, Glycine max
gagcgaagagaatggctcccaagggtttaatctttttggctgtgttatgcttctcagcactgtcactgagtcgttgtcttgcggaggataatggacttgttatgaacttctacaaggaatcatgccctcaggctgaagacatcatcaaagaacaagtcaagcttctctacaagcgccacaagaacactgctttctcctggctcagaaacatcttccatgactgtgctgttcagagttgtgatgcttcactgttgctggactcca

SEQ ID NO: 124288 - DNA, 259 bp, Glycine max
ctatgatgagagtgcggtttcctttgttggtgttgctgggaactgttttcctggcatcagtttgtgtctcattaaaggtgagagaggatgagaataaccctttctacttgagaagctctaacagcttccaaactctctttgagaaccaaaacggtcgcattcgtctcctccagagattcagcaaacgctcgctataacttgagaaccttcgagactaccggattgtccagtttcagtcacaacgcatcacaatccttct

SEQ ID NO: 124289 - DNA, 262 bp, Glycine max
tcctagtataccttaataaataatttaagatactatgatgagagcacggttcccattactgttgctgggacttgttttcctggcttcagtttctgtctcatttggcattgcttactgggaaaaagagaaccccaaacacaacaagtgtctccagagttgcaatagcgagagagactcgtacaggaaccaagcatgccacgctcgttgcaacctccttaaggtggagaaagaagaatgtgaagaaggtgcaattccacgacca

SEQ ID NO: 124290 - DNA, 259 bp, Glycine max
agcagtcaaaaggagtgattgggcctcattggtacaagtgtttttaacaaacagcaacagtacagagcatttcgatgcatgtaagtggacaaaatcggaaccacattcctgggaattgatcttcccaatagaggtatgtggtcctaataatggttttgaaatgtggagttctgagtgggcaaatcaaacttcatggcacttgagtttccttattgacaatcccaaacagtctacagtttttgatattctcttgggaatt

SEQ ID NO: 124291 - DNA, 259 bp, Glycine max
accttaataaataatttaagatactatgatgagagcacggttcccattactgttgctgggacttgttttcctggcttcagtttctgtctcatttggcattgcttactgggaaaaagagaaccccaaacacaacaagtgtctccagagttgcaatagcgagagagactcgtacaggaaccaagcatgccacgctcgttgcaacctccttaaggtggagaaagaagaatgtgaagaaggtgaaattccacgaccacgacca

SEQ ID NO: 124292 - DNA, 246 bp, Glycine max
gttcaatatcctagtacaccgtattaaagaatttaagatatactatgatgagagcgcggttcccattactgttgctggaagttgttgtcctggcatcagtttctgtctcatttggcattgcgtattgggaaaagcagaaccccagtcacaacaagtgcctccgaagttgcaatagcgagaaagactcctacaggtaccaagcatgccacgctcgttgcaacctccttaaggtggaggaagaagaag

SEQ ID NO: 124293 - DNA, 247 bp, Glycine max
atccaaacccgtgttctgattaaatgacatagtcatttaatccaaacccgtgttctgatgcgtggagtatggaatttctgaagcgtaccggatttcattgtgatatcacttgtgtcactggatggactgccactccaatgcaggatgttcaggttacgatcgattgggttatttcctctcaggaatgtgttcccaggacctattgtgttttgaatccgcaaaatccttttgtgtcatatcggtggat

SEQ ID NO: 124294 - DNA, 259 bp, Glycine max
ctcgagcgattaggctcatgtcattgttgtgactcgtacttcttcgtcgttatcttcttcttttgttgtatgtgtgtttgttttttctctcacctgaaaatgtcttgctgcggtggtaactgtggttgcggaagcgcctgcaagtgcggcaacggctgcggaggctgcaagatgtacccagacttgagctacaccgagtcaaccaccaccgagaccttggtcatgggagtggcaccagttaaggctcaattcgagagtg

SEQ ID NO: 124295 - DNA, 264 bp, Glycine max
ggctcgagaagtcttccatagccccccaaaaatgaagagcaccatcttctttgctctctttctcttttgtgccttcaccacctcatacctaccttcagccatcgctgatttcgtgctcgataatgaaggtaaccctcttgaaaatggtggcacatattatatcttgtcagacataacagcatttggtggaataagagcagccccaacgggaaatgaaagatgccctctcactgtggtgcaatctcgcaatgagctcgacaaagg

SEQ ID NO: 124296 - DNA, 234 bp, Glycine max
ctttccctttgtttccttcttttcagtggctgcttcgctctgagagagcaggcacagcaaaatgagtgccatatccaaaagctgaatgccctcaaaccggataaccgtatagagtcggaaggtgggttcattgagacctggaaccctaacaacaagccattccagtgtgccggtgttgccctctctcgctgcacccttaaccgcaatgcccttcgtagaccttcctaaaccaac

SEQ ID NO: 124297 - DNA, 258 bp, Glycine max
taccaaaataggtggcgtgaagcattagagaggcttcttgagacaaataacttcccagagtttactggtagggtatgcccagcaccttgtgaaggttcttgtgtccttggtattattgagaatccagtatctattaaaagcatagaatgtgctatcatagacaaagcttttgaggaggggtggatggtgccacgacctccagctaggagaactgggaaaagagtggccgttgttggaagtggaccgtctggcctggca

SEQ ID NO: 124298 - DNA, 234 bp, Glycine max
ctctaagattaactacaggaatatgcctaccctcatacaacttagcatcagtaagaagtttaagagggtaagcatattcctgtatttaatattagtgcaggggaaaatcatgtagttcaaatacccttaatggcacaggaggaaattctgtcttctagtgcaagtgatttcagagctgcaattgtgagtaaaaatagcaagcctcaagctactgcaatgcatgtgggagctata

SEQ ID NO: 124299 - DNA, 258 bp, Glycine max
gccagttctgatatttacaccatctgctctcaagactgtgaattatggaatcctgcttgcacaaaagcaatgactatgtcatttaatccaaacccgtgttctgatgcatggagtttggaatttttgaagcgtaccggatttcactgtgatatcatttgtgtcactggatggactgccaccccaatgcaggatgttcaggttacaattgattggtttatttcctctcaggaatgtgttcccaggacttattgtgtttta

SEQ ID NO: 124300 - DNA, 260 bp, Glycine max
tggggaaactgactttcccccagggcacttcccgaagtgtcaaaagaatgcctctttctatagggggaggagctggtgcaaagaatgctattctcatgaatatgccaaatgctgttctttcaatgtggagatattttgttggagatctcgtctttgaagtttctaagatgacttctccctacattaaatgtacagtctctttcttcatagcatttggaaatttggctgatgacaccatcaattttgaggcttttccccac

SEQ ID NO: 124301 - DNA, 184 bp, Glycine max
tttgaaattttgatacaccgcgatcacaggttgccgcaccttaaaaccggaaacaaaagcaatcgttacttgatttcaagaatctctcaatttcttcctacttctttgtgtacgatttcttaagggaaagaaaatcactctctgtgctggccacagacttcgtgaatcattttcttttccacac

SEQ ID NO: 124302 - DNA, 260 bp, Glycine max
cgcaactaaataagaaatgaagagtactatcttctttgctctctttctagtttgtgccttcaccatctcatacctgccttcagccaccgctcagttcgtgctcgacactgatgatgatcctcttcaaaacggtggcacatactatatgttgccagttatgagaggaaagggcggtggaatagaagtagattcaactggaaaagaaatatgccctctcactgttgtgcaatcacccaatgagctcgataaggggattggac

SEQ ID NO: 124303 - DNA, 234 bp, Glycine max
tgttgcttctattctccctcttaggtctctcgtctagttcaagcatatgcaactcatcgttccatattggaccttgacctaaccaagtttaccacacagaaacaggtgtcttcactgttccaactatggaagagtgagcatggacgtgtctaccataaccacgaagaagaggcaaagagacttgagattttcaagaataacttgaactatatcagggacatgaatgctaacaga

SEQ ID NO: 124304 - DNA, 256 bp, Glycine max
gcatggtgcatgcagcggaacatgtagtagaatagaagagaagagaagattgttaattgaagcagaggaagacctaacatgtccgttacggagctgaaggagcgtcacttggcggcgacggaaaccgtcaacagtctcagggagcgcttgaaggagaggcgtctttcattgctcgatacagatattgctggctacgccagtctcaaggtagatcccctgtcacctttggtcccaccgatctcgtttgttgtagaac

SEQ ID NO: 124305 - DNA, 256 bp, Glycine max
gtgccaataaagcgcagagcatggtgttgaaggccagatgtctttcgatcagtctgtagtagcaattatgtctaaatgcaaagccagcatgagaatgggaaacactgatgctcaaattttgatggttccagggcgcagattcatagctcatggacattttttcaaaaatctgactcagaaagtgcgagtccaaattgttacatctgaaaagagttactggcatgtgtatgatcctgacaagtttcagatgtttgac

SEQ ID NO: 124306 - DNA, 259 bp, Glycine max
gggagaagaggtcgagtttcacagcagcaatggtgtacgtcaaggctcagaaatcaaaagcctacttcaagagatatcaagtcaagttcaagagaagaagagagggaaaaaccgattaccgtgccaggattcggttgattaatcaggacaagaacaaatataacactccgaaataccgatttgttgttcgctttagcaacaaggacattgttgcacaaataatatctgctagcattgctggcgatattgttcttgctgc

SEQ ID NO: 124307 - DNA, 255 bp, Glycine max
tctttgaacactcatcaccatggccaagcttgttctttccctttgttaccttcttttcagtggctgcttcgctctgagagagcaggcacagcaaaatgagtgccagatccaaaagctgaatgccctcaaaccggataaccgtatagagtcggaaggtgggttcattgagacctggaaccctaacaacaagccattccagtgtgccggtgttgccctctctcgctgcacccttaaccgcaatgcccttcgtagacc

SEQ ID NO: 124308 - DNA, 254 bp, Glycine max
ttgacttacaggataaagacaattaccttcagaagctgtcgttgtaaatgttacatgtggtagtggacgtggtggtttacccaccactgcttggattagttctgcagttaacaatcgctcctcagatatcaacaaaaagattcgcacagcacttgggaaaggtaagaaaattgtttttcttaccagagttgatccttgtccagtagctttactggctgttctttttggcgttaagaatgaaattctgagttcta

SEQ ID NO: 124309 - DNA, 251 bp, Glycine max
aaacatgttgctcatgaaagcctcaaggatcagattcctgctgttgacaagttgtattctactaaggttaataaatttgcaaaaattatgaaccttagacaaagtgttgttggtgatcttaaacttcttactgatgggaagttgtatgagggtaagcatattcctgtatctaatattagtgcaggggaaaatcatgtagttcaaatacccttaatggcacaggaggaaattctgtcttctagtgcaagtga

SEQ ID NO: 124310 - DNA, 249 bp, Glycine max
ccctcctcgccgaccaagccatggaaagcgtgaacaagacgaggacgaggacgaagatgaagataaacctcgtcctagtcgaccaagccaaggaaagcgtgaacaagaccaggaccaggacgaggacgaagatgaagatgaagatcaacctcgcaagagccgcgactggagatcgaaaaagacacaacccagaagacctagacaagaagaaccacgtgaaagaggatgcgagacaagaaacggggttga

SEQ ID NO: 124311 - DNA, 256 bp, Glycine max
cttaattattaacacttccttagttcaatatggggaagcccttcactctctctctttcttccctttgcttgctactcttgtcgagtgcatgctttgctattagctccagcaagctcaacgagtgccaactcaacaacctcaacgcgttggaacccgaccaccgcgttgagtccgaggtggtttgattcaaacatggaactctcaacaccctgagctgaaatgcgccggtgtcactgtttccaaactcaccctcaac

SEQ ID NO: 124312 - DNA, 251 bp, Glycine max
acttattaacactttccttagttcaatatggggaagcccttcttcactctctctctttcttccctttgcttgctactcttgtcgagtgcatgctttgctattacctccagcaagttcaacgagtgccaactcaacaacctcaacgcgttggaacccgaccaccgcgttgagtccgaagtggtcttattgaaacatggaactctcaacaccctgagctgcaatgcgccggtgtcactgtttccaaacgcacc

SEQ ID NO: 124313 - DNA, 189 bp, Glycine max
cttattaacactttccttagttcaatatggggaagtccttcttcactctctctctttcttccctttgcttgctactcttgtcgagtgcatgctttgctattacctccagcaagttcaacgagtcacaactcaacaacctcaacgcgttggaacccgaccaccgcgttgagtccgaggtggtcttattga

SEQ ID NO: 124314 - DNA, 259 bp, Glycine max
ctgaagcaaagcaatggctacttcagagttgaaaacccagaatgcggttgcatctctctccctaaccttaaccttggtactggtgctactgaccagcaaggcaaactcagcggagactgtttctttcagctggaacaagttcgtgccggagcaaccagacatgatcctccgaggagacgctattgtgacatcctcgggaaagttacaactcaataaggttgacgaaaacggcaccccaaaaccctcgtctcttggtcgc

SEQ ID NO: 124315 - DNA, 257 bp, Glycine max
gattttccaatcaaatatagatatggcaaatatgacaggagtgggaacttttctatagagagtggtccaaatcgagaagtctatgctaactccccaaggaatgaggcgaaatatatttttctttcagatggcatgatgcgggaaataccttggcgtggtgctggtgtagcagtccccatgttttctgttaggtcagaatctgatctgggtgttggggagtttcttgaccttaagttgctagttgactgggctgtagc

SEQ ID NO: 124316 - DNA, 253 bp, Glycine max
ggaatggtttgattgtgttgatgaggaggattcctttgaggaagtctctttgagtgcagcactcaatggtgttgagggtttggactatatggagagaattcctcttgccacatctgagcggatatcctcatgtgctttcacgcaaaaatggtgaaaaaggcaaaaggagatttgtttctggggatggtgaagagatgacattgattccgggaaccagtgttgaagagacttacaacaagctaacagttgaact

SEQ ID NO: 124317 - DNA, 255 bp, Glycine max
cttgctctatactacacagtacacacactagaagaataatggcttccatcctccactactttttagccctctctctttcttgctcttttcttttcttcttatccgactcagtcacccctacaaaaccaataaaccttgttgttctacccgttcaaaatgatggttccacagggctccattggtccaacctccaaaaaagaacccctctaatgcaagtaccagtcctggtggacctcaatggaaatcacttgtggg

SEQ ID NO: 124318 - DNA, 254 bp, Glycine max
caccgcacgaatatcttgttgtttggagcgatccgagaaaaactctgtaaacatgttggtttaccaggacctccttacaggtgatgagcttctctctgactccttccgttacaaggaaattgagaatggaatgctgtgggaagttgaggggaagtgggttgttaaaggagcagttgatgtagacattggtgcaaacccttctgctgagggtggaggagaagatgagggagttgatgatgcagctgttaaggttg

SEQ ID NO: 124319 - DNA, 254 bp, Glycine max
caaaaatgaagagtactatcttctttgctctctttctagtttgtgccttcaccatctcatacctgccttcagccaccgctcagttcgtgctcgacactgatgatgatcctcttcaaaacggtggcacatactatatgttgccagttatgagaggaaagggcggtggaatagaagtagattcaactggaaaagaaatatgccctctcactgttgtgcaatcacccaatgagctcgataaggggattggactagtc

SEQ ID NO: 124320 - DNA, 252 bp, Glycine max
gtggccacagttggtattcctgagaatacaggtatatcattggcctgtgctatgaatagttcttttagggggcgcgccagttctgatatttacaccatctgctctcaagactgtgaattgtggaatcctgcttgcacaaaagcaatgactatgtcatttaatccaaacccgtgttctgatgcatggagtttggaatttctgaagcgtactggatttcattgcgatatcatttgtgtcactggatggactgcc

SEQ ID NO: 124321 - DNA, 253 bp, Glycine max
gcggaggaaaagaaactaacaaggattcccttagtaacggcgagcgaaccgggaaaagcccaccatgaaaatcggtcgccctcggcgtccgaattgtagtctggagaagcgtcctcagtggcggaccgggcccaagtcccctggaagggggcgccagagagggtgagagccccgtcgtgcccggaccctgtcgcaccacgaggcgctgtcggcgagtcgggttgtttgggaatgcagccccaatcgggcggta

SEQ ID NO: 124322 - DNA, 249 bp, Glycine max
ggaaaaagttgtattgaaattttcacaagaggaatttcttacagcttggtcaactcaggtgcgtcctgcaacaactctgttggctgatgggtgcccatatttgtatgctatggtgcatgatagttcagtgtctacaataccaggtgattttgtcattggtgttaagttgacaaccataaacaatatgtgtgcatatgggctcaatcctggtatttcaggttctcgtcttttgggcaccattcctcagtc

SEQ ID NO: 124323 - DNA, 252 bp, Glycine max
aattcttccaccaagttatgggtttccttgtgttgcttcttttctccctcttaggtctctcttctagttccagcatatcaactcatcgttccatattggaccttgacctaaccaagtttaccacacagaaacaggtgtcttcactgttccaactatggaagagtgagcatggacgtgtctaccataaccacgaagaagaggcaaagagacttgagattttcaagaataacttgaactatatcagggacatga

SEQ ID NO: 124324 - DNA, 252 bp, Glycine max
ctaaaggttccatgttggatctgaaaatttctcaatctaaaattgcacttcccaagaacacagttggaggaaccattctgcgtagtgatctattggcaaattttttgacagagggcaattttagagcaagtgttgatttgcagcgcactcatcgtattagaggaatgattaaaatggtggccacagttggtattcctgagaatacaggtatatcattggcctgtgctatgaatagttcttttagggggcgcg

SEQ ID NO: 124325 - DNA, 241 bp, Glycine max; identical to SEQ ID NO: 104135

SEQ ID NO: 124326 - DNA, 245 bp, Glycine max
tgggaaccaagagcaagagtttctaaaatatcagcagcagcagcaaggaggttcccaaagccagaaaggaaagcaacaagaagaagaaaacgaaggaagcaacatattgagtggcttcgcccctgaattcttgaaagaagcgttcggcgtgaacatgcagatagtgagaaacctacaaggtgagaacgaagaggaggatagtggagccattgtgacagtgacaggaggtctaagagtcacagctc

SEQ ID NO: 124327 - DNA, 242 bp, Glycine max; identical to SEQ ID NO: 112081

SEQ ID NO: 124328 - DNA, 240 bp, Glycine max
cacacaactactacaagtacttccttacaatcaaaaccaacaacaactatggcaagttatcaaaagcactacgatgatcagggtcgcaaggttgacgagtatggcaacgttgagaagcaaaccgacgaatacggcaaccctgttcatgctgctagtgtcacctatgtagccaccagaactgctgctggtggttacagtgatgacattaataagcaacatgataccaccaatgcctacggc

SEQ ID NO: 124329 - DNA, 241 bp, Glycine max
agcagaaggagcaaaagcaatggcgccgaagaagccgagaaccacgacaaggaaccctgatttggttagggggattggcaagtattcgaggtcgcagatgtaccacaagaggggcatctgggccatcaaggccaaaaactgtggcgttttgccccgccacgatcccaagcccaagcccgaggccccggcccagaagccgcccaagttctaccccgcggacgatgttaagaagcccctcgtc

SEQ ID NO: 124330 - DNA, 232 bp, Glycine max
gaaagcatcagcaagaagaagaaaacgaaggaggcagcatattgagtggcttcaccctggaattcttggaacatgcattcagcgtggacaagcagatagcgaaaaacctacaaggagagaacgaaggggaagacaagggagccattgtgacagtgaaaggaggtctgagcgtgataaaaccacccacggacgagcagcaacaaagaccccaggaagaggaagaagaagaaga

SEQ ID NO: 124331 - DNA, 233 bp, Glycine max
cttaaacactcatcagtcatcaccatggccaagctagtttttaccctttgttttctgcttttcagtggctgctgcttcgctttcagttccagagagcagcctcagcaaaacgagtgccagatccaaaaactcaatgccctcaaaccggataaccgtatagagtcagaaggagggctcattgagacatggaaccctaacaacaagccatgccagtgtgccggtgttgccctctc

SEQ ID NO: 124332 - DNA, 235 bp, Glycine max
cgcgtgcatagcagagtcagagacagagacgcagccatggggcggagacctgcgaggtgttataggcaaattaagaacaagccataccccaagtcacgtttctgccgtggtgttcctgatcccaagatcaggatttatgatgttggtatgaagaagaagggtgttgatgagtttcctttctgtgtccatctggttagttgggagaaggaaaatgtttcaagtgaggccctggaag

SEQ ID NO: 124333 - DNA, 232 bp, Glycine max
cggctcgagcaaaaccccagagtattttaccttgctgggaacccagatatagagcacccagacaccatgcaacaacagcagcagcagaagagtcatggtggacgcaagcaggggcaacaccagcagcaggaggaagaaggtggcagtgtgctcagtggcttcagcaaacatttcttagcacaatccttcaacaccaacgaggacacagctgagaaacttcggtctccagatg

SEQ ID NO: 124334 - DNA, 233 bp, Glycine max
ataaaattcttccaccaagttatgggtttccttgtgttgcttcttttctccctcttaggtctctcttctagttccagcatatcaactcatcgttccatattggaccttgacctaaccaagtttaccacacagaaacaggtgtcttcactgttccaactatggaagagtgagcatggacgtgtctaccataaccacgaagaagaggcaaagagacttgagattttcaagaataa

SEQ ID NO: 124335 - DNA, 242 bp, Glycine max
atatcctagtacaccgtattaaagaatttaagatatactatgatgagagcgcggttcccattactgttgctgggagttgttttcctggcatcagtttctgtctcatttggcattgcgtattgggaaaagcagaaccccagtcacaacaagtgcctccgaagttgcaatagcgagaaagactcctacaggaaccaagcatgccacgctcgttgcaacctccttaaggtggaggaagaagaaga

SEQ ID NO: 124336 - DNA, 238 bp, Glycine max
cctacattggttggcattgaatgtcccaaggatgagaaacttcctcgtcgcaaaatttttgacaaacctaagacgcgctgcttcactattctccctatggagtttaatcttgtggttcgtcagaagtttttaaattttgtgaggttcattatgaagaaaagggacaagcttagttgtcaagttggaatcaacccataatccatggaatggactggtttggccaatagattactgagta

SEQ ID NO: 124337 - DNA, 236 bp, Glycine max
gtgcggtttcctttgttggtgttgctgggaactgttttcctggcatcagtttgtgtctcattaaaggtgagagaggatgagaataaccctttctacttgagaagctctaacagcttccaaactctctttgagaaccaaaacggtcgcattcgtctcctccagagattcaacaaacgctccccacaacttgagaaccttcgagactaccggattgtccagtttcagtcaaaacccaa

SEQ ID NO: 124338 - DNA, 234 bp, Glycine max
agttcaatatcctagtataccttaataaataatttaagatactatgatgagagcacggttcccattactgttgctgggacttgttttcctggcttcagtttctgtctcatttggcattgcttactgggaaaaagagaaccccaaacacaacaagtgtctccagagttgcaatagcgagagagactcgtacaggaaccaagcatgccacgctcgttgcaacctccttaaggtgga

SEQ ID NO: 124339 - DNA, 235 bp, Glycine max
ttctctccattggtccttaaacactcatcagtcatcaccatggccaagctagttttttccctttgttttctgcttttcagtggctgctgcttcgctttcagttccagagagcagcctcagcaaaacgagtgccagatccaaaaactcaatgccctcaaaccggataaccgtatagagtcagaaggagggctcattgagacatggaaccctaacaacaagccattccagtgtgccg

SEQ ID NO: 124340 - DNA, 228 bp, Glycine max
cgccactcgatgtttccatttgcctgcatgcctttggtattgtggggtgtggttcgtttagtggtgtcaagtcttgcgaacgtgagggtgcatgagtggtaatcgggatgtttttgttgcacggctccatgcttgcgcatgcaacgtgtgacatgcatccttttcattgtcaccttagccttcgtggcttaggtgctgacgattggttcctgtgttgcctacctacca

SEQ ID NO: 124341 - DNA, 232 bp, Glycine max
gtatcatcagccaaatttgaggcttttccccacaagctggtgcagtttggagagattcaggaaaaagttgtattgaaattttcacaagaggaatttcttacagcttggtcaactcaggtgcgtcctgcaacaactctgttggctgatgggtgtccatatttgtatgcaatggtgcatgatagttcagtgtctacaataccaggtgattttgtcattggtgtcaagttgacaa

SEQ ID NO: 124342 - DNA, 223 bp, Glycine max
caaaaatatgccactcccatgatgcccctagatgaagaaattctttctaaggttgcacaagatatggttgaggaatggtttgattgtgttgatgaggaggattcctttgaggaagtttctttaagtgcagcactcaatggtgttgagggtttagactatatggaaagaattcctcttgccacatctgagggttttcctcatgtgctttcacgcaaaaatggtg

SEQ ID NO: 124343 - DNA, 231 bp, Glycine max
  unsure (1)..(231): unsure at all n locations
ggagaaagcagaatgtgaagaaggtgaaattccacacaacatacgacacacacaacanncggagacggnncctcagcaacccggtgagaaggcgcaagacgacgatgagcaaccacgtccaatcccattcccacgcccacaaccccgacaagaagaagagcccgagcagagagaggaacaggaatggcctcgcaagggcgnnngacgcggagaaacgggaagtgaagagga

SEQ ID NO: 124344 - DNA, 231 bp, Glycine max
aggtatcattctgcgtagtgacctattggcaaattttttgacagagggcaattttagagcaagtgctgatttgcagcgcactcatacgtatcaaaggaatgattaaaatggtggccacagttagtattcctgagactacaggtatagcattagcctgtgctatgaatagttctgttagggggcgtgccagttctgatatgtacaccatctggtctcaagactgtgaattat

SEQ ID NO: 124345 - DNA, 231 bp, Glycine max
ccagggttatcaaactgaaacgttaatacggtttctcaaagctagggactggaatattgccaaagcccataaaatgttaattgattgtttgaactggagggtggaaaatgagattgacaatgttttaaggaagcctatccccatggatttgtacagagccatacgggattctcaactcataggaatgtctggttactcaaaggagggtctacctgtcattgctgttggtgt

SEQ ID NO: 124346 - DNA, 231 bp, Glycine max
gcagcagcagcaaggaggttcccaaagccagaaaggaaagcaacaagaagaagaaaacgaaggaagcaacatattgagtggcttcgcccctgaattcttgaaagaagcgttcggcgtgaacatgcagatagtgagaaacctacaaggtgagaacgaagaggaggatagtggagccattgtgacagtgaaaggaggtctaagagtcacagctccagccatgaggaagccaca

SEQ ID NO: 124347 - DNA, 230 bp, Glycine max
cctaaaggttccatgttggatcttaaaatttctcagtctaaaattgcacttcccaagaacacagttggaggaactattctgcgtagtgatctattggcaaattttctgacagagggcaattttagagcaagtgttgatttgcagcgcactcatcgtattaaaggaatgattaaaatggtggccacagttggtattcctgagaatacaggtatatcattggcctgtgctat

SEQ ID NO: 124348 - DNA, 240 bp, Glycine max
gcatgatagttcagtgtctacaataccaggtgattttgtcattggtgtcaagttgacaaccataaacaatatgtgtgcatatgggctcaatcctggtatttcaggttctcgtcttttgggcaccattcctcagtccatttcacagcaaactgtttggaatcaaatggcaacagtgagaacaccattgaattttgattctagcaagcagagcttttgtcagttttctattgaccttctcgg

SEQ ID NO: 124349 - DNA, 240 bp, Glycine max
gaagatattgacatggggtacgaagatgaaccgccagagcccgagattgaggaaggtgcagaggaagatgtggagaacaaaaacgatgaaataactggagagcctattgacaccgaggataaggaagaggaacaaccagtgaagcggcctcgaaagacatcgaaatatatgactaagtatgagcgtgctagaattttgggcacccgtgctcttcaaaatcagtatgaatgcacctgtcat

SEQ ID NO: 124350 - DNA, 234 bp, Glycine max
tgggtgtccatatttgtatgcaatggtgcataatagttcagtgtctacaataccaggtgattttgtcattggtgtcaagttgacaaccataaacaatatgtgtgcatatgggctcaatcctggtatttcaggttctcgtcttttgggcaccattcctcagtccatttcacagcaaactgtttggaatcaaatggcaacagtgagaacaccattgaattttgattctagcaagca

SEQ ID NO: 124351 - DNA, 229 bp, Glycine max
tggatacctaggcacccagagacgaggaagggcgtagtaagcgacgaaatgcttcggggagttcaaagcgaagaaagattcgaaacgaagaaagaaagcgttgtgaagaatggcggaagagggacaagtgatcggtgtccacagcgtagaggagtggaaggaacatctcaagaagggagaagagtccaagaaattgattgtggtggattttactgcttcttggtgcggt

SEQ ID NO: 124352 - DNA, 227 bp, Glycine max
cacacacaactactacaagtacttccttacaatcaaaaccaacaacaactatggcaagttatcaaaagcactacgatgatcagggtcgcaaggttgacgagtatggcaacgttgagaagcaaaccgacgaatacggcaaccctgttcatgctgctagtgtcacctatgtagccaccagaactgctgctggtggttacagtgatgacattaataagcaacatgatacc

SEQ ID NO: 124353 - DNA, 226 bp, Glycine max; identical to SEQ ID NO: 112959

SEQ ID NO: 124354 - DNA, 224 bp, Glycine max
ggctgcaaaaaagggtggagagagacaattcaatggtctcgttgatgtctacaggaagacattggcatctgatggtgttgccgggctctaccgtggtttcaacatctcatgtgttggaatcatcgtgtatcgtggtctgtactttggattgtatgattctgttaaaccagttgtcctcacagggtcattgcaggatagcttttttgccagctttgcccttggat

SEQ ID NO: 124355 - DNA, 228 bp, Glycine max
gcgaggcaatcccattctcatcttccatttccaccatcaatactattttcttgtcgttgagaagcttcgcgaacgaaagcaaagaaccctagaccgtcacagaaccattccatagccatgtctggtgttggccctctttctcaggattgggaacctgtcgtcctccgcaagaaggctcccaccgccgccgccaagaaggacgagaaagccgtcaacgccgcccgccgc

SEQ ID NO: 124356 - DNA, 228 bp, Glycine max
tataaattgcggtttgggttctctctctctcctcactcacaacaatatctgcacataaaaaaccactctacaaaactctccagtaattctgaaaattttattttcttttggtgaaattaacagctctgtgattgatcaatggcgacaaaggaaggcaaagccataggcatcgatctcggcacgacctacagctgcgtgggcgtgtggcaaaacgaccgcgtcgagatc

SEQ ID NO: 124357 - DNA, 232 bp, Glycine max
cccaatttggtgccatgagtaattaaataatctgctggaaataatatctaccaatataaataaagcatccagccactgtaatctgcaatgctgataataatgccatgaagtagcactgcctaaacatctacaaagtactctcgtgtactttttatgtgtgtattcctatcacgaagttaataaactattttatcaaaaaataaaaaaaggggggcccccggtctagtaacct

SEQ ID NO: 124358 - DNA, 234 bp, Glycine max
tgctattggtattaatgccgagaacaaccagaggaacttcctcgcaggttcgcaagacaatgtgataagccagatacctagtcaagtgcaggagcttgcattccctgggtctgcacaagctgttgagaagctattaaagaaccaaagagaatcctactttgtggatgctcagcctaagaagaaagaggaggggaataagggaagaaagggtcctttgtcttcaattttgagggc

SEQ ID NO: 124359 - DNA, 228 bp, Glycine max
ggcacccatcagccaacagagttgttgcaggacgcatgatagttcagtgtctacaataccaggtgattttgtcattggtgttaagttgacaaccataaacaatatgtgtgcatatgggctcaatcctggtatttcaggttctcgtcttttgggcaccattcctcagtccatttcacagcaaactgtttggcatcaaatggcaacagtgagaacaccattgaattttga

SEQ ID NO: 124360 - DNA, 231 bp, Glycine max
cttaattattaacacttccttagttcaatatggccaagcccttcactctctctctttcttccctttgcttgctactcttgtcgagtgcatgctttgctatcagctccagcaagctcaacgagcgccaacccaacaacctcaacgcgttggaacccgaccaccgcgttgagtccgaaggtggtttgcttcaaacatggaactctcaacaccctgagctgaaatgcgccggtg

SEQ ID NO: 124361 - DNA, 229 bp, Glycine max
  unsure (1)..(229): unsure at all n locations
cgttcttgtaagggattaattcttcgttaccaactttgggagcaggagagtctgcattcaatattcattttgaatgggacggaagcatgggaatccccggtgcgttttacataanaaactacatgcaagttgagttcttcctcaagagtttgactcttgatgccatttcaaaccaaggaaccatccgctttgtttgcaactcatgggtttataacactaaactttacaa

SEQ ID NO: 124362 - DNA, 231 bp, Glycine max
agaacattcaagtactttcaagttcctttgtcaataagcaagagcaatacactgtggaaggagtgcagaatcttggagacaaagcagtgatgtgtcatgggctaaatttcagaactgcagtattttactgccataaagtccgtgaaacaacagctttcatggttccattggtggctggtgatggaaccaaaactcaggcacttgctgtttgccactcagatacttctggaa

SEQ ID NO: 124363 - DNA, 226 bp, Glycine max
gttattatcaaataattaattaaattcctcgtggaatcttgttgaagccatgtctacagctggtcaggtcatcaagtgcagagctgcggtggcatgggaagcagggaagccactatcgatagaaaccatagaagtggcaccaccccagaaaggtgaagtgcgtttgaagatcctcttcaactccctttgccgtacagatgtttactggtgggatgctaagggccag

SEQ ID NO: 124364 - DNA, 226 bp, Glycine max
tgttgagcttttttgcgagtccatttggcaaaagggttgaattagcattgaaactgaagggtgtggagtatgagtacatagaacaagatatcttcaacaagactagtctccttctccagttgaacccggttcacaagaaggttccggttcttgttcatgcccacaaacccatcgctgagtcattcgtcattctcgaatacgttgatgaaacatggaagcagtatcc

SEQ ID NO: 124365 - DNA, 229 bp, Glycine max
tctcgagccgattcggctcgagtgaaattttcacaagaggaatttacttacagcttggtcaactcaggtgcgtcctgcaacaactctgttggctgatgggtgcccatatttgtatgctatggtgcatgatagttcagtgtctacaataccaggtgattttgtcattggtgttaagttgacaaccataaacaatatgtgtgcatatgggctcaatcctggtatttcaggt

SEQ ID NO: 124366 - DNA, 222 bp, Glycine max
ggctcgagaatcaatgtgatagcatgtgagggggcagagagggttgaaaggccagaaacctacaagcagtggcaagtcaggaaccagagagcagggttcaagcaacttccattggcccaagagcatgtgaatagagtgaaggaaatggtgaagaaggaataccataaagattttgtagttggtgaggatggcaagtgggttttgcaaggatggaaagggcga

SEQ ID NO: 124367 - DNA, 227 bp, Glycine max
aacaccagtaggcactgcgatcaaatcaccctctctgaagcgatgtacaacaatgaagacactcctgttgttgccgtttctattattgacaccaacagcttggagaaccagctcgaccagatgcctaggagattctatcttgctgggaaccaagagcaagagtttctaaaatatcagcagcagcagcaaggaggttcccaaagccagaaaggaaagcaacaagaaga

SEQ ID NO: 124368 - DNA, 228 bp, Glycine max
ccttagtccaatatggggaagcccttcactctctctctttcctccctttgcttgctactcttgtcgagtgcatgctttgctattagctccagcaagctcaacgagtgccaactcaacaacctcaacgcgttggaacccgaccaccgcgttgagtccgaaggtggtttgattcaaacatggaactctcaacaccctgagctgaaatgcgccggtgtcactgtttccaaa

SEQ ID NO: 124369 - DNA, 235 bp, Glycine max
tgaccacaactgatgagagattggtaggcacagaacatgagggatatgatccttttcttggtggaattcaataatatgcgactcccatgatgcccctagatgacgaaattctttctaaggttgcacaagatatagttgaggaatggtttgattgtgttgatgacgaggattcctttgaggaagtttctttgactgcagcactcaatggtgttgagggtttggactatatggaaag

SEQ ID NO: 124370 - DNA, 232 bp, Glycine max
cgagagatgctggcgcgagtttcattaatgtatccatgtctaccatcacctctaaatggtttggtgaagatgagcagaatgttcgcgctttattcacgctggccgccaaggtctccccaactattatatttgttgatgaggttgatagtatgctgggacagcggaccagagttggagagcatgaagccatgcgcaagataaagaatgagtttatgactcattgggatggact

SEQ ID NO: 124371 - DNA, 184 bp, Glycine max
aaattttgattaaccgcgatcacaggttgccgcaccttaaaaccggaaacaaaagcaatcgttacttgatttcaagaatctctcaatttcttcctacttctttgtgtacgatttcttaagggaaagaaaatcactctctgtgctggccacagacttcgtgaatcattttcttttccacacaaca

SEQ ID NO: 124372 - DNA, 229 bp, Glycine max
tctaaaagtagttagaaacacacttggttcgcaaggttgggatgttcttgttccaggaactgctttagggtaacttgttcaggttgaaaaaattgttcctggttcactaccatcatcagttgaaggacctattatccttgttgttaacaaagcggatggtgatgaagaggtaacagctgctgggaggaacatagtgggagttatacttcagcaagagctgcctcactta

SEQ ID NO: 124373 - DNA, 230 bp, Glycine max
taaaattcttccaccaagttatggagttccttgtgttgcttcttttctccctcttaggtctctcttctagttccagcatatcaactcatcgttccatattggaccttgacctaaccaagtttaccacacagaaacaggtgtcttcactgttccaactatggaagagtgagcatggacgtgtctaccataaccacgaagaagaggcatagagacttgagattttcaagaat

SEQ ID NO: 124374 - DNA, 230 bp, Glycine max
gtctttgaacactcatcaccatggccaagcttgttctttccgcttgtttccttcttttcagtggctgcttcgctctgagagagcaggcacagcaaaatgagtgccagatccaaaagctgaatgccctcaaaccggataaccgtatagagtcggaaggtgggttcattgagacctggaaccctaacaacaagccattccagtgtgccggtgttgcactctctcgctgcacc

SEQ ID NO: 124375 - DNA, 225 bp, Glycine max
gaaaagggacaagcttagttgtcaagttggaattaacccatattctatggaatggactggtttggccaatagattactgagtaagggcaacgatattctgtgttgcgattatgctagttttgatggtttgattaccaagcaagttatgagcaagatggcagaaatgatcaacagtctttgtggtggtgatgaaaaactgatgcgtgaaaggacacacctgctgtt

SEQ ID NO: 124376 - DNA, 224 bp, Glycine max
ccctgttcctgtgtgtgtgagtgaccgagtgagtttgtttttctcagctgatatatatggcgcttgatcgctccattataagcaaaacgacgtggtacagcgtcgtattatggatgatggtggtgctggtgagagtgcacggtgcagccgcgaggccgaaccggaaggagtgggactcagtcataaagttaccgactgaaccggtggatgctgactcggatgaa

SEQ ID NO: 124377 - DNA, 225 bp, Glycine max
ataaaattcttccaccaagttatgggtacacttgtgttgcttcttttctccctcttaggtctctcttctagatccagcatatcaactcatacgttccatattggaccttgacctaaccaagtttaccacacagaaacaggtgacttcactgttccaactatggaagagtgagcatggacgtgtctaccataaccacgaagaagaggcaaagagacttgagatttt

SEQ ID NO: 124378 - DNA, 233 bp, Glycine max
ttctctccattgtctttgaacactcatcaccatggccaagcttgttctttccctttgtttccttcttttcagtggctgcttcgctctgagagagcaggcacagcaaaatgagtgccagatccaaaagctgaatgccctcaaaccggataaccgtatagagtcggaaggtgggttcattgagacctggaaccctaacaacaagccattccagtgtgccggtgttgccctctctc

SEQ ID NO: 124379 - DNA, 227 bp, Glycine max
cagagatctatgagtgatgttggtaaaggtaagcatgagattgagtctttgaagccaactcttttcatcatcgtcaggaccaacatcacccagagatctatgagtactattcactacgactcacatgcaacgaagatagcactggtgatcgatggcagagggcatcttcagatatcatgtccacacatgtcatcaaggtcgtcacactcgaagcatgataagagtag

SEQ ID NO: 124380 - DNA, 227 bp, Glycine max
gttcaatatcctagtataccttaataaataatttaagatactatgatgagagcacggttcccattactgttgctgggacttgttttcctggcttcagtttctgtctcatttggcattgcttactgggaaaaagagaaccccaaacacaacaagtgtctccagagttgcaatagcgagagagactcgtacaggaaccaagcatgccacgctcgttgcaacctccttaa

SEQ ID NO: 124381 - DNA, 229 bp, Glycine max
tcacccatcaataccaaaatgaccaagcttacaattctcctcatcgctcttctcttcatcgcccacacctgctgcgcctccaaatggcaacagcaccagcaagagagctgccgcgagcagctcaaggggatcaacctcaacccctgtgagcacatcatggagaagatccaagctggccgccgcggcgaggacggcagcgacgaagatcacattctcatcaggaccatgc

SEQ ID NO: 124382 - DNA, 227 bp, Glycine max
attcctgagaatacaggtatatcattggcctgtgctatgaatagttcttttagggggcgcgccagttctgatatttacaccatctgctctcaagactgtgaattgtggaatcctgcttgcacaaaagcaatgactatgtcatttaatccaaacccgtgttctgatgcatggagtttggaatttctgaagcgtactggatttcattgcgatatcatttgtgtcactgg

SEQ ID NO: 124383 - DNA, 229 bp, Glycine max
gttaagttgacaaccataaacaatatgtgtgcatatgggctcaatcctggtatttcaggttctcgtcttttgggcaccattcctcagtccatttcacagcaaactgtttggaatcaaatggcaacagtgagaacaccattgaattttgattctagcaagcagagcttttgtcaattttctattgaccttctcggtggaggaattttagtggacaaaactggagattgga

SEQ ID NO: 124384 - DNA, 227 bp, Glycine max
gtttcctcgtatcttaggccacgaagcttcggggattgtggagagcgtgggcaagggtgtgacacatctgaaaccaggtgaccatgctctcccaatattcactggggagtgtggtgaatgcacctattgcaagtctgaagagagcaacctgtgtgagcttctcaggatcaacactgacagaggagtgatgctcagtgatggcaaaacaaggttctccaaaaatggac

SEQ ID NO: 124385 - DNA, 224 bp, Glycine max
aaacactcatcagtcatcaccatggccaagctagtttgttccctttgtgttctgcgtttcagtggctgctgcttcgctttcagttccagagagcaggctcagcaaaacgagtgccagatccaaaaactcaatgccctcaaaccggataaccgtatagagtcagaaggagggctcattgagacatggaaccctaacgacaagccattccagtgtgccggtgttgc

SEQ ID NO: 124386 - DNA, 220 bp, Glycine max
gttcaatatcctagtacaccgtattaaagaatttaagatatactatgatgagagcgcggttcccattactgttgctgggagttgttttcctggcatcagtttctgtctcatttggcattgcgtattgggaaaagcagaaccccagtcacaacaagtgcctccgaagttgcaatagcgagaaagactcctacaggaaccaagcatgccacgctcgttgcaa

SEQ ID NO: 124387 - DNA, 219 bp, Glycine max
caatcccaaacagtctacagtttttgacattctcttgggaatttctcaagattttgaaattgctggtaatactcttatgccagctttttctgttccacaggctactgccagatcttctgaaaatgcggaatcctctgcatgatctggaatttgtgttttctttcatttgtccgtttgtttaattcaataaaggaaattaggcatgaccctcttgttgag

SEQ ID NO: 124388 - DNA, 219 bp, Glycine max
caagctggtgcagtttggagagattcaggaaaaagttgtattgaaatttatggtgtcatcagccaaatttccaaatgctaagatgacttctccctacattaaatgtacagtctctttcttcatagcatttggaaatttggctgatgacaccatcaattttgagacttttccccacaagctggtgcagtttggagagattcaggaaaaagttgtattgaa

SEQ ID NO: 124389 - DNA, 223 bp, Glycine max
aacttattaacactttccttagttcaatatggggaagcccttcttcactctctctctttcttccctttgcttgctactcttgtcgagtgcatgctttgctattacctccagcaagttcaacgagtgccaactcaacaacctcaacgcgttggaacccgaccaccgcgttgagtccgaaggtggtcttattgaaacatggaactctcaacaccctgagctgcaa

SEQ ID NO: 124390 - DNA, 224 bp, Glycine max
caatattcaaaccttgctctatagtacacagtacacacactagaagaataatggcttccatcctctactacttgttagccctctctctgtcttgctctagtcttttcttcttatccgactcagtcacccctacaagaccaataaaccttgttgttctacccgttcaacatgatggatccacagggctccattgggccatcctccaaaaaagaacccctctaatg

SEQ ID NO: 124391 - DNA, 251 bp, Glycine max
aagagctccctcgttcatatccacaacactgaggcagcaacaggaagagcaacctttggaagtgcggaaatatagagctgaattgtctgaacaagatatatttgtaatcccagcaggttatccagttgtggtcaacgctacctcagatctgatttctttgcttttggtatcaatgccgagaacaaccagaggaacttccttgcaggttcgaaagacaatgtgataagccagatacctagtcaagtgcagga

SEQ ID NO: 124392 - DNA, 250 bp, Glycine max
aacaataattccttcacttgcagaacttagttctctgttgcatcatcatcatcttcattagtgttagccctaaacttcaccttcaaccatgaccacagtgccaccacacagtgtccaagtgcacacaacaacacaccgctacgaagccggctcgtcccgccggctcgttttgaggcgccgcgttacgaagccggcatcaaggcgacctcttccatttaccattccgagagaggtccgacgacctctcagg

SEQ ID NO: 124393 - DNA, 237 bp, Glycine max
tctcgagccgaatcggctcgagccttcttcactctctctctttcatccctttgcttgctaatcttgtcgagtgcatgctatgctattacctccagcaagttcaacgagtgccaactcaacaacctcaacgcgttggaacccgaccaccgcgtgagtccgaagggtcttattgaaacatggaactctcaacaccctgagctgcaatgcgccggtgtcactgtttccagacgcaccctc

SEQ ID NO: 124394 - DNA, 239 bp, Glycine max
cttaattattaacacttccttagttcaatatggggaagcccttcactctctctctttcttccctttgcttgctactcttgtcgagtgcatgctttgctattagctccagcaagctcaacgagtgccaactcaacaacctcaacgcgttgaacccgaccaccgcgttgagtccgaaggtggtttgattcaaacatggaactctcaacaccctgagctgaaatgcgccggtgtcactgttt

SEQ ID NO: 124395 - DNA, 118 bp, Glycine max
aaaggctttagcttgccttttgttcactgtaaaataataatgtaagtactctctataatgagtcacgaaacttttgcgggaataaaaggagaaattccaatgagttttctgtcaaaaa

SEQ ID NO: 124396 - DNA, 239 bp, Glycine max
atactatgatgagagtgcggtttcctttgttggtgttgctgggaactgttttcctggcatcagtttgtgtctcattaaaggtgagagaggatgagaataaccctttctacttgagaagctctaacagcttccaaactctctttgagaccaaaacggtcgcattcgtctcctccagagattcaacaaacgctccccacaacttgagaaccttcgagactaccggattgtccagtttcagt

SEQ ID NO: 124397 - DNA, 245 bp, Glycine max
gaaagagatagtgtggtagagagagaggagcggaggagagaaaatgacgacgaggttcaagaagaacaggaagaagagaggccacgtcagcgccggtcacggtcgtatcgggaagcaccgcaagcatcccggtggtcggggtaacgccgtggcatgcaccaccaccgcatcctcttcgacaagtaccatcccggtttcttcggaaaggtgggtatgcgctacttccacaaactccgcaacaaatt

SEQ ID NO: 124398 - DNA, 245 bp, Glycine max
tagtagtgttggtgggttgcaaagatgcttgggggtcttctccataggggtcataagataaaagggacagtggtgttgatgcgcaagaatgtgttggacgtgaatagcgtaaccagcgttgggggaattattggtcaaggtctcgactagttggctcaacactcgatactcttactgccttcttgggccgatccgtgtctctccagcttattagtgctaccaaagctgatgctaacggaaaaggg

SEQ ID NO: 124399 - DNA, 245 bp, Glycine max
gtgctcagtggcttcagcaaacacttcttggcacaatccttcaacaccaacgaggacatagctgagaaacttcagtctccagacgacgaaaggaagcagatcgtgacagtggaaggaggcatctgcgttatcagccccaagtggcaagacaacaagatgaagatgaagatgaagacgaagatgatgaagatgaacaaattccctctcaccctcctcgccgaccaagccatggatagcgtgaacaa

SEQ ID NO: 124400 - DNA, 244 bp, Glycine max
tggtccttaaacactcatcagtcatcaccatggccaagctagttttttccctttgttttctgcttttcagtggctgctgcttcgctttcagttccagagagcagcctcagcaaaacgagtgccagatccaaaaactcaatgccctcaaccggataaccgtatagagtcagaaggagggctcattgagacatggaaccctaacaacaagccattccagtgtgccggtgttgccctctctcgctgc

SEQ ID NO: 124401 - DNA, 242 bp, Glycine max
aagaatggaatttactctccacattggaatctgaatgcaaacagtgtgatctatgtgactcgaggacaaggaaaggttagagttgtgaactgccaagggaatgcattgttcgacggtgagcttaggaggggacaattgctggtggtacacagaacttcgtggtggcggacaagccggagaacaaggattcgaatacatagtattcaagacacaccacaacgcagtcactagctacttgaagg

SEQ ID NO: 124402 - DNA, 241 bp, Glycine max
ctcatcaccatggccaagcttgttctttccctttgtttccttcttttcagtggctgcttcgctctgagagagcaggcacagcaaaatgagtgccagatccaaaagctgaatgccctcaaaccggataaccgtatagagtcggaaggtggttcattgagacctggaaccctaacaacaagccattccagtgtgccggtgttgccctctctcgctgcacccttaaccgcaatgcccttcgtag

SEQ ID NO: 124403 - DNA, 242 bp, Glycine max
ccagattattacacgaaacataatgaagttgtgaccataaactggaaatgcaagaagcttatcttgtcaatctcgtaaatgtgttacgagaattgtatttgcacagtccagaggaagctcgccaattgagaaggaaagctctctctgtattgaatggctgcaaaaagctgatgtgcctaccatagcacagattgaagagttccattcgatgcagaggatgatgaatgctcctgattcaaatg

SEQ ID NO: 124404 - DNA, 245 bp, Glycine max
ctatgatgagagtgcggtttcctttgttggtgttgctgggaactgttttcctggcatcagtttgtgtctcattaaaggtgagagaggatgagaataaccctttctacttgagaagctctaacagcttccaaactctctttgagaaccaaacggtcgcattcgtctcctccagagattcaacaaacgctccccacaacttgagaactttcgagactaccggattgtccagtttcagtcaaaaccca

SEQ ID NO: 124405 - DNA, 244 bp, Glycine max
cggctcgagaatgcatgcagctgcggtggcatgggaagcagggaagccactatcgatagaaaccatagaagtggcaccaccccagaaaggtgaagtgcgtttgaagatcctcttcaactccctttgccgtacagatgtttactggtggatgctaagggccagactccgctgtttcctcgtatcttaggccacgaagcttcggggattgtggagagcgtgggcaagggtgtgacacatctgaaac

SEQ ID NO: 124406 - DNA, 244 bp, Glycine max
cgaggacatagctgagaaacttcagtctccagacgacgaaaggactcagatcgtgacagtggaaggaggtctcagcgttatcagccccaagtggcaagaacaacaagatgaagatgaagatgaagacgaagatgatgaagatgaacaattccctctcaccctcctcgccgaccaagccatggaaagcgtgaacaagacgaggacgaggacgaagatgaagataaacctcgtcctagtcgaccaa

SEQ ID NO: 124407 - DNA, 242 bp, Glycine max
atatatactatgatgagagtgcggtttcctttgttggtgttgctgggaactgttttcctggcatcagtttgtgtctcattaaaggtgagagaggatgagaataaccctttctacttgagaagctctaacagcttccaaactctcttgagaaccaaaacggtcgcattcgtctcctccagagattcaacaaacgctccccacaacttgagacttttcgagactaccggattgtccagtttcag

SEQ ID NO: 124408 - DNA, 229 bp, Glycine max
ggctcgagtgcaaaattgatgcgtgaaaggttacacctgctgttgacttgttgttcaaggatggcaatttgtaagaaagatgtttggagagttgaatgtggaatcccttctggatttccgctcacagttattgcaatagcatttttaatgagatgctcattagatatagctatgaaaaattactgcgccaggctagagctccaaagcatgttttacaatgcttcaaaaa

SEQ ID NO: 124409 - DNA, 236 bp, Glycine max
gaaattatgtcagaaagcaagatgtcagcattgaatatgatgcatgtacaattccaaatgattgtggttcattggttgttgccaaggttggaaatcacaaacaaattgttggtttccatgttgctggaagcaaaggaagactgggaatgcttcattgataccatatgttgagccagttgtgcaagctcaaagtgctgaagtttactttgacttcttccctgtggaggttgatagtc

SEQ ID NO: 124410 - DNA, 149 bp, Glycine max
gaaattttgataaaccgcgatcacaggttgccgcaccacaaaaccggaaacaaaagcaatcgttacttgatttcaagaatttctcaatttctttctacttctttgtgtacgatttcttaagggaaagaaaatcactctctgtgctgcca

SEQ ID NO: 124411 - DNA, 241 bp, Glycine max
tctcagtgaatgtgttcccaggacttattgtgttttaaatccacaaaatccttttgtgttaaataggtggatggggaaactgactttcccccagggcacttcccgaaatgttaagagaatgcctctttctatagggggaggagctgtgcaaagaatgctattctcatgaatatgccaaatgctgttctttcaatgtggagatatcttgttggagatctcgtctttgaagtttctaagatga

SEQ ID NO: 124412 - DNA, 244 bp, Glycine max
tctcgagccgaatcggctctagacatagtagtgttggtgggttgcttagatgcttgggggtactcctcataggggtcataagatagaagggacagtggtgttgatgcgcaagaatgtgttggacgtgaatagcgtaaccagcgttggggaattattgagtcatgtctcgacttagttggctcaacactcgatactcttactgccttcttgggccgatccgtgtctctccagcttattagtgcta

SEQ ID NO: 124413 - DNA, 148 bp, Glycine max
taagatttgaaattttgataactcgcgatcacaggttgccgcaccttaaaaccggaaacaaaagcaatcgttacttgatttcaagaatttctcaatttctttctacttctttgtgtacgatttcttaagggaaagaaaatcactcctg

SEQ ID NO: 124414 - DNA, 236 bp, Glycine max
cttaccaggtccagacatagtaaggattgacagactgagagctctttcttgattctatgggtggtggtgcatggccgttcttagttggtggagcgatttgtctggttaattccgttaacgaacgagacctcagcctgctaaatgctatgtggaggtaaccctccacggccagcttcttagagggactatggccgcttaggccacggaagtttgaggcaataacaggtctgtgatgc

SEQ ID NO: 124415 - DNA, 240 bp, Glycine max
gttcaatatcctagtataccttaataaataatttaagatactatgatgagagcacggttcccattactgttgctgggacttgttttcctggcttcagtttctgtctcatttggcattgcttactgggaaaaagagaaccccaacacaacaagtgtctccagagttgcaatagcgagagagactcgtacaggaaccaagcatgccacgctcgttgcaacctccttaaggtggagaaagaag

SEQ ID NO: 124416 - DNA, 241 bp, Glycine max
cacaaaacttccacttgagagaaaagctgtgtattaagactacaaattttcaatttttcaatggcgtcgaggcaacaaaaagaggatcgagctgaggcagctgcgaaagttgctgcgaaagaactcgaacaactcaaccgagaaaagaccgtgatttcagtgttggtgttgcagaccaacaccaacaagaagaacatcagttagatcaacaaaagcgtggtgtaatcggatccatgttcaa

SEQ ID NO: 124417 - DNA, 237 bp, Glycine max
  unsure (1)..(237): unsure at all n locations
aaagctttctagctagtcataacatcaccattactgatggtattgacaaaactagtgcaactttgcaatttagaaagttagcagattgtgattttctcaagagaaactttaagcagatgtctaatgttttgtgggtggctcctaggacaaggcgagtttatggtcacaacttcattatgtttcgtgtaataatctgganatgctagaagcttatcttgtcaatctcgtaaatgtgtt

SEQ ID NO: 124418 - DNA, 238 bp, Glycine max
cacggaagcaccacggttcaagacatcgcgagatagttgaaactcggggacaacgagcttctgcgcacggagaagaagttcaaggttttcatggagaattacgggaggagctactccacagaggaggagtatttgcgccgtttgggattttcgcccagaacatggtcagagcggcggagcatcaggcgctggaccccaccgccgtccacggcgtcacgcagttctccgatctcaccga

SEQ ID NO: 124419 - DNA, 236 bp, Glycine max
aagaaaaaagagaagaagatgggtttgaagaacaacatggtggtgctaaaggtgtgtttggtgccaattttccttgtggggggtactactagtgccaacttgaggctgagtaagcttggcctgctcatgaaaagtgatcatcacaacactcaaatgatgatgagtcttcaaaaccatgctgtgatcaatgcgcatgcacaaagtcaaaccctcctcaatgccgctgttcagatatg

SEQ ID NO: 124420 - DNA, 238 bp, Glycine max
ttcaagaccaatgatagaccctcgatcggaaaccttgcaggggcaaactcattgttgaacgcattgccagaggaagtgattcagcacacttttaacctaaagagccagcaggccaggcaggtgaagaacaacaaccctttcagttcctggttccacctcaggagtctcagaggagagctgtggcttagagagccctttttgcatgtgctaccacacttttgtccttttgggctctagc

SEQ ID NO: 124421 - DNA, 235 bp, Glycine max
agcaacgagattcttattgggatgcacgtccttcctcaaggagcaatgaatatcccctttttatacctcgccaaaattattgctctactgacggagaaaactcatggtctgagagaagctcaagcaattttggagttgcttcgtggaatcacagaggaggcatcgcctagattcatctgggagtactagctttaattattcttaaagttcttcgcattctgttcaaacacacaaa

SEQ ID NO: 124422 - DNA, 195 bp, Glycine max
cccaatttggtgccatgagtaattaaataatctgctggaaataatatctaccaatataaataaagcatccagccactgtaatctgcaatgctgataataatgccatgaagtagcactgcctaaacatctacaaagtactctcgttactttttatgtgtgtattcctatcacgaagttaataaactattttatcag

SEQ ID NO: 124423 - DNA, 237 bp, Glycine max
caaacagatgaggctcaaggtcgcagaagcagcagctacaggacagtcaccagaagattcgtcacttcaatgaaggagacgtactcgtgattcctcctggtgttccttactggacctataacactggcgatgaaccagttgttccatcagtcttcttgacacctctaacttcaataaccagcttgatcaaacccctagggtattttaccttgctgggaacccagatatagagtaccc

SEQ ID NO: 124424 - DNA, 236 bp, Glycine max
gtgaagtgagtagtgaaggtgctgaatcgaatcgaatctccgaagatggccgcgagcgatcgcacagtgttgcaattctcttcatcatcttcttcttcgcagagcttgtccgcgaaggtccaccctctggtcatcttcaacactgcgattgctacgttcgacgccctgaccaagccgatcgcgtcatcggaaccctactcggctacgtccttcccgatggaaccgtcgatatccgc

SEQ ID NO: 124425 - DNA, 242 bp, Glycine max
  unsure (1)..(242): unsure at all n locations
gctgatttatttattcatagatggagctcaagtcatagttaaatagcccgatacgtttcctcgactcactatcgacaatcntacagcatacattttagtactacatacttattcagtaaaaagcactcaaaattgaagacaaaggccctttcttcccttgttcccctcctctttctgctgaggctgagcatccacaaagtaggactcactttggctctttattaggctctcgatatcttttg

SEQ ID NO: 124426 - DNA, 234 bp, Glycine max
  unsure (1)..(234): unsure at all n locations
cggaacagcaacgttgtagagggagacttttgggggagagtgagtgagagtaaaaagatgtttctgcgtgcggtggcgcggccgttgatggcgaaggtgaaggcttcgacggggatcgtggggctggacgtggtgccgaagcgagggaggtgctgattgggctgtacagcaagacgctgaaagagatccagaaggttcccgaagatganaggtaccgcatagccgtggagagct

SEQ ID NO: 124427 - DNA, 234 bp, Glycine max
cttccttagttcaatatggcaaagcccttcactctctctctttcatccctttgcttgctactcttgtcgagtgcatgctttgctattagctccagcaagctcaacgagtgccaacacaacaacctcaacgcgttggaacccgccaccgcgttgagtccgaaggtggtttgattcaaacatggaactctcaacaccctgagctgaaatgcgccggtgtcactgtttccaaactca

SEQ ID NO: 124428 - DNA, 236 bp, Glycine max
taaataatgcttttggttcaaatgtctatctgtagtgaggagagtagcgcctattgtagagaagatggtggaaaatagacttaggtggtttgggcatgtcatgagaagaccggtagactctgtagtgaggagagtagaccgatggagagaaggcaaacaattcgaggcagaggaagacccaaaaagactataagagaggttatcaaaaaggatctcgaactagtagatttggatag

SEQ ID NO: 124429 - DNA, 164 bp, Glycine max
atttgaaattttgataaaccgcgatcacaggttgccgcaccttaaaacctgaaacaaaagcaatcgttacttgatttcaagtatctctcaatttcttcctacttctttgtgtacgatttcttaagggatagaaaatcacctctgtgctggccacagacttcgtg

SEQ ID NO: 124430 - DNA, 234 bp, Glycine max
aggagcaggatgacctctatattgatcacaatctcagcttaaccgaggcactctgtggcttccagtttgctgtcaaacatcttgatggtaggcaactattgatcaaatcaaaccctggggaagtcatcaaaccaggtcaaataaagcaataaatgatgagggaatgccacaacacaataggccattcatgaagggtcgcctttacatccagtttaatgttgatttcccagactc

SEQ ID NO: 124431 - DNA, 234 bp, Glycine max
tctcgagccgattcggctcgagagcttttctttttcttgttcttctattttctgattttagcaaattaaaatagtagtgtatttggtaggttttggcaaagatgttttcagttccaggggtgtcgggaactctgaacagggaggagggcataagataaaagggacagtggtgttgatgaggaagaatgtgttggacttcaacagcgtggctgatcttactaaaggaaatgttgg

SEQ ID NO: 124432 - DNA, 236 bp, Glycine max
gctactgcgactgcgcttcacgatgggtgcttacaagtatgtttcggagctatggcgcaagaagcagtctgatgttatgagattcttgcagcgggtgaggtgctgggagtaccgccagcaaccttctattgtccgtttgaaaggtctactcgcccagacaaggctcgccgcttgggtttcaaggctaagcagggttatgtgatttaccgtgttcgtgtacgaaggggtggccggaa

SEQ ID NO: 124433 - DNA, 238 bp, Glycine max
tctaaattgaaaagctttctagctggtcataatatcaccattactgatggtattgacaaaactagtgcaactttgcaatttagaaagttagcagattgtgattttctcaagagaaactttaggcagatgtctaatgttttggggtggcatctgaggacaaggcgagtttatggtcacaacttcattatgtttcatgttataatctggaaatgcaagaagcttatcttgtcaatctcgt

SEQ ID NO: 124434 - DNA, 237 bp, Glycine max
ttattatcaaataattaattaaattcctcgtggaatcttgttgaagccatgtctacagctggtcaggtcatcaagtgcagagctgcggtggcatgggaagcagggaagccactatcgatagaaaccatagaagtggcaccccccagaaaggtgaagtgcgtttgaagatcctcttcaactccctttgccgtacagatgtttactggtgggatgctaagggccagactccgctgtttc

SEQ ID NO: 124435 - DNA, 182 bp, Glycine max
attttgataaaccgcgatcacaggttgccgcaccttaaaaccggaaacaaaagcaatcgttacttgatttcaagaatttctcaatttctttctacttctttgtgtacgatttcttaagggaaagaaaatcactctctgtctggccacagacttcgtgaatcattttcttttccacacatcat

SEQ ID NO: 124436 - DNA, 236 bp, Glycine max
actaacaataattccttcacttgcagaacttagttctctgttgcatcatcatcatcttcactagtgttagccctaaacttcaccttcaaccatgaccacagtgccaccacacagtgtccaagtgcacacaataacacacactacgaagccggcgtcgtcccgccggctcgttttgaggcgccgcgttacgaagccggcatcaaggctccctcttccatttaccattccgagagagg

SEQ ID NO: 124437 - DNA, 233 bp, Glycine max
ctcagcatggctaagcttgttctttccctttgtgttctgcttgtcagtggctgctgcttcgcttccagtttcagagagcagccacagcaaaacgagtgccagatccaacgcctcaatgccctcaaaccggataaccgtatgagtcagtcggtggcttcattgagacatggaaccctaacaacaagccattccagtgtgccggtgttgcactctctcgctgcaccctcaaccgc

SEQ ID NO: 124438 - DNA, 231 bp, Glycine max
ttcaagattcaggtactgcgtttcggaagcagacacagatggctcgtacgaagcaaaccgctcgtaagtccacaggaggaaaggctcctaggaagcagcttgcaaccaaggctgcacgtaagtctgcaccaactactgtggtgtgaagaagccccaccgttatcgtcctggtaccgttgctcttcgtgagattaggaaataccagaagagtaccgagcttttgatccggaa

SEQ ID NO: 124439 - DNA, 189 bp, Glycine max
taagatttgaaattttgataaaccgcgatcacaggttgccgcaccttaaaaccggaaacactagcaatcgttacttgatttcaagaatctctcaatttcttcctacttctttgtgtacgatttcttaagggtaagaaatcactctctgtgctggccacagacttcgtgaatcattttcttttccacaca

SEQ ID NO: 124440 - DNA, 234 bp, Glycine max
aaaattcttccaccaagttatgggcctccttgtgttgcttcttttctccctcttaggtctctcttctagttccagcatatcaactcatcgttccatattggaccttgacctaaccaagtttaccacacagaaacaggttcttcactgttccaactatggaagagtgagcatggacgtgtctaccataaccacgaagaagaggcaaagagacttgagattttcaagaataacttg

SEQ ID NO: 124441 - DNA, 227 bp, Glycine max
ggttgatgtgtggtgggggatcatagaactgaaggggcctaagcagtatgattggagagcctacaggagtttgtttcagctggttcaagaatgtggcttgacactgcaagctattatgtcattccatcaatgtggagggacgtaggagatatagttaacatcccaattccccagtgggtgcttgacattggagaatcaaatcatgatatcttctacaccaaccgctc

SEQ ID NO: 124442 - DNA, 223 bp, Glycine max
agaggacaagatctaagtgattagaaatagaggcattcctgctgatgtttttcaaattcatgaactcgctttgcaagaacatcagcaggaatgcctctatttctaatcacttccatctgatgttcttgcaaagcgagtcatgaatttgagaaacatgttgctcatgaaagcctcaaggctcaaattcctgatgttgacaagttgtattctactaaggttaata

SEQ ID NO: 124443 - DNA, 234 bp, Glycine max
aacttattaacactttccttagttcaatatcggggaagcccttcttcactctctctctttcttccctttgcttgctactcttgtcgagtgcatgctttgctattacctccagcaagttcaacgagtgccaactcaacacctcaacgcgttggaacccgaccaccgcgttgagtccgaaggtggtcttattgaaacatggaactctcaacaccctgagctgcaatgcgccggtgt

SEQ ID NO: 124444 - DNA, 230 bp, Glycine max
agcaaaatgaccaagttcacaatcctcctcatctctcttctcttctgcatcgcccacacttgcagcgcctccaaatggcagcaccagcaagatagctgccgcaagcagctccagggggtgaacctcacgccctgcgaaagcacatcatggagaagatccaaggccgcggcgatgacgatgatgatgatgacgacgacaatcacattctcaggaccatgcggggaagaatc

SEQ ID NO: 124445 - DNA, 232 bp, Glycine max
tctctccattgtctttgaacactcatcaccatggccaagcttgttctttccctttgtttccttcttttcagtggctgcttcgctctgagagagcaggcacagcaaaatgagtgccagatccaaaagctgaatgccccaaaccggataaccgtatagagtcggaaggtgggttcattgagacctggaaccctaacaacaagccattccagtgtgccggtgttgccctctctcg

SEQ ID NO: 124446 - DNA, 231 bp, Glycine max
ctaaagccgtggggcccaccgggttgcccgttgataacaggcgcgtggatttcaacatcatctctggcacctccatgtcgtgccctcacgtgagcggcttagccgcgctgatcaaatcggctcaccctgattggagccagccgcggtgagatcggctctgatgacaacggcttacacagtttacaaaactggtgagaagttgcaagacagcgcaacgggaaaaccatccac

SEQ ID NO: 124447 - DNA, 229 bp, Glycine max
aaaatggtggccacagttggtattcctgagaatacaggtatagcattggcctgtgctatgaatagttcttttagggggcgtgccagttctgatatttacaccatctgctctcaagactgtgaattatggaatcctgcttgcacaaaagcaatgactatgtcatttaatccaaacccgtgttctgatgcatggagtttggaatttttgaagcgtaccggatttcactgtg

SEQ ID NO: 124448 - DNA, 229 bp, Glycine max
ccagcaagctcaacgagtgccaactcaacaacctcaacgcgttggaacccgaccaccgcgttgagtccgaaggtggtttgattcaaacatggaactctcaacaccctgagctgaaatgcgccggtgtcactgtttcaaactcaccctcaactgcaatggcctccacttgccatcttactcaccttatccccggatgatcatcatcgcccaagggaaaggagcacttgga

SEQ ID NO: 124449 - DNA, 225 bp, Glycine max
gtgccggtgttgccctctctcgctgcaccctcaaccgcaacgcccttcgtagaccttcctacaccaacggtccctaggaaatctacatccaacaaggtaagggtatttttggcatgatatacccgggctgtcctacacatttgaagagcctcaacaacctcaacaaagaggacaaagcagcagaccacaagaccgtcaccagaagatctataacttcagagaggg

SEQ ID NO: 124450 - DNA, 231 bp, Glycine max
atatcctagtataccttaataaataatttaagatactatgatgagagcacggttcccattactgttgctgggacttgttttcctggcttcagtttctgtctcatttggcattgcttactgggaaaaagagaacccaaacacaacaagtgtctccagagttgcaatagcgagagagactcgtacaggaaccaagcatgccacgctcgttgcaacctccttaaggtggagaaa

SEQ ID NO: 124451 - DNA, 231 bp, Glycine max
gaaacctgctttggaaatggttactcaaaaggccctagagaaaaaggcacaagctggaaagtgggctgaacctcatgtggaaaccattaaaactaaatgggtcccggccgtaaaagaacagtggtctgtggtgaaacaaatgctgaacctcatgtgcaattattgaccacgaaaactgttgaagtttatgaggcatcaaagaatgcaatttccccccacttaagcaaggca

SEQ ID NO: 124452 - DNA, 231 bp, Glycine max
gagaatacaggtatatcattggcctgtgctatgaatagttcttttagggggcgcgccagttctgatatttacaccatctgctctcaagactgtgaattgtggaatcctgcttgcacaaaagcaatgactatgtcattaatccaaacccgtgttctgatgcatggagtttggaatttctgaagcgtactggatttcattgcgatatcatttgtgtcactggatggactgcca

SEQ ID NO: 124453 - DNA, 148 bp, Glycine max
cacctttgttcactcttcttctcttgcggctagggttttagcgcacttcttctagatttaaggaagatgggtaaggaaaaggttcacatcagtattgtggtcattggccatgtcgactctgggaaatccactaccactggtcacctga

SEQ ID NO: 124454 - DNA, 222 bp, Glycine max
tcggctcgagcagttattatcaaataattaattaaattcctcgtggaatcttgttgaagccatgtctacagctggtcaggtcatcaagtgcagagctgcggtggcatgggaagcagggaagccactatcgatagaaaccatagaagtggcaccaccccagaaaggtgaagtgcgtttgaaagtcctcttcaactccctttgccgtacagatgtttactggtg

SEQ ID NO: 124455 - DNA, 238 bp, Glycine max
accagctcgaccagatgcctaggagattctatcttgctgggaaccaagagcaagagtttctaaaatatcagcagcagcagcaaggaggttcccaaagccagaaaggaaagcaacaagaagaagaaaacgaaggaagcaacatattgagtggctcgcccctgaattcttgaaagaagcgttcggcgtgaacatgcagatagtgagaaccctacaaggtgagaacgaagaggaggatagt

SEQ ID NO: 124456 - DNA, 141 bp, Glycine max
aaaggctttagcttgccttttgttcactgtaaaataataatgtaagtactctctataatgagtcacgaaacttttgcgggaataaaaggagaaattccaatgagttttctgtcaaaaaaaaaaaaaaaagggcggccgccg

SEQ ID NO: 124457 - DNA, 255 bp, Glycine max
aattaattaaattcctcgtggaatcttgttgaagccatgtctacagctggtcaggtcatcaagtgcagagctgcggtggcatgggaagcagggaagccactatcgatagaaaccatagaagtggcaccaccccagaaaggtgaagtgcgtttgaagatcctcttcaactccctttgccgtacagatgtttactggtgggatgctaagggccagactccgctgtttcctcgtatcttaggccacgaagcttcgggg

SEQ ID NO: 124458 - DNA, 222 bp, Glycine max
cgagtgccaactcaacaacctcaacgcgttggaacccgaccaccgcgttgagtccgaaggtggtttgattcaaacatggaactctcaacaccctgagctgaaatgcgccggtgtcactgtttccaaactcaccctcaaccgcaatggcctccacttgccattctactcaccttatccccggatgatcatcatcgcccaagggaaaggagcacttggagttgc

SEQ ID NO: 124459 - DNA, 140 bp, Glycine max
taagaatggaatttactctccacattggaatctgtaatgcaaacagtgtgatctatgtgactcgaggacaaggaaaggttagagttgtgaactgccaagggaatgcagtgttcgacggtgagcttaggaggggacaattg

SEQ ID NO: 124460 - DNA, 139 bp, Glycine max
acttattaacactttccttagttcaatatggggaagcccttcttcactctctctctttcttccctttgcttgctactcttgtcgagtgcatgctttgctattacctccagcaagttcaacgagtgccaactcaacaacc

SEQ ID NO: 124461 - DNA, 137 bp, Glycine max
attctctccattgtctttgaacactcatcaccatggccaagcttgttctttccctttgtttccttcttttcagtggctgcttcgctctgagagagcaggcacagcaaaatgagtgccagatccaaaagctgaatgcc

SEQ ID NO: 124462 - DNA, 132 bp, Glycine max
agagtttttgatgtacctcactgaccaggccatggagatgagaaccagactttcttgagctatctatttcttttcactaatagcctaatttccaaacatagccttgggcaaatgtacagaaaccgaggtaga

SEQ ID NO: 124463 - DNA, 250 bp, Glycine max
cccctatctctcaccaacttccgctacttcctactccaaccactttcttttttcccgcagtcatgggcaaggtcaagatcggaatcaacggatttggaagaattggccgtttggtggccagggtggctctgcagagagacgatgttgaactcgttgccgttaacgatcctttcattaccaccgattacatgacatacatgtctaaatacgacagtgttcacgggcactggaagcatcacgatgtcaccgt

SEQ ID NO: 124464 - DNA, 216 bp, Glycine max
cgtattaaagaatttaagatatactatgatgagagcgcggttcccattactgttgctgggagttgttttcctggcatcagtttctgtctcatttggcattgcgtattgggtaaagcagaaccccagtcacaacaagtgcctccgaagttgcatagcgataaagactcctacaggaaccaagcatgccacgctcgttgcaacctccttaaggtggag

SEQ ID NO: 124465 - DNA, 197 bp, Glycine max
tgtccagccggcgttcgaatctgcgttcgatttgaaatccacgccaattgagttttatagcttccaagatgtgcatgacttgtatgaaggtggaattaagcttcctagagatgtaattagcacaattatccccttaccagtgatcaaagaactctatcgtaccgatggtcaacacatcctcaagtttccacacaaca

SEQ ID NO: 124466 - DNA, 255 bp, Glycine max
ggtggcacatattatatcttgtcagacataacagcatttggtggaataagagcagccccaacgggaaatgaaagatgccctctcactgtggtgcaatctcgcaatgagctcgacaaagggattggaacaatcatctcgtccccatatcgaatccgttttatcgccgaaggcatcctttgagccttaagttcgattcatttgcagttataatgctgtgtgttggaattcctaccgagtggtctgttgtggaggatc

SEQ ID NO: 124467 - DNA, 228 bp, Glycine max
aattcctaccgagtggtctgttgtggaggatctaccagaaggacctgctgttaaaattggtgagaacaaagatgcaatggatggttggtttagacttgagagagtttctgatgatgaattcaataactataagcttgtgttctgtccaagcaagctgaggatgacaaatttggggatattgggattagtattgatcatgatgatggaaccaggcgtttggtggtgtct

SEQ ID NO: 124468 - DNA, 237 bp, Glycine max
tctcgagccgaatcggctcgaggttcaatatcctagtacaccgtactaaagaatttaagatatactatgatgagagcgcggttcccattactgttgctgggagttgttttcctggcatcagtttctgtctcatttggcattgcgtattcggaaaagcagaaccccagtcacaacaagtgcctccgaagttgcaatagcgagaaagactcctacaggaaccaagcatgccacgctcgt

SEQ ID NO: 124469 - DNA, 238 bp, Glycine max
  unsure (1)..(238): unsure at all n locations
gttccacactgcatacgacctcgntntgagaaccaaactttctttagctatctttttctttttagcttttagccgtattttcaaacctagcctttggcaaatgtaaagaaaccgacgtagaagaagaagaccctgacgtcgtaacatgcaaacaccaatgccaacagccacagcaatacactgagggtgactagcgggtatgcttgcaaagatgtgacaggtatcatcgtatgaagct

SEQ ID NO: 124470 - DNA, 211 bp, Glycine max
attctctccattggtccttaaacactcatcagtcatcaccatggccaagctagttttttccctttgttttctgcttttcagtggctgctgcttcgctttcagttccagagagcagcctcagcaaaacgagtgccagatccaaaaactcaatgccctcaaaccggataaccgtatagagtcagaaggagggctcattgagacatggacccct

SEQ ID NO: 124471 - DNA, 137 bp, Glycine max
ttgaacttcttgagaagattgtgcttcagaattctgcattcagtggcaactttaatttgcagaatcttcttattttgacagcaataaaggctgatccatccagagttatggattatgttaatagattggctaatttt

SEQ ID NO: 124472 - DNA, 248 bp, Glycine max
acactacaacctgaacgcgaacagcataatatacgcattgaatggacgggcattgatacaagtggtgaattgcaacggtgagagagtgtttgatggagagctgcaagagggacgggtgctgatcgtgccacaaaactttgtggtgctgcaagatcacagagtgacaacttcgagtatgtgtcattcaagaccaatgatacacccatgatcggcactcttgcaggggcaaactcattgttgaacgcatt

SEQ ID NO: 124473 - DNA, 114 bp, Glycine max
aagaatcaaagaaaggggtggtggctgcttcgaaagcttaataatttgtttatttccagaacatcatagttttcgcagcagcaaactaacaaattactcatatcatataataag

SEQ ID NO: 124474 - DNA, 143 bp, Glycine max
aacttattaacactttccttagttcaatatggggaagcccttcttcactctctctctttctaccctttgcttgctactcttgacgagtgcatgctttgctattacctccagcaagttcaacgagtgccaactcaacaacctca

SEQ ID NO: 124475 - DNA, 214 bp, Glycine max
  unsure (1)..(214): unsure at all n locations
aagatctataacttcagtgatggtgatttgatcgcagtgcctactggtgttgcatggcggatgtacatcaatgaagacactcctgttgttgccgtgtctattattgacaccaacagcttggtgnaccagctcgaccagatgcctagggattctatcttgctgggaaccaagatcaagtttttctaaaatatcagcaagagtgtggaggtcatca

SEQ ID NO: 124476 - DNA, 254 bp, Glycine max
ttgtccttgaatataatactcagcatggctaagcttgttctttccctatgtcttctgctttacagtggctgctgcttcgctttcagtttcagagatcagccacagcaaaacgagtgccagatccaacgcctcaatgccctcaaaccggataaccgtatagagtcagatggtggcttcattgagacatggaaccctaacaacaagccattccagtgtgccggtgtcgccctctctcgctgcaccctcaaccgcaa

SEQ ID NO: 124477 - DNA, 249 bp, Glycine max
tctgcagttaacaatcgctcctcagatatcaacaaaaagattcgcacagcacttgggaaaggtaagaaaattgtttttcttactagagttgatccttttccagtagctctactggctgttctttttggcgttaagaatgaaattctgagttccaacgccactaaccctatgctgacgcgacttcttgagaactgtaagagtctcaaatatctggttgatgagtgtccttttgcatttgtgaactagtat

SEQ ID NO: 124478 - DNA, 225 bp, Glycine max
caaacacaacaagtgtctccagagttgcaatagcgagagagactcgtacaggaaccaagcatgccacgctcgttgcaacctccttaaggtggagaaagaagaatgtgaagaaggtgaaattccacgaccacgaccacgcccacaacaccggagagggaacctcagcaacccggtgagaaggaggaagacgaagatgagcaaccacgtccaatcccattcccacgc

SEQ ID NO: 124479 - DNA, 227 bp, Glycine max
cgattgctagaatggaatttcgatgctcagtcatctcttttaccattctcttctctcttgctcttgcaggagagagccatgtccatgcatcgctacctgtggaagattattgggaagctgtttggccaaacactcccattcccactgcactgcgagatcttctaaagcctctccctgcaggtgttgaaatcgatgaactccctaagcacattgatgatacacagtac

SEQ ID NO: 124480 - DNA, 132 bp, Glycine max
  unsure (1)..(132): unsure at all n locations
taaaattcttccaccaagtaaagggctgtcntgtgatgcttctttactcccactaaggtctctcatctagtaggagcataagatctcgggcttcggtataggagcatggcgtagccgagtttaccacagagg

SEQ ID NO: 124481 - DNA, 131 bp, Glycine max
gtctttgaacactcttcaccgtggccaagcttgttctttccctttgtttccttcttttcagtggctgcttcgctctgagagagcaggcacagcaaaatgagtgccagatccaaaagctgaatgcccgcaaa

SEQ ID NO: 124482 - DNA, 131 bp, Glycine max
gtcctacaaacttaattatgaacacttccttagttcaatatggggaagccctacactctctctctttctgcccttagcttgctactctagtcgagtgcatgccttgcgaggagctccagcaagctcaacga

SEQ ID NO: 124483 - DNA, 216 bp, Glycine max
cttaattattaacacttccttagttcaatatggggaagcccttcactctctctctttcttccctttgcttgctactcttgtcgagtgcatgctttgctattagctccagcaagctcaacgagtgccaactcaacaacctcaacgcttggaacccgaccaccgcgttgagtccgaaggtggtttgattcaaacatggaactctcaacaccctgagct

SEQ ID NO: 124484 - DNA, 251 bp, Glycine max
gtgctgtagaaaatggtgttgtcaaggagcaagctcagcctataacgacaaagccaacatccaatgggagcaatgaagatcattctctacaaaaggcggacgtgtacaagacactcagtggtcacagagctggtgaggctgccattgtctatgaacatggagctgatgttgaggcactaatgccaaaactacggcgatctgattactacacactgcctcgtatacatgaactggcggccaaggaaagagct

SEQ ID NO: 124485 - DNA, 112 bp, Glycine max
gttgccgcaccttaaaaccggagacaaaagcaatcgttacttgatttcaagaatttctcaatttctttctacttctttgtgtacgatttcttaagggaaagaaaatcactct

SEQ ID NO: 124486 - DNA, 246 bp, Glycine max
ggctcgagaatcaatgtgttagcatgtgagggggcagagagggttgaaaggccagaaacctacaagcagtggcaagtcaggaaccagagagcagggttcaagcaacttccattggcccaagagcatgtgaatagagtgaaggaatggtgaagaaggaataccataaagattttgtagttggtgaggatggcaagtgggttttgcaaggatggaaagggcgaattctttttgctgtttcttctggga

SEQ ID NO: 124487 - DNA, 247 bp, Glycine max
accttaataaataatttaagatactgtgatgagagcacggttcccattactgttgctgggacttgttttcctggcttcagtttctgtctcatttggcattgcttactgggaaaaagagaaccccaaacacaacaagtgtctccagagttgcaatagcgagagagactcgtacaggaaccaagcatgccacgctcgttgcaacctccttaaggtggagaaagaagaatgtgaagaaggtgaaattcca

SEQ ID NO: 124488 - DNA, 136 bp, Glycine max
gtacgtgaactcggaatctcgctctaggctgagaacatcaaaccgatagcggtgttgctgcccaagcatgagttggacgttaaccctgatggctcagcagttgacaaccttgatgctttcatgggccgtagtgtct

SEQ ID NO: 124489 - DNA, 247 bp, Glycine max
caacactctctccaaagttcaaattaagtctgaggtgtgagaaagagagaattgatatgggtgccggtctagttgcgttcctcttaatggttcttgtgcaattggtctatgcagtgatgaacattacttcaaagctttcaatagaatctggaatgagccctcttgtccttgttgcttatcgacaactcttttgtactgtgtccattgctccctttgcttattggctcgagtggaatacgcttcccag

SEQ ID NO: 124490 - DNA, 133 bp, Glycine max
cgagctggttctctcttgctgggaaccaagagcaagagtttctaaaatatctgcaagagcaaggaggtcatcaaagccagaaaggaaagcatcagcaagaagaagaaaacgaaggaggcagcatattgagtgg

SEQ ID NO: 124491 - DNA, 130 bp, Glycine max
ctcacttgaattactttaggaggaggtagtctgcatggatgactgatgaagaatttgcaagagaaatgcttgctggtgtaaatccaaacttgattcgttgtcttaaggatttccctccacgaagcaagct

SEQ ID NO: 124492 - DNA, 235 bp, Glycine max
gtcagaaagcaagatgtcagcattgaatatgatgcatgtacaattccaaatgattgtggttcattggttgttgccaaagttggaaatcacaaacaaattgttggtttccatgttgctggaagcaaaggaagactgggatatgctcattgataccatacgttgagccagttgtgcaagctcagagtgctgaagtttactttgacttcttccctgtggaggttgataatccagaggg

SEQ ID NO: 124493 - DNA, 260 bp, Glycine max
attccaatatattccattctctctgtgtatttccctacctctcccttcaagatgcagatcttcgtcaagaccctcaccggcaagaccatcacccttgaggtggaaagctctgacaccatcgacaacgtcaaggccaagatccaggacaggaaggaatccccccgaaccagaagcgtctcttttccgccggaaagcaacttgaggacggccgtacccttgctgactacaacattcagaaggagagtactcttcacctcgtc

SEQ ID NO: 124494 - DNA, 241 bp, Glycine max
ctcagcatggctaagcttgttctttccctttgttttctgcttttcagtggctgctgcttcgctttcagtttcagagagcagccacagcaaaacgagtgccagatccaacgcctcaatgccctcaaaccggataaccgtatagagcagaaggtggcttcactgagacatggaaccctaacaacaagccattccagtgtgccggtgttgccctctctcgctgcaccctcaaccgcaacgccct

SEQ ID NO: 124495 - DNA, 110 bp, Glycine max
catgaacatcaacgcacttgtcaggcaatctctaattaatgctaatggcataatggagacaacctttttgccctcaaagtattctgtggagatgtcttcggcggtttata

SEQ ID NO: 124496 - DNA, 218 bp, Glycine max
gttcaatatcctagtacaccgtattaaagaatttaagatatactatgatgagagcgcggttcccattactgttgctgggagttgttttcctggcatcagtttctgtctcatttggcattgcgtattgggaaatgcagaaccccagtcacaacaagtgcctccgaagttgcaatagcgagaaagactcttacaggaaccaagcatgcaacgttcgttgc

SEQ ID NO: 124497 - DNA, 237 bp, Glycine max
ctcgagccgcaaaaatggagaaccaacaaccggcacctatctccgtgacactgctacatctgctatccaaaacttcgctcccatcaacaaaatccaccaacatctctgcgcgtttcacttttactcatatgacatgagccggcaagtggaggcacaccatttttgcgcgcaccagaacgaggagatgaggcagtgccttatctacgacagccccgagaagaaagccaggctcatagg

SEQ ID NO: 124498 - DNA, 237 bp, Glycine max
ccattggtccttaaacactcatcagtcatcaccatggccaagctagttttttccctttgttttctgcttttcagtggctgctgcttcgctttcagttccagagagcagcctcagcaaaacgagtgccagatccaaaaactcaatgccctcaaaccggataaccgtatagagtcagaaggagggctcattgagacatggaaccctaacaacaagccattccagtgtgccggtgttgcc

SEQ ID NO: 124499 - DNA, 127 bp, Glycine max
cacacaactactacaagtactgccttacaatcaaaaccaacaacaactatggcaagttatcaaaagcactacgatgatcagggtcgcaaggttgacgagtatggcaacgttgagaagcaaaccgacg

SEQ ID NO: 124500 - DNA, 129 bp, Glycine max
ctcaaatgccatgaagtttgattttccttattgacaatcccaaacagtctacagtttttgacattctcttgggaatttctcaagattttgaaattgctggtaatactcttatgccagctttttctgttc

SEQ ID NO: 124501 - DNA, 129 bp, Glycine max
ctcgagccgaatcggctcgagttaacactttccttagttcaataaggggaagcccttcttagctctctctctttggtcccattgcttgctactcttgtcgagtgcatgctttgctattacctccagcaa

SEQ ID NO: 124502 - DNA, 221 bp, Glycine max
aacacttccttagttcaatatggggaagcccttcactctctctctttcttccctttgcttgctactcttgtcgagtgcatgctttgctattagctccagcaagctcaacgagtgccaactcaacaacctcaacgcgttggaaccgaccaccgcgttgagtccgaaggtggtttgattcaaacatggaactctcaacaccctgagctgaaatgcgccggtgt

SEQ ID NO: 124503 - DNA, 216 bp, Glycine max
cacacagactctttctctctctagaatccatggcagccattggtctgaacggcgtaaaggtggggacgacgtcgtctcaggcgtaccttgaaggcaaggcagtgaaggagacgagggctttgatggctgaactgtgtcgccatttctacacccttggatgggtgacagggacaggtggcagcatctccatgaaggtccacgatgactcaattccca

SEQ ID NO: 124504 - DNA, 242 bp, Glycine max
gataacttaattagtgttcatgaatatgtcaagccttactttagtggttctaaattgaaaagctttctagctggtcataatatcaccattactgatggtattgacaaaactagtgcaactttgcaatttagaaagttagagattgtgattttctcaagagaaactttaggcagatgtctaatgttttgtgggtggctcctgaggacaaggcgagtttatggtcacaacttcattatgtttca

SEQ ID NO: 124505 - DNA, 118 bp, Glycine max
gatcattccttcacttgcagaacttagttcactgtagcatcaacatcatcatcattagtgtcagccctaaacttcagcttcaaccatgaggacagtgccaccacaccgtgtccaagtg

SEQ ID NO: 124506 - DNA, 247 bp, Glycine max
ctcgtttaaaggtatcagcttatccctgagtaaccagaactcattgtaattaacaattggatagtagttcccattagtatgacaaagtggcagttattcctgcagattgaccagtccttccagattcaccgtagttatggaagcatgcttgaaggcgaggctgatgaactcaagagggtattcttggaagggaatccttacctcctggcaattaccatggttgtttctcttcttcatacagtctttg

SEQ ID NO: 124507 - DNA, 243 bp, Glycine max
attttgccaaactaaaatagttgtgttggtagctttggcaaagatgttttcagcaggccataagatcaaagggacagtggtgttgatgcccaagaatgagttggaagttaaccctgatggctcagcatatgacaaccttaatgctttcttgggccgtagtgtctcccttcagctcattagtgctaccaaggctgatgcacatggaaaaggaaaagttggaaaggatacgttcttggaagggat

SEQ ID NO: 124508 - DNA, 127 bp, Glycine max
cattgtctttgaacactcatcaccatggccaagcttgtactttccctttgtttccttcttttcagtggctgcttcgctctgagagagcaggcacagcaaaatgagtgccagatccaaaagctgaatg

SEQ ID NO: 124509 - DNA, 185 bp, Glycine max
caacaatcctacttgcaaggattcagcaggaacattttagaggcctcctacgataccaaattcgaggagataaacaaggttctgtttagtagagaggaagggcagcagcaaggggagcagaggctgcaagagagcgtgattgtggaaatctcgaaggaacagattcgggcactgagcaaacgtgc

SEQ ID NO: 124510 - DNA, 237 bp, Glycine max
gggaaactgactttcccccagggcacttcccgaaatgttaagagaatgcctctttctatagggggaggagctggtgcaaagaatgctattctcatgaatatgccaaatgctgttctttcaatgtggagatattttgttggagatctcgtctttgaagtttctaagatgacttctccctacattaaatgcacagtctctttcttcatagcatttggaaatttggctgatgacaccatc

SEQ ID NO: 124511 - DNA, 128 bp, Glycine max
  unsure (1)..(128): unsure at all n locations
caataccaggtgattttgtagacactgaactatcatgcaccatagcatacaaatatggtcanccatcagccaacagagttgtagcaggacgcacctgagttggctgatgggtgcccatatttgtatgc

SEQ ID NO: 124512 - DNA, 128 bp, Glycine max
gaggaatcttagtggacaaaactggagattggatcacacttatacaaaattctccaattagtaacttgttgagagttgctgcttggaagaaaggctgtttaatggtcaagattgtgatgtctgggaat

SEQ ID NO: 124513 - DNA, 248 bp, Glycine max
tgatagaccctcgatcggaaaccttgcaggggcaaactcattgttgaacgcattgccagaggaagtgattcagcacacttttaacctaaagagccagcaggccaggcaggtgaagaacaacaaccttttaatttccggtccccacctgaggattctcagaggagagctgtggcttagagagccctttttgcatgtgctaccacacttttgtccttttgggctctagctagtgctggtagcagtaaata

SEQ ID NO: 124514 - DNA, 243 bp, Glycine max
acatacatagtagtgttggtgggttgcaaagatgcttgggggtcttctccataggggtcataagataaaagggacagtggtgttgatgcgcaagaatgtgttggacgtgaatagcgtaaccagcgttgggggaattttggtcaaggtctcgacttagttggctcaacactcgatactcttactgccttcttgggccgatccgtgtctctccagcttattagtgctaccaaagctgatgccaac

SEQ ID NO: 124515 - DNA, 256 bp, Glycine max
gttcaatatcctagtataccttaataaataatttaagatactatgatgagagcacggttcccattactgttgctgggacttgttttcctggcttcagtttctgtctcatttggcattgcttactgggaaaaagagaccccaaacacaacaagtgtctccagagttgcaatagcgagagagactcgtacaggaaccaagcatgcgacgctcgttgcaacctccttaaggtggagaaagaagaatgtgaagaaggtga

SEQ ID NO: 124516 - DNA, 251 bp, Glycine max
  unsure (1)..(251): unsure at all n locations
cgacatgctagaagtgaagtgaccatatcttaatttcaaatcataaaattcttccaccaagttatgggtatacttgtgttgcttcttttctccctcttaggtctctcttctagttccagcatatcaactcatcgtccatattggaccttgaccaaaattaaaaaccacacagaaacaggtgtcnncantgnnccaactatggaagagtgagcatggacgngtctaccataaccacgaagaagaggcaaaga

SEQ ID NO: 124517 - DNA, 253 bp, Glycine max
aggaattttagtggacaaaactggagattggatcacacttatacaaaattctccaattagtaacttgttgagagttgctgcttggaagaaaggctgtttaatggttaagattgtgatgtctgggaatgcagcagcaaaaggagtgattgggcctcattggtacaagtgtttttaacaaacagcaacagtacagagcattttgatgcatgtaagtggacaaaatcggaaccacattcctgggaattgatcttcc

SEQ ID NO: 124518 - DNA, 135 bp, Glycine max
cactcatcaccatggccaagcttgttctttccctttgtttccttcttttcagtggctgcttcgctctgagagagcaggcacagcaaaatgagtgccagatccaaaagctgaatgccctcaaaccggataaccgat

SEQ ID NO: 124519 - DNA, 253 bp, Glycine max
acaacaatcagcttgatcaaaaccccagagtattttaccttgctgggaacccagatatagagcacccagagaccatgcaacaacagcagcagcagaagagtcatggtggacgcaagcaggggcaacaccagcacaggaggaagaaggtggcagtgtgctcagtggcttcagcaaacatttcttagcacaatccttcaacaccaacgaggacacagctgagaaacttcggtctccagatgacgaaaggaagcag

SEQ ID NO: 124520 - DNA, 253 bp, Glycine max
agtgattaatgaaggagaagcaaacattgaacttgttggcattaaagaacaacaacagaggcagcaacaggaagagcaacctttggaagtgcggaaatatagagctgaattgtctgaacaagatatatttgtatcccagcaggttatccagttgtggtcaacgctacctcagatctgaatttctttgcttttggtatcaatgccgagaacaaccagaggaacttccttgcaggttcgaaagacaatgtgataa

SEQ ID NO: 124521 - DNA, 250 bp, Glycine max
gagagactgaaccgcatcgggagcgggagcggcgggacggtgtacaaggtggtccaccgcaccagcgggcgcgtgtacgcctgaaggtgatatacggtcaccacgaggagtccgtgcggcggcagatccaccggaaatccagatcctccgtgacgtgaacgatccgaacgtggtgaagtgccacgagatgtacgatcagaacagcgaaatccaggtgctgctggagttcatggacggagtctcactggag

SEQ ID NO: 124522 - DNA, 252 bp, Glycine max
cttaacacttccttagttcaatatggggaagcccttcactctctctctttcttccctttgcttgctactcttgtcgagtgcatgctttgctattagctccagcaagctcaacgagtgccaactcaacaacctcacgcgttggaacccgaccaccgcgttgagtccgaaggtggtttgattcaaacatggaactctcaacaccctgagctgaaatgcgccggtgtcactgtttccaaactcaccctcaaccgc

SEQ ID NO: 124523 - DNA, 255 bp, Glycine max
ctgaagcgtaccggatttcattgtgatatcatttgtgtcactggatggactgccactccaatgcaggatgttcaggttacaattgattggtttatttcctctcaggaatgtgttcccaggacctattgtgttttaatccacaaaatccttttgtgttaaataggtggatggggaaactgactttcccccagggcacttcccgaagtgtcaaaagaatgcctctttctatagggggaggagctggtgcaaagaatg

SEQ ID NO: 124524 - DNA, 125 bp, Glycine max
gtgtcatcagccatatttgaggcttttccccataagctggtgcagtttggagagattcaggaaaaagttgtattgaaattttcacaagaggaattccttacagcttggtcaactcaggtgcgtcc

SEQ ID NO: 124525 - DNA, 246 bp, Glycine max
agttcaatatcctagtataccttaataaataatttaagatactatgatgagagcacggttcccattactgttgctgggacttgttttcctggcttcagtttctgtctcatttggcattgcttactgggaaaaaggaaccccaaacacaacaagtgtctccagagttgcaatagcgagagagactcgtacaggaaccaagcatgccacgctcgttgcaacctccttaaggtggagaaagaagatgtg

SEQ ID NO: 124526 - DNA, 255 bp, Glycine max
gatgaagatgaagatcaacctcgcaagagccgcgaatggagatcgaaaaagacacaacccagaagacctagacaagaagaaccacgtgaaagaggatgcgagacaagaaacggggttgaggaaaatatctgcacttgaagcttcacgagaacattgctcgcccttcacgcgctgacttctacaaccctaaagctggtcgcattagtaccctcaacagcctcaccctcccagccctccgccaattccaactcagtg

SEQ ID NO: 124527 - DNA, 252 bp, Glycine max
tctcgagcgaatcggctcgggaatatgccaaatgctgttcgttcaatgtggagatattttgttggagatctcgtatttgaagtttctaagatgacttctccctacattaaatgtacagtctctttcttcatacatttggaaatttggctgatgacaccatcaattttgaggcttttccccacaagctggtgcagtttggagagattcaggaaaaagttgtattgaaattttcacaagaggaatttcttacag

SEQ ID NO: 124528 - DNA, 124 bp, Glycine max
cttaattattaacacttccttagttcaatatggggaagcccgtcactctctctctttcttccctttgcttgctactcttgtcgagtgcatgctttgctattagctccagcaagctcaacgagtg

SEQ ID NO: 124529 - DNA, 247 bp, Glycine max
ccaaaagctgaatgccctcaaaccggataaccgtatagagtcggaaggtgggttcattgagacctggaaccctaacaacaagccattccagtgtgccggtgttgccctctctcgctgcacccttaaccgcatgcccttcgtagaccttcctacaccaacggtccccaggaaatctacatacaacaaggtaatggtatttttggcatgatattcccgggttgtcctagcacttatcaagagccgcaag

SEQ ID NO: 124530 - DNA, 249 bp, Glycine max
cttaattattaacacttccttagttcaatatttgtaagcccttcactctctctctttcttccctttgcttgctactcttgtcgagtgcatgctttgctattagctccagcaagctcacctagtgccatcttacaacctcaatccgttggaacccgaccaccgcgttgagtccgaaggtggtttgattcaaacatggaactctcaacaccctgagctgaaatgcgccggtgtcactgtttccaaactcac

SEQ ID NO: 124531 - DNA, 101 bp, Glycine max
aaaggctttagcttgccttttgttcactgtaaaataataatgtaagtactctctataatgagtcacgaaacttttgcgggaataaaaggagaaattccaat

SEQ ID NO: 124532 - DNA, 231 bp, Glycine max
ttcaatatcctagtataccttaataaataatttaagatactatgatgagagcacggttcccattactgttgctggtacttgttttcctggcttcagtttctgtctcatttggcattgcttactgggaaaaaagaaccccaaacacaacaagtgtctccagagttgcaatagcgagagagactcgtacaggaaccaagcatgccacgctcgttgcaacctccttaaggtgga

SEQ ID NO: 124533 - DNA, 231 bp, Glycine max
attggcctcaggcatcaattcctttctcagatgatgagctcgactatatatatcacctagacccatttcgtgattcagaaatgcttagaatggagcttcccatgattcgagaagcatgcttgcgggttttggtctctgtactatcttcctcaaggaagcagcagcttttggtctttgtctagcagagattggtgacatgatgagtagggaatttcagggtctccatgaaga

SEQ ID NO: 124534 - DNA, 251 bp, Glycine max
ctctccattgtctttgaacactcatcaccatggccaagcttgttctttccctttgtttccttcttttcagtggctgcttcgctctgagagagcaggcacagcaaaatgagtgccagatccaaaagctgaatgcctcaaaccggataaccgtatagagtcggaaggtgggttcattgagacctggaaccctaacaacaagccattccagtgtgccggtgttgccctctctcgctgcacccttaaccgcaatg

SEQ ID NO: 124535 - DNA, 250 bp, Glycine max
gatcatggatagtagtgttggtgggttgcaaagatgcttgggggtcttctccataggggtcataagataatagggacagtggtgttgatgcgcaagaatgtgttggacgtgaatagcgtaaccagcgttggggaattattggtcaaggtctcgacttagttggctcaacactcgatactcttactgccttcttgggccgatccgtgtctctccagcttattagtgctaccaaagctgatgccaacggaaa

SEQ ID NO: 124536 - DNA, 146 bp, Glycine max
  unsure (1)..(146): unsure at all n locations
cttaattattaacacttccttagttcaatatggggaagcccgtncatgtctctctttcttccctttgcttgctactcttgtcgagtgcatgctttgctatgagctccagcaagctcaaggagtgccagctcaaaacctcaacgcgt

SEQ ID NO: 124537 - DNA, 247 bp, Glycine max
agagtttctaaaatatcagcaagagcaaggaggtcatcaaagccagaaaggaaagcatcagcaagaagaagaaaacgaaggaggcagcatattgagtggcttcaccctggaattcttggaacatgcattcagctggacaagcagatagcgaaaaacctacaaggagagaacgaaggggaagacaagggagccattgtgacagtgaaaggaggtctgagcgtgataaaaccacccagggacgagcagc

SEQ ID NO: 124538 - DNA, 117 bp, Glycine max
cacacacacacacacactaagaataatggcttctatcctccactactttttagcccgctctctttctttctctttccttttcttcttatccgactccgtccccattccccaacacca

SEQ ID NO: 124539 - DNA, 250 bp, Glycine max
cttaattattaacacttccttagttcaatatggggaagcccatcactctctctctttcttccctttgcttgctactcttgtcgagtgcatgctttgctattagctccagcaagctcaacgagtgccaactcacaacctcaacgcgttggaacccgtgcaccgcgttgagtccgaaggtggtttgattcaaacatggaactctcaacaccctgagctgaaatgcgccggtgtcactgtttccaaactcacc

SEQ ID NO: 124540 - DNA, 244 bp, Glycine max
attcaaaccttgctctatactacacagtacacacactagaagaataatggcttccatcctccactactttttagccctctctctttcttgctcttttcttgtcttcttatccgactcagtcacccctacaaaccaataaaccttgttgttctacccgttcaaaatgatggttccacagggctccattggtccaacctccaaaaaagaacccctctaatgcaagtaccagtcctggtggacctca

SEQ ID NO: 124541 - DNA, 122 bp, Glycine max
cccaatagaggtatgtggtcctaataatggttttgaaatgtggagttctgagtgggcaaatcaaacttcatggcatttgagtttccttattgacaatcccaaacagtctacagtttttgata

SEQ ID NO: 124542 - DNA, 250 bp, Glycine max
tttgaacactcatcaccatggccaagcttgttctttccctttgtttccttcttttcagtggctgcttcgctctgagagagcaggcacagcaaaatgagtgccagatccaaaagctgaatgccctcaaaccgataaccgtatagagtcggaaggtgggttcattgagacctggaaccctaacaacaagccattccagtgtgccggtgttgccctctctcgctgcacccttaaccgcaatgcccttcgtaga

SEQ ID NO: 124543 - DNA, 248 bp, Glycine max
taaaattcttccaccaagttatgggtttccttgtgttgcttcttttctccctcttaggtctctcttctagttccagcatatcaactcatcgttccatattggaccttgacctaaccaagtttaccacacgaaacaggtgtcttcactgttccaactatggaagagtgagcatggacgtgtctaccataaccacgaagaagaggcaaagagacttgagattttcaagaataacttgaactatatcaggg

SEQ ID NO: 124544 - DNA, 248 bp, Glycine max
  unsure (1)..(248): unsure at all n locations
ttctctccattggtccttaaacactcatcagtcatcaccatggccaagctagttttttccctttgttttctgcttttcagtggctgctgcttcgctttcagttccagagagcagcctcattanaacgagtccagatccaaaaactcaatgccctcaaaccggataaccgtatagagtcagaaggagggctcattgagacatggaaccctaacaacaagccattccagtgtgccggtgttgccctctct

SEQ ID NO: 124545 - DNA, 244 bp, Glycine max
acaaaccctcccctcacactctccaaacccgagcggcactacacacgttatctctctctctctctctctctctccctctctccttccccaagatgtcgagcgccgatcccgagcaccgagaagaggaggagcacccgccgtcggcgacgacgaggacaccggagcacacgtcgctcccatcgtcaagctcgaggaggttgctgtcaccaccggcgaggaggacgaagatgcaatcctagatctc

SEQ ID NO: 124546 - DNA, 250 bp, Glycine max
tcgagcgattcggctcagaacttattaacactttccttacgttcaatatggggaagcccttcttcactctctcactttcttccctttgcttgctactcttgtcgagtgcatgctttgctattacctccacaagttcaacgagtgccaactcaacaacctcaacgcgttggaacccgaccaccgcgttgagtccgaagtggtcttattgaaacatggaactctcaacaccctgagctgcaatgcgccggtg

SEQ ID NO: 124547 - DNA, 101 bp, Glycine max
tgcatgatagttcagtgtctacaataccaggtgattttgtcattggtgttaagttgacaaccataaacaatatgtgtgcatatgggctcaatcctggtatt

SEQ ID NO: 124548 - DNA, 250 bp, Glycine max
gatgaggccactcatccagactccatgagggccactttggctgaatttgtttctactttcatctttgtctttgctggagaaggctctggccttgctttggttaaaatttaccaggattcagctttctcagtggtgaattgttggcagttgcaatgacacatggatttgctctatttgctgctgtttctgcaagcatgcatgtatcaggtggccatgtcaacccagctgtgacatttggtgctctcattgg

SEQ ID NO: 124549 - DNA, 247 bp, Glycine max
gcagaaagaattaagaaagccaaaaatttggagctgcttttgactgctggcattggttctgatcatgttgatctcaaagctgcagctgctgctggtttaactgtggcagaggtcacaggaagcaacgtttgtcggttgcggaggacgaactcatgagaatcctcattctaatgaggaatttcttgccagggtaccatcaggctgttaatggggaatggaatgttgctggcattgcacatagagctta

SEQ ID NO: 124550 - DNA, 234 bp, Glycine max
atccggataaaggtgaaaatcatgcccgtcatgttcttggaggaaatgacacctttccttatcctcgtagggggagaactggtagaaaaccaacaaggaaagatcctaatagtgagagtaggagcatgatgtttatcttccaagagatgaggcttttggacacttgaagtcatctgactttcttacttatggactaaaatccgtatctcaaaatgttcttccattattgcaatc

SEQ ID NO: 124551 - DNA, 241 bp, Glycine max
  unsure (1)..(241): unsure at all n locations
atagtagtgttggtgggttgcaaagatgcttgggggtcttctccataggggtcataagataatagggacagtggtgttgatgcgcaagaatgtgttggacgtgaatagcgtaaccagcgttgggggaattattggtcaaggtctcgacttagttggctcaacactcgatactcttacntgcttcttgggccgatccgtgtctctccagcttattagggctaccaaagctgatgccatggga

SEQ ID NO: 124552 - DNA, 242 bp, Glycine max
gggaagaagaacaacaagagcagcatgaggaacaagatgaaaatccctacatttttgaggaagataaggattttgagaccagagtcgaaactgaaggtggcagaattcgggttctcaagaagttcactaaaaatccaagcttcttcagggcattgagaacttccgtttggccattttggaagctagagcacacacgttcgtgtctcctcgccaatttgattccgaggttgtttttctcaaca

SEQ ID NO: 124553 - DNA, 205 bp, Glycine max
ttctgttccacaggctactgccagatcttctgaaaatgcggaatcctctgcatgatctggaatttgtgttttctttcatttgtccgtttgtttaattcaataaaggaaattaggcatgaccctcttgttgagtatgctctgcctatttgaaaatttccacacctcttttaattgtcgtaatgatgtgtgaagtgtgtgttatttt

SEQ ID NO: 124554 - DNA, 247 bp, Glycine max
ataaaattcttccaccaagttatgggtataccttgtgttgcttcttttctccctcttaggtctctcttctagttccagcatatcaactcatcgttccatattggaccttgacctaaccaagtttaccacaagaaacaggtgtcttcactgttccaactatggaagagtgagcatggacgtgtctaccataaccacgaagaagaggcaaagagacttgagattttcaagaataacttgaactatatca

SEQ ID NO: 124555 - DNA, 252 bp, Glycine max
ctccccttgctgcggttgctccatcacctaatcacttccccacttcccctgtaaatcacgtttagttcgcacaaggttttaaaaaatggctgatgctgaggacattcaacctcttgttgttgataatggactggaatggtcaaggcgggttttgcaggtgatgacgctcctagggccgtgttccccagtattattgggcgaccacgccataccggtgtaatggttgggatgggtcagaaggatgcttacgtg

SEQ ID NO: 124556 - DNA, 243 bp, Glycine max
cgcacgcattgcttcgcctcacaacagcagctgcagcagcaatggctcccaaacgaggtggaaaggctccggctcttgccgctaagaagaagcctgagaaggtcacgaatccgttgttcgagaagcgtccaagcagttcggaatcggaggggcgttgcctccgaagagagacttgactaggttcgtgaagtggccaaagaatgttcaaattcagaggaagaagaggattctgaagcagaggtt

SEQ ID NO: 124557 - DNA, 217 bp, Glycine max
tgaaaagctttctagctggtcataatatcaccattactgatggtattgacaagactagtgcaactttgcaatttagaaagttagcagattgtgattttctcaagagaaactttaagcagatgtctaatgtttgtgggtagctcctgaggacaaggcgagtttatggtcacaacttcattatgtttcgtgtaataatctggaattgcaagagcttatc

SEQ ID NO: 124558 - DNA, 245 bp, Glycine max
attcaaaccttgctctatactacacagtacatacactagaagaataatggcttccatcctccactactttttagccctctctctttcttgctcttttcttttcttcttatccgactcagtcacccctcaaaaccaataaaccttgttgttctacccgttcaaaatgatggttccacagggctccattgtcccaacctccaaaaaagaacccctctaatgcaagtaccagtcctggtggacctcaa

SEQ ID NO: 124559 - DNA, 210 bp, Glycine max
tcacacacaactactacaagtacttccttacaatcaaaaccaacaacaactatggcaagttatcaaaagcactacgatgatcagggtcgcaaggttgacgagtatggcaacgttgagaagcaaaccgcgaatacggcaaccctgttcatgctgctagtgtcacctatgtagccaccagaactgctgctggtggttacagtgatgacatta

SEQ ID NO: 124560 - DNA, 118 bp, Glycine max
ggaatcctgcttgcacaaaagcaatgactatgtcatttaatccaaacccgtgttctgatgcatggagtttggaatttctgaagcgtactggatttcattgcgatatcatttgtgtcac

SEQ ID NO: 124561 - DNA, 245 bp, Glycine max
gagctgataagaaaatgcagttatatcatcatcccttggatttggaaagccagagggtgagacttgcattggaggaggagggtgtagattatacatctcaccatgtcaatcccattactgccaagacttggattccactttcttcaagatgaatcgccatggaagagtcccggttttccaaaatggctctcacatcatttacaatactattgatataatccagtacatagaaagaattgctgtgg

SEQ ID NO: 124562 - DNA, 244 bp, Glycine max
tgaagcaagagcgagagaaacaaatccaagaggaaactcgtgagaagaaagaggaggaaagccgtgaaagggaagaagaacaacaagagcagcatgaggaacaagatgaaaatccctacatttttgaggaagataaggattttgagaccagagtcgaaactgaaggtggcagaattcgggttctcaagaagttcactgaaaaatccaagcttcttcagggcattgagaacttccgtttggccat

SEQ ID NO: 124563 - DNA, 243 bp, Glycine max
gaaaaacccaaaaagattgatgccagattgagacaaagaatagatcctcaatacaatgaggttcaggctcagatggaaacaaatttgtttaaattgtctcttgatgatgttgaaactcctaaaggtccatgttggatcttaaaatttctcaatctaaaattgcacttcccaaaaacacagttggaggaaccattctgcgtagtgacctattggcaaattttttgacagagggcaattttagag

SEQ ID NO: 124564 - DNA, 118 bp, Glycine max
actaacaataattccttcacttgcagaacttagttctctgttgcatcatcatcatcttcattagtgttagccctaaacttcaccttcaaccatgaccacagtgccaccacacagtgtc

SEQ ID NO: 124565 - DNA, 248 bp, Glycine max
aaaattcttccaccaagttatgggtctaccttgtgttgcttcttttctccctcttaggtctctcttctagttccagcatatcaactcatcgttccatattggaccttgacctaaccaagtttaccacaagaaacaggtgtcttcactgttccaactatggaagagtgagcatggacgtgtctaccataaccacgaagaagaggcaaagagacttgagattttcaagaataacttgaactatatcaggg

SEQ ID NO: 124566 - DNA, 241 bp, Glycine max
atatactatgatgagagtgcggtttcctttgttggtgttgctgggaactgttttcctggcatcagtttgtgtctcattaaaggtgagagaggatgagaataaccctttctacttgagaagctctaacgcttccaaactctctttgagaaccaaaacggtcgcattcgtctcctccagagattcaacaaacgctccccacaacttgagaatcctcgagactaccggattgtccagtttcagt

SEQ ID NO: 124567 - DNA, 95 bp, Glycine max
ttgtctttgaacactcatcaccatggccaagcttgttctttccctttgtttccttcttttcagtggctgcttcgctctgagagagcaggcacagc

SEQ ID NO: 124568 - DNA, 246 bp, Glycine max
ggaatcctgcttgcacaaaagcaatgactatgtcatttaatccaaacccgtgttctgatgcatggagtttggaatttctgaagcgtactggatttcattgcgatatcatttgtgtcactggatggatgccaccccaatgcaggatgttcaggttacaattgattggtttatttcctctcaggaatgtgttcccaggacctattgtgttttaaatccacaaaatccttttgtgttaaataggtggat

SEQ ID NO: 124569 - DNA, 242 bp, Glycine max
gcttgcacaaaagcaatgactatgtcatttaatccaaacccgtgttctgatgcgtggagtttggaatttctgaagcgtaccggatttcattgtgatatcatttgtgtcactggatggactgccactcaatgcaggatgttcaggttacaattgattggtttatttcctctcaggaatgtgttcccaggacctattgtgttttaaatccacaaaatccttttgtgttaaataggtggatgggg

SEQ ID NO: 124570 - DNA, 246 bp, Glycine max
tggaaaggctacctttttggaaggtatcattacttcattgccaactttgggagcaggccaatctgcattcaaaattaattttgaatgggatgatgggagtggaattcctggagcattttatatcaaaattttatgcaaactgagtttttccttgtgagtttgactcttgaagacattccaaaccatggaagcaattactgtgtttgcaattcgtggatttacaatgccaaactcttcaaaagtgac

SEQ ID NO: 124571 - DNA, 243 bp, Glycine max
cagcactgagtctgagccacgagaatgcaatgttcgtgccacactacaacctgaacgcgaacagcataatatacgcattgaatggacgggcattgatacaagtggtgaattgcaacggtgagagatgtttgatggagagctgcaagagggacgggtgctgatcgtgccacaaaactttgtggtggctgcaagatcacagagtgacaacttcgagtatgtgtcattcaagaccaatgatacacc

SEQ ID NO: 124572 - DNA, 244 bp, Glycine max
tgaacactcatcaccatggccaagcttgttctttccctttgtttccttcttttcagtggctgcttcgctctgagagagcaggcacagcaaaatgagtgccagatccaaaagctgaatgccctcaaccggataaccgtatagagtcggaaggtgggttcattgagacctggaaccctaacaacaagccattccagtgtgccggtgttgccctctctcgctgcacccttaaccgcaatgcccttcg

SEQ ID NO: 124573 - DNA, 111 bp, Glycine max
gctggtgcaaagaacagcatttggcatattcatgagaatagcattctttgcaccagctcctccccctatagaaagacgcattctctaaacacttcgggaagtgccctgggg

SEQ ID NO: 124574 - DNA, 238 bp, Glycine max
tcaatgttgaagaggcttacaacaagctaacagttgaacttgagaaaagtgttcctacattggttggcattgaatgtcccaaggatgaaaaacttcctcgtcgcaaagtttttgataaacctaaacgcgctgcttcactattctccctatggagttaaatcttgtggtccgtcagaagtttttaaattttgtgaggttcattatgaagaaaagggacaagcttagttgtcaagttgga

SEQ ID NO: 124575 - DNA, 242 bp, Glycine max
ctttggacttgcgaggatatatgaagctcctctgaagccgttatctgataatggggttgttgtaaccatttggtatcgtgcacccgagttgcttcttggagcaaaacattatactagtgctgtgatatgtgggctgtgggatgcatttttgctgagttgttgaccttgaagccgctatttcaaggggcagaagtcaaagctacatcaaatccctttcagctcgaccaacttgacaagatatt

SEQ ID NO: 124576 - DNA, 248 bp, Glycine max
ctccattggtccttaaacactcatcagtcatcaccatggccaagctagttttttccctttgttttctgcttttcagtggctgctgcttcgctttcagttccagagagcagcctcagtaaaacgaggccagatccaaaaactcaatgccctcaaaccggataaccgtatagagtcagaaggagggctcattgagacatggaaccctaacaacaagccattccagtgtgccggtgttgccctctctcgca

SEQ ID NO: 124577 - DNA, 250 bp, Glycine max
aacttcattatgtttcgtgtaataatctggaaatgcaagaagcttatcttgtcaatctcgtaaatgtgttacgagaattgtatttgcacagtccagaggaagctcgccaattgagaaggaaagctctctctcgtattgaatggctgcaaaaagctgatgtgcctaccatagcacagattgaagagttccattcgatgcagaggatgatgaaggctcctgattcaaatgacaatattgatctactgttgag

SEQ ID NO: 124578 - DNA, 231 bp, Glycine max
ctttgaacactcatcagcattgtaagacgagttctccctacattaaatgtacagtctctttcttcatagcatttggaaatttggctgatgacaccatcaattttgaggcttttccccacaagctggtgcagtttggagagattcaggaaaaagttgtattgaaattttcacaagaggaattttctacagcttggtcaactcaggtgcgtcctgcaacaactctgttggctg

SEQ ID NO: 124579 - DNA, 264 bp, Glycine max
gcatgcacgttcggctcgatcagattttcacaagacgaatttcttacagcttggtcaacccaggtgcgtcgtgcaacaactctgttggctgatcggtcacctatcagaatgctattgtacataatagttcatactctacaataccaggtgattttgtcattggtgttaagttgacaaccataaacaatatgtgtgcatatgggctcaatcctggtatttcaggttctcgtcttttgggcaccttcatcagtccatttcacagca

SEQ ID NO: 124580 - DNA, 241 bp, Glycine max
aacctcgtcaagaagaagagcacgagcagacagaggaacaggcatggcctcgcaaggaggaaaaacgcggagaaaagggaagtgaagcacgaagatgaggatgaggatgaggaacaagatgaacgtcaattcccattcccacgcccacctcatcagaaggaagagcgagagcaagaggaagatgaggatgaggagcagcagcgagagagcgaagaaagtgaagattctgagttacgaagac

SEQ ID NO: 124581 - DNA, 245 bp, Glycine max
tctcgagccgctcgagccgattctgctcgaggatagttcagtgtctacaataccaggtgcactttgtcactggtgttaagttgacaaccataaacacatatgtgtgcatatgggctcaatcctggtatttcaggttctcgtcttttgggcaccattcctcagtccatttcacagcaaactgtttggaatcaaatggcaacagtgagaacaccattgaattttgattctagcaagcagagcttttg

SEQ ID NO: 124582 - DNA, 244 bp, Glycine max
acacttccttagttcaatatggggaagcccttcactctctctctttcttccctttgcttgctactcttgtcgagtgcatgctttgctattagctccagcaagctcaacgagtgccaactcaacaacctcaacgcgttggaacccgaccaccgcgttgagtccgaaggtggtttgattcaaacatggaactctcaacaccctgagctgaaatgcgccggtgtcactgtttccaaactcaccctca

SEQ ID NO: 124583 - DNA, 244 bp, Glycine max
agatcctcaatacaatgaggttcaggctcagatggaaacaaatttgtttaaattgtctcttgatgatgttgaaactcctaaaggctccatgttggatctgaaaatttctcaatctaaaattgcacttcccaagaacacagttggaggaaccattctgcgtagtgatctattggcaaattttttgacagagggcaattttagagcaagtgttgatttgcagcgcactcatcgtattagaggaatg

SEQ ID NO: 124584 - DNA, 247 bp, Glycine max
ggatcactccgcaagaatgctatgttcgtgccacactacaccctgaacgcgaacagcataatatacgcattgaatgggcgggcattggtacaagtggtgaattgcaatggtgagagagtgtttgatggagagctgcaagagggaggggtgctgatcgttccacaaaactttgcggtggctgcaaaatcccagagcgataactttgagtatgtgtcattcaagaccaatgatagaccctcgatcggaa

SEQ ID NO: 124585 - DNA, 242 bp, Glycine max
ctctatctctattaagttgtaactctatttatcactcagatatttgagaaggctttgaaagatggtgcttttgggacttctcatggtgggatttctttctctgggttcatttgtctcagcttctggttatggttggatggatgctcatgcaaccttctatggagggggtgatgcctcaggcaccatgggtggagcatgtggatatgggaacttgtacagccagggctatggaacaaacactg

SEQ ID NO: 124586 - DNA, 245 bp, Glycine max
gctagaatggaatttcgatgctcagtcatctcttttaccattctcttctctcttgctcttgcaggagagagccatgtccatgcatcgctacctgaggaagattattgggaagctgtttggccaaacactcccattcccactgcactgcgagagcttctaaagcctcaccctgcaggtgttgaaatcgatgaactccctaagcaaattgatgatacacagtacccaaaaacattcttctataaaga

SEQ ID NO: 124587 - DNA, 231 bp, Glycine max
agcgcacaaagcaaagcagtaaatgcttttattgattctgaacattttacaaaacaactgcttttattttattaaagccaaacatgaaagcactcaaacacactagattaccatgtgcaggttggatgaagaaattcgggaagcagctgcaagagatgcaagagttgcaagggaagcagctgcaagatatgcaagggatgcaagggtgcaggcgagagttgtaaagagaac

SEQ ID NO: 124588 - DNA, 232 bp, Glycine max
gtctttgaacactcatcaccatggccaagcttgttctttccctttgtttccttcttttcagtggctgcttcgctctgagagagcaggcacagcaaaatgagtgccagatccaaaagctgaatgccctcaaaccggataaccgtatagagtcggaaggtgggttcattgagacctggaaccctaacaacaagccattccagtgtgccggtgttgccctctctcgctgcaccct

SEQ ID NO: 124589 - DNA, 245 bp, Glycine max
aaagcaaagtctgatattgtggtcaagattggactcaggaagggttctcgttcctttgctgaagctcgtgcagctgggttttctgaggagaatgggactctaggtgatatatgggaaactgtctctggaagtgatcttgtgatgctgttaatttctgattctgcacaggctgataactatgagaagatattgtctcacatgaagccaaacagtatacttgggctttcccatggttttcttcttgg

SEQ ID NO: 124590 - DNA, 117 bp, Glycine max
aagcaaagcaatggctacttcaaagttgaaaacccagaatgtggttgtatctctctccctaaccttaaccttggtactggtgctactgaccagcaaggcaaactcagcggaaactgt

SEQ ID NO: 124591 - DNA, 242 bp, Glycine max
tctctcccattctctcgcatctcaatacccttttgatttgtgacaggaaagcaaacatgcttgatcaggtccaacaccctacaatcatggacttggttgctggccagctccatctccgttctggtgtttctggtattaggagttatgaaggagcctactgccaccccacaatgtaccaaagaccctcttttgggaattactcgaatgctgcattccagtatcctgtgatgccctcatgcaaa

SEQ ID NO: 124592 - DNA, 244 bp, Glycine max
caagaacaatcaaacagaagtggctcaaggtcgcagaagcagcagctacaggacagtcaccagaagattcgtcacttcaatgaaggagacgtactcgtgattcctcctggtgttccttactggacctataacactggcgatgaaccagttgttgccatcagtcttctcgacatctctaacttcaataaccagcttgatcaaacccctagggtattttaccttgctgggaacccagatatagagt

SEQ ID NO: 124593 - DNA, 90 bp, Glycine max
aaattttgataaaccgcgatcacaggttgccgcaccttaaaaccggaaacaaaagcaatcgttacttgatttcaagaatctctcaatttc

SEQ ID NO: 124594 - DNA, 242 bp, Glycine max
aacagctttcatggttccattggtggctggtgatggaaccaaaactcaggcacttgctgtttgccactcagatacttctggaatgaatcatcacatgcttcatgaacacatgggagttgatcctggaactaaccctgtttgccatttccttggaagcaaggccattttatgggtacccaatttatctatacacactgcctatcagactaacgttgttgtttaattagtccatgcatctgcat

SEQ ID NO: 124595 - DNA, 229 bp, Glycine max
atcctagtacaccgtattaaagaatttaagatatactatgatgagagcgcggttcccattactgttgctggcagttgttttcctggcatcagtttctgtctcatttggcattgcgtattgggaaaagcagaaccccagtcacaacaagtgcctccgaagttgcaatagcgagaaagactcctacaggaaccaagcatgccacgctcgttgcaacctccttaaggtggag

SEQ ID NO: 124596 - DNA, 242 bp, Glycine max
attgggccaacctccaaaaaagaacccctctaatgcaagtaccagtcctggtggacctcaatggaaatcacttgtgggttaactgtgagcagcagtactcatccaaaacgtaccaagcacccttctgccactccacccaatgctctagagccaacacccaccaatgcctcagttgccccgcggcatcaaggccagggtgccacaaaaacacgtgtggcctcatgtccactaatcccatcacc

SEQ ID NO: 124597 - DNA, 179 bp, Glycine max
tgataaaccgcgatcacaggttgccgcaccttaaaaccggaaacaaaagcaatcgttacttgatttcaagaatttctcaatttctttctacttctttgtgtacgatttcttaagggaaagaaaatcactctctgtgctggccacagacttcgtgaatcattttcttttccactcttagt

SEQ ID NO: 124598 - DNA, 244 bp, Glycine max
caaaagtttttaaattttgtgaggttcattatgaagaaaagggacaaacttagttgtcaagttggaatcaacccatactccatggaatggactggtttggccaatagattactgagtaagggcaatgatattctgtgttgccatcttgctcataacttgcttggtaatcaaaccatcaaaactagcataatggcagaaatgataaacagtctttgtggtggtgatgaaaaattgatgcgtgaaa

SEQ ID NO: 124599 - DNA, 242 bp, Glycine max
agcgaaggagatataaagactcttggtaatggtaacatgaacatcgtccaatcaccccttgagaggcccttgcttatcagcaactgcaccagtgaggaacgctttcaaaagctctcaagatacaggaataagaggacaaagaggaattttgggaggaaaatcaagtatgcttgcaggaaggctcttgctgacagtcagccaagaatccgtgggagatttgcaaggactgaagagtctgatgt

SEQ ID NO: 124600 - DNA, 232 bp, Glycine max
cgccaaagcaaaaggagcagaaatggcattgatgagaccatttgcacaatgagacttcgccaaaacattggtcagaattcatcacctgacatctacaaccctcaagctggtagcatcacaaccgccaccagccttgacttcccagccctctggcttctcaaactcagtgcccagtatggatcactccgcaagaatgctatgttcgtgccacactacaccctgaacgcgaaca

SEQ ID NO: 124601 - DNA, 239 bp, Glycine max
gttgcagaccgagctagctagctagcaagcaagcacagagatggaggcaaagcgaggccatgccctcatgtgcttggcacgtgtttcactcttcctctgcgctctaaccctatccgctgctcacggaagcaccacggttcaacacatcgcgagaaagttgaaactcggggacaacgagcttctgcgcacggagaagaagttcaaggttttcatggagaattacgggaggagctactcca

SEQ ID NO: 124602 - DNA, 246 bp, Glycine max
ttcctcgtcgcaaaatttttgacaaacctaagacgcgctgcttcactattctccctatggagtttaatcttgtggtccgtcaaaagtttttaaattttgtgaggttcattatgaagaaaagggacaaacttagttgtcaagttggaatcaacccatactccatggaatggactggtttggccaatagattactgtctaagggcaatgatattctgtgttgcgattatgctagttttgatggtttga

SEQ ID NO: 124603 - DNA, 249 bp, Glycine max
aaatgaccaagttcacaatcctcctcatctctcttctcttctgcatcgcccacacttgcagcgcctccaaatggcagcaccagcaagatagctgccgcaagcagctccagggggtgaacctcacgccctgcgagaagcacatcatggagaagatccaaggccgcggcgatgacgatgatgatgatgacgacgtgaatcacattctcaggaccatgcggggaagaatcaactacataaggaggaacgaag

SEQ ID NO: 124604 - DNA, 245 bp, Glycine max
agcattccatagttctcagatagggcacgtctctcgcggcctcttctctccctcgcgccgcccacactaaaaggttattgctctattattgtttgacgatggctgatgctcatgggactgataagaacattgaggtgtggaaaatcaagaaattgatcaaagctcttgaggctgccagaggaaatgggacaagtatgatttcccttatcatgcctccacgtgatcaaatatctcgtgtcaccaag

SEQ ID NO: 124605 - DNA, 242 bp, Glycine max
  unsure (1)..(242): unsure at all n locations
attcaaaccttgctctatactacacagtacacacactagaagaataatggcttccatcctccactactttttagccctctctctttcttgctcttttcttttcttcttatccgactcagtcacccctacaaaaccaataaaccttgttgttctacccgttcaaaatgatggttccacagggctccattggtttaatctcaaaaaaattanncctctaatgcaagtaccagtcctggtggacc

SEQ ID NO: 124606 - DNA, 240 bp, Glycine max
gtgttttaaatccacaaaatccttttgtgttaaataggtggatgggaaaattgactttcccccagggcacttcccgaagtgttaagagaatgcctctttctatagggggaggagctggtgcaaagaatgctattctcatgaatatgccaaatgctgttctttcaatgtggagatattttgttggagatctcgtctttgaagtttctaagatgacttctccctacattaaatgtacagtct

SEQ ID NO: 124607 - DNA, 201 bp, Glycine max
tgaattcttgaaagaagcgttcggcgtgaacatgcagatagtgagaaacctacaaggtgagaacgaagaggaggatagtggagccattgtgacagtgaaaggaggtctaagagtcacagctccagccatgaggaagccacagcaagaagaagatgatgatgatgaggaagagcagccacagtgcgtggagacagacaaagg

SEQ ID NO: 124608 - DNA, 241 bp, Glycine max
ttaacacttccttagttcaatatggggaagcccttcactctctctctttcttccctttgcttgctactcttgtcgagtgcatgctttgctattagctccagcaagctcaacgagtgccaactcaacaacctcaacgcgttggaacccgaccaccgcgttgagtccgaaggtggtttgattcaaacatggaactctcaacaccctgagctgaaatgcgccggtgtcactgttgcgaaactca

SEQ ID NO: 124609 - DNA, 244 bp, Glycine max
ctccattggtccttaaacactcatcagtcatcaccatggccaagctagttttttccctttgggttctgcttttcagtggctgctgcttcgctttcagttccagagagcagcctcagcaaaacgagtgccagatccaaaaactcattgccctcaaaccggataaccgtatagagtcagaaggagggctcattgagacatggaaccctaacaacaagccattccagtgtgccggtgttgccctctc

SEQ ID NO: 124610 - DNA, 241 bp, Glycine max
cgaaggggaagacaagggagccattgtgacagtgaaaggaggtctgagcgtgataaaaccacccacggacgagcagcaacaaagaccccaggaagaggaagaagaagaagaggatgagaagccacagtgcaagggtaaagacaaacactgccaacgcccccgaggaagccaaagcaaaagcagaagaaatggcattgacgagaccatatgcaccatgagacttcgccacaacattggccag

SEQ ID NO: 124611 - DNA, 234 bp, Glycine max
gggtttcgtttcgggtttgacgttgtgcacaatcactttctgcgcttcacttactcgcttcgtgcggtattctttcttagtcgaactcgtgcgaaaatgcgtgagattcttcacatacagggagagcaatgcggaaaccagatcggagcgaagttctgggaggtggtgtgctcggagaggggatcgattccacggggaggtaccagtgggagaacgagttgcaactcgagcgag

SEQ ID NO: 124612 - DNA, 244 bp, Glycine max
gtcccaaggatgaaaaacttcctcgtcgcaaagtttttgataaacctaagacgcgctgcttcactattctccctatggagtttaatcttgtggttcgtcagaagtttataaattttgtgaggttcattatgaagaaaagggacaagcttagttgtcaagttggaatcaacccatattctatggaatggactggtttggccaatagattactgagtaagggcaacgatattctgtgttgcgatta

SEQ ID NO: 124613 - DNA, 243 bp, Glycine max
gtctttgaacactcatcaccatggccaagcttgttctttccctttgtttccttcttttcagtggctgcttcgctctgagagagcaggcacagcaaaatgagtgccagatccaaaagctgaatgccctcaaaccggataaccgtatagagtcggaaggtgggttcattgagacctggaaccctaacaacaagccattccagtgtgccggtgttgccctctctcgctgcacccttaaccgcaatg

SEQ ID NO: 124614 - DNA, 200 bp, Glycine max
attcccttaggaatccagcttccaaagcttacgaacaggtgtttgcacctcaccatggttgggcaatcaggaaggctgtttccgtgggaatgtatgtccttcctacaaaggaacagcttctgaagaaacttaatgaggatggtaagtgcaggattaagtttgcttgaactttttattgaactttaagtcctgaaaaaaga

SEQ ID NO: 124615 - DNA, 238 bp, Glycine max
gataaacctcgtcctagtcgaccaagccaaggaaagcgtgaacaagaccaggaccaggacgaggacgaagatgaagatgaagatcaacctcgcaagagccgcgaatggagatcgaaaaagacacaacccagaagacctagacaagaagaaccacgtgaaagaggatgcgagacaagaaacggggttgaggaaaatatctgcaccttgaagcttcacgagaacattgctcgcccttcac

SEQ ID NO: 124616 - DNA, 106 bp, Glycine max
aattattaacacttccttaggtcgagatggggaagcccttcactctgtctctttgttccctttgcttgctactcttgtcgagtgcatgctttgggattagctccag

SEQ ID NO: 124617 - DNA, 236 bp, Glycine max
acgaccacgaccacgaccacaacacccggagagaaggaggaagacgaagatgagcaaccacgtccaatcccattcccacgcccacaacctcgtcaagaagaagagcacgagcagagagaggaacaggaatggcctcgcaaggaggaaaaacgcggagaaaagggaagtgaagaggaagatgaggatgaggatgaggaacaagatgaacgtcaattcccattcccacgcccacctca

SEQ ID NO: 124618 - DNA, 128 bp, Glycine max
caccacctcgtcaagaagaagagcacgagcagagagaggaacaggcatggcctcgccaggaggaaaaacgcggagaacagggaagtgaagaggaagatgaggatgaggatgaggaacaagatgaacgt

SEQ ID NO: 124619 - DNA, 234 bp, Glycine max
ctccattggtccttaaacactcatcagtcatcaccatggccaagctagttttttccctttgttttctgcttttcagtggctgctgctccgctttcagttccagagagcagcctcaagaaaacgagtgccagatccaaaaactcaatgccctcaaaccggataaccgtatagagtcagaaggagggctcattgagacatggaaccctaacaacaagccattccagtgtgccggtg

SEQ ID NO: 124620 - DNA, 234 bp, Glycine max
  unsure (1)..(234): unsure at all n locations
ctccattggtccttaaagattcatcagtcattaccatggccaagctagtgnttccgctttgttttctgcttttcagtggctgttngttcgatttcagttccagagagcagcttgtataaaacgagtgccagatcgaaaaactcaatgtcgtcaaaccggataagcgtatagagtcagaaggagggctcattgagacatggaaccctagcaacaagccattccagtgtgccggtg

SEQ ID NO: 124621 - DNA, 222 bp, Glycine max
tggggaagcccttcttcactctctctctttcttccctttgcttgctactcttgtcgagtgcatgctttgctattacctccagcaagttcaacgagtgtcaactcaacaacctcaacgcgttggaacccgaccaccgcgttgagtccgaaggtggtcttattgaaacatggaactctcaacactctgagctgcaatgcgccggtgtcactgtttccaaacgca

SEQ ID NO: 124622 - DNA, 234 bp, Glycine max
aaatgaccaagttcacaatcctcctcatctctcttctcttctgcatcgcccacacttgcagcgcctccaaatggcagcaccagcaagatagctgccgcaagcagctccagggggtgaacctcacgccctgcgagaagcacatcatggagaagatccaaggccgcggcgatgacgatgatgatgacgacgacgacaatcacattctcaggaccatgcggggaagaatcaactaca

SEQ ID NO: 124623 - DNA, 236 bp, Glycine max
ccaaaaggtacatcgcttcagagagggtgatttgatcgcagtgcctactggtgttgcatggtggatgtacaacaatgaagacactcctgttgttgccgtttctattattgacaccaacagcttggagaaccagctcgaccagatgcctaggagattctatcttgctgggaaccaagagcaagagtttctaaaatatcagcagcagcagcaaggaggttcccaaagccataaaggaa

SEQ ID NO: 124624 - DNA, 236 bp, Glycine max
gcaaatcaaacttcatggcatttgagtttccttattgacaatcccaaacagtctacagtttttgatattctcttgggaatctctcaagattttgaaattgctggtaatactcttatgccagctttttctgttccacaggctactgccagatcttctgaaaatgcggaatcctctgcatgatctggaatttgtgttttctttcgcttgttcgtttgtttaattcaataaaggaaatt

SEQ ID NO: 124625 - DNA, 235 bp, Glycine max
ctcaaggtcgcagaagcagcagctacaggacagtcaccagaagattcgtcacttcaatgaaggagacgtactcgtgattcctcctggtgttccttactggacctataacactggcgatgaaccagttgttgccatcagtcttcttgacacctctaacttcaataaccagcttgatcaaacccctagggtattttaccttgctgggaacccagatatagagtacccagagaccatg

SEQ ID NO: 124626 - DNA, 247 bp, Glycine max
ctcgagccgaatccgctcgaggtcaacccaggtgcgtcctgcaacaactctgttggctgatgggtgtacatatttgtatgctatggtgcatgatagttcagtgtctacaataccaggtgattttgtcattggtgttaagttgacaaccataaacaatatgtgtgcatatgggctcaatcgtggtatttcaggttctcgtcttttgggcaccattcctcagtccatttcacagcaaactgtttggaat

SEQ ID NO: 124627 - DNA, 238 bp, Glycine max
caaatgatatcacagtgaaatcatttgtgtcactggatggactgccaccccaatgcaggatgttcaggttacaattgattggtttatttcctctcaggaatgtgttcccaggacttattgtgttttaaatccacaaaatccttttgtgttaaataggtggatggggaaactgactttcccccagggcacttcccgaaatgttaagagaatgtctctttctatagggggaggagctggt

SEQ ID NO: 124628 - DNA, 81 bp, Glycine max
actctccattgtctttgaacactcatcaccatggccaagcttgttctttcgctttgtttccttcttttcagtggctgcttc

SEQ ID NO: 124629 - DNA, 231 bp, Glycine max
gggtttccttgtgttgcttcttttctccctcttaggtctctcttctagttccagcatatcaactcatcgttccatattggtccttgacctaaccaagtttaccacacagaaacaggtgtcttcactgttccaactatggaagagtgagcatggacgtgtctaccataaccacgaagaagaggcaaagagacttgagattttcaagaataacttgaactatatcagggacat

SEQ ID NO: 124630 - DNA, 234 bp, Glycine max
gcaagctcaacgagtgccaactcaacaacctcaacgcgttggaacccgaccaccgcgttgagtccgaaggtggtttgattcaaacatggaactctcaacaccctgagctgaaatgcgccggtgtcactgtttccaaactcaccctcaaccgcaatggcctccacttgccatcttactcaccttatccccggatgatcatcatcgcccaagggaaaggagcacttggagttgcaa

SEQ ID NO: 124631 - DNA, 218 bp, Glycine max
caatatcctagtataccttaataaataatttaagatactatgatgagagcacggttcccattactgttgctgggacttgttttcctggcttcagtttctgtctcatttggcattgcttactgggaaaaagagaaccccaaacacaacaagtgtctccagagttgcaatagcgagagagactcgtacaggaaccaagcatgccacgctcgttgcaacct

SEQ ID NO: 124632 - DNA, 232 bp, Glycine max
catttttggcatgatattcccgggttgtcctagcacttatcaagagccgcaagaatctcagcaacgaggacgaagccagaggccccaagaccgtcaccaaaaggtacatcgcttcagagagggtgatttgatcgcagtgcctactggtgttgcatggtggatgtacaacaatgaagacactcctgttgttgccgtttctattattgacaccaacagcttggagaaccagctc

SEQ ID NO: 124633 - DNA, 235 bp, Glycine max
tacaaaagcacaatttgttagtggaaaaaccttcaaatatgatatagttggtgctggttcacattcttcagaagatttttctgaaaaggaagatcaagaaaaacccaaaaagattgatgccagattgagacaaagaatagatcctcaatacaatgaggttcaggctcagatggaaacaaatttgtttaaattgtctcttgatgatgttgaaactcctaaaggttccatgttggat

SEQ ID NO: 124634 - DNA, 218 bp, Glycine max
caagaaaaacccaaaaagattgatgccagattgagacaaagaatagatcctcaatacaatgaggttcaggctcagatggaaacaaatttgtttaaattgtctcttgatgatgttgaaactcctaaaggttccatgttggatcttaaaatttctcagtctaaaattgcacttcccaagaacacagttggaggaactattctgcgtagtgatctattggc

SEQ ID NO: 124635 - DNA, 231 bp, Glycine max
agagacctccttccatagcgaattcgaggagataaacagggttttgttgggagaggaagaggagcagaggcagcaagagggagtgatcgtggaactctcaaaggaacaaattcggcaactgagcagacgtgccaaatctagttcaaggaaaaccatttcctccgaagatgaaccattcaacttgagaagccgcaaccccatctattccaacaactttggaaagttctttga

SEQ ID NO: 124636 - DNA, 229 bp, Glycine max
atgtccattggtgcttaaacattcatcaggcatcatgatggataatgtagtaagtactctctataatgtgcttttcaactgctgctggtttgatttgagttctagagatgagtctgatgtcaacgagtgccagatccaaaaactcaatgccctcaaaccggataaccgtatagagtcagaaggagggctcattgagacatggaaccctaacaacaagccattcgagtgt

SEQ ID NO: 124637 - DNA, 238 bp, Glycine max
tccaaaccacaatctgaatacaagaacgaataatagacaacaaaagataggactgagttttcttttattcgttcttgtattcagattgtggtttggagatttcttcagaggtcaaaaggttcagatgtactagcaacaaagcaggccttgttgttcattatcttgcttcagtatgttccaagatttctccgaatggtaccattgacttcagagcttaagagaacagccggtgtctttc

SEQ ID NO: 124638 - DNA, 237 bp, Glycine max
gaagccgcgaccccatctattccaacaagcttggcaagttgtttgagattaccccagagaaaaaccctcagcttcgggacttggatgtcttcctcagtgttgtggatatgaacgagggagctctttttctgccacacttcaattcaaaggccatagtggtactagtgattaatgaaggagaaccacacattgaacttgttggcattaaagaacaacaacagaggcagcaacaggaag

SEQ ID NO: 124639 - DNA, 161 bp, Glycine max
cgcacgcacgcgtacggaaccacgcggttccctttgttggtgttgctgggaactgttttcctggcatcagtttgttcctcattaaaggtgagagaggatgagaataaccctttctacttgagaagctctaacagcttcaaaactctctttgagacccaaaa

SEQ ID NO: 124640 - DNA, 159 bp, Glycine max
cacttccttagttcaatatggggaagcccttcactctctctctttcttccctttgcttgctactcttgtcgagtgcatgctttgctattagctccagcaagctcaacgagtgccaactcaacaacctcaacgcgttggaacccgacaaccgcgttgagt

SEQ ID NO: 124641 - DNA, 163 bp, Glycine max
cactgatccgcattgccgttcaaagtggtcttatttgaaaaacacttgggcgttggtgcaaatgtttgcttcgttaattttctctggagacgacaggctcactgagaaccaaatttttacttgcagagatttggacatcttggttgtttattatccaatagca

SEQ ID NO: 124642 - DNA, 137 bp, Glycine max
tggtgtatctctttcacatttaagaaaagtctcgaatcttggtttattgattggtggaatactaggcaatccgaaattttcttgaatgatattaaagaaaagagtattctaaaaaaattcatagaatttgaggaact

SEQ ID NO: 124643 - DNA, 179 bp, Glycine max
atattcccgggttgtcctagcacttatcaagagccgcaagaatctcagcaacgaggacgaagccagaggccccaagaccgtcaccaaaaggtacatcgcttcagagagggtgatttgatcgcagtgcctactggtgttgcatggtggatgtacaacaatgaagacactcctgttgttgc

SEQ ID NO: 124644 - DNA, 144 bp, Glycine max
cactaccaatggtgattttgttcaaggaaaagctctcgcaatggttaaagttactgtagcatgtgctgctgttggcttgacatcaagttacactcccactccattgttggaatctggattgcaataagccagagggttaattgt

SEQ ID NO: 124645 - DNA, 139 bp, Glycine max
aacagctttcatggttccattggtggctggtgatggaaccaaaactcaggcacttgctgtttgccactcagatacttctggactgaatcatcacatgcttcgtgaactcatgggatttgatcttggaaataaccctgtt

SEQ ID NO: 124646 - DNA, 176 bp, Glycine max
cctattggcaaattttttgacatagggcaattttagagcaagtgttgatttgcagcgcactcatcgtatcaaaggaatgattaaaatggtggccacagttggtattcctgagaatacaggtatagcattggcctgtgctatgaatagttcttttagggggcgtgccagttctgatt

SEQ ID NO: 124647 - DNA, 272 bp, Glycine max
cacgaaatctgctcgagcttcagatgattttcctgaaaaggaagatcaagaaaaacccaaaaagattgatgccagattgagacaaagaatagatcctcaatacaatgaggttcaggctcagatggaaacaaatttgtttaaattgtctcttgatgatgttgaaactcctaaaggttccatgttggatcttaaaatttctcagtctaaaattgcacttcccaagatcacagttggaggaactattctgcgagatgaccaattggcaattttct

SEQ ID NO: 124648 - DNA, 161 bp, Glycine max
aggaaggatctctatggtaacattgtcttgagtggtggttccacaatgttccctggcattgctgataggatgagcaaggagattacagcattggcaccaagtagcatgaaaattaaggttgtagcaccaccagagaggaagtacagtgtctggattggagg

SEQ ID NO: 124649 - DNA, 176 bp, Glycine max
caatatcctagtataccttaataaataatttaagatactatgatgagagcacggttcccattactgttgctgggacttgttttcctggcttcagtttctgtctcatttggcattgcttactgggaaaaagagaaccccaaacacaacaagtgtctcaagagtaatcatagcgagag

SEQ ID NO: 124650 - DNA, 178 bp, Glycine max
caaaagtttttaaattttgtgaggttcattatgaagaacagggacaaacttagatgtcaagttggattcaacccatactccatggaatggactggtttggccactagattactgagtaagggcaatgatattctgtgttgccatcttgctcataacttgcttggtactcaaaccatca

SEQ ID NO: 124651 - DNA, 179 bp, Glycine max
gaatgcctttctatagggggaggagctggtgcaaagaatgctattctcatgaatatgccaaatgctgttctttcaatgtggagatattttgttggagatctcgtctttgaagtttctaagatgacttctcgctacattaaatgtacagtctctttcttcatagcatttggaaatttggc

SEQ ID NO: 124652 - DNA, 175 bp, Glycine max
aaaattgcacttcccaaaaacacagttgctggaaccattctgcgtagtgacctattcggcaaattttttgacagagggcaattttagagcaagtgttgatttgcagcgcactcatcgtatcaaaggcatgattaaaatggtggccacagttggtattcctgagaatacaggtgta

SEQ ID NO: 124653 - DNA, 148 bp, Glycine max
cacattcttcagaagattttcctgaacaggaagatcaagataaacccagaaagattgatgccagattgagacaaagaatagatcctcaatacaatgaggttcaggctcagatggaaacaaatttgtttaaattgcctctggatgatgt

SEQ ID NO: 124654 - DNA, 180 bp, Glycine max
agcatgtgctgctgttggcttgacatcaagctatactccgactccattgttggaatctggtttgcaaaaagacagagggttaattgtggagtattttggaaggatgtcttacgttgctcataacgttaatcacccccaagagaaagatttgttggaaggaaatttcccctttgatattaa

SEQ ID NO: 124655 - DNA, 175 bp, Glycine max
gcattttgatgcatgtaagtggacaaaatcggaaccacattcctgggaattgatcttcccaatagaggtatgtggtcctaataatggttttgaaatgtggagttctgagtgggcaaatcaaacttcatggcatttgagttcccttattgacaaccccaaacagtctacagttttt

SEQ ID NO: 124656 - DNA, 138 bp, Glycine max
tgaacactcatcaccatggctaagcttgttctttccctttgtttcgttcttttcagttggtgcttcgatctgagatatcaggcacagcaaagtgagtgcgagatccaaaatttgaatgccctcaaaccggataacggg

SEQ ID NO: 124657 - DNA, 136 bp, Glycine max
gaaaaaagagaagaagatgggtttgaagaacaacatggtggtgctaaaggtgtgtttggtgctacttttccttgtggggggtactactagtgccaacttgaggctgagtaagcttggcctgctcatgaaaagtgat

SEQ ID NO: 124658 - DNA, 218 bp, Glycine max
tcggctctatatttccgcacttccaaaggttgctcttcctgttgctgctcctgttgttgttcttttaggccgaattgtctgaacaagatatatttgtaatcccagcaggttatccagttgtggtcaacgctacctcaaatctgaatttctttgctattggtattaatgccgagaacaaccagaggatcttcctcgaaggttcgcaagacaatgtgata

SEQ ID NO: 124659 - DNA, 194 bp, Glycine max
cagacttcaatctggtgatgccctgagagtcccctcaggaaccacatactatgtggtcaaccctgacaacaacgaaaatctcagattaataacactcgccatacccgttaacaagcgtggtagatttgagagtttctacatatctagcactgaagctcaacaatcctacttgcagggattcagcaggaacattt

SEQ ID NO: 124660 - DNA, 172 bp, Glycine max
tacacactcatcagtcatcaccatggccaagctagttttttccctttgatttctgctttacagtggctgctgcttcgatttcagttccagacagcagactcagagcgacgagtgccagatccataaactcaatgccctcaaaccggataaccgtatagactcaccaggaggg

SEQ ID NO: 124661 - DNA, 171 bp, Glycine max
ggtcatcaaagccagaaaggaaagcatcagcaagaagaagaaaacgaaggaggcagcatattgagtggcttcaccctggaattcttggaacatgcattcagcgtggacaagcagatagcgataaacctacaaggagagaacgaaggggaagacaagggagccattgtgaca

SEQ ID NO: 124662 - DNA, 185 bp, Glycine max
aattcggctagagaaattttgataaacagagatgacaggttgtagcagcttaaaaccggaaacaaaagtaatcgttacttgatttcaagaatctatgaatttattaatatttatttgtgtacgatttgttaagggaagaaaatgactatatgtgatggaaaaagatttagtgaatgattttattt

SEQ ID NO: 124663 - DNA, 149 bp, Glycine max
ccgctacgaagctggcgtcgtcccccccggagcccgtttcgaaccgacgcgttatgaagccggcgtcaaagcgccctccatttaccattccgagagaggtccaacgacttcccaggtcctcgccgtcctcgccggcctcccggtcggtg

SEQ ID NO: 124664 - DNA, 148 bp, Glycine max
cgattgctagaatggaatttcgatgctcagtcatctcttttaccattctcttctctcttgctcttgcaggagagagccatgtccatgcatcgctacctgaggaagattattgggaagctgtttggccaaacactcccattcccactgg

SEQ ID NO: 124665 - DNA, 100 bp, Glycine max
atttgaaattttgataaaccgcgatcacaggttgccgcaccttaaaaccggaaacaaaagcagtcgttacttgatttcaagaatctctcaattacttcct

SEQ ID NO: 124666 - DNA, 147 bp, Glycine max
ctaagaaagtcttccatagccccccaaaaatgaagagcaccatcttctttgctctctttctcttttgtgccttcaccacctcatacctaccttcagccatcgctgatttcgtgctcgataatgaaggtaaccctcttgaaaatggtg

SEQ ID NO: 124667 - DNA, 146 bp, Glycine max
gacgaagatgaagatgaagatcaacctcgcaagagccgcgaatggagatcgaaaaagacacaacccagaagacctagacaagaagaaccacgtgaaagaggatgcgagacaagaaacggggttgaggaaaatatctgcaccttgaa

SEQ ID NO: 124668 - DNA, 143 bp, Glycine max
acaatgaagacactcctgttgttgccgtttctattattgacaccaacagcttggagaaccagctcgaccagatgcctaggagattctatcttgctgggaaccaagagcaagagtttctaaaatatcagcaagagcaaggaggt

SEQ ID NO: 124669 - DNA, 142 bp, Glycine max
atgtcaccaattatccatattgttaccgtgggatctggcacaacagaatcaatagcaaatgttacagaaattcactatggattaaatttctcttctgataatggtgatgatgaatttggaatttcctctgtcaaattttcaa

SEQ ID NO: 124670 - DNA, 136 bp, Glycine max
cttaaaaccggaaacaaaagcaatcgatacttgatttcaagaatctctcaattacttcctacttctttgtgtacgatttcttaagggaaagaaaatcactctctgtgctggccacagacttcgtgcatcattttct

SEQ ID NO: 124671 - DNA, 175 bp, Glycine max
gctggtaatactcttatgccagctttttctgttccacaggctactgccagatcttctgaaaatgcggaatcctctgcatgatctggaatttgtgttttctttcatttgtccgtttgtttaattcaataaaggaaattaggcatgaccctcttgttgagtatgctctgcctatttg

SEQ ID NO: 124672 - DNA, 145 bp, Glycine max
accttgctctatactacacagtacagacactagaagaataatggcttccatcctccactactttgtagccctctctctttcttgctctattctccgcttcttatccgactcagtcacccctacaaaaccaataaaccttgttgtt

SEQ ID NO: 124673 - DNA, 147 bp, Glycine max
cattggtccttaaacactcatcagtcatcaccatggccaagctagttttttccctttgttttctgcttttcagtggctgctgcttcgctttcagttccagagagcagcctcagcaaaacgagtgccagatccaaaaactcaatgccc

SEQ ID NO: 124674 - DNA, 225 bp, Glycine max
gtataccttaataaataatttaagatactatgatgagagcacggttcccattactgttgctgggacttgttttcctggcttcagtttctgtctcatttggcattgcttactgggaaaaagagaaccccaaacacaacaagtgtctccagagttgcaatagcgagagagactcgtacaggaaccaagcatgccacgctcgttgaaacctccttagggtggagaaag

SEQ ID NO: 124675 - DNA, 140 bp, Glycine max
cacaaaggcttatgctaccagaaccatccttttcctgaaaaatgacggaactttaaggccacttgccatagagttgagtttgccacatcctcagggagatcaatctggtgcttttagtcaagtttttctgcctgcagatg

SEQ ID NO: 124676 - DNA, 143 bp, Glycine max
taaacactcatcagtcatcatcatggccaagctagttttttccctttgttttctgcttttcagtggctgctgcttcgctttcagttccagagagcagcctcagcaaaacgagtgccagatccaaaaactcaatgccctcaaac

SEQ ID NO: 124677 - DNA, 143 bp, Glycine max
gtttgttgttcctcactgacctcaccatggcgaccagagccaagctttctttagctatcttccttttctttcttttagccttgatttcaaacctagccttgggcaaacttaaagaaaccgaggtcgaagaagatcccgagctc

SEQ ID NO: 124678 - DNA, 143 bp, Glycine max
aagtcttccatagccccccaaaaatgaagagcaccatcttctttgctctctttctcttttgtgccttcaccacctcatacctaccttcagccatcgctgatttcgtgctcgataatgaaggtaaccctcttgaaaatggtggc

SEQ ID NO: 124679 - DNA, 146 bp, Glycine max
ggaaaaacttgcaaggaagaacaatgatcaaagtctctccaatcgacttgggccggttcaactgccatacactttgctccatcctaacagtgaggaagggttgacttgcagggggattcctaatagcatctctatctaagggagca

SEQ ID NO: 124680 - DNA, 254 bp, Glycine max
ctcgagccgcaagtacttccttacaatcaaaaccaacaacaactatggcaagttatcaaaagcactacgatgatcagggtcgcaaggttgacgagtatggcaacgttgagaagcaaaccgacgaatacggcaaccctgttcatgctgctagtgtcacctatgtagccaccagaactgctgctggtggttacagtgatgacattaataagcaacatgataccaccaatgcctacggcgtagacactggtagacag

SEQ ID NO: 124681 - DNA, 93 bp, Glycine max
aggggaagcccttcactctctctctttcttccctttgcttgctactcttgtcgagtgcatgctttgctattagctccagcaagctcaacgagt

SEQ ID NO: 124682 - DNA, 108 bp, Glycine max
cactcatcagtcatcaccatggccaagctagttttttccctttgttttctgcttttcagtggctgctgcttcgctttcagttccagagagcagcctcagcaaaacgag

SEQ ID NO: 124683 - DNA, 256 bp, Glycine max
atttggctgatgacaccatcaattttgaggcttttccccacaagctggtgcagtttggagagattcaggaaaaagttgtattgaaattttcacaagaggaatttcttacagcttggtcaactcaggtgcgtcctgcaacaactctgttggctgatgggtgtccatatttgtatgctatggtgcatgataattcagtgtctacaataccaggtgattttgtcattggtgttaagttgacaaccataaacaatatgtg

SEQ ID NO: 124684 - DNA, 253 bp, Glycine max
aagaaatgaagagtactatcttctttgctctctttctagtttgtgccttcaccatctcatacctgccttcagccaccgctcagttcgtgctcgacactgatgatgatcctcttcaaaacggtggcacatactatatgttgccagttatgagaggaaagggcggtggaatagaagtagattcaactggaaaagaaatatgccctctcactgttgtgcaatcacccaatgagctcgataaggggattggactagt

SEQ ID NO: 124685 - DNA, 245 bp, Glycine max
taatatcaccattactgatggtattgacaaaactagtgcaactttgcaatttagaaagttagcagattgtgattttctcaagagaaactttaagcagatgtctaatgttttgtgggtggctcctgaggacaaggcgagtttatggtcacaacttcattatgtttcatgtaataatctggaaatgcaagaagcttatcttgtcaatctcgtaaatgtgttacgagaattgtatttgcacagtccag

SEQ ID NO: 124686 - DNA, 95 bp, Glycine max
caaaggctttagcttgccttttgttcactgtaaaataataatgtaagtactctctataatgagtcacgaaacttttgcgggaataaaaggagaaa

SEQ ID NO: 124687 - DNA, 254 bp, Glycine max
tcaatatcctagtataccttaataaataatttaagatactatgatgagagcacggttcccattactgttgctgggacttgttttcctggcttcagtttctgtctcatttggcattgcttactgggaaaaagagaaccccaaacacaacaagtgtctccagagttgcaatagcgagagagactcgtacaggaaccaagcatgccacgctcgttgcaacctccttaaggtggagaaagaagaatgtgcagaaggtg

SEQ ID NO: 124688 - DNA, 161 bp, Glycine max
aacacttccttagttcaatatggggaagcccttcactctctctctttcttccctttgcttgctactcttgtcgagtgcatgctttgctattagctccagcaagctcaacgagtgccaactcaacaacctcaacgcgttggaacccgacaaccgcgttgagt

SEQ ID NO: 124689 - DNA, 246 bp, Glycine max
cttaattattaacacttccttagttcaatatggggaagcccttcactctctctctttcttccctttgcttgctactcttgtcgagtgcatgctttgctattagctccagcaagctcaacgagtgccaactcaacaacctcaacgcgttggaacccgaccaccgcgttgagtccgaaggtggtttgattcaaacatggaactctcaacaccctgagctgaaatgcgccggtgtcactgtttccaaac

SEQ ID NO: 124690 - DNA, 94 bp, Glycine max
atactatgatgagagtgcggtttcctttgtaggtgttgctgggaactgttttcctggcatcagtcagtgtctcattaaaggtgagagaggatga

SEQ ID NO: 124691 - DNA, 169 bp, Glycine max
gttgtgcctcactgacctcaccatggcgaccagagccatgcttactttagctatcagcctactctttctatgagccttgatttcagacctagccttgggcaaacttatagaaatcgatgtcgtagaagatcccgagctcgtaacatgcagacaccagtgccaacagcaa

SEQ ID NO: 124692 - DNA, 207 bp, Glycine max
aacttattaacactttccttagttcaatatggggaagcccttcttcactctctctcttgcttccctttgcttgctactcttgtcgagtgcatgctttgctattacctccagcaagttcaacgagtgccaactcaacaaccaaaacgcgttggaacccgaccaccgcgttgagtccgaaggtggtcttattgaaacatggaactctca

SEQ ID NO: 124693 - DNA, 256 bp, Glycine max
cttaattattaacacttccttagttcaatatggggaagcccttcactctctctctttcttccctttgcttgctactcttgtcgagtgcatgctttgctattagctccagcaagctcaacgagtgccaactcaacaacctcaacgcgttggaacccgaccaccgcgttgagtccgaaggtggtgtgattacatacatggactctcaacaccccgagctgaaatgcgccggtggtcatgtttccaaactcaccctcaa

SEQ ID NO: 124694 - DNA, 202 bp, Glycine max
ctcgagccgctatatacacacacacacacactaagaataatggcttctatcctccactacattttagccctctctctatctctctctatccttttcttcttatccgactccgtccccattccccaacaccacactaaccctacaatatctataaaccttctggttctacccgttcaaaatgatgcttccacagggctccatt

SEQ ID NO: 124695 - DNA, 228 bp, Glycine max
tatacacacacacacacacactaagaataatggcttctatcctccactactttttagccctctctctttctttctctttccttttcttcttatccgactccgtccccattccccaacaccacactaaccctacaaaacctataaaccttctggttctacccgttcaaaatgatgcttccacagggctccattgggccaacctccaaaaaaggacccctctaatgcaag

SEQ ID NO: 124696 - DNA, 174 bp, Glycine max
tgataaactgcgatcacaggttgccgcaccttaaaaccggaaacaaaagcaatcgttacttgatttcaagaatttctcaatttctttctacttctttgtgtacgatttcttaagggaaagaaaatcactctctgtgctggccacagacttcgtgaatcatttacttttccacac

SEQ ID NO: 124697 - DNA, 250 bp, Glycine max
gttcaatatcctagtataccttaataaataatttaagatactatgatgagagcacggttcccattactgttgctgggacttgttttcctggcttcagtttctgtctcatttggcattgcttactgggaaaaagagaaccccatacacaacaagtgtctccagagttgcaatagcgagagagactcgtacaggaaccaagcatgccacgctcgttgcaacctccttaaagtggagaaagcagaatgtgaag

SEQ ID NO: 124698 - DNA, 250 bp, Glycine max
cggctcgaggcagccgttaattttggtcagtatccttatggaggtttgataatgaaccgcccaactgcttctagaaggttgcttcctgagaaaggcaccccagaatatgaagaaatgattaataaccatgaaaaggcttatttgagaacaattacatcaaagttgccgactctcattagcctttcagtgatagagatcttgtcgacacatgcttctgatgaggtctaccttggccagagggacaaccaca

SEQ ID NO: 124699 - DNA, 247 bp, Glycine max
cttccatagccccccaaaaatgaagagcaccatcttctttgctcactttctcttttgtgccttcaccacctcatacctaccttcagccatcgctgatttcgtgctcgataatgaaggtaaccctcttgaaaatggtggcacatattatatcttgtcagacataacagcatttggtggaataagagcagccccaacgggaaatgaaagatgccctctcactgtggtgcaatctcgcaatgagctcgac

SEQ ID NO: 124700 - DNA, 154 bp, Glycine max
ctcgagccgcgcgatcacaggttgccgcaccttaaaaccggaaacaaaagcaatcgttactacgatttcaagaatctctcaatttcttcctacttctttgtgtacgatctcttaagggacagataatcactctctgtgctggccacagacttcg

SEQ ID NO: 124701 - DNA, 231 bp, Glycine max
aattttcacaagaggaatttcttacagcttggtcaacccaggtgcgtcctgcaacaactctgttggctgatgggtgtccatatttgtatgctatggtgcatgatagttcagtgtctacaataccaggtgattttgtcattggtgttaagttgacaaccataaacaatatgtgtgcatatgggctcaatcctggtatttcaggttctcgtcttttgggcaccattcctcagt

SEQ ID NO: 124702 - DNA, 245 bp, Glycine max
gaatgcagcagtcaaaaggagtgattgggcctcattggtacaagtgtttttaacaaacagcaacagtacagagcattttgatgcatgtaagtggacaaaatcggaaccacattcctgggaattgatcttcccaatagaggtatgtggtcctaataatggttttgaaatgtggagttctgagtgggcaaatcaaacttcatggcatttgagttccctattgacaatccaaacagtctacagttttg

SEQ ID NO: 124703 - DNA, 230 bp, Glycine max
cttggatcctgacaaattcaaagaaatggctactaaggtctatgattttcaaaagcccgacactagtccacttttcaagcttctagcatcagggtttgcaaattatgatggcgacaagtgggctaaacacagaaagatcgtgagtccagcattcaatgtagagataatgaagctcttggtaccgatattttgccagagttgcgatgatttgatcagccaatgggagagtt

SEQ ID NO: 124704 - DNA, 226 bp, Glycine max
gaaattttgataaaccgcgatcacaggttgccgcaccttaaaaccggaaacaaaagcaatcgttacttgatttcaagaatctctcaatttcttcctacttctttgtgtacgatttcttaagggaaagaaaatcactctctgtgctggccacagacttcgtgaatcattttcttttccactctaagtttatttgctagacactctcctatttgatataggactcgtg

SEQ ID NO: 124705 - DNA, 239 bp, Glycine max
caccaggtgcccttctaatgggagatgccttcaatatgcgtcaccctttaaccggaggaggaatgactgtggctttatctgacattgttgtgctaagggacttacttaaaccccttcatgatctccatgatgcttctgctctttgcagataccttgaatcattctacaccctacgcaagctcgtagcatctacaataaacacactagccggggcattgtacaaagttttttgtgcatct

SEQ ID NO: 124706 - DNA, 222 bp, Glycine max
ttgaacactcatcaccatggccaagcttgttctttccctttgtttccttcttttcagtggctgcttcgctctgagagagcaggcacagcaaaatgagtgccagatccaaaagctgaatgccctcaaaccggataaccgtatagagtcggaaggtgggttcattgagacctggaaccctaacaacaagccattccagtgtgccggtgttgcctctctcgctgc

SEQ ID NO: 124707 - DNA, 261 bp, Glycine max
gacacccatcagccaacagagttgttgcaggacgcacctgagttgaccaagctgtaagaaattccaggtgattttgtcattggtgtcaagttgacaaccataaacaatatgtgtgcatatgaggctcaatcctggtatattcagttctcgacttttgggcaccattgctgcagtccatttgcacagcaaactgtgttggacttcaaatggccaacagttgagaacacccattgaattttgattctaagcaagcagagcttt

SEQ ID NO: 124708 - DNA, 250 bp, Glycine max
  unsure (1)..(250): unsure at all n locations
ctcgagccgattgaaattttcacaagaggaatttcttacagcttggtcaacccaggtgcgtactgcaacaactctgttggctgatgggtgtccatatttgtatgctatggtgcatgatagttcagtgtctacaataccaggtgatttagtcattggtgttaagttgacaaccattaacaatatgtgtgcatatgggctcaatcctggtatntcaagttctcgtcttttgggcaccattctcagtccattt

SEQ ID NO: 124709 - DNA, 250 bp, Glycine max
ctatgatgagagtgcggtttcctttgttggtgttgctgggaactgttttcctggcatcagtttgtgtctcattaaaggtgagagaggatgagaataaccctttctacttgagaagctctaacagcttccaaactctctttgagaaccaaaacggtcgcattcgtctcctccagagattcaacaaacgctccccacaacttgagacccgtcgagactaccggattgtccagtttcagtcaaaaccaacaca

SEQ ID NO: 124710 - DNA, 107 bp, Glycine max
ccattggtccttaaacactcatcagtcatcaccatggccaagctagttttatccctttgtttactgcttttcagtggatgctgcttcgctatcagttccagagagca

SEQ ID NO: 124711 - DNA, 218 bp, Glycine max
aagggcttggagactcatctgaatcagcccctattgcctttcctcaagacatacaaatggaggaaaggcctgaacctgttaggaacaacccacctcacggtactcggcgctaccaggatcagatggtcccaagtattacttcttcccatgtgagagtggaagaggtagaaacatcttcagaccttcgaaactcggctgcagacagcagagccgaagtg

SEQ ID NO: 124712 - DNA, 228 bp, Glycine max
ggcggaacccttcttcactctctctctttcttccctttgcttgccactcttgctcgactgcatgctctcctattacctccagcaagttcaacgagtgccaactcaacaacctcaacgcgttggaacccgacaaccgcgttcagtccgacagtggtcttattgaaacatggaactctcaacaccctgagctgcaatgcgacggtgtcactgtttccaaacgcaacctca

SEQ ID NO: 124713 - DNA, 232 bp, Glycine max
ctcgagccgttggtccttaaacactcatcagtcatcaccatggccaagctagttttttccctctgtactctgcttttcagtggctgctgcttcgctttcagttccagagagcagcctcagcaaaacgagtgccagatccaaaaactcaatgacaacacaccggataaccgtatagagtcagaaggagggctcattgagacatggaaccctaacaacaagccattccagtgtg

SEQ ID NO: 124714 - DNA, 242 bp, Glycine max
gagcaagagtttctaaaatatcagcaagagcaaggaggtcatcaaagccagaaaggaaagcatcagcaagaagaagaaaacgaaggaggcagcatattgagtggcttcaccctggaattcttggaacatgcattcagcgtggacaagcagatagcgaaaaacctacaaggagagaacgaaggggaagacaagggagccattgtgacagtgacaggaggtctgagcgtgataaaaccacccac

SEQ ID NO: 124715 - DNA, 164 bp, Glycine max
gcaaatcaaacttcatggcatttgagtttccttattgagaatcccaaacagtctacagtatcagatatactcttgggaatctctcaagatttggaaatctcgctggtaatactcttatgccagctttttctgtcccacaggctactgccagatcttctgccaat

SEQ ID NO: 124716 - DNA, 244 bp, Glycine max
ggaggtattggacctgtgccagtgggacgtgttgagaccggtgtcttgaagcctggaatggtggtgacttttgcaccaactggactgacaactgaagtcaagtctgtggagatgcaccatgaatctcttacagaggcacatcctggtgacaatgtgggattcaatgttaagaatgttgctgttaagcgtttgaagcgtggttatgttgcctcaaactcaaaggatgaccctgcaaaggaggctg

SEQ ID NO: 124717 - DNA, 244 bp, Glycine max
cggctccaggacgaagaggattaagaggatccgacggtcgccacgtttagcaacaaccaaaccctctctactctttcttcttctcttcgctagggttttagcttcttcctcttcacttcgttcttctggcctctaccatgagcaacgacaaggacaccttcaacgtcgctgatctcacttccgctctcaacgaggacaatagagcagaccttgtcaatgctctcaagagcaagatacagagttt

SEQ ID NO: 124718 - DNA, 239 bp, Glycine max
ggcgatgagcatcatactttctttagctatctatttcttctttctattagccttatgttcaaacctagcctttggcaaatgtaaagaaaccgaggtagaagaagaagaccctgagctcgtaacatgcaaacaccaatgccaacagccagagcaatacactgagggtgacaagcgggtatgcttgcaaagatgtgacacgtatcatcgtatgaagcaagacgagagaaacaatccagagg

SEQ ID NO: 124719 - DNA, 232 bp, Glycine max
gcaccaaagaggagttccaacaaggacaggcacaccaaggttgagggcagggggaggaggataaggatgcctgctctctgtgctgccagaatcttccagttgaccagagaattgggccacaaatctgatggggaaaccatccagtggctcctccagcaggctgagccatccatcatagctgcccatgggactggcacaatcccagcatctgctcttgctgctgctggcaatc

SEQ ID NO: 124720 - DNA, 183 bp, Glycine max
cgcattgccagaggaagtgattcagcacacttttaacctaaagagccagcaggccaggcaggtgaagaacaacaaccctttcagcttcctggttccacctcaggagtctcagaggagagctgtggcttagagagcccttttgcatgtgctaccacacttttgtccttttgggctctagctagt

SEQ ID NO: 124721 - DNA, 245 bp, Glycine max
gattcaggaaaaagttgtattgaaattttcacaagaggaatttcttacagcttggtcaactcaggtgcgtcctgcaacaactctgttggctgatgggtgcccatatttgtatgctatggtgcatgatagttcagtgtctacaataccaggtgattttgtcattggtgttaagttgacaaccataaacaatatgtgtgcatatgggctcaatcctggtatttcaagttctcgtcttttgggcacca

SEQ ID NO: 124722 - DNA, 224 bp, Glycine max
attgtttaaaagatacatttatgcagaagacaaagaaactttaccaggatacacatactcagcgcaatattgcaaaattgaatgatgaactctatgaagttcaccagataatgactcggaatgtgcaggaagttcttggtgttggtgaacagttggaccaggtcagccaaatgtccagtcgaatatcatcagaatctcgcatatatgctgataaagctagagat

SEQ ID NO: 124723 - DNA, 236 bp, Glycine max
caatggcaatggcttcttcaatccctaatgcgccttctgcgttcaattctcagagctacgttggtctcagagcgccactgaggaccttcaacttttcttctcctcaagctgccaaaattcctcgctcccaacgccttttcgtcgtcagagcctccgattcggagttcgaagccgccgttgtcgccggtacagttccgccggcgctcccgtgccgcccagaccggcggctccggttg

SEQ ID NO: 124724 - DNA, 229 bp, Glycine max
cttaattattaacacttccttagttcaatatggggaagctcttcactctctctctttcttccctttgcttgctactcttgtcgagtgcatgctttgctattagctccagcatgctcaacgagtgccaactcaacaacctcaacgcgttggaacccgaccaccgcgttgagtccgaagtggtttgattcaacatggaactctcaacaccctgagtgagatgcgccggtgt

SEQ ID NO: 124725 - DNA, 175 bp, Glycine max
ggaggattcctttgaggaagtttctttgagtgcagcactcaatggtgttgagggtttggactatatggaaagaattcctcttgccacatctgagggttttcctcatgtgctttcacgcaaaaatggtgaaaaaggcaaaaggagatttgtttctggggatggtgaagagatgaca

SEQ ID NO: 124726 - DNA, 177 bp, Glycine max
attcaaaccttgctctatactacacagtacacacactagaagaataatggcttccatcctccactactttttagccctctctctttcttgctcttttcttttcttcttatccgactcagtcacccctacaaaaccaataaaccttgttgttctacccgttcataatgatggttccac

SEQ ID NO: 124727 - DNA, 245 bp, Glycine max
  unsure (1)..(245): unsure at all n locations
atcacacacaactactacaagtacttccttacaatcaaaaccaacaacaactatggcaagttatcaaaagcatcacgatgatcagggtcgcaaggttgacgagtatggcaacgttgagaagcaaaccgacgaatacggcaaccctgttcatgatngtagtgtcacctatgtagccaccagaactgctgctggtggttacagtgatgacattaataagcaacatgataccaccatgcctacggcgt

SEQ ID NO: 124728 - DNA, 234 bp, Glycine max
aagctctagttacggatgctgacaacgtcatcccaaaggctgttgacgccttcaggagtgttgaaaacgttgagggaaatggtggccccggaaccatcaagaagatcactttccttgaggatggagaaaccaagtttgtgttgcacaaaatagaagcgattgatgaggctaacttgaggtatagctatagcgtagttgggggagatgggttgccagacacagtggagaagatca

SEQ ID NO: 124729 - DNA, 200 bp, Glycine max
aattattaacacttccttagttcaatatggagaagcccttcactctctctctttcttccctttgcttgctactcttgtcgagtgcatgctttgctattagctccagcaagctcaacgagtgccaactcaacaacctcaacgcgttggcacccgaccaccgcgttgagtccgaagtggtttgattcaaacatggaactctc

SEQ ID NO: 124730 - DNA, 239 bp, Glycine max
ttaattattaacacttccttagttcaatatggggaagcccttcactctctctctttcttccctttgcttgctactcttgtcgagtgcatgctttgctattagctccagcaagctcaacgagtgccaactcaacaacctcaacgcgttggaacccgaccaccgcgttgagtccgaagtggtctgattcaaacatggaactctcaacaccctgagctgaaatgcgccggtgtcactgtttc

SEQ ID NO: 124731 - DNA, 156 bp, Glycine max
gttggcttgacatcaagctatactccgactccattgttggaatctggtttgcaaaaagacagagggttaattgtggagtattttggaaggatgtcttacgttgctcataacgttaatcagtcccaagagacagatttgttggaaggaaatttttcc

SEQ ID NO: 124732 - DNA, 103 bp, Glycine max
cttcctcaccgattgctagaatggaatttcgatgctcagtcatctcttttaccattctcttctctcttgctcttgcaggagagagccatgtccatgcatcgct

SEQ ID NO: 124733 - DNA, 193 bp, Glycine max
gtggaatcccttctggatttccgctcacagttatttgcaatagcatttttaatgagatgctcattagatatagctatgaaaaattactgcgccaggctagagctccaagcatgtttttacaatccttcaaaaattttgtttctttgtgtgtgtatggtgatgataacttaattagtgttcatgaatatgtcaa

SEQ ID NO: 124734 - DNA, 169 bp, Glycine max
cattcccacgcccacaacctcgtcaagaagaagagcacgagcagagagaggaacaggaatggcctcgcaaggaggataaacgcggagaaaagggaagtgaagaggaagatgaggatgaggatgaggaacaagatgaacgtcaattcccattcccacgcccacctcatca

SEQ ID NO: 124735 - DNA, 246 bp, Glycine max
cattgtctttgaacactcatcaccatggccaagcttgttctttccctttgtctccttcttttcagtggctgcttcgctctgagagagcaggcacagcagaatgagtgccagatccaaaagctgaatgccctcaaaccggataaccgtatagagtcggaaggtgggttcattgagacctggaaccctaacaacaagccattccaatgtgccggtgttgccctctctcgctgcacccttaacgcaatg

SEQ ID NO: 124736 - DNA, 160 bp, Glycine max
gtcgcagcaaatcaaaatggccaacaagaaaatgaagaaggaacaatattcttgtgaccatccacctgcatcatgggattggaggaaaaaaggtgtcatcacccaagtaaagtaccaagggggctgtggaagcggttgggcgttttctgccacgggagcc

SEQ ID NO: 124737 - DNA, 160 bp, Glycine max
ataaaattcttccaccaagttatgggtttccttgtgttgcttcttttctccctcttaggtctctcttctagttccagcatatcaactcatcgttccatattggaccttgacctaaccaagtttaccacacagaaacaggtgtcttcactgttccaactat

SEQ ID NO: 124738 - DNA, 243 bp, Glycine max
  unsure (1)..(243): unsure at all n locations
attatgctagttttgatggtttgattaccaagcaagttatgagcaagatggcagaaatgataaacagtctatgtggtggtgatgaaaaattgatgcgtgaaaggacacacctgctgttggcttgttgttcaaggatggcaatttgtaagaaagatgtttggagagttgaatgtggaatcccttctggatttccgctcacagnntattgcaatagcnattttaatgagatgctcattagatata

SEQ ID NO: 124739 - DNA, 160 bp, Glycine max
agcaaaatgaccaagttcacaatcctcctcatctctcttctcttctgcatcgcccacacttgcagcgcctccaaatggcagcaccagcaagatagctgccgcaagcagctccagggggtgaacctcacgccctgcgagaagcacatcatggagaagatcc

SEQ ID NO: 124740 - DNA, 241 bp, Glycine max
ctcgagccgcatggccaagcttgttctttccctttgtttccttcttttcagtggctgcttcgctctgagagagcaggcacagcaaaatgagtgccagatccaaaagctgaatgccctcaaaccggataaccgtatagagtcggaaggtgggttcattgagacctggaaccctaacaacaagtcattccagtgtgccggtgttgccctctctcgctgcacccttaacccgcatgcccttcgt

SEQ ID NO: 124741 - DNA, 237 bp, Glycine max
atggcatttgagtttccttattgacaatcccaaacagtctacagtttttgacattctcttgggaatttcttccaattagtaacttgttgagagttgctgcttggaagaaaggctgtttaatggttaagattgtgatgtctgggaatgcagcagtcaaaaggagtgattgggcctcattggtacaagtgtttttaacaaacagcaacagtacagagcattttgatgcatgtaagtgga

SEQ ID NO: 124742 - DNA, 98 bp, Glycine max
cgagactaccgcattttggagttcaactccaaacccaacaccctccttctccccaaccatgactgacgctgattgacctcatgcgtgtatcctgtaac

SEQ ID NO: 124743 - DNA, 262 bp, Glycine max
atctggtttgcaaaaagacagagggttaattgtggaatattttggaaggatgtcttacgttgctcataacgttaatcagccccaagagaaagatttgttggagggaaatttttcctttgatattaaatctcgctctagattggaaaaagtttcctctacaaaagcacaatttgttagtggaaaaaccttcaaatatgatataattggtgctggttcacattcttcagatgatttacctgaaaaggagactcaggaaaacccc

SEQ ID NO: 124744 - DNA, 259 bp, Glycine max
cctttgtttccttcttttcagtggctgcttcgctctgagagagcaggcacagcaaaatgagtgccagatccaaaagctgaatgccctcaaaccggataaccgtatagagtcggaaggtgggttcattgagacctggaaccctaacaacaagccattccagtgtgccggtgttgccctctctcgctgcacccttaaccgcaatgcccttcgtagaccttcctacaccaacggtccccaggaaatctacatacaacaaggt

SEQ ID NO: 124745 - DNA, 263 bp, Glycine max
tgcagaccgagctagctagctagcaagcaagcacagagatggaggcaaagcgaggccatgccctacatgtgcttggcacgtgtttcactcttcctctgcgctctaaccctatccgctgctcacggaagcaccacggttcaagacatcgcgagaaagttgaaactcggggacaacgagcttctgcgcacggagaagaagttcaaggttttcatggagaattacgggaggagctactccacagaggaggagtatctgcgccgttt

SEQ ID NO: 124746 - DNA, 260 bp, Glycine max
atgatgaggaagagcagccacagtgcgtggagacagacaaaggttgccaacgccaaagcaaaaggagcagaaatggcattgatgagaccatttgcacaatgagacttcgccaaaacattggtcagaattcatcacctgacatctacaaccctcaagctggtagcatcacaaccgccaccagccttgacttcccagccctctggcttctcaaactcagtgcccagtatggatcactccgcaagaatgctatgttcgtgcca

SEQ ID NO: 124747 - DNA, 261 bp, Glycine max
ctcgagccgcgcgaacagcataatatacgcattgaatgggcgggcattggtacaagtggtgaattgcaatggtgagagagtgtttgatggagagctgcaagagggaggggtgctgatcgttccacaaaactttgcggtggctgcaaaatcccagagcgataactttgagtatgtgtcattcaagaccaatgatagaccctcgatcggaaaccttgcaggggcaaactcattgttgaacgcattgccagaggaagtgattca

SEQ ID NO: 124748 - DNA, 235 bp, Glycine max
gttcaatatcctagtacagcggattaaagcatttaagatatactatgatgcgagcgcggttcccattactgttactgggagtggttttcctggcatcagtggctgtctcatttggcattgcgtattgggatacgcagaaccccagtcacaacaagtgcctccgaagttgctatagcgagacagactcctacaggcaccaagcatgccacgctcgttggcacctccttagggtgga

SEQ ID NO: 124749 - DNA, 263 bp, Glycine max; identical to SEQ ID NO: 110814

SEQ ID NO: 124750 - DNA, 263 bp, Glycine max
gtgccaactcaacaacctcaacgcgttggaacccgaccaccgcgttgagtccgaaggtggtcttattgaaacatggaactctcaacaccctgagctgcaatgcgccggtgtcactgtttcacaaacgcaccctcaaccgcaacggcctccacttgccatcttactcaccttatccccaaatgatcattgtcgttcaagggaagggagcaattggatttgcatttccgggatgtcctgagacgtttgagaagccacaacagcaa

SEQ ID NO: 124751 - DNA, 263 bp, Glycine max
gatggagagctgcaagagggacgggtgctgatcgtgccacaaaactttgtggtggctgcaagatcacagagtgccaacttcgagtatgtgtcattcaagaccaatgatacacccatgatcggcactcttgcaggggcaaactcattgttgaacgcattaccagaggaagtgattcagcacactttcaacctaaaaagccagcaggccaggcagataaagaacaacaaccctttcaagttcctggttccacctcaggagtctca

SEQ ID NO: 124752 - DNA, 265 bp, Glycine max
cttaattattaacacttccttagttcaatatggggaagcccttcactctctctctttcttccctttgcttgctactcttgtcgagtgcatgctttgctattagctccagcaagctcaacgagtgccaactcaacaacctcaacgcgttggaacccgaccaccgcgttgagtccgaaggtggtttgattcacacatggaactctcaacaccctgagctgaaatgcgccggtgtcactgtttccaaactcaccctcaaccgcaatgg

SEQ ID NO: 124753 - DNA, 261 bp, Glycine max
caagaacaatcaaacagaagaggctcaaggtcgcagaagcagcagctacaggacagtcaccagaagattcgtcacttcaatgaaggagacgtactcgtgattcctcctggtgttccttactggacctataacactggcgatgaaccagttgttgccatcagtcttcttgacacctctaacttcaataaccagcttgatcaaacccctagggtattttaccttgctgggaacccagatatagagtacccagagaccatgcaa

SEQ ID NO: 124754 - DNA, 245 bp, Glycine max
catcaccatggccaagctagttttttccctttgttttctgcttttcagtggctgctgcttcgctttcagttccagagagcagcctcagcaaaacgagtgccagatccaaaaactcaatgccctcaaaccggataaccgtatagagtcagaaggagggctcattgagacatggaaccctaacaacaagccattccagtgtgccggtgttgcccactctcgtgaaacctaaacggcaagccctttgg

SEQ ID NO: 124755 - DNA, 258 bp, Glycine max
cgcactccgtcttcatcaatcagcatcaccaccgctccaacacaggggacaatgagggagatccttcacgttcagggagggcaatgcgggaaccagatcggttcgaagttctgggaagtggtgtgcgacgagcacggcatagatccgacggggaagtacgtcggaaactcagatctacaactcgagcgcgtgaacgtgtactacaacgaagcttcctgcgggcggtttgtcccacgcgcagtgctgatggacctggag

SEQ ID NO: 124756 - DNA, 255 bp, Glycine max
ctcgagccgattcggctcgagacaatatgtgtgcatatgggctacaatcctggtatttcaggttctcgtcttttgggcaacattcctcagtccatttcacagcaaactgtttggaatgaaatggcaacagtgagagcaccattgaattttgattctagcaagcagagcttttgtcaattttctattgaccttctcggtggaggaattttcgtggacaaaactggagattggatcacacttatacaaaattctcca

SEQ ID NO: 124757 - DNA, 258 bp, Glycine max
ctcgagcgaatcggctcagaaacaattcaattcaatctgcctcgatcatggagaggacaacatttgggtttttgttcttgctcctccttgtcttagcttctgatgtgacggtgaagagagcagaggcgaaagattgcttgacaaggaggcacgggttccagggtagatgcttattcgacaggcaatgtgcacatgtgtgcaggagcgatggtttcatcggtggtcagtgccgaggccctcttcgacaatgcttttgca

SEQ ID NO: 124758 - DNA, 258 bp, Glycine max
gcaaaaacaaaatcccagtatcaaaattcttctctttttttcatatttcgcaaagacatggatttcagagtgatgggtttggagtctccactgttccacacgctgcaacacacgatggacatgtcagaggacggtgcaggagacaacaagacacacaatgctccaacatggtcatacgttcgagacgcgaaagcaatggctgcaacacctgcggatgtgaaggagtatccgaattcttacgtgttcgagatcgacatg

SEQ ID NO: 124759 - DNA, 260 bp, Glycine max
tgttctgaagccaattattgatgtctttgtttctaatggcaatcgctacaatctgctccattctgctgttctggaactttttgagtttattcggaaggaaaatctgaaattattgctgagatacatagtcgattctttttgggaccagctggtgaaatttgagaatttggcttcaattcactcactgaaagttaaatatgagcagtgtttggataatggtgggacaaatgatgatgccactactgcagtggaccttcgaa

SEQ ID NO: 124760 - DNA, 229 bp, Glycine max
atggtgcatgatagttcagtgtctacaataccataccatacaaatatcgccacccatcagccaacagagttgttgcaggacgcaccggggttgaccaagctgtaagaactctgttggctgatgggtgtccatatacgtaatgctatggtgcatgatagttcagtgtctactataccaggtgattttgccattggtgttaagttgccaaccataaaccatatgtgcacat

SEQ ID NO: 124761 - DNA, 259 bp, Glycine max
acctcattgtattgaggatcaggctcagatggaaacaaatttgtttaaattgtctcttgatgatgttgaaactcctaaaggttccatgttggatcttaaaatttctcagtctaaaattgcacttcccaggaacacagttggaggaactattctgcgtagtgatctattggcaaattctcctgacagagggcaattttagagcaagtgttgatttgcagcgcactcatcgtattaaaggaatgattaaactggtggccac

SEQ ID NO: 124762 - DNA, 249 bp, Glycine max
ctctttcttcctcttcctcagtagtgcgattttcgattctactctctgcaactatgcctaaccctaaggtcttcttcgacatgaccatcggcggtcaacctgccggccgcatcgtgatggagctctacgccgacgtgactccgagcaccgccgagaacttccgcgcgctctgcaccggcgagaagggcgccgggcggagcggcaagccctcccactacaaaggctcgtccttccaccgcgtgatcccga

SEQ ID NO: 124763 - DNA, 255 bp, Glycine max
attaataaagatgagtttgaagaacaacatggtggtgctaaaggtgtgtttgttgcttcttttccttgtgggggttacagctgcacgcatggaactgagcttcttcaaaagtgatcagtcatcaagttatgatgatgatgagtattcaaaaccatgctgtgatctctgcatgtgcacacgctcaatgcctcctcaatgcagctgtgaagatattaggctgaattcatgccactcagattgtaagagctgtatgtg

SEQ ID NO: 124764 - DNA, 255 bp, Glycine max
cctggttccacctcaggagtctcagaggagagctgtggcttagagagcccattttgcatgtgctaccacacttttgtccttttgggctctagctagtgctggtagcagtaaataagaatgaataaaagaaacaaaggcttagatgccctttgttaagtgtagaataacgggtatagtaactatgtacccttgtgtaatgagtcactcaagtacctatgcgggaaaagcataaataaaagaagaaattccaataaa

SEQ ID NO: 124765 - DNA, 258 bp, Glycine max
agtttgcaaaaattatgaaccttagacaaagtgttgttggtgatcttaaacttcttactgatgggaagttatatgagggtaagcatattcctgtatctaatattagtgcaggggaaaatcatgtagttcaaatacccctaatggcacaggaggaaattctgtcttctagtgcacgtgatttcagaactgcaatggtgagtaaaaatagcaagcctcaagctactgcaatgcatgtgggagctatagaaattatcattg

SEQ ID NO: 124766 - DNA, 258 bp, Glycine max; identical to SEQ ID NO: 111374

SEQ ID NO: 124767 - DNA, 257 bp, Glycine max
actcgccatacccgttaacaagcctggtagatttgagagtttcttcctatctagcactgaagctcaacaatcctacttgcaaggattcagcaggaacattttagaggcctcctacgataccaaattcgaggagataaacaaggttctgtttagtagagaggaagggcagcagcaaggggagcagaggctgcaagagagcgtgattgtggaaatctcgaaggaacagattcgggcactgagcaaacgtgccaaatcta

SEQ ID NO: 124768 - DNA, 249 bp, Glycine max
ggagctggtgcaaagaatgctattctcatgaatatgccaaatgctgttctttcaatgtggagatattttgttggagatctcgtctttgaagtttctaagatgacttctccctacattaaatgtacagtctctttcttcatagcatttggaaatttggctgatgacaccatcaattttgaggcttttccccacaagctggtgcagtttggagagattcaggaaaaagttgtattgaaattttcaccagag

SEQ ID NO: 124769 - DNA, 254 bp, Glycine max
ctctagggttatcatttctccatttccattttctctctcacttttcaagaatcgtaagctatgggaaagtcttacccaactgtgagtgctgattaccagaaggccgttgagaaggcgaagaagaagctcagaggcttcatcgctgagaagagatgcgctcctctaatgctccgtttagcatggcactctgctggaacctttgacaagggcacgaagaccggtggacccttcggaaccatcaagcaccctgccga

SEQ ID NO: 124770 - DNA, 254 bp, Glycine max
aatttctcattctcccatttcctctcagaaccctcgatcactcccacgcgctcctatatcctctccttcaccgtcgctctctccaacgatcacaacaacatcgtcatcccatggcaaacgccgcatctggtatggcagtccatgatgactgcaagttaaggtttttggagctgaagacaaagaggacacaccgtttcatagtttttaagattgaggagcagcagaagcaggtcattgtggagaagctggtgagc

SEQ ID NO: 124771 - DNA, 255 bp, Glycine max; identical to SEQ ID NO: 121871

SEQ ID NO: 124772 - DNA, 212 bp, Glycine max
cttcataaacgccgcccaaaaccatttatagggtttacttttctttgccaagaaaatgagagagtgcatttcaatccacattagtcaggccgctatccaggtcggaaacgcatgctgggaactctattgccttgaacacggcattcagcccgatgggcagatgccgagtgacaagaccgttggaggaggagacgacgccttcaacacattct

SEQ ID NO: 124773 - DNA, 250 bp, Glycine max
cattggtccttacagactcatcagtcatcaccatggccaagctagttcattcactttagtttctgattttcagtggctgctgcttcgctttcagttccaaagagcagcctcaggaaaacgagtgccagatccaaaaactcaatgccctcaaaccggataaacgtatagagtcagaaggagggctcattgcgacatgggaccctaacaaaaagacattccagtgtgccgatgatgccctctatcactgcac

SEQ ID NO: 124774 - DNA, 254 bp, Glycine max
caacgacgacagatactcctacagacttcaatctggtgatgccctgagagtcccctcaggaaccacatactatgtggtcaaccctgacaacaacgaaaatctcagattaataacactcgccatacccgttaacaagcctggtagatttgagagtttctcgcctatctagcactgaagctcaacaatcctacttgcaaggattcagacggaacattttagaggcctcctacgataccaaattcgaggagataaac

SEQ ID NO: 124775 - DNA, 256 bp, Glycine max
caaatatttgtcaatattgaaccatttgaggttctacttgccagaactgtatccaaagctgcataaaattttgtttttggatgatgacatagtggttcagaaggacctcactgggttatggaagattgatatggatggcaaggtgaatggagcagtagaaacatgttttgggtcattccatagatatgcacagtacatgaatttctctcaccccttgattaaagcaaagtttaatccaaaggcttgtgcatgggct

SEQ ID NO: 124776 - DNA, 255 bp, Glycine max; identical to SEQ ID NO: 102867

SEQ ID NO: 124777 - DNA, 256 bp, Glycine max
ctcgagccgcaagcttactggtgctcaggttcttctcagtcgtttgaggttgttcctacagtcctggttatccctatgaagaaattttaagcacatttcacaatcagaccggcatagtcatgtgctcctacctcccaatgttcaccagctttaatagaacaaggggtggcttgattcaattgaaccatggcaggcctcagcctctccaatatgttgtcaatgcagcctttttggctgctctttacagtgattatct

SEQ ID NO: 124778 - DNA, 255 bp, Glycine max
caagcttgttctttccctttgtttccttcttttcagtggctgcttcgctctgagagagcaggcacagcaaaatgagtgccagatccaaaagctgaatgccctcaaaccggataaccgtatagagtcggaaggtgggttcattgagacctggaaccctaacaacaagccattccagtgtgccggtgttgccctctctcgctgcacccttaaccgcaatgcccttcgtagaccttcctacaccaacggtccccagga

SEQ ID NO: 124779 - DNA, 245 bp, Glycine max
tacgagttctttgctaatcgacaacttgtaacaatattttcagcacctaattattgtggggagtttgacaatgctggtgctatgatgagtgttgatgagacgctaatgtgctctttccaaatattaaagccagctgataaaaaagcaaagctcaattttggaagtacaaccactgctaagcctggaaactctccagcaggtgtaaaggttggaagatattagtccttcctggatgcgaagtgtga

SEQ ID NO: 124780 - DNA, 250 bp, Glycine max
gtctttgaacactcatcaccatggccaagcttgttctttccctttgtagccttcttttcagtggctgcttcgctctgagagagcaggcacagcaaaatgagtgccagatccaacagctgaatgccctcaaaccggataaccgtatagagtcggaaggtgggttcattgagacctggaaccctaacaacaagccattccagtgtgccggtgttgccctctctcgctgcacccttaaccgcaatgcccttcg

SEQ ID NO: 124781 - DNA, 254 bp, Glycine max
cttaaacactcatcagtcatcaccatggccaagctagttttttccctttgttttctgcttttcagtggctgctgcttcgctttcagttccagagagcagcctcagcagaacgagtgccagatccaaaaactcaatgccctcaaaccggataaccgtatagagtcagaaggagggctcattgagacatggaaccctaacaacaagccattccagtgtgccggtgttgccctctctcgctgcaccctcaaccgcaa

SEQ ID NO: 124782 - DNA, 253 bp, Glycine max
gagatgaggaaatcatgtggcttcttcttcttgctcctcctccttgtctttgcttcccaggtggtggtgcagacggagggaagagtgtgtgagtcacaaagccacgggttccatggtttgtgtaatagagaccacaactgtgctttggtctgcaggaacgaaggtttctccggtggcaggtgcaaaggcttccgccgccgctgcttttgcaccaggatttgttgagatctcatcaaacactactcttgccatg

SEQ ID NO: 124783 - DNA, 251 bp, Glycine max
cgttaacacttccttagttcaatatggggacgcccttcactctctctctgtcttccctttgcttgctactcttgtcgagtgcatagctttgctatgagctccagcaagctcaacgcgtgccaactcaacaacctcaacgcgttggaacccgaccaccgcgttgagtccgacggtggtttgattcaaacatggaactctcaacaccctgagctgcaatgcgccggtgtcactgtttccaaactcaccctcaa

SEQ ID NO: 124784 - DNA, 248 bp, Glycine max
tgttaacacttccttagttcaatatggggaaacccttcactctctctctttcttccctttgcatgctactcttgtcgagtgcatgctttgctattagctccagcaagctcaacgagtgccaactcaacaacctcaacgcgttggaacccgaccaccgcgttgagtccgaaggtggtttgattcaaacatggaactctcaacaccctgagctgaaatgcgccggtgtcactgattccaaactcaccctc

SEQ ID NO: 124785 - DNA, 252 bp, Glycine max
caggcaagccccactcaaccaccacacctctcctcgttcacgctacccctttctgctcttcttctacctttcaagttttaaaagtataaagatggcagagacattcctatttacctcagagtcggtgaacgagggacaccctgacaagctctgcgaccaaatctccgatgctgtcctcgacgcttgcctcgagcaggacccagacagcaaagttgcctgcgaaacatgcagcaaaaccaacttggtcatggt

SEQ ID NO: 124786 - DNA, 247 bp, Glycine max
gttcaatatcctagtataccttaataaataatttaagatactatgatgagagcacggttcccattactgttgctgggacttgttttcctggcttcagtttctgtctcatttggcattgcttactgggaaaaagagaaccccaaacacaacaagtgtctccagagttgcaatagcgagagagactcgtacaggaaccaagcatgccacgctcgttgcaacctccttaaggtggagcaagaagatgtga

SEQ ID NO: 124787 - DNA, 221 bp, Glycine max
gttatttctcagcgcgtaaagcatggctttgttggtggagaaaaccacgagtggtcgcgagtacaaggtcaaggacctttcccaggccgacttcggccgcctcgagatcgagctggccgaggttgagatgcccggcctcatggcctgtacggaccgagttgcggacccctacccagtcccttgcaacgggggacccgcactcaccgagctccctcgcacat

SEQ ID NO: 124788 - DNA, 249 bp, Glycine max
taagaaatgaagagtactatcttctttgctctctttctagtttgtgccttcaccatctcatacctgccttcagccaccgctcagttcgtgctcgacactgatgatgatcctcttcaaaacggtggcacatactatatgttgccagttatgagaggaaagggcggtggaatagaagtagattcaactggaaaagaaatatgccctctcactgttgtgcaatcacccaatgagctcgataaggggattgga

SEQ ID NO: 124789 - DNA, 250 bp, Glycine max
gccgcggcgatgacgatgatgatgatgacgacgacaatcacattctcaggaccatgcggggaagaatcaactacataaggaggaacgaaggaaaagacgaagacgaagaagaagaaggacacatgcagaagtgctgcacagaaatgagcgagctgagaagccccaaatgccagtgcaaagcgctgcagaagataatggagaaccagagcgaggaactggaggagaagcagaagaagaaaatggagaagga

SEQ ID NO: 124790 - DNA, 251 bp, Glycine max
caaacttattaacactttccttagttcaatatggggaagcccttcttcactctctctctttcttccctttgcttgctactcttgtcgagtgcatgctttgctattacctccagcaagttcaacgagtgccaactcaacaacctcaacgcgttggaacccgaccaccgcgttgagtccgaaggtggtcttattgaaacatggaactctcaacaccctgagctgcaatgcgccggtgtcactgtttccaaacg

SEQ ID NO: 124791 - DNA, 121 bp, Glycine max
cagaaaacaaaggctttagcttgccttttgttcactgtaaaataataatgtaagtactctctataatgagtcacgaaacttttgcgggaataaaaggagaaattccaatgagttttctgtc

SEQ ID NO: 124792 - DNA, 248 bp, Glycine max
agcaaaatgaccaagttcacaatcctcctcatctctcttctcttctgcatcgcccacacttgcagcgcctccaaatggcagcaccagcaagatagctgccgcaagcagctccagggggtgaacctcacgccctgcgagaagcacatcatggagaagatccaaggccgcggcgatgacgatgatgatgatgacgacgacaatcacattctcaggaccatgcggggaagaatcaactacataaggaggaa

SEQ ID NO: 124793 - DNA, 249 bp, Glycine max
aacacttccttagttcactatggagacgcccttcactctctctctttctacccttagcttgctactcttgtcgagtgcatgctttgctattagctccagcaagctcaacgagtgccaactcaacaacctcaacgcgttggaacccgaccaccgcgttgagtccgcaggtggtatgatgcaaacatggaactctcaacaccctgagctgacatgcgccggtgtcactgtttccaaactcaccctcaaccg

SEQ ID NO: 124794 - DNA, 194 bp, Glycine max
gttcaatatcctagtataccttaataaataatttaagatactatgatgagagcacggttcccattactgttgctgggacttgttttcctggcttcagtttctgtctcatttggcattgcttactgggaaaaagagaaccccaaacacaacaagtgtctccagagttgcaatagcgagagagacgcgtccaggaa

SEQ ID NO: 124795 - DNA, 282 bp, Glycine max
ctcgagccgtttttaatgagatgctcattagatatagctatgaaaaattactgcgccaggctaaagctccaagtatgtttttacaatccttcaaaaattttgtttctttgtgtgtgtatggtgatgataacttaattagtgttcatgaatacgtcaagccttactttagtggttctaaattgaaaagctttctagctggtcataatatcaccattactgatggtattgacaagactagtgcaactttgcaatttagaaagttagcagattgtgattttctca

SEQ ID NO: 124796 - DNA, 275 bp, Glycine max
ctcgagccgcactcatcaccatggccaagcttgttctttcactacgagtccatcatttcagtggctagttcgttctgagaaagcatgtacagcacaatgagtgccagatccaaaagctgaatgccctcaaaccggataaccgtatagagtcggaaggtgggttcattgagaactggaatcctaacaacaagcaattccagtgtgtcggtgttgacctctctcgctgcacccttaacagtaatgccctacgtagatcttcctacactaacggtccc

SEQ ID NO: 124797 - DNA, 281 bp, Glycine max
caaaagacgagaaactgaaataccaggattgagcccatatgcacaactattggctcaatcctggtatttcaggttctcgtctattgggacacattcatcagtccatttaacagcaaactgtttggaatcaaatggcaacagtgagatgaccattgaattttgattctagcaagcagagcttatgtcaatactctattgatcttcttggtggaggaattttagtggacaaaactggagattggatcacacttatacaaaattctccaattagtaacttgttg

SEQ ID NO: 124798 - DNA, 281 bp, Glycine max
ccgattgctagaatggaatttcgatgctcagtcatctcttttaccattctcttctctcttgctcttgcaggagagagccatgtccatgcatcgttacctgaggaagattattgggaagctgtttggccaaacactcccattcccactgcactgcgagagcttctaaagcctctccctgcaggtgtcgaaatcgatgaactccctaagcaaattgatgatacacagtacccaaaaacattcttctataaagaagaccttcatccaggcaaaacaatgaaagt

SEQ ID NO: 124799 - DNA, 285 bp, Glycine max
aggaaaggaaagtgaagaagaagaagaagaccaagacgaggatgaggagcaagacaaagagagccaagaaagtgaaggttctgagtctcaaagagaaccacgaagacataagaataagaacccttttcacttcaactctaaaaggttccaaactctcttcaaaaaccaatatggccacgttcgcgtcctccagaggttcaacaaacgctcccaacagcttcagaatctccgagactaccgcattttggagttcaactccaaacccaacacccttcttctccccca

SEQ ID NO: 124800 - DNA, 273 bp, Glycine max
ttaacacttccttagttcaatatggggaagcccttcactctctctctttcttccctttgcttgctaactcttgtcgagtgcatgctttgctattagctccagcaagctcaacgagtgccaactcaacaacctcaacgcgttggaacccgaccaccgcgttgagtccgaaggtggtttgattcaaacatggaactctcaacaccctgagctgaaatgcgccggtgtcactgtttccaaactcaccctcaaccgcaatggcctccacttgccatc

SEQ ID NO: 124801 - DNA, 270 bp, Glycine max
gtattaaagaatttaagatatactatgatgagagcgcggttcccattactgttgctgggagttgttttcctggcatcagtttctgtctcatttggcattgcgtattgggaaaagcagaaccccagtcacaacaagtgcctccgaagttgcaatagcgagaaagactcctacaggaaccaagcatgccacgctcgttgcaacctccttaaggtggaggaagaagaagaatgcgaagaaggtcaaattccacgaccacgaccacaacacccg

SEQ ID NO: 124802 - DNA, 279 bp, Glycine max
tcaaggtttcagcttttgagtaccactaccaatggtgattttgttcaagggaaagatctcgcaatggttaaagttaatgtagcatgtgctgctgttggtctgacatcaagttacactccaactccattgttggaatctggtttgcaaaaagacagagggttaattgtggagtattttggaaggatgtcttacgttgctcataacgtctttcagccccaagagaaagatttgttggagggaaatttttcctttgatattaaatctctctctagattggaa

SEQ ID NO: 124803 - DNA, 278 bp, Glycine max
taaaattcttccaccaagttatgggtttccttgtgttgcttcttttctccctcttaggtctctcttctagttccagcatatcaactcatcgttccatattggaccttgacctaaccaagtttaccacacagaaacaggtgtcttcactgttccaactatggaagagtgagcatggacgtgtctaccataaccacgaagaagaggcaaagagacttgagattttcaagaataacttgaactatatcagggacatgaatgcaaacagaaaatcaccccat

SEQ ID NO: 124804 - DNA, 276 bp, Glycine max
aggcattcctgctgatgttcttgcaaagcgagctcatgaatttgaaaaacatgttgctcatgaaagcctcaaggatcaaattcctgctgttgacaagttgtattctactaaggttaataagtttgcaaaaattatgaaccttagacaaagtgttgttggtgatcttaaacttcttactgatgggaagttgtatgagggtaagcatattcctgtatctaatattagtgcaggggaaaatcatgtagttcaaatacccctaatggcacaggaggaaat

SEQ ID NO: 124805 - DNA, 278 bp, Glycine max
ccttgctctatactgcacagtacacacactagaagaataatggcttccatcctccactactttttagccctgtctctttcttggtctttgctcttcttctgatccgactcagtcacccctataaaaccaataaaccttgttgttctacccgttcaaaatgatggttccacagggctccattggtccaacctccaaaaaagaacgcctctaatgcaagtaccagtcctggtggacctcagtggaaatcacttgtgggttaactgtgagcagcagtactc

SEQ ID NO: 124806 - DNA, 279 bp, Glycine max
ctccattggtccttaaacactcatcagtcatcaccatggccaagctagttttttccctttgttttctgcttctcagtggctgctgcttcgctttcagttccagagagcagcatcagcaaaacgagtgccagatccaaaaactcaatgcactcaaaccggataaccgtatagagtcagaaggagggctcattgagacatggaaccctaacaacaagccattccagtgtgccggtgttgcactctctcgctgcaccctcaaccgcaacgctcttcgtagac

SEQ ID NO: 124807 - DNA, 271 bp, Glycine max
ctagtacaccgtattaaagaatttaagatatactatgatgagagcgcggttcccattactgttgctgggagttgtgttcctggcatcagtttctgtctcatttggcattgcgtattgggaaaagcagaaccccagtcacaacaagtgcctccgaagttgcaatagcgagatagactcctacaggaaccaagcatgccacgctcgttgcaacctccttaaggtggaggaagaagaagaatgcgaagaaggtcaaattccacgaccacgacca

SEQ ID NO: 124808 - DNA, 222 bp, Glycine max
  unsure (1)..(222): unsure at all n locations
ctcaaaattgatggtggtcacagccaatatgggctttcccaaagctggtgcagtntggagagattccaggacaaagttgtattgaaattttcaccagaggaatttcttacagcttggtcaactcaggtgcgtcctgcaacaactctgttggctgatgggtgcccatatttgtatgctatggtgcatgatagttcagtgtctacaataccaggtgattttgtc

SEQ ID NO: 124809 - DNA, 273 bp, Glycine max
gttcaatatcctagtataccttaataaataatttaagatactatgatgagagcacggttcccattactgttgctgggacttggttttcctggcttcagtttctgtctcatttggcattgcttactgggaaaaagagaaccccaaacacaacaagtgtctccagagttgcaatagcgagagagactcgtacaggaaccaagcatgccacgctcgttgcaacctccttaaggtggagaaagaagaatgtgaagaaggtgaaattccacgaccacg

SEQ ID NO: 124810 - DNA, 272 bp, Glycine max
accaaagccttcctagaacgaaaaaaaaaagaagagcaattttccctcaccaaagaagaagaagcaaacaatggccgatcaacttaccgatgaacagatctccgagttcaaggaagccttcagcttgttcgacaaggacggcgatggttgcatcacaaccaaggagcttggaactgttatgcgttcattggggcaaaacccaactgaggcagagctccaggacatgatcaatgaagtggatgctgatgggaatggtaccattgacttccctg

SEQ ID NO: 124811 - DNA, 270 bp, Glycine max
cgacaaccaattcacatcactgaaggaaattatgtcagaaagcaagatgtcagcattgaatatgatgcatgtacaattccagatgattgtggttcattggttgttgccaaggttggaaatcacaaacaaattgttggtttccatgttgctggaagcaaaggaagactgggatatgcttcattgataccatatgttgagccagttgtgcaagctcaaagtgctgaagtttactttgacttcttccctgtggaggttgatagtcaagaggga

SEQ ID NO: 124812 - DNA, 274 bp, Glycine max
aagaaagatgtttggagagttgaatgtggaatcccttctggatttccgctcacagttatttgcaatagcatttttaatgagatgctcattagatatagctatgaaaaattactgcgccaggctagagctccaagcatgtttttacaatccttcaaaaattttgtttctttgtgtgtgtatggtgatgataacttaattagtgttcatgaatatgtcaagccttactttagtggttctaaattgaaaagctttctagctggtcataatatcacca

SEQ ID NO: 124813 - DNA, 273 bp, Glycine max
attgtctttgaacactcatcaccatggccaagcttgttctttccctgtgtttccttcttttcagtgcgctgcttcgctctgagagagcaggcacagcaacatgagtgccagatccaaaagctgaatgccctcaaaccggataaccgtatagagtcggaaggtgggttcattgagacctggaaccctaacaacaagccattccagtgtgccggtgttgccatctctcgctgcacccttaaccgcaatgcccttcgtagaccttcctacaccaag

SEQ ID NO: 124814 - DNA, 275 bp, Glycine max
taaaattactcagtctaacattgctcttccctagaacacagtttgatgagctatcctgcgcagtgatccgattggcagatttgctgacatggggccattttacagctcgtgttgcattgcagcgcactcatcgtgattaacggaatgattacaatggtggccacagttggtattcctgagaatacacgtatatcattggcctgtgctatgcatggtgcttccagggggcgttccagttctgatattgacaccatctgctcttcagactgtgagtt

SEQ ID NO: 124815 - DNA, 278 bp, Glycine max
caatccttcaacaccaacgaggaatagctgagaaacttcagtctccagacgacgaaaggaagcagatcgtaacagtggaaggaggtctcagcgttatcagccccaagtggcaagaacaacaagatgaagatgaagatgaagacgaagatgatgaagatgaacaaattccctctcaccctcctcgccgaccaagccatggaaagcgtgaacaagacgaggacgaggacgaagatgaagataaacctcgtcctagtcgaccaagccaaggaaagcgtgaa

SEQ ID NO: 124816 - DNA, 266 bp, Glycine max
  unsure (1)..(266): unsure at all n locations
taaacactcatcagtcatcaccatggccaagctagttttttccctttgatttctgcttttcagtggctgctagttcgatttcagttccagagcgcagtgctaaaaanacgagtgccagatccaaaaactcaatgccctcaaaccggataaccgtatagagtcagaaggagggctcattgagacatggaaccctaacaagaagccattccagtgtgccggtgttgccctctctcgctgcaccctcaaccgcaacgcccttcgtagac

SEQ ID NO: 124817 - DNA, 273 bp, Glycine max
gacctagacaagaagaaccacgtgaaagaggatgcgagacaagaaacggggttgaggaaatatctggcacttgaagcttcacgagaacattgctcgaccttcacgcgctgacttctacaaccctaaagctggtcgcattagtaccctcaacagcctcaccctcccagccctccgccaattccaactcagtgcccaatatgttgtcctctacaagaatggaatttactctccacattggaatctgaatgcaaacagtgtgatctatgtgactcg

SEQ ID NO: 124818 - DNA, 276 bp, Glycine max
gaggcttttccccacaagctggtacagtttggagagattcaggaaaaagttgtattgaaatgttcacaagaggaatttcttacagcttggtcaacccaggtgcgtcctgcaacaactctgttggctgatgggtgtccatatttgtatgctatggtgcatgatagttcagtgtctacaatactaggtgattttgtcattggtgttaagttgacaaccataaacaatatgtgtgcatatgggctcaatcctggtatttcaggttctcgtcttttgggc

SEQ ID NO: 124819 - DNA, 266 bp, Glycine max
accgattgctagaatggactttcgatgctcagtcatctcggttaccattctcgactctcttgctcttgcaggagagagtcatgtccatgcatcgctacctgaggaagattatcgggaagctgttgggccaaacactcccattgccactgcgctgcgagagcttctgaatcctctccctgccaggtgttgaaatcgctgcactcgctaggcaagttgcatgatacacagtacccagaaacattctgctatagagacgatcttcatcc

SEQ ID NO: 124820 - DNA, 280 bp, Glycine max
  unsure (1)..(280): unsure at all n locations
tgaaattttgataaaccgcgatcacaggttgccgcaccttaaaaccggaaacaaaagcaatcgttacttgatttcaagaatctctcaatttcttcctacttctttgtgtacgatttcttaagggaaagaaaatcactctctgtgctggccacagacttcgtgaatcattttcttttccactcttagtataaccggtgnacactctcctatttgatataggacttcgtgtcagatttaaacttcttctgtttctttctcagttctctgcttaatttcaagt

SEQ ID NO: 124821 - DNA, 282 bp, Glycine max
  unsure (1)..(282): unsure at all n locations
cggctcgagttttgataaaccgcgatcacaggttgccgcaccttaaaaccggaaacaanagcaatcgttacttgatttcaagaatctctcaatttcttcctacttctttgtgtacgatttcttaagggaaagaaaatcactctctgtgctggccacagacttcgtgaatcattttcttttccactcttagtttattcactgaacactctcctatttgatataggacttcgtgtcagatttaaacttcttctgtttctttctcagttctctgcttaatttcaa

SEQ ID NO: 124822 - DNA, 283 bp, Glycine max
aaccattctgcgtagtgatctattggcaaattttttgacagagggcaattttagagcaagtgttgatttgcagcgcactcatcgtattagaggaatgattaaaatggtggccacagttggtattcctgagaatacaggtatatcattggcctgtgctatgaatagttcttttagggggcgcgccagttctgatatttacaccatctgctctcaagactgtgaattgtggaatcctgcttgcacaaaagcaatgactatgtcatttaatccaaacccgtgttct

SEQ ID NO: 124823 - DNA, 283 bp, Glycine max
ctcgagccgcttgaaagtttttctaatccatcaaataaagaccagcttgaagaaagaatggcacgcatcaaagaggatccatctctgaaacatattttggaggagatagagactggcggtcctgctgctatgatgaggtactggaataatgaggaggttttgcagaagttgggacaagccatgggtcttgccaattcgggagatgcaggtgcctctgctgaaaattctggggcagatgagaccgaagatttgggaaatgaagatgaatcaattgttcatcata

SEQ ID NO: 124824 - DNA, 274 bp, Glycine max; identical to SEQ ID NO: 123538

SEQ ID NO: 124825 - DNA, 272 bp, Glycine max
cgaacagcataatatacgcattgaatggacgggcattgatacaagtggtggattgcaacggtgagagagtgtatgatggagagctgcaagagggacgggtgctgatcgtgccacaaaactttgtggtggctgcacgatcacagagtgacaacttcgagtatgtgtcattcaagaccaatgatacacccatgatcggcactcttgcaggggcgaactcattgttgaacgcattaccagaggaagtgattcagcacactttcaacctaaaaagc

SEQ ID NO: 124826 - DNA, 272 bp, Glycine max
cttattaacactttccttagttcaatatggggaagcccttcttcactctctctctttcttccctttgcttgctactcttgtcgagtgcatgctttgctattacctccagcaagttcaacgagtgccaactcaacaacctcaacgcgttggaacccgaccaccgcgttgagtccgaaggtggtcttattgaaacatggaactctcaacaccctgagctgcaatgcgccggtgtcactgtttccaaacgcaccctcaactgcaacggcctccat

SEQ ID NO: 124827 - DNA, 271 bp, Glycine max
gaaaacagtcgaaaacaagatggaacacacagtttctgcgttgaggtctttgatcggatctcactctccgccggtggatgccatagtggtgccctctgacgattatcacctgagggaatatgtgtctgcacgagacaagcgccgcgaattcgtttccggcttcactggaagtgccggcttggcacttataacaaataaagaagcactgctgtggacggctggacggtattttttgcaggctgagacagaacttagtgctgggtggaagcta

SEQ ID NO: 124828 - DNA, 218 bp, Glycine max
aatacgacagctcctaactggatcaagatctcaactgaagttgtcgaaggcaatatccgcaatttgcgaagaaaggtctgaccccgtctcagattggtgtcattctcagagattctcacggtaatgctcacgtctatagcgtcactggcatcgagatccttcgcatcctcaaaggtcacggacttgcgcctgatgttcccgaggacctgtaccagttg

SEQ ID NO: 124829 - DNA, 268 bp, Glycine max
ctcgagccgctcgagccgctcgccttgcttgccctttgtcttccatactttcaagtcctttacgtgatcagctgcgcgttttgtgctgcttctgttgttattgccttggaagacttgcacaagaatggtgttctctacagaggtgtgtcacctgatgttttgatgttggaacaaactggacatatacagctggtggacttcagatttggaaaacagctttctggtgagagaacattcacaatttgtgggatggcagattcactggctc

SEQ ID NO: 124830 - DNA, 275 bp, Glycine max
cttaattattaacacttccttagttcaatattggggaagcccttcactctctctctttcttcgctttgcttgctactcttgtcgagtgcatgctttgctattagctccagcaagctcaacgagtgccaactcaacaacctcaacgcgttggaacccgaccaccgcgttgagtccgaaggtggtttgattcaaacatggaactctcaacaccctgagctgaaatgcgccggtgtcactgtttccaaactcaccctcaaccgcaatggcctccactt

SEQ ID NO: 124831 - DNA, 273 bp, Glycine max
cagcaacgatgacgaagccagaggccccaagaccgtcaccaaaaggtacatcgcttcagagagggtgatttgatcgcagtgcctactggtgtagcatggtggatgtacaacaatgaagacactcctgttgttgccgtttctattattgacaccaacagcttggagaaccagctcgaccagatgcctaggagattctatcttgctgggcaacaagagcaagagtttctaaaatatcagcagcagcagcaaggaggttcccaaagccagaaagga

SEQ ID NO: 124832 - DNA, 275 bp, Glycine max
attgttgtgactcgttcttcttcgtcgttatcttcttcttttgttgtttgtgtgtttgtattctctctcacctgaaaatgtcttgctgcggtggtaactgtggttgcggaagcgcctgcaagtgcggcaacggctgcggaggctgcaagatgtacccagacttgagctacaccgagtcaaccaccaccgagaccttggtcatgggagtggcaccagttaaggctcaattcgagagtgctgaaatgggtgttcccgctgagaacgatggctgcaaa

SEQ ID NO: 124833 - DNA, 281 bp, Glycine max
caacaacttctgctacttcctactccaaccgcacttctgctccgcaattatcatgggcaaggtcaagatcggaatcaacggatttggaagaattggccgtttggtagccagagtggctctgcagagagacgatgttgaactcgttgccgttaacgaccctttcatcaccaccgattacatgacatacatgtttaaatacgacagtgttcatggacactggaagcatcacgatgtcaccgttaaggacgagaagacccttctcttcggtgacaagccagtca

SEQ ID NO: 124834 - DNA, 281 bp, Glycine max
atgggaaacaaaactacccttttgcttttgctctttgttctttgccatggagtggccacaacaacaatggacttccatgatgatgagggtggtgataaaaagtcaccaaaaagtttgtttttgatgagcaactccacgagggttttcaagactgatgcaggggaaatgcgtgtgctgaaaagccatggtggtaggatattttataggcacatgcacattggcttcatctctatggaaccaaagtccttgtttgttcctcagtacctcgactccaatctcat

SEQ ID NO: 124835 - DNA, 278 bp, Glycine max
  unsure (1)..(278): unsure at all n locations
ctgaggacaaggcgagtttatggtcacaacttcattagatntcatgtaataatctggaaatgcaagaagcttatcttgtcaatctcgtaaatgtgttacgagaattgtatttgcacagtccagaggaagctcgccaattgagaaggaaagctctctctcgtattgaatggctgcaaaaagctgatgtgcctaccatagcacagattgaagagttccattcgatgcagaggatgatgaatgctcctgattcaaatgataatatcgatctactgttgagc

SEQ ID NO: 124836 - DNA, 277 bp, Glycine max
ctctaccttgattcgcaacacttcctgagttccgtatggggcagcgcttcactctctctctttcttgcctttgcttgctactcttgtcgagtgcatggctttgctattagctccagcaagctcaacgagtgccaactcaacaacctcaacgcgttggaacccgaccaccgcgttgagtccgaaggtggtttgattcaaacatggaactctcaacaccctgagctgaaatgcgccggtgtcactgtttccaaactcaccctcaacagcaatggcctcc

SEQ ID NO: 124837 - DNA, 269 bp, Glycine max
gttcaatatcctagtataccttaataaataatttaagatactatgatgagagcacggttcccattactgttgctgggacttgttttcctggcttcagtttctgtctcatttggcattgcttactgggaaaaagagaaccccaaacacatcaagtgtctccagagttgcaatagcgagagagactcgtacaggaaccaagcatgccatgctcgttgcaacctccttaaggtggagatagaagaatgtgaagaaggtgaaattccacgacc

SEQ ID NO: 124838 - DNA, 269 bp, Glycine max
tgaaattttgataaaccgcgatcacaggttgccgcaccttaaaaccggaaacaaaagcaatcgttacttgatttccagaatctctcaatttcttcctacttctttgtgtacgatttcttaagggaaagaaaatcactctctgtgctggccacagacttcgtgaatcattttcttttccactcttagtttaatttgtgaacactctcctatttgatataggacttcgtgtcagatttaaacttctactgtttctttctcagttctctgtt

SEQ ID NO: 124839 - DNA, 268 bp, Glycine max
ttctctccattggtccttaaacactcatcagtcatcaccatggccaagctagttttttccctttgttttctgcttttcagtggctgctgcttcgctttcagttccagagagcagcctcagcaaaacgagtgccagatccaaaaactcaatgccctcaaaccggataaccgtatagagtcagaaggagggctcattgagacatggaaccctaacaacaagccattccagtgtgccggtgttgccctctctcgctgcaccctcaaccgca

SEQ ID NO: 124840 - DNA, 269 bp, Glycine max
attggtccttaaacactcatcagtcatcaccatggccaagctagttttttccctttgttttctgcttttcagtggctgctgcttcgctttcagttccagagagcagcctcagcaaaacgagtgccagatccaaaaactcaatgccctcaaaccggataaccgtatagagttcgaaggagggctcattgagacatggaaccctaacaacaagccattccagtgtgccggtgttgccctctctcgctgcaccctcaaccgcaacgcccttc

SEQ ID NO: 124841 - DNA, 270 bp, Glycine max
ccatcatatcattagacaactagttgatctcttcttctactagagttctctctactctgggtagtgatatatcatgaatcaatggctgacgctatctttggataccctttcagacgcttcatctggggtcaccctccaattttcagagaatggtctggctcaatagccctcttagattggctcgaatcacccactgcccacatcttaaaagttaatgttccaggattcagcaaggaagacatacaggtgcagattgaggatgggaatatt

SEQ ID NO: 124842 - DNA, 276 bp, Glycine max
ccagattgagacaaagaatagatcctcaatacaatgaggttcaggctcagatggaaacaaatttgtttaaattgtctcttgatgatgttgaaactcctaaaggttccatgttggatcttaaaatttctcaatctaaaattgcacttcccaaaaacacagttggaggaaccattctgcgtagtgatctattggcaaattttttgacagagggcaattttagagcaagtgttgatttgcagcgcactcatcgtattaaaggaatgattaaaatggtgg

SEQ ID NO: 124843 - DNA, 274 bp, Glycine max
tgggaatgcagcagtcaaaaggagtgattgggcctcattggtacaagtgtttttaacaaacagcaacagtacagagcattttgatgcatgtaagtggacaaaatcggaaccacattcctgggaattgatcttcccaatagaggtatgtggtcctaataatggttttgaaatgtggagttctgagtgggcaaatcaaacttcatggcatttgagtttccttattgacaatcccaaacagtctacagtttttgcatattctcttgggaattctcaa

SEQ ID NO: 124844 - DNA, 273 bp, Glycine max
gttcgattgtgttgatgaggaggattcctttgaggaagtttctttaagtgcagcacttaatggtgttgagggtttggactaatatggaaagaattcctcttgccacatctgagggatttcctcatgtgctttcacgcaaaaatggtgaaaaaggcaaaaggagatttgtctctggggatggtgaagagatgacactgattccgggaaccagtgttgaagaggcttacaacaagctaatagttgaacttgagaaaagtgttcctacattggttg

SEQ ID NO: 124845 - DNA, 278 bp, Glycine max
gcagattgagacaaagaatagatcctcaatacaatgaggttcaggctcagatggaaacaaatttgtttaaattgtctcttgatgatgttgaaactcctaaaggttccatgttggatcttaaaatttctcaatctaaaattgcacttcccaaaaacacagttggaggaaccattctgcgtagtgatctattggcaaattttttgacagagggcaattttagagcaagtgttgatttgcagcgcactcatcgtattaaaggaatgattaaaatggtggcc

SEQ ID NO: 124846 - DNA, 268 bp, Glycine max
catacatagtagtgttggtgggttgcaaagatgcttgggggtcttctccataggggtcataagataaaagggacagtggtgttgatgcgcaagaatgtgttggacgtgaatagcgtaaccagcgttgggggaattattggtcaaggtctcgacttagttggctcaacactcgatactcttactgccttcttgggccgatccgtgtctctccagcttattagtgctaccaaagctgatgccaacggaaaagggaaacttggaaaggcta

SEQ ID NO: 124847 - DNA, 269 bp, Glycine max
agaaagtcttccatagccccccaaaaatgaagagcaccatcttctttgctctctttctcttttgtgccttcagcacctcatacctaccttcagccatcgctgatttcgtgctcgataatgaaggtaaccctcttgaaaatggtggcacatattatatcttgtcagacataacagcatttggtggaataagagcagccccaacgggaaatgaaagatgccctctcactgtggtgcaatctcgcaatgagctcgacaaagggattggaaca

SEQ ID NO: 124848 - DNA, 264 bp, Glycine max
gctggaagcaaaggaagactgggatatgcttcattgataccatatgttgagccagttgtgcaagctcaaagtgctgaagtttacttcgacttcttccctgtggaggttgatagtcaagagggagttgctcacattggtgaattgaaatctggtgtctatgttccactgcctacaaaaactaatttggtggaaactcccaaggaatggcaactggatctaccttgtgataaaattcctagtgtcttgactacaactgatgaaaga

SEQ ID NO: 124849 - DNA, 267 bp, Glycine max
taacttgctctatactacacagtacacacactagaagaataatggcttccatcctccactactttttagccctctctctttcttgctcttttcttttcttcttatccgactcagtcacccctacaaaaccaataaaccttgttgttctacccgttcaaaatgatggttccacagggctccattgggccaacctccaaaaaagaacccctctaatgcaagtaccagtcctggtggacctcaatggaaatcacttgtgggttaactgtg

SEQ ID NO: 124850 - DNA, 267 bp, Glycine max
ataaaattcttccaccaagttatgggtttccttgtgttgcttcttttctcgctcttaggtctctcttctagttccagcatatcaactcatcgttccatattggaccttgacctaaccaagtttaccacacagaaacaggtgtcttcactgttccaactatggaagagtgagcatggacgtgtctaccataaccacgaagaagaggcaaagagacttgagattttcaagaataacttgaactatatcagggacatgaatgcaaacaga

SEQ ID NO: 124851 - DNA, 271 bp, Glycine max
aagagcaagagtttctaaaatatcagcagcagcagcaaggaggttcccaaagccagaaaggaaagcaacaagaagaagaaaacgaaggaagcaacatattgagtggcttcgcccctgaattcttgaaagaagcgttcggcgtgaacatgcagatagtgagaaacctacaaggtgagaacgaagaggaggatagtggagccattgtgacagtgaaaggaggtctaagagtcacagctccagccatgaggaagccacagcaagaagaagatga

SEQ ID NO: 124852 - DNA, 270 bp, Glycine max
cacgaaacagaaaatgccaggactcacagcaccttccgattactcccaagaacccccccgccactcttctcttctcatcaacgccaaggaacctttcaatgcggagccaccgcgtgctgcgttggttgcttcctacgtcaccccttccgatttcttctataagaggaaccacggtccaatccccatcgttgagaacatcaacagatattccgtgaacgtgtccggcttggtggagcgtcccaaacagctcttcatgaaagatatatggat

SEQ ID NO: 124853 - DNA, 268 bp, Glycine max
taaacactcatcagtcatcaccatggccaagctagttttttccctttgttttctgcatttcagtggctgctgtttcgctttcagttccagagagcagcctcagcaaaacgagtgccagatccaaaaactcaatgccctcaaaccggataaccgtatagagtcagaaggagggctcattgagacatggaaccctaacaacaagccattccagtgtgccggtgttgccctctctcgctgcaccctcaaccgcaacgcccttcgtagacct

SEQ ID NO: 124854 - DNA, 271 bp, Glycine max
cgaacagcataatatacgcattgaatggacgggcattgatacaagtggtgaattgcaacggtgagagagtgtttgatggagagctgcaagagggacgggtgctgatcgtgccacaaaactttgtggtggctgcaagatcacagagtgacaacttcgagtatgtgtcattcaagaccaatgatacacccatgatcggcactcttgcaggggcaaactcattgttgaacgcattaccagaggaagtgattcagcacactttcaacctaaaaag

SEQ ID NO: 124855 - DNA, 277 bp, Glycine max
  unsure (1)..(277): unsure at all n locations
caataattccttcacttgcagaacttagttctctgttgcatcatcatcatcttcattagtgttagccctanacttcaccttcaaccatgaccacagtgccaccacacagtgtccaagtgcacacaacaacacaccgctacgaagccggcgtcgtcccgccggctcgttttgaggcgccgcgttacgaagccggcatcaaggcgccctcttccatttaccattccgagagaggtccgacgacctctcaggttctcgcagttgtcgccggccttccggt

SEQ ID NO: 124856 - DNA, 270 bp, Glycine max
ctcgagccggttcaatatcgtagtataccttaataaataatttaagatactatgatgagaggaaggttctcattactgttgctgagaattgtcttcctggcttcagtttctgtctcatttggcattgactactgggaaaaagagaaccccaaacataacaagtgtctccagagttgcaatagcgagagagagtcgtacaggaaccaagcatgccacgctcgttgcaacctgcttaaggtggagaaataagatgtggagaaggtggttcca

SEQ ID NO: 124857 - DNA, 256 bp, Glycine max
tgttgaaatcctaaaggttccatgttggatcttaaaatttctcagtctaaaattgcacttcccaagaacacagttggaggaactattctgcgtagtgatctattggcacattttctgacagagggcaattttagagcaagtgttgatttgcagcgcactcatcgtattaaaggaatgattaaaatggtggccacagttggtattcctgagaatacaggtatatcattggcctgtgctatgaatagttcttttaggg

SEQ ID NO: 124858 - DNA, 276 bp, Glycine max
gtcggagagcaagagagagagagagagcaaaatggctgatacaagtggaggagatgcagtgagaccggtggtaatatgtgatcacaagtgtggctgcacagttccatgcactggtggttccacttgcaggtgcacaagtgtcggcatgacaactggaggcggtgatcacgtgacatgctcgtgcggagagtactgtgggtgcaatccatgctcatgtcccaagactgcggcttctggaactggttgcagatgtggcacagattgctcatgtgcctc

SEQ ID NO: 124859 - DNA, 278 bp, Glycine max
gtgattgttgtgactcgttcttcttcgtcgttatcttcttcttttgttgtttgtgtgtttgttttttctctcacctgaaaatgtcttgctgcggtggtaaacagtggttgcggaagcgcctgcaagtgcggcaacggctgcggaggctgcaagatgtacccagacttgagctacaccgagtcaaccaccaccgagaccttggtcatgggagtggcaccagttaaggctcaattcgagagtgctgaaatgggtgttcccggtgagaacgatggctgcaa

SEQ ID NO: 124860 - DNA, 251 bp, Glycine max
gtggacacaaatttgtttacattgtctcttgcatgatgttgaaactcctaaaggttccatgttggatacttaaaatttctcagtctaaaattgcacttcccaagaacacagttggaggcactattctgcgtagtgatctattggcaaattttctgacagagggcaattttagagccagtgttgatttgcagcgcactcatcgtattaaaggaatgattaaactggtggccacattggtattcctgagaata

SEQ ID NO: 124861 - DNA, 270 bp, Glycine max
gctcggcgctccattgtctttgaacactcatcaccatggccaagcttgttctttccctagtgtttccttcttttcagtggctgcttcgctctgagagagcaggcacagcaaaatgagtgccagatccaaaagctgaatgccctcaaaccggataaccgtatagagtcggaaggtgggttcattgagacctggaaccctaacaacaagccattccagtgtgccggtgttgccctctctcgctgcacccttaaccgcaatgcccttcgtaga

SEQ ID NO: 124862 - DNA, 273 bp, Glycine max
caaacttaattattaacacttccttagttcaatatggggaagcccttcactctctctctttcttccctttgcttgctactcttgtcgagtgcatgctttgctattagctccagcaagctcaacgagtgccaactcaacaacctcaacgcgttggaacccgaccaccgcgttgagtccgaaggtggtttgattcaaacatggaactctcaacaccctgagctgaaatgcgccggtgtcactgtttccaaactcaccctcaaccgcaatggcctc

SEQ ID NO: 124863 - DNA, 268 bp, Glycine max
cagcaaagggcagcagcttgatgcggttcactttacctatgaagtgggtctggtggaaaagttccctcctgttcccttgttgaagtcttttctcaaggatgctaagaaagttgcggcttctattttggaagatcctaataatgcaggccgagctgcgtacctagctgcaaggaaagagcagtctgcactcagggctgtgattaaatgcattgaagaatacaaacttgaggatgagttccctccagaaaatctgaagaagcgacttgac

SEQ ID NO: 124864 - DNA, 252 bp, Glycine max; identical to SEQ ID NO: 111967

SEQ ID NO: 124865 - DNA, 261 bp, Glycine max
cagaattagggttttccaattcacagagcaacacaacgaaccaacaatggcgcagctcagccgcagtcgcagccgcagcacgggcaagcagcgctggagcaggtgcagtgcttcggtcgcaagaagaccgccgtggccgtgacctactgcaagcgcgggcgcggtctcatcaagatcaacggctgctccattgagctcgtggagccggagatcctccgcttcaaggccttcgagcctatcctcctgttgggtaagagccgc

SEQ ID NO: 124866 - DNA, 265 bp, Glycine max
gttcaatatcctagtataccttaataaataatttaagatactatgatgagagcacggttcccattactgttgctgggacttgttttcctggcttcagtttctgtctcatttggcattgcttactgggaaaaagagaaccccaaacacaacaagtgtctccagagttgcaatagcgagagagactcgtacaggaaccaagcatgccacgctcgttgcaacctccttaaggtggagaaagaagaatgtgaagaaggtgacattccac

SEQ ID NO: 124867 - DNA, 270 bp, Glycine max
tatggggaagcccttcactctctctctttcttccctttgcttgctactcttgtcgagtgcatgctttgctattagctccagcaagctcaacgagtgccaactcaacaacctcaacgcgttggaacccgaccaccgcgttgagtccgaaggtggtttgattcaaacatggaactctcaacaccctgagctgaaatgcgccggtgtcactgtttccaaactcaccctcaaccgcaatggcctccacttgccatcttactcaccttatccccg

SEQ ID NO: 124868 - DNA, 270 bp, Glycine max
atgagtccattggagagccttgcatcatctgctgtccgcacagcaaacaaggccaaagcaaaactcattgttgtactgacacgtggcgggtctacagctaagttggttgctaagtataggccagcggttccaatattatcggtggtggttccagtgttgagcacagactcatttgattggacatgcagtgatgagacgccagcaaggcacagcttgatatataggggcttgattccaatattgggggagggatccgccaaggctactgat

SEQ ID NO: 124869 - DNA, 269 bp, Glycine max
gaacctacttgcaaggattcaacaggaacattttagaggcctcctacgataccaaattcgaggagataaacaaggtactagtttagtagagaggaagggcagcagcaaggggagcagaggctgcaagagagcgtgattgtggaaatctcgaaggaacagattcgggcactgagcaaacgtgccaaatctagttcaaggaaaaccatttcttctgaagataaacctttaacttgagaagccgcgaccccatctactccaacaagcttggc

SEQ ID NO: 124870 - DNA, 272 bp, Glycine max
gtgttggattagttctgcagttaacaatcgctcctcagatatcaacaaaaagattcgcacagcacttgggaaaggtaagaaaattgtttttcttactagagttgatccttttccagtagctctactggctgttctttttggcgttaagaatgaaattctgagttccaacgccactaaccctatgctgacgcgacttcttgagaactgtaagagtctcgaatatctggttgatgagtgtccttttgcatttgtgaactagtatgtaatatttt

SEQ ID NO: 124871 - DNA, 150 bp, Glycine max
tctcgagccgaatcggctcgagatgaaagaaaggacattaggcaacaccctcttgttgaacatgctctgcctatttgaagcatttccacacctcttttaattgtcgtaatgatgtgtgaagtgtgtgttattttaaaaaaaaaacaaaaa

SEQ ID NO: 124872 - DNA, 229 bp, Glycine max
ggaattttagtggacaaaactggagattggatcacacttatacaaaattctccaattagtaacttgttgagagttgctgcttggaagaaaggctgtttaatggttaagattgtgatgtctgggaatgcagcagtcaaaaggagtgattgggcctcattggtacaagtgtttttaacaaacagcaacagtacagagcatttgctgcatgtaagtggaacaaatcgggaac

SEQ ID NO: 124873 - DNA, 256 bp, Glycine max
ccgcaagagcgcgaatggagatcgaaaaagacacaacccagaagacctagacaagaagaaccacgtgaaagaggatgcgagacaagaaacggggttgaggaaaatatctgcaccttgaagcttcacgagaacattgctcgcccttcacgcgctgacttctacaaccctaaagctggtcgcattagtaccctcaacagcctcaccctcccagccctccgccaattccaactcagtgcccaatatgttgtcctctaca

SEQ ID NO: 124874 - DNA, 268 bp, Glycine max
ggcggcggaggttagagcaacgggaagtaacgttataacgccgggaagacttgcggctatggctcaatcagctgctgcttataatgctgactgcaagcatgaccaggacaaggtcaagcttgccgacgttctgaccggagcaaccgccaaattgcccgcggacaaggccgcgacgctgcaagatgctgaaggggtggcgagtgctgaggccaggaacaaccccgatgccaccgccactaccggtggggtagccgcttctgttgcggct

SEQ ID NO: 124875 - DNA, 244 bp, Glycine max
atatcctagtataccttaataaataatttaagatactatgatgagagcacggttcccattactgttgctgggacttgttttcctggcttcagtttctgtctcatttggcattgcttactgggaaaaagagaaccccaaacacaacaagtgtctccagagttgcaatagcgagagagactcgtacaggaaccaagcatgccacgctcgttgcaacctccttaaagtggagaaagagaatgtgaag

SEQ ID NO: 124876 - DNA, 265 bp, Glycine max
caggtatcatcgtatgaagcaagagcgagagaaacaaatccaagaggaaactcgtgagaagaaagaggaggaaagccgtgaaagggaagaagaacaacaagagcagcatgaggaacaagatgaaaatccctacatttttgaggaagataaggattttgagaccagagtcgaaactgaaggtggcagaattcgggttctcaagaagttcactgaaaaatccaagcttcttcagggcattgagaacttcgtttggccatttggaagc

SEQ ID NO: 124877 - DNA, 267 bp, Glycine max
tggacaagcttagttgtcaagttggaatcaacccatattctatggaatggactggtttggccaatagattactgagtaagggcaacgatattctgtgttgcgattatgctagttttgatggtttgattaccaagcaagttatgagcaagatggcagaaatgatcaacagtctttgtggtggtgatgaaaaactgatgcgtgaaaggacacacctgctgttggcttgttgttcaaggatggcaatttgtaagaaagatgtttggagag

SEQ ID NO: 124878 - DNA, 265 bp, Glycine max
tcaatatcctagtataccttaataaataatttaagatactatgatgagagcacggttcccattactgttgctgggacttgttttcctggcttcagtttctgtctcatttggcattgcttactgggaaaaagagaaccccaaacacaacaagtgtctccagagttgcaatagcgagagagactcgtacaggaaccaagcatgccacgctcgttgcaacctccttaaggtggagaaagaagaatgtgaagaaggtgaaattccacga

SEQ ID NO: 124879 - DNA, 239 bp, Glycine max
gaatagttcttttagggggcgtgccagttctgatatttacaccatctgctctcaagactgtgaattatggaatcctgcttgcacaaaagcaatgactatgtcatttaatccaaacccgtgttctgatgcatggagtttggaatttttgaagcgtaccggatttcactgtgatatcatttgtgtcactggatggactgccaccccaatgcaggatgttcaggtacaattgattggtttat

SEQ ID NO: 124880 - DNA, 262 bp, Glycine max
gccgaacaaggtcagccagatcatccagagttgcttttgttgttgaactgaatcaaaatggagcgaaggaacatgcagaggttggatctagctattctatggaatggctatctctactgagagaacatagagtctttgcttatttaggtagagctctcatgtcatctgttgcaatgaattgcattgctaagacagttggtgcttctagcactgataactttcctcaggagagcattgataatactctagagcccagagatca

SEQ ID NO: 124881 - DNA, 269 bp, Glycine max
gcaaagcaatggctacttcaaagttgaaaacccagaatgtggttgtatctctctccctaaccttaaccttggtactggtgctactgaccagcaaggcaaactcagcggaaactgtttctttcagctggaacaagttcgtgccgaagcaaccaaacatgatcctccaaggagacgctattgtgacctcctcgggaaagttacaactcaataaggttgacgaaaacggcaccccaaaaccctcgtctcttggtcgcgccctctactccacc

SEQ ID NO: 124882 - DNA, 270 bp, Glycine max
aggtgaaatctgtggcaccatttgggttatgcttcaactccaacaagatcaatgcatatcctagcgtggaccttgtgatggacaagcccaatggtcctgtttggagaatctctggtgaggacttgatggtgcaggcacaacctggggtcacgtgtttgggtgttatgaatggaggaatgcaacctagagctgaaattaccttaggggcacgtcagttggaagagaacctggtggtgttcgatcttgcaaggtcaagggttgggtttagca

SEQ ID NO: 124883 - DNA, 214 bp, Glycine max
caccattactgatggtattgacaagactagtgcaactttgcaatttagacagttagcagattgtgattttctcaagagaaactttaagcagatgtctaatgttatgtgggtagctcctgaggactaggcgagtttatggtcacaaattgaacatgttgcgtgtaataatctggaaatgcaatgagcttatcttgtacatctcgtaaatcaggta

SEQ ID NO: 124884 - DNA, 270 bp, Glycine max
ctatgatgagagtgcggtttcctttgttggtgttgctgggaactgttttcctggcatcagtttgtgtctcattaaaggtgatagaggatgagaataaccctttctacttgagaagctctaacagcttccagactctctttgagaaccagaacgtggcgattcgtctcctccagagattcgacaaacgcgcgccacaacttcagaaccatcgagactaacggagtgttcagtttcagtcagaacacatcacaatgcttgttcatcagcatg

SEQ ID NO: 124885 - DNA, 265 bp, Glycine max
gaggaaattctgtcttctagtgcaagtgctttcagaactgcaatggtgagtaaaaatagcaagcctcaagctactgcaatgcatgtgggagctatcagaattatcattgatagtttcgcaagtgctgactgcaacatagttggtgcaatgcttttagttgatacttatcatgccaatcctgaaaatgcagttcgtagtatttttgttgcgactttcagaggcggattgcccattcgggtggttacatttccgaataccattgtgc

SEQ ID NO: 124886 - DNA, 260 bp, Glycine max
ccattgtctttgaacactcatcaccatggccaagcttgttctttccctttgtttccttcttttcagtggctgcttcgctctgagagagcaggcacagcaaaatgagtgccagatccaaaagctgaatgccctcaaaccggataaccgtatagagtcggaaggtgggttcattgagacctggaaccctaacaacaagccattccagtgtgccggtgttgccctctctcgctgcacccttaaccgcaatgcacttcgtagac

SEQ ID NO: 124887 - DNA, 268 bp, Glycine max
tatgagtattattcactacaactcacagatctctgggtgatgttggtaaaggtaagcatgaggttgagtctttgaagccaacatcacccagagatctatgagtactattcactacaactcacatgcaacgaagatagcactggtgatggatggtagagggcatcttcaaatatcatgtccacacatgtcatcaacgtcagactcaaagcatgataagagtagcccctcataccatagaatcagtgcggacttgaagcctggactggtg

SEQ ID NO: 124888 - DNA, 266 bp, Glycine max
ggatttcttcacatcctacgatgaggtttatgacagttttgatgctatgggcttgcaagagaatctcctgagaggcatttatgcatatggttttgagaagccatcagctattcagcaaaggggaatagttccattctgcaagggacttgacgttatacaacaggcccagtctggaactgggaaaacagcaactttctgctctggaattctgcagcaacttgactatagtgtgactgaatgccaagccttggttttagcaccaacta

SEQ ID NO: 124889 - DNA, 264 bp, Glycine max
gatagtagtgttggtgggttgcaaagatgcttgggggtcttctccataggggtcataagatacaagggacagtggtgttgatgcgcacgaatgtgttggacgtgaatagcgtaaccagcgttgggggaattattggtcaaggtctcgacttagttggctcaacactcgatactcttactgccttcttgggccgatccgtgtctctccagcttattagtgctaccaaagctgatgccaacggaacagggaaacttggaaaggcta

SEQ ID NO: 124890 - DNA, 259 bp, Glycine max
attgctggtaatactcttatgccagctttttctgttccacaggctactgccagatcttctgaaaatgcggaatcctctgcatgatctagaatttgtgttttctttcatttgtccgtttgtttaattcaataaaggaaattaggcatgaccctcttgttgagtatgctctgcctatttgaaaatttccacacctcttttaattgtcgtaatgatgtgtgaagtgtgtgttattttaaaaaaaaaaaaaaaaaagggcggc

SEQ ID NO: 124891 - DNA, 258 bp, Glycine max
gacttattaacactttccttagttcaatatggggaagcccttcttcactctctctctttcttccctttgcttgctactcttgtcgagtgcatgctttgctattacctccagcaagttcaacgagtgccaactcaacaacctcaacgcgttggaacccgaccaccgcgttgagtccgaaggtggtcttattgaaacatggaactctcaacaccctgagctgcaatgcgccggtgtcactgtttccaaacgcaccctcaa

SEQ ID NO: 124892 - DNA, 262 bp, Glycine max
tggtccttaaacactcatcagtcatcaccatggccaagctagttttttccctttgttttctgcttttcagtggctgctgcttcgctttcagttccagagagcagcctcagcaaaacgagtgccagatccaaaaactcaatgccctcaaaccggataaccgtatagagtcagaaggagggctcattgagacatggaaccctaacaacaagccattccagtgtgccggtgttgccctctctcgctgcaccctcaaccgcaacgc

SEQ ID NO: 124893 - DNA, 266 bp, Glycine max
cgcacaaaaccaagccacccactaacttgtttggtccaagacatggctctgatcctgcatgctaccaaaacaaacaagaatgccttcaagactctgattgcggcagagtacagtggcgtccaagtggaattggcccctaatttcgagatgggtgtctctaacaaaactcctgaatttctcaagatgaatcctattggaaaggttcctgttttggaaacgcccgatggtccagtctttgagagcaatgcaatcgctcgttacgttgc

SEQ ID NO: 124894 - DNA, 262 bp, Glycine max
gttcaatatcctagtacaccgtattaaagaatttaagatctactatgatgagagcgcggttcccattactgttgctgggagttgttttcctggcatcagtttctgtctcatttggcattgcgtattgggaaaagcagaaccccagtcacaacaagtgcctccgaagttgcaatagcgagaaagactcctacaggaaccaagcatgccacgctcgttgcaacctccttaaggtggaggaagaagaagaatgcgaagaaggtca

SEQ ID NO: 124895 - DNA, 264 bp, Glycine max
tggttaccaatttttgtgaattgtctttatcctgtaagtcaattaccttcagaagctgtcgttgtaaatgttatctgtggtagtggacgtggtggtttacccaccactgcttggattagttctgcagttaataatcgctcctcagatatcaacaaaaagattcgcacagcacttgggaaaggtaagaaaattgtttttcttactagagttgatccttttccagtagctttactggctgttctttttggcgttaagaatgaaatt

SEQ ID NO: 124896 - DNA, 264 bp, Glycine max
caccatggccaagcttgttctttccctttgtttccttcttttcagtggctgcttcgctctgagagagcaggcacagcaaaatgagtgccagatccaaaagctgaatgccctcaaaccggataaccgtatagagtcggaaggtgggttcattgagacctggaaccctaacaacaagccattccagtgtgccggtgttgccctctctcgctgcacccttaaccgcaatgcccttcgtagaccttcctacaccaacggtccccagga

SEQ ID NO: 124897 - DNA, 256 bp, Glycine max
gacttattaacactttccttagttcaatatggggaagcccttcttcactctctctctttcttccctttgcttgctactcttgtcgagtgcatgctttgctattacctccagcaagttcaacgagtgccaactcaacaacctcaacgcgttggaacccgaccaccgcgttgagtccgaaggtggtcttattgaaacatggaactctcaacaccctgagctgcaatgcgccggtgtcactgtttccaaacgcaccctc

SEQ ID NO: 124898 - DNA, 261 bp, Glycine max
gatagatcctcaatacaatgaggttcaggctcagatggaaacaaatttgtttaaattgtctcttgatgatgttgaaactcctaaaggttccatgttggatcttaaaatttctcaatctaaaattgcacttcccaaaaacacagttggaggaaccattctgcgtagtgacctattggcaaattttttgacagagggcaattttagagcaagtgttgatttgcagcgcactcatcgtatcaaaggaatgattaaaatggtggc

SEQ ID NO: 124899 - DNA, 257 bp, Glycine max
catgattactggtacctcccaggctgattgtgctgtccttatcattgactccaccactggtggttttgaagctggtatttctaaggatggacagactcgtgagcatgctcttcttgctttcacccttggtgtgaagcagatgatctgctgctgtaacaagatggatgccactaccccgaagtactctaaggctaggtatgatgaaattgtgaaggaagtctcttcctacttgaagaaggttggttacaacccagaca

SEQ ID NO: 124900 - DNA, 258 bp, Glycine max
ataaaattcttccaccaagttatgggtttccttgtgttgcttcttttctccctcttaggtctctcttctagttccagcatatcaactcatcgttccatattggaccttgacctaaccaagtttaccacacagaaacaggtgtcttcactgttccaactatggaagagtgagcatggacgtgtctaccataaccacgaagaagaggcaaagagacttgagattttcaagaataacttgaactatatcagggacatgaat

SEQ ID NO: 124901 - DNA, 262 bp, Glycine max
gagaaaatcaacatttttttttctatcaattcacacgacaaaatttagcagagttcaaaacaccaaccaagtaaagtaaagaagggaagatgtcactgataccaagtttcttcggtggtcgaaggagcaatgttttcgaccctttctcgctcgacgtatgggaccccttcaaggatttgtctttcccttctgctgaagattcagctttcttgaaaacacgagtggattggaaggagaccccagaagcgcacgtgttcaaggc

SEQ ID NO: 124902 - DNA, 260 bp, Glycine max
ctataattccttcacttgcgtaacttagttctctgttgcatcatcatcatcgtcatgagtgttagccctaaacttcaccttcaaccatgacctgagtgccaccacacagtgtccaagtgtacacaacaacacaccgctacgacgccggcgtcgtcccgccggctcgttttgacgcgccgcgttacgaatccggcatcagggcgcgctcttccatttaccattccgtgataagtccgacgacctctcaggtcctcgcattg

SEQ ID NO: 124903 - DNA, 247 bp, Glycine max
cttgttgttagtggctctgatgatggaactgctaaattatgggatatgcgtcaaaggggttccatccaaacattcccagataaataccagattaccgctgttggcttctcagatgcatcagataagatcttcactggtggtattgacaatgatgtcaagatttgggatttgcgtaaaggggaagttaccatgacacttcaaggtcatcaagacatgattactgatatgcagctgagtcctgatgggt

SEQ ID NO: 124904 - DNA, 267 bp, Glycine max
cccactaacaattccttcacttgcagcactgttgcatcatcatcttcattgcaaaaccctaaacttcaccttcaaccatgaccacacaagtaccaccacacagtgtccaagtccacacaacaacacaccgctacgaagctggcgtcgtcccccccggagcccgtttcgaaccgccgcgttatgaagccggcgtcaaagcgccctccatttaccattccgagagaggtccaacgacttcccaggtcctcgccgtcctcgccggcctcc

SEQ ID NO: 124905 - DNA, 264 bp, Glycine max
ccaccatatcattagacaacgagtttatctcttcttctactagagttctcttttctctgggtagtgtaatatcattaatcaatggctgacgctatctttggataccctttcagacgcttcatctggggtcaccctccaattttcagagaatggtctggctcaatagccctcttagattggctcgaatcacccactgcccacatcttaaaagttaatgttccaggattcagcaaggaagacataaaggtgcagattgaggatggg

SEQ ID NO: 124906 - DNA, 264 bp, Glycine max
tcataatttaagatactatgatgagagcacggttcccattactgttgctgggacttgttttcctggcttcagtttctgtctcatttggcattgcttactgggaaaaagagaaccccaaacacaacaagtgtctccagagttgcactagcgagagagactcgtacaggaaccaagcatgccacgctcgttgcaacctccttaaggtggagaaagacgaatgtgaagaaggtgaaattccacgaccacgaccacgtccacagcacc

SEQ ID NO: 124907 - DNA, 250 bp, Glycine max
gctattaaagaaccaaagagaatcctactttgtggatgctcagcctaagaagaaagaggaggggaataagggaagaaagggtcctttgtcttcaattttgagggctttttactgaataagtatgtactaaaatgtatgctgtaatagctcatagtgagcgaggaaagtatcgggctatgtaactatgactagagcttcaactatgaataaataaatcgacagcatatgatgcttttgttttgtgtccttc

SEQ ID NO: 124908 - DNA, 235 bp, Glycine max
taaggtctcagattttggattggctagaacagcactggatgagagaaacaagcacatctccacacatgttatgggaacatttggctacttagctcctgaatatgcaatgactggccatcttctggtcaagagtgatgtttatagttatggagttgtactccttgagctcctaactggaagaaagcctgtggatttgtcacaaccccgggtccagaaatctcgtgacagggttcgt

SEQ ID NO: 124909 - DNA, 258 bp, Glycine max
gttcaatatcctagtacaccgtattaaagaatttaagatatactatgatgagagcgcggttcccattactgttgctgggagttgttttcctggcatcagtttctgtctcatttggcattgcgtattgggaaaagcagaaccccagtcacaacaagtgcctccgaagttgcaatagcgagaaagactcctacaggaaccaagcatgccacgctcgttgcaacctccttaaggtggaggaagaagaagaatgcgaagaag

SEQ ID NO: 124910 - DNA, 256 bp, Glycine max; identical to SEQ ID NO: 113320

SEQ ID NO: 124911 - DNA, 256 bp, Glycine max
gagcaaaccagtaagataacagcagatgcccttgatctagatggatacacagtggacgaggcactagcaagtcggaggttatttatgttagattaccatgatgtattcatgccatatataaggcggataaatcagacatatgccaaggcttatgcgacaaggactatcctttttctgagagaaaatggaaccttaaagccagtggccatcgaattaagtttgccacatcctgctggggtactgtcaggtgctgtca

SEQ ID NO: 124912 - DNA, 260 bp, Glycine max
tctagaatggaatttcgatgctcagtcatctcttttaccattctcgtctctcttgctcttgcaggagagagccatgtccatgcatcgctacctgaggaagattattgggaagctgtttggccaaacactcccattcccactgcactgcgagagcttctaaagcctctccctgcaggtgttgaaatcgatgaactccctaagcaaattgatgatacacagtacccaaaaacattcttctataaagaagaccttcatccagg

SEQ ID NO: 124913 - DNA, 254 bp, Glycine max
tgggaattgatcttcccaatagaggtatgtggtcctaataatggttttgaaatgtggagttctgagtgggcaaatcaaacttcatggcatttgagtttccttattgacaatcccaaacagtctacagtttttgatattctcttgggaatttctcaagattttgagattgctggtaatactcttatgccagctttttctgttccacaggctactgccagatcttctgaaaatgcggaatcctctgcatgatctgg

SEQ ID NO: 124914 - DNA, 262 bp, Glycine max
tacttattaacactttccttagttcaatatggggaagcccttcttcactctctctctttcttccctttgcttgctactcttgtcgagtgcatgctttgctattacctccagcaagttcaacgagtgccaactcaacaacctcaacgcgttggaacccgaccaccgcgttgagtccgaaggtggtcttattgaaacatggaactctcaacaccctgagctgccatgcgccggtgtcactgtttccaaacgcaccctcaaccgc

SEQ ID NO: 124915 - DNA, 260 bp, Glycine max
ctcgagccgcttcaaacttaattattaacacttccttagttcaatatggggaagcccttcactctctctctttcttccctttgcttgctactcttgtcgagtgcatgctttgctattagctccagcaagctcaacgagtgccaactcaacaacctcaacgcgttggaacccgaccaccgcgttgagtccgaaggtggtttgattcaaacatggaactctcaacaccctgagctgaaatgcgccggtgtcactgtttccaa

SEQ ID NO: 124916 - DNA, 258 bp, Glycine max
agcaaacattgaacttgttggcattaaagaacaacaacagaggcagcaacaggaagagcaacctttggaagtgcggaaatatagagctgaattgtctgaacaagatatatttgtaatcccagcaggttatccagttgtggtcaacgctacctcagatctgaatttctttgcttttggtatcaatgccgagaacaaccagaggaacttccttgcaggttcgaaagacaatgtgataagccagatacctagtcaagtgca

SEQ ID NO: 124917 - DNA, 115 bp, Glycine max
gtgacaatcatgcccgtcctgttcttggaggaaatgacactttccttatcctcgtagggggagactggtagaaaccacaaggaagatccaatagtgagataggagcatgtgttta

SEQ ID NO: 124918 - DNA, 256 bp, Glycine max
atggggaagcccttcactctctctctttcttccctttgcttgctactcttgtcgagtgcatgctttgctattagctccagcaagctcaacgagtgccaactcaacaacctcaacgcgttggaacccgaccaccgcgttgagtccgaaggtggtttgattcaaacatggaactctcaacaccctgagctgaaatgcgccggtgtcaatgtttccaaactcaacctcaaccgcaatggcctccaattggcatcttact

SEQ ID NO: 124919 - DNA, 248 bp, Glycine max
gctagaatggaatttcgatgctcagtcatctcttttaccattctcttctctcttgctcttgcaggagagagccatgtccatgcatcgctacctgaggaagattattgggaagctgtttggccaaacactcccattcccactgcactgcgagagcttctaaagcctctccctgcaggtgttgaaatcgatgaactccctaagcaaattgatgatacacagtacccaaaaacattcttctataaagaaga

SEQ ID NO: 124920 - DNA, 253 bp, Glycine max
tacatgtggtagtggacgtggtggtttacccaccactgcttggattagttctgcagttaacaatcgctcctcagatatcaacaaaaagattcgcacagcacttgggaaaggtaagaaaattgtttttcttaccagagttgatccttttccagtagctttactggctgttctttttggcgttaagaatgaaattctgagttctaacgccactaaccctatgctgacgcgacttcttgagaactgtaagagtctc

SEQ ID NO: 124921 - DNA, 254 bp, Glycine max; identical to SEQ ID NO: 111291

SEQ ID NO: 124922 - DNA, 258 bp, Glycine max
tgcagatgtcacaggatctgcaaccctgagcatagttcaggttttctggggtttggacaaaaagcttgctcagaggaagcactttccttctgtaaactggcttatttcttattcaaaatactcaacggcacttgaaaccttttatgagcaatttgatccagattttatcaacattaggacaaaggctcgtgaagttctgcaaagggaagatgacctgaatgaaattgttcagcttgtgggcaaggatgctttagctga

SEQ ID NO: 124923 - DNA, 258 bp, Glycine max
gacatcttggttgtttattatacaatagcaactcgatttagaaaatttctaccgcattacattaggtggcatctgtataccttgttgatctacattctcccatcttttctcactgctgaaattaaatataagcggaatcagagtaatactcagatttccggcttattttacgacggcagatacaaattctggactaaacacgagaaaaatcttgctttgacagaagaggaaaagatggaagtgattagaaatagaggc

SEQ ID NO: 124924 - DNA, 258 bp, Glycine max
ctcatcaccatggccaagcttgttctttccctttgtttccttcttttcagtggctgcttcgctctgagagagcaggcacagcaaaatgagtgccagatccaaaagctgaatgccctcaaaccggataaccgtatagagtcggaaggtgggttcattgagacctggaaccctaacaacaagccattccagtgtgccggtgttgccctctctcgctgcacccttaaccgcaatgcccttcgtagaccttcctacaccaag

SEQ ID NO: 124925 - DNA, 242 bp, Glycine max
ctcggagagaaagagagagagagagagaaaatggctgatacaagtggaggagatgcagtgagaccggtggtaatatgtgataacaagtgtggctgcacagttccatgcactggtggttccacttgcaggtgcacaagtgtcggcatgacaactggaggcggtgatcacgtgacatgctcgtgcggagagtactgtgggtgcaatccatgctcatgtcccaagactgcggcttctggaactgg

SEQ ID NO: 124926 - DNA, 288 bp, Glycine max
ttcggctcgaggaaacctacaaggtgagaacgaagaggaggatagtggagccattgtgacagtgacaggaggtctaagagtcacagctccagccatgaggaagccacagcaagaagaagatgatgatgatgaggaagagcagccacagtgcgtggagcacagacaaaggttgccaacgccaaagcaaaaggagcagcaatggcattgctgagaccatttgcacaatgagacttcgccaaaacattggtcagcattcatcaactgacatctacaacactcagctggtag

SEQ ID NO: 124927 - DNA, 207 bp, Glycine max
tcggctcgagctccattgtctttgaacactcatcaccatggccaagcttgttctttccctttgtttccttcttttcagtggctgcttcgctctgagagagcaggcacagcaaaatgagtgccagatccaaaagctgaatgccctcaaaccggataaccgtatagagtcggaaggtgggttcattgagacctggaaccctaacaacaa

SEQ ID NO: 124928 - DNA, 267 bp, Glycine max
attcggggatgcacctaacaacatgcgacagtttcaaaaccaagatattttccacgatttggccttcaccccattaaccatcaccctgcagggagagtacaacgtgagagtcaactcaataagaatcaaccagcacagtgtgttcccactgaacaagatatcatccaccatcgtagggtcgacctctggaggaaccatgattagcacctcaactcctcacatggttctccagcaatccgtgtaccaggctttcactcagtgtttgct

SEQ ID NO: 124929 - DNA, 263 bp, Glycine max
gtaaaacttggcattagggttgtgatttgtggaactattggttgttcggccatagtttcatcaattttttgtaacattatatgaaagacttaaatatgtttgtgacccctgatatatatactcgaattttgcgaaaaagaagaatctaagatgacttctccctacattaaatgtacagtctctttcttcatagcatttggaaatttggctgatgacaccatcaattttgaggcttttccccacaagctggtgcagttggagag

SEQ ID NO: 124930 - DNA, 263 bp, Glycine max
cttccttagttcaatatggggaagccttcactctctctctttacttccctttgcttgctactcttgtcgagtgcatgctttgctattagctccagcaagctcaacgagtgccaactcaacaacctcaacgcgttggaacccgaccaccgcgttgagtccgaaggtggtttgattcaaacatggaactctcaacaccctgagctgaaatgcgccggtgtcactgtttccaaactcaccctcaaccgcaatggcctccattgcca

SEQ ID NO: 124931 - DNA, 265 bp, Glycine max
aagcacaacttttgctcaaagcttcagaaactatgctcatgaaagcttatgcttttttgaagtacaacaatgcaaccactttgattgttcggacccatttggcagaattggtcaatgaagacttttatgatgaaaaatttaattttattggcacaattgggactccagcttttcatcgacaaattgctgcacacttggagaaaatgccattatggcaaaaagcaattttgtgtggaatgggacattgtttgtctcggaaaagcaa

SEQ ID NO: 124932 - DNA, 262 bp, Glycine max
gagcaaaccagtaagataacagcagatgcccttgatctagatggatacacagtggacgaggcactagcaagtcggaggttatttatgttagattaccatgatgtattcatgccatatataaggcggataaatcagacatatgccaaggcttatgcgacaaggactatcctttttctgagagaaaatggaaccttattcccagtggccatcgaattaagtttgccacatcctgctgggagactgtcaggtgctgtcagcaagt

SEQ ID NO: 124933 - DNA, 266 bp, Glycine max
gaagttgacaaccataaacaatatgtgtgcatatgggctcaatcctggtatttcaggttctcgtcttttgggcaccattcctcagtccatttcacagcaaactgtttggacatcaaatggcaacagtgagaacaccattgaattttgattctagcaagcagagcttttgtcagttttctattgaccttctcggtggaggcatcttagtggacaaaactggagattggatcacacttatacaaaattctccaattagtacttgttga

SEQ ID NO: 124934 - DNA, 262 bp, Glycine max
gaactagctcttctggcaaaggaacgttgttcctaggccctttggtcgtaattcttagcacccttgtttgggcagcatggttcataattcaaaaagacataagcaagacatttccagctccttacacgagcactggcttaatgtgtttcatggcaagctttcaatgcgtgatcattgccgtgtgtgtcgaccacagggcctcagcttggtcactccacaatgctatgagactttcctctgccctttatgcgggaatttttgc

SEQ ID NO: 124935 - DNA, 267 bp, Glycine max
gtacaccgtattaaagaatttaagattactatgatgagagcgcggttcccattactgttgctgggagttgttttcctggcatcagtttctgtctcatttggcattgcgtattgggaaaagcagaaccccagtcacaacaagtgcctccgaagttgcaatagcgagaaagactcctacaggaaccaagcatgccacgctcgttgcaacctccttaaggtggaggaagaagaagaatgcgaagaaggtcaaattccacgaccacgacca

SEQ ID NO: 124936 - DNA, 263 bp, Glycine max
gttctgagatggtgaacggagtattcgaccgaaaggagagtttctttttcccttttgagttgccgagagaggagcgtggtcgtcgcgctgatgcgtgagaggtttagaacaatcaagaaaaggtgtgcatgtggctgaagatcacggggaatgtattaagcttcagagactctttaaattaaattttctgtattttgtgttatatgttactagttctttaaattagccagatggagtttatgtgtatctaaatgcaggctgct

SEQ ID NO: 124937 - DNA, 169 bp, Glycine max
tgaaattttgataaaccgcgatcacaagttgccgcaccttaaaaccggaaacaaaagcaatcgttacttgatttcaagaatctctcaatttcttcctacttctttgtgtacgatttcttaagggatagaaaatcactctctgtgctggccacagacttcgtgaatcatt

SEQ ID NO: 124938 - DNA, 258 bp, Glycine max
caggcaaattgctttaaaatttttggagtcagataagaaaactgctgagcttgttggaaatacaaaaatgaaggccagcaccaatgttaggcataatgttcgtccttgtactagttctgccagggcccaacttatcccagatattcttcgctgttatagcagtggaggccggacaattgtatttgccgagacaaaagaatgtgcttctcagcttgcaaggatcttgaatggagcaaagctctccatggtgacgtacag

SEQ ID NO: 124939 - DNA, 265 bp, Glycine max
ctttccttagttcaatatggggaacccttcttcactctctctatttcttccctttgcttgctactcttgtcgagtgcatgctttgctattacctccagcaagttcaacgagtgccaactctacaacctcaacgcgttggaacccgaccaccgcgttgagtccgaaggtggtcttattgctacatggaactctcagcaccctgagctgcaatgcgccggtgtcaatgtttccaaacgctagctcatccgcaactgctccacttgcc

SEQ ID NO: 124940 - DNA, 257 bp, Glycine max
taaaattcttccaccaagttatgggtttccttgtgttgcttcttttctccctcttaggtctctcttctagttccagcatatcaactcatcgttccatattggaccttgacctaaccaagtttaccacacagaaacaggtgtcttcactgttccaactatggaagagtgagcatggacgtgtctaccataaccacgaagaagaggcatcgagacttgagattttcaagaataacttgaactatatcagggacatgatg

SEQ ID NO: 124941 - DNA, 265 bp, Glycine max
gttaaacactcttcttcatcgtcgtcgcaatgggacgtgtgatccgtgcgcagcgtaacgggagcaggctcggtcttcaagtcccacacgcaccaccgcaagggccctgcccgcttccggagcctggatttcggagagcgcaacggctacctgaagggtgtcgtcactgacgtcatccacgatcctggccgtggcgcggctctcgctaaggtcgccttccgctacccgttccgctacaattagcagaacgagctctcatcgccgc

SEQ ID NO: 124942 - DNA, 258 bp, Glycine max
gcaacagtgagaacaccattgaattttgattctagcaagcagagcttttgtcagttttctattgaccttctcggtggaggaatcttagtggacaaaactggagattggatcacacttatacaaaattctccaattagtaacttgttgagagttgctgcttggaagaaaggctgtttaatggtcaagattgtgatgtctgggaatgcagcagtcaaaaggagtgattgggcctcattggtacaagtgtttttaacaaca

SEQ ID NO: 124943 - DNA, 260 bp, Glycine max
cacacacaactactacaagtacttccttacaatcaaaaccaacaacaactatggcaagttatcaaaagcactacgatgatcagggtcgcaaggttgacgagtatggcaacgttgagaagcaaaccgacgaatacggcaaccctgttcatgctgctagtgtcacctatgtagccaccagaactgctgctggtggttacagtgatgacattaataagcaacatgataccaccaatgcctacggcgtagacactggtagacag

SEQ ID NO: 124944 - DNA, 261 bp, Glycine max
gaaaattctccaattagtaacttgttgagagttgctgcttggaagaaaggctgtttaatggttaagattgtgatgtctgggaatgcagcagtcaaaaggagtgattgggcctcattggtacaagtgtttttaacaaacagcaacagtacagagcattttgatgcatgtaagtggacaaaatcggaaccacattcctgggaattgatcttcccaatagaggtatgtggtcctaataatggttttgaaatgtggagtctgagt

SEQ ID NO: 124945 - DNA, 262 bp, Glycine max
gaagaagagaacatagtggtgtttatgtacgatgacatagctacagacgagttaaatcccagacctggagtcatcatcaaccaccctgagggacaagatgtgtatgctggtgttcctaaggattacaccggtgagaatgtgacggcccagaacctctttgccgttattcttggagacaagaataaagtgaagggaggaagtggcaaagtgatcaatagcaaacctgaggacagaatattatatactactctgatcatggagt

SEQ ID NO: 124946 - DNA, 262 bp, Glycine max
tctcgagccgattcggctcgacttccttagttcaatatggggcagtccttcactctctagctttcttccctttgcttgagctatcttgtcgagtgcatgctttgctattagctccagcaagctcaacgagtgccaactcaacaacctcaacgcgttggaacccgaccaccgcgttgagtccgaaggtggtttgattcaaacatggaactctcaacaccctgagctgaaatgcgccggtgtcactgtttccaaactcacctca

SEQ ID NO: 124947 - DNA, 261 bp, Glycine max
accgattgctagaatggaatttcgatgctcagtcatctcttttaccattctcttctctcttgctcttgcaggagagagccatgtccatgcatcgctacctgaggtagattattgggaagctgtttggccaaacactgccattcccactgcactgcgagagcttctaaagcctctccctgcaggtgttgatatcgatgaactcgctaagcaaattgatgatacacagtacgcaaaaacattcttctatgaagcagaccttca

SEQ ID NO: 124948 - DNA, 194 bp, Glycine max
cttccttagttcaatatggcgaagcccttcactctctctctttcttccctttgcttgctactcttgtcgagtgcatgctttgctattagctccagcaagctcaacgagtgccaactcaacaacctcaacgcgttggaacccgaccaccgcgttgagtccgacggtggtttgattcaaacatggaactctcaaca

SEQ ID NO: 124949 - DNA, 185 bp, Glycine max
ttttcactttcaggtattttacttgctgggaacccagatatagagtacccagagaccatgcaacaacaacaacagcagaaaagtcatggtggacgcaagcaggggcaacaccagcaggaggaagaggaagaaggtggcagcgtgctcagtggcttcagcaaacacttcttggcacaatccttcca

SEQ ID NO: 124950 - DNA, 261 bp, Glycine max
atcgattgctagaatggaatttcgatgctcagtcatctcttttaccattctcttctctcttgctcttgcaggagagagccatgtccatgcatcgctacctgaggaagattattgggaagctgtttggccaaacactcccattcccactgcactgcgagagcttctaaagcctctccctgcagatgttgaaatcgatgaactccctaagcacattgatgatacacagtacccaaaaacattcttctataaagaagacttcat

SEQ ID NO: 124951 - DNA, 252 bp, Glycine max
ggtgcctactggtgttgcatggtggatgtacaacaatgaagacactcctgttgttgccgtttctattattgacaccaacagcttggagaaccagctcgaccagatgcctaggagattctatcttgctgggaaccaagagcaagagtttctaaacatatcagcaagagcaaggaggtcatcaaagccagaaaggtaagcatcagcacgaagaagaaaacgacagaggcagcatattgagtggcttcaccctgg

SEQ ID NO: 124952 - DNA, 258 bp, Glycine max
ctgtctctgtctctactcctggaaaatttgaggaatttttcgggcctggaggacgagacccagaatcggtcctctcagcattcagctggaatgtgctgcaagctgcgctccaaaccccataaggaaagttagaaaagctttttgatcaacagaacgagggaagtattttcgcaataagcagagaacaggtgcgtgcgttggcccctaccaagaaaagctcttggtggccattcggtggcgaatccaagcctcattcaa

SEQ ID NO: 124953 - DNA, 257 bp, Glycine max
gggcacttcccgaagtgtcaaaagaatgcctctttctatagggggaggagctggtgcaaagaatgctattctcatgaatatgccaaatgctgttctttcaatgtggagatattttgttggagatctcgtctttgaagtttctaagatgacttctccctacattaaatgtacagtctctttcttcatagcatttggaaatttggctgatgacaccatcaattttgaggcttttccccacaagctggtgcagttggaga

SEQ ID NO: 124954 - DNA, 255 bp, Glycine max
gttcctcactgaccaagccatagcgatgagaaccaaactttctttagctatctttttcttttttcttttagccagattttcaaacctagcctttggcaaatgtaaagaaaccgaggtagaagaagaagaccctgagctcgtaacatgcaaacaccaatgccaacagccacagcaatacactgagggtgacaagcgggtatgcttgcaaagatgtgacaggtatcatcgtatgaagcaagagcgagagaaacaaat

SEQ ID NO: 124955 - DNA, 107 bp, Glycine max
gacattttgataaaccgcgatcacaggttgccgcaccttaaaaccggggacaaaagccatcgttacttgatttcaagaatctctcaattacgtcgtactactttgtg

SEQ ID NO: 124956 - DNA, 258 bp, Glycine max
tgcacttcccaagaacacagttggaggaactattctgcgtagtgatctattggcaaattttctgacagagggcaattttagagcaagtgttgatttgcagcgcactcatcgtattaaaggaatgattaaaatggtggccacagttggtattcctgagaatacaggtatatcattggcctgtgctatgaatagttcttttagggggcgtgccagttctgatatttacaccatctgctctcaagactgtgaatttggaat

SEQ ID NO: 124957 - DNA, 261 bp, Glycine max
  unsure (1)..(261): unsure at all n locations
gncgtgtgtgatactttcctttcatcttcttcttctctctgcgataaaagcaaaacctaaaatttggtttaggcataggaatctgttgtagagttgatctacctggaatggagggagcatcgtggaatagtagtgtttgtgtggcaccgtttctgagcaagactacgacatggttgatgatccttccaccgacttagtggtgtcgtggggcgaaaacaacaactcctttgttgtttggaagttccccaattcgccacagac

SEQ ID NO: 124958 - DNA, 260 bp, Glycine max
ggaacagcataatatacgcttgaatggacgggcattgatacaagtggtgaattgcaacggtgagagagtgtttgatggagagctgcaagagggacgggtgctgatcgtgccacaaaactttgtggtggctgcaagatcacagagtgacaacttcgagtatgtgtcattcaagaccaatgatacacccatgatcgggactcttgcaggggcaaactcattgttgaacgcattaccagaggaagtgattcagccactttcaa

SEQ ID NO: 124959 - DNA, 259 bp, Glycine max
ggatttttcgaccagagtcgaaacagaaggtggcagcattcgggttctcaagaagttcactgagaaatccaagcttcttcaaggcattgagaatttccgtttggccatcttagaagctagagcacacacgttcgtgtccccacgccactttgattccgaggttgtcttgttcaacattaaggggagagccgtacttgggttggtgagggacagtgaaacagaaaaaatcaccctagaacctggagacatgaacacatac

SEQ ID NO: 124960 - DNA, 259 bp, Glycine max
ttattaacactttccttagttcaatatggggaagcccttcttcactctctctctttcttccctttgcttgctactcttgtcgagtgcatgctttgctattacctccagcaagttcaacgagtgccaactcaacaacctcaacgcgttggaacccgaccaccgcgttgagtccgaaggtggtcttattgaaacatggaactctcaacaccctgagctgcaatgcgccggtgtcactgtttccaaacgcacctcaaccgca

SEQ ID NO: 124961 - DNA, 258 bp, Glycine max
tgagtcactagcacttcccgagttacaggttaaagaagacactgatctcttcatcattgacgaagttggtaagatggagttgttcagttcctcattcttccctgcagttctaagagttttggagtcaaatatcccagttttggcttccattccagttccaaaattcggcagagacatacctgaagttgcaaggttgcggaatcatgcaggggcaacttgttttacattgagcgttagtaacagagatgcgttagagaa

SEQ ID NO: 124962 - DNA, 258 bp, Glycine max
tggagttgcaattccaggatgaactgagacgtttgaggagccacaagaacaatcaaacagaagaggctcaaggtcgcagaagcagcagctacaggacagtcaccagaagattcgtcacttcaatgaaggagacgtactcgtgattcctcctggtgttccttactggacctataacactggcgatgaaccagttgttgccatcagtcttcttgacacctctaacttcaataaccagcttgatcaaacccctagggtatt

SEQ ID NO: 124963 - DNA, 258 bp, Glycine max
gggaaaattgactttccccagggcacttcccgaagtgttaagagaatgcctctttctatagggggaggagctggtgcaaagaatgctattctcatgaatatgccaaatgctgttctttcaatgtggagatattttgttggagatctcgtctttgaagtttctaagatgacttctccctacattaaatgtacagtctctttcttcatagcatttggaaatttggctgatgataccatcaattttgaggctttccccaca

SEQ ID NO: 124964 - DNA, 257 bp, Glycine max
gcatgtgggagctatagaaattatcattgatagtttcgcaagtcctgactgcaacatagttggtgcaatgcttttggttgatacttatcataccaatcctgaaaatgcagttcgtagtatttttgttgcgcctttcagaggcggaaggcccattcgggtggttacatttccgaataccattgtgcagattgaaccagacatgaattcaaggtttcagcttttgagtaccactaccaatggtgattttgttcaaggaa

SEQ ID NO: 124965 - DNA, 257 bp, Glycine max
taaaattcttccaccaagttatgggtttccttgtgttgcttcttttctccctcttaggtctctcttctagttccagcatatcaactcatcgttccatattggaccttgacctaaccaagtttaccacacagaaacaggtgtcttcactgttccaactatggaagagtgagcatggacgtgtctaccataaccacgaagaagaggcacagagcacttgagattttcaagaataacttgaactatatcagggcatgaat

SEQ ID NO: 124966 - DNA, 256 bp, Glycine max
ggatggactgccactccaatgcaggatgttcaggttacaattgattggtttatttcctctcaggaatgtgttcccaggacctattgtgttttaaatccacaaaatccttttgtgttaaataggtggatggggaaactgactttcccccagggcacttcccgaagtgtcaaaagaatgcctctttctatagggggaggagctggtgcaaagaatgctattctcatgaatatgccaaatgctgttctttcatgtggag

SEQ ID NO: 124967 - DNA, 259 bp, Glycine max
ttcaaccaagcgcgggtaaacggcgggagtaactatgactctcttaaggtagccaaatgcctcgtcatctaattagtgacgcgcatgaatggattaacgagattcccactgtccctgtctactatccagcgaaaccacagccaagggaacgggcttggcggaatcagcggggaaagaagaccctgttgagcttgactctagtccgactttgtgaaatgacttgagaggtgtaggataagtgggagctggaacagcgaaa

SEQ ID NO: 124968 - DNA, 256 bp, Glycine max
gttaataaataatttaagatactatgatgagagcacggttcccattactgttgctgggacttgttttcctggcttcagtttctgtctcatttggcattgcttactgggaaaaagagaaccccaaacacaacaagtgtctccagagttgcaatagcgagagagactcgtacaggaaccaagcatgccacgctcgttgcaacctccttaaggtggagaaagaagaatgtgaagaaggtgaaattccacgatcagacca

SEQ ID NO: 124969 - DNA, 162 bp, Glycine max
ctagtatatcttaataactagtttaagatactatgatgagagcacggttcccattactgttgctgggactagcattcctggacttcaggttctgtctcattgagcattgcttagtggcgtcaagtgaggcccaaatacaacaagtatctccagagctgccat

SEQ ID NO: 124970 - DNA, 200 bp, Glycine max
aaagaatgctattctcatgaatatgccaaatgctgttctttcaatgtggagatattttgttggagatctcgtctttgaagtttctaagatgacttctccctacattaaatgtacagtctctttcttcatagcatttggacatttggctgatgataccatcaattttgaggcttttccccacaagctggtgcagtttggag

SEQ ID NO: 124971 - DNA, 256 bp, Glycine max
gtgctcttccactcccgtaccgtctctgcctctctgcaatccacagttgaaaatgcctttcaagaggtacgttgagatcgggagggttgctcaaatcaactacggcaaggaatatggcaggctcgtcgtcatcgtcgacgtcattgaccagaacagagtacttgtcgatgcccctgatatggtgaggtcccaagtcacattcaaaaggctttcccttaccgacatcaagattgacatcatgagggtcccaagaaga

SEQ ID NO: 124972 - DNA, 256 bp, Glycine max
tttcttcttatctagcactcaagcccaacagtcctacttgcaaggcttcagccataatattctagagacctccttccatagcgaattcgaggagataaacagggttttgtttggagaggaagaggagcagaggcagcaagagggagtgatcgtggaactctcaaaggaacaaattcggcaactgagcagacgtgccaaatctagttcaaggaaaaccatttcctccgaagatgaaccattcaacttgagaagccgc

SEQ ID NO: 124973 - DNA, 255 bp, Glycine max
caagggtccaactctgcttgatgcacttgaccaggttagtgagcccaagaggccctctgacaagcccctcaggcttccccttcaggatgtgtacaagattggaggtattggaactgtgccagtgggacgtgttgagaccggtgtcttgaagcctggaatggtggtgacttttgcaccaactggactgacaactgaagtcaagtctgtggagatgcaccatgaatctcttacagaggcacatcctggtgacaatgt

SEQ ID NO: 124974 - DNA, 252 bp, Glycine max
tgtctttatcctgtaagtgaattaccttcagaagctgtcgttgtaaatgttacatgtggtagtggacgtggtggtttacctaccactgcttggattagttctgcagttaacaatcgctcctcagatatcaacaaaaagattcgcacagcacttgggaaaggtaagaaaattgtttttcttactagagttgatccttttccagtagctctactggctgttctttttggcgttaagaatgaaattctggttcca

SEQ ID NO: 124975 - DNA, 254 bp, Glycine max
gaagaaaaacccaaaaagattgatgccagattgagacaaagaatagatcctcaatacaatgaggttcaggctcagatggaaacaaatttgtttaaattgtctcttgatgatgttgaaactcctaaaggttccatgttggatcttaaaatttctcagtctaaaattgcacttcccaagaacacagttggaggaactattctgcgtagtgatctattggcaaattttctgacagagggcaattttagagcagtgtt

SEQ ID NO: 124976 - DNA, 254 bp, Glycine max
cggctcgagcgattgctagaatggaatttcgatgctcagtcatctcttttaccattctcttctatcttgctcttgcaggagagagccatgtccatgcatcgctacctgaggaagattattgggaagctgtttggccaaacactcccattcccactgcactgcgagagcttctaaagcctctccctgcaggtgttgaaatcgatgaactccctaagcaaattgatgatacacagtacccaaaaacattttctata

SEQ ID NO: 124977 - DNA, 257 bp, Glycine max
cagcgaccaagcaggcccgaacaacaagaaccacgtggaagaggatgtcagactagaaatggggttgaggaaaatatttgcaccatgaagcttcacgagaacattgctcgcccttcacgtgctgacttctacaacccaaaagctggtcgcattagcaccctcaacagtctcaccctcccagccctccgccaattcggactcagtgcccaatatgttgtcctctacaggaatggaatttactctccacatggaacttg

SEQ ID NO: 124978 - DNA, 251 bp, Glycine max
cgagcggttcaatatcctagtacaccgtattaaagaatttaagatatactatgatgaaagcgcggttcccattactgttgctgggagttgttttcctggcatcagtttctgtctcatttggcattgcgtattgggaaaagcagaaccccagtcacaacaagtgcctccgaagttgcaatagcgagaaagactcctacaggaaccaagcatgccacgctcgttgcaacctccttaaggtggaggaaaagaag

SEQ ID NO: 124979 - DNA, 252 bp, Glycine max
gattggatcacacttatacaaaattctccaattagtaacttgttgagagttgctgcttggaagaaaggctgtttaatggtcaagattgtgatgtctgggaatgcagcagtcaaaaggagtgattgggcctcattggtacaagtgtttttaacaaacagcaacagtacagagcattttgatgcatgtaagtggacaaaatcagaaccacattcctgggcattgatcttcccaatagaggtatgtggtctaata

SEQ ID NO: 124980 - DNA, 255 bp, Glycine max
gaaaagctttctagctggtcataatatcaccattactgatggtattgacaagactagtgcaactttgcaatttagaaagttagcagattgtgattttctcaagagaaactttaagcagatgtctaatgttttgtgggtagctcctgaggacaaggcgagtttatggtcacaacttcattatgtctcgtgtaataatctggaaatgcaagaagcttatcttgtcaatctcgtaaatgtgttacgagaatgtatttg

SEQ ID NO: 124981 - DNA, 252 bp, Glycine max
ttcgagccgttctgcgtagtgatctattggcaaattttctgacagagggcaattttagagcaagtgttgatttgcagcgcactcatcgtattaaaggaatgattaaaatggtggccacagttggtattcctgagaatacaggtatatcattggcctgtgctatgaatagttcttttagggggcgtgccagttctgatatttacaccatctgctctcaagactgtgaattatggaatcctgcttgcaacaagc

SEQ ID NO: 124982 - DNA, 250 bp, Glycine max; identical to SEQ ID NO: 113262

SEQ ID NO: 124983 - DNA, 251 bp, Glycine max
atggccttgctcggttatcactggtcaacgacggtggcgttatagaacaaacatttttgtggggaaggtattctgtggaaatgtctgctgtagtttacaaggattgggattttacagatcaagcattgcctgctgatcttataaaaagaggaatggcaattgaggatccatcgtgccctcatggcattcgccttgtgatagaggactacccttatgctgttgatggacttgagatatgggatgcttcaaga

SEQ ID NO: 124984 - DNA, 251 bp, Glycine max
gttgttcaaggatggcaatttgtaagaaagatgtttggagagttgaatgtggaatcccttctggatttccgctcacagttatttgcaatagcatttttaatgagatgctcattagatatagctatgaaaaattactgcgccaggctaaagctccaagtatgtttttacaatccttcaaaaattttgtttctttgtgtgtgtatggtgatgataacttaattagtgttcatgaatacgtcaagcctacttta

SEQ ID NO: 124985 - DNA, 230 bp, Glycine max
attaacacttccgtagttcaatatctggaagcccttcacactctctcgtgcttccctttgcttgctactcttgtcgaatgcatgctttgctattagctgccagtcaagctcatcgagtgcgaactcaataaccttaacgcgttcgaaactgaccaccgcgttgagtccgcagtggtttgagtcgtacatggagctctcgacaccctgagctgctatgtgccggtgtcact

SEQ ID NO: 124986 - DNA, 254 bp, Glycine max
gcaaatgtttgcttcgttaattttctctggagacgacaggctcactgagaaaacaatttttacttgcagagatttggacatcttggttgtttattatacaatagcaactcaatttagaaaatttctaccgcattacattaggtggcatctgtataccttgttgatctacattctcccatcttttctcactgctgaaattaaatataagcggaatctgagtaatattcatatttccggcttattttacgacggca

SEQ ID NO: 124987 - DNA, 252 bp, Glycine max
ctcgagccgtcaaaattgatggtacagtttggagagattcaggaaaaagttgtattgaaatagttcacaagaggaatttcttacagcttggtcaacccaggtgcgtcctgcaacaactctgttggctgatgggtgtccatatttgtatgctatggtgcatgatagttcagtgtctacaataccaggtgattttgtcattggtgttaagttgacaaccataaacaatatgtgtgcatatgggctcaacctggt

SEQ ID NO: 124988 - DNA, 256 bp, Glycine max
gaagaaacgaagatagaatgtgcacagccctaaagacgaattaccagcttagcgaggagatcggtcgcggtcgtttcggcaccatcttccgctgcttccacccactctccaacgtaccctacgcctgcaaactcatcgacaaatccctcctccatgactccaccgaccgcgactgcctccagaacgaacccaaattcatgaccctcctttcacctcacccaaacatccttcaaatcttccatgttttcgaggacga

SEQ ID NO: 124989 - DNA, 249 bp, Glycine max
caagagatgatttacagagatatgccacatacatgtgattctgctctctgaaaatcatctcttgtcaacaggccatttacttctccaaaactgaaaagggccaatgaaaatggcagtaactagttccgctgctctgcaaagtttctgaagtcctcaaatgtgattcgtgcatccttaaggcgtggatcatcattcagtccatcaaccctttcaagcaacctgcctagatgactcatgtcggcagagcaa

SEQ ID NO: 124990 - DNA, 252 bp, Glycine max
tctctccattgtctttgaacactcatcaccatggccaagcttgttctttccctttgtttccttcttttcagtggctgcttcgctctgagagagcaggcacagcaaaatgagtgccagatccaaaagctgaatgccctcaaaccggataaccgtatagagtcggaaggtgggttcattgagacctggaaccctaacaacaagccattccagtgtgccggtgttgccctctctcgctgcacccttaacgcaatg

SEQ ID NO: 124991 - DNA, 255 bp, Glycine max
caatttgttagtggaaaaaccttcaaatatgatataattggtgctggttcacattcttcagatgattttcctgaaaaggaagatcaagaaaaacccaaaaagattgatgccagattgagacaaagaatagatcctcaatacaatgaggttcaggctcagatggaaacaaatttgtttaaattgtctcttgatgatgttgaaactcctaaaggttccatgttggatcttaaaatttctcagtctaaattgcacttc

SEQ ID NO: 124992 - DNA, 245 bp, Glycine max
tctctccattgtctttgaacactcatcaccatggccaagcttgttctttccctttgtttccttcttttcagtggctgcttcgctctgagagagcaggcacagcaaaatgagtgccagatccaaaagctgaatgccctcaaaccggataaccgtatagagtcggaaggtgggttcattgagacctggaaccctaacaacaagccattccagtgtgccggtgttgcctctctcgctgcaccctaacg

SEQ ID NO: 124993 - DNA, 123 bp, Glycine max
gtgcggtttcctttgttggtgttgctgggaactgttttcctggcatcagtttgtgtctcattataggtgacatatgaggagaataaccctttctacttgagaagctctaacagcttccaaact

SEQ ID NO: 124994 - DNA, 239 bp, Glycine max
  unsure (1)..(239): unsure at all n locations
ggctcgagatgcaaggaatggtatgaagagtagtagtgctagtagtagtgcnattggtccaactagaattatcattagttgccctgagaagggtgaggttgttgggaagcttgttttactacctggaagctttcaagagctagttgagattggagccaagaaatttggtttctatcctaataaggttgtatgcaaagatggaggtgaaattgaagatctggaggtgattagggaggtga

SEQ ID NO: 124995 - DNA, 284 bp, Glycine max
tctccattggtccttaaacactcatcagtcatcaccatggccaagctagttttttccctttgttttctgcttttcagtggctgctgcttcgctttcagttccagagagcagcctcagcaaaacgagtgccagatccaaaaactcaatgccctcaaaccggataaccgtatagagtcagaaggagggctcattgagacatggaaccctaacaacaagccattccagtgtgccggtgttgccctctctcgctgcaccctcaaccgcaacgcccttcgtagaccttc

SEQ ID NO: 124996 - DNA, 278 bp, Glycine max
agctcatacatagtagtgttggtgggttgcaaagatgcttgggggtcttctccataggggccataagataaaagggacagtggtgttgatgcgcaagaatgtgttggacgtgaatagcgtaaccagcgttgggggaattattggtcaagtctcgacttagttggctcaacactcgatactcttactgccttcttgggccgatccgtgtctctccagcttattagtgctaccaaagctgatgccaacggaaaagggaaacttggaaaggctaccttttt

SEQ ID NO: 124997 - DNA, 270 bp, Glycine max
agtccctatggagtttaatcttgtggttcgtcagaagtttttaaattttgtgaggttcattatgaagaaaagggacaagcttagttgtcaagttggaatcaacccatactccatggaatggactggtttggccaatagattactgagtaaggcaacgatattctgtgttgcgattatgctagttttgatggtttgattaccaagcaagttatgagcaaaatggcagaaatgatccgtactccttgtggtggtgatgcaaattgatgcgtg

SEQ ID NO: 124998 - DNA, 279 bp, Glycine max
ctctctaagctgaaatctgaagctaacttaagggccatgagatggccaatggcaacactagtcatcgcttcaagctcttgcttttccttctaactctgcactcttcattcgctgagattttcttcgaagagagattcgaagatggatggagagccgttgggtgctatccgattggaaaaggagtgaaggaaaagcgggtaccttcaagcacacagcaggaaaatggtctggggatcctgatgacaaaggtcttcagacatataatgacgccaagcattt

SEQ ID NO: 124999 - DNA, 279 bp, Glycine max
gtctctccgcagcagccacacttcttcgccgtttcagctgaagagccatccgcaggtaagcaatggttaagcataataatgttatccccaatgggcacttccggaaacactggcaaaactatgtgaagacttggtttaatcaaccagcccgaaagaccagaagacggttggctcggcagaagaaggctgtcaagattttccccaggcctactgctggatctctgaggcctattgttcatggccagactctgaaatacaacatgacagtcagagccggga

SEQ ID NO: 125000 - DNA, 279 bp, Glycine max
ctctcgagccgattcggctcgacggcatgttgaagttccagtttcattggtgttgtcttgatttactttggcagttcttaagagttatgaagcctttgtcctcaggggcgttggtcatggcagcaagttatcctggtctgtcatcacaatctttcccgttgggatgggttgttttttactaccaaagccctagctttttaagcttcattttttttttttttgaacttgtcattgtaaccttcgataccatgtaatgatactgagatatgcccttaaaaa

SEQ ID NO: 125001 - DNA, 201 bp, Glycine max
aattcagctcgagtgcaatttcaataaaccgcgatcacaggttgccgcaccttaaaaccggaaacaaaagcaatcgttacttgatttcaagaatctatcaatttcttcctacttctttgtgtacgatttcttaagggacagaaaatcactctctgtgctggcccagacttcgtgaatcattttcttttccactcttagttt

SEQ ID NO: 125002 - DNA, 276 bp, Glycine max
gtcccatagcagcgatgggaatcgatcttaaggctgggggtaagagcaaaaagaccaaaagaacagcaccaaaatccaatgacatctacctcaaattacttgtcaagctttatcggttccttgttcgaaggactggcagcaatttcaatgtgttatactcaagcgcttgttcatgagcaaggttaacaagcctccaatttctttgtcaaggttaattaagtatacaaaggggcaggaggataaaattgctgtaatagtggggactgtaactgatga

SEQ ID NO: 125003 - DNA, 231 bp, Glycine max
taataatttaagctactatgatgagagcacggttcccattactgttgctgggacttgttttcctggcttcagtttctgtctcatttggcattgcatactgggaaaaagagaaccccaaacacaacaagtgtctccagagttgcaataggcgagagactcgtacaggaaccaagcatgccaagctcgttgcaacctccttaaggtggagaaagaagaatgtgaagaaggtga

SEQ ID NO: 125004 - DNA, 272 bp, Glycine max
gaaagatgtttggagagttgaatgtggaatcccttctggatttccgctcacagttatttgcaatagcatttttaatgcgatgctcattagatatagctatgaaaaattactgcgccaggctaaagctccaagtatgtttttacaatcttcaaaaattttgtttctttgtgtgtgtatggtgatgataacttaattagtgttcatgaatatgtcaagccttactttagtggttctaaattgaaaagctttctagctggtcataatatcaccat

SEQ ID NO: 125005 - DNA, 263 bp, Glycine max
ggcatggtttgattgtgttgatgaggaggattcctttgaggaagtttctttgagtgcagcactcaatggtgttgagggtttggactatatggaaagaattcctcttgccacatctgagggttttcctcatgtgctttcacgcaaaatggtgaaaaaggcaaaaggcgatttgtttctggggatggtgaagagatgacattgattccgggaaccagtgttgaagaggcttacaacaagctaacagttgaacttgagcacagtgt

SEQ ID NO: 125006 - DNA, 274 bp, Glycine max
ttagttcaatatcctagtataccttaataaataatttaagatagtatgatgagagcacggttcccattactgttgctgggacttgttttcctggcttcagtttctgtctcatttggcattgcttactgggaaaaagagaaccccaaacacaacaagtgtctccagagttgcaatagcgagagagactcgtacaggaaccaagcatgccacgctcgttgcaacctccttaaggtggagaaagaagaatgtgaagaaggtgaaattccacgaccac

SEQ ID NO: 125007 - DNA, 288 bp, Glycine max
ttcggctcgagagatttggaattttgataaaccgcgatcacaggttgccgcaccttaaaaccggaaacaaaagcaatcgttacttgatttcaagaatttctcaatttctttctacttctttgtgtacgatttcttaagggcaagaaaatcactctctgtgctggccacagacttcgtgaatcattttcttttccacttttagtccatcaactgcacattttcctatttgatataggacttcgtgtcagatttaaacttcttctgtttcttactcagatctctgttcaa

SEQ ID NO: 125008 - DNA, 278 bp, Glycine max
ttagttcaatatcctagtataccttaataaataatttaagatactatgatgagagcacggttcccattactgttgctgggacttgttttcctggcttcagtttctgtctcatttggcattgcttactgggaaaaagagaaccccaaaacaacaagtgtctccagagttgcaatagcgagagagactcgtacaggaaccaagcatgccacgctcgttgcaacctccttaaggtggagaaagaagaatgtgaagaaggtgaaattccacgaccacgacca

SEQ ID NO: 125009 - DNA, 271 bp, Glycine max
cggttcaatatcctagtacaccgtattaaagcatttaagatatactatgatgagagcgcggttcccattactgttgctgggagttgttttcctggcatcagtttctgtctcatttggcattgcgtattgggaaaagcagaaccccagtcaaacaagtgcctccgaagttgcaatagcgagacaccttcctacaggaaccaagcatgccacgctcgttgcaacctccttaaggtggaggaagaagaagaatgcgaagaaggtcaaattccac

SEQ ID NO: 125010 - DNA, 280 bp, Glycine max
cgtctgcttcgtgttgtagctagctcctcgaaaatgctggcacgcctcgccgcgagtcgcttcaacgagatccgtcagattttccgtcagccttctagggctttctcgaccgctctgaactaccaccttgacacaccggacaacaaccctaacttccatgggaattcaccgaggccaatcaagcaaaggttaaggagattttgtctcactatccatccaactataagcaatctgctacaattcctcttttggatcttgcccagcagcagcatggcggctg

SEQ ID NO: 125011 - DNA, 277 bp, Glycine max
gggcaaagagcggttctgaagtttgctcagtacactggtgctcatgctattgctggaaggcacactcctggtaccttcaccaatcagcttcaaacttccttcagcgagcctcgtctccttattcttaccgatccaagaacagatcaccgcctattaaggaagctgctcttgggaatattcccaccattgctttctgtgacaccgattcacctatgaggtacgtggacattggaattgctgccaacaacaagggcaaacacagcattggttgtctctt

SEQ ID NO: 125012 - DNA, 277 bp, Glycine max
tagccaacagagttgttgcaggacgcacctgagttgactgatgggtgtccatatttgtatgcaatggtgcatgatagttcagtgtctacaataccaggtgattttgtcattggtgtcaagttgacaaccataaacaatatgtgtgcatatgggctcaatcctggtatttcaggttctcgtcttttgggcaccattcctcagtccatttcacagcaaactgtttggaatcaaatggcaacagtgagaacaccattgaattttgattctagcaagcaga

SEQ ID NO: 125013 - DNA, 270 bp, Glycine max
gtgagaacaccattgaattttgattctagcaagcagagcttttgtcaattctctattgatcttcttggtggaggaattttagtggacaaaactggagattggatcacacttatacaaaattctccaattagtaacttgttgagagtgctgcttggaagaaaggctgtctaatggttaagattgtgatgtctgggaatgcagcagtcaaaaggagtgattgggcctcattggtacaagtgtttttaacaaacagcaacagtacagagcatt

SEQ ID NO: 125014 - DNA, 270 bp, Glycine max
gttaattattaacacttccttagttcaatatggggacgcccttcactctctctctttcttccctttgcttgctactcttgtcgagtgcatgctttgctattagctccagcaagctcaacgagtgccaactcaacaacctcaacgcctggaacccgaccaccgcgttgagtccgaaggtggtttgattcaaacatggatgtctcaacacccagagctgaaatgcgccggtgtcactgtttccaaactcactctcaaccgctaatggcctcc

SEQ ID NO: 125015 - DNA, 270 bp, Glycine max
tggcatttccatcagtaagaaattgttggatcaaacatctgatgacttccacaaggtgttgcacactgctattcgctgcatcaatgaccataagaagtactatgagaaggttttgcgcaatgcagtcaagacgtttggaactgacgaggatggactaagccgcgtgattgttacaagggctgagaaggatctgaaggacatcaaagaggactactacaagagcaacagtgttcaccttgaggatgaagtgtccaaggaaacttctgggga

SEQ ID NO: 125016 - DNA, 273 bp, Glycine max
cgctctagagcattgggtggagtggcagaagggtgccacaaaaacacgtgtggcctcatgtccactaatcccatcacccaacaaaccggtttaggtgaactaggagaagacgttcttgcaatccacgccacacaagggtcgacccacaacttggcccattggtcacagtcccacaattcctcttttcttgtgcaccttccttccttgttcaaaagggtcttcctagaaacactcaaggtgtggctgggctaggccatgcaccaatttctcttc

SEQ ID NO: 125017 - DNA, 275 bp, Glycine max
gcactcttcatcaagctccgctccaacacaggggacaatgagggccatccttcacgtgcagggagggcaatgcgggaaccagatcggttccaagttctgggaagtggtgtgcgacgagcacggcatagatccgacggggaagtacgcggaaactcagatctgcaactcgagcgcgtgaacgtctactacaatgaagcctcgtgcgggcgcttcgtgccacgcgcggtgctgatggacctggagcccggaaccatggacagcgtgcggaccgggcg

SEQ ID NO: 125018 - DNA, 274 bp, Glycine max
taccgattgctagaatggaatttcgctgctcagtcatctcttttaccattactcttctctcttgctcttgcaggagagagccatgtccatgcatcgctacctgaggaagattattgggaagctgtttggccaaacactcccattccactgcactgcgagagcttctaaagcctctccctgccactgttgaaatcgatgaactccctaagcaaattgatgatacacagtacccaaaaacattcttctataaagaagaccttcatccaggcaaaac

SEQ ID NO: 125019 - DNA, 265 bp, Glycine max
cgattactgtatctaatatctcctgcaggggcccatcatgtagttcaaatacccttaatggcacaagaggaaattctgtcttctagtgcaagtgctttcagacctgcaatggtgcgcagaaatagcacgcctcaagctactgcaatgcagtgggagctatagaaattatcattgatagtttcgcaagtactgcattgccacatcagttggtgcaatgcttttggttgatacttatcataccaatcctgcaaatgccgttcgtagt

SEQ ID NO: 125020 - DNA, 186 bp, Glycine max
taagatttgaaattttgataaaccacgatcacacgttgccgcaccttaaaaccggaaacaaaagcaatcgttacttgatttcacgaatctctcaatttcttcctacttctttgtgtacaattacttaagggaaagaaaatcactctctgtgctggccacagacttcgtgaatcattttcttttcca

SEQ ID NO: 125021 - DNA, 274 bp, Glycine max
ggaagctggtctagagggtttctacggccagtcaaaacctgagtctaaccctaacttcaatgtaggaaccgatttcattgcaaacaaccaaatcccagggattgatttcgcaacagtgcattcctaccccgaccaatggatataagttcaggttatgaggaccaaatctcattcttaggccggtggctgaatgagcacatccaagatgcacagaacacccttcacaagccacttctatttgcggagtttggtatttccacaaagagttatggtg

SEQ ID NO: 125022 - DNA, 257 bp, Glycine max
gggacgccattcttcactctctctcccacttccctttgcttgctactcttgtcgagtgcatgctttgctattacctccagcaagttcaacgagtgccaactcaacaacctcaacgcgtaggaacccgaccaccgcgttgagtcgacggtggtctcattgaaacatggaactctcaagaccctgagctgcaatgcgccggtgtcactgtttccaaacgcaccctcaccacccacggcctccacttgccatcttactca

SEQ ID NO: 125023 - DNA, 272 bp, Glycine max
ctctccatttgtccttgaatataatactcagcatggctaagcttgttctttccctttgttttctgcttttcagtggctgctgcttcgctttcagtttcagagagcagccacagcaaaacgagtgccagatccaacgcctcaatccctcaaaccggataaccgtatagagtcagaaggtggcttcattgagacatggaaccctaacaacaagccattccagtgtgccggtgttgccctctctcgctgcaccctcaaccgcaacgcccttcgca

SEQ ID NO: 125024 - DNA, 271 bp, Glycine max
atttgcaagcgaaatgcttgctggtgtaaatccaaacttgattcgttgtcttaaggatttccctccacgaagcaagctagatagccacgtctatggtgatcatactagtaaaataaccaaagaacacctagagcccaacttagaagggctcactgtagatgaggcaattcaaaacaagagattgttcctactagatcatcatgacccaatcatgccatatttgaggcgaataaatgcaacctccacaaaggcttatgctaccagaaccatc

SEQ ID NO: 125025 - DNA, 269 bp, Glycine max
gtctctctctctctctctctctctgcggaaaccggaatatctcagttctctgatcagatccatccgacgtcgtttcagtgataatggctccgttcagcggcgatgagacggcaccgtttttcggcttccttggagctgcagctgccctcgtcttctcctgtatgggagctgcctatggcacagcgaagagtggcgttggcgtggcttcgatgggtgtgatgagaccagagctggtgatgaagtctattgtccctgttgttatggctgga

SEQ ID NO: 125026 - DNA, 271 bp, Glycine max
gagtgaagcagcagagggaggagcggcattaaaaatgcagatcttcgtgaaaaccctaacggagaagaccataaccctcgaggtcgaaagcagcgacaccattgacaataccaaggcctaagattcaagaccaggaaggcatcctccggatcagcagcgtttgattttcgccggaaagcaacttgaagatggaaggaccttggccgattacaacatccagaaggaatcaacccttcaccttgtcctcaggcttcgtggtggcatcatcgag

SEQ ID NO: 125027 - DNA, 269 bp, Glycine max
agaccacaacacccggagacggaacctcagcaacccggtgagaaggaggaagacgacgatgagcaaccacgtccaatcccattcccacgcccacaacctcgtcaagaagaagagcacgagcagagagaggaacaggaatggctcgcaaggaggaaaaacgcggagaaaagggaagtgaagaggaagatgaggatgaggatgcaggaacaagcatgaacgtcaattcccattcccacgcccacctcatcagaaggaagagcgaaagcaag

SEQ ID NO: 125028 - DNA, 265 bp, Glycine max
taattattaacacttccttagttcaatatggggaagcccttcactctctctctttcttccctttgcttgctactcttgtcgcgtgcatgctttgctattagctccagcaagctcaacgagtgccaactcaacaacgtcacgcgttggaacccgaccaccgcgttgagtccgaaggtggtttgattcaaacatggaactctcaacaccctgagctgaaatgcgccggtgtcactgtttccaaactcaccctcaaccgcaatggcct

SEQ ID NO: 125029 - DNA, 262 bp, Glycine max
attcactacaactcacatgcaacgaagatagcactggtgatcgatggcagagggcatcttcaaatatcatgtccacacatgtcatcaaggtcgtcacactcgaagcatgataagagtagcccttcataccatagaatcattccgatttgaagcctggaatggtgtttgttgtccctcccggtcatcccttcgtcaccatagcttccaataaagagaatctcctcatgatttgcttcgaggttaacgctcgagacaacaagaa

SEQ ID NO: 125030 - DNA, 267 bp, Glycine max
gatattttgttggagatctcgtctttgaagtttctaagatgacttctccctacattaaatgtacagtctctttcttcatagcatttggaaatttggctgatgacaccatcaattttgaggcttttccccacaagctggtgcagtttggagagattcaggaaaaagttgtattgaaattttcacaagaggaatttcttacagcttggtcaactcaggtgcgtcctgcaacaactctgttggctgatgggcgcccatatttgtatgcta

SEQ ID NO: 125031 - DNA, 178 bp, Glycine max
gttcaatatcctagtataccttaataaataatttaagatactatgatgagagcacggttcccattactgttgctgggacttgttttcctggctacagtttctgtctcatttggcattgcttactgggataaagagaacgcaaacacaacaagtgtctccagagttgcaatagcgagag

SEQ ID NO: 125032 - DNA, 268 bp, Glycine max
aggaattttagtggacaaaactggagattggatcacacttatacaaaattctccaattagtaacttgttgagagttgctgcttggaagaaaggctgtttaatggttaagattgtgatgtctgggaatgcagcagtcaaaagagtgattgggcctcattggtacaagtgtttttaacaaacagcaacagtacagagcatttcgatgcatgtaagtggacaaaatcggaaccacattcctgggaattgatcttcccaatagaggtatgtg

SEQ ID NO: 125033 - DNA, 239 bp, Glycine max
gacaaggaaaaccctaagagatgaagagaactcctatcttgttccctctcttctttcttctttgtgccttcacctcatatctaccttcagccaccgctgatgatgatcatgtgtacgacactgacggcgataagcttcaatacggtgtcaattatttcgtgttgccagtgataagaggaaatggcggtggaataccagtagcaaaagcaggaaacgaaacttgccctctgactgtggtg

SEQ ID NO: 125034 - DNA, 265 bp, Glycine max
ttcaaaccttgctctatactacacagtacacacactagaagaataatggcttccatcctccactactttttagccctctctgtttcttgctcttttcttttcttcttatccgactcagtcacccctacaaaaccaataaacttgttgttctacccgttcaaaatgatggctccacagggctccactcctccccacctccaaaaaagaacccctctaatgcaagtaccagtcctggtggacctcaatggaaatcacttgtgggtta

SEQ ID NO: 125035 - DNA, 264 bp, Glycine max
cttaaacactcatcagtcatcaccatggccaagctagttttttcactttgttttctgcttttcagtggctgctgcttcgctttcagttccagagagcagcctcagaaaaacgagtgccagatccaaaaactcaatgccccaaaccggataaccgtatagagtcagaaggagggctcattgagacatgcccccacccaacaagccattccagtgtgccggtgttgccctctctcgctgcaccctcaaccgcaacgcccttcgtag

SEQ ID NO: 125036 - DNA, 265 bp, Glycine max
atggaaacaaatttgtttaaattgtctcttgatgatgttgaaactcctaaaggttccatgttggatcttaaaatttctcagtctaaaattgcacttcccaagaacacagttggaggaactattctgcgtagtgatctattggcaaattttctgacagagggcaattttagagcaagtgttgatttgcagcgcactcatcgtattaaaggaatgattaaaatggtggccacagttggtattcctgagaatacaggtatatcattgg

SEQ ID NO: 125037 - DNA, 260 bp, Glycine max
actagttcaatatcctagtataccttaataaataatttaagatactatgatgagagcacggttcccattactgttgctgggacttgttttcctggcttcagtttctgtctcatttggcattgcttactgggaaaaaggaaccccaaacacaacaagtgtctccagagttgcaatagcgagagagactcgtacaggaaccaagcatgccacgctcgttgcaacctccttaaggtggagaaagaagaatgtgaagaaggtga

SEQ ID NO: 125038 - DNA, 263 bp, Glycine max
ggcagaggaagaaggtggcagcgtgctcagtggcttcagcaaacacttcttggcacaatccttcaacaccaacgaggacatagctgagaaacttcagtctccagacgacgaaaggaagcagatcgtgacagtggaagaggtctcagcgttatcagccccaagtggcaagaacaacaagatgaagatgaagatgaagacgaagatgatgaagatgaacaaattccctctcaccctcctcgccgaccaagccatggaaagcgtga

SEQ ID NO: 125039 - DNA, 258 bp, Glycine max
gtggcgttctgagtgggcaaattaaacttcatggcatttgagtttccttattgacaatcccaaacagtctacagtttttgatattctcttgggaatttctcaagattttgagattgctggtaatactcttatgccactttttctgttccacaggctactgccagatcttctgaaaatgcggaatcctctgcatgatctggaatttgtgctttcttttgcttgttcgtttgtttaattcaatacaggaaattaggcatg

SEQ ID NO: 125040 - DNA, 259 bp, Glycine max
taagatttgaaattttgataaaccgcgatcacaggttgccgcaccttaaaccggaaacaaaagcaatcgttacttgatttcaagaatctctcaatttcttcctacttctttgtgtacgatttcttaagggccagaaatcactctctgtgctggccacagacttcgtgaatcattttcttttccactcttagtccatctactcacactctcctatttgatataggacttcgtgtcagatttagacttcttctgcttcttt

SEQ ID NO: 125041 - DNA, 265 bp, Glycine max
cgtacttattaacacttccttagttcaatatggggaagcccttcactctctctctttcttccctttgcttgctactcttgtcgagtgcatgctttgctattagctccagcaagctcaacgagtgccaactcaacaacctcaacgcgttggaacccgaccaccgcgttgagtccgaaggtggtttgattcaaacatggaactctcaacaccctgagctgaaatgcgccggtgtcactgtttccaaactcaccctcaaccgcaatgg

SEQ ID NO: 125042 - DNA, 263 bp, Glycine max
ctctcgagccgaatcggctcgagcgcgtactgtgtatcatcaatttgattagggagttcatccaggcaaaacaatgaaagtacagttcaccaagcgtccctatgcacaaccttatggtgtatatacatggttaacggatttaaagacacctctaaagaaggatatagttttgaagagatatgcatcaagaaagaagcgtttgagggagacgagaagttttgtgcaaaatccttgggaacagtaattggttttgccatttcaaa

SEQ ID NO: 125043 - DNA, 255 bp, Glycine max
caagttattatcaaataattaattaaattcctcgtggaatcttgttgaagccatgtctacagctggtcaggtcatcaagtgcagagctgcggtggcatgggaagcagggcaaccactatcgatagaaaccatagaagtgcaccaccccagcaaggtgaagtgcgtttgaagatgctcttcaactccctttgccgtacagatgtttactggtgggatgctacgggctacactccgctgtttcctcgtatcttaggc

SEQ ID NO: 125044 - DNA, 251 bp, Glycine max
ttcattattaacacttccttagttcaatatggggaagcccttcactctctctctttcttccgtttgcttgctactcctgtcgagtgcatgctttgctattagctccagcaagctcaacgagtgcgaactcaacaactcaacgcgttggaacccgaccaccgcgttgagtccgacggtggtctgattcaaacatggaactctcaacaccctgagctgaaatgcggcggtgtcactgtttccaaactaacctc

SEQ ID NO: 125045 - DNA, 204 bp, Glycine max
gtacaagtacttccttacaatccaaaccaacaacaactatggccagttatcaaaagcactacgatgatcagggtcgcaaggttgacgagtatggcaacgttgagaaggcaaccgacgaatacggcaaccctgttcatgctggtagtgtcacctatgtagccaccagaactgctgctggtggttacagtgctgccattaataagc

SEQ ID NO: 125046 - DNA, 262 bp, Glycine max
gaggaagatgaggatgaggatgaggaacaagatgaacgtcaattcccattcccacgcacacctcatcagaaggaagagcgaaagcaagaggaagatgaggatgaggagcagcagcgagagagcgaagaaagtgaagttctgagttacgaagacataagaataagaacccttttctcttcggctctaacaggttcgaaactctcttcaaaaaccaatatggtcgcattcgcgtcctccagaggttcaaccaacgctccccaca

SEQ ID NO: 125047 - DNA, 255 bp, Glycine max
gttcaatatcctagtataccttaataaataatttaagatactatgatgagagcacggttcccattactgttgctgggacttgttttcctggcttcagtttctgtctcatttggcattgcttactgggaaaaagaaaccccaaacacaacaagtgtctccagagttgcaatagcgagagagactcgtacaggaaccaagcatgccacgctcgttgcaacctccttaaggtggagtcagtagaatgtgaagaaggtg

SEQ ID NO: 125048 - DNA, 259 bp, Glycine max
tggaaacaaatttgtttaaattgtctcttgatgatgttgaaactcctaaaggttccatgttggatctgaaaatttctcaatctaaaattgcacttcccaagaacacagttggaggaaccattctgcgtagtgatctattggcaaattttttgacagagggcaattttagagcaagtgttgatttgcagcgcactcatcgtattagaggaatgattaaaatggtggccacagttggtattcctgagaatacaggtatatc

SEQ ID NO: 125049 - DNA, 249 bp, Glycine max
tgtgagcgagcgagcgaggtagggttttcgatgttcccccgtctttgaattcagttcgcgacgatggggtccatccccgatccaggcgagttgagcgagttgactcagccgagcttcgacgagttccagcgccaagttccctcatgaccagctgcagcctcctctggaaggagctctccgaccacttctcctccctcgagcaagacctgcaccacaaatccgaagccctcaaacgcaagattcgcaccc

SEQ ID NO: 125050 - DNA, 260 bp, Glycine max
aactcattttcgaactacatttcttccaccaactcataaaatactcatatctgttcccaaaagcttgtttgtgagaatggcttcgggtgaaaagaaattcccacctcaagaacaacaaacacagcctgggaagagcatgctatgaatccagtaccccaattcactagccctgagtacaagccttcaaataaacttcaaggaaagatagcattagtgactgggggtgactctgggattggacgagcggtgtgtaacttgtt

SEQ ID NO: 125051 - DNA, 261 bp, Glycine max
attttgtgaggttcattatgaagaaaagggacaaacttagttgtcaagttggaatcaacccatactccatggaatggactggtttggccaatagattactgagtaagggcaatgatattctgtgttgcgattatgctagttttgatggtttgattaccaagcaagttatgagcaagatggcagaaatgataaacagtctttgtggtggtgatgaaaaattgatgcgtgaaaggacgcacctgctgttggcttgttgttcaa

SEQ ID NO: 125052 - DNA, 289 bp, Glycine max
tcggatcgagttgtgtcttaaatccacaaaatccttttgtgttaaataggtggatggggaaactgactttcccccagggcacttcccgaaatgttaagagaatgcctctttctatagggggaggagctggtgcaaagaatgctattctcatgaatatgccaaatgctgttctttcaatgtggagatattttgttggagatctcgtctttgaagtttctaagatgacttctccctacattaaatgtacagtctctttcttcatagcatttggaaatttggctgatgacac

SEQ ID NO: 125053 - DNA, 279 bp, Glycine max
gttcaatatcctagtacaccgtattaaagaatttaagatatactatgatgagagcgcggttcccattactgttgctgggagttgttttcctggcatcagtttctgtctcatttggcattgcgtattgggaaaagcagaaccccagtcacaacaagtgcctccgaagttgcaatagcgagaaagactcctacaggaaccaagcatgccacgctcgttgcaacctccttaaggtggaggaagaagaagaatgcgaagaaggtcaaattccacgaccacgac

SEQ ID NO: 125054 - DNA, 278 bp, Glycine max
cttaattattaacacttccttagttcaatatggggaagcccttcactctctctctttcttccctttgcttgctactcttgtcgagtgcatgctttgctattagctccagcaagctcaacgagtgccaactcaacaacctcaacgcgttggaacccgaccaccgcgttgagtccgaaggtggtttgattcaaacatggaactctcaacaccctgagctgaaatgcgccggtgtcactgtttccaaactcaccctcaaccgcaatggcctccacttgcca

SEQ ID NO: 125055 - DNA, 279 bp, Glycine max
aggaattttagtggacaaaactggagattggatcacacttatacaaaattctccaattagtaacttgttgagagttgctgcttggaagaaaggctgtttaatggttaagattgtgatgtctgggaatgcagcagtcaaaaggagtgattgggcctcattggtacaagtgtttttaacaaacagcaacagtacagagcattttgatgcatgtaagtggacaaaatcggaaccacattcctgggaattgatcttcccaatagaggtatgcggtcctaataa

SEQ ID NO: 125056 - DNA, 278 bp, Glycine max
agacaattaccttcagaagctgtcgttgtaaatgttacatgtggtagtggacgtggtggtttacccaccactgcttggattagttctgcagttaacaatcgctcctcagatatcaacaaaaggattcgcacagcacttgggagaggtaagaaaattgtttttcttactaagagttgaaccttttccagtagctttactggctgttctttttggcgttaagaatgaaattctgagttctaacgccactaaccctatgctgacgcgacttcttgagaact

SEQ ID NO: 125057 - DNA, 279 bp, Glycine max
  unsure (1)..(279): unsure at all n locations
tcaacatgcctgtaacctgacttctttgttgggtcatcaacagccaatgtgccancatctatcactgcagctccaggtttgatccaactgcccttgatcatcatcggctgtcctgctgctgatgacccaacaaagaagtcaggttacaggcttgttggacatgtagattttggggaagcatctaaagttgctggttggattactccagttcctggtggtgttagtccaatgacagtcacaatgttgctgaagaatactttggatggagccaagcgctac

SEQ ID NO: 125058 - DNA, 277 bp, Glycine max
aagcagagcttttgtcaattctctattgatcttcttggtggaggaattttagtggacaaaactggagattggatcacacttatacaaaattctccaattagtaacttgttgagagttgctgcttggaagaaaggctgtttaatggttaagattgtgatgtctgggaatgcagcagtcaaaaggagtgattgggcctcattggtacaagtgtttttaacaaacagcaacagtacagagcattttgatgcatgtaagtggacaaaatcggaaccacatt

SEQ ID NO: 125059 - DNA, 277 bp, Glycine max
attgaatgtcccaaggatgagaaacttcctcgtcgcaaaatttttgacaaacctaagacgcgctgcttcactattctccctatggagtttaatcttgtggttcgtcagaagtttttaaattttgtgaggttcattatgaagaaaagggacaagcttagttgtcaagttggaatcaacccatactccatggaatggactggtttggccaatagattactgagtaagggcaacgatattctgtgttgcgattatgctagttttgatggtttgattacca

SEQ ID NO: 125060 - DNA, 268 bp, Glycine max
tttactctccacattggaatctgaatgcaaacagtgtgatctatgtgactcgaggacaaggaaaggttagagttgtgaactgccaagggaatgcagtgttcgacggtgagcttaggaggggacaattgctggtggtaccacagaacttcgtggtggcggacaagccggagaacaaggattcgaatacatagtattcaagacacaccacaacgcagtcactagctacttgaaggatgtgtttagggcaattccctcagaggttcttgcc

SEQ ID NO: 125061 - DNA, 276 bp, Glycine max
cattggtccttaaacactcatcagtcatcaccatggccaagctagttttttccctttgttttctgcttttcagtggctgctgcttcgctttcagttccagagagcagcctcagcaaaacgagtgccagatccaaaaactcaatgccctcaaaccggataaccgtatagagtcagaaggagggctcattgagacatggaaccctaacaacaagccattccagtgtgccggtgttgcgctctctcgctgcaccctcaaccgcaacgcccttcgtagac

SEQ ID NO: 125062 - DNA, 276 bp, Glycine max
  unsure (1)..(276): unsure at all n locations
aatttcgatgctcagtcatctcttttaccattctcttctctcttgctcttgcaggagagagccatgtccatgcatcgctacctgaggaagattattggcaagctgtttggccaaacactcccattcccactgcactgcgagagcttctaaagcctctccctgcaggtgttgaaatcgatgaactccctaagcaaattgatgatacacagtacccaaaaacattcttctataaagaagaccttcatccaggcanaacaatgaaagtacaattcacca

SEQ ID NO: 125063 - DNA, 227 bp, Glycine max
gtagattgaaccagacatgaattcaaggtttcagcttttgagtaccactaccaatggtgattttgttcaaggaaaagatctcgcaatggttaaagttaatgtagcatgtgctgctgttggcttgacatcaagctatactccgactccattgttggaatctggtttgcaaaaagacagagggttaattgtggagtattttggaaggatgtcttacgttgctcataacg

SEQ ID NO: 125064 - DNA, 278 bp, Glycine max
gaaagttagcagattgtgattttctcaagagaaactttaagcagatgtctaatgttttgtgggtggctcctgaggacaaggcgagtttatggtcacaacttcattatgtttcgtgtaataatctggaaatgcaagaagcttatcttgtcaatctcgtaaatgtgttacgagaattgtatttgcacagtccagaggaagctcgccaattgagaaggaaagctctctctcgtattgaatggctgcaaaaagctgatgtgcctaccatagcacagattgaa

SEQ ID NO: 125065 - DNA, 278 bp, Glycine max
gcattgcttcgcctcacaacagcagctgcagcagcaatggctcccaaacgaggtggaaaggctccggctcttgccgctaagaagaagcctgagaaggtcacgaatccgttgttcgagaagcgtccgaagcagttcggaatcggaggggcgttgcctccgaagagagacttgactaggttcgtgaagtggccaaagaatgttcaaattcagaggaagaagaggattctgaagcagaggttgaaggttcccccagctttgaaccagtttaccaaaactct

SEQ ID NO: 125066 - DNA, 277 bp, Glycine max
taaacactcatcagtcatcaccatggccaagctagttttttccctttgttttctgcttttcagtggctgctgcttcgctttcagttccagagagcagcctcagcaaaacgagtgccagatccaaaaactcaatgccctcaaaccggataaccgtatagagtcagaaggagggctcattgagacatggaaccctaacaacaagccattccagtgtgccggtgttgccctctctcgctgcaccctcaaccgcaacgcccttcgtagaccttcctacacc

SEQ ID NO: 125067 - DNA, 276 bp, Glycine max
tcaatatcctagtacaccgtattaaagaatttaagatctactatgatgagagcgcggttcccattactgttgctgggagttgttttcctggcatcagtttctgtctcatttggcattgcgtattgggaaaagcagaaccccagtcacaacaagtgcctccgaagttgcaatagcgagaaagactcctacaggaaccaagcatgccacgctcgttgcaacctccttaaggtggaggaagaagaagaatgcgaagaaggtcaaattccacgaccacga

SEQ ID NO: 125068 - DNA, 273 bp, Glycine max
tatgaactctatacagggacagttctttttccaggttttactaacaatgacatgctatggctccacatggaattgaagggtatttttccgaaaaagatgcttcgtaagggagcatttattgaacaacattttgatcagtacctgaattttcttgctacagaggaggaccctgtgacgaaaaaggctataaagcggatgattgtaaacataaagccaaaagatattggaacaatcatcagtggctctccaggggaggatccaaagatgttaacc

SEQ ID NO: 125069 - DNA, 277 bp, Glycine max
gagggtgatttgatcgcagtgcctactggtgttgcatggtggatgtacaacaatgaagacactcctgttgttgccgtttctattattgacaccaacagcttggagaaccagctcgaccagatgcctaggagattctatcttgctgggaaccaagagcaagagtttctaaaatatcagcagcagcagcaaggaggttcccaaagccagaaaggaaagcaacaagaagaagaaaacgaaggaagcaacatattgagtggcttcgcccctgaattcttga

SEQ ID NO: 125070 - DNA, 276 bp, Glycine max
cttaattattaacacttccttagttcaatatggggaagcccttcgctctctctctttcttccctttgcttgctactcttgtcgagtgcatgctttgctattagctccagcaagctcaacgagtgccaactcaacaacctcaacgcgtaggaacccgaccaccgcgttgagtccgaaggtggtttgattcaaacatggaactctcaacaccctgagctgaaatgcgcaggtgtcactgtttccaaactcaccctcaactgcaatggcctccacttgc

SEQ ID NO: 125071 - DNA, 273 bp, Glycine max
attaacactttccttagttcaatatggggaagcccttcttcactctctctctttcttccctttgcttgctactcttgtcgagtgcatgctttgctattacctccagcaagttcaacgagtgccaactcaacaacctcaacgcgttggaacccgaccaccgcgttgagtccgaaggtggtcttattgaaacatggaactctcaacaccctgagctgcaatgcgccggtgtcactgtttccaaacgcaccctcaaccgcaacggcctccacttgc

SEQ ID NO: 125072 - DNA, 272 bp, Glycine max
aggagtctgacatgtgtgcgagtcaacgggcgagtaaacccgtaaggcgcaaggaagctgattggtgggatccccctgtgggttgcaccgccgaccgaccctgatcttctgtgaagggttcgagtgagagcatacctgtcgggacccgaaagatggtgaactatgcctgagcggggcgaagcagagggaaactctggtggaggcccgcagcgatactgacgtgcaaatcgttcgtctgacttgggtataggggcgaaagactaatcgaaccg

SEQ ID NO: 125073 - DNA, 274 bp, Glycine max; identical to SEQ ID NO: 103940

SEQ ID NO: 125074 - DNA, 258 bp, Glycine max
tgcattcacaggggtgaagcctcccaatggcataagcttctttggaagcctctcaggaagggcctctgatggtcgtctcagtctagattttatgactgaagagttgaagctgccatacctgaatgcatatttggactcggttggatcgaattacaggcatggtgcaaactttgcagtaggaggctcctccattcggcctggtggtattagtccattccctcttggccttcaagtagctcagttcctactgttcaagtt

SEQ ID NO: 125075 - DNA, 273 bp, Glycine max
ctgtgatatcatttgtgtcactggatggactgccaccccaatgcaggatgttcaggttacaattgattggtttatttcctctcaggaatgtgttcccaggacttattgtgttttaaatccacaaaatccttttgtgttaaataggtggatggggaaactgactttcccccagggcacttcccgaaatgttaagagaatgcctctttctatagggggaggagctggtgcaaagaatgctattctcatgaatatgccaaatgctgttctttcaat

SEQ ID NO: 125076 - DNA, 276 bp, Glycine max
aattttgataaaccgcgatcacaggttgccgcaccttaaaaccggaaacaaaagcaatcgttacttgatttcaagaatttctcaatttctttctacttctttgtgtacgatttcttaagggaaagaaaatcactctctgtgctggccacagacttcgtgaatcattttcttttccacttttagtttatttgctgaacactctcctatttgatataggacttcgtgtcagatttaaacttcttctgtttctttctcagttctctgttcaatttcaag

SEQ ID NO: 125077 - DNA, 275 bp, Glycine max
  unsure (1)..(275): unsure at all n locations
gcatctcctttaccaccattctagatatcagagaactttgcagctctcttaggtntttaaaaaacaccacgcaaacagcaagatggccacttccgacagtaacatgctactaaattatgttccagtttatgtgatgctcccactcggagttgtcaatgttgacaatgtttttgaagacccagatggccttaaagaacagctcttgcagcttcgagctgcgggtgttgacggggttatggttgatgtgtggtgggggatcatagaactgaaggggc

SEQ ID NO: 125078 - DNA, 273 bp, Glycine max
gtatttttgtcgcgcctttcagaggcggaaggcctattcgggtggttacatttccgaataccattgtgcagattgaaccagacatgaattcaaggtttcagcttttgagtaccactaccaatggtgattttgttcaaggaaaagatctcgcaatggttaaagttaatgtagcatgtgctgctgttggcttgacatcaagttacactccaactccattgttggaatctggtttgcaaaaagacagagggttaattgtggaatattttggaagga

SEQ ID NO: 125079 - DNA, 272 bp, Glycine max
caagttattatcaaataattaattaaattcctcgtggaatcttgttgaagccatgtctacagctggtcaggtcatcaagtgcagagctgcggtggcatgggaagcagggaagccactatcgatagaaaccatagaagtggcaccaccccagaaaggtgaagtgcgtttgaagatcctcttcaactccctttgccgtacagatgtttactggtgggatgctaagggccagactccgctgtttcctcgtatcttaggccacgaagcttcgggga

SEQ ID NO: 125080 - DNA, 268 bp, Glycine max
cactatcttggttcccgcagtcatgggcatggtcacgatcggaatcaacggatttggaagaattggccgtttggtggccagggtggctctgcagatagacgatgttgaactcgttgccgttaacgatcctttcattaccaccgattacatgacatacctgtgtacatacgacagtgttcacgggcactggaagcatcacggtgtcaccgttaaggatgataagacccttctcttcggtgacaagccagtcactgtttctggacacagg

SEQ ID NO: 125081 - DNA, 272 bp, Glycine max
ctctaatccgtttccgccgttccgctccttcctaccacactctccactctctctttccgacgattaaccgtttctcctcctccgcctccgccgccatggttgctcacgcgaaggacgaggcgtacctcagcgcgacgattccgaagcgcatccgtctcttcgagaccatcctggcggagcagcacactcagcgcctctcgctctcgccggatcctatcaaggttactctccccgacggcagcgtcaaggaggcgaagaagtggcatacgacg

SEQ ID NO: 125082 - DNA, 270 bp, Glycine max
atcgagccgctcgagcggctcgaggtggtagctcctgaggacaacaggagtttatggtcacagcttcattaggtttcgtgtaatgatctggaaatgcaagaagcttatcttgtcaatctcgtaaatgtgttacgagaattgtatttgcacagtccagaggaagctcgccaattgagaaggaaagctctctctcgtattgaatggctgcaaaaagctgatgtgcctaccatagcacagattgaagagttccattcgatgcagaggatgatg

SEQ ID NO: 125083 - DNA, 270 bp, Glycine max
gattttagcaaattaaaatagtagtgttattggtaggttttggcaaagatgttttcagttccaggggtgtcgggaatcctgaacagaggaggagggcataagataaaagggacagtggtgttgatgaggaagaatgtgttggacttcaacagcgtggctgatcttactaaaggaaatgttgggggactcataggcaccggcctcaacgttgttggctcaacacttgataacctcactgctttcttgggccgaagtgtcgccctacagctc

SEQ ID NO: 125084 - DNA, 223 bp, Glycine max
gaccaagttcacaatcctcctcatctctcttctcttctgcatcgcccacacttgcagcgcctccaaatggcagcaccagcaagatagctgccgcaagcagctccagggggtgaacctcacgccctgcgagaagcacatcatggagaagatccaaggccgcggcgatgacgatgatgatgatgacgacgacaatcacattctcaggaccatgcggggaagaatc

SEQ ID NO: 125085 - DNA, 273 bp, Glycine max
cttaattattaacacttccttagttcagtatggtggaagcccttcactctctctctttcttccctttgcttgctactcttgtcgagtgcatgctttgctattagctccagcaagctcaacgagtgccaactcaacaacctcaacgcgttggaacccgaccaccgcgttgagtccgaaggtggtttgattcaaacatggaactctcaacaccctgagctgaaatgcgccggtgtcactgtttccaaactcaccctcaaccgcaatggcctccat

SEQ ID NO: 125086 - DNA, 271 bp, Glycine max
aattaagctgccaacagatataatcagcaagattagtccactacccgtgcttaaggaaatcttccgaactgatggtgaacaggcccttaagtttcctcctcctaaagtaattcaagtgagtaagtctgcatggatgactgatgaagaatttgcaagagaaatgcttgctggtgtaaatccaaacttgattcgttgtcttaaggatttccctccacgaagcaagctagatagccaagtctatggtgatcatactagtcaaataaccaaagaa

SEQ ID NO: 125087 - DNA, 271 bp, Glycine max
agcaaagcaatggctacttcaaagttgaaaacccagaatgtggttgtatctctctccctaaccttaaccttggtactggtgctactgaccagcaaggcaaactcagcggaaactgtttctttcagctggaacaagttcgtgccgaagcaaccaaacatgatcctccaaggagacgctattgtgacctcctcgggaaagttacaactcaataaggttgacgaaaacggcaccccaaaaccctcgtctcttggtcgcgccctctactccaccc

SEQ ID NO: 125088 - DNA, 271 bp, Glycine max
gagcttcagtgctagataggaagaaactcaacaatcctacttgcaaggattcagcaggaacattttagaggcctcctacgataccaaattcgaggagataaacaaggttctgtttagtagagaggaagggcagcagcaaggggagcagaggctgcaagagagcgtgattgtggaaatctcgaaggaacagattcgggcactgagcaaacgtgccaaatctagttcaaggaaaaccatttcttctgaagataaaccttttaacttgagaagc

SEQ ID NO: 125089 - DNA, 272 bp, Glycine max
ggcttccttaagctccttagtgctgctccttgcagctctaattctatcccctcaagttcttgcaaactatgagctctcccccagtgtacaagcctcccactgagaaaccaccagtttagaagcccccagttgagaagcctcctgtttacaagcctccagttgagaaccctccagtttataagcctccagtagagaagccaccagtgtacaagcccccagttgaggatcctccagtgtacaagcccccagttgagaaacctccagtgtacaag

SEQ ID NO: 125090 - DNA, 266 bp, Glycine max
ctcttcttctcttgcggctagggttttagcgcacttcttctagatttaaggaagatgggtaaggaaaaggttcacatcagtattgtggtcattggccatgtcgactctgggaaatccactaccactggtcacctgatttacaagcttggaggcattgacaagcgtgttattgagaggtttgagaaggaagctgctgagatgaacaagaggtctttcaagtatgcctgggtgctggacaaacttaaggctgagcgtgaaagaggaat

SEQ ID NO: 125091 - DNA, 270 bp, Glycine max
gttttgatggtttgattaccaagcaagttatgagcaagatggcagaaatgataaacagtctttgtggtggtgatgaaaaattgatgcgtgaaaggacgcacctgctgttggcttgttgttcaaggatggcaatttgtaagaaagatgtttggagagttgaatgtggaatcccttctggatttccgctcacagttatttgcaatagcatttttaatgagatgctcattagatatagctatgaaaaattactgcgccaggctaaagctccaa

SEQ ID NO: 125092 - DNA, 271 bp, Glycine max
gtttttaacaaacagcaacagtacagagcattttgatgcatgtaagtggacaaaatcggaaccacattcctgggaattgatcttcccaatagaggtatgtggtcctaataatggttttgaaatgtggagttctgagtgggcaaatcaaacttcatggcatttgagtttccttattgacaatcccaaacagtctacagtttttgatattctcttgggaatttctcaagattttgagattgctggtaatactcttatgccagctttttctgtt

SEQ ID NO: 125093 - DNA, 267 bp, Glycine max
ctcgagccggttgtgaatgactcgtgctatcatcaacttgtcagccattggttaaacactcgtgcagttgttgagccattcatcatagcaacaaacaggcatctcagtgttgttcaccctatttataaactccttcaccctcactatcgtgacaccatgaacataaatggccttgctcggttatcactggtcaacgacggtggcgttatagaacaaacattcttgtggggaacgtattctgtggaaatgtctgctgtagtttacaag

SEQ ID NO: 125094 - DNA, 268 bp, Glycine max
ccttagttcaatatggggaagcccttcttcactctctctctttcttccctttgcttgctactcttgtcgagtgcatgctttgctattacctccagcaagttcaacgagtgccaactcaacaacctcaacgcgttggaacccgaccaccgcgttgagtccgaaggtggtcttattgaaacatggaactctcaacaccctgagctgcaatgcgccggtgtcactgtttccaaacgcaccctcaaccgcaacggcctccacttgccatctt

SEQ ID NO: 125095 - DNA, 266 bp, Glycine max
aatttttgtgaattgtctttatcctgtaagtcaattaccttcagaagctgtcgttgtaaatgttacatgtggtagtggacgtggtggtttacctaccactgcttggattagttctgcagttaacaatcgctcctcagatatcaacaaaaagattcgcacagcacttgggaaaggtaagaaaattgtttttcttactagagttgatccttttccagtagctctactggctgttctttttggcgttaagaatgaaattctgagttcca

SEQ ID NO: 125096 - DNA, 267 bp, Glycine max
tgcggtttcctttgttggtgttgctgggaactgttttcctggcatcagtttgtgtctcattaaaggtgagagaggatgagaataaccctttctacttgagaagctctaacagcttccaaactctctttgtccttagcgggagagccatacttaccttggtgaacaacgacgacagagactcctacaaccttcaccctggcgatgcccagagaatcccagctggaaccacttactatttggttaaccctcacgaccaccagaatctca

SEQ ID NO: 125097 - DNA, 267 bp, Glycine max
tgaaattttgataaaccgcgatcacaggttgccgcaccttaaaaccggaaacaaaagcaatcgttacttgatttcaagaatctctcaatttcttcctacttctttgtgtacgatttcttaagggaaagaaaatcactctctgtgctggccacagacttcgtgaatcattttcttttccactcttagtttatttgctgaacactctcctatttgatataggacttcgtgtcagatttaaacttcttctgtttctttctcagttctctg

SEQ ID NO: 125098 - DNA, 175 bp, Glycine max
ctccattggtccttaaacactcatcagtcatcaccatggccaagctagttttttccctttgttttctgcttttcagtggctgctgcttcgctttcagttccagagagcagcctcaggaaaacgagtgccagatccaaaaactcaatgccctcaaaccggataaccgtatagagtc

SEQ ID NO: 125099 - DNA, 271 bp, Glycine max
caacagcacaatttgttagtggaaaaaccttcaaatatgatatagttggtgctggttcacattcttcagaagatttttctgaaaaggaagatcaagaaaaacccaaaaagattgatgccagattgagacaaagaatagatcctcaatacaatgaggttcaggctcagatggaaacaaatttgtttaaattgtctcttgatgatgttgaaactcctaaaggttccatgttggatcttaaaatttctcaatctaaaattgcacttcccaaaaa

SEQ ID NO: 125100 - DNA, 272 bp, Glycine max
cttttcctttcttagagatgctggtaatgggggagtttttgttggcaatgttgcttcagcattcacaacttcaagtgtgcttgaggcccaaagtagaaagcccaacagatatgaagtttcccaatacagatatcgcaatgtgccaataaagcgcagagcatgggttgaaggccagatgtctttcgatcagtctgtagtagcaattatgtctaaatgcaaagccagcatgagaatgggaaacactgatgctcaaattttgatggttccagggc

SEQ ID NO: 125101 - DNA, 272 bp, Glycine max
accaagttcacaatcctcctcatctctcttctcttctgcatcgcccacacttgcagcgcctccaaatggcagcaccagcaagatagctgccgcaagcagctccagggggtgaacctcacgccctgcgagaagcacatcatggagaagatccaaggccgcggcgatgacgatgatgatgatgacgacgacaatcacattctcaggaccatgcggggaagaatcaactacataaggaggaacgaaggaaaagacgaagacgaagaagaagaagg

SEQ ID NO: 125102 - DNA, 271 bp, Glycine max
aaacctacaaggtgagaacgaagaggaggatagtggagccattgtgacagtgaaaggaggtctaagagtcacagctccagccatgaggaagccacagcaagaagaagatgatgatgatgaggaagagcagccacagtgcgtggagacagacaaaggttgccaacgccaaagcaaaaggagcagaaatggcattgatgagaccatttgcacaatgagacttcgccaaaacattggtcagaattcatcacctgacatctacaaccctcaagct

SEQ ID NO: 125103 - DNA, 269 bp, Glycine max
gtttgagattaccccagagaaaaaccctcagcttcgggacttggatgtcttcctcagtgttgtggatatgaacgagggagctctttttctgccacacttcaattcaaaggccatagtggtactagtgattaatgaaggagaagcaaacattgaacttgttggcattaaagaacaacaacagaggcagcaacaggaagagcaacctttggaagtgcggaaatatagagctgaattgtctgaacaagatatatttgtaatcccagcaggtt

SEQ ID NO: 125104 - DNA, 265 bp, Glycine max
gacctcatcggtagatatttcggaacccctgctcttggatcctcacgggaacgaggaaaaggaagagtatttgcgcgaagaggttccggagtggaaggagcagataacgataagagggttggtggtgagtgctgtgttggggagcttgttctgcatcatcacccacaagctaaatctcaccgttgggatcatcccttctcttaatgttgctgctggcttgttggggttcttctttgtgaggacctggactgggttgttgaccaag

SEQ ID NO: 125105 - DNA, 271 bp, Glycine max
gcaaaatgaccaagttcacaatcctcctcatctctcttctcttctgcatcgcccacacttgcagcgcctccaaatggcagcaccagcaagatagctgccgcaagcagctccagggggtgaacctcacgccctgcgagaagcacatcatggagaagatccaaggccgcggcgatgacgatgatgatgatgacgacgacaatcacattctcaggaccatgcggggaagaatcagctacataaggaggaacgaaggaaaagacgaagacgaaga

SEQ ID NO: 125106 - DNA, 270 bp, Glycine max
ctaagaaagtcttccatagccccccaaaaatgaagagcaccatctactttgctctctttctcttttgtgccttcaccacctcatacctaccttcagccatcgctgatttcgtgctcgataatgaaggtaaccctcttgaaaatggtggcacatattatatcttgtcagacataacagcatttggtggaataagagcagccccaacgggaaatgaaagatgccctctcactgtggtgcaatctcgcaatgagctcgacaaagggattggaa

SEQ ID NO: 125107 - DNA, 266 bp, Glycine max
gaaattttcaagtccttggagggatgggcctcggagtgggtcctaccgctgctgaagcccgtggagcaatgctggcagccacaaaacttcctccctgacccctcccttccgcatgaagagttcagccatcaggtgaaggagcttcgcgaacgcactaaagagttacctgatgagtactttgttgtgctggtgggtgatatggtcaccgaggacgcgcttcccacttaccagaccatgatcaacaaccttgatggagtgaaagatga

SEQ ID NO: 125108 - DNA, 263 bp, Glycine max
ggtgaccatcagccaacagagttgttgctatgctgcatgatagttcagtgtctacaataccaggtgattttgtcattggtgttaagttgacaaccataaacaatatgtgtgcatatgggctcaatcctggtatttcaggttctcgtcttttgggcaccattcctcagtccatttcacagcaaactgtttggaatcaaatggcaacagtgagaacaccattgaattttgattctagcaagcagagcttttgtcaattctctatt

SEQ ID NO: 125109 - DNA, 171 bp, Glycine max
ccgcgatcacaggttgccgcaccttaaaaccggaaacaaaagcaatcgttacttgatttcaagaatctctcaatttcttcctacttctttgtgtacgatttcttaagggaaagaaaatcactctctgtgctggccacagacttcgtgaatcattttcttttccacacaaca

SEQ ID NO: 125110 - DNA, 265 bp, Glycine max
attcaaaccttgctctatactacacagtacacacactagaagaataatggcttccatcctccactactttttagccctctctctttcttgctcttttcttttcttcttatccgactcagtcacccctacaaaaccaataaaccttgttgttctacccgttcaaaatgatggttccacagggctccattgtcacaacctccaaaaaagaacccctctaatgcaagtaccagtcctggtggacctcaatggaaatcacttgtgggtt

SEQ ID NO: 125111 - DNA, 265 bp, Glycine max
ctttgaacactcatcaccatggccaagcttgttctttccctttgtatccttcttttcagtggctgcttcgctctgagagagcaggcacagcaaaatgagtgccagatccaaaagctgaatgccctcaaaccggataaccgtatagagtcggaaggtgggttcattgagacctggaaccctaacaacaagccattccagtgtgccggtgttgccctctctcgctgcacccttaaccgcaatgcccttcgtagaccttcctacacca

SEQ ID NO: 125112 - DNA, 267 bp, Glycine max
tctcgagccgattcggctcgagaagccattccagtgtgccggtgttaccctctctcgctgcacgctcaaccgcaacgcccttcgtagaccttcctacaccaacggtccccaggaaatctacatccaacaaggtaagggtatttttggcatgatatacccgggttgtcctagcacatttgaagagcctcaacaacctcaacaaagaggacaaagcagcagaccacaagaccgtcaccagaagatctataacttcagagagggtgattt

SEQ ID NO: 125113 - DNA, 267 bp, Glycine max
attcattccccttatctttctctcttctctctccccgcccaaaccctaactccctaccctattccgctttctctcatccatcatgaaaggaggaaagtccaagaccgaatctaagagagccgatgccaaacttgctgtgaataagaagggcgccgccaccaagactaggaaacccgccggaaaggggaaggcagcgaaagatcctaacaagccaaagaggcctccaagtgctttcttcgttttcatggaggaattcaggaaggtgtt

SEQ ID NO: 125114 - DNA, 267 bp, Glycine max
gcttcctacgatgaaattaaaaatgctatcaaggaagcttctttctccagcctcactgtgaggtcaacaacagagacatccacggtggggctggagaaagaagattcctacgatgaaattacaaatgctatcaaggaggaatcagagggcaagttgaagggaattcttggttacactgaagatgatgtggtctccactgactttaacggcgatagcagatcaagtatttttgatgcaaaggctggaattgcattgaataagaacttt

SEQ ID NO: 125115 - DNA, 266 bp, Glycine max
aagaagatgggtttgaagaacaacatggtggtgctaaaggtgtgtttggtgctacttttccttgtggggggtactactagtgccagcttgaggctgagtgagcttggcctgctcatgaaaagtgatcatcatcaacactcaaatgatgatgactcttcaaaaccatgctgtgatcaatgcgcatgcacaaagtcaaaccctcctcaatgccgctgttcagatatgaggctgaattcgtgccattcagcttgcaaatcttgtatttg

SEQ ID NO: 125116 - DNA, 263 bp, Glycine max
aattcctggagcattttatatcaagaacttccactcccatcatcccattcaaaattaattttgaatgcagattggcctgctcccaaagttaattttgaatgggatgatgggagtggaattcctggagcattttatatcaagaattttatgcaaactgagtttttccttgtgagtgtgactcttgaagacattccaaaccatggaagcatccactttgtttgcaattcgtggatttacaatgccaaactcttcaaaagtgaccg

SEQ ID NO: 125117 - DNA, 262 bp, Glycine max
caaaagatgaaaacaggatggttaaggccatagattgcttagatgggtctgagattgatattgagcttgctcagttcatgaaaggatactttgaagggcatattcttgaaaatggttggccgcagttattgaaattgaaagattggccttcacctagcgcttctgaagaatttctactgtaccaaagacccgagtttatcagcaaactacctttacttcagtatattcactccaagtggggccttctcaatgttgcagctaa

SEQ ID NO: 125118 - DNA, 262 bp, Glycine max
taaacttcttactgatgggaagttgtatgagggtaagcatattcctgtatctaatattagtgcaggggagaatcatgtagttcaaatacccctaatggcacaggaggaaattctgtcttctagtgcaagtgatttcagaactgcaatggtgagtagaaatagcaagcctcaagctactgcaatgcatgtgggagctatagaaattatcattgatagtttcgcaagtcctgactgcaacatagttggtgcaatgcttttggtt

SEQ ID NO: 125119 - DNA, 262 bp, Glycine max
ctgatctgaatgcgaagaacgaacgagagtgcagcggcaatgggtagaagcactttggctttggttctcgcgattctgatctcttttcagggaacccacgttagatccgatgcctccgatcaccgttacaaggatggagactccgtccctctttacgccaacaaagttggtccctttcacaaccccagtgaaacgtatcggtactttgacctgccattctgtgtaacaggtcatgagaaagaaaagactgaagccctcggtg

SEQ ID NO: 125120 - DNA, 263 bp, Glycine max
aattttgataaaccgcgatcacaggttgccgcaccttaaaaccggaaacaaaagcaatcgttacttgatttcaagaatctctcaatttcttcctacttctttgtgtacgatttcttaagggaaagaaaatcactctctgtgctggccacagacttcgtgaatcattttcttttccactcttagtttattttctgaacactctcctatttgatataggacttcgtgtcagatttaaacttcttctgtttctttctcagttctct

SEQ ID NO: 125121 - DNA, 282 bp, Glycine max
gggaagttgtatgagggtaagcatattcctgtatctaatattagtgcaggggagaatcatgtagttcaaatacccctaatggcacaggaggaaattctgtcttctagtgcaagtgatttcagaactgcaatggtgagtagaaatagcaagcctcaagctactgcaatgcatgtgggagctatagaaattatcattgatagtttcgcaagtcctgactgcaacatagttggtgcaatgcttttggttgatacttatcataccaatcctgaaaatgcagttcgt

SEQ ID NO: 125122 - DNA, 277 bp, Glycine max
agctggtgcagtttggagagattcaggaaaaagttgtattgaaattttcacaagaggaatttcttacagcttggtcaactcaggtgcgtcctgcaacaactctgttggctgatgggtgcccatatttgtatgctatggtgcatgatagttcagtgtctacaataccaggtgattttgtcattggtgttaagttgacaaccataaacaatatgtgtgcatatgggctcaatcctggtatttcaggttctcgtcttttgggcaccattcctcagtccat

SEQ ID NO: 125123 - DNA, 280 bp, Glycine max
cccatctattccaacaactttggaaagttctttgagatcacccctgagaaaaacccacagcttcgggacttggatatcttcctcagttctgtggatatcaacgaaggagctcttcttctaccacacttcaattcaaaggccatagtgatactagtgattaatgaaggagatgcaaacattgaacttgttggcattaaagaacaacaacagaagcagaaacaggaagaggaacctttggaagtgcaaaggtacagagctgaattgtctgaagacgatgtat

SEQ ID NO: 125124 - DNA, 296 bp, Glycine max
cacgcgtatcggatctcgagctacatggcagaaatgataaacagtctttgtggtggtgatgcaaaattgatgcgtgaaaggacacacctgctgttggcttgttgttcaaggatggcaatttgtaagaaagatgtttggagagttgaatgtggaatcccttctggatttccgctcacagttatttgcaatagcatttttaatgagatgctcattagatatagctatgaaaaattactgcgccaggctagagctccaagcatgtttttacaatccttcaaaaattttgtttctttgtg

SEQ ID NO: 125125 - DNA, 276 bp, Glycine max
ctgggatatgcttcattgataccatacgttgagccagttgtgcacgctcaaagtgctgaagtttactttgacttcttccctgtggaggttgatagtcaagagggagttgctcacattggtgaattgaaatctggtgtctatgttccactgcctacaaaaactaatttggtggaaactcccaaggaatggcaactggatctaccttgtgacaaaattcctagtgtcttgactacaactgatgagagattggtaggcacagaacatgagggatatgat

SEQ ID NO: 125126 - DNA, 258 bp, Glycine max
ttatgtcagaaagcaagatgtccgcattgaatatgatagcatgtacaattccaaatgactgtggttcattggttgttgccaaggttggaaatcacaaacaaattgttggtttccatgttgctggaagcaaaggaagactgggatatgcttcattgataccatatgttgagccagttgtgcaagctcaaagtgctgaagtttactttgacttcttccctgtggaggttgatagtcaagagggagttgctcacattggtg

SEQ ID NO: 125127 - DNA, 278 bp, Glycine max
agattttgaaattgctggtaatactcttatgccagctttttctgttccacaggctactgccagatcttctgcgaatgcggaatcctctgcatgatctggaatttgtgttttctttcatttgtccgtttgtttaattcaataaaggaaattaggcatgaccctcttgttgagtatgctctgcctatttgaaaatttccacacctcttttaattgtcgtaatgatgtgtgaagtgtgtgttattttaaaaaaaaaaaaaaaaaaaaagggcggccgccga

SEQ ID NO: 125128 - DNA, 295 bp, Glycine max
tatgcatgcggctcaagaacgcctattcggtgtggttacatttccgaataccattgtgcagattgaaccagacatgaattcaaggtttcagcttttgagtaccactaccaatggtgattttgttcaaggaaaagatctcgcaatggttaaagttaatgtagcatgtgctgctgttggcttgacatcaagttacactccaactccattgttggaatctggtttgcaaaaagacagagggttaattgtggaatattttggaaggatgtcttacgttgctcataacgttaatcagccc

SEQ ID NO: 125129 - DNA, 278 bp, Glycine max
cggctcgagaagaaagtgaagtgaaggaaagggtgggagggagtgctactgatactgaaattgaaatggaggagaagaagctcaaactgtattcctactggataagctcctgttccttccgagtccgatttgctctcaacctcaaaggactaccttacgattacctagcagtcacttcattttctgaccctgagtttcttaagctcaaccccattggatttgttcccgtgcttgtcgatggagattcagtaattgttgactctcttgccattattatg

SEQ ID NO: 125130 - DNA, 279 bp, Glycine max
cactcgagcgaattcggctcgactccattgtctttgaacactcaccaccatggccaagcactgttctttccctttgtttacatcttttcagtggctgcttcgctctgagagagcaggcacagcaaaatgagtgccagatccaaaagctgaatgccctcaaaccggataaccgtatagagtcggaaggtgggttcattgagacctggaaccctaacaacaagccattccagtgtgccggtgttgccctctctcgctgcacccttaaccgcaatgcccttc

SEQ ID NO: 125131 - DNA, 278 bp, Glycine max
ctgagagtcccctcaggaaccacatactatgtggtcaaccctgacaacaacgaaaatctcagattaataacactcgccatacccgttaacaagcctggtagatttgagagtttcttcctatctagcactgaagctcaacaatcctacttgcaaggattcagcaggaacattttagaggcctcctacgataccaaattcgaggagataaacaaggttctgtttagtagagaggaagggcagcagcaaggggagcagaggctgcaagagagcgtgattgt

SEQ ID NO: 125132 - DNA, 278 bp, Glycine max
taaacactcatcagtcatcaccatggccaagctagttttttccctttgttttctgcttttcagtggctgctgcttcgctttcagttccagagagcagcctcagcaaaacgagtgccagatccaaaaactcaatgccctcaaaccggataaccgtatagagtcagaaggagggctcattgagacatggaaccctaacaacaagccattccagtgtgccggtgttgccctctctcgctgcaccctcaaccgcaacgcccttcgtagaccttcctacacca

SEQ ID NO: 125133 - DNA, 282 bp, Glycine max
aactgctcacaaactcatggtagcaatgttggatggagatgagcggtttattgagcctacaccaaaatcactggaaaatttaaccctgcaatctgttaaggatgcagtgatgaatcaattttttggtgataacatggaggtatgcattgtaggtgactttactgaggaggacattgaatcttgcattcttgattaccttggcacagctcaggccgcaagaaatcacgaaagagagaaagaattcaacccacccttatttcgaccatctccatctgatttgca

SEQ ID NO: 125134 - DNA, 277 bp, Glycine max
ggaaaaccatttcttctgaagataaacctttcaacttgagaagccgcgaccccatctattccaacaagcttggcaagttgtttgagattaccccagagaaaaaccctcagcttcgggacttggatgtcttcctcagtgttgtggatatgaacgagggagctctttttctgccacacttcaattcaaaggccatagtggtactagtgattaatgaaggagaagcaaacattgaacttgttggcattaaagaacaacaacagaggcagcaacaggaaga

SEQ ID NO: 125135 - DNA, 277 bp, Glycine max
ctcaatttcttcctacttctttgtgtactatttcttaagggtaagaaaatcactctctgtgctggccacagacttcgtgaatcattttcttttccactcttcgtataatttatgaacactctcctatttgatataggacttcgtgtcagatttaaacttcttctgtttctttctcagttctctgcttaatttcaagttcaagctggtgaaatcttggattagtgctctcactcttctatctgatataggacttcgtgggtagacttttccatttctc

SEQ ID NO: 125136 - DNA, 275 bp, Glycine max
caatatcctagtacaccgtattaaagaatttaagatatactatgatgagagcgcggttcccattactgttgctgggagttgttttcctggcatcagtttctgtctcatttggcattgcgtattgggaaaagcagaaccccagtcacaacaagtgcctccgaagttgcaatagcgagaaagactcctacaggaaccaagcatgccacgctcgttgcaacctccttaaggtggaggaagaagaagaatgcgaagaaggtcaaattccacgaccacga

SEQ ID NO: 125137 - DNA, 273 bp, Glycine max
gaggggaaccactctcaaccttcagatttttggactacggtgtgaccatttcattttacagggctccttatttggttgagattgatgtggtccaaggaaagagaattttgaggctggaggaggttgatgggaatggtgacgcatggagaagtgcagatgtgctgtctttcaacactggacattggtgggatcatcaaggctctcttcaagggtgggattatatggaattaggaggcaaatactaccaagatatggatcgtttagcagctttgg

SEQ ID NO: 125138 - DNA, 275 bp, Glycine max
acttaattagtgttcatgaatacgtcaagccttactttagtggttctaaattgaaaagctttctagctggtcataatatcaccattactgatggtattgacaagactagtgcaactttgcaatttagaaagttagcagattgtgattttctcaagagaaactttaagcagatgtctaatgttttgtgggtagctcctgaggacaaggcgagtttatggtcacaacttcattatgtttcgtgtaataatctggagatgcaagaagcttatcttgtc

SEQ ID NO: 125139 - DNA, 279 bp, Glycine max
agctattaaagaaccaaagagaatcctactttgtggatgctcagcctaagaagaaagaggaggggaataagggaagaaagggtcctttgtcttcaattttgagggctttttactgaataagtatgtactaaaatgtatgctgtaatagctcatagtgagcgaggaaagtatcgggctatgtaactatgactagagcttcaactatgaataaataaatcgacagcatatgatgcttttgttttgtgttcaaaaaaaaaaaaaaaagggcggccgccgact

SEQ ID NO: 125140 - DNA, 277 bp, Glycine max
acagtcaccagaagattcgtcacttcaatgaaggagacgtactagtgattcctcctggtgttccttactggacctataacactggcgatgaaccagttgttgccatcagtcttcttgacacctccaacttcaacaatcagcttgatcaaaaccccagagtattttaccttgctgggaacccagatatagagcacccagagaccatgcaacaacagcagcagcagaagagtcatggtggacgcaagcaggggcaacaccagcagcaggaggaagaagg

SEQ ID NO: 125141 - DNA, 273 bp, Glycine max
ctctccattgtctttgaacactcatcaccatggccaagcttgttctttccctttgtttccttcttttcagtggctgcttcgctctgagagagcaggcacagcaaaatgagtgccagatccaaaagctgaatgccctcaaaccggataaccgtatagagtcggaaggtgggttcattgagacctggaaccctaacaacaagccattccagtgtgccggtgttgccctctctcgctgcacccttaaccgcaatgcccttcgtagaccttcctaca

SEQ ID NO: 125142 - DNA, 273 bp, Glycine max
ttcgagcgaatcggctcgagactagttcaatatcctagtataacttaataaataatttaagatactatgatgagagcacggttcccattactgttgctgggacttgttttcctggcttcagtttctgtctcatttggcattgcttactgggaaaaagagaaccccaaacacaacaagtgtctccagagttgcaatagcgagagagactcgtacaggaaccaagcatgccacgctcgttgcaacctccttaaggtggagaaagaagaatgtgaa

SEQ ID NO: 125143 - DNA, 276 bp, Glycine max
tgaacactcatcaccatggccaagcttgttctttccctttgtttccttcttttcagtggctgcttcgctctgagagagcaggcacagcaaaatgagtgccagatccaaaagctgaatgccctcaaaccggataaccgtatagagtcggaaggtgggttcattgagacctggaaccctaacaacaagccattccagtgtgccggtgttgccctctctcgctgcacccttaaccgcaatgcccttcgtagaccttcctacaccaacggtccccaggaa

SEQ ID NO: 125144 - DNA, 263 bp, Glycine max
ctgaaaccttgaattcatgtctggttcagcttttgagtaccactaccaatggtgattttgttcaagggaaagatctcgcaatggtcaaagtcaacattagcacatgctacattaactttaaccattgcgagatctttcccttgaactaaatcaccattggttaaagttaatgtagcatgtgctgctgttggcttgacatcaagttacactccaactccattgttggaatctggtttgcaaaaagacagagggttacttgtgga

SEQ ID NO: 125145 - DNA, 276 bp, Glycine max
ggaaggcatagtacacaggacagttgaagtgaatggcataaaaatgcatgttgctgagaaaggtgaaggtcccgtggtcttgttcctccacggcttcccggagctctggtactcctggcgccaccagattctggctctcagcaacctcggctaccgcgccgtggctccagatctccgcggctacggagacaccgaggcaccagcttcaatcagcagctacaccatcctccacttagtttctgacatcgtcgcgctcattcactcacttgctgtgga

SEQ ID NO: 125146 - DNA, 277 bp, Glycine max
ggacatcttggttgtttattatacaatagcaactcaatttagaaaatttctaccgcattacattaggtggcatctgtataccttgttgatctacattctcccatcttttctcactgctgaaattaaatataagcggaatctgagtaatattcatatttccggcttattttacgacggcagatacaaattctggactagacacgagaaaaatcttgctttgacagaagaggaaaagatggaagtgattagaaatagaggcattcctgctgatgttctt

SEQ ID NO: 125147 - DNA, 266 bp, Glycine max
gttcaatatcctagtataccttattatataatttaagatactatgatgagagcacggttcccattactgtcgctgggacttgttttcgtggcttcagtttctgtctcatttggcattgcttactgggacaaagagaaccccatacacaacaagtgtctccagagttgctatagcgagagcgactcgtacaggaaccaagcatgccacgctcgttgcaacctccttaaggtggagtaagaagaatgtgaagaaggtgaaattccacg

SEQ ID NO: 125148 - DNA, 274 bp, Glycine max
ctggtttgcaaaaagacagagggttaattgtggagtattttggaaggatgtcttacgttgctcataacgttaatcagccccaagagaaagatttgttggagggaaatttttcctttgatattaaatctcgctctagattggaaaaagtttcctctacaaaagcacaatttgttagtggaaaaaccttcaaatatgatataattggtgctggttcacattcttcagaagattttcctgaaaaggaagatcaagaaaaacccaaaaagattgatgc

SEQ ID NO: 125149 - DNA, 274 bp, Glycine max; identical to SEQ ID NO: 103940

SEQ ID NO: 125150 - DNA, 274 bp, Glycine max
tgagaatacaggtatagcattggcctgtgctatgaatagttcttttagggggcgtgccagttctgatatttacaccatctgctctcaagactgtgaattatggaatcctgcttgcacaaaagcaatgactatgtcatttaatccaaacccgtgttctgatgcatggagtttggaatttttgaagcgtaccgtatttcactgtgatatcatttgtgtcactggatggactgccaccccaatgcaggatgttcaggttacaattgattggtttatt

SEQ ID NO: 125151 - DNA, 274 bp, Glycine max
gcagatgtctaatgttttgtgggtggctcctgaggacaaggcgagtttatggtcacaacttcattatgtttcgtgtaataatctggaaatgcaagaagcttatcttgtcaatctcgtaaatgtgttacgagaattgtatttgcacagtccagaggaagctcgccaattgagaaggaaagctctctctcgtattgaatggctgcaaaaagctgatgtgcctaccatagcacagattgaagagttccattcgatgcagaggatgatgaatgctcct

SEQ ID NO: 125152 - DNA, 275 bp, Glycine max
ggcaaaaggagatttgtttctggggatggtgaagagatgacattgattccgggaaccagtgttgaagaggcttacaataagctaatagttgaacttgagaaaagtgttcctacattggttggcattgaatgtcccaaggatgagaaacttcctcgtcgcaaaatttttgacaaacctaagacgcgctgcttcactattctccctatggagtttaatcttgtggttcgtcagaagtttttaaattttgtgaggttcattatgaagaaaagggacaa

SEQ ID NO: 125153 - DNA, 274 bp, Glycine max
ctcgagccgcgggtatgcttgcaaagatgtgacaggtatcatcgtatgaagcaagagcgagagaaacaaatccaagaggaaactcgtgagaagaaagaggaggaaagcagtgaaagggaagaagaacaacaagagcagcatgaggaacaagatgaaaatccctacatttttgaggaagataaggattttgagaccagagtcgaaactgaaggtggcagaattcgggttctcaagaagttcactgaaaaatccaagcttcttcagggcattgaga

SEQ ID NO: 125154 - DNA, 273 bp, Glycine max
ccccgacggccacctcttccaggtcgagtatgccctcgaagccgtccgcaagggcaacgccgccgtcggcgtccgcggcaccgacaacgtcgtcctcggcgtcgagaagaaatccaccgccaagctccaagactccaggtcggtgaggaagattgtgaatctggacaaccacattgcgctggcatgcgcggggctgaaggccgacgcacgtgtgctcataaacagggcacgtgtggagtgccagagccacaggctcaccgtggaggatcccgt

SEQ ID NO: 125155 - DNA, 273 bp, Glycine max
gccgtttctattattgacaccaacagcttggagaaccagctcgaccagatgcctaggagattctatcttgctgggaaccaagagcaagagtttctaaaatatcagcaagagcaaggaggtcatcaaagccagaggaaaggagatgatttaggatgaaggagatagagtgggaagtgtgctgaaggccttgataggttgcggtgttgaacaacaagagtgcttttgttggaggcactttcaccattttttggatgagaatcagagcttcgtgcg

SEQ ID NO: 125156 - DNA, 288 bp, Glycine max
ggaatttcggtcttcggctcgaggatcatacatagtagtgttggtgggttgcaaagatgcttgggggtcttctccataggggtcataagataaaagggacagtggtgttgatgcgcaagaatgtgttggacgtgaatagcgtaaccagcgttgggggaattattggtcaaggtctcgacttagttggctcaacactcgatactcttactgccttcttgggccgatccgtgtctctccagcttattagtgctaccaaagctgatgccaacggaaaagggaaacttggaa

SEQ ID NO: 125157 - DNA, 271 bp, Glycine max
aggaaaggttaactaagaagcaatacttcaatggccacccttgttgttcataaccaaacttcttctgctcaagatgctgaggctctccaacaggcttccaaaggatggggggctgatgacaaggccattatagcagtactgggtcacagaaatgttcatcagaggcaagaaatcagaaaagcttatgaggagatttaccaagaggatctcatcaaacgccttgagtccgagatctctggtgactttgagagagctatgtaccggtggatgt

SEQ ID NO: 125158 - DNA, 269 bp, Glycine max
tccgagcgaatcggctcgagatcgttatccttaacgggactaccattctggccttggagaacaacgacgacagagacacctagagacttgaatctggtgatgccctgagagtgacgtcaggaaccgcatagtatgtggtcaacgctgacaacaacgagaatctcaggttaataacactcggcatacccgttaacaagcctggtagatttgagagtttcttcctatctagcactgaagctcaacaatcctacttgcaaggattcagcagg

SEQ ID NO: 125159 - DNA, 271 bp, Glycine max
aagcaatggctacttcaaagttgaaaacccagaatgtggttgtatctctctccctaaccttaaccttggtactggtgctactgaccagcaaggcaaactcagcggaaactgtttctttcagctggaacaagttcgtgccgaagcaaccaaacatgatcctccaaggagacgctattgtgacctcctcgggaaagttacaactcaataaggttgacgaaaacggcaccccaaaaccctcgtctcttggtcgcgccctctactccacccccat

SEQ ID NO: 125160 - DNA, 269 bp, Glycine max
gaagacgaagatgatgaagatgaacaaattccctctcaccctcctcgccgaccaagccatggaaagcgtgaacaagacgaggacgaggacgaagatgaagataaacctcgtcctagtcgaccaagccaaggaaagcgtgaacaagaccaggaccaggacgaggacgaagatgaagatgaagatcaacctcgcaagagccgcgaatggagatcgaaaaagacacaacccagaagacctagacaagaagaaccacgtgaaagaggatgcga

SEQ ID NO: 125161 - DNA, 271 bp, Glycine max
ataaaaaaccactctacaaaactctccagtaattctgaaaattttattttcttttggtgaaattaacagctctgtgattgatcaatggcgacaaaggaaggcaaagccataggcatcgatctcggcacgacctacagctgcgtgggcgtgtggcaaaacgaccgcgtcgagatcatccccaacgaccaaggcaaccgaaccactccctcttatgtagccttcaccgacaccgagaggctcatcggagacgcggcgaagaaccaagtcgcca

SEQ ID NO: 125162 - DNA, 271 bp, Glycine max
  unsure (1)..(271): unsure at all n locations
cattttcagaggaacaatggcgggtagggtttcgacgtgcttcttcttcgtgtttgctctttctctccttcttccttttcagatctccgctgaggaatcatcggagaaagagttcgtactcacattggatcactctaactttcacgacactgtcagcaagcacgatttcatcgtcgtcgagttctacgctccatggtgtggccactgtaagaagcttgctcccgagtatgangcagctgcttctatcttgagtagtcatgatcctccggtt

SEQ ID NO: 125163 - DNA, 272 bp, Glycine max
agcaaaatgaccaagttcacaatcctcctcatctctcttctcttctgcatcgcccacacttgcagcgcctccaaatggcagcaccagcaagatagctgccgcaagcagctccagggggtgaacctcacgccctgcgagaagcacatcatggagaagatccaaggccgcggcgatgacgatgatgatgatgacgacgacaatcacattctcaggaccatgcggggaagaatcaactacataaggaggaacgaaggaaaagacgaagacgaaga

SEQ ID NO: 125164 - DNA, 274 bp, Glycine max
ggtcaccggaactccccatggctgggatgtcctcttctacatcttccagttcttccgcgtcgtcctcctcttcaccgtcatcgttctcgtcggcaccggctggtccttcctcaaacccttcctccaggagcgcgaaaagaaggtcctcatgatcgtcatccctttacaagtcctcgctaatgtggcttccgtcgtcatcggcgaaacggggcccttcatcaaggattgggttacttggaatcaggttttcttgctcgtcgacattatttgctgc

SEQ ID NO: 125165 - DNA, 269 bp, Glycine max
ctctccattggtccttaaacactcatcagtcatcaccatggccaagctagttttttccctttgttttctgcttttcagtggctgctgcttcgctttcagttccagagagcagcctcagcaaaacgagtgccagatccaaaaactcaatgccctcaaaccggataaccgtatagagtcagaaggagggctcattgagacatggaaccctaacaacaagccattccagtgtgccggtgttgccctctctcgctgcaccctcaaccgcaacg

SEQ ID NO: 125166 - DNA, 271 bp, Glycine max
aagaaggtgaaattccacgaccacgaccacgcccacaacacccggagagggaacctcagcaacccggtgagaaggaggaagacgaagatgagcaaccacgtccaatcccattcccacgcccacaacctcgtcaagaagaagagcacgagcagagagaggaacaggaatggcctcgcaaggaggaaaaacgcggagaaaagggaagtgaagaggaagatgaggatgaggatgaggaacaagatgaacgtcaattcccattcccacgcccacc

SEQ ID NO: 125167 - DNA, 270 bp, Glycine max
ctcgagccgttctcatcaagttactatctataattaattaaattcctcgtggaatattgaagaagccatgtctacagctgggcaggtcatcaagtgcagagctgcggtggcatgggaagcagggaagccactgtcaatagaaaccatagaagtggcaccaccccagaaaggtgaagtgcgtttgaggatcctcttcaactccctttgccgtagtgatgtttattggtgggatgctaaggaccagactcctctgtttcctcgtatcttagg

SEQ ID NO: 125168 - DNA, 270 bp, Glycine max
gggatggtgaagagatgacattgattccgggaaccagtgttgaagaggcttacaacaagctaatagttgaacttgagaaaagtgttcctacattggttggcattgaatgtcccaaggatgagaaacttcctcgtcgcaaaatttttgacaaacctaagacgcgctgcttcactattctccctatggagtttaatcttgtggtccgtcaaaagtttttaaattttgtgaggttcattatgaagaaaagggacaagcttagttgtcaagttg

SEQ ID NO: 125169 - DNA, 270 bp, Glycine max
atttcctctcaggaatgtgttcccaggacctattgtgttttaaatccacaaaatccttttgtgttaaataggtggatgggaaaattgactttcccccagggcacttcccgaagtgttaagagaatgcctctttctatagggggaggagctggtgcaaagaatgctattctcatgaatatgccaaatgctgttctttcaatgtggagatattttgttggagatctcgtctttgaagtttctaagatgacttctccctacattaaatgtaca

SEQ ID NO: 125170 - DNA, 272 bp, Glycine max
ctcgagccgcttaattattaacacttccttagttcaatatggggaagcccttcactctctctctttcttccctttgcttgctactcttgtcgagtgcatgctttgctattagctccagcaagctcaacgagtgccaactcaacaacctcaacgcgttggaacccgaccaccgcgttgagtccgaaggtggtttgattcaaacatggaactctcaacaccctgagctgaaatgcgccggtgtcactgtttccaaactcaccctcaaccgcaat

SEQ ID NO: 125171 - DNA, 268 bp, Glycine max
acagtacagagcattttgatgcatgtaagtggacaaaatcggaaccacattcctgggaattgatcttcccaatagaggtatgtggtcctaataatggttttgaaatgtggagttctgagtgggcaaatcaaacttcatggcatttgagtttccttattgacaatcccaaacagtctacagtttttgatattctcttgggaatttctcaagattttgagattgctggtaatactcttatgccagctttttctgttccacaggctactgc

SEQ ID NO: 125172 - DNA, 270 bp, Glycine max
atcacaaccactcttaatttctctctgccttgctcatttacacacctctccaacctttcactttcagctttatttgaatccctctctctcctttccaaatggctagcgttgaggttgcacatcaaacaccaacaacagttccagaaaatgaaacaaccgaggtaatcaagacccaggaaacaaccccggaaccagtaccagccactgaggctcctgcaacagaacaagcagcagctgaggttcctgctcaagaagaacaacaagcaactg

SEQ ID NO: 125173 - DNA, 267 bp, Glycine max
ctggacaattaaagaatagagtttcgtttcgtaaagcaatgaaaaaagctattgaattaactgaacaggcgggtacaaaaggagttcaagtacaaattgcaggacgtatcgacggaaaagaaattgcacgtgttgaatggatcagagaaggtagagttcctctacaaaccattcgagcgaaaatcgattattgttgctatacagttcgaactatttatggggttttagggatcaaagtttggatattttctagataaagaaaaatat

SEQ ID NO: 125174 - DNA, 264 bp, Glycine max
caaggatggcaatttgtaagaaagatgtttggagagttgaatgtggaatcccttctggatttccgctcacagttatttgcaatagcatttttaatgagatgctcattagatatagctatgaaaaattactgcgccaggctaaagctccaagtatgtttttacaatctttcaaaaattttgtttctttgtgtgtgtatggtgatgataacttaattagtgttcatgaatatgtcaagccttactttagtggttctaaattgaaaa

SEQ ID NO: 125175 - DNA, 269 bp, Glycine max
tttgatcgcagtgcctactggtgttgcatggtggatgtacaacaatgaagacactcctgttgttgccgtttctattattgacaccaacagcttggagaaccagctcgaccagatgcctaggagattctatcttgctgggaaccaagagcaagagtttctaaaatatcagcagcagcagcaaggaggttcccaaagccagaaaggaaagcaacaagaagaagaaaacgaaggaagcaacatattgagtggcttcgccctgaattcttgaa

SEQ ID NO: 125176 - DNA, 267 bp, Glycine max
cagcaacagtacagagcattttgatgcatgtaagtggacaaaatcggaaccacattcctgggaattgatcttcccaatagaggtatgtggtcctaataatggttttgaaatgtggagttctgagtgggcaaatcaaacttcatggcatttgagtttccttattgacaatcccaaacagtctacagtttttgatattctcttgggaatttctcaagattttgagattgctggtaatactcttatgccagctttttctgttccacaggc

SEQ ID NO: 125177 - DNA, 267 bp, Glycine max
gagcacacagtgttggtcgaacccattgtgtgaagttggtgcaccgtttgtacccagagattgatccagctctgaaccctgaccacgtccctcacattctgaagaagtgccctgatgccattccagaccctaaggccgtgcagtacgtgagaaacgaccgtggcacccccatgattctagacaacaattactacagaaatatattggacaacaagggcttgttgatagtggatcaccaactagccaatgacaagaggaccaagcctt

SEQ ID NO: 125178 - DNA, 268 bp, Glycine max
cttaaacactcatcagtcatcaccatggccaagctagttttttccctttgttttctgcttttcagtggctgctgcttcgctttcagttccagagagcagcctcagcaaaacgagtgccagatccaaaaactcaatgccctcaaaccggataaccgtatagagtcagaaggagggctcattgagacatggaaccctaacaacaagccattccagtgtgccggtgttgccctctctcgctgcaccctcaaccgcaacgcccttcgtagac

SEQ ID NO: 125179 - DNA, 261 bp, Glycine max
gctttctagctggtcatagtatctacattactgatggtattgacaagactagtgcaactttgcaatttagaaagttagcagattgtgattatctcaagagaaactttaagcagatgtctaatgttttgtgggtagctcctgaggacaaggcgagtatatggtcacaacttcattatgtctcgtgtaataatctggaaatgcatgatgcttatcttgtcaatctcgtaaatgtgttacgagaattgtattagtagagtccag

SEQ ID NO: 125180 - DNA, 268 bp, Glycine max
cttaattattaacacttccttagttcaatatggggaagcccttcactctctctctttcttccctttgcttgctactcttgtcgagtgcatgctttgctattagctccagcaagctcaacgagtgccaactcaacaacctcaacgcgttggaacccgaccaccgcgttgagtccgaaggtggtttgattcaaacatggaactctcaacaccctgagctgaaatgcgccggtgtcactgtttccaaactcaccctcaaccgcaatggcct

SEQ ID NO: 125181 - DNA, 268 bp, Glycine max
agcaagcgtcccactatctccaacggatatggtcgtttaactgaagttggtcctgacgatgatgaaaagagttggcttcaaagactcaatctcatgcttacctttaccaacatcacccagagatctatgagtactattcactacaactcacatgcaacgaagatagcactggtgatcgatggcagagggcatcttcaaatatcatgtccacacatgtcatcaaggtcgtcacactcgaagcatgataagagtagcccttcataccata

SEQ ID NO: 125182 - DNA, 268 bp, Glycine max
gtcatttacgcttctcttctctgcagcaactatgcctaaccctaaggtcttcttcgacatgaccatcggcggtcaatctgctggccgcatcgtgatggagctctacgccgacgtcactccccgcaccgccgagaacttccgcgcgctttgcaccggcgagaagggcgtagggcggagcggcaagcccctccactacaagggctcgtccttccaccgcgtgatcccgagtttcatgtgtcagggtggcgacttcaccgccggaaacgga

SEQ ID NO: 125183 - DNA, 265 bp, Glycine max
ctccattgtctttgaacactcatcaccatggccaagcttgttctttccctttgtttccttcttttcagtggctgcttcgctctgagagagcaggcacagcaaaatgagtgccagatccaaaagctgaatgccctcaaaccggataaccgtatagagtcggaaggtgggttcattgagacctggaaccctaacaacaagccattccagtgtgccggtgttgccctctctcgctgcacccttaaccgcaatgcccttcgtagacctt

SEQ ID NO: 125184 - DNA, 269 bp, Glycine max
atggaactctcaacaccctgagctgcaatgcgccggtgtcactgtttccaaacgcaccctcaaccgcaacggcctccacttgccatcttactcaccttatccccaaatgatcattgtcgttcaagggaagggagcaattggatttgcatttccgggatgtcctgagacgtttgagaagccacaacagcaatcaagcagaagaggctcaaggtcgcagcagcaactacaagacagtcaccagaagattcgtcacttcaatgaaggagacg

SEQ ID NO: 125185 - DNA, 258 bp, Glycine max
gttcctcactgaccaagccatagcgatgagaaccaaactttctttagctatctttttcttttttcttttagccttattttcaaacctagcctttggcaaatgtaaagaaaccgaggtagaagaagaagaccctgagctcgtaacatgcaaacaccaatgccaacagccacagcaatacactgagggtgacaagcgggtatgcttgcaaagatgtgacaggtatcatcgtatgaagcaagagcgagagaaacaaatcca

SEQ ID NO: 125186 - DNA, 268 bp, Glycine max
ggaaatttttcctttgatattaaatctcgctctagattggaaaaagtttcctctacaaaagcacaatttgttagtggaaaaaccttcaaatatgatatagttggtgctggttcacattcttcagaagatttttctgaaaaggaagatcaagaaaaacccaaaaagattgatgccagattgagacaaagaatagatcctcaatacaatgaggttcaggctcagatggaaacaaatttgtttaaattgtctcttgatgatgttgaaactc

SEQ ID NO: 125187 - DNA, 265 bp, Glycine max
tggatagtaattaacctcactcaaactcgggatcacagaaaccaacaacagttcttgcactgaggtttcacgatgttgctggaacttgcacttggtttgtttgtgttagctttgtttctgcacttgcgtcccacaccaagtgcaaaatcaaaagcacttcgccacctcccaaaccctccaagcccaaagcctcgtcttcccttcattggccaccttcacctcttaaaagataaacttctccactatgcactcatcgatctctcca

SEQ ID NO: 125188 - DNA, 260 bp, Glycine max
cgacaaccaattcacatcactgaaggaaattatgtcagaaagcaagatgtcagcattgaatatgatgcatgtacaattccaaatgattgtggttcattggttgttgccaaagttggaaatcacaaacaaattgttggtttccatgttgctggaagcaaaggaagactgggatatgcttcattgataccatacgttgagccagttgtgcaagctcaaagtgctgaagtttactttgacttcttccctgtggaggttgatag

SEQ ID NO: 125189 - DNA, 260 bp, Glycine max
gaaaggatctatgattatgatgtctacaatgatttaggtgatccggataaaggtgaaaatcatgcccgtcctgttcttggaggaaatgacacctttccttatcctcgtagggggagaactggtagaaaaccaacaaggaaagatcctaatagtgagagtaggagcaatgatgtttatcttccaagagatgaggcttttggacacttgaagtcatctgactttcttacttatggactaaaatccgtatctcaaaatgttct

SEQ ID NO: 125190 - DNA, 265 bp, Glycine max
tttcctttgatattaaatctcgctctagattggaaaaagtttcctctacaaaagcacaatttgttagtggaaaaaccttcaaatatgatataattggtgctggttcacattcttcagaagattttcctgaaaaggaagatcaagaaaaacccaaaaagattgatgccagattgagacaaagaatagatcctcaatacaatgaggttcaggctcagatggaaacaaatttgtttaaattgtctcttgatgatgttgaaactcctaa

SEQ ID NO: 125191 - DNA, 264 bp, Glycine max
tacacacacacacacacactaagaataatggcttctatcctccactactttttagccctctctctttctttctctttccttttcttcttatccgactccgtccccattccccaacaccacactaaccctacaaaacctataaaccttctggttctacccgttcaaaatgatgcttccacagggctccattgggccaacctccaaaaaaggacccctctaatgcaagtaccagtcctggtggacctcaatggaaaccacttgtgg

SEQ ID NO: 125192 - DNA, 263 bp, Glycine max
cgggggaatttatgatggagaaaactgtacaagtccgtatgggattaatcactttgttttacttgtgggttatggttcagcggatggtgtagattactggatagcgaaaaattcatggggagaagattggggagaagatggttacatttggatccaaagaaacacgggtaatttattaggagtgtgtgggatgaattatttcgcttcatacccaaccaaagaggaatcagaaacactggtgtctgctcgcgttaaaggtcatc

SEQ ID NO: 125193 - DNA, 265 bp, Glycine max
cattgtctttgaacactcatcaccatggccaagcttgttctttccctttgtttccttcttttcagtggctgcttcgctctgagagagcaggcacagcaaaatgagtgccagatccaaaagctgaatgccctcaaaccggataaccgtatagagtcggaaggtgggttcattgagacctggaaccctaacaacaagccattccagtgtgccggtgttgccctctctcgctgcacccttaaccgcaatgcccttcgtagaccttcct

SEQ ID NO: 125194 - DNA, 267 bp, Glycine max
gattgggcctcattggtacaagtgtttttaacaaacagcaacagtacagagcattttgatgcatgtaagtggacaaaatcggaaccacattcctgggaattgatcttcccaatagaggtatgcggtcctaataatggttttgaaatgtggagttctgagtgggcaaatcaaacttcatggcatttgagtttccttattgacaatcccaaacagtctacagtttttgacattctcttgggaatttctcaagattttgaaattgctggt

SEQ ID NO: 125195 - DNA, 259 bp, Glycine max
ctccattgtctttgaacactcatcaccatggccaagcttgttctttccctttgtttccttcttttcagtggctgcttcgctctgagagagcaggcacagcaaaatgagtgccagatccaaaagctgaatgccctcaaaccggataaccgtatagagtcggaaggtgggttcattgagacctggaaccctaacaacaagccattccagtgtgccggtgttgccctctctcgctgcacccttaaccgcaatgcccttcgta

SEQ ID NO: 125196 - DNA, 238 bp, Glycine max
ccgggttgtcctagcacatttgaagagcctcaacaacctcaacaaagaggacaaagcagcagaccacaagaccgtcaccagaagatctataacttcagagagggtgatttgatcgcagtgcctactggtgttgcatggtggatgtacaacaatgaagacactcctgttgttgccgtttctattattgacaccaacagcttggagaaccagctcgaccagatgcctaggagattctatc

SEQ ID NO: 125197 - DNA, 250 bp, Glycine max
gagaaaaatcttgctttgacagaagaggaaaagatggaagtgattagaaatagaggcattcctgctgatgttcttgcaaagcgagctcatgaatttgaaaaacatgttgctcatgaaagcctcaaggatcaaattcctgctgttgacaagttgtattctactaaggttaataagtttgcaaaaattatgaaccttagacaaagtgttgtaggtgatcttaaacttcttactgatgggatgttgtatgggg

SEQ ID NO: 125198 - DNA, 245 bp, Glycine max
gttcaatatggggaagcccttcactctctctctttcttccctttgcttgctactcttgtcgagtgcatgctttgctattagctccagcaagctcaacgagtgccaactcaacaacctcaacgcgttggaacccgaccaccgcgttgagtccgaaggtggtttgattcaaacatggaactctcaacaccctgagctgaaatgcgccggtgtcactgtttccaaactgaccctcaaccgcaatggcc

SEQ ID NO: 125199 - DNA, 259 bp, Glycine max
tatcgagccgattcggctcgagggttcccaaagccagaaaggaaagcaacaagaagaagaaaacgaaggaagcaacatattacgtggcttcgcccctgaattcttgaaagaagcgttcggcgtgaacatgcagatagtgagaaacctacaaggtgagaacgaagaggaggatagtggagccattgtgacagtgaaaggaggtctaagagtcacagctccagccatgaggaagccacagcaagaagaagatgatgatgat

SEQ ID NO: 125200 - DNA, 258 bp, Glycine max
ctctgcttcaacttgctccctcagaagcgaagaagaagccacagagaactagtctcctactctcacccgcaagagaaaaatggcatctcacatcgttggatacccccgtatgggtcccaagagagagctcaagttcgctctcgagtctttctgggatggcaagagcagcgccgaggatttgcagaaggtgtcttctgatctcagggcatccatctggaagcagatggctgatgctgggatcatgtacatccccagcaa

SEQ ID NO: 125201 - DNA, 256 bp, Glycine max
tgttcaatatcctagtataccttaataaataatttaagatactatgatgagagcacggttcccattactgttgctgggacttgttttcctggcttcagtttctgtctcatttggcattgcttactgggaaaaagagaaccccaaacacaacaagtgtctccagagttgcaatagcgagagagactcgtacaggaaccaagcatgccacgctcgttgcaacctccttaaggtggagatagaagaatgtgatgaaggt

SEQ ID NO: 125202 - DNA, 227 bp, Glycine max
ctggggaagcaggcatgaactaatgttggggaacacgttcgagcccaaccaaaattctaaacctccaaacaaggaggttcctcctcaggaatttaatgatagggtgctggaaggttttcaagtcacccccctttggcatcaaggttttattcgcgatgatggaaggtcaaattatgtagagacggtaaagacagctcgtggagtgtatagtacacgtcctgaatatg

SEQ ID NO: 125203 - DNA, 236 bp, Glycine max
ggctcgagaagctggtgcagtttggagagattcaggaaaaagttgtattgaaattttcacaagaggaatttcttacagcttggtcaactcaggtgcgtcctgcaacaactctgttggctgatgggtgtccatatttgtatgcaatggtgcatgatagttcagtgtctacaataccaggtgattttgtcattggtgtcaagttgacaaccataaccaatatgtgtgcatatgggctc

SEQ ID NO: 125204 - DNA, 252 bp, Glycine max
gttgaaggaaatggctgaagcacaactacgagaccagcatggcaaccctgtcccactcaccgatcaatacggtaatccggttatcttaactgacgagcgcggtaatcccgtccaactcactggtgtcgctaccaccgctaccggcacagcaggttctgggtttgggtcctatggtaccggtgcttacggtggtggtgcaagtgcaaccaccgttgcagatcttttggcaacccaaccaaggagtggcaggga

SEQ ID NO: 125205 - DNA, 253 bp, Glycine max
aattcttccaccaagttatgggtttccttgtgttgcttcttttctccctcttaggtctctcttctagttccagcatatcaactcatcgttccatattggaccttgacctaaccaagtttaccacacagaaacaggtgtcttcactgttccaactatggaagagtgagcatggacgtgtctaccataaccacgaagaagaggcaaagagtcttgagattttcaagaataacttgaactataggcgggatatgaa

SEQ ID NO: 125206 - DNA, 253 bp, Glycine max
attctgggatgaaggaaaaatttgtacaaatgatgaagagcatctatgaaacagaagttacagattggccagtaccactgaaaatcatttctggaaccattcttgcaacaattttgggaacaaccttctggaaactcttttcctttcttagagatgctggtaatgggggagtttttgttggcaatgttgcttcagcattcacaacttcaagtgtgcttgaggcccaaagtagaaagcccaacagatatgaagt

SEQ ID NO: 125207 - DNA, 199 bp, Glycine max
ttcaaaccttgctctatactacacagtacacacactagaagaataatggcttccatcctccactactttttagccctctctctttcttgctcttttcttttcttcttatccgactcagtcacccctacaaaaccaataaaccttgttgttctacccgttcaaaatgatggttccacagggctccattggtgcaacctcc

SEQ ID NO: 125208 - DNA, 255 bp, Glycine max
caaagtccttgtttgttcctcagtacctcgactccaatctcatcatattcatccgtagaggggaagcaaagctgggattcatatatgatgatgaactagcggaaaggagattgaagacaggggacttgtacatgattccatctggttcagcattctatttggtgaacataggagaaggtcagagacttcacgttatctgcagcattgacccctctacaagcttgggattagagaccttccagtccttctatattg

SEQ ID NO: 125209 - DNA, 245 bp, Glycine max
attaggtggcatctgtataccttgttgatctacattctcccatcttttctcactgctgaaattaaatataagcggaatctgagtaatattcatatttccggcttattttacgacggcagatacaaattctggactaaacacgagaaaaatcttgctttgacagaagaggaaaagatggaagtgattagaaatagaggcattcctgctgatgttcttgcaaagcgagctcatgaatttgaaaaaca

SEQ ID NO: 125210 - DNA, 255 bp, Glycine max
tggaaaaggaaaagttggaaaggatacgttcttggaagggattaatacttcgttaccaactttgggagcaggagagtctgcattcaatattcattttgaatgggacggaagcatgggaatccccggtgcgttttacataaagaactacatgcaagttgagttcttcctcaagagtttgactcttgaagccatttcaaaccaaggaaccatccgctttgtttgcaactcatgggtttataacactagactttacaa

SEQ ID NO: 125211 - DNA, 253 bp, Glycine max
tggggaagcccttcttcactctctctctttcttccctttgcttgctactcttgtcgagtgcatgctttgctattacctccagcaagttcaacgagtgccaactcaacaacctcaacgcgttggaacccgaccaccgcgttgagtccgaaggtggtcttattgaaacatggaactctcaacaccctgagctgcaatgcgccggtgtcactgtttccaaacgcaccctcaaccgcaacggcctcaacttgccatc

SEQ ID NO: 125212 - DNA, 233 bp, Glycine max
cagtcaggaatcggctcagaaggttctgttggtaagagagggagcactagacgaggagaggctgcaagagagtgtgatagtggaaatctcaaagaaacaaattcgggaactgagcaaacatgccaaatctagttcaaggaaaaccatttcttctgaagataaacctttcaacttgagaggccgcgaccccatctattccaacaagcttggcaagttgtttgagattaccccag

SEQ ID NO: 125213 - DNA, 259 bp, Glycine max
gagggttgcttctggctttttgttctctgggggctgtggtgtggctgccattgctgctttatcttggatttacaactacgtttctgggaaccagcctgcgggttctgacacccttgactatgcaaaagggtaccttactgataaggcaagggatgtgaaggagagggcaaaggattatggaagttatgctcagggtagaattaatgaggccacacaaggaccttattagtcatgcatgcatgaatatatgcatgtgtgt

SEQ ID NO: 125214 - DNA, 243 bp, Glycine max
cttaattattaacacttccttagttcaatatggggaagcccttcactctctctctttcttccctttgcttgctactcttgtcgagtggatgctttgctattagcttcagcaaacacttcttggcacaatccttcaacaccaacgaggactcagctgagaaacttcagtctccagacgacgaaaggaagcagatcgtgacagtggaaggaggtctcagcgttatcagccccaagtggcaagaac

SEQ ID NO: 125215 - DNA, 253 bp, Glycine max
ctcgagccgtgaaaatgcagttcgtagtatttttgtcgcgcctttcagaggcggaaggcctattcgggtggttacatttccgaataccattgtgcagattgaaccagacatgaattcaaggtttcagcttttgagtaccactaccaatggtgattttgttcaaggaaaagatctcgcaatggttaaagttaatgtagcatgtgctgctgttggcttgacatcaagtgacactccaactccagtgttggaatct

SEQ ID NO: 125216 - DNA, 215 bp, Glycine max
ctgcattggagtggcagtccatccagtgacacaaatgatatcacaatgaaatccggtacgcttcagaaattccaaactccacgcatcagaacacgggtttggattaaatgacatagtcattgcttttgtgcaagcaggattccataattcacagtcttgagagcagatggcgtaaatatcagaactggcacgccccctaaaagaactattcatag

SEQ ID NO: 125217 - DNA, 255 bp, Glycine max
cggctcgagattttgataaaccgcgatcacaggttgccgcaccttaaaaccggaaacaaaagcaatcgttacttgatttcaagaatctctcaatttcttcctacttctttgtgtacgatttcttaagggaaagaaaatcactctctgtgctggccacagacttcgtgaatcattatcttttccactcttagtttatttgctgaacactctcctatttgatataggacttcgtgtcagatttaaacttcttctgtt

SEQ ID NO: 125218 - DNA, 255 bp, Glycine max
tgtgactcgagggaaaggaagagttagagtggtgaactgccaagggaatgcagtgttcgacggtgagctaaggaggggacaattgctagtggtgccgcagaactttgtggtggctgagcaagggggagaacaaggattggaatacgtagtgttcaagacacaccacaacgccgtgagcagctacattaaggaagtctttagggcaatcccttcggaggttctttccaattcttacaacttggccagagtcaagtg

SEQ ID NO: 125219 - DNA, 253 bp, Glycine max
cggaagccttggaagacattactgctctcttctatgatgaagagcgcaacgagatctatacaggcaataggcatggtctggttcatgtctggtctaactgatgcattgttgagtttattcttgtctcgtgttttctcattagtattgatccatgggttgcagtcatagttctctcctgatgtaagaacctttgggagagctgtaaccattaggtgttattgtatcatttatgttttggttgttttgtcatcta

SEQ ID NO: 125220 - DNA, 252 bp, Glycine max; identical to SEQ ID NO: 103369

SEQ ID NO: 125221 - DNA, 189 bp, Glycine max
gcttggaagaaaggctgtttaatggttaagattgtgatgtctgggaatgcagcagtcaaaaggagtgattgggcctcattggtacaagtgtttttaacaaacagcaacagtacagagcattttgatgcatgtaagtggacaaaatcggacccacattcctgggatttgatcttcccaatagaggaatgt

SEQ ID NO: 125222 - DNA, 250 bp, Glycine max
aatatatatactatgatgagagtgcggtttcctttgttggtgttgctaggaactgttttcctggcatcagtttgtgtctcattaaaggtgagagaggatgagaataaccctttctacttgagaagctctaacagcttccaaactctctttgagaaccaaaacggtcgcattcgtctcctccagagattcaacaaacgctccccacaacttgagaaccttcgagactaccggattgtccagtttcagtcaa

SEQ ID NO: 125223 - DNA, 215 bp, Glycine max
cttattaacactttccttagttcaatatggggaagcccttcttcactctctctctttcttccctttgcttgctactcttgtcgagtgcatgctttgctattacctccagcaagttcaacgagtgccaactcaacaacctcaacgcgttggaacccgaccaccgcgttgagtccgaaggtggtcttattgaaacatggaactctcaacaccctgag

SEQ ID NO: 125224 - DNA, 232 bp, Glycine max
gaagacgaagatgatgaagatgaacaaattccctctcaccctcctcgccgaccaagccatggaaagcgtgaacaagacgaggacgaggacgaagatgaagataaacctcgtcctagtcgaccaagccaaggaaagcgtgaacaagaccaggaccaggacgaggacgaagatgaagatgaagatcaacctcgcaagagccgcgaatggagatcgaaaaagacacaacccagaa

SEQ ID NO: 125225 - DNA, 253 bp, Glycine max
cacaaatcttagccgccattgatttttcctcttccatttctcttactttctcagcctttttcgattacccatttggttatttcgccctaatggctcttgctccatccaaagtttccaccttttctggtttttctcccaaacccagtgttgggggtgctcagaaaaacccaacttgctctgtttctctgagctttttgaatgagaaacttggaagcagaaaccttagggtttgtgcctcaacggtgcctctcac

SEQ ID NO: 125226 - DNA, 230 bp, Glycine max
cattgtctttgaacactcatcaccatggccaagcttgttctttccctttgtttccttcttttcagtggctgcttcgctctgagagagcaggcacagcaaaatgagtgccagatccaaaagctgaatgccctcaaaccggataaccgtatagagtcggaaggtgggttcattgagacctggaaccctaacaacaagccattgcagtgtgccggtgttgcctctctcgctgc

SEQ ID NO: 125227 - DNA, 252 bp, Glycine max
aagcagagcttttgtcagttttctattgaccttctcggtggaggaatcttagtggacaaaactggagattggatcacacttatacaaaattctccaattagtaacttgttgagagttgctgcttggaagaaaggctgtttaatggtcaagattgtgatgtctgggaatgcagcagtcaaaaggagtgattgggcctcattggtacaagtgtttttaacaaacagcaacagtacagagcattttgatgcatgt

SEQ ID NO: 125228 - DNA, 256 bp, Glycine max
cggctcgaggaaattttgataaaccgcgatcacaggttgccgcaccttaaaaccggaaacaaaagcaatcgttacttgattacaagaatctctcaatttcttcctacttctttgtgtacgatttcttaagggaaagaaaatcactctctgtgctggccacagacttcgtgaatcattttcttttccactcatagtttaactcctgcacactctcctatttgatataggacttcgtgtcacatttaaactttttctg

SEQ ID NO: 125229 - DNA, 235 bp, Glycine max
cttcactctctctctttcttccctttgcttgctactcttgtcgagtgcatgctttgctattagctccagcaagctcaacgagtgccaactcaacaacctcaacgcgttggaacccgaccaccgcgttgagtccgaaggtggtttgattcaaacatggaactctcaacaccctgagctgaaatgcgccggtgtcactgtttccaaactcacccgcaaccgcaatggcctccacttg

SEQ ID NO: 125230 - DNA, 244 bp, Glycine max
ggcaaattttttgacagagggcaattttagagcaagtgttgatttgcagcgcactcatcgtatcacaggaatgattaggatggtggccacagttggtattcctgagaatacaggtatagcattggcctgtgctatgagtagttcttttagggggcgtgccagttctgatatttacaccatctgctctcaagactgtgaatgatcgaatcctgcttgcacagaagcaatgactatgtcatttagt

SEQ ID NO: 125231 - DNA, 236 bp, Glycine max
taattattaacacttccttagttcaatatggggaatcccttcactctctctctgtcttccctttgcttgctactcttgtcgagtgcatgcgttgctattagctccagcaagctcaacgagtgccaactcaacaacctcaacgcgttggaacccgaccaccgcgttgagtccgaaggtggtttgattcaaacatggaactctcacaaccctgagctgaaatgcgccggtgtcactgt

SEQ ID NO: 125232 - DNA, 253 bp, Glycine max
ctcgagaaacctgattttgagcccattgctgctcttggcattgagatttggacaatgcaggatggcatcctatttgacaatattctgatagctaacgatgataaagttgcagaatcctatcgggagaccacatggaagcccaagtttaccattgagaaagaaaaacagaaggctgaagatgaggctgcaactggttcagatggtattgcaggcttccagaagaaggtatttgacctcttgtacaagattgcag

SEQ ID NO: 125233 - DNA, 163 bp, Glycine max
acttcaagtgtgcttgaggcccaaagtagaaagcccaacagatatgaagtttcccaatacagatatcgcaatgtgccaataaagcgcagagcatgggttgaaggccagatgtctttcgatcagtctgtagtagcaattatgtctaaatgcaaagccagcatga

SEQ ID NO: 125234 - DNA, 250 bp, Glycine max
agaatacaggtatatcattggcctgtgctatgaatagttcttttagggggcgcgccagttctgatatttacaccatctgctctcaagactgtgaattgtggaatcctgcttgcacaaaagcaatgactatgtcatttaatccaaacccgtgttctgatgcatggagtttggaatttctgaagcgtactggatttcattgcgatatcatttgtgtcactggatggactgccaccccaatgcaggatgttca

SEQ ID NO: 125235 - DNA, 235 bp, Glycine max
gtgcggtttcctttgttggtgttgctgggaactgttttcctggcatcagtttgtgtctcattaaaggtgagagaggatgagaataaccctttctacttgagaagctctaacagcttccaaactctctttgagaaccaaaacggtcgcattcgtctcctccagagattcaacaaacgctccccacaacttgagaaccttcgagactacgggattgcccattttgagtaaaccccca

SEQ ID NO: 125236 - DNA, 227 bp, Glycine max
tctcgagccgaatcggctcgagatccgagatcaaccccgacgaaggcaaggggtttttctcggcttcttcagatttctgaaatggcgcctgtttcagctttagccaagtacaagctcgtcttcctgggtgaccaatccgtgggcaaaaccagcatcatcactcgcttcatgtatgataaattcgataacacctatcaggctacaattggtatggatttccaaccaaa

SEQ ID NO: 125237 - DNA, 251 bp, Glycine max
gcagaatgggcagaagataacattccctggcgaactgcatgaagcgccggacacaattactggggatatcgtctttgtccttcagcagaaggaacatcccaaattcaaaagaaaggctgaagatctttttgtagagcacactttgtcccttaccgaggccttgtgtggcttccaatttgtgctgactcacttggatagcggtcagcttcttattaaatcaaatcccggggaagttgtgaagcctgattcat

SEQ ID NO: 125238 - DNA, 142 bp, Glycine max
ttgaaattttgataaaccgcgatcacaggttgccgcaccttaggaccggaaacaacagcgatcgtctcttgattgcacgattctcacaatttctgcatactctctatgtgtacgatttcttaggggaaagaaaatcactctc

SEQ ID NO: 125239 - DNA, 250 bp, Glycine max
ctttggaaagttctttgagatcacccctgagaaaaacccacagcttcgggacttggatatcttcctcagttctgtggatatcaacgaaggagctcttcttctaccacacttcaattcaaaggccatagtgatactagtgattaatgaaggagatgcaaacattgaacttgttggcattaaagaacaacaacagaagcagaaacaggaagaggaacctttggaagtgcaaaggtacagagctgaattgtct

SEQ ID NO: 125240 - DNA, 270 bp, Glycine max
tcagaattccgctagggaaattatcctttgatattaaatctcgctctagattggaaaaagtttcctctacaaaagcacaatttgttagtggaaaaaccttcaaatatgatataattggtgctggttcacattcttcagatgattttcctgaaaaggaagatcaagaaaaacccaaaaagattgatgccagattgagacaaagaatagatcctcaatagaatgaggttcaggctcagatggaaacaaatttgtttaaattgtctcttgatg

SEQ ID NO: 125241 - DNA, 107 bp, Glycine max
gaaattttgataaaccgcgatcacaggttgccgcaccttagaaccggaaacagtagcaaacgttacttgatttcaagaatctctcgatttcttcctacttctttgtg

SEQ ID NO: 125242 - DNA, 251 bp, Glycine max
attgtctttgaacactcatcaccatggccaagcttgttctatccctttgtttccttcttttcagtggctgcttcgctctgagagagcaggcacagcagaatgagtgccagatccaaaagctgaatgccctcagaccggataaccgtatagagtcggaaggtgggttcattgagacctggaaccctaacaacaagccattccagtgtgccggtgttgccctctctcgctgcacccttaaccgcaatgccctt

SEQ ID NO: 125243 - DNA, 252 bp, Glycine max
gctttctagctggtcataatatcaccattactgatggtattgacaagactagtgcaactttgcaatttagaaagttagcagattgtgattttctcaagagaaactttaagcagatgtctaatgttttgtgggtagctcctgaggacaaggcgagtttatggtcacaacttcattatgtttcgtgtaataatctggaaatgcaagaagcttatcttgtcaatctcgtaaatgtgttacgagaattgtatttgc

SEQ ID NO: 125244 - DNA, 104 bp, Glycine max
ggctcgagtggtccttaaacactcatcagtcaccaccatggccaagcgcgttagttccctttgtattcacgcttttcagtggctgctgcttagctttcagtacc

SEQ ID NO: 125245 - DNA, 106 bp, Glycine max
gtataccttaataaataatttaagatactatgatgagagcacggttcccattactgtagctgggacttgttctcctggcttcagtttctgtctcatttggcattgc

SEQ ID NO: 125246 - DNA, 240 bp, Glycine max
gttcctcactgaccaagccatggcgatgagaaccagactttctttagctatctttttcttttttcttttagccttattttcaaacctagcctttggcaaatgtaaagaaaccgaggtagaagaagaagaccctgagctcgtaacatgcaaacaccaatgccaacagccacagcaatacactgagggtgacaagcgggtatgcttgcaaagatgtgacatgtatcatcgtatgaagcaaga

SEQ ID NO: 125247 - DNA, 243 bp, Glycine max
tcaatatcctagtacaccgtattaaagaatttgagatgtactatgatgagagcgcggttcccattactgttgctgggagttgttttcctggcatcagtttctgtctcatttggcattgcgtattgggaaaagcagaaccccagtcacaacaagtgcctccgaagttgcaatagcgagaaagtactcctacaggaaccaagcatgccacgctcgttgcaacctcctaagggtggaggaagaaaa

SEQ ID NO: 125248 - DNA, 251 bp, Glycine max
ctcgagccgccttagttcaatatggggaagcccttcttcactctctctctttcttccctttgcttgctactcttgtcgagtgcatgctttgctattacctccagcaagttcaacgagtgccaactcaacaacctcaacgcgttggaacccgaccaccgcgttgagtccgaaggtggtcttattgaaacatggaactctcaacaccctgagctgcaatgcgccggtgtcactgtttccaaacgcaccctcaa

SEQ ID NO: 125249 - DNA, 254 bp, Glycine max
agttgccacgccgctcttcgtcctcttcagcccggtgctggttccagccacggtcgccatcggcctggccgtggccgggttcctgacgtcgggggccttcgggctcacggcgctgtcttccttctcctggatcctgaactacatccgggagacccagccagcctcggagaacctcgccgccgccgcgaagcatcacctcgccgaggcggcggagtacgtggggcagaagacgaaggaagtggggcacaagacca

SEQ ID NO: 125250 - DNA, 251 bp, Glycine max
  unsure (1)..(251): unsure at all n locations
aagatttgaaattttgataaaccgcgatcacatgttgccgcaccttaaaaccggaaacaaaagcaatcgttacttgatttcaagaatctctcaatttcttcctacttctttttgtactatttcttaagggaaagaaaatcactctctatgctggccacatacttcgtgaatcattttcttttccactcttaattcatttcgagaanactctcctatttgatataggacttctgtcagctttaaacctcttc

SEQ ID NO: 125251 - DNA, 254 bp, Glycine max
atcggagacactattcctgatcttcaagttgaaactaaccaaggcaaaatcaagcttcatcagttctgtgctgatggctggaccatccttttctctcacccaggtgatttcaccccggtttgtaccactgagcttggtaagatggctcagtatgctaaggagttttatcaacgaggagtgaagctcttaggtttatcttgtgatgatgtgcaatcccacaatgagtggatcaaagacattgaagcctacactcc

SEQ ID NO: 125252 - DNA, 248 bp, Glycine max
ataggaatataagaactaagatggattggatcggagcgtaccgcggaggccagagaagcagggactggtgcgacccttcatcaccattcactgatttgtgggaccctcgtcgtgtcggtgacgctgatgatatcacctcctctctcgcccatgctcacgttgactggcgtgagactgataaagctcatatcttccgtgctgatcttccaggggtgaagaaagaggatctgaaggtgcaggtggaggag

SEQ ID NO: 125253 - DNA, 237 bp, Glycine max
ctagttcaatatcctagtataccttaataaataatttaagatactatgatgagagcacggttcccattactgttgctgggacttgttttcctggcttcagtttctgtctcatttggcattgcttactgggaaaaagagaaccccaaacacaacaagtgtctccagagttgcaatagcgagagagactcgtacaggaaccaagcatgccacgctcgttgcaacctccttaaggtggag

SEQ ID NO: 125254 - DNA, 248 bp, Glycine max
atttccaaaaatgccagtgaagatgaaatcaagaaggcctatagaaaggcggctatgaagaaccatccagataagggaggagatcctgaaaagtttaaggagttaggtcaagcatatgaagttttaagtgatcctgagaagaaagaactgtatgaccagtatggtgaagatgcccttaaagaagggatggggggaggaggctcgtttcataatccatttgatatatttgaatcattttttggaggagc

SEQ ID NO: 125255 - DNA, 251 bp, Glycine max
ggacaaggcgagtttatggtcacaacttcattatgtttcgtgtaataatctggaaatgcaagaagcttatcttgtcaatctcgtaaatgtgttacgagaattgtatttgcacagtccagaggaagctcgccaattgagaaggaaagctctctctcgtattgaatggctgcaaaaagctgatgtgcctaccatagcacagattgaagagttccattcgatgcagaggatgatgaatgctcctgattcaaatg

SEQ ID NO: 125256 - DNA, 248 bp, Glycine max
atcttaaacttcttactgatgggaagttgtatgagggtaagcatattcctgtatctaatattagtgcaggggaaaatcatgtagttcaaatacccttaatggcacaggaggaaattctgtcttctagtgcaagtgatttcagagctgcaatggtgagtaaaaatagcaagcctcaagctactgcaatgcatgtgggagctatagaaattatcattgatagtttcgcaagtcctgattgcaacatagtt

SEQ ID NO: 125257 - DNA, 108 bp, Glycine max
attggatttgcatttccgggatgtcctgagacgtttgagaagccacaacagcaatcaagcagaagaggctcaaggtcgcagcagcaactacaagacagtcaccagaag

SEQ ID NO: 125258 - DNA, 277 bp, Glycine max
aatcggctcagttgaaattttgataaaccgcgatcacaggttgccgcaccttaaaaccggaaacaaaagcaatcgttacttgatttcaagaatttctcaatttctttctacttcttcgtgtacgatttcttaagggaaagaaaatcactctctgtgctggccacagacttcgtgaatcattttcttttccacttttagtctattcacctgaacactctcctatttgatataggacttcgtgtcagatttaaacttcttctgcttctttctcagttct

SEQ ID NO: 125259 - DNA, 275 bp, Glycine max
atgtctaccttgttgatctacatcctcccatcttttctcactgctgaaattaaatataagcggaatcagagtaatattcagatttccggcttattttacgacggcagatacaaattctggactaacacgagaaaaatcttgctttgacagaagaggaaaagatggaagtgattagaaatagaggcattcctgctgatgttcttgcaacgcgagctcatgaatttgaaaaactgttgctcatgaaagcctcaaggatcaaattcctgctgttgaca

SEQ ID NO: 125260 - DNA, 289 bp, Glycine max
ctcgaatccctgtgtgttaaataggtggatgggaaaattgactttcccccagggcacttcccgaagtgttaagagaatgcctctttctatagggggaggagctggtgcaaagaatgctattctcatgaaatgccaaatgctgttctttcaatgtggagatattttgttggagatctcgtctttgaagtttctaagatgacttctccctacattaaatgtacagtctctttcttcatagcatttggaaatttggctgatgataccatcaattttgaggcttttccccaca

SEQ ID NO: 125261 - DNA, 284 bp, Glycine max
accagttcaatatcctagtacaccgtattaaagaatttaagatctactatgatgagagcgcggttcccattactgttgctgggagttgttttcctggcatcagtttctgtctcatttggcatgcgtattgggaaaagcagaaccccagtcacaacaagtgcctccgaagttgcaatagcgagaaagactcctacaggaaccaagcatgccacgctcgttgcaacctccttaaggtggaggaagaagaagaatgcgaagaaggtcaaactccacgaccacgacca

SEQ ID NO: 125262 - DNA, 276 bp, Glycine max
ctcaggtgcgtcctgcaacaactctgttggctgatgggtgcccatatttgtatgctatggtgcatgatagttcagtgtctacaataccaggtgattttgtcattggtgttacgttgacaacataaacaatatgtgtgcatatgggctcaatcctggtatttcaggttctcgtcttttgggcaccattcctcagtccatttcacagcaaactgtttggaatgaaatggcaacagtgagaacaccatgaattttgattctagcaagcagagttttgtc

SEQ ID NO: 125263 - DNA, 280 bp, Glycine max
gctctctctctccttctcgctctttcagctttgacttttgttggaaactaaggcctaatcaaaatggtgaagttcacagctgaagagctacgtcgtattatggactataagcataatatcgtaatatgtctgtcattgctcatgttgatcacggaaaatcaaccctcactgattctcttgtggctgctgctggtattattgctcaagaagttgccggtgatgtccgtatgactgatacccgtgcagatgaagctgagcgtggtattaccatcaagtctac

SEQ ID NO: 125264 - DNA, 280 bp, Glycine max
ctcgagatcgagccctcgagccgattcggctcgagaaagatcatacatagtagtgttggtggcatgcacagctcttgggggtcttctccataggggacataagataaaagggacagtggtgttgtgcgcaagaatgtgttggacgtgaatagcgtaaccagcgttgggggaattattggtcaaggtctcgacttagttggctcaacactcgatactcttactgccttcttgggccgatccgtgtctctccagcttattagtgctaccaaagctgatgcca

SEQ ID NO: 125265 - DNA, 273 bp, Glycine max
caaggaggaaaaacgcggagaaaagggaagtgaagaggaagatgaggatgaggatgaggaacaagatgaacgtcaattcccattcccacgcccacctcatcagaaggaagagcgaaagcagaggaagatgaggatgaggagcagcagcgagagagcgaagaaagtgaagattctgagttacgaagacataagaataagaaccctttctcttcggctctaacaggttcgaaactctcttcaaaaaccaatatggtcgcattcgcgtcctccaga

SEQ ID NO: 125266 - DNA, 281 bp, Glycine max
cagaagaggaaaagatggaagtgcattagaaatagaggcattcctgctgatgttcttgcaaagcgagctcatgaatttgaaaaacatgttgctcatgaaagcctcaaggatcaaattcctctgttgacaagttgtattctactaaggttaataagtttgcaaaaattatgaaccttagacacagtgttgttggtgctcttaaacttcttactgatgggaagttgtatgagggtaagcatattcctgtatctaatattagtgcaggggagaatcatgtagtt

SEQ ID NO: 125267 - DNA, 279 bp, Glycine max
gactgggatatgcttcattgataccatatgttgagccagttgtgcaagctcaaagtgctgaagtttacttcgacttcttccctgtggaggttgatagtcaagagggagttgctcacattggtgaattgaaatctggtgtctatgttccactgcctacaaaaactaatttggtggaaactcccaaggaatggcaactggatctaccttgtgacaaaattcctagtgtcttgactacaactgatgaacgattggtaggcacagaacatgagggatatgatc

SEQ ID NO: 125268 - DNA, 280 bp, Glycine max
tcggctcgagcttctctggttgattcggatctagagtcttcagtttctcctcgttgttcttcgctttcctgttttcaatttcgattctttcgttaatttaataagatgtttgggagggcaccgaagaagacgataatacgaggtactacgaaatcctcggcgtctccaagaacgcttcgcaggatgatctgaagaaggcttacaagaaagccgccattaagaatcaccccgacaagggcggtgatcccgagaagtttaaagagctggcgcaagcttatga

SEQ ID NO: 125269 - DNA, 282 bp, Glycine max
aaaagatcatacatagtagtgttggtgggttgcaaagatgcttgggggtcttctccataggggtcataagataaaagggacagtggtgttgatgcgcaagaatgtgttggacgtgaataggtaaccagcgttgggggaattattggtcaaggtctcgacttagttggctcaacactcgatactcttactgccttcttgggccgatccgtgtctctccagcttattagtgctaccaaagctgatgccaacggaaaagggaaacttggaaaggctacctttttg

SEQ ID NO: 125270 - DNA, 275 bp, Glycine max
acatagtagtgttggtgggttgcaaagatgcttgggggtcttctccataggggtcataagataaaagggacagtggtgttgatgcgcaagaatgtgttggacgtgaatagcgtaaccacgttgggggaattattggtcaaggtctcgacttagttggctcaacactcgatactcttactgccttcttgggccgatccgtgtctctccagcttattagtgctaccaaagctgatgccaacggaaaagggaaacttggaaaggctacctttttggaa

SEQ ID NO: 125271 - DNA, 280 bp, Glycine max
aattcttccaccaagttatgggtttccttgtgttgcttcttttctccctcttaggtctctcttctagttccagcatatcaactcatcgttccatattggaccttgacctaaccaagttaccacacagaaacaggtgtcttcactgttccaactatggaagagtgagcatggacgtgtctaccataaccacgaagaagaggcaaagagacttgagattttcaagaataacttgaactatatcagggacatgaatgcaaacagaaaatcaccccattctcat

SEQ ID NO: 125272 - DNA, 278 bp, Glycine max
atgaccaagttcacaatcctcctcatctctcttctcttctgcatcgcccacacttgcagcgcctccaaatggcagcaccagcaagatagctgccgcaagcagctccagggggtgaacctcacgccctgcgagaagcacatcatggagaagatccaaggccgcggcgatgacgatgatgatgatgacgacgacaatcacattctcaggaccatgcggggaagaatcaactacataaggaggaacgaaggcaaagacgaagacgaagaagaagaaggaca

SEQ ID NO: 125273 - DNA, 279 bp, Glycine max
tatttcttcttatctagcactcaagcccaacagtcctacttgcaaggcttgagtgctagataagaagaaatcatcatatctgccaggtttgttgacgggtatggcaagtttgattatttgagattcatgtggtcgtgagggttaaccaccttgtaagtccatctgctctcaagactgtgaattgtggaatcctgcttgcacaaaagcaatgactatgtcatttaatccaaacccgtgttctgatgcatggagtttggaatttctgaagcgtactggatt

SEQ ID NO: 125274 - DNA, 260 bp, Glycine max
atcgaagccggggagcggaggtgcggcgtcggcgcagaacgaagccatagaccggcgagagcgtctccggcgattggctctggagaccatagacctggcgaaggatccctatttcatgcgcaaccacctcggaagctacgaatgcaaactctgtctcactctccacaacaacgagggtcaactacttggctcacactcagggaaagcgccaccacaccaacttggccacacgtgcagtcgcgaggccaaagatccccgcg

SEQ ID NO: 125275 - DNA, 277 bp, Glycine max
gttccaagagatgaaaattttggtcacttgaagtcctcggattttcttgcatatggaataaaatctttatctcaatatgtcttaccggcgttcgaatctgttttcgatttgaacttcacgccaaatgagtttgatagcttccaagatgtgcgtgacctccacgaaggtggaattaagcttcctacagaagtaattagcacaattatgcccttaccggtggtcaaagaactctttcgtacagatggtgaacaagtcctcaagtttccaccacctcatg

SEQ ID NO: 125276 - DNA, 274 bp, Glycine max
gcatttttaatgagatgctcattagatatagctatgaaaaattactgcgccaggctaaagctccaagtatgtttttacaatccttcaaaaattttgtttctttgtgtgtgtatggtatgataacttaattagtgttcatgaatacgtcaagccttactttagtggttctaaattgaaaagctttctagctggtcataatatcaccattactgatggtattgacaagactagtgcaactttgcaatttagaaagttagcagattgtgattttctc

SEQ ID NO: 125277 - DNA, 275 bp, Glycine max
tcttgcaactgcacaaagtgttcgagatgctctcattataaactggaatgctacctatgattactatgagaagctgaatgttaagcaggcatattacctttcgatggaatttttgcgggtagagcactattaaatgcaataggaaatctagagttaactggtccccatgctgaggctttgagcaagctcgggcataaattagaaaatgtggcataccaggagccagatgctgcacttggaaatggtggtcttgggcgtcttgcttcatgtttctt

SEQ ID NO: 125278 - DNA, 272 bp, Glycine max
gttctacatagcatctcctttaccaccattctagatatcagagaactttgcagctctcttaggtttttaaaaaacaccacgcaaacagcaagatggccacttccgacagtaacatgtactaaattatgttccagtttatgtgatgctcccactcggagttgtcaatgttgacaatgtttttgaagacccagatggccttaaagaacagctcttgcagcttcgagctgcgggtgttgacggggttatggttgatgtgtggtgggggatcatag

SEQ ID NO: 125279 - DNA, 269 bp, Glycine max
attcatcgcgttgctaacttaacaccaatgacaaaatcacctggtattgtcattggtgttaagttgacaaccataaacaatatgtgtgcatatgggctcaatcctggtatttcaggttctgtcttttgcagttcattcctcagtccatttcacagcaaactgtttggaatcaaatggcaacagtgagaacaccattgaattttgattctagcaagcagagcttttgtcaattctctattgatcttcttggtggaggaatcctagtggac

SEQ ID NO: 125280 - DNA, 283 bp, Glycine max
gtacaagtggtgaattgcaatggtgagagagtgtttgatggagagctgcaagagggacaggtgttaattgtgccacaaaactttgcggtggctgcaagatcacagagcgacaacttcggtatgtttcattcaagaccaatgatagaccctcgatcggcaaccttgcaggtgcaaactcattgttgaacgcattgccggaggaagtgattcagcaacttttaacctaaggaggcagcaggccaggcaggtcaagaacaacaaccctttcagcttcctggttcca

SEQ ID NO: 125281 - DNA, 281 bp, Glycine max
cggaatttgagtaatattcatatttccggcttattttacgacggcagatacaaattctggactaaacacgagaaaaatcttgctttgacagaagaggaaaagatggaggtgattagaatagaggcattcctgctgatgttcttgcacagcgagctcatgaatttgaaaaacatgttgctcatgaaagcctcaaggatcaaattcctgctgttgacaagttgtattctactaaggttaataagtttgcaaaaattatgaaccttagacaagtgttgttggtg

SEQ ID NO: 125282 - DNA, 280 bp, Glycine max
ctacacagtacacacactagaagaataatggcttccatcctccactactttttagccctctctctttcttgctcttttcttttcttcttatccgactcagtcacccctacaaaaccataaaccttgttgttctacccgttcaaaatgatggttccacagggctccattggtccaacctccaaaaaagaacccctctaatgcaagtaccagtcctggtggacctcaatggaaatcacttgtgggttaactgtgagcagcagtactcatccaaaacgtacca

SEQ ID NO: 125283 - DNA, 277 bp, Glycine max
agaatataggaatataagaactaagatggattggatcggagcgtaccgcggaggccagagaagcagggactggtgcgacccttcatcaccattcactgatttgtgggaccctcgtcgtgtcggtgacgctgatgatatcacctcctctctcgcccatgctcacgttgactggcgtgagactgataaagctcatatcttccgtgctgatcttccaggggtgaagaaagaggatctgaaggtgcaggtggaggagaataagatcctgcagataagcggg

SEQ ID NO: 125284 - DNA, 273 bp, Glycine max
cattggtccttaaacactcatcagtcatcaccatggccaagctagttttttccctttgttttctgcttttcagtggctgctgcttcgctttcagttccagagagcagcctcagcaaacgagtgccagatccaaaaactcaatgccctcaaaccggataaccgtatagagtcagaaggagggctcattgagacatggaaccctaacaacaagccattccagtgtgccggtgttgccctctctcgctgcaccctcaaccgcaacgcccttcgtag

SEQ ID NO: 125285 - DNA, 264 bp, Glycine max
gtgcggtttcctttgttggtgttgctgggaactgttttcctggcatcagtttgtgtctcattaaaggtgagagaggatgagaataaccctttctacttgagaagctctaacagctccaaactctctttgagaaccaaaacggtcgcattcgtctcctccagagattcaacaaacgctccccacaacttgagaaccttcgagactaccggattgtccagtttcagtcaaaacccaacacaatccttctccgccaccatgctgacg

SEQ ID NO: 125286 - DNA, 272 bp, Glycine max
tacttcactgttgctggactccacaagaaggagcttgtctgagaaggaaacagatagaagctttgggttgagaaatttcaggtacattgagaccatcaaagaagcttggaaaggaatgcccaggagttgtttcctgtgctgatatcctcgttctctctgccagagatggcattgtttcgctaggaggtccccatatccctcttaaaacaggaagaagggatggtagaaggagcagagccgatgtggtagagcagttcctcccagaccacaat

SEQ ID NO: 125287 - DNA, 258 bp, Glycine max
ctttgcacagcacacggaacagatggcaagtgattacgaaatagcaagcgattcctgactggatgttcctcgcaccagcagagctacatggaatttagaaacaacatggttgtctcatgcagcagcctcaagcatcagatatcctgctgttgcacaagttgtattactactaaggctactaactttgcacaaattatgaaccttagccagagtgttgttggtgatcttagattcttcctgatgggaagtgtctgaggg

SEQ ID NO: 125288 - DNA, 271 bp, Glycine max
taagatttgacattttgataaaccgcgatcacaggttgccgcaccataaaaccggaaacaaaagcaatcgttacttgatttcaagaatctctcaatttcttcctacttctttgtgtacgatttcttaagggaaagaaaatcactctctgtgctggccacagacttcgtgaatcattttcttttccactcttagcccacctcacgcacactctcctatttgatataggacttcgtgtcagatttaaacttcttctgtttctttctcagttct

SEQ ID NO: 125289 - DNA, 263 bp, Glycine max
ctctcgagccgaatcggctcgagaatatcctagtacaccgtatcatagaatttacagatctcattatgatgagagcgcggttgccattactgttgctgggagttgttttcctggcatcgtttctgtctcatttggcattgcgtattgggaaaagcagaaccccagtcacaacaagtgcctccgaagttgcaatagcgagaaagactcctacaggaaccaagcatgccacgctcgttgcaacctccttaaggtggaggcagaag

SEQ ID NO: 125290 - DNA, 277 bp, Glycine max
gagtagagcagcagagaagagagaaaacggcactgcagccgtagaaggaaaaccgaccatggtgcacgtctccttttacaggaactatggtaagacgtttaagaagccccgccgtcgtacgagaaggagcgtctagacgcggagctgaagctggtgggggagtacgggctgcggtgcaagagggagctgtggagggtgcagtacgcgctcagccgcatccgcaacaacgcgcggaatctccttaccctcgacgagaagaaccgcgccggatcttcga

SEQ ID NO: 125291 - DNA, 271 bp, Glycine max
cttatttgaacaacacttgggcgttggtgcaaatgtttgcttcattaattttctctggagacaacaggctcactgcgaaaacaatctttacttgcagagatttggacatccttggtgtctattatacaatagcaactcaatttagaaaatttctaccgcattacattaggtggcatctgtataccttgttgatctacattctcccatcttttctcactgctgaaattacatataagcggaatctgagtaatattcatatctccggcttatt

SEQ ID NO: 125292 - DNA, 272 bp, Glycine max
ggcagaggaagaagaagaagaggatgagaagccacagtgcaagggtaaagacaaacactgccaacgcccccgaggaagccaaagcaaaagcagaagaaatggcattgacgagaccaatgcaccatgagacttcgccacaacattggccagacttcatcacctgacatctacaaccctcaagccggtagcgtcacaaccgccaccagccttgacttcccagccctctcgtggctcagactcagtgctgagtttgggatctctcgcaagaatgc

SEQ ID NO: 125293 - DNA, 274 bp, Glycine max
gtaagaaagatgtttggagagttgaatgtggaatcccttctggatttccgctcacagttatttgcaatagcatttttaatgagatgctcattagatatagctatgaaaaattactgcgccaggctaaagctccaagtatgtttttacaatccttcaaaaattttgtttctttgtgtgtgtatggtgatgataacttaattagtgttcatgaatatgtcaagccttactttagtggttctaaattgaaaagctttctagctagtcataacatcac

SEQ ID NO: 125294 - DNA, 274 bp, Glycine max
gtcttcttgatccttctttttctccttgaactcaaacatggcagatgaggtggttctgctagatttctggccaagtccatttgggatgagggtcaggattgcacttgctgaaagggtatcaaatatgagtacaaagaagaggacttgaggaacaagagtcctcttctcctccaaatgaacccggttcacaagaagattccggttctcatccacaatggcaaacccatttgtgaatccctcattgctgttcagtacattgaggaggtttggaatg

SEQ ID NO: 125295 - DNA, 268 bp, Glycine max
ggcaaagatctcgcaatggttaaagttaatgtagcatgtgctgctgttggcttgacatcaagctatactccgactccattgttggaatctggtttgcaaaaagacagagggtaattgtggagtattttggaaggatgtcttacgttgctcataacgttaatcagccccaagagaaagatttgttggaaggaaatttttcctttgatattaaatctcgctctagattggaaaaagtttcctctacaaaagcacatttgttagtggaaaa

SEQ ID NO: 125296 - DNA, 272 bp, Glycine max
gattcaaacatggaactctcaacaccctgagctgaaatgcgccggcgtcactgtttccaaactcaccctcaaccgcaatggcctccacttgccatcttactcaccttatcccggatgatcatcatcgcccaagggaaaggagcacttggagttgcaattccaggatgtcctgagacgtttgaggagccacaagaacaatcaaacagaagaggctcaaggtcgcagaagcagcagctacaggacagtcaccagaagattcgtcacttcaatga

SEQ ID NO: 125297 - DNA, 246 bp, Glycine max
aaaagatcatacatagtagtattggtgggctgcacagatgcttgggggtcttctccataggggtgataagatagaagggacagtggtgttgatgcgcatgaatgtgttggcgtgaatagcgtaaccagcgttgggggaattattggtcaatgtctcgacttagttggctcaacactcgatactcttactgccttcttggaccggtccgtgtctctccagcttattagtgctcacatagcctgtgcc

SEQ ID NO: 125298 - DNA, 265 bp, Glycine max
cggctcgaggttattatcaaataattaattaaattcctcgtggaatcttgttgaagccatgtctacagctggtcaggtcatcaagtgcagagctgcggtggcatgggaacagggaagccactatcgatagaaaccatagaagtggcaccaccccagaaaggtgaagtgcgtttgaagatcctcttcaactccctttgccgtacagatgtttactggtgggatgctaagggccagactccgctgtttcctcgtatcttaggccacg

SEQ ID NO: 125299 - DNA, 270 bp, Glycine max
cgatcttcgatcttcgtcgctgaaaatgagagagtgcatttcaatccacatcggccaggccgggattcaggttggaaacgcctgctgggagctttactgcctcgaacacgcattcagcctgatgggcagatgccaagtgacaagaccgttggtggaggtgatgatgttttcaacaccttcttcagtgaaactggggcaggaaagcacgtgccccgtgcgatttttgtagatcttgagcccactgtgattgatgaggttaggactgggaca

SEQ ID NO: 125300 - DNA, 263 bp, Glycine max
gaatttcttacagcttggtcaactcaggtgcgtcctgcaacaactctgttggctgatgggtgcccatatttgtatgctatggtgcatgatagttcagtgtctacaataccagtgattttgtcattggtgttaagttgacaaccataaacaatatgtgtgcatatgggctcaatcctggtatttcaggttctcgtcttttgggcaccattcctcagtccatttcacagcaaactgtttggaatcaaatggcaacagtgagaaca

SEQ ID NO: 125301 - DNA, 273 bp, Glycine max
taagtttgcaaaaattatgaaccttagacaaagtgttgttggtgatcttaaacttcttactgatgggaagttgtatgagggtaagcatattcctgtatctaatattagtgcagggagaatcatgtagttcaaatacccctaatggcacaggaggaaattctgtcttctagcgacgcgatttcagaactgcaatggtgagtagaaatagcaagcctcaagctactgcaatgcatgtgggagctatagaaattatcattgatagtcttcgcaagt

SEQ ID NO: 125302 - DNA, 267 bp, Glycine max
gaatccagcccgagagcagaaggaggaacacgaatggcatcgcaaggaggaaaaacacggaggaaagggaagtgacgaggacaagatgaacgtgaacacccacgcccacaccaacctcatcaaaaggaagaggaaaagcacgaatggcaacacaagcaggaaaagcaccaaggacaggaaagtgaagaagaagaagaagaccaagacgaggatgaggagcaagacaaagagagccaagaaagtgaaggttctgagtctcaaagagaa

SEQ ID NO: 125303 - DNA, 277 bp, Glycine max
attaacactttccttagttcaatatggggacgcccttcttcactctctctctttcttccctttgcttgctactcttgtcgagtgcatgctttgctattacctccagcaagttaacgagtgccaactcaacaacctcaacgcgttggaacccgaccaccgcgttgagtccgaaggtggtcttattgaaacatggaactctcaacaccctgagctgcaatgcgccggtgtcactgtttccaaacgcaccctcaaccgcaacggcctccacttgccatct

SEQ ID NO: 125304 - DNA, 270 bp, Glycine max
agattgaaccagacatgaattcaaggtttcagcttttgagtaccactaccaatggtgattttgttcaaggaaaagatctcgcaatggttaaagttaatgtagcatgtgctgtgttggcttgacatcaagctatactccgactccattgttggaatctggtttgcaaaaagacagagggttaattgtggagtatcttggaaggatgtcttacgttgctcataacgttaatcagccccaagagaaagatttgttggaaggaatttttccttt

SEQ ID NO: 125305 - DNA, 269 bp, Glycine max
ggcttattttacgacggcagatacaaattctggactacacacgagcaaaatcttgcattgacagaagaggacaagatggaagtgattagaaatagaggcattcctgctgagttcttgcacagcgagctcatgaatttgaaaaacatgttgctcatgaaagcctcaaggatcaaattcctgctgttgacaagttgtattctactaaggttaataagtttgcaaaaattgatgaaccttagacaaagtgttgttggtgatcttaaattctt

SEQ ID NO: 125306 - DNA, 267 bp, Glycine max
aaaattcttccaccaagttatgggtttccttgtgttgcttcttttctccctcttaggtctctcttctagttccagcatatcaactcatcgttccatattcggaccttgacctaaccaagtttaccacacagaaacaggtgtcttcactgttccaactatggaagagtgagcatggacgtgtctaccataaccacgaagaagaggcaaagagacttgagattttcaagaataacttgaactatatcagggacatgaatgcaaacagaa

SEQ ID NO: 125307 - DNA, 257 bp, Glycine max
taagaaagtcttccatagccccccaaaaatgaagagcaccatcttctttgctctctttctctattgtgccttcaccacctcatacctaccttcagccatcgctgattcgtgctcgataatgaaggtaaccctcttgaaaatggtggcacatattatatcttgtcagacataacagcatttggtggcataagagcagccccaacgggaaatgaaagatgccctctcactgtggtgcaatctcgcaatgagctcgacaa

SEQ ID NO: 125308 - DNA, 266 bp, Glycine max
gctgatgataccatcaattttgaggcttttccccacaagctggtgcagtttggagagattcaggaaaaagttgtattgaaattttcacaagaggaatttcttacagcttgtcaactcaggtgcgtcctgcaacaactctgttggctgatgggtgtccatatttgtatgcaatggtgcatgatagttcagtgtctacaataccaggtgattttgtcattggtgtcaagttgacaaccataaacaatatgtgtgcatatgggctccat

SEQ ID NO: 125309 - DNA, 269 bp, Glycine max
atcaaggtcgtcacactcgaagcatgataagagtagcccttcataccatagaatcagttccgatttgaagcctggaatggtgtttgttgtccctcgcggtcatcccttcgtcaccatagcttccaatacagagaatctcctcatgatttgcttcgaggttaacgctcgagacaacaagaagtttacatttgcagggaaggacaacattgtgagttctctggacaacgttgctaaggagcttgcctttaactatccttctgagatggtga

SEQ ID NO: 125310 - DNA, 263 bp, Glycine max
ataacactggcgatgaaccagttgttgccatcagtcttcttgacacctctaacttcaataaccagcttgatcaaacccctagggtattttaccttgctgggaacccagtatagagtacccagagaccatgcaacaacaacaacagcagaaaagtcatggtggacgcaagcaggggcaacaccagcaggaggaagaggaagaaggtggcagcgtgctcagtggcttcagcaaacacttcttggcacaatccttcaacaccaacg

SEQ ID NO: 125311 - DNA, 267 bp, Glycine max
ggctcgaggaagacaacccagtctggttttgtgaatttcataagagacaagtacacagcacttcctgatacccgtgaaaggatggtagcaacagaagtaaccgcacttggaggtattcgtatgaatcgctgtatagcctccctcagaagccgctttactttacagaaaagtatcaggaagtgaaaaaagttctggctgacactttttttggcccaccaaaagggggagtctatagcccatctgttcaaaacacactctacctgatgg

SEQ ID NO: 125312 - DNA, 268 bp, Glycine max
cgggcctttacatttccgaataatctcagtagcagtactcaaaagctgaaaccttgaattcatgtctggttcagcttttgagtaccactaccaatggtgattttgtcaaggaaaagatctcgcaatggttaaagttaatgtagcatgtgctgctgttggcttgacatcaagttacactccaactccattgttggaatctggtttgcaaaaagacagagggctaattgtggaatattttggaaggatgtcttacgttgctcataacgtt

SEQ ID NO: 125313 - DNA, 267 bp, Glycine max
ataaagatgcgtttgaagagcccatggtggtgctaacaggtgtgtttgatgcttcttttccttgtgggggttacagctgcacgcatggaactgagcttcttcaaaatgatcagtcatcaagttatgatgctgatgagtattcaaaacgatgctgtgatctctgcaggtgcacacgctcaatgcctcctcaatgcagctgtgcagacattagagcgaattcatgccactcagattgtaagagctgcatgtgcacacgctcacagccag

SEQ ID NO: 125314 - DNA, 267 bp, Glycine max
aggacatgatggtactcaaggacttggtttgaatgacattcttagtttatcagatacaaaaccagataaagtatcagataaaaaacaagatatagttgaaggtgtcagggtatagtgaaattcgcaaaagagttcttggatcttattgatgctgcagatgctacagcacagagtgaaattgaccgtgaggctctcaagaggttagctgcagctggttcggtgaaaggtgctttagaaggtcatgaattgagaggattagcattacgc

SEQ ID NO: 125315 - DNA, 266 bp, Glycine max
ctccagagttgcaatagcgagagagactcgtacaggaaccaagcatgccacgctcgttgcaacctccttaaggtggagaaagaagaatgtgaagaaggtgaaatccacgaccacgaccacgaccacaacacccggagagggaacctcagcaacccggtgagaaggaggaagacgaagatgagcaaccacgtccaatcccattcccacgcccacaacctcgtcaagaagaagagcacgagcagagagaggaacaggaatggcctcgc

SEQ ID NO: 125316 - DNA, 267 bp, Glycine max
ggataatgtgctttgtgaattgtcacttggccgcacacttggaagcagttaatcggcggaatgctgattttgatcacatttatcgaaatatggtgttcacccgatgtccaacctacttaatactgcagctggtatggtaccatacctgttcttgctttgctctcttgccttctccacatatttattttggctactttactcttctggcttgccattggtcctctctgttacagctggcgtctctacttctgttcatgtgcttcgtgg

SEQ ID NO: 125317 - DNA, 270 bp, Glycine max
agttcatcgacaaccaattcacatcactgaaggaaattatgtcagaaagcaagatgtcagcattgaatatgatgcatgtacaattccaaatgattgtggttcattggtgttgccaaggttggaaatcacaaacaaattgttggtttccatgttgctggaagcaaaggaagactgggatatgcttcattgataccatatgttgagccagttgtgcaagctcaaagtgctgaagtttacttcgacttcttccctgtggaggttgatagtcaa

SEQ ID NO: 125318 - DNA, 335 bp, Glycine max
tgcgtgtgtttgtgaattgttgttgagatctgaatcacaatcagaaacgataatggctacaccggaccacctcttcaacctccgcaacaacttctacctcggcgcttaccaagccgccatcaacagcagcgacgttgccaacctctcccaagaagataccctcgagcgcgacaccctcgtccaccgctgctacatcgccctcggccagctccagttcgtcatctccgagatccacgacgatgctcccacaccactccaagccgtcaaactcctcgccctctatttctcctctcccgacaccaaggattccgccatcgcgagtctcaaggagtggc

SEQ ID NO: 125319 - DNA, 325 bp, Glycine max
ttaagttataaaatcagggtaatgatccaccaacccgctagttctttttatgaggcacaaacgggagaatttatcctggaagcggaagagctactgaaaatgcgtgaaactatcacaagggtttatgtacaaagaacgggcaaacctttatgggttatatccgaagacatggaaagggatgtttttatgtcagcagcagaagcccaagcttacggaattgtagatcttgtagccgttgaataaaaaataagtggcaaggattattctaaaaaaatacaggatttgaaatttcatttttgaatcttcttactttcattttaatata

SEQ ID NO: 125320 - DNA, 320 bp, Glycine max
ttgctttctttactggtgtaaaccatcatgggcaacctgttctctttggttgtgctttcctaattaacgaatctgaagcatcatttgtgtggcttttcaagacatggcttatggccatgtctggatgtccgccagtgtcaataacaactgatcatgattctgcaattcggtcagccataatacaagtcttccccgagactcgtcaccgtttctgcaagtggcacatctttaaaaaatgccaggagaagttatctcatattttcctccaatatccaaattttgaagcagaatttcacaaatgtgttaacttgactgagtcg

SEQ ID NO: 125321 - DNA, 322 bp, Glycine max
ccaatacctgccaagtctgtgagcgcagctccttgattccttcaacttctgctctcttggttgtaagattgttggaacctccaaaaagttccgaaataagaaaatgttaggtgaggcagatggtgaagaatcagttaacggtataagaaataatgcaagtgccagaaagaaaatccacagctttacaccctcaacaccaccaccaacagtggttaattacagaactgccaagagaagaaaaggaattccacatagagctccaatgggtggagggcttattatagaatactaatgttgtatagtggttttctgtcacttacca

SEQ ID NO: 125322 - DNA, 313 bp, Glycine max
gcgcattatagcacaccacacaaaaaagcaaagcagaaaacaactgttacttacacacgccatgggtatgggtatgggtatgggtatgggtaaatgagtggtaaatgagtggtttttgagcagaagcagttaaaagagaaagggattcagcgaagatgacatcggttggtgtggcaccaacttcgggtttgagagaagccagtgggcatggagcagcaggtgttgatagattgccagaggagatgaacgatatgaaaattagggatgatagagaaatggaagccacagttgttgatggcaatggaacggagac

SEQ ID NO: 125323 - DNA, 316 bp, Glycine max
gctggagaactaccccggcgtgaagcgcatcaccatcaagccccaaactgacagatgggtcttccctgagaccaacaccggtatcattgtcttggctgagggtcgattgatgaacttgggatgcgccactggacaccccagttttgtgatgtcctgctccttcaccaaccaggtcattgctcagcttgagttgtggaaggagaagagtaccggcaagtacgagaagaaggtttacgttttgcccaagcaccttgatgagaaggtggctgcacttcacctgggcaaacttggagctaagctgacccagcttagcaag

SEQ ID NO: 125324 - DNA, 315 bp, Glycine max
catttgtgaactaacaacaacacaaggccatcatcatggcagctgcttccccaatggcaagccaactcaagtccaccttcactaggactcttgtagctcccaagggcctctctgcctcttcaccacttcacctcgtgccttctagaaggcaatttagcttcactgttaaggccatccaatcagagaagccaacctatcaagtgattcagccaatcaacggtgacccattcattggaagcctggaaaccccagttacatccagccctttgatcgcatggtacttgtccaacctgccgcatacagaacgcagtgagc

SEQ ID NO: 125325 - DNA, 319 bp, Glycine max
aaagcttacaaggacttgaggagtggcagtccgaagtaaattttctaggacgtctttctcataccaatcttgttaagctgttgggatactgtttggaggaatcggagcttcttctggtctatgaattcatgcaaaagggcagtttggaaaatcatctatttggaaggggttctgctgttcaaccacttccttgggacatcaggcttaagatagcaattggagcagctcgtggcctcgctttcttgcatacatccgagaaagtaatttacagagacttcaaggcctcaaatatattgcttgatggatcctataatgcaaa

SEQ ID NO: 125326 - DNA, 328 bp, Glycine max
ctgctcgagcagctcgacggctcgagcggctcgagcactatgcaatcatgagctcttatgagtaccttagcactggacttaaacagtacaacttggataacaacatggacggtttttacattgctcctgcttttatggacaagcttgttgttcacatcagcaagaacttcatgaccctgcccaacatcaaggttcctctcattcttggtatctggggaggcaaaggtcaaggaaaatccttccaatgcgagcttgtctttgccaagatgggaatcaaccctatcatgatgagtgctggagagttggaaagtggaaatgcaggagagcc

SEQ ID NO: 125327 - DNA, 328 bp, Glycine max
cgtgagtgtggtggatgccgaaaacctaatcagaaaaaaaatcgtagttggaggcgccgcactccactccactccaatcaatcagatactagcgatggggaggaagcgaaaggtagcaccgaaatcttctgtatccgccgagcccccgctgaagcaacaccaaccaaaacccgaaaatgccgctcaggaatacgaagaagaggtcgaagaggaagttgaggaagaagaggtagaggaagaggtcgaagaggaagaagaagaagaggaggacaaagaagtgaacgctcctccaaccacaaagagtgacactgaagtttcattttcatct

SEQ ID NO: 125328 - DNA, 320 bp, Glycine max
cttcgccgtttcagctgaagagccatccgcagtaagcaatggttaagcataataatgttatccccaatgggcacttccggaaacactggcaaaactatgtgaagacttggtttaatcaaccagcccgaaagaccagaagacggttggctcggcagaagaaggctgtcaagattttccccaggcctactgctggatctctcaggcctattgttcatggccagactctgaaatacaacatgaaagtcagagccgggagaggattttcactggaagaattgaaggctgcaggaattcccaagaaacttgctccaactattggg

SEQ ID NO: 125329 - DNA, 319 bp, Glycine max
ccttcttatagtccaacttcaccttcctacagccctacatcaccctcttacagtccgacgtctccatcatatagtcctacatcacctgcttacagccccacatcacctggatacagcccaacctcgccatcgtatagccctacctcaccatcatatagccctacgtcccctagttacaatccgcagtcagcaaagtatagtccttcgttagcatattctccaagcagtccgagattgtctccatcaagtccatatagtcccacatcaccaaattatagtccgacatcaccatcatattcaccaacatctccatcttatt

SEQ ID NO: 125330 - DNA, 315 bp, Glycine max
gccacagtatgattccacttggatcttgtacaatgaagctgaatgcaacaactgaaatgatgcctgtgacatggcccagctttactgatattcacccttttgcaccagttgaccaggctcaaggttatcaggaaatgttcaataatttgggtgaactgttgtgcaccatcactgggtttgactccttctccttgcaaccaaatgctggtgctgctggagaatatgccggacttatggttattcgtgcatatcatttggcaaggggagaccaccaccgcaatgtttgcattatacctgtttccgcacatggtacaa

SEQ ID NO: 125331 - DNA, 311 bp, Glycine max
ggcattagtgaagttggctgaagatgcagtgagtaccaagaaggcggagaaaaaggatattgttggtttacaggagcaggtttttgttcggaaggtgattgagctgcatgacaagtacctggcatatgtgaatgattgtttccaaaatcatacactttttcacaaggctcttaaggaggcttttgagatcttttgcaacaagggtgtcgctggaagctcaagtgcagaactgcttgccactttttgtgacaatattcttaagaaaggaggaagtgaaaaattgagtgatgaagcaattgaagaaactcttg

SEQ ID NO: 125332 - DNA, 310 bp, Glycine max
gggcagtgaccctgaaaaccctgaagcaacaatagagagactagcaagtgatgatgatacatttgctgggactagcttgtaggatcatgagtgatccatctgtaggttcccttacgtttgtcagggtgtatgctggaaagctaggtgctgggtcttatgtactcaatgcaaacaaagggaaaaaggagagaattggtagacttttagaaatgcatgcaaacagcagagatgatgttaaagtggctttagctggtgatattattgctcttgcaggtttgatagatactattacaggtgaaacattgtgtga

SEQ ID NO: 125333 - DNA, 319 bp, Glycine max
tcaaaacactcataacacaaagcacaaagcaaagctcatccttgagttaaaaaatggcagcagcttcttccatggctctctcatccccatccttggctggcaaggccgtgaagctgggcccatcagccccagaagtgggaagggtgagcatgaggaagaccgtcaccaagcaggtctcctcaggaagcccatggtacggcccagaccgagtcaagtacttgggcccattctctggcgagcccccgtcctacctaaccggtgagttcccaggcgactacggctgggacactgctgggctttccgcagacccagaaacttt

SEQ ID NO: 125334 - DNA, 317 bp, Glycine max
  unsure (1)..(317): unsure at all n locations
attcgagcgaatcggctgaccatgcaaaatgtttttattgacataattcaacttcatcacttccagttaaaattgattcataaccttttgatcagttttttccagaggctagcgaagttgactttgccagacaatcagtttttagtggatgttcttttaagttggactatttgacaaagccttcattttttgaagattttggctttgttgagaaaataaaaatgtcagacagggtgaagaccggagatgaacttttcttggttggctacccatattttaatgtcaatgaaatgctcgttgtnggaagactttataaa

SEQ ID NO: 125335 - DNA, 325 bp, Glycine max
cgaatcttggtttattgattggtggaatactaggcaatccgaaattttcttgaatgatattaaagaaaagagtattctaaaaaaattcatagaatttgaagaactgtttttcttagatgacatgttaaaggaatgtccggaaacacatctacaaaacctgcgtactggaatctataaagaaacaatccaattaatcaaaacgcacaacgaagatcgtatgaatacgattttgcacttctcgacaaatataatttgtttctttattctaagcggttattctattcttggtaatcaagacttgttcttattactctttggttcgaga

SEQ ID NO: 125336 - DNA, 331 bp, Glycine max
ggaaactcgtccccatcgaagagcttacttgacctcgcaccacggaatcgttccctactaattcaactcaacaacactatcgtctccattcactagttagaaacgtgcgttccaatgtctgatcctgccgaagaggctgctttcatcgagaagctctacgaatacggcgagcaactcaacaatgccaaggacaagtcgcagaatgtgcaggattaccagggaatcatagatgcggcgaagacgagtgtgaaggcgaacagctcgctgcacagctgattcccaggttctacaagttctttcctgacctttctagccctgctctcgatgcaca

SEQ ID NO: 125337 - DNA, 325 bp, Glycine max
  unsure (1)..(325): unsure at all n locations
ctacattcccatcccccagcgccagaccgacctccccttcctcctcgccgtcgaagagtcttttccatcaccggccgtggcaccgtcgccactggccgtgtagagcgtggcaccatcaaagtaggggaaactgttgaccttgtaggtttgagagaaacaaggaacacaaccgtcacaggtgtagaaatgttccagaagattctagacgaagccctggctggagacaacgtggggctgttgcttagaggggttcagaagactgacattcagaggggaatggtgttggctanaccaggcacgattacgccgcacaccaagttctcag

SEQ ID NO: 125338 - DNA, 317 bp, Glycine max
gtaccaccaggctttaaaggatctgtatacgcatctgactcctattcagcgggtcaacatcgcacggcaccctaacaggccaactttccttgatcatgtgtttaacataactgagaagtttgttgaactccatggtgatcgggcaggttacgatgatcctgctattgttactggtctagggactatagatggtagaagctacatgttcattggtcaccaaaagggtagaaatactaaagaaaatattcagcgtaactttgggatgccaactcctcatggttacaggaaggcccttcgcttgatggaatatgcagatc

SEQ ID NO: 125339 - DNA, 316 bp, Glycine max
agaagctctgggcatttactctcatgattttgtgcctgtcacatattcttctgaagtggtttggtaccaggaattgatgaggtttgctccaacactgttgcttttgggatctctcttgtatatgggaaggagaatgcaaggtggaattggtgttggtggcagtggtggcggcaagggtgcccgtggaatattcaacataggaaaagcaccagttactaaagtagacaaaaatgccaaaaacaagatctattttaaagatgttgctggctgtgatgaggcaaagcaagaaattatggagtttgtccacttcctcaag

SEQ ID NO: 125340 - DNA, 311 bp, Glycine max
gcctactacacattcttcatcacttcattcaacatttctccccttagcttgtttcaccaatggctgctgcggttagtgctgcagtctcttttccatccaccaagtctacctctcttccaagcaggacctccctcattgccccagagagagttgtgttcaagaaggcttcattgcaaaacagagatgtttctagcagtggacgggtagtttccatcagagctcaagtcaccactgaggcaccagccaaggttgaaaaagagtccaagaaacaggatgaaggtgtggttgtgaacaagtttaaacccaagacc

SEQ ID NO: 125341 - DNA, 310 bp, Glycine max
gtagtctctactctgattgggatcttctccctccaaagacaatcaaggatcctgaggctaaaaaaccagaagattgggatgacaaagaatatattcctgatcctgaggataagaaaccagaggggtatgatgacatcccaaaagagctcccagaccccgaagccaagaagcctgaagattgggatgatgaggaagatggtgagtggacaccccctaccattgccaaccctgagtacaagggcccatggaaggcagagaaaatcaagaaccccaactataaaggaaaatggaaggcaccattgattgataa

SEQ ID NO: 125342 - DNA, 311 bp, Glycine max
atcttttgtttgttcttcagtactttagtgtgtgatttaattccaagattttgagaatgtctagctgtgggtgtggaagtagctgcaactgtggcagcaactgcggttgcaacaagtactcttttgacttgagctatgttgagaagacaaccacagagactcttgttttgggtgttgggtctgtgaaggcccaattggagggtgctgaaatgggtgttgcagctgagaacggtggctgcaactgtggatcaagctgcacctgcgacccatgcaactgcaagtgaggtcaagatttataaccttgaagcaga

SEQ ID NO: 125343 - DNA, 312 bp, Glycine max
  unsure (1)..(312): unsure at all n locations
cctacgtatactacgtatactacacatttcatttgcctcttgtagtagccatggttttccaaacaaacattaatcttcacttcgtattgtttcctctcatggctcaaggccacatgatccccatgatggacattgcaagactattggcacggcgtggtgtgattgtttccatattcaccaccccaaaaaatgcatcacgattcaattctgttctttctcgtgatgtttcatcaggcctcccaatccggctagtacaactccattttccatccanagaagcaggactacctgaagggtgtgagaattggacat

SEQ ID NO: 125344 - DNA, 323 bp, Glycine max
tggttctcttcttaaaagtattgtcattgatggagaaacaacattacctatatatacagtgttagaggtatacagagtgtcagatatggaacttgttagggtgcttcctagtgcagaagatgaggtcaatgtggcatgctttcatccttttgccggaggaggactagtttatggaacaaaggaaggaaagcttagggtcctccagtatgacggtgctcatgcagtgaatggcgctggaccaagttactttcctgaggagaccatcgttggagtcagtcagtgagcaaggtttagacaaatgattggacatgtaattcaaagat

SEQ ID NO: 125345 - DNA, 324 bp, Glycine max
tcttgaaagagtctgggctattggatacttgaagagttctcgtcgggttgtgattggctatgatgaaggaacaattatggtcaaacttggtcgagaagttcctgtggctagcatggacaacagcgggaaaattatttggtctaagcataatgaaattcagactgtcaatataaaaagtgtaggagcagatgtagaggttgctgacggagaaaggttacctttagctgttaaggagttgggtacctgcgatctctaccctcaaaatttaaagcacaatccaaatgggaggtttgttgttgtgtgtggagatggtgagtacattat

SEQ ID NO: 125346 - DNA, 315 bp, Glycine max
gtatgctgacaaggaagatatctttgttcctgatattttctgggactatacaagtgctaaagtactaacaatggagtgggttgatggagtcaaactaaatgagcaacaagcaattgagagacaaggattaaaagtcttggatctggtaaacgcaggcatacagtgcagtctcagacagttactcgagtatggatattttcatgcagaccctcatcctgggaatcttttggcaacacctgaaggaaagcttgcttttcttgattttggcatgatgagtgagactccagaagaagcaagatatgccataattggtca

SEQ ID NO: 125347 - DNA, 317 bp, Glycine max
tggcgcgcaaatttacttggcagccggcaggtttgatgatgctgtaacagcatctgagcaagcagctaaactagatccaagtaattttgagatgaatgcagtggtgaggagggccagagcagtgacatcagccagaatgagtggtaacttactcttcaaggcatcaaaattcacggaagcatatgctgtatacaatgaaggactagagcatgatccacacaactcagttctgctatgcaatagagcagcgtgtcgttctaagctaggtcaattcgagaaagcaattgaagattgtaacgtagcacttataattcaac

SEQ ID NO: 125348 - DNA, 310 bp, Glycine max
cattgccaaagctcatggaggtgtatctgtatttggcggagtaggtgaacgtactcgtgagggaaatgatctttatatggaaatgaaagaatctggagtaattaatgaacaaaatattgcagaatcaaaagtagctctagtatatggtcaaatgaatgaaccgcccggagctcgtatgagagttggtttaactgccctgactatggcggaatattttcgagatgtcaatgaacaagatgtacttctatttatcgacaaatctttcgcttcgtccaagcaggatctgcagtatctgccttattgggtcgaa

SEQ ID NO: 125349 - DNA, 316 bp, Glycine max
aaaaagcctccaaagttgtggttcacactaaagatccatcttatccagaaaagatgattaaatttgcagttatggatagcaccaccggaagcttatcaacaaagacagggataagttctctgaccaacattagtggtgaaactgaaagctctcatgtaattgaggatagaaacattgccatctccattcaagatctacgcaaggtcaccaataactttgcttcagaaaatgagctaggccatggtgggtttggaactgtttacaagggtgagcttagaaatggtaaaaaaatagcagtgaagagaatggaatgtgg

SEQ ID NO: 125350 - DNA, 311 bp, Glycine max
atcagcagaagtccatcaaaaggatacagaaagctacaagctgtcttaaaaacaataatgttacgtcggacaaaaggctcacttcttgatggggtagctatcatttccttgccacctaaatctgtagagttgaaaaaagtggaattttcacaggaggaacgagatttttattccaaactagaggctgattcccgagcacagtttcaggaatatgctgatgctggaactgtgaagcaaaactatgttaacatttcgttgatgcttttgcgccttagacaagcgtgcgatcatcctctgcttgtcaaacgtta

SEQ ID NO: 125351 - DNA, 307 bp, Glycine max
tgctccaagtatgtttttacaatccttcaaaaattttgtttctttgtgtgtgtatggtgatgataacttaattagtgttcatgaatatgtcaagccttactttagtggttctaaattgaaaagctttctagctggtcataatatcaccattactgatggtattgacaaaactagtgcaactttgcaatttagaaagttagcagattgtgattttctcaagagaaactttaagcagatgtctaatgttttgtgggtggctcctgaggataaggcgagtttatggtcacaacttcattatgtttcgtgt

SEQ ID NO: 125352 - DNA, 312 bp, Glycine max
tattcagagagagtgcagacaatgagctcaagggaatcctctctgtgtgtgatgagccacttgtgtccgttgacttcaggtgcactgatgtgtcctcaaccctcaaaggcaaactcaatggcattgcactccgtgtgccaacaccgaacgtctcagtggtggacctcgtcgttcaggtctcaaagaagacctttgcagaagaagtgaatgcagcattcagagagagtgcagacaatgagctcaagggaatcctctctgtgtgtgatgagccacttgtgtccgttgacttcaggtgcactgatgtgtcctcaa

SEQ ID NO: 125353 - DNA, 324 bp, Glycine max
aggaaagtttaaagccactgattctcctcttccgactgttccgggctatgatgttgcgggtgtggtggtgaaagttggtagtcaagtgaaggactttaaagtgggtgatgaagtgtatggagatgtaaatgagaaagcacttgaaggtcctaagcagttcggatctttggctgagtacacagctgttgaggagaaattgttggcaccaaaaccgaagaatttggactttgctcaagctgcttctcttcctctagcaattgagactgcttatgagggtttggagaggactggattttctcctggtaaatctattcttgttctaaa

SEQ ID NO: 125354 - DNA, 312 bp, Glycine max
tgagtattggcagcaagacaagtggaatggctgctttcctcttaagtggcacgttgttaaggatgttcctaacaatttgttgaggcacattaccctggataacaatgagaacaaacctgtcactaacagtagggatacacaagaggtaatgttggagcctggcctgaaattaatcaaaattttcaaggaatataccagcaagacatgcattctggatgattttggcttctatgaggcccgtcagaagactattttggagaagaaagcaaagcaacaattcccaaagcaggtatgggaagggaaactgctgat

SEQ ID NO: 125355 - DNA, 315 bp, Glycine max
aaatcgatatagatagattttatcttatagaaataattgaaaaatacattcaattatgtcttcgcgtatcaaatattttcttttcatatcgatgcgtacgatatttttccagcaattaatgtatgtgagacagaaactttcacttacagttttttctttttaatattgtatttcattttttttaataattaataaaataataataataatgaataaaaaaatcaaataataattaataaaaagaaaaaagtgtaaatcaaatagaaatttataaaatctatgatcctagagtagttccctagacaaaatagaagt

SEQ ID NO: 125356 - DNA, 298 bp, Glycine max
cacaatcatgtcagataaagaagtagtagtaaatgggttatctgaggaccaagcatggcaagagctcaagtttccagagttgttgaacagtgatgctgttagagaaatccatgcaactattgaaaaagaatgggattttcttcaaaggtcagcttgccaaaccgctgcgggaagggctctgtggaagcatgccatccatgatccactggctgacgtgctggcaggagagacttacttgagaaacctccatgaaaagatcaagaaagacattctcaacaatgctcgggaaacttccgga

SEQ ID NO: 125357 - DNA, 310 bp, Glycine max
cacttctattagtccggatggaaggttgttagctgttcttggggacagtactgagtgcttgatggctgatgctaactctggaaagattactgggagcctaaaggggcacttggactactctttttcatcagcttggcacccaaatggacaaatattggccactgggaatcaggacaaaacatgcaggttgtgggacataagaaatctttcacaatctatggctgtgttaaagggaagaatgggtgcaataagagcactaagattcacttcggacggacgatttttggccatggctgaacctgcagacttc

SEQ ID NO: 125358 - DNA, 307 bp, Glycine max
ggcttatggtggatacctaggcacccagagacgaggaagggcgtagtaagcgacgaaatgcttcggggagttgaaaataagcgtagatccggggattcccgatataggtcaacctttcgaactgctgctgaatccacgggcaggcaagagacaacctggtgaactgaaacatcctagtagccagaggaaaagaaagcaaaagcgattcccgtagtagcggcgagcgaaatgggagcagcctaaaccgtgaaaacggggttgtgggagagctatacaagtgtcgtgctgctaggcgaacagcagagaa

SEQ ID NO: 125359 - DNA, 310 bp, Glycine max
cacatgccttctcttcttctgcgtttccggaactgaatcctataaaacctaggcactcacgtcttctcaggagtgccgtgcaacatgaaactcctacatcacagctttctgaaatatggtcacctctggaaagccaaggatggaaaccttatgttgaatcaaataagccaacagcattaccagagaagtccgagggatatatccaggtctttcttgatggaggtttgaaccaacaaaggatggggatatgtgatgcagttgctgtggcaaagatactgaatgctactctggtgattccataccttgaatt

SEQ ID NO: 125360 - DNA, 305 bp, Glycine max
ctaatcctagttatttgatttatatactttttttatagtaaatacatgagatagaatattcaaaatggaatatttctattattttattcttcatccaatgactatacattcattatatttttgtgtaaatagaggaaaaactcgatggaaaaatggtggtttaattctatgttgtttaataggaagttagaatacaggtgtgaattaagtaaatcaatggatagtcttggtcctattgaaaataccagtctaagggaagaccctaaaattttaaccgatatagaaaaaaaaattcacagggattt

SEQ ID NO: 125361 - DNA, 304 bp, Glycine max
gctgatctcatccatttttgggataagttccgcaaagctcctgagggttctctcaggaaaaatacagctcagaaacaagttttggaagcaatgtctcacagaatgcatgtagacaacagtgtaaaactgattgggaagcttttatttggcattgaaaagggtccagaagtactcaacgctgttagaccggctggatcggcacttgttgatgactggcactgcctgaaaaccatggtgaggacttttgagacacttgtggatcctgtctcaatacggatgaaacacatgagtctttgcaacatct

SEQ ID NO: 125362 - DNA, 351 bp, Glycine max
attttctgttaggtctgttggtctagttgctgagataaagagactgcttggtgtggttcaagacttgagagagagtgagtgggacttgcagttgatattggaaatgtttagacgtgagtccattgattcaagggatgtcatggatgcaagggaagcagaatacagagcatgggctcatgttcaaagtttgaaatcatctcttgatgagcacaacttagaacatcgagttaagacagccaatgaagcagaggcaagatctcaactagaagctggctgctgctgaagctgagatagcagacatgagactagaattagcagattctaagaggcaaatgtgtgacttgtctgatg

SEQ ID NO: 125363 - DNA, 339 bp, Glycine max
tagaaacctctcagcccctctccgatcaaatggccaccgtaatcgacggcaaagccgttgcgcaaaccatccgatctgaaatcgccgacgaggtgcgcaactctctcaaaaatacggcaaggttccgggattagcggtggtgatagtagggaacagaaaagattcacagagctatgttggaatgaagagaaaggcatgcgctgaattgggaatcaaatccttcgatgtggaccttcccgaacaagtctcccaagctgaactaatcaaacaagttcaccagttgaatgctaaccctgacgtacatggtatattggttcagctcccgttgcctaagcacat

SEQ ID NO: 125364 - DNA, 337 bp, Glycine max
gttcatggtcttgctggggcatttgctcttggaataaagaaacttggaactgtggaaattcaggaccttcccttctttgacactgtgaaggttaagacttccaatgcacacgcaattgctgatgctgctctcaaaagtggaataaatttgcgagttgttgatggaaacactatcactgttgcttttgatgaaacaaccacattagaggatgttgataatcttttcaaagtttttgctggtggaaagcccgtctccttcacagctgcatctcttgcaccagaagttcagagtgcgattccttctggattagttaggaagagccttatctgacgcacct

SEQ ID NO: 125365 - DNA, 344 bp, Glycine max
ggaggggtgagcaaaatcaaagacggatataacccggctacttggatgttggaagttacaacttcagcacaagaacttagtttgggtgttgattttactgacttgtacaagaattctgatctatataggagaaacaagcagcttatacaagaactgggtcaacctgctcccggttcaaaggatctttatttccctactcaatactctcagtcattcttggtccaatgccaagcttgcttatggaaacaacgttggtcatattggcgtaatccaccatacactgctgtgaggtttttcttcactactttcatagccctgatgttcggaacaatgttctgggacct

SEQ ID NO: 125366 - DNA, 346 bp, Glycine max
cacacttgggttatatgtatagttcaaactctctattcaattcagggttgtggatattgaagaagctcaagggcacacaatgcattcaccaacttaccttcacagatgaccctgatcttgagaatactttcatctacaatctttccaaggagaagacactggctaacttccagaatgtgcttcttttgtcctcacctcaggatggctatgttccataccattctgcgagaatagaaccatgtccagcagcttctttggatttctctaaaagagggaaaatcttcctggagatgctgaataattgcttggaccagatccaagctcacactaacgatagggtggtcat

SEQ ID NO: 125367 - DNA, 337 bp, Glycine max
ctttggtgggtgatatacctcaaggcctaccaaagaaattgatgcatggatgaaatatttttggtgggtgatatacctcaaggcctaccaaaattacctgttccaaaatcttttgagtatgcacagtccttaattccaactgctcttctcataactggtgtggctatactggaatcagtgggaattgccaaggcattagcagcgaaaaatggatacgagttggattcaaatcaagagttgttcggtcttggtgtttccaatgttcttggttcattgttttcagcataccccacaacaggatccttttcaaggtcagctgtaaatcatgaaagcggtg

SEQ ID NO: 125368 - DNA, 334 bp, Glycine max
gcaaaacctaaacctgaccgcagaagccatgtctgattccgacgagaggatgaaggaaaccctagccctgtcctcagaagcagagcgtgacagagacaaatccatgtctgattctgattctgaggacgaagctcagcagaacctccaaatcgaatctctacagaccgagcttgttactaacccctctaactacgatgctcatttgcaatatatacggcttctgaggagaatgggtgatgttgataaactgtcaagagccagggaagctatgagtgaactctttccgttgagccctacaatgtggcgtcaatggatcaaagatgagctttctctc

SEQ ID NO: 125369 - DNA, 338 bp, Glycine max
  unsure (1)..(338): unsure at all n locations
ggaattagcacaattcgcagaattagaagcttttgcccaattcgcttctgatctcgataaagctactcaaaatcaattagcaagaggtcaacgattgcgcgagttgcttaaacaatcccaatcagctcctcttaccgtggaagaacagataataactatttatactggaacgaatggttatcttgattcattagaaattggacaggtaaggaaatttcttgttgagttacgtgcttacttaaacacgaataaacctcaattcacagaaatcatatcttctaccaagacattcactggggaagcagaagtccttttgaaggcagctatnntcagacaga

SEQ ID NO: 125370 - DNA, 333 bp, Glycine max
attatatttgcagtggagaaggaaagaatatctatctctcattctctcgtgcctcaacgcttttttaactcctttcgcttttccattccaacctctttcacacttcagatctgtttcttcatcggttgttcaagtaaatggcctttgtcaccactgctgaagtgtgtgatgcgaacccatagttaattttgagtggggagcttcgtgcccttcagccagtttttcagatttatggccgtcgacaggttttctctggacctatagttaccttgaaggtgtttgaagacaatgttttggttcgtgagtccttgaagagaaggcaatgcagagtct

SEQ ID NO: 125371 - DNA, 336 bp, Glycine max
ttggtttctataaagatgcatcatccttttcattttaaaaaaaactacggtgaagtttaaacttcaccatatctctactaggaagcaacctatgctgtaacagttggtttggcagcactggagagtttggatctccgcttcgccaagctctcactccggcgatctctctgctccttcaatctggaagcgaggagtttttgatactctgctgcttctgattttgccttagcaattctcttcttcttgtcggcaatccttgctcgtttcctttggagtgtcaaaggagtgactagtcgttgaatctttggagctttgctcactttattcccagctttg

SEQ ID NO: 125372 - DNA, 345 bp, Glycine max
cggtcgagcccatcgtttcgcattggttctggtcctcagacggttggaacagcttgactcgtagccacggataatgtttattcgggtctggagtcatcgacttcgcgggctcaggcgttgttcacatggtacgcgggatagcgggcctgtggggggctttaattgaaggcccgagaatcggccggttcgaccgttcgggccggtcggttgctttacgtggccacagcgcgtctttagttgtgcttggtacgtttttgttatggttcggctggtacggcttcaaccctggttcgtttgtgacaatagacaaggggtatgaaagtggagggtattatggtcaatgga

SEQ ID NO: 125373 - DNA, 340 bp, Glycine max
cacacctgccgccagtcacatcatccggatacgaaaggcgaccggtggcatcctcctcactgccagccacaaccctggtggccccgatgaggactttggcatgaagtacaacctcgccaacggtgccccggctcccgagagcgtcaccaacaagatctacgaaacctccaagaccctctcgtcgtacaagatcgccgaactccccgacatcgacttgagcacaattggcacacaaaagtatggcagcctcgaggttgagatcgtccactcaacagaggactacctgaagatgctcaaggacatcttcgactttgacctcatcaagtcgttcctcaagcag

SEQ ID NO: 125374 - DNA, 343 bp, Glycine max
cgacacaatgctttttgcaccaccacgccctcaccactccagctagagcttcaacacagcgcctagttgtgagcaccaaaccagaccacattgtttgcaaggcagcacagaagcaggttactgtccaagagggtgaggacactactactggccttgtctctcgcaggttggccctcactgtgctcattggtgctgctgctgttggctctaaggtggcacctgctgatgcagcctatggagaagctgccaatgtgtttggaaaaccaaagacaaacacagacttcctttcatacaatgggaatggattcaaactctcaattccctcatagtggaaccaagcaaa

SEQ ID NO: 125375 - DNA, 285 bp, Glycine max
gttggcaaaattgtggaaggtaacgtggaccagtcagatggtagcttccttgatgatgagcaaatagatagtggctgggttctcacctgtgttgctcaacctaggtcagacgttgtcattgagacacacaaggagggagagatcgaatgatcaatatatatatatatgatgtaatcttatccattgctgttctaattctatctatatcttggattttttattttgttatagtgatttggcatatttgtgacaaatagtgagtttattacttgtgtcatatgtgtg

SEQ ID NO: 125376 - DNA, 347 bp, Glycine max
ttctcttcctcccaaacatgtttctctttctctctctctctcttaattcctgaaaagcaagtagctaaggaaaacaaaaacatcatcacagagactcacaaaggaaaaacaaacaaacaaacaaaatgtcttctccaagcaagcggcgagaaatggacttgatgaaactgatgatgagtgactacaaggtggagatgattaatgatggaatgcaagagttttatgtgcacttccatggacccaatgagagtccttatcatggaggtgtatggacagtaagagttgagctgccagatgcttatccttataaatctccttccataggctttatcaataagatctatcac

SEQ ID NO: 125377 - DNA, 349 bp, Glycine max
ctttagagagatagagagatagagagagagagaaagaaattaagaaaaaatggcagcctgcactgtctactcaacacaatctctgagcacaaattgctccatctcaaccccatcaaagacacagctgagtttcttccaccaaaagcaggtagttttctggaggaacagcaacaggggcaacagcagcagcagaagaagctatgtgataacatgtgcagcaggtgactcacagacagtggtgattggtcttgctgcagactcagggtgtgggaagagcccttcatgaggaggctgacaagtgtgtttggaggagcagcagagccaccgaagggtggcaaccctgactcaa

SEQ ID NO: 125378 - DNA, 290 bp, Glycine max
  unsure (1)..(290): unsure at all n locations
gaagagaagaaagagattgaagagacccagcagaccgacaaggacagatggaagggtcttgcctatgatatctcagacgaccaacaagacatcacaagaggaaagggtttggttgactcccttttccaagctccacaggatgctggaactcactatgcagtcatgagctcctacgagtacctcagcactggacttcgccagtacttggacaacaaaatggatgganctacattgctccacttttatggacaagcttgttgttcaatctccaagaattcatgacctgccaa

SEQ ID NO: 125379 - DNA, 329 bp, Glycine max
caaatggctgaggcttcagcacaagcttgtgtcagtattccttccaatccctggagttctctgcaaaggggtttcagtgcataataactccctgtaatgtgcactagtaaagaccaaagtatgattattgttacattatgttacatggttgtacttgtatatacatatcttgtcccacctttgtaaatacaattgggacactactaggattgggaagaagggtctttacatttatagtttggcaaatagatattgcaactacctttgtataattctatgtctgaaggagcaattacaatttacaagggatggtgccatttacggcataa

SEQ ID NO: 125380 - DNA, 342 bp, Glycine max
tctcaatcgttttctacataatacaaacctctctaatttttgaagcttattatacccaatctcgatatgcagatcttcgtgaaaaccctaactggcaagacgatcaccttggaggtggagtcctctgacaccatcgacaacgtgaaggccaaaatccaagacaaggagggcattcctccggatcaacagcgtttaatcttcgccggaaaacagctcgaagacggcagaaccctcgccgactacaacatccaaaaggagtccacgctccacctcgtcctccgcctccgcggcggcatgcaaatcttcgtcaaaacccttactggcaaaacaatcacgctagag

SEQ ID NO: 125381 - DNA, 341 bp, Glycine max
ggcgatcgttcgggaagaaacagtaatgctactgacatgggaaagaaggggagttggttttctgcaatcaaaagagttttcacacaccactccaaagggaaggattcagataataacaaaggcacaaaagagaagaagaaaagtctaggaaaactaaagcatggagaggccaattcattcatccccctcttcagagagccaagtagcattgagaaaatctttggggactttgaaagggagcaacaactactggggttaaggcctgccactcctccggagaggcctaaaacgccaccttatgcccctccaagagctccttctcctaggcctccctctccaag

SEQ ID NO: 125382 - DNA, 334 bp, Glycine max
cgaaatattcagtgcctgcttggcaagaaagccagcaatactatgttccacccatggtccatgacaatatcccttcatcctataatttccaaggtcctcctacaagatctgatggtgatgcctctacatcagctagctgcaagcgtgattgctctatttttgaagatgataagcctgtcttcatgtctagggacgaaattgatagacactctccatcaagaaaagatggtattgatgtacatcatgagacacacttgcggtactcctattgtgccttccttcagaatcttggaatgcgtcttgagctgcctcaaaacatcattgggacagctat

SEQ ID NO: 125383 - DNA, 338 bp, Glycine max
ttgcaattgaagttgaagtcttgcccttctctcttcaactccaaacacaagacatcatcatccatggctgcctccgtctccactgtcggagctgtcaacagagctcttttgaacctgaatgggtctggacctggggtttcagctcccagttcatccttctttgggagcagcttgaagaaggttattggctcaagggtccccaacacaaagatttcctctggaagcttcaagattgttgctgtagaagagaagaaagagattgaagagacccagcagaccgacaaggacagatggaagggtcttgcctatgatatctcagacgaccaacaggacatcac

SEQ ID NO: 125384 - DNA, 337 bp, Glycine max
  unsure (1)..(337): unsure at all n locations
tccaaatggatgtggcaagagtactttactgaaattgattatgggtttggaaaagccaactgggggtgaagttttgctcggggagcataatgtgttacctaactattttgagcagaatcaggctgaggcacttgatctggaaaaaaccgtgcttgagacagtagaggaagctgcagaggactggaggattgatgatattaaagggctccttgggcgttgtaattttaaagctgatatgcttgaccgaaaagtttcactattgagtggcggtgagaaggcacggctggctttttgcanattcatggtaaaaccatcaatctgcttgtgttggatgaac

SEQ ID NO: 125385 - DNA, 333 bp, Glycine max
accaaacagataatgaagtagcccaagggacccaacctgcaattggatctggaggccagtataaatattatttcaatattggaagtgttgagtcttttgaggagaagctagaggaagcgcaagaagctctgggcatttactctcatgattttgtgcctgtcacatattcttctgaagtggtttggtaccaggaattgatgaggtttgctccaacactgttgcttttgggatctctcttgtatatgggaaggagaatgcaaggtggaattggtgttggtggcagtggtggcggcaagggtgcccgtggaatattcaacataggaaaagcaccag

SEQ ID NO: 125386 - DNA, 340 bp, Glycine max
gagaccttttcatcaatcagatgaatcttctggatagagcagtgaagatcgttgctgaattagatgaaccagcagagcaaaactatgtaaaaaagcatgcatcagaacaagctcaagcccttggagttgaagttcgagaggcagcaacaaggatcttctccaatgcttctggctcctactcctcaaacataaacttggctgtggagaattcttcatggaatgatgagaagcagctccaagacatgtatcttagcagaaagtcttttgcttttgattctgatgctcctggtgctggcatgactgatgaaagaaaagtcttcgagatggctctgagcacagc

SEQ ID NO: 125387 - DNA, 335 bp, Glycine max
cgtgtcttcttctctaaaataaaaaaccctaacttctgaacctttcaccgcatcgccaccgattccctatctccactaatcacagataagaaaatgagtagacgctcgagcagaactgtctacgttgggaatctacccggtgatatccgtgaaagagaagttgaagatttgtttctgaagtacggacacataacacacatcgacctaaaggttcccccaagaccacctggttatgcatttgtagagtttgaagatgctcaagatgctgaggatgcaattcgtggtcgtgatggctatgattttgatggccaccggttacgggtggagcctgccat

SEQ ID NO: 125388 - DNA, 337 bp, Glycine max
  unsure (1)..(337): unsure at all n locations
tactcgagccgagccgaatcggctcgaggaaagatattgtcgataaatagaagtacatctttagcttagtccaagcaggatctgaagtatctgccttattgggtcgaatgccttctgctgtgggttatcaacccactcttagtactgaaatgggttctttacaagaaagaatcacttctaccaaagaggggtccataacttctattcaagcagtttatgtacccgcagacgatttaaccgatcctgcgcctgctacgacatttgcacatttagatgctactactgtactatcaagaggattagcggccanaggtatctatccagcagtagtccttta

SEQ ID NO: 125389 - DNA, 334 bp, Glycine max
ttggcctgatatggcagaagttagattgcttctgtgaggggaaaacaatagccttagatggaaggagggaaggatggtccacatgagttatgatggtggggttgttgggtttgggtacctcttgttaatgtaattggcgatttgtaatgttgttgaccagttccttgtgaaatgtaatgtgctatcctatctgtttttctttaaaccaaaaccgaagaatttggactttgctcaagctgcttctcttcctctagcaattgagactgcttatgagggtttggagaggactggattttctcctggtaaatctattcttgttctggatggttctgga

SEQ ID NO: 125390 - DNA, 340 bp, Glycine max
cttcaaaacactcataacacaaagcacaaagcaaagctcatccttgagttaaaaaatggcagcagcttcttccatggctctctcatccccatccttggctggcaaggccgtgaagctgggcccatcagccccagaagtgggaagggtgagcatgaggaagaccgtcaccaagcaggtctcctcaggaagcccatggtacggcccagaccgagtcaagtacttgggcccattctctggcgagcccccgtcctacctaaccggtgagttcccaggcgactacggctgggacactgctgggctttccgcagacccagaaaccttcgccaagaaccgtgaactc

SEQ ID NO: 125391 - DNA, 335 bp, Glycine max
gaaggagaagcaaatggcttcctcaatgatctcttccccagctgttaccactgtcaaccgtgccggtgccggcatggttgctccattcactggcctcaagtccatggctggcttccccaccaggaagaccaacaatgacattacctccattgctagcaacggtggaagagtgcaatgcatgcaggtgtggccaccagttggcaagaagaagtttgagactctttcctacctgccagaccttgatgatgcacaattggcaaaggaagtagaataccttcttaggaagggatggatccttgcttggaattcgagttggaggcggtttcgtgtacgtg

SEQ ID NO: 125392 - DNA, 337 bp, Glycine max
  unsure (1)..(337): unsure at all n locations
ctctaccaatccactgtcgatggaaggaagatcgtcgacgtacttgttgaccaaaacattgttcccggtatcaaggtcgacaagggtttggtgcccctagctggttcgaacgatgagtcatggtgccaaggtcttgatggtcttgcgtctcgctcagctgcatactaccagcaaggtgcccgtttcgccaaatggcgtactgttgtgagcatccccaacggtccctctgctctggcagtgaaggaagctgcctggggtctagctcgctatgctgcaatttcacaggagaacgggttggtcncaattgtggagctagagatcttgcttgatggtgaga

SEQ ID NO: 125393 - DNA, 337 bp, Glycine max
  unsure (1)..(337): unsure at all n locations
agagttattatcccaatttcctttcttctgtggctaatgctatatcagcgaaaagcatgtttcatgttttctacagtccaagagcaagtcatgcggattttgctgtgccctaccaaaaatatatcaaaagcatcaagaatccagtgaccatcgggacaagattcaaaatgaaatttgaaatggatgaatctcccgaaagaaggtgcactagtggcatagtgactggaatgagtgatttggatccctataaatggcctaagtcaaaatggaggtgcttgatggtcagatgggatgaggtattgagttaaccnccagatagagtgtctcctgggagtga

SEQ ID NO: 125394 - DNA, 341 bp, Glycine max
gaaaaactcagcacaacacccctcccaaccctcttcttctcttaatttctcatcatatcatatctattaatcttacacatatattaagacatagatataatttttttcgttttatttttccttgcatgggctgttaagataagatgtctcgcacgtgctcacagtgcggcaacaacggccacaactcgcggacatgcaccgacggtggcgccgccgcttcctgcggcgggtctcccagggagaacggcatcatgctgttcggcgtaagagttatgaccgaagctaactcctccttccggaagagcgccacatgaacaacctctcacagtacgagcggatcc

SEQ ID NO: 125395 - DNA, 335 bp, Glycine max
  unsure (1)..(335): unsure at all n locations
ctgctgcttcccttggcatgtcagaaatgcttggaaaccccatcaacttcagtggtgccacaaggccagctccatctgcttctagtcctgcctccttcaagactgtggctcttttctccaaaaagaaggctacaccaacatctccaaaaaaagctgctgctgctgctcctgccaatgatgagcttgccaagtggtatggtcctgacagaaggatcttcttgcctgagggtctcttggaccgatccgaaatcccagagtacttgaccggagaagtccctggagagtatgtggattctcctctcttatagtccacttntaattcacattaacatgct

SEQ ID NO: 125396 - DNA, 326 bp, Glycine max
  unsure (1)..(326): unsure at all n locations
atcttttctaacatggctgctgggactggactctttgcagagattttggatggagatgtgtacaagtactatgctgatggagaatggaagaaatctgcttctgggaaaagtgttgccatcatcaaccccactaccagaaagactcaatacaaagttcaagcttgttcacaagaggaggttaacaaggtcatggacttggcaaaatctgcccaaaagttatgggcaaagaccccactatggaaacgtgctgaacttcttcacaaggcagctgctatccttaaagagcacaaagcaccaattgcagagtgcctggtganagaaatagc

SEQ ID NO: 125397 - DNA, 221 bp, Glycine max
ttggcaagtaaatatttctgttcctgaaggttgtgctgatccaagtgctagaagttgtgatgggacttgcgtgtaacattcttagaattctcaatgtcttaggtgcaaagagaagatgccaagtttgagatgattttactatatttttcatattggactgtcttcctctataattttgagttaaagtgtccacttaaattgaatttggtgccttttccttt

SEQ ID NO: 125398 - DNA, 337 bp, Glycine max
ggtgctcatcactgctcctggtaaaggagatatccccacctacgtggttggtgtcaatgagtatgactacagccctgatgaacccatcatcagcaatgcctcttgcaccactaactgccttgcaccctttgtcaaggtccttgatcagaaattcggtatcatcaagggtaccatgaccaccactcactcctacaccggtgaccaaaggcttcttgatgcgagccaccgtgacctgaggcgtgcaagggcagcagcactcaacattgtccccacttcaacaggagcagcaaaggcagtggcccttgtcctcccaaccctcaaaggcaaactcaatggc

SEQ ID NO: 125399 - DNA, 337 bp, Glycine max
ttgacaggttcatcatcataaccttcaatgaaaagaaatggctgaggcaagcattggcagcaaaagcagcagatggtctttacagggaatgacagctctcgtcaccggtggatccaaaggaatcggatatgctatcgtggaggagttggcacagcttggagccactgtgcacacttgcgctcggaacgaagctgaactcaatgaatccttaaatgaatggaacacaaaaggatacagagtaactggttccgtctgtgacgtggcgtctcgtgcagacagacaagacctcatagctagagtctccaatgagtttaatgggcaactcgatatccttgta

SEQ ID NO: 125400 - DNA, 308 bp, Glycine max
  unsure (1)..(308): unsure at all n locations
cacaatcatgtcagatagagaagtagtagtacatgggttatctgaggaccaagcatggcaagagctcaagtttccagagttgttgaacagtgatgctgttagagaaatccatgcaactattgaaaaagaatgggattttcttcaaaggtcagcttgccataccgctgcgggaagggctctgtggaagcatgccatccatgatccactggctgacgtgctggcaggagagacttacttgagaaacctccatgagttgctcangtatgacattctcaacaatgctcgggaaacttccggagtcactctcg

SEQ ID NO: 125401 - DNA, 333 bp, Glycine max
ctcgcagcgccgagtctgtgcgagcgactatcatagagcttgaggacaatctacaggacggcattgccaatgcagttggctcttctctgacaaagctttcacatgcaacagttgtaggcattgcttgtgatgtttgtgaacctcatgatgtgcagagactggctaacttcgctgtcaaagaacttggtcatattgacatttggataaacaatgccggaacaaataaaggttttagaccattgcttcagtttagtgacgacgatatcacacagattgtctcaacaaatttggttggatctatcctctgcactcgagaagccatgcgtgttatga

SEQ ID NO: 125402 - DNA, 331 bp, Glycine max
gtaagaattatggcatcagaggagacaacaatttggaaggcaatgataaaaactccagcctccatagtgttgataatttacacctttatatcaatgtggtttgtaggtggcctcactgccttccatttgtatttgataagtaccaatcagactacatatgaaaacttcagataccgatatgatcggcgagccaacccatataatgaaggagtgttgaataatttcaaagagatattctgcatcagcattcccctttcaaagaacaattttagggcaatggtgccaagagaaccagcattacctactcgatcagtgggtggaggctttatga

SEQ ID NO: 125403 - DNA, 328 bp, Glycine max
ctgacccaatctggatacctaccgtgacctccttcaaactgtccaagtcactaagcccacttcctttgctgaacaggatttattgaacatgtacttcaaggacaaatataggccaattcctaatgtctataatcttgtgttggccatgctgtggcgtcaccctgagaacgttgagcttgaaaaagttaaagtggttcactactgtgctgctggatctaagccttggaggtacacagggaaggaggaaaatatggagagagaagatatcaagatgttggtgaagaagtggtgggatatatatgaggatgagactttggactacaacaat

SEQ ID NO: 125404 - DNA, 265 bp, Glycine max
gtgtttttcatttcatcgtgcattcaatggccaccacagcagctctatccggaaccatggtgagcacctccttcatgaggaggcaacctatgaccaccacaagcctaaagacattccccaacgttggtgaagctctttttggtctgaaaagtggacgaggtggtcgtgtcacttgcatggcctcgtacaaggtgaagctcataaccccagaaggagaagtggagtttgattgcccagatgatgttttcattgttgacaaggcaga

SEQ ID NO: 125405 - DNA, 327 bp, Glycine max
ccaagttcttccatattggttgaggaggcctcgagtcaatatttagtttttgctgccatctgtgggtttctgatggatgatgccgggcatcgtgaaaatggaaggcacaaagcagcagatcaatataaatctgctcagggacagtggttgatgcaacatcagccttccatgaagcagattatggcaattatggctgaaagagatgtagccattcaagaaagaaatctggccatttccgagaaaaaagcagcatatgctgagcgcgatatggcattcatgcagcgagatgctgcaattagctgacgtaataatgcacatttggaacga

SEQ ID NO: 125406 - DNA, 337 bp, Glycine max
gtgcctcggaagcagttcatagactacttgggaaactacgttaaccactttgagatcaagcctctgtaccagcgtgcagtggagttggtggagtatgatggatggaaagggatttggagagtgaaggctcagaatagaagatctggtgagcttgaggaatacgctggaaagtacctggtcgtggccagtggcgaaaccgccgagcctcgtctgcctcagattcaaggcttggagagtttcaatggaaaagtgattcactcaactgcctacagaaacgggaacgagtttaagaataaacatgttctggttgtcggatctggcaattccggcatggaga

SEQ ID NO: 125407 - DNA, 337 bp, Glycine max
  unsure (1)..(337): unsure at all n locations
attttattggtcagaaatgagttagtatggttaagtatttcacactggatcatctatttctaatattataagctaaaggaccaagaactgaaattattataacctcaacttgaactatccatacatagccactttacactcactcttgtgttgttgccttcatggccaagccagtgtccattgaggtatggaacccaagtggcaaatacagagttgttagcaccaaaccaatgcctggaactcgttggatcaatcttctcgttcanaatgatgttcgccttgaaatatgtaccgagaaganaacgattctgtcagttgaagacatcattgctttgat

SEQ ID NO: 125408 - DNA, 335 bp, Glycine max
ggtgtgtctctcaaggactccaccttgttcggtctttcattttcagaacctatcaaagctaacttcagctcttctgcattgaggtgtcagagggaattcgaacaaaagctctgtgctgtgagggccgaaacagtggctacagcctctccagcagttaccaagtctacaccagaagggaagaaaacattgaggaagggcagtgttgtgataactggggcttcatctggactaggcctggccactgctaaggctttggctgagacgggaaaatggcatgtaataatggcctgcagggattacctcaaagctgcaagagctgcaaaatccgctggcat

SEQ ID NO: 125409 - DNA, 331 bp, Glycine max
atcgggcacaagctggttggctcatgctcaacagggcctagcagctttggctatctccttggcactcaactttagcccagttttgtttaatggcaatgcattggcatctgagtttgatgtgcttaatgagggtccacccaaagattcttatgtgtttgatgatgcaggagtgcttagtagggtgaccaggtctgatttaaagcagttgttgtctgatttggaatcaaggaagaacttccgcatcaattttataactgttagaaaactcacgagcaaagctgatgcatttgagtatgctgaccaagtcttggagcgttggtaccttctgtag

SEQ ID NO: 125410 - DNA, 336 bp, Glycine max
ctcgagccgtttgtcaaattcttctgttcaacaggtctttgccaatggatactaagtcggctgtagaattaatggagtcttccgcagaggttcatttttctggatttcacatggatggttttgagcaaagaaaggctagcatagaacaaccaacaacctcagaaactgacatgtataaacaaccttttgtcataggtgttgctgggggtgcagcatctggcaagacaacagtttgtgatatgattattcagcagcttcatgatcaacgagttgtacttgttaatcaggattctttttacaataacttgacggaggaggaacttacaagagtacaag

SEQ ID NO: 125411 - DNA, 334 bp, Glycine max
ccactccaatgcaggatgttcaggttacaattgattggtttatttcctctcaggaatgtgttcccaggacttattgtgttttaaatccacaaaatccttttgtgttgaataggtggatggggaaactgactttcccccagggcacttcccgaactgttaagagaatgcctctttctatagggggaggagctggtgcaaagaatgctattctcatgaatatgccaaatgctgttctttcaatgtggagatattttgttggagatctcgtctttgaagtttctaagatgacttctccctacattaaatgtacagtctctttcttcatagcatttgg

SEQ ID NO: 125412 - DNA, 336 bp, Glycine max
caacaaagtctcgtctcgtctgtcgcaggttcagcatcttcttcagcaggccgaacaccgcgctctctccgccgaccagggctcacctcctaaaatcaccttagatcatgttacggtgagctttgccagaagtggaggacctgggggtcagaatgtcaataaagtgaacaccaaggtggacatgcgcttcaatgttaaaaatgcatattggttgagtgacaggatcagagacaagattttgcaaacggagaaaaaccgtattaacaaggatggggagcttgtgatttcttcaaccaagactagaacgcagaagggtaacattgaggatgctttggc

SEQ ID NO: 125413 - DNA, 331 bp, Glycine max
gctcgaggaagacgaagatgtcaggcttcttccaaaccagcttctattttggatacactttgatgttttgtcttggactgggaattctgtgtggagctgtgggttatcttggttcgaatttgtttgtgaggaggatctacagaaacatcaagtgtgactaaggcttttgtaggagtctgagaccagagcacttccatatgtttgttgctggagacaataaatttcttagaggaagcctctggtcatgtgtgggggacaaacaatgtttacaggtagtaagtatcacagggttgaggatgaggatgtattttttctctatattagttgatgt

SEQ ID NO: 125414 - DNA, 330 bp, Glycine max
  unsure (1)..(330): unsure at all n locations
tggtagtaaccattgtagcttctcattgtgttgttccaaaccaagaaacacccaaggttcgtttatggttatcagatagtgaccaagtagtgcgtttaggtcatacacccactatatatgtttacaaagcaaaacacaacaccaaaaccatagagagaatgaaaacctcacttggcaagattttggtgtactactatccagttgctggaagattgaacttatcagatagtggtcgaatggaattggattgcaacgcaaagggagtgacacttcttgaagctgaaaccacaaagtcattgggtgattatggagatttntcaccttctgagt

SEQ ID NO: 125415 - DNA, 347 bp, Glycine max
cgcaccagtttcaccgcacgaatatcttgttgtttggagcgatccgagaaaaactctgtaaacatgttggtttaccaggacctccttacaggtgatgagcttctctctgactccttccgttacaaggaaattgagaatggaatgctgtgggaagttgaggggaagtgggttgttaaaggagcagttgatgtagacattggtgcaaacccttctgctgagggtggaggagaagatgagggagttgatgatgcagctgttaaggttgttgacattgttgacacattcagacttcaggagcaacccgcattcgataagaagcagtttgttaccttcatgaagaggtttat

SEQ ID NO: 125416 - DNA, 296 bp, Glycine max
  unsure (1)..(296): unsure at all n locations
agaagatggagatgtatcagatctggagcaggagaatagcgttgggagcgttcgcgtttgttctgcttttcctatcggcctcagcagacgacgtcgttgtgctctctgaagataacttcgagaaggaagttggtcaggacagaggagctctcgttgagttctatgctccttggtgtggacactgcaaaaagcgtgctccagaatatgataagcttggtagcagcttcaagaaagccaaatctgttttaatcggncaggttgactgtgatgagcacaagagtgtgtgcagcaaatat

SEQ ID NO: 125417 - DNA, 295 bp, Glycine max
cggcggtgcctctactctcgaagaagatcgtgaagaagagggtgaagaagttcaagaggcctcagagtgacacgaaaatttctgtcaagacaaactggcgcagaccaaagggtatcgattcccgtgttaggtgaaagttcaagggctgcactttgataccaaacattggttatggttcagacaagaagacccgccactatctccctaatggtttgaagacatttgttgtgcacaatgtgaaggacttggaactgctcatgatgcacaacaggacttactgtgctgagattgccca

SEQ ID NO: 125418 - DNA, 315 bp, Glycine max
gctagacatgtcagtacagtatccgcggtcgatagtgaagtaaatgaagaatctggaaaatcaatctggaaaaatagagtgagaagctggaagggttaggatacaaagatcatgaagatatagtctgcacccaaggaagacaaggaggcctcaattcctccagagcagcagatggaagaaacacggcccgcagaggctactgctgcaccactttcagtagttattctcaatgtcgaaatccaaaattgcaccgtacagaactgtgatagtcatgcgattgataatattgggacttttcttccattatcgagttac

SEQ ID NO: 125419 - DNA, 346 bp, Glycine max
ctcattctattttcatagtgacgaacttctgaagaaatggcaaatcatcctttgacacactctcactctttccgcgcgaggtctgatgaaactctcactggtcacaggaacgaaattctagcccttctgtcaagagctgaacccaagggcaagggaatcctgcaacatcaccaagtggttgcagagtttgacgaaatccctgaggcgagcagaaagaaactccaagatgatgtctttcgagcaattttgagatccacacaggaagccataatgctaccaccatttgtagctcttgctgttcgaccatggcctcgtgtatgggactatctgcgtgtgaatgtgcaca

SEQ ID NO: 125420 - DNA, 303 bp, Glycine max
ctcggaatcggctcgagtgaacctaacgccctctttacattcccgccgcgttccgccaagtggaggatttttctccagaatggtggcagctggtgacgacactgacatggtaccatgactactggctaagccagcagcacgatgatgcagccttctatggcgaggatgggtttgatggcaatgatgtggttgatttacttcctgattcgtttgattttgatgctggtgaagatctttttgaagagtttattcgatcttctgaatcccaagaagacactggacccaaaggaactgcatgagctt

SEQ ID NO: 125421 - DNA, 250 bp, Glycine max
agcaaggtgtaggcttgggtatttccatgtggtgaacaatgattatactcactgggaaatgtatgccattggtggaagtgccaatccaaccatcaactgccaaggcaacagatttgttgcacccgatgacagagtcagcaaagaggtgacaaaacgtgaagataccccagagagtgagtagcaggattagaattagaggtcagaaggggacttgttagtaaacggtagcgttttcacagcatcgggtgct

SEQ ID NO: 125422 - DNA, 282 bp, Glycine max
tgtttaatgatggacaggacagttccttcaaagttgatggatgatattgcagctactcggattcaaaatgcatttcgttcatttatggcaagaagaacattacaccatctaaggggtgcagagaaattcgaagctttgattcaagaccacctggccagggagcaaacagcaactgcactaagctatatacattcatggagcagaatacaagaacaaattagagttcgaagaatctgtatgataacagaagccaggattaagcacaagacattggacacccag

SEQ ID NO: 125423 - DNA, 209 bp, Glycine max
ctctctctctctctctctctttctctctctgcgatctgtttcgtgttgtagctagctcctcgaaaatgctggcacgcctcgccgcgagtcgcttcaacgagatccgtcagattttccgtcagccttctagggctttctcaaccgctctgaactaccaccttgacacaccggacaacaaccctaaacttccatgggaattcaccgaggcc

SEQ ID NO: 125424 - DNA, 281 bp, Glycine max
tgtttgtcattagcacttcttcttttcacactgccgctgcaacaatggcttcagagaagtgcatttcgaacccaatgagggagataaaagtgcagaagctcgttctcaatatctctgttggcgagagtggagatcgtctcaccagagccgccaaggtgttggaacaacttagtggccaaaccccagtgttttccaaagcaaggtacactgttcgttcctttgggattagacgaaatgagaagattgcatgctatgtcactgtcagaggtgacaaggcaatg

SEQ ID NO: 125425 - DNA, 281 bp, Glycine max
ctttcttcaccgttcgctctttctttctcccctacacaaaacatggctttgcccaatcagcaaaccgtcgattaccccagcttcaagcttgtcatcgtcggcgacggtggcacaggaaagacaaccttcgtgaagaggcatctcactggtgaattcgagaagaaatatgaaccgaccattggtgtggaggttcatccgttggattttttcacgaactgtggaaagattcgcgtctattgttgggatactgctgggcaagagaagtttagtggcctcagaga

SEQ ID NO: 125426 - DNA, 255 bp, Glycine max
cgcaacaaaaagagagatcccaggcgaggagaaagatggaggggaaggagcaggatgtgtcgttgggagcgaacaagttccccgagagacagccaattgggacggcgccgctggttgacccgacggagtttacgtcatggtcgttttacagagcagggatagcagagtttgtggccacttttctgtttctctacatcactgtcttaaccgttatgggagtcgccggggctaagtctaagtgtagtaccgttggga

SEQ ID NO: 125427 - DNA, 327 bp, Glycine max
gaggtgagacacatcagtgttgatgaagatccaccactccctctgctttctcaacaatctaaatctcatcaggtgccagagttacctgtacactataaacaactttgggataccccgttcaatcatggcttacaccaatgtgtcaagccgactactaaatataaagctgcccaaggatttgatcgctatctaaccgtgagaagtaatggtggactaaatcaaatgcgaactggtatatcagacatggtggctgtggcacatataatgaatgcaactttagtcatacctcaattggataagcgttcattctggaacgactctagtgtg

SEQ ID NO: 125428 - DNA, 340 bp, Glycine max
  unsure (1)..(340): unsure at all n locations
cgtgaatgcgtataaaaggaaaataaagaaattagcgtcaaaatgttgggtgtgttcagcagctccatagtgtcgccgccggacgagctcgtggcngccggcagccgtactccgtcgccgaagatgacggcggcggcgctgcggaagcggttcgaggagaagaacccctccgccgtgtcggtggaggtcggagagcatgtccagctcgcttatacccaccacaacgagtcgccgtttcagcccagatcctttgctgtcaaggatgaggtacgctgcttgtttgagggagctcttgacaatttgggaaacttgagacaacaatatggactggccaagtcag

SEQ ID NO: 125429 - DNA, 283 bp, Glycine max
  unsure (1)..(283): unsure at all n locations
tanaatcaccggcgatgttgccgggagattccaccggctccaccaccgcaacagtaaccgatccttcgccggaaccatcacattaaccacaatgtcgtcgacaccgcagagcttaaagcagagagtcttcagatgcctaaccanactctccgaccgcgacacgcagtctctcgccgctgcggagctcgagtcaatcgctcgaaacctcgacggagccaccgtgccgatgttcctctcgtgcatgtactccaccgacgactccgacaagccaccggtgcgcaag

SEQ ID NO: 125430 - DNA, 309 bp, Glycine max
  unsure (1)..(309): unsure at all n locations
caactctttctcacccgctagganttccttccatcgcatcttgatttcgcaacctcgtctagcaattctccatggagggtgctgggatggaagagaataatattattaatgatgataataagtctgaggcgcatttgacttctgctgctgcttttgtggagggtggaattcaggatgcttgtgatgatgcttgcagcatatgccttgaagctttctgtgatagtgatccctccacggtgacaagttgcaagcatgagtttcatcttcagtgcattctggaatggtgtcaaagaagctcccagtgcccca

SEQ ID NO: 125431 - DNA, 223 bp, Glycine max
ggacaaggagggaatcccccagaccagcaacgtctcatcttcgccggaaagcaacttgaggacgggcgcaccctcgccgactacaacatccagaaggaatcaacccttcacctcgtcctccgtctccgtggtggcatgcagatcttcgttaagaccctcaccggcaagactataaccctagaagtcgagagctccgacaccatcgacaacgtcaaggctaaga

SEQ ID NO: 125432 - DNA, 275 bp, Glycine max
gtgaatcaagaaccgctctgctatggctgctctgcaatacttggaatcgctgcgtaattcgcaccctgagctctccgattggtacaattcgctagcggatctgtaccagaagaagctctggcaccagctcactctcaagctcgagcagtttgtggctctcgccgtcttccaggctggtgatgctttaatacaattatatcacaatttcatcacagactttgagacgaaaatcaaccttctcaagcttgcacattttgctgttatagtttctcggc

SEQ ID NO: 125433 - DNA, 258 bp, Glycine max
agtgaaatggacttggaagcagtgaagaggtacttagagaaaggaggagaaacagcatcggcggtggatgggttgcctccgaggtttctggaaccgttaataatgaacgctcttaaggtcgatctcatcgaaactggtcgcgttgtctgctccatgaagatacctccgcgtttactcaatgctgggaattcgttacacggtggcgccatcgctgctctggtcgacgtggtggggtccgctgcgattcccaccgttgga

SEQ ID NO: 125434 - DNA, 195 bp, Glycine max
gcagacttaacaacagcacaaagcgggttactgtctgttcaagctaccatctctctctctctttcttagtgcctccttgccagaagttaaaatggcccaagaaactttcctattcacatctgaatcagtgaacgaggggcacctgacaagctctgtgaccagatctccgatgctgtgctcgatgcatgcttggag

SEQ ID NO: 125435 - DNA, 241 bp, Glycine max
ctcgagccgatgtcggctcgagcgagctcgagaccactcttaatagctctctgccttgctcctttacacacctctccaacctttcacttacagctttatttgaatccctctctctcctttccaaatggccagcgttgaggttgcacatcacacaccaacaacagttccagaaaatgaaacaaccgaggtaatcaagacccaggaaacaaccccggaaccagtaccagccactgaggctcct

SEQ ID NO: 125436 - DNA, 238 bp, Glycine max
ccaggtccggcctcaaactcacaatcttctggaccgtgggagcccgcccaggcccggcccaggcccaaccccagcccgcgggccttcgcttatccgtggtgccctacgcgaacggcgacgtgtacgagggggagctgaagggagagaagtgttgtaggagtggggtttactattacagtatgagtggaaggtatgagggggattgggtggatgggaagtacgatgggttcggggtgga

SEQ ID NO: 125437 - DNA, 342 bp, Glycine max
tcttcgtttccacccctcactccgcctccgtcatcctcaaccccagccctccctcccaagccttcttcaaccaaaccctagaaaccttcattctccctcttctccatttcctctctcaaacaaattcacccttaatgctcaacctctacccttactacgtcttcatgcagaacagaaacctcgtccctctcgataacaccctcttcaaacccctccctttctccaaacaaatgctcgaccccaacactcttcttcactacaccaacctcctcgacgccatgatcgacgctgcttacttctccatgaagaatctcaacgtcactgatgtaaccgttctcgtca

SEQ ID NO: 125438 - DNA, 337 bp, Glycine max
gagaacctgagatccgatgcgaacaatcagtcgaaggagcttagagcctttacttgatatttagtaaagcgcactcactctaacggcgtaccttttgcatgatgggtcagcgagaaaatgggaacagcggcttaagccagtaggtgtaggcgcctttcagaggtggaatcttctagttcttcctatttgacccgaaaccgatcgatctagccatgagcaggttgaagagagctctaacaggccttggaggaccgaacccacgtatgtggcaaaatacggggatgacttgtggctaggggtgaaaggccaaccaagatcggatatagctggttttccg

SEQ ID NO: 125439 - DNA, 321 bp, Glycine max
cagggaactcttgacagggtttggattttacgagccttactggctcattgactttgcgaatgcttgcattgttcttcacttggtaggaggatatcagatttacagtcagccgatctatggagctgttgacagatggtgttcaaaaagataccccaacagtggatttgtgaataatttctaccaattgaaactgcctcggttgccagcttttcagctaaacatgttcaggatatgttttagaacaacctatgtggtttccacgactggactcgctatcctatttccttacttcaatcaagttataggagtgttaggagctta

SEQ ID NO: 125440 - DNA, 298 bp, Glycine max
caagcacatagttatcatcaattccccagctagttttggccacgcctgcatcttcttctgctttaagctatggcctctaacttcagcttgagaactttgatgatatttgcccttgcattttctctcgccctgcaaggcactcttggagggatagaatgcgagagtctgagccatgacacatgctcattcgccgtgacatctgctggcaaacgatgtgtgcttgagaagcaggtgaagaggactggtgaggaagcatacacatgcaggacatcagagattgaagctgataaactgaagg

SEQ ID NO: 125441 - DNA, 194 bp, Glycine max
tggttccagagtctgttttgaagaagcagaagagagaggaggaatgggcgttggccaagaagcaagacctcgaggctgcgacgaagaagagagccgagagccgcaaactcatctacaacagagctaagcagtacgctaaggagtacgatcaccaggagaaggaattgattcggttgacacgcgaggccaagctg

SEQ ID NO: 125442 - DNA, 305 bp, Glycine max
  unsure (1)..(305): unsure at all n locations
agaagcagggcaccactctgagaagaaacgacgactaaacgtagatcaggtgaaggccttggagaagaacttcgaagtagagaacaaactggaacctgaccgaaaggtgaagctcgcgcaagaactcggcttgcaaccaagacaagttgcggtttggttccaaaaccgccgtgccagatggaaaacaaagcaattggaagagattacggcgtcctcaaagccattacggatcattaaacttaactttgacaccctccaacaagacaacgaagccttactcaaacagataaaggattganatcggg

SEQ ID NO: 125443 - DNA, 204 bp, Glycine max
gcgctcctgtccttaactggccgggtcgtgcctccggtgctgttactttgaagaaattagagtgctcaaagcaagcctacgctctgtatacattagcatgggataacaccacaggattctgatcctattgtgttagccttcgggatcggagtaatgattaacagggacagtcgggggcattcgtatttcatagtcagaggtgaa

SEQ ID NO: 125444 - DNA, 367 bp, Glycine max
ctgaattcagaaacatcgaaagagagaggcatggccgagcaaaccttcatcatgatcaagccagatggcgttcaaagaggccttattggcgagattattagcagatttgagaggaagggtttttacttgaaagggttgaaactcgttactgtggaccgtccttttgctgagaagcactatgctgatttgtctgcaaagcctttctttagtggtttggtggattacattgtctctggccctgttgttgccatgatctgggagggtaagaatgttgttacaactggccgaaagattatcggagccacaaacccagctcaatctgagcctggcactattcgtggtgactttgctattgacattggaagga

SEQ ID NO: 125445 - DNA, 366 bp, Glycine max
tcggctcgagcttggcaccaagtttataatttatgatacgcaacctccctacaagaatgctatgctgtctccacctggccgcagccgtacgttttcaaaaaaggtttctccaaaggtccctagcggcagctacaatattgcccaggtcacctatgagttgaatgtccttggtactagggggccacgaaggatgaattgcacaatgtactcaattcctgcatcatccatggagcctaatggcgttgtcccaggccagtcagagctccttccccgtgcccttgaggattctctccggagtatatccttctcaaaatcaatcgacaattcaaccgagttcagcagctctagagtctctgacataatggg

SEQ ID NO: 125446 - DNA, 384 bp, Glycine max
  unsure (1)..(384): unsure at all n locations
ctcggaatcggctcgagctaactcactcactcacaactcagtgnaaagagaatccgaggcgaagagaagagaanaattaagatggaggggaaggagcaggatgtgtcgctgggagcgaacaagttcccggagagacagccgattgggacggcggcgcagagccaagacgacggcaaggactaccaggagccggcgccggcgccactggttgacccgacggagtttacgtcatggtccttttacagagcagggatagcagagtttgtggccacttttctgtttctatacatcactgtcttaaccgtcatgggagtcgccggggctaagtctaagtgcagtaccgttgggattcaaggaatcgcttgaagcttcggtggcatgatc

SEQ ID NO: 125447 - DNA, 210 bp, Glycine max
ggctcgacggtaactgtggttgcggaagctcctgcaagtgcggcaacggctgcggaggctgcaagatgtacccagccttgagctacactgagtcaaccaccatcgagaccttggtcataggagtggcacctgagaaggctcaacttgacggtgctgaaatgggtgtgcccgctgagaacgctggcggctaatgtcgaggtacactgctcc

SEQ ID NO: 125448 - DNA, 330 bp, Glycine max
  unsure (1)..(330): unsure at all n locations
ctcggaatcggctcgagaattctcacactcaattaccattccataacctaaatctcctctttgtttccgagtcagagagcaatggcacgtaccaagcaaaccgctcgcaagtccaccggcggaaaggcgccgaggaagcaattggcgactaaagccgctcgcaagtcagctccggccaccggcggagtgaaagaagcccaacgcttcaggcccggaacggtagctctgaaggagatcagaaaggtacagaagagcactgaacttctgatccganaactcccattccagaggctcgtcagaaaatcgctcaagatgtcaaaacaatcttcg

SEQ ID NO: 125449 - DNA, 372 bp, Glycine max
  unsure (1)..(372): unsure at all n locations
gnagaagacccttgcacatagcttcaaagaaattaattaagatgggtcaccattcttgctgcaaccaacagaaggttaagagaggcctttggtcccccgaggaagatgagaagctcatcagatacattaccactcacggctatggttgctggagtgaagttccagagaaagctgggcttcaaaggtgtggtaagagttgtcgcctgagccggattaattnnntgaggctgcncctagaagaggcaggtttacacctgaagatgagaagttaattataagtcttcacggggtcgttngcaacagatgggctcacattgcaagccattaccagtagaactgacnacgaaatanagaactactggattcttngat

SEQ ID NO: 125450 - DNA, 323 bp, Glycine max
tcgagagatgaacaccatcacggcgcaaaaccgacgggactcgaatcagaacacgggcatttcgatccacaattgtaggatcatggccacgccggatcttgaagcatccaagggtagctaccccacttatctgggacgtccttggaaactttacgctagaaccgtcttcatgctgtcctacataggggaccacgtgcatccacgtggctggctcgagtggaacacttcctcctctgctttagacacgtgttattatggtgaatacatgaattatgggccgggttcactctgggccacgggttattgggcggctacgggcctca

SEQ ID NO: 125451 - DNA, 363 bp, Glycine max
  unsure (1)..(363): unsure at all n locations
ttacctgaagatggcttcggtgtcctttgccgtgggacttttaccttacgcttcagttcgatttcccgtattgagcaacgccaactcactgaaactcagttcctcagctagcatctctactccaattcttcagcacaagctctgctctcttctttcccccctccctctaagccctcgccctcgccctctcaccattgtatccgctaagggctgacaaatgaaaacccacaaggcatctgcaaagcggtttagggtgaccggacgaggcaaaatagtgcgtaggagagctggcaagcagcatttgctcgtcaagaagaataccaagcgcaaatcccgactctccanaatgcacgcggtcagcag

SEQ ID NO: 125452 - DNA, 368 bp, Glycine max
gcttaacctctctcattcaccatttcctcacctccttcaaccgctgctaaattctagggttccgaaatggacgctggcggaaagatcaagaagggcgccggaggtagaaagggcggcggcccaaagaagaagccggtttcaaggtccgtcaaagccggtctccaattccccgtcggaagaattggccgttatttgaagaaaggaaggtacgctcagcgtgtcggtaccggtgctctcgtatacttggctgcagttctcgaatacctagctgccgaggtgcttgagttggctgggaatgccgcacgtgacaactagaagaacaggattattccaagacacgtgctactagcagtgagggacgatgaaga

SEQ ID NO: 125453 - DNA, 359 bp, Glycine max
tgaggatttaaatgacctacaggatattcttgaatgggcgaaggcaaataactgtggaccattacagattataagtgagtattatcgcttaacttgccctgcaaggggctcagcacttaggtttcatcctttggaacacctgcatcccttggaatatcacagaccagatgagacaattctacatcttgctggttcaactgttcgattgaaatcttgcagtacgggtctggaatttgcaacgagcctaattctctcttagctgaggaggaggcaactgcattatctatatgggctgtagcgtgcatgtgtggtaccttgaggcttgaacatgtgttggcattctttgctggagctctact

SEQ ID NO: 125454 - DNA, 265 bp, Glycine max
cgcgaaccaagtctcagaagtgaggggcaaaatagtaatgtgggatggttcggtgcaggaaatagagcaacctttgacagtggcagagttgatgctggagcacccagagcaagttgtggttaagttgcattcagcagtgacgcagacaagggcaacaccattgccagcagatcacaagttagagacacacaaggtgtatcgtgtgcttcccattaagcgacggaagcgcgttggattaagcggcgaagacactcggcgcattctc

SEQ ID NO: 125455 - DNA, 363 bp, Glycine max
tcgagctcgagcgttttagcgcacttcttctagatttaaggaagatgggtaaggacaaggttcacatcagtattgtggttattggccatgttgactctgggaagtccactaccactggccacctgatctacaagcttggaggcattgacaagcgtgttattgagagatttgagaaggaagctgctgagatgaacaagaggtctgtcaagtatgcctgggtgcttgataagcttaaggctgagcgtgaaagaggaatcacaattgagattgccttgtggaagtttgaaaccaccaagtactattgcacagtcattgatgcgcctggacacagggatttcatcaagaacatgatcactgggacat

SEQ ID NO: 125456 - DNA, 367 bp, Glycine max
  unsure (1)..(367): unsure at all n locations
ccttccgcctgctctatgacactaaaggccgattccgtctccattctgtcagggatgatgaggcaaagttcaagctctgcaaggttaggtcagtgcagtttggccagaaaggtatcccatacctgaacacctatgatggtcgcaccatccgttacccagaccctctcatcagggccaacgacaccattaagctggatctggaggatcacaagattgttgattttatcaaagctgnatgtgggaatgtagttatggtaacaggtgggagcaacagggggcgtgttggagtgatcagaacagggagaagcataagggtagctttgagacaattcacgtgcaggattccactggacatgaatttgctact

SEQ ID NO: 125457 - DNA, 371 bp, Glycine max
  unsure (1)..(371): unsure at all n locations
atcgacggtggcatcggcgccgccgtggggaacccgccgacgtggccatggtccgaatgcaggcagacgggcgcctcccagcggcacagcggcgcaactacaagtccgtcgtggacgccatcacgcgaatcgcgaacacgaaggcgtcactagcctttggagaggctcatcgcttacggtgaaccgcgctatgctcgtgacggcgtcgcagctcgcgtcgtacgaccagttcaaagaaacgatcttagagaacggcatgatgcgcgacgggctcgggacccatgtcacggcgagcttcgcggcggggttcgtggcgacggtggcgtcgaaccccgtcgacgtgatcacgacgnaggtgatgaacatgaggg

SEQ ID NO: 125458 - DNA, 297 bp, Glycine max
gcacacgaagaattggtatccaattccacttgtatgttgccgaccctggggcaaactgccagaaaatgttccctgtcatcccaaacttgcagattttgctaactgtatgaagaagaaaggtcgaggaatgtccatatttgtctctatactagatggggattaccatgaatgtgctgaagatgccaagactgcttgcaaacaatgtagcaccgacatagattactaaaattgtgaaggtgtggctgagataattgttgcacctaacatgtctgaaggcttccgtggcataattcagac

SEQ ID NO: 125459 - DNA, 207 bp, Glycine max
gacttcttccctgtggaggttgatagtcaagagggagttgcgcacattggtgaattgacatctggtgtctatggttcactggctacaaaaactaatttggtggaaactcccaagggatagcaactggatctaccttgtgacaaaattcctagtgtcttgactacaactgatgcgagattggtacgcaccgatcattctggagatgat

SEQ ID NO: 125460 - DNA, 138 bp, Glycine max
  unsure (1)..(138): unsure at all n locations
tgaatgctgaggatgggttntgttgcagatgttgaaatgattctaggcaaggtagcaaatgttaataaagttcagacacttcttttcagtgctactttgccagactgggttaagcaaattgcttaccaatttttgaag

SEQ ID NO: 125461 - DNA, 311 bp, Glycine max
acattactctctcactttctccaatatggcttcttctcgaaatgagttttatgcacttatgctagtggtggtggctggctccatagtggcttcctgtggtgctaacttcaaccaagactttgatctaacttggggtgatcagcgtgctaagatattcaatggtggtcagcttctatctctttccctggacaaagtctctggctctagcttccaatccaagaaagagtacttatttagcaggatcgatatgcagctgcagctcgttgctagcaacgggagctgcactgtcactgctgactacttgtcgtctc

SEQ ID NO: 125462 - DNA, 375 bp, Glycine max
  unsure (1)..(375): unsure at all n locations
gtaactcggaatcggctcgagctcatctggacaacttattcttccggaggcactaaagcttttgcccttgtacacacttgcattaactaagagtacagggttgcgaactgagggaaagatagatgagcggtcattttggataaactatgtatcctctatctctgctccattagcaataccacttgtgtatcctaggatgatggctatccatgatcttgactcaaaggaagatgaagactctgttattcctccctttcttcctctgactagtgaacacgtcagtcatgatgggatatatcttcttgagaacggtcatgatngcttgatatatgttggagactctgtgaatccagacattgtgcagaaactgtttgg

SEQ ID NO: 125463 - DNA, 255 bp, Glycine max
cacaccaaacacataatagcagtatcagggcattagcacttcaactcacagaccttacacatgtttgttataaagtcaatgaagctctcggcgttgcagcagagttacctcacgcgccgggcgaacagcttcagaggatcggcgcagttggattcgtccgccgacggcgcgatgaagtcgccggcgacgattgactggcttgtaatccacagcgtctactgactcatcagctaggtgctcggcttccgcttcacg

SEQ ID NO: 125464 - DNA, 196 bp, Glycine max
ggaatcggctcgagagtaccctgcttacttgcaatctgctgtggtgaatgttagacaactttacatcagatctcttcttgctgctctctgtatccatgcgtatcaacaagttgcgtatatgatattgcaaagggtatcacctgttacccactctgtgggtaattgtgtgaagcgtgttatggtcattgtgagctct

SEQ ID NO: 125465 - DNA, 316 bp, Glycine max
caagaagccagaaatgtcttcttttacttattccctattcaccaccattttcttagtgctaacaatctttcttcatccatcaaatgctcaactgagttcaaccttctactccagcacgtgccccaacgtgtcttccgttgtgcgcagtgttgttcagcaggctctgcaatctgatcctcgtattgctgcgagcctaactcgtcttcattttcatgattgcgttgttaatggatgcgatggcatccatgtattagacgtatgcggcaacataatactgagcgatacaaatgcaggtctcaacaacaattcagctcgt

SEQ ID NO: 125466 - DNA, 142 bp, Glycine max
cattttcttcctcagtagtgtcattgacgcttctcttctctgcagcaactatgcctaaccctaaggtcttcttcgacatgaccatcggcggtcaatctgctggccgcatcgtgatggagctctacgctcgacgtcactcccc

SEQ ID NO: 125467 - DNA, 328 bp, Glycine max
  unsure (1)..(328): unsure at all n locations
cactcccctccccctttccccattctccaatcaaaaatcatttcttttctgggggagctaagatgggtgtgtcgaaattgggttttttggggcttctttttgctgattttctctttgcagttggagctgtggagctgggcaggaaccaacccactgaaagaatttcaggtagtgctggtgatgtattggaagatgatccagtgggaaggttgaaggtttttgtttatgaactgtccagtaaatataataagaacattctgcataaaggatccangatgtctcaaccatatgtttgctgctgaaatctgtatgcaccgggttctcttat

SEQ ID NO: 125468 - DNA, 143 bp, Glycine max
gtaggaactcaagatcgcacgattggccatgtcctctataattagctacattcttcaggccattgtcaccggaactggaccatcggataccctcgccgatcaccttgctgaccctatcaacatcaacgcctcggcctatgtca

SEQ ID NO: 125469 - DNA, 264 bp, Glycine max
tgccagtagtcatatgcttgtctcaaagattaagccatgcatgtgtaagtatgaactaattcagactgtgaaactgcgaatggctcattaaatcagttatagtttgttctgatggtatctactactcggataaccgtagtaattctagagctaatacgtgcaacaaaccccgacttctggcagggatgcatttattagatgaaagggtcacacaggctctagctgttgctgtgatgattcatgataactcgtcggatcgcacgg

SEQ ID NO: 125470 - DNA, 325 bp, Glycine max
  unsure (1)..(325): unsure at all n locations
cttcggcagaacgtctcggttatgctaccgagcagcttgccttctacacaggacccacagttgggggtctgcttaatgccacctttagcaatgcaactgacatgattctatcaatttatgcattgacaagcaatatgataagggctgttcagcaatccctactcggttcaatcttgtacaatatgcttctaattcgtagctgtgcattctatactagtggccttgcacattgacaacaaagtacagtttttgataangcggctactgtagtcaattctggcttactcttgatggctgtgatgggaatactattcctgctgtgctg

SEQ ID NO: 125471 - DNA, 332 bp, Glycine max
ggaagacaaaacatacgatttgaacttcaaggaagataacaatgatggctcgcagaggatctctggagatgctttgaaagatctgtacaagtcatttgtgtcagagtacccaattgtttcaattgaggatccatttgaccaggatgactgggagcactatgctaagctaactgctgaggttggagccaatgtacaaattgttggtgatgatctcttggttaccaaccccaagagggttcagaaggcaattgatacgaaagcatgcgatgctcttctcctcaagggtcaccaaattggttctgtgactgagagtattgaagctgtcaggatgt

SEQ ID NO: 125472 - DNA, 278 bp, Glycine max
ttctctctctctctgttttttctatataaatttctctcgcgtcttcattcctctcattccctctgaattcttctcactcttcagatctctctcccttccttccatcccaaccacaaggttgctgagacgacataaaacatggtgaagatttgctgcattagagctggctatggttggtggcccaaccatggctgtaattgccttgaagtgtcctgagatcgaggtgatcgtggtggacattctgcaccgcgaatcaacgcgtggatcagcgacacctc

SEQ ID NO: 125473 - DNA, 317 bp, Glycine max
ggttttgccggagatgatgcgccgagggcggtgttccccagcattgtggggcgtccacgtcacacgggagtgatggttgggatggggcagaaggatgcgtatgttggggacgaggctcaatccaagaggggtattttgactctcaaatacccaattgagcatggaattgtgagtaattgggacgacatggagaagatctggcatcacacgttctacaacgagcttcgtgtggctcctgaagaacaccctgtgcttctcaccgaggcgccgcttaatcccaaggccatcgtgagaaatgactcagatctgtttgagac

SEQ ID NO: 125474 - DNA, 352 bp, Glycine max
  unsure (1)..(352): unsure at all n locations
ctatgatatctaccagaggtgatcacttccagcatctcaaactcgtcaccaattccgacggcacgatcactcgccagcgtgatgacccacccatctcaccctcactcaatcccacccttcccgtcctcacccaagacgcaaccatcaaccgatcaaacaacaccttcgcccgcatattcctaccccgcgaacactcgattccccccctccaagaactccctctcgtcgtttacttccacggcggcggcttcgtcctcttcagcgacgcctctgacttcttccacgacgcatgcgtaaacctcgcagacgacaccactccatcgtcgtntccgtggagtacgactcgcacgga

SEQ ID NO: 125475 - DNA, 268 bp, Glycine max
  unsure (1)..(268): unsure at all n locations
ttcggctcgagctttctctcccactcactcactcacaggtaagcaatggcgggataaggagggaaagggcttcttgcagcgataaccaccgcggcgaataagggacaagacaaggacaagaagagacctatttctcgctcttcacgtgctggaatccagtttcctgtgggacgtatccataggcagctgatacatagggtccaagcccatggacgtgtgnggcacagctgcagtgtacttaccgtcactctacagatctgactgctga

SEQ ID NO: 125476 - DNA, 206 bp, Glycine max
  unsure (1)..(206): unsure at all n locations
ttcacagaccgagaaatcccaatcctatggcagaggaagggaaacccgatgaacagctctttcagcttctctccaatcttctccaccaggtggaatcactgacgaatcaagaagaagttgaactgcgttctaaaattgaaactcttcgattagacgttacaacgttccttcanagtcaacgcagcaccttaacgaggcgtatgtca

SEQ ID NO: 125477 - DNA, 329 bp, Glycine max
caccagcatcatataatttcatttcccattctactcactcacacacacacacactctctttccatgggtccgtttcgtaaacccttccttgcatttctctcggttgttctatttctgggtctctatgaggcagcagcagaacagactcagactcacaagagtacttacattgtacacgtggcgaaatcggagcatgcccgagagcttcgagcaccacgctgtgtagtatgagtcgtcactgaagaccgtatctgactcggcggagatgatttacacctacgagaacgccatccatggctacgcgacgagattaaccgctgaggaaacgc

SEQ ID NO: 125478 - DNA, 341 bp, Glycine max
gtgaggtagaaccttccactgtggtgactctgcgatgggtgcctacaagtatgtttcagagctatggcgcaagaagcagtctgatgtcatgcgcttcttgcagcgggtgaggtgctgggagtataggcagcaaccttccattgttcgtttgacaaggtctacccgccctgacaaggctcgtcgcttaggcttcaaggctaagcagggctatgtgatttaccgtgttcgtgttaggcagggtggccgaaagagaccagttctcagaggtattgtttatgggcagtccacaaaccagggagttacccaactgatatttcagcgaacaagaggtcagttgccga

SEQ ID NO: 125479 - DNA, 292 bp, Glycine max
gtctcccctactgtacaatgcaccgtggagaaagctttaactcaggcaacaaagcttcaaaggaaggatctctgtttggttggtgcaagcaggaccgatgcaggagtccatgcttggggtcaggttgctcatttttttacaccttttaactatgacaacttggaacaacttcatgcagctttgaacggtcttcttcctactgatatccgaattagagagatcagccctgcatcagctgaatgtcatgctcgattttctagcaaaacgctgatatgagagaagctgcaacata

SEQ ID NO: 125480 - DNA, 337 bp, Glycine max
tgcagccgctggtggaggcgcagataccgttcaagatctacattgtgaaggaccacgacatgaaggagaggctctgcgtggaggtggagcggctcgggctcagcaccgtcatcatggggagccgcggcttcggcgcgtcgaagcgagccgcgaaggggaggctcgggagtgttagtgattactgcgtgcaccattgcgtgtatcccgttatggttgtgcgctacccgaggagaacgataacggtacggtaacggtacggtgctgtagtcttctttgcagctggggaccgatggacttccactatgcggagaggacatgagtgatcatgatgctcgat

SEQ ID NO: 125481 - DNA, 183 bp, Glycine max
  unsure (1)..(183): unsure at all n locations
aatattcanaccttgctctatactacacagtacacacactagaagaatattggcttccatcctccactacttttgtagcctctctctttcttgatgctttcttttcttcttatccgactcagtcacacctagaaaatcaataaaccttgttggtctacacgttcaaaatgatggttccacagg

SEQ ID NO: 125482 - DNA, 283 bp, Glycine max
cgactttgtttcccaatttccattgcctccgcttccacctcgcaaccatgatcatcccggagaagaaccgcaaggagatctgcaaatacctcttccaagagggagtttgcttcgcgaagaaggacttcaatttggccaagcaccctgagatcgacgtgccgaatctgcaggtgattaagctgatgcagagtttcaagtctcgcgagtacgtgagatgaacttttgcttggatgcactattactggttcctcaccaacgatggcatcgagtttctcagaactta

SEQ ID NO: 125483 - DNA, 295 bp, Glycine max
  unsure (1)..(295): unsure at all n locations
tgtgcatcagaatcacattcaatttgctctagaaagaggaattcccggatatcttggtgtcctgggaactaagagactcccttacccaagcagatcttttgagctcgctcattgttctcgttgtcgaattgattggcttcaaagagatggaattctacttcttgaactagaccggttgctaaaggcagaggnntatttgcatactcatctctgaagcatatgctccagatgaagaggtctaaggatatggaagaatgagtgacttgtgggcgtattgtggaaatactgcaagagg

SEQ ID NO: 125484 - DNA, 303 bp, Glycine max
cggctcgatgttatcagaagcactacgatgatcagggtcgcaaggttgacgagtatggcaacgttgagaagcaaaccgacgaatacggcaaccctgttcatgctgctagtgtcacctatgtagccaccagaactgctgctggtggttacagtgatgacattaataagcaacatgataccaccatggctacggcgtagacaactggtagacagcattctagtggtggctacgatggtgacactaataaacatcatggaactactggtggctataatgatgacaccaatagacatcatggaacta

SEQ ID NO: 125485 - DNA, 242 bp, Glycine max
  unsure (1)..(242): unsure at all n locations
agctcctgaggacaaggcgagtttatggtcacaacttcattatgtttcgtgtaataatctggaaatgcaagaagcttatcttgtcaatctcgtaaatgtgttacgagaattgtatttgcacagtccagaggaaagctcgccaattgagagganagctctctctcgtaatgaatggctgcaaaaagctgatgtgcctaccatagcacagattgaaagagttcattcgatgcagaggatgatga

SEQ ID NO: 125486 - DNA, 307 bp, Glycine max
  unsure (1)..(307): unsure at all n locations
tgttggcanagtgctacaaaactggtctatccattttggatgatgatgtttttgaagtagaccaaccacgagacctttttctctactgttattatggaggtatgatatgcattggacagaagcactttcagaaggcattggacctcctgcataatngtgtaactgctcccatgtctaccataaatgctatagctgttgaagcttacaaaaagtatatattggtttctctcattcgtcatggacagttctcaaccagtcttcccctagtatctnnctcgactgctcaaaggaaccctgagactttgtc

SEQ ID NO: 125487 - DNA, 254 bp, Glycine max
aggatgttcaggtgatgagtgaaggacctgtacacatcccaatgcacaagattcctgaaaacatgcatgaacagttagaatggtgtagtgaagcgcctttttacactcttggtcctttaactaatgatattgaacacggctatgatcacatcacctctgcaattggtgctgccagtatgggggcacttggtactgctcttctctgttatgtgactccaagtaacatcttgggttgcctaacgggatgacgtgaa

SEQ ID NO: 125488 - DNA, 235 bp, Glycine max
  unsure (1)..(235): unsure at all n locations
cgtcaagatgtaccagggtggtgctggtccagacgtgggtggtgcaatggacgatgatgttcctgctgctggaagcggtgcggggccaaagattgaggaagtagactaaatttagtttatttctgcttttgatttactatttatttttaaatgtctgatttcatgtcctttggttggatttagtttctcaagaaagacaatatttggtagtatgtcatgtcngattatgttttca

SEQ ID NO: 125489 - DNA, 369 bp, Glycine max
  unsure (1)..(369): unsure at all n locations
taggatctaccctgcacttggttttgaggcttcgtggtggcatgcaaatctttgttaagactttgaccggaaaaacaataactttagaagttgaaagttctgataccatcgataacgtgaaggcaaagatacaggacaaagaggggattccaccagaccagcagaggcttatctttgctgggaagcagctggaagatggtcgtactcttgctgattataatatccagaaggagtccactctgcatttggtgttgaggcttcgtggaggtatgcagatatttgtgaagactctgacagggaagaccattaccttggaggtgganagctctgnatactattgacatgtgaaagctaagattcaggacaagg

SEQ ID NO: 125490 - DNA, 277 bp, Glycine max
acaacctaagacgcgctgcttcactattctccctatggagtttaatcttgtggttcgtcagaagtttttaaattttgtgaggttcattatgaagaaaagggacaagcttagttgtcaagttggaatcaacccatactccatggaatggactggtttggccaatagattactgagcaagggcaacgatattctgtgttgcgattatgctagttttgatggtttgattaccaagcaagttatgagcaagatggcagaaatgataaacagtctttgtggt

SEQ ID NO: 125491 - DNA, 306 bp, Glycine max
  unsure (1)..(306): unsure at all n locations
tgtgtgtggttgctgcggcggcaatggcggacacttggcatcgatattcgggacggagaaggacagggtgaactgcccgttctacttcaagatcggcgcgtgcaggcacggcgaccggtgctcgcgtcntcacacgaagccgagcataagctccactatttctcctctcaacatgtaccagcgccctgacatgatcacccncggcgtcgacgcncacggccaccttatcgancctcgcaaaatccaggtacacttcgaggagttctacgcagtactcttcgacgagctctccaagtaccgtgatat

SEQ ID NO: 125492 - DNA, 327 bp, Glycine max
  unsure (1)..(327): unsure at all n locations
gtananaagaaggatttagtgggaagagagcggaacaaagaggagaaacaaagaagcagtccaagaggaaaagtagaggcagagaaagcaagaccaatggaagaaacaaaggtggaagctanaggaagagataaagatgtaacacaagagggtggtgttgaggaacaaggaagaggaagacaagaaaatgaacaatctagcttgaaagacatgtcgaagtacagagctgaagctcaacaagattcattcaatgctactgaagctgctaagggaagatacgagagggcaaacaagcgacagtgaagctgcaaagagagaagcagcagg

SEQ ID NO: 125493 - DNA, 335 bp, Glycine max
  unsure (1)..(335): unsure at all n locations
agaaacctaagcttagaattagaaacaaagataagaagaaaggaaagaattgatcgttgaaaatgcagggaggaaagaaagcgggagagtccattaaggaaacagctacaaacattggtgcttctgccaaggctggcatggagaagaccaaggcactgtccaagagaaggcaganagaatgacagcacgtgatccggtgcnaaaggagttggcaaccannagatagaggcaagatgaacaggcggactggacaaagcagcgcgcgtcagcataacacggcggcaacagtcgccacacggctggcacatgggcatggcaccacacacggaacggga

SEQ ID NO: 125494 - DNA, 230 bp, Glycine max
gtcgagccgattcggctcgagaagtgtgacataacagagaagacagcatgtgacaatgggagtaatggaggtcttatgacagatgcctacaattatttgctcgagtctggtgggttggaggaggagtcttcatatccctacactggggagagaggtgaatgcaagtttgatccagagaaaatagcagttaagatcacaaatttcaccaatatccctgctgatgagaacca

SEQ ID NO: 125495 - DNA, 323 bp, Glycine max
  unsure (1)..(323): unsure at all n locations
cgctaacttcaacacctttaattttctanaagtaattcagcggctgaataccaagcggagaagatgagtcaggagcagccacggcgtcccaaaggccanaaccccatcanatacggcgacgtttttgtcgtctccggcgaccttgcacagaagctcgtcgcaccggaagatgctgccatgatgcaaagcgcggaaactcgagtgctcggacaaaccaaaccggcggacagcttcgtcatgcatctgcagccacagatgacagctggctgtcagatacggagcacgacgtacgcgacgtgggtacatcacgaactaagtcctgg

SEQ ID NO: 125496 - DNA, 362 bp, Glycine max
  unsure (1)..(362): unsure at all n locations
nataaatttggaacttcaacaagtatggaggagttattggtgctttcaactgtcaaggggctggttgggaccctaagatgaagaagatcaagggtttctctgaatgctacaggccaatttcttgtactgtgcatgtaactgaggttgaatgggaccaaaagacagaagcagttcacatgggtaaggcagaggagtatgtcgtgtatctcaatcaggctgaggaactgcatttcatgaccccaaagtctgaaccactccaatttactattcaaccttccacttttgagatctacaactttgtcccagttganaagctaggtggcagcatcanatttgcaccattgggctcacaacatgttcac

SEQ ID NO: 125497 - DNA, 369 bp, Glycine max
  unsure (1)..(369): unsure at all n locations
gaacaacaccacaatgggaagaagaccggcgaggtgttaccggcagataaagaacaaaccgtacccgaaatcccgtttctgccgcggcgtgccggagccgaagatccgaatctacgacgtgggaatgaagaaganaggcgtggacgagttcccgttctgcgtgcacctggtctcgtgggagaaggagaacgtctccagcgaggctttggaggcggcgcgcatcgcatgcaacaagtacatggccaagttcgccggaatagatgccttccacctgcgcgtgagggtgcatcccttccacgtgctccgcatcaacaagatgctatcgtgcgccgnggccgacagctcccagaccggcatgaggggcgcttt

SEQ ID NO: 125498 - DNA, 366 bp, Glycine max
  unsure (1)..(366): unsure at all n locations
tcgacaacagagagagataagttagtcttgctggaacaggttcttcacaagagggtggttggtcaggatactgctgtaagatctgtcgctgatgcaattcgccgttcaagggctggattgtctgatccaaatcggccaattgcaagcttcatgttcatgggtccgactggtgtcggcanaactgagcttgccaaggctttggctggttacttgtttaacactgaaaatgctcttgttagaattgatatgagtgagtacatggagaaacatgctgtttcacgtctagttggagccctcctggttatgttggttatgaagaaggcggtcagctaactgaagtggtcaggagaagacctactctgtggt

SEQ ID NO: 125499 - DNA, 233 bp, Glycine max
  unsure (1)..(233): unsure at all n locations
tggtgaatgcgtaganaaggaaaataaagaaattagcgtgaaaaatgttgggtgtgttcagcagctccatagtgtcgccggcggaggagctcgttgccgccggctgccgtacaccgtcgccgaagatgacggcggcggcgctgcggaagtgggttcgagatgagaatccctccgcagtgtcggtggaggtcggagagcatgtccagctcgctttatacccacagaacgagtcg

SEQ ID NO: 125500 - DNA, 329 bp, Glycine max
  unsure (1)..(329): unsure at all n locations
taacaatgtcgttgattccaagtttcttcggcaccgggcgaagaaccaacgtcttcgaccccttctccctcgacgtgtgggacccattccatggcttccccggcaacaccgcactctccgctccgcgctccgagacggcgggcttcgcaaacacgcgcatcgactggaaggagacggcggaggcgcacgtgttcaaggcagacctgccgnggctgaagaaggnaagagtgaagggtgagatcgaggnagagggaagggtgctgcagataagcgggacagagacaaaggagaagaggacaagaacgacacgtggcaacgcctcgaacgct

SEQ ID NO: 125501 - DNA, 358 bp, Glycine max
  unsure (1)..(358): unsure at all n locations
tgtacagtaatacagaggttattcacgatgttaacattcagcccgatgacgtgtcggcaacgggggaagtaagggacatatcagccacaaagactcatgatatctacgattctgtcacggacaacaacaacaacaaaaccggttctcaggtcggagagtacgcagattacgcttctcagaaggccaaggaaacataagatgccacgatggaagaagctggagagtacacagattatgcttcgcagaaagcgaaggaagcgaagaagacgaccatggagaatggtggagaatacaagattatctgcggcganacctaggagagataagagctactgtgaataagatgcgagagtataag

SEQ ID NO: 125502 - DNA, 280 bp, Glycine max
cgtagtaagtcggattcggtcgacagaagaagaatccaggcgaggagaaagatggaggggaaggagcaggatgtgtcgttgggagtgaacaagttccccgagagacagccgggtgggacggcggcgcagagccaagacgacggcaaggactaccaggagccggcgccggcgccgctggttgatccgacggagtttacgtcatggtcgttttaaagagcagggatagcagagtttgtggccacttttctgtttctctacatcaccgtcttaaccgttatgg

SEQ ID NO: 125503 - DNA, 184 bp, Glycine max
taccatcttttggaacatgagagaaaaccctcagatcttgcattaaaagcactgcccttaataactaaaatctcacagttagggggcaagctttctactgcgtcatctgttccagaagtgcaattagctcagtatgttccagcactggaaagacgggctaccatgaggctgctgcaacaggtgt

SEQ ID NO: 125504 - DNA, 299 bp, Glycine max
  unsure (1)..(299): unsure at all n locations
ggaatcggctcgacgacacctatggtgaaccccgtgggattacctcttttggcagagccaaggaaaattaccatcacagctagcagcccccactcaagatacactgatcccaaggttttggtctcaagaacctaccagggaacaatgtttgctgnggctcgattgganaatggacagaactgtagctggtggatggtggatcttggccaagatcatcagcttatgtgcaactactataccctgaggcaggacggttctaaggccttcccgagatgttggaaatgtcagggctcacttga

SEQ ID NO: 125505 - DNA, 297 bp, Glycine max
  unsure (1)..(297): unsure at all n locations
aacaaactaccttttgcttttgctctttgttctttgccatggagtggccacaacaacaatggccttccatgatgatgagggtggtgataaaaagtcaccanaaagtttgtctttgatgagcaactccacgaggtgtttcaagactgatgcaggggaaatgcgtgtgctgataagcatggtggtaggatattttataggcacatgcacattggcttcatctctatggaaccatagtccttgtttgattctcagtacctcgactccaatctcatcctattcatccgtagaggggaagca

SEQ ID NO: 125506 - DNA, 333 bp, Glycine max
  unsure (1)..(333): unsure at all n locations
tcattactacaccacttgctgaaaaggccaaagctgctggtagcaccactgctcagtatgttggggagaaagcagcacaagccaaagatgctactgtgcaaactggcaagagtgctgcaaatgctgctcagatttgagggacaaggctttggcacagggtggagtgctgcacattattctactgagataactgtggagggacccaagctgcaacaatgttgttagggagtgctgagtagncaggcagagctctgagcttcagtatgtcatggatatgcgaaagtttactgctgtgcactggggagatgccaggagtacactgcaagacagagt

SEQ ID NO: 125507 - DNA, 288 bp, Glycine max
cacacacaactactacaagtacttccttacaatcaaaaccaacaacaactatggcaagttatcaaaagcactacgatgatcagggtcgcaaggttgacgagtatggcaacgttgagaagcaaaccgacgaatacggcaaccctgttcatgctgctagtgtcacctatgtagccaccagaactgctgctggtggttacagtgatgacattaataagcaacatgataccaccaatgcctacggcgtagacactggtagacagcattctagtggtggctacgatggtgaca

SEQ ID NO: 125508 - DNA, 341 bp, Glycine max
  unsure (1)..(341): unsure at all n locations
nagttccttacaatcanaaccaacaacacatatggcaagttatcaaaagcactacgatgatcagggtcgcaaggttgacgagtatggcaacgttgagaagcaaaccgacgaatacggcaaccctgttcatgctgctagtgtcacctatgtagccaccagaactgctgctggtggttacagtgatgacattaataagcaacatgataccaccaatgcctacggcgtagacactggtagacagcattctagtggtggctatcgatgtgacactaataaacatcatgnaactactggtggctataatgatgacaccaatagacatcatggaactaccggtgtct

SEQ ID NO: 125509 - DNA, 314 bp, Glycine max
tgcggaggtagggtctagcggctggaagagcaccgcacaccgcgtggtgtccggtgcgcccccggcgtgccttgaaaatccggaggtccgagtgcctctcacgcccggtcgtactcataaccgcatcaagtctccaaggtgaacagtctctggtcgatggaacaatgtaggcataggaagtcggcaaaatggatccgtaacctcgggataaggattggctctgagggctaggcacgggggtccagtcccgaacacgtcggctgtcggtggactgctcgagctgcttccgcggctagagcgggtcgtcgcgtgcc

SEQ ID NO: 125510 - DNA, 354 bp, Glycine max
  unsure (1)..(354): unsure at all n locations
atagaagtatcttntgtggtacttgatgaagctgatcggatgcttgacatgggttttgaacaaatagttcgctctatactgggtcaaacgtgttctgatcgtcaaatggttatgttcagtgctacatggcctttgccagttcattacttggcacaggagtttatggatcctaatcctgtaaaagttgttgtaggctcagaagacttagctgccaatcatgatgtcatgcagatagttgaggtcttggatgaccgttctcgtgataagcgcctagttgctttactggaaaagtaccacaaatctccagagaatcgagtattggttttgttttgtacaaattggagccaaacgagt

SEQ ID NO: 125511 - DNA, 245 bp, Glycine max
tgcagaccgagctagctagctagcaagcaagcacagagatggaggcaaagcgaggccatgccctcatagtgctggcacgtgtttcactcttcctctgcgctctaaccctatccgctgctcacggaagcatcacggttcaagacatcgcgagatagttgaaactcgaggacaacgagcttctgcgcacggagaagaagttcagggttttcaatgagaattacgggaggagctactccacagaggag

SEQ ID NO: 125512 - DNA, 271 bp, Glycine max
  unsure (1)..(271): unsure at all n locations
cttcatagttcagtgtgtcgtttacaaatgtcgcagttgctggatagagccaagaacttcgtgtcggagaaggtaaatgatatggccaagccggaggcgagtgtcactgacgtggacttcaagcgcgtgagctaagataatgtcgagtacttggtcaangtctctgttcgtaacgcttattcaacttccatacgcatttgtgagatcaactactctttcaaaagcgcatccagggagatagcatcagggagaatgcagacccagatcgtga

SEQ ID NO: 125513 - DNA, 343 bp, Glycine max
  unsure (1)..(343): unsure at all n locations
tgaaatttgaagagtttgtttattgtgaaaaaaagatgacacaangcagcaaagaaagccttagagacctttaaggaaaccgcagccaccattggcgcctctgccaagtctggcttggagaaaaccaaggccactatccaagagaagaatgagaagatgaatgcagaagatcaaactcanatggatatggctaccaagaggaaagagtaaaagtcaaccagctgagatggaaagcagcaggccgtagtactacgcgctgcannacatacgccaggctgagcacatggcaaagggcacacgacacgccggcctagatcgagactgcaacacatcacatggccgg

SEQ ID NO: 125514 - DNA, 359 bp, Glycine max
tgagaatataggaatataagaactaagatggattggatcggagcgtaccgcggaggccagagaagcagggactggtgcgacccttcatcaccattcactgatttgtgggaccctcgtcgtgtcggtgacgctgatgatatcacctcctctctcgcccatgctcacgttgactggcgtgagactgataaagctcatatcttccgtgctgatctaccaggggtgaagaaagaggatctgaaggtgcaggtggaggagaataagatcctgcagataagcggggagagggtgaaggagaaggaggaccagaacgacaagtggcacgcgtcgagaggcagtgcggaacttcctcgccgttccgg

SEQ ID NO: 125515 - DNA, 276 bp, Glycine max
  unsure (1)..(276): unsure at all n locations
tgaattaattattggagacagacaaacgggtanaacagtagtagccacagatactattctcaatcatcagggacaacatgtaatatgtgtatatgtagctattggtcaaaaagcatcttctgcggctcaagtggtgaataccttatcagaaagagatgcanatggatacactattgtagtagctgaaacagcggattctccagctacattacaatacctcgcaccttatacaggagcagctctggctgaatatttgatgtaccgtgaacgtcacac

SEQ ID NO: 125516 - DNA, 342 bp, Glycine max
agagaagctaagaggcgcagcgtagcaaaagctcgtggaattgctagcaatggcgaggatcaaggtttacgagctgaggcagaagacgaaggctgatctgctgaatcaactgaaggacctgaaggcggagcttgccttgcttcgtgttgctaaggtcaccggtggtgcccctaacaagctttccaagataaaggtggtgaggttgaacattgcccaggttttgacggtgatttctcagaagcagaaggctgcgttgagggatgcctacaagaataagaagtacttgcctctcgatctccgccctaagaagaccaggctattcgcaggaggcttactaagcac

SEQ ID NO: 125517 - DNA, 325 bp, Glycine max
tttggatggcgaaaagacaggatactgtggaagatgtcacctgtggtaacactgttgctatggttggtttggatcagttcataacaaagaatgctactttgactaatgacaaggaagttgatgctcatcccattcgagctatgaagtgttctgtctcacctgttgttcgtgttgctgttcaatgtaaggttgcatcagatcttcccaagcttgttgaaggtcttaagcggttggactagtcagatccctatggtgtttgtaccattgaggagtctggtgaacacattgttgctggtgcaggagagcttcatcttgagatctgttt

SEQ ID NO: 125518 - DNA, 282 bp, Glycine max
gacgataggaaatcctgtaagaagtgtggaagaaaggaaggaggaatatgaccgggcgcgggcacgtatctttagtagccctagaagctctgaatcaggcgatacctcatccatggttccaatggacgggagaaattcttctactagcaaggatgagaatgaaactagcaagaaccccatggctgattcagaaagatatatcagtgtcagggatagttgttcgactcgagttgccatactcagagatagggaaaaggatcgcagtgatccagattatgaccg

SEQ ID NO: 125519 - DNA, 348 bp, Glycine max
acactgtcgttgactccaagtttcttcggcaccgggcgaagaaccaacgtcttcgaccccttctccctcgacgtgtgggacccattccatggcttccccggcaccaccgccctctccgctccgcgctccgagacggcggccttcgccaacacgcgcatcgactggcacgagacggcggaggcgcacgtgttcaaggcagacctgccggggctgaagaaggaagatgtgacggtggagatcgaggatgatggaaaggtgctgcagataagcggacagagaacccaggagaaggaggacaagaacgacacgtggcaccgcctcgaacgctccacggcagctttctccgcc

SEQ ID NO: 125520 - DNA, 351 bp, Glycine max
caagtacttccttacaatcaaaaccaacaacaactatggcaagttatcaaaagcactacgatgatcagggtcgcaaggttgacgagtatggcaacgttgagaagcaaaccgacgaatacggcaaccctgttcatgctgctagtgtcacctatgtagccaccagaactgctgctggtggttacagtgatgacattaataagcaacatgataccaccaatgcctacggcgtagacactggtagacagcattctagtggtggctacgatggtgacactaataaacatcatggaactactggtggctataatgatgacaccaatagacatcatggaactaccggtgtctatggta

SEQ ID NO: 125521 - DNA, 294 bp, Glycine max
tgcttgtgtactataaccaaattggagcaacacctttttgtatctgatcctagaatcacaagcctagctacccattttctaccttctcatgatcttaggtgtttggttgtgaaaaatgacgagggtgactcgtgattttggtgatacgatgcaaagagaggctgtgccagcggtttcttctgatgtggtgtttgcttctgctcggtttcctaattacaaaattggagcaaataatcagataatggagacaaaggatgacccaaaagtgctatcaatgaaggaggttgttgcacg

SEQ ID NO: 125522 - DNA, 294 bp, Glycine max
gctggttgaggttgagactgttcttcagactcaggaaccagtgataaaaccaatttggaatacatttgctagcagtctcagtggaatttggaagggtgtaggtgctgtgttttctcccatcacagctgaaatggaaccaatggaaataggtagcaagaatgaacaattatatgactgctatactctttctcgcatagaggcagtaccatcagtttcaggtgagcgtacatctcaaatccagagaaaggttaactgggtgactttgaatccttatggcgaaataccacagcatat

SEQ ID NO: 125523 - DNA, 294 bp, Glycine max
aagctgttgagcttttttgcgagtccatttggcaaaagggttgaatgggcattgaaactgaagggtgtggagtatgagtacatagaacaagatatcttcaacaagactagtctccttctccagttgaacccggttcacaagaaggttccggttcttgttcatgcccacaaacccatcgctgagtcatacgtcatcgttgaatacgttgatgaaacatggaagcagtatccactgttgcctcgagacccttatcaaagagcacttgctcgattttgggctaatttcgctgagcaa

SEQ ID NO: 125524 - DNA, 342 bp, Glycine max
attcttaaagtagggcagcatgacaagaccatgggtgcaacaggtgacactaacgtcttagctcagatgatcgatgaagcggaaggcctggaaaagatcgagaacctacagagccacgataacaatgaaatctatgaaaaggctgtgaagcttcttgagacatactggatggaggaggaagatgacgcaatggctactgccggggaagctgctcctgctgtttttgactttaaccaaggtggcaaccctcctggtgctggtggtctgaacttcaactgatacagtctttgatcagaatggtgttaattccttcagtgatgggcttggcattggcttgtcgtg

SEQ ID NO: 125525 - DNA, 342 bp, Glycine max
  unsure (1)..(342): unsure at all n locations
aanaaacattgctcatgttctttcaaagttaccaaacacaagtacacaacacaacagcaacatatggcgtctgaacaattggctcgcagagagaacaccaccaccgagaaggagattcacgttgagaaacacagggttcccaagatggccacccacttcgagcaccttgcggagcagctaaagaatctgacatcaccgctgggaaggatactccgcanggtagcatagaagccttgcaagctggagagagggtcaaagatcatgcaggaaaagccatgggagatattggtggacgtgggaaagccagagagactcacgagctgggtgcacactttgaatcct

SEQ ID NO: 125526 - DNA, 340 bp, Glycine max
gtaaataagttgaggcctttgaggacccaacagatccgcaagttccttagggttatggcccaaggcgcagaggcacagaagccccttgacttgaccgaggagcttctgaaatggaccaacagcaccatctccatgatgatgctcggcgaggctgaggagatcagagacatcgctcgcgaggttcttaagatctttggcgaatacagcctcactgacttcatctggccattgaagcatctcaaggttggaaagtatgagaagaggatcgacgacatcttgaacaagttcgaccctgtcgttgaaagggtcatcaagaagcgccgtgagatcgtgaggagga

SEQ ID NO: 125527 - DNA, 339 bp, Glycine max
gttgcaatcgcataataataaccatccaaagtttattgagagaaatttgcaagtttgaaaagaaacatggcatctcatcaacaaaacaagcaagagcttgatgaaagggcaaggcaaggagagactgttgttccgggtggcactggtggcaagagccttgaggctcagcaacatcttgctgaaggaaggagcaggggagggaaaacaaggaaggagcagctggggacagaagggtaccatgaaatgggacgcaaaggtgggttgagcactatggacaagtcaggagaagaacgtgctcaagaggaagccattgacatcgatgagtccaagttcaggact

SEQ ID NO: 125528 - DNA, 297 bp, Glycine max
atggcaagctctcacaatactgatataacggctaatacgcttagcccatctaccaactgggctataggctactgctagcgcttctgaaaatacggcatccgctgcataatctgccattcgaatgcactatcgcagctgcgatcctttaacacactcgaggatattctgcacgaacctctcgagaatgatgctctgccgatactgagaatttccacacctcttaagaatgagtcgtaatgatctgtgaagtgagtctgattttacaaaatttccatgtgatgtactagtatccacacc

SEQ ID NO: 125529 - DNA, 180 bp, Glycine max
cagcaacacaactccacttaccccctggattccgattccaccccaccgatgaagaactcgtcgttcactatctctgccgcaaatgcgcttcgcaagaaatcgcagttccaataatcgccgaaatcgatctctacaagtacgacccatgggaccttccaggaatggctttgtacggagaga

SEQ ID NO: 125530 - DNA, 292 bp, Glycine max
agcttggggagctaaaggaatctgctgctgatgctgctaaaagggctatgggtttcttcaccggtggcaacaaagaccaaactagagaggaggaggaggaaacgaggcggagtatgcaggaggtgagggtgcaagataaggagtatggaacgggacgtggtactggagagaagttggtgataaaaatggaagagtcgcggccaggagcggtggcggatgcgctcaaagcagcgaatagggccatggacggcgatatggaggaggaaggcgtgcttcatgtggagcgtcgtag

SEQ ID NO: 125531 - DNA, 344 bp, Glycine max
cgtttaagggttttgttttcatttaggtcactaatccgatatcatgaagctcgatacgactagtctcgaatcgtttcccacactgattgcacctcaaaacgacgtcgccggagaactctccgccgctccgttctttgaccttccgaattccaatgacttcgatgggttcttgaaagacgctattcagatggtgaagcccgcgaagggtactacaactcttgcttttatatttaaagagggtgttatggtagctgctgattctcgagctagcatgggaggatatatatcgtcgcagtctgtgaagaaaattatcgaaatcaatccgtatatgcttgggacaatgg

SEQ ID NO: 125532 - DNA, 341 bp, Glycine max
gtgagtttgtgaagacaaaaaatcactagctactcaataatggccacagtaggaaggaacgttgcagctcctttgctgtttcttaacttgatcatgtattttattgttcttggctttgctagttggtgcctcaacaggttcatcaatggccaaacttaccaccctagttttggtggaaatggtgcaaccatgtttttcttaaccttctccatactagcagctgttctgggcatcgtgtccaaacttttgggtgggaatcacatgaggacatggaggagtgacagtttagcatctgcaggagccacatcaatggttgcttgggcagtcacagctctagcatt

SEQ ID NO: 125533 - DNA, 339 bp, Glycine max
cttaaatcagaaaatcagatacaagacaatggccaacagggttatggtggagcaaaggacacaattggtagtgtagaccacattactacaccacttgctgaaaaggccaaagctgctggtagcaccactgctcagtatgttggggagaaagcagcacaagccaaagatgctactgtgcaaactggcaagagtgctgcaaaagttgcctcagatttgagggacaaggctttggccacagggtggagtgctgcacattattctactgagataactgtggagggaaccaaggctgcaacaaatgttgttaagggagttgctgagtatgcaggacagaaggct

SEQ ID NO: 125534 - DNA, 329 bp, Glycine max
gtcttgttttacagcaatagcattggctgggactgggtgcgataaggcaccggtggtgttcgtgttcggcgattcgaactcggacacgggtggactcgcttccggtctgggtttccctatcaatcttcccaatggccgcaatttctttcacagatccactggccgcttgtccgatggacgcctcgtcatcgacctactctgccaaagtttgaatgcaagtttgttggtaccatatttggacgccttgtctggaacctcattcgcaaatggagcaaactttgcagtggtggggtctctactctcccaaatatgtcctttctccgtcatat

SEQ ID NO: 125535 - DNA, 336 bp, Glycine max
caaaaccaaaacactcaagttaacttcaacacctttaattttctgaacgagattcagccacagaatatcaaagggagcgaagatgagtcaggagcagccaaggcgcccccaaggccaagaccccatcaaatacggcgacgtttttgacgtctacggtgaccttgcacagatgcccattgcaccggaagatgctgccatgatgcaaagcgcggaagctcgagtactcggaaaaacccaacccggcggacttcttccgtcatgcaatcgccgccacaaggaatcaacaggctggtcttgtcggtcaccaggtacgtcacgacatcaccggcgaccatg

SEQ ID NO: 125536 - DNA, 344 bp, Glycine max
gctcgagttgcactgcaacttagccacttgaacccccttcgtaagcctcttcacatcttcacttcttcacttcttcttccgcactaatacgaaaagagaaggaattcacaaaagaggttaccatgttggacgatgagagagaggagaaggaggtggatctcacttctccggaagttgtcaccaagtacaaggagcgccgcggagattgttaacagggctttgcagttagttatttcagaatgtaaaccgaaggcaaagattgttgacctttgcgagaaaggggattcgtatattagagagcaaactggtagcatgtacaagaatgtgaagaggaagatagagag

SEQ ID NO: 125537 - DNA, 346 bp, Glycine max
  unsure (1)..(346): unsure at all n locations
tagtgctcctgatctttccctgaggaagctttacattggaagcttatcaccagaagtcacaagtgaaattctncttaactattttgcaaggcatggtgaaatagaggaaggttcagttgcatatgacagggatacaaatgaatcacgtggttttggctttgtcacatacaagacagcggaggctgcgaagaaggccatagatgacctagaaaagacacttgggggaagaaatatagttgtaaaatatgctgattcccaaaaaggtaaaactggccagccaccatttcctgctggagtggttccgatggcagcattacctatgaacccaggatatatgcagcagcct

SEQ ID NO: 125538 - DNA, 342 bp, Glycine max
ttgcagaccgagctagctagctagcaagcaagcacagagatggaggcaaagcgaggccatgccctcatgtgcttggcacgtgtttcactcttcctctgcgctctaaccctatccgctgctcacggaagcaccacggttcaatacatcgcgagatagttgaaactcggggacaacgagcttctgcgcacggagaagaagttcaaggttttcatggagaattacgggaggagctactccacagaggaggagtatttgcgccgtttggggattttcgcccagaacatggtcagagcggcggacatcaggcgctggaccccaccgccgtccacggcgtcacgcagt

SEQ ID NO: 125539 - DNA, 337 bp, Glycine max
  unsure (1)..(337): unsure at all n locations
gggctgctcgtttcgcggcncgggattcacgcttctcccacaagaacgcgctacagcgctgcctggaacacgccaggctgtggcttaccaagtcggagcagcccattgaacctgatactgatgttacttatgctgcattgagggagaagttgaacaagattatgtcttcggagtactttattaccactcctgagatgaaggctccggttgaagttgctgcggctgctgctgggggtaattacgtgtctttccatgtgccggtgcatgggtctgtggttccagttgaagttgagcaacccgtttttcagtctcaggagaaggatgaaggaactgcaaa

SEQ ID NO: 125540 - DNA, 204 bp, Glycine max
gctcggaaccggctcgagcgcttcggagaaaactgcgccagtggcagagaaggccacagactacactcttcaggctgcggagaaggccaagagtgcgggtggcacaacggcgagttacgtcggagagaaagcggtgcaggccaatgatgtcgccgtcgacagtgagatgagtgcggctaagtatgctgccaaggtggctgctga

SEQ ID NO: 125541 - DNA, 341 bp, Glycine max
  unsure (1)..(341): unsure at all n locations
tgatatagaaagagagagaagaagaaaagaagaacagagatgcaatcctcaaaggagaagatgcccaacatggcaagtgctgccaaggaacaagtcgacatctataaagccanaatagacgagaaggcagagatagcaacggcaagaacagaagaggagagggtgatagcccatgagcacgcaaaggcgaaggaagctggagcaaagatggagctgcatgaagctaaagcaaggcatgcagcagagaagctaagcgccaaccaatcacattatggtctccaccatggccacaacaaccctcccttagtaggaacaactcagactcactaccagcaagggca

SEQ ID NO: 125542 - DNA, 337 bp, Glycine max
cgggtttccaattcacagagcaacacaacgaaccaacaatggcgcagctcagccgcagtcgcagccgcatcacgggcaagcagcgctggagcaggtgcagtgcttcggtcgcaagaagaccgccgtggccgtgacctactgcaagcgcgggcgcggtctcatcaagatcaacggctgccccattgagctcgtggagccggagatcctccgcttcaaggccttcgagcctatcctcctgttgggtaagagccgcttcgccggcgtcgacatgcgcatccgcgtcaagggtggcggccacacctcccagatctacgccatccgccagagcatcgccaag

SEQ ID NO: 125543 - DNA, 335 bp, Glycine max
agagaagcactcttcgttcttcgactgtctacgatctgctttctctgaattgtgaaaatgtcgctcggagaaactgcttgttcatacgcagctctcatccttcatgaagatggaattagtgtaactgctgacaagatcagcaccttgttgaaaactgcaaaggttccagtagactcttattggccaaccttgtttgctaaacttgctgagaagaaaaatcttggcgatttgatagcaaatgcggcaggcggtggtgcaccagttgctgttgcagctgccccagttgctgctgctgctggtggtgctgctgccgcagctccagctgctgaggagaa

SEQ ID NO: 125544 - DNA, 318 bp, Glycine max
cgagcaatcggctcagaccgccggcctcgtcatcaagctcaagaccttctgcctccgcaaggacgcgttcggcttcttcgccttcgtcagcgccaagaagaaggagctggacggcctacgcgccgagatgccggtggcgctggcggagtgcgtcgatccggcgaaattcgtgctggaggcgatctcggaggtgtttccggtcgacaagagaggggagaaggccggccacgacttgggctgggcctgcgtccttgtcctggagtcgttaattccggtcgtcgtcgacccgtcatcggaaatcgaggttttggttaccct

SEQ ID NO: 125545 - DNA, 313 bp, Glycine max
aaataattgatctttgaaaatgcagggaggaaagaaagctggagagtccatcaaggaaacagctgcaaacattggtgcttctgccaaggctggcatggagaaaaccaaggccactgtccaggagaaggcagaaagaatgacggcacgtgatccgatgcaaaaggagttggcaacccagaagaaagaggcaaagatgagccaggcagactggacaacaggcggcgcgtcacataacacggcgcgaacaggctgccaggcaggcacatgggcaaccatgggaccatcagacgcactatccggcatgaacggcagc

SEQ ID NO: 125546 - DNA, 337 bp, Glycine max
  unsure (1)..(337): unsure at all n locations
tgcagatcgagctagctagctagcaagctagcacatttatngaggtcaagcgaggccatgcctcatatgaaacagagangnttcactcttcctctgcgctctaaccctatccgctgctcacggaagcaccacggttcaagacatcgcgagaaagttgaaactcggggacaacgagcttctgcgcacggagaagaagttcaaggttttcatggagaattacgggaggagctactccacagaggaggagtatttgcgccgtttggggattttcgcccagaacatggtcagagcggcggacatcaggcgctggaccccacgccgtccacgggtcacgcat

SEQ ID NO: 125547 - DNA, 301 bp, Glycine max
attggtagagactgctagcaatttgtcaaagcagaaggcaactttaggtggtgggtttgatcctctattgttgactggcatgtatgatcaaggaatggtgaggcagcatgtcagcactacccaactgagtggagtgagtgcaagcagtgtggcattgccaggacctgggaagactacaacccctgtgttggctctccccgccccggatggatccgtgcagccagttaatccagatccatttgccgcatcgctgagtgttccaaccacggcctatgtccaaatggctgatatggagaagaag

SEQ ID NO: 125548 - DNA, 282 bp, Glycine max
gctggtgcagtttggagagattcaggttaaagttgtattgaaattttcacaagaggaatttcttacagcttggtcaactcaggtgcgtcctgcaacaactctgttagctgatgggtgtccatatgtgtatgctatggtgcatgatagttcagtgtctacaataccaggtgattttgtaattggtgttaagttgacaaccataaacaatatgtgtgcatatgggctcaatcctggtatttcaggttctcgtctgttgggcaccattcctcagtccatttcaca

SEQ ID NO: 125549 - DNA, 285 bp, Glycine max
aacaagtcgaagaggaaactcgcgagaaggaagaagaacatcaagagcagcatgaggaggaggaagaccaaaatccctacgtttttgaagaagataaggatttgtcgaccagagtcgaaacagaaggtggcagcattcgggttctcaagaagttcactgagaaatccaagcttcttcaaggcattgagaatttccgtttggccatcttagaagctagagcacacacgttcgtgtccccacgccactttgattccgaggttgtcttgttcaacattaaggggagag

SEQ ID NO: 125550 - DNA, 295 bp, Glycine max
  unsure (1)..(295): unsure at all n locations
ggaattcggctggtctcgagcgaattctgctcgactgnatgagaaccaaattgccgcatatttattaaaatatggtccacttgctatgggcgtgaatgcaattttcatgcaaacatacattggtggtgtctcatgccctctcatatgtagcaagaaaaggctgaaccatggtgtgttacttgtgggatatggtgcaaaaggcttctcaattcttaggcttggcaacaaaccatactggatcatcaagaattcgtggggggagatatggggagaagatggctattacaagctctgc

SEQ ID NO: 125551 - DNA, 329 bp, Glycine max
cgtattgtgtttctctctttccgcggcctagatctgagcagtttggaaaccctaactgctctcaccaacgacatcaccactctctccgatcaactacctctttcgtcgccctaagtcatggcaggaattgcacccgagggatcacagtttgatgctcgtcaatatgataccaagatgaatgagctgcttacgtccgatggtcaggatttcttcacatcctacgatgaggtttatgacagttttgatgctatgggcttgcaagagaatctcctgagaggcatttatgcatatggttttgagaagccatcagctattcagcaaaggggaat

SEQ ID NO: 125552 - DNA, 315 bp, Glycine max
  unsure (1)..(315): unsure at all n locations
cactggaacccccttcgtaagcgtcttcacatcatggcggctctacagagagacgatgttgaactcgttgttcctaangattctttcattaccaccgattacatgacatacatgtttaaatacgacagtgttcacgggcactggaagcatcacgatgtcaccgttaaggatgagaagacccttctcttcggtgacaagccagtcactgtttttggacacaggaacctgaagagatccatggaagtcgactggagctgacatcattgttgagtccaccggagtatcacgataaggataaggctgccgcacatttga

SEQ ID NO: 125553 - DNA, 346 bp, Glycine max
cggctcgagcacacaactactacaagtacttccttacaatcaaaaccaccaacaactatggcaagttatcaaaagcactacgatgatcagggtcgcaaggttgacgagtatggcaacgttgagaagcaaaccgacgaatacggcaaccctgttcatgctgctagtgtcacctatgtagccaccagaactgctgctggtggttacagtgatgacattaataagcaacatgataccaccaatgcctacggcgtagacactggtagacagcattctagtggtggctacgatggtgacactaataaacatcatggaactactggtggctataatgatgacaccaatagac

SEQ ID NO: 125554 - DNA, 254 bp, Glycine max
gcaagtgcaccttccaagttagcattgcttatatttgcctgtgtcacatttgccaggaaatacatcttttacggagtcaaatattacaggcgctgatttcacggatctaccactaagagaagatcaacgtgaatacctctgcaaagttgctgatggagtgaacgcaacaactggaaatgctacgcgtgatacattgttctgcaattagtattccattgctgaatactcactccaagaccttcaaatgtgtgcat

SEQ ID NO: 125555 - DNA, 321 bp, Glycine max
atcaaagaaaggggtggtggctgcttcgaaagctttataatttgtttatttccagaacatcatagttttcgcagcagcaaactaacaaattactcatatcatataataagatggcccgttctctctcgcaagccaaacgtattggtgtccttgttgctcaatctatctccctaattcccgttcatcggcgaggttacgcagtggcatccgatgtatcggtaagagttggattgggtaatattgggcgaaggaatggaatcgtgggaggtgtagaagagaagcctgatacaagagatggttcaaaagcctactcaactgatt

SEQ ID NO: 125556 - DNA, 302 bp, Glycine max
gctcggatatcggctcgagacaattacacggttcaatgaatagtcggtgataaacaaacgaagtctctgcaaaacgcgatcgattcttctgtcgacagatgaagttcactgcactgaattctacgtttcgccgcgctctgctcaatggccggaaccataacggtaaccgcctcggttcagcggcgctgatgccgtatgcgtcggcggatacgaggctcctctgcgccggaccaaaacggattgttcttctactggaagaggacgatggtttcgccggcggaggcgaactgccggagcaggag

SEQ ID NO: 125557 - DNA, 292 bp, Glycine max
gtgaattcatggaaaggcacactgtctccaaacttattggttcacctcctggatatgttggttacactgaaggtggtcaattgaccgaggcagttcggcgtcgtccttacactgttgtactgtttgatgagattgagaaagcccatcctgatgtgttcaacatgatgcttcagatcctggaagatggaagactaacagacagtaagggcagaacagtggatttcaagaacacacttcttataatgacatcaaatgttggaagcagtgtgattgagaaaggaggccgcaaaat

SEQ ID NO: 125558 - DNA, 291 bp, Glycine max
  unsure (1)..(291): unsure at all n locations
canaccttgctctatactacacagtacacacactagaagaataatggcttccatcctccactactttttagccctctctctttcttgctcttgtcttgtctgcttatccgactcagtcacccctacaaaaccaataaaccttgttgttctacccgttcaaaatgatggttccacagggctccattgggccaacctccaaaaaagaacccctctaatgcaagtaccagtcctggtggacctcaatggaaatcacttgtgggttaactgtgagcagcagtactcatccaaaac

SEQ ID NO: 125559 - DNA, 326 bp, Glycine max
  unsure (1)..(326): unsure at all n locations
ggatttatgatctctttcacttcggccatgcacgttctctcgagcaagccaaaaaaactgtttccaaacacttatctccttgttggatgctgcaatgatgagatcacacataagtatanaggcaaaactgtcatgactgagaaggaacgctatgagtctcttcgccactgcaggtgggttgatgaagttattccagatgcgccatgggtaatcacttcgggagttccttgacaagcatcaaattgactatgtggcacatgatagtcttccgtaagttatgctgatgcaagtggagctggaaaggatgtgtatgaatatgttaagtc

SEQ ID NO: 125560 - DNA, 321 bp, Glycine max
cggctcgagttgatggtcttgcgtctcgctcagctgcatactaccagcaaggtgcgcgtttcgccaaatggcgtactgttgtcagcatccccaacggtccctctgctctggcagtgaaggaagctgcctggggtctagctcgctatgctgcaatttcacaggagaacgggttggtcccaattgtggagccagagatcttgcttgatggtgagcatgggattgacaggacattcgaagtagcccaaaaggtgtggtcagaggtattcttctacctggctgagaacaatgtcctgttggaaggtattctcctcaagcctagca

SEQ ID NO: 125561 - DNA, 318 bp, Glycine max
catattcagcaagagtgctaagtacagtttattcgatccatgcaaagaaatggcctacatacccttggatgaggataccaaggtcaaggggaaggcagccattgatgttgtgtgcaacccattggggaaatctggaggagctctaattcagcagttcatgatcttaacttttggttcactagctaactcaactccgtacctgaggagggtccttctggtgattgtacttgccctggtatcagcagccaagtcgcttgatacacagtttactgcctttcgtcgagaagaagaacttgagaaagagatggagagagcagc

SEQ ID NO: 125562 - DNA, 326 bp, Glycine max
cacacaactactacaagtacttccttacaatcaacaccaacaacaactatggcaagttatcaccagcactacgatgatcagggtcgcaacgttgacgagtatggcaacgttgcgaagcaaaccgacgaatacggcaaacctgtgcatgctgctagtcgtcactatgtagccaccacaactactgctagtggttacagtgatgacattaataagcaacatgataccatcaatgcctacggcgtagacactggtcgacagcattctagtcgtagctacgatggtgacactaactaacatcatcgaactactggtggctataatgatga

SEQ ID NO: 125563 - DNA, 192 bp, Glycine max
atttgagaaggtgttgagtgccagtgacgcatgtcgaattggccgtcttgttctcccaaaagcctgtgctgaggcatattttcctcctatttcacaatctgaaggtgttcctttgcgaatgcaagatgtgaaggggaatgagtggacatttcagttcagattttgggctaataacaacagcaagatgtatgt

SEQ ID NO: 125564 - DNA, 290 bp, Glycine max
ctcggagagaaagagagagagagagagaaaaatggctgatacaagtggaggagatgcagtgagaccggtggtaatatgtgataacaagtgtggctgcacagttccatgcactggtggttccacttgcaggtgcacaagtgtcggcatgacaactggaggcggtgatcacgtgacatgctcgtgcggagagtactgtgggtgcaatccatgctcatgtcccaagactgcggcttctggaactggttgcagatgtggcacagattgctcatgtgcctcttgccgcacttaac

SEQ ID NO: 125565 - DNA, 288 bp, Glycine max
ggcaaactgacgaatatggcaacccggttcatgccactagtgtcacttatgttgccaccaaaagtgttggtggctaaatgatgacgctaatagcacatgatatactggttctacgcgagaaagcacggtagacatcatttgtcgtggtacgaggtgaactaacaacaacatgatgctactggtgttatccggatagacattgtgagatcatgactacggtgttatggctatacacgacagacatcatggactctggggtgatccgggataacaccataacgacacatg

SEQ ID NO: 125566 - DNA, 306 bp, Glycine max
  unsure (1)..(306): unsure at all n locations
ctcaagtctctcgaagcctctttctctctcttctagaagctatctgtgtttggtgttactaagtctccaacaagcanagtacatggttgatttggaaatccaggtcnccaccccattcgacccgtttgccgaggcgagagaatcggatgcccccggagcaaaggagtatgtgcatattcgaattcagcagaggaatgggaagaagagtctgaccacagtgcaagggctgaagaaggagttcagctacgagaagatcctcaaggacctcaagaaggagttctgctgctacggaaccgtggtgcagga

SEQ ID NO: 125567 - DNA, 386 bp, Glycine max
  unsure (1)..(386): unsure at all n locations
aacataccaaagaatctcctacctatagctattgagagagggtgtgtntacactttggaaatggcagagaaagaagtgagaaacaagcagttggtattaagggactatgtcactggctttcccaaagaatctgaattatatgtcacttgcaatggtaccatcaaactgaaggtgactccaaaatggcattggtgcaaaacctctctatggcagctgatcccacctcaagaccttgatgaagaaagctgataaccttagtgttcttcagtccttcacacctggcttaccactgtatggatatggagtggctaaggttgtggattctaggcacctgcatttgaagaggtgactatgtgtgtggcataactggatgggaagagtacact

SEQ ID NO: 125568 - DNA, 387 bp, Glycine max
cgagcacaaacacaaacacaaacacacgtgtcgagtgaattcaaatcaatttaggcagaaaatgaggtgttttggttttatagtgataggtctagtggctgtgcttggagggttacccttctcctcaaatgcaaaattagaaccctgtttttacaagaagacttgtccccaggtgcattttattgtatgtaaagtcgtagagaaagtttcaagaacggatcacgtatgcctgccagtctcgttaggcttttcttccatgactgttttgttcaagggtgtgatgcatcaattttgttgaacaacactgccaccatagtgagtgagcaacaagctctgccaactacgaactcaataagaggtttggatgttgtagaccagatcaagaca

SEQ ID NO: 125569 - DNA, 341 bp, Glycine max
ggtgtgaagcgtggccgcaacctcgccgcgcaggaactatggtctgagcttgaccctttctctgacttccttggcttcgataccaccaattccaaaaaccaaccacccctgcagaaaattccagacaaaaaagtggtgtcatcatgtgagaagaagaagaaaagcgtggtgggtgcagaaaagaagaagagtgatagtgggcgagctcgtaaaaagtgtacagaggaatcaggcaaaggccatggggcaagtgggccgcggagataagggacccacacaagggtgttcgtgtctggctcggcaccttcgccaccgccgaagaagccgcccaagctacgacg

SEQ ID NO: 125570 - DNA, 354 bp, Glycine max
tcgaggcacaatacaataaattggcagatccaactgatgaggaaaatgacatgttggatctagcttttgggcttactgacacatcacgtctgggttgccaagtgattgcaaaacctgaacttgatggaattcgtttagctattcctgctgccactcggaacttcgctgttgatggttatgtgccgaaaccacattgagtcatttttttgggttcaatcaaagagtgccgctttcagttttgtatccttaccgacttagataaattagcatttattgatatcataggcattatttttgtattgtccgtgttcacggagcacctctatatatatatatatctatgtgtatagagat

SEQ ID NO: 125571 - DNA, 334 bp, Glycine max
attcggctcgagccggcagataaaaaacaagccataccccaaatcacgtttctgccgtggtgttcctgatcctaagatcagaatttatgatgttggtatgaagaagaaaggtgttgatgagtttcccttctgcgttcatctggttagctgggaaaaagaaaatgtttcaagtgaagcattggaagctgctagaattgcatgcaacaaatatatggcgaaatttctggaaaggatgctttccacttgagagtcagagtacatccattccatgttcttaggatcaacaagatgctttcatgtgctggagctgataggcttcagactggaatgagag

SEQ ID NO: 125572 - DNA, 375 bp, Glycine max
tcggctcgaggttcaaccaaggggagagattaagaatcttcctcagggtgctactgtcattgactatgcttatatgatacacactgaaataggcaacaagatggtagctgcaaaggtcaatggcaatcttgtttctcctgctcatgtacttgcaaatgcagaagttgtagagataatcacatataatgcactttccagcaaatcagcctttcagaggcatagcagtggttgcaacatgctaaaacacgtagtgcaagacacaaaataatgaagtttctgagggagcaagctgcacgctctgctgctgatatcactacggaagcagtcaatgactttgtcactgattcgtgacggggatagtgaatctgaagaact

SEQ ID NO: 125573 - DNA, 369 bp, Glycine max
cctctttcctcttcattctcttcccaaataaaactataatcagtcttcagtgatcgtcaacacttaagacccaagtgtaaatgaagaaagtggtggtgaagttgaatttgcacgatgacaaagcaaagcaaaaggccatgaagtcggtttctagcctagcaggcatcgattctatctccatggacatgaaggagaagaaactgactgtgtgggtgaaatagaccctgtcgatgtggtgagcaaattgagaaaaacttggcacccagaaattgtaactgttgggccggcaaaagagccagagaagaagcaagaagacaagatagacgagggcataatagatgacaagaagaaagatgatgataagaagaa

SEQ ID NO: 125574 - DNA, 366 bp, Glycine max
  unsure (1)..(366): unsure at all n locations
ctggtggtgctgctgacagggttttgaaccaactgcttacagaaatggacggaatgtcggcaaagaaaactgtgttcatcattggggccactaatcgaccagatattattgacccagctcttctgcgtcctggtcgtctcgaccagttgatttatatccccctcccagatgaggattcccgtcatcagatatttagagcctgcttgaggaaatcccccgtgtcgaaagatgttgatcttagagcacttgcaaagtacactcagggtttcagtggtgctgatatcacggagatntgccagcgtgcgtgcaagtatgctattagagagaacattgagaaggacattgagagagataggaggaaagagt

SEQ ID NO: 125575 - DNA, 345 bp, Glycine max
cttcacgcttcgcgtgagcaacttcacaggagaactatggaatgacgtagatgcattcggtttggagtttatagaaggaaacaaaccagttgtttattcatcaaggcatggccatgcaagtttccctcatcctgggagctaccttcagggatcatccacacttggaataggagcaaagaatgaagcagctaaaagtatactgacagtggatccagcaccagatacaaggttgttgcggccgagtatcttggtgagggagcaattgctgaaccatgttggttgcagtacatgagagagtggggcctacagttgtgtatgatcacgttgaatagtaagtgatagact

SEQ ID NO: 125576 - DNA, 361 bp, Glycine max
gatctggtcatcgttgggatctccatacgccggatctgctaaaatacgcttgatccatatgggcctcctcgaccacttgtgggacgacaccgtcgccggcccaaggccggaaaacggtctcggcaagctccgaaaacaccacaccttcactttccgacctagctccggcaaggaaacggagggcgggagcgtgagatcgtacggagacaatcgtcggaggaagcgacgagagtgacgcgtagtatcatgatcgtgaaaccgcccgggtaccagagtggatcgcctccggtttctcccgccggttctactactccgatttctccgttttccggaggaaaagattcgtttcggtttcgaagaa

SEQ ID NO: 125577 - DNA, 364 bp, Glycine max
  unsure (1)..(364): unsure at all n locations
gcttcactgtttcctggacttggtggtaacaatgggatggggggcggtggtctcaatggtctatttggagcaggctttccggatcttgaacaaatgcagcaaccatttgtgtcaaatcccaatttaatgagagatataatgaacacacctgctatgcagaatttaataaataatcctgacatagtgcggaatcttataatgaataaccgcagatgcaagaactaatggataggaaccccgagctggcacacatacttaatgatcccagcactcttcgtcagacacttgaagctacaaggaactctgagatcatgcgcgatatgatgangaatacagatagagcaatgagcaacattgaatcttc

SEQ ID NO: 125578 - DNA, 327 bp, Glycine max
  unsure (1)..(327): unsure at all n locations
ctctctactactgctagctgtgacttgttttgagttcaatcaaatcgcattggtatctgaaatcaggaaagatggttagcgtactgagatcaggcaggcacaaagggcagaaggcccagcaaccatccttgccattggaactgcaaacccaccaaaccgtgttgatcagagcacctatcctgattactacttcagaatcaccaacaggaccacatgaccgagctcanagagaaatttcagcgcatgtgtgacaagtctatgatcgagacgagatatatgtacctanacgaagagatcttgaaagagaatcgaacatgtgtgctacat

SEQ ID NO: 125579 - DNA, 339 bp, Glycine max
cgaatacttacaatccgtcatgcagctcgatgcttgcttgctttgggggaatatttccaacgcctgagggctttgagctcactgtggtctaatagacctcgtgaacctgcttagtctcacaacaaggttacaagagcgcaaactcataacatgaacgtgatgtgatgatgaatatgggtcagtttctttggccaagagcatcaagacatgtatcatgtgaggtccaagttgctcacattgtacctgcagttgagcggtatggagacgttgtctatatgactgctagctcattagatgcatacgagtttgtaaatagatgaatcatagacgcatggtgta

SEQ ID NO: 125580 - DNA, 365 bp, Glycine max
gtagctattatactctctagagtaattgcggaatctgctagaattttctaataatggcgaaagacgttgagcaggtcacagagcaaggtgaatactccgcgaaggactaccatgaccctcctccggcaccgttgatcgacccagatgagctcacaaagtggtccttgtacagagccgccatagctgagttcatagcaacactccttttctttacatcaccgtgttgaccattattggctacaagagacagagtgacaccaaaatccccggtaacaccgaatgtgacggcgttggcattttgggcatcgcttgggccttcggtggcatgatcttcatcctatgttactgcactagcggaatctctg

SEQ ID NO: 125581 - DNA, 348 bp, Glycine max
ggattgtctaacaatgatgataaaggtatctttcttgggtatcctattgttggatttagcaaccggatgcaggcatcagggacatgtttggatagtctaaatgatggattgatcacagcatgtccatgggactccagaatcaaaggggaattctttcaccaaacagcatttagcattccattgtctgctgtaaagaacttcatcgagatgtgcgaaagcttgttgagctggagccagagtcactgtgtggcttagagacagcacatgggattctcatgcgctatgttacggcttctagtgcttaccgtggaaaatcagaggatgctgtggatcttgacatcacatact

SEQ ID NO: 125582 - DNA, 348 bp, Glycine max
tgatatatagaagagccttccatatatagcctcccaaaaaaatgaagagtactacctctttggctctctttctactttgtgccctaacttcatcatatcagccttcagccaccgctgatattgtattcgacaccgaaggcaatcctattcgaaacggcggcacatactatgtgttgccagttataagaggatagggcggcggaatagatttgcgaaaccgagacagaaacatgccctctcactgttgtgcaatctcctttgaggtctcataggtctacactgatatttcacccgattaaatcttgacatcacgagacttatgtgagctcagttcattatgaccgctgt

SEQ ID NO: 125583 - DNA, 358 bp, Glycine max
  unsure (1)..(358): unsure at all n locations
gggagaaggagaaagagaaggagaaggagagggaaagagaaagaagggagagggaacgggaacgggaagagagagagaggtctcggaggagtaggagtcgttccgagagagaaagagaaagagaacgggatttcgacaccagagatagcaggagatttagggacaaaaaagaggcagcggacccgaggcagatccagaaagggatcgagaactgtttttgcttaccagatgcccttaaaggcatcggagagggatgcttatgaattcttctcgaaagctggcaaggtgagggatgccgtctgatcatggataggaactcgagacgatctanaggtgttgggtatattgagttttatga

SEQ ID NO: 125584 - DNA, 365 bp, Glycine max
gagatggcggcggagataccgtgctgtggaacaaagttttcactgtacgttttggtgatcataggtttggtctgcttcgcgggactaatggctggtctcactctcggactcatgtctttgggactcgtcgacctcgaagttctcatcaaatctggtcgtcctcaggatcgcatccacgcttcgaaaatttatccggttgttaagaccagcatcttctgctttgcacgcttttaattggaaactccttagccatggaggctcttcccatttttcttgattcactggtgcatcccgctgcggcaatcttgatttcggtcacgctcatcctcatgtttggagagatattgccccaagcaatttgtaca

SEQ ID NO: 125585 - DNA, 309 bp, Glycine max
aatgcagggtaccttgactctaacatgataattatacttaatgacaacaagcaagtttctttgcctactgctactattgatggtcctgcaactccaattggagcccgcaatagtgccttaagcaaaattcaagcaagcaccaaataccgcaaactgagagaagctgcgaaaggcatcacaaagcagataggaggaacaacacacaacttgcagcaaaggtagatgagtatgcaagaggtatgatcagtggttctagtactacacttgttgaggagctcggcttatactacatatgccctgtggatggtc

SEQ ID NO: 125586 - DNA, 353 bp, Glycine max
  unsure (1)..(353): unsure at all n locations
ggtggacaaatatgggtacgcatatttccagacaaaccggttacagtaagacctactgaaacacgtatgggttcaggaaaaggttctcccgaatattgggtagctgtcgttaaacctgggaaaatactttatgaaatgggtggggtaccagaaaatatagcaagaaaggctatttcaatagcatcatccaaaatgcctatagaactcaattcattatttcagggtaataaattagaaccaaaggaaagaggtctttaagatgaaaacaagagatgcaaatgtaggttcctttttttgaacacaaaatatgtttacttccatttgttgactgagagaataaanatatgatatga

SEQ ID NO: 125587 - DNA, 351 bp, Glycine max
ttctgaaccaacacaatgatggaatggaagggtcttgcgttcttctgcggtttgatagatagctagctatgttggcatgaagatttgagcgggaaaataataagacaacatacataacgttttctcaaagtggttttggtattttatgtagtttatcataagacggcagtttgcgtgcactgatcagttcttagagcatgattcagcatccccgcagtttgtttcctcaagaaggatgagtgtgtacgatgcgatccaccatattagtatgtggggagaaggttcacaagtgatggaaatgtaagtgcagtcatgctctaattgatgagacagcatgaagtatgatagtca

SEQ ID NO: 125588 - DNA, 346 bp, Glycine max
  unsure (1)..(346): unsure at all n locations
gcattattcttttcatctgtcgttctttttctttctctctgcctccatcaggatcattcaatttacctcaaaataaacaattttctcttgttatggctcttttggtgtatcttgtgcttttcctagccttcacttatcattcaagtgctctttactgtatatgcaaagatggtgtgagtgatcaaacccttcagaaagcatagattatgcttgtggaactggagctgactgtacccctattctccanaatggagcttgttaccaacccaacactgtgaaggatcactgtaactatgcagttaatagctattaccanagaaagggtaatgctcctggaacctgtgat

SEQ ID NO: 125589 - DNA, 332 bp, Glycine max
caagtcacggttttgccgtggtgttcctgatcacaagatcaggatttacgatgttggtatgaagaagaagggtgttgatgaattacctttctgtgtccatctggttagttgggagaaggaaaacgcttctagtgaggccctgtaagctgctcgtattgcttgcaacaagtacatggccaaatttgctggaaaggatgcttccacttgagagtcagggtgcacccattccatgttcttaggatcaacaagatgctttcgtgtgccggagctgataggctccgaactggaatgagaggtgctgttggatagcgacagtgtacttgtgctagagt

SEQ ID NO: 125590 - DNA, 355 bp, Glycine max
  unsure (1)..(355): unsure at all n locations
atagactcaagtcaattaaacttgtgtcgtgctgcagttactggtcaaaaccctccaccaccggatgagaaatgttgtgcagttattcgccaagccaatttgcgttgcctctgcagttacaagtctatcctaccttcattcggaataaaccccaaaaatgctttggccttgcctggtaaatgtggtctgcaatcacctctaattgttgagtgtagtgaggcaatcaatgatggtcacggactcatggtcattacaagcaccttagtgttcaatattgctttcgggtgtttcattaacactgaagataaatgttaagacaacatntgatacgcctcgaacaacggtgcagttattt

SEQ ID NO: 125591 - DNA, 367 bp, Glycine max
atcaatcatcttttgtttgttcttcagtactttagtgtgtgatttaattccaagattttgagaatgtctagctgtgggtgtggaagtagctgcaactgtggcagcaactgcggttgcaacaagtactcttttgacttgagctatgttgagaagacaaccacagagactcttgttttgggtgttgggtctgtgaaggcccaattggaggtgctgaaatgggtgttgcagctgagaacggtggctgcaactgtggatcaagctgcacctgcgacccatgcaactgcaagtgaggtcaagatttataaccttgaagcagagataactgtaatatatgtatcaacaaataataagaattacgtgttgtgtt

SEQ ID NO: 125592 - DNA, 363 bp, Glycine max
ttcggctcgagcggacttgcaatgtcaattggcaatggccatgctgaaagtgcagagcgtggaggtgaaaacaggctctcacagagatggagaagggaaaactgagatacaaggcagtccaatttccaaagagactgcagcttctaataagatgttgggagttgtccctgccagtgttgcaggaacaatagttggacatgtagtttcttcaggtatgacactgcactggagctgagaaatccttccagtgttcattctagaacaagtgccccacaaccttgtccagtattgcctgcagaagcttgggtacagaatgagcgtgactgaaacgggagaggcggaacagtcaatcgagatctctag

SEQ ID NO: 125593 - DNA, 395 bp, Glycine max
gacggagctcggcatcggctcgagggaactcttcccttgtccgtttaacgggaaagcacccgtttaactcggagccacccctccctcgcctcatgcaccacggcttcatcaccccggtccccctccactacgtccgcaagtacgggccagtcccccgggcccgctgggaggactggaccgtggaagtcacgggcctggtcaccaggcccacatgcttcaccatggagcaaccctccacgatttccccagtcgcgagtacccagccacactcgtctgcgctgggaaccggcggaaggaacagaacatggtgaaacagagcatcggcttcaactggggggcagcgccatcgccactgcggtgtggagcggcgtgcccttgcgcaccctgctcaagag

SEQ ID NO: 125594 - DNA, 322 bp, Glycine max
  unsure (1)..(322): unsure at all n locations
cgtgagagatgaagatggtgaagggtttttggtggataagattttggataagactgggatgaaggggaccgggaaatggacggtgcagcaggcggcagagctttcgatagccgcgcccacgattgcggcgtcgttggattgccggtacttgagtgggttgaaggaggagagggagagtgccgcggcggtgctgaaggaagcggggtgagtgatgaattggggagggtaaatgtgagtggggtggataagaagaggttgattgatgatgtgaggcaggctctgtatgcttccaagatttgtagttatgctcangtgatgaatt

SEQ ID NO: 125595 - DNA, 315 bp, Glycine max
atctgggctctgggaagacggctactttctgctctggtattctgcagcaacttgactatagcttgacgcaatgccaggccttggttttagcaccaactcgtgagcttgctcagcagattgagaaggttatgcgagcacttggagattatctaggtgtgaaggttcatgcttgtgtgggaggtaccagtgtgcgtgaagaccaagcattctatctagcggtgttcatgttgtggttggtacgcctggtcgtgtgtttgatatgctgcgcagacagtcacttctgcgagatcacatcaagatgtttgtattggatga

SEQ ID NO: 125596 - DNA, 316 bp, Glycine max
ctcacctgaaaatgtcttgctgcggtggtaactgtggttgcggaacgcctgcaagtgcggcaacggctgcggaggctgcaagatgtacccagacttgagctacaccgagtcaaccaccaccgagaccttggtcatgggagtggcaccagttaaggctcaattcgagagtgctgaaatgggtgttcccgctgagaacgatggcgcaaatgtggagctaactgcacctgcaacccctgcacttgcaagtgaggtgttggagagctaaagcttcaagcagagatggcccttagaaataatgatactaactatatgtagt

SEQ ID NO: 125597 - DNA, 361 bp, Glycine max
aatcactgtatatgattatcttgttaaggttcgtaagatagatctccgatactctgctgaccttccatgtatcaatgttggcaagcctaaacgactaacattaatccccattgacgtttgtgaattggtatcattgcaacgatatacaaaagctctgtccacgcttcatagggctacattagtggataagtcgatagcagaaccacaagagaggatgataatcttgtctgatgcactgagaacaagcaactattgtgctgaacctatgctccggaattgtggaatttctataagcactggctacactgaagtggagtgcttggcgtggcctgcaccaagattgaagtttagcaatggtgag

SEQ ID NO: 125598 - DNA, 361 bp, Glycine max
ctaccgtttcgtcgtcaccatgccgcaaggggattacatagagcgtcacagaagagactatggctaccgtcttgatcacttcgagcggaagcgcaagaaagaggcgcgtcaagttcacaaacgttcttcaattgcccagaaggctctgggtattaagggcaaaatgattgccaagaaaaattatgctgaaaaggcacagataagaagactttggctatgcatgaagaatcaacgtctaggcgcaagactgatgataatgtccaggatggagctgttcctgcttatctccttgatcgtgataacacaaccagagcaaaggttcttagcaacacaattaagcataagaggaaggagaaggcgg

SEQ ID NO: 125599 - DNA, 356 bp, Glycine max
  unsure (1)..(356): unsure at all n locations
ctctaatcactctagctgttgcaaatttctactatttttcaatggcttctgcagatgttgagttccgttgctttgttggtgggcttgcttgggtcaccggcaacgatgccctcgagaaagcctattcaatctacggcgacatcgttgaatcgaaggtccgtttgatgcaggcaccgcaactgatctcacacgattcggttcggattttttctcgatcctctactgatctgtgatctctgatctatttgcgctacttgatctatgatatgatacttgtgttactatatgattcttntattactcacgccaataggtacgttcatcttcttcctttcaccataggcgaagatcgatcg

SEQ ID NO: 125600 - DNA, 352 bp, Glycine max
actgcagtcacattccgtgggccaagtgacactcaccttgatagtcttgtgggccaagcattgtttggagatggagctgctgcagtcattgttggttctgacccaattccacaagttgagaagcctttgtatgagcttgtttggactgcacaaacaattgctccagacagtgaaggtgctattgatggacaccttcgtaagttggactcacatttcacctcctcaaggatgttcccgggattgtctcaaagaacattgataaggcactttttgaggctttcaacccattgaacatctctgattacaactccatcttttggattgcacacctggtgggcctgcgattgtagac

SEQ ID NO: 125601 - DNA, 289 bp, Glycine max
ctttacttcgcctatggctcgtcactccttgctcttagccctcctcctcttcgccgctgtggccaccgccgcgatggcgtggcgcgtccgacgccgacgacatcctgatccgtcaggtggtgccagatgttggcgaagcgaagaggaggacaacctgctgaacgccgagcaccacttcgcgagcttcaaggccaaggcgccaagacctacgccaccaaggaggagcacgatcatcgcttcggcgtcttcaagtccaacctccgcagagccaggctgcacgccaagctcg

SEQ ID NO: 125602 - DNA, 296 bp, Glycine max
attccttttctaagtcgattaatatttacagagtgaagattttatttttctgtctttctttggaagataaagaatgggttctaagtccgaaaccgtttgcgttactggggcttctggttacatcggatcatggcttgtcatgagactcatcgagcgtggctataccgttcgagccaccgtactcgacccagctgatatagggaggtgaagcatttgctggatctgccaggtgcagagagcaagctgtctctgtggaaggcagaacttacagaagagggaactttgatgaaccatta

SEQ ID NO: 125603 - DNA, 358 bp, Glycine max
ggctgcagctgaggcaatagaaaagggacgacaaggcaggggaagcaagcctttaattccatcttccatggattttatcccaggtggtgttatgcagtttacttctggtgaagtaaagccaaagaaagacctgctagctgaagatattttgaagaagaaaatgtaccctaagagggaagagtttcaatggcgccctttcctcttctgtgcaaacgctttgatcttattgatccatatatggggaagccgccacctgctccacggattaggagtaagatggataccttgatttttacatcagattcagtcaaaggtaccaaagtggacgggcctgttacttcaaagaaagacatctcat

SEQ ID NO: 125604 - DNA, 353 bp, Glycine max
tagaggctgcagtaaaggccataaaggagtggggccagccaaagtcaaagattacccacttgatcttctgcaccaccagtggtgttgacatgcctggtgctgattaccaactgaccaaacaattgggccttcgcccctatgtgaagaggtatatgatgtaccaacaaggttgctttgcaggtggcacggttcttcgttggccaaggatttggctgagaacaacaagggtgcacgtgtgcttgttgtctgttctgagatcactgcagtcacattccgtggaccaagtgacactcaccttgatagtcttgtgggctagcattgtttggagatggactgctgctgtcattgttggt

SEQ ID NO: 125605 - DNA, 354 bp, Glycine max
ctcagaattctctaaaagagatctttttctgctctttgaagaaagaagggtctttgcttgattttggagatgtctctgctctcagatctcatcaaccttaacctctccgataccaccgagaaggtgatcgcagagtacatatggatcggtggatcaggaatggacctgaggagcaaagcaaggactctcccaggccagttagcgacccttcagagcttcccaagtggaactatgatggttccagcacaggtcaagctcctggtgaagacagtgaagtgattttatacccacaagccattttcagggatcatgaattgaaccgaacaatatcttggttatctgtgatgctacact

SEQ ID NO: 125606 - DNA, 351 bp, Glycine max
gtttcttttcgtgaaacaaaagagaacaaaagattaggttttgtgatgtcgggcatggagaggcttcagaggatgttcgcgggtgcaagtggagcgctgggccatcccccaccggattcccccaccctcgattcctccgagcaggtctacatctcctccctcgcccttctcaaaatgctcaaacacggaagagtggggtacccatggaagtgatgggtctgatgttgggggagttcgtggatgagtacaccgttcgcgttgtggatgtgtgtgcgatgcctcagagtgggaccggtgtcagcgttgaagctgttgatcatgtttttcagactaatatgcttgatatgttga

SEQ ID NO: 125607 - DNA, 297 bp, Glycine max
gcgcgggtatacggcgggagtaactatgactctcttaaggtagccagatgcctcgtcatctaattagtgacgcgcatgaatggagtaacgagattcccactgtccctgtctactatccagcgaaaccacagccaagggaacgggcttggcggaatcagcggggaaagaagacctgttgagcttgactctatccgactttgtgaaatgacttgagaggtgtatgataagtgggagctggaaacagcgaaagtgaaataccactacttttaacggtgatttacttattccgtgaatcgg

SEQ ID NO: 125608 - DNA, 264 bp, Glycine max
gtcaacgaaatcgcgaacagaacagcaacgttaacaatgggttctcgctacgaggtggaactgaagctctcatcggcacgcgctctcaagaacgtgaactggcgccatggcccgaaccgcccatacgtcgtcgattgggtcgacccaagcaacaagctctcgacgcgcgtggacgaaagcggcgacactgacgcgaattggaccaaacgctcacaattccgttgccaccaaagcctctcgaggatcaaacggtgtacatcgacg

SEQ ID NO: 125609 - DNA, 250 bp, Glycine max
attctctctgtgtatttccctacctctcccttcaagatgcagatcttcgtcaagaccctcaccggcaagaccatcacccttgaggtggaaagctctgacaccatcgacaacgtcaaggccaagatccaggacaaggaagggatccccccggaccagcaagcgactcattttcgccggaaagcaacttgaggacggacgtaccttgctgactacaacattcagaaggagagtactcttcacctcgtcctcc

SEQ ID NO: 125610 - DNA, 266 bp, Glycine max
agaactctaacgaaagagcgagaaagcgaagacagccatggcgtcgtttcttcaatcgtttctggatccgaagaagaactggttcgccgctcagcacatgaaatccgtctccaaacgcctccgcaaatatgggctccgatacgacgatttgtacgatccttactacgatctggatgtgaaggaggcgctgaatcggctccgaaagaggtggtggacgctcgccacgcgcgtcttaaacgcgccatcgatctttccatgaagcacga

SEQ ID NO: 125611 - DNA, 262 bp, Glycine max
aactttagccgaggtcaggaggagcactagctaagttcacaatttcaaaatggctacgggactaaagaagcatttgaaaaggctcaatgctcctaagcattggatgcttgacaaactgggtagtgcatttgcgcctaaaccctcatctggaccacacaaatcgagggagtgcctccccctcattcttattctggaaaccggctgaagtatgctctgacataccgtgaagtcattgctattctgatgcagcgccatgttcttg

SEQ ID NO: 125612 - DNA, 260 bp, Glycine max
cggctcgagctcgagccgtcgacctattgtcatgtttctctctcccttagtcaaagggattcatcgttgttcgtcccaggttatttagagaagcagaatagtgaagatttgctgcattggagctggatatgtggggggtcctactatggcagtcattgcacttaagtgcccatccattgaagtcgctgttgtgatatctctaaatcccgcattgcagcctggaacagcgaccagcttcctatctatgaacctggccttga

SEQ ID NO: 125613 - DNA, 256 bp, Glycine max
gctacagcggcttgatctcagccagaataacttttctggttccttaccagatgatgttggaacacttcagcacttggagattctcaagctctcagacaataagctgtctggatatattcctgcagcattaggcaatctgtctcatttgaactggttgttgatggatggcaattatttctatggtgaaatactccccatttgggttctcttgcaactttgcaaattgcaatggatctcagttacaataactttctgg

SEQ ID NO: 125614 - DNA, 211 bp, Glycine max
ctcttttgctgcatcagaggagttgtaaattaagagcatggctgcacaagctcttgtatcatcatcttctcttaccttctcagcggaggctgcaagacaaagtcttggaccaagatcactccaatctccatttggcttctccagaaaagcctcctttcttgttaaggcagctgctaccccccctgtcaagcaaggatcagacaggcctttg

SEQ ID NO: 125615 - DNA, 208 bp, Glycine max
agtgaatcgaatgcatgtttggactcgatggcctgctgaatgacactaaaggctcaggatggaaattggtgtatgtagattatgagagtgatgttctacttgttggtgatgatccttgggaggaatttgtaggctgtgtccgctgcataagaattttatcaccttcagaagttcagcagatgagtgaagaggggatgaagcttctaaa

SEQ ID NO: 125616 - DNA, 208 bp, Glycine max
gcttggacaattagcctcacaaaagcaaagatcaaacaaaccaaggacgagaacacgatgttgcttgaacttgcacttggtttattggtgttggctctgtttctgcacttgcgtcccacacccactgcaaaatcataagcacttcgccatctcccaaacccaccaagcccaaagcctcgtcttcccttcataggacaccttcatctct

SEQ ID NO: 125617 - DNA, 210 bp, Glycine max
  unsure (1)..(210): unsure at all n locations
tgaagagttgagcgggaanataataagacaacatacataacgtgttctcaaagtggtgtttttatgttatgttgtttatcataagacggcagtttgcctgcactgatcagttcttagagcatgaattcagcatccccgcagtttgtttcctcaagaaggatgagtgtgtacgatccgatccaccagattagtatgtggggagaaggcttc

SEQ ID NO: 125618 - DNA, 212 bp, Glycine max
ctcgaagcagccatggggatcgatctcaaggccggaggtaagagcataaagaccaaaagaacagcacccaagtccaatgatatctatctcaagctcttggtcaagctttatcgcttccttgttcggagaactggcagcaacttcaatgctgttatacttaagagattgttcatgagcaaggttaacaaacccccattgtctttgtcaaggtt

SEQ ID NO: 125619 - DNA, 207 bp, Glycine max
ataaccaatcatctttagttcttcagtaatttattgtgggattctattctaagattttgagaatgtctagctgtgggtgtggaagcagctgcaactgtggcagcaactgcggttgcaacaagtactcttttgacttgagttacgttgagaagacaaccacagagactctagttttgggtgttgggcctgtgaaggccaattggaggg

SEQ ID NO: 125620 - DNA, 206 bp, Glycine max
  unsure (1)..(206): unsure at all n locations
tcgggcgtaatacattgtcaggtggggagtttggctngtggcggcacatctgttaaaagataacgcaggtgtcctaagatgagcgcaacgagaacagaaatctcgtgtggaacaaaagggtaaaagctcgtttaattctgatttccagtacgaatacgaaccgtgaaagcgtggcctatcgatcctttagtccttcggaatttgaa

SEQ ID NO: 125621 - DNA, 210 bp, Glycine max
ctcctgtttctttattaattctctctttcaaatatatggcagaagatgcttcaattattccaacacacacaaaagcttggtactactctgaacatggtagtccaggtgatgttctcaaattagatcctaattggcccttaccccaacaactcaaagatgaccaagtgctcatcaaggtcatcgctgcatccattaatcccgttgattaca

SEQ ID NO: 125622 - DNA, 234 bp, Glycine max
cgtacgacactcggaatctgctcgagcgccctacggccactgcctcgtcgccggaataaagaagtacccaagcaaggtcatcaagaaggactccgcgaagaagaccgcgaagaaatctagggttaaggccttcgtgaagctcgtgaactaccagcacctcatgcccacgcgctacacgctcgacgtggatctaaaggacgctgttacccccgatgttctagccaccaaggacaa

SEQ ID NO: 125623 - DNA, 207 bp, Glycine max
gctcagtcatctcttttaccattctcttctctcttgctcttgcaggagagagccatgtccatgcatcgctacctgaggaagattattgggaagctgtttggccaaacactcccattcccactgcactgcgagagcgactaaagcctctccctgcaggtgttgaaatcgatgaactccctaagcaaattgatgatacacagtacccaa

SEQ ID NO: 125624 - DNA, 209 bp, Glycine max
catgggctaaatttcagaactgcagtattttactgccataaagtccgtgaaacaacagctttcatggttccattggtggctggtgatggaaccaaaactcaggcacttgctgtttgccactcagatacttctggaatgaatcatcacatgcttcatgaactcatgggagttgatcctggaactaaccctgtttgccatttccttggaag

SEQ ID NO: 125625 - DNA, 207 bp, Glycine max
cactgtgctcatctccacacagcatgatgagactgtcacaaatgatgagattgcagctgatcttaaagaacacgtgattaagcctgtgatgcctgagacgtaccttgatgagaagaccatgttccatttgaacccttctggcaggtttgtcattggagggccgcatggcgatgctggtctcaccggccgcaagatcatcatcgacac

SEQ ID NO: 125626 - DNA, 218 bp, Glycine max
ggaatcggctcgaggcttaatcgaactattcagattctaggaaatgagttggtggttggctggagcaatcggtgctgccaagaagaaattcgaggaagaggatccgccgcgaacttccagagcgtgggcctggtgatcggcgtgacgggcatcgtgggcaacagcctcgccgagatcctcggtctcgtcgacacccccgccggtccatggaaggtcta

SEQ ID NO: 125627 - DNA, 208 bp, Glycine max
tcaggaactatgtgatgcatcaaacactttctacttactattaccttatgaagccttctggtggcccgcagcaaagtcatggatgtcttcatcaaggctgctgaatatatggaaattccagttcgtaggactgatgatgaacctcttcagaagctgtttatgttggtaaggagtgagttgaatcttgacctcaaaaacatcaagcagg

SEQ ID NO: 125628 - DNA, 195 bp, Glycine max
aatggggtctctaatggcctctctgactctcacgcttgtattggcatgactctctctaagcgtgcgatctcaaacctcagcggacaagtacgagtatgcatctccgccagcaccggagaagcctgacaactaccactctccaccaccaccagcacacaagtagccatacaaataaccttctcctccatgagctgt

SEQ ID NO: 125629 - DNA, 206 bp, Glycine max
cgtctcaccaaatctatagaagcagcactgattgaagctgagaagactgtacagattgccttggctaaggcctccatggtggatgatctccataataaaaatcaagagctaattaaacagattgagatttgccaggcagaaaataaaattttggacaaaatgcatagactgaaggtggcagaggttgaaaagcttacccaaaccgt

SEQ ID NO: 125630 - DNA, 186 bp, Glycine max
cacacgtggttggtggtgttgttcttctgctcttcccctttcggtatcttcttctgagcttgtttaagctctttctatgtgattccattaacatagattatcacaatgtgtggtattcttgctgttcttggttgttctgatgactctctagccaaaagggtccgcgtgcttgagctctctcgcaga

SEQ ID NO: 125631 - DNA, 220 bp, Glycine max
ggaatcggctcgagctggagtttgctttccgagttgaagaagatgctgtttggattcaggtggccaaggctcaactaagggaagggctagtaagtgatgccattgagtcctttatacgagctgatgatgccacacaatttttagatgttatccgtgctgctgaagatggcaatgtttaccatgacttggtgagatacttgctgatggtaaggcagaagac

SEQ ID NO: 125632 - DNA, 208 bp, Glycine max
tcgtcgagccgaatcggctcgagcacaaactcgctgcttattctgaaccgaactttgaagttttgttattttgtgcaatggcagccaagagcaaaatcctagtccttggaggaacaggatacattggaaaattcatagttaaggcaagcgcagaagcaggacaccccacttttgccttagttagagagagcaccctttctcatcctga

SEQ ID NO: 125633 - DNA, 227 bp, Glycine max
  unsure (1)..(227): unsure at all n locations
gtaactcggaatcggctcgaggtnatactcatgagcttgatgtccctataatttgcacaattttgtatatcccccttgttcttatagattggcactaacgtgcttctcctccattcctccggcatgcgtttggacctcataatttcattaaagagtttggtgagccactccagacctctatctccaagagttttccacacttcaatagggatattgtctggctccac

SEQ ID NO: 125634 - DNA, 205 bp, Glycine max
aggcatcgagaaggtcggatccagctccggcaggacctccaagcccgttgtcatcgccaactgcggtcaactctcttagacgacgttgacccgcggctttaatctctgaatctgtgttatttctgtcggtgtcgtttttgccttttttttctcttcttttctttctcgtgtcgtcgtttaggggattgtggtgttaaggatatca

SEQ ID NO: 125635 - DNA, 204 bp, Glycine max
gtagaaaggaggaggtggttacacgtgagtacaccattaatctccacaagcgcctccatggctgcacatttaagaagaaagctcctatagctattaaggagataaggagatttgcccaaaaggccatggggaccaatgatgtgagggtggatgtgaagttgaacaagtttgtctggagccagggaatcaggagtgttccaagga

SEQ ID NO: 125636 - DNA, 203 bp, Glycine max
gtggaatgcaaatctgtgttaagactctgaccggagagacaatcacccttgaggtggagagctctgacaccattgacaatgttaatgcgaagattcaggacaaagagggtatcccaccagatcaacagaggctgatctttgctggaaagcagcttgatgatggccgtacccttgctgattacaacatccagaaggagtccact

SEQ ID NO: 125637 - DNA, 204 bp, Glycine max
tcggtgggttacaaatgtgagcggcatcaattttcttatcaaagagggtccaaaagtcaatgcaaagttcgagctgaagccgccagcatatccactgaatggtttggagccggtgatgagccagcagacacttgagtttcactgggggaagcaccacaagacttatgtggaaaatctgaaaaaacaagttgttgggacagagct

SEQ ID NO: 125638 - DNA, 223 bp, Glycine max
gctcggcaatcggctcgagctatgagaggcattaaggtagacttgcatgcctgcctcaacaataaagttgtatttaagggttttgctgtatcaaaagaatctcagaataatgctgcagagttcacattccaagggacaccagcacatcttaggcatggtgatgttgttatagctgctatcaccagttgtacaaatacttcaaatcctagcgtaatgcttggag

SEQ ID NO: 125639 - DNA, 206 bp, Glycine max
cggctcgagcggctcgagcttcgtgtcaatttctctctctcagcgctttctgcaatcgaaccttacatctccaacaggatccacaggccgaatgagaaatggggctgacatgcacaaagcttgtcagtcggcttttcgcgaagaaggaaatgcgaattctgatggttggtcttgatactgctggtaagagcactatcctgtacaag

SEQ ID NO: 125640 - DNA, 203 bp, Glycine max
caataacctcactcagactcgggatcacagaaaccaacaacagttcttgcactgaggtttcacgatgttgctggaacttgcacttggtttgtttgtgctagctttgtttctgcacttgcgtcccacaccaagtgcaagatcaaaagcacttcgccacctcgcaaaccctccaagcccaaagcctcgtcttcccttcattggcc

SEQ ID NO: 125641 - DNA, 205 bp, Glycine max
gtgctctgctcgtgcctctagggttatcatatctccatttccatttcctctctctcagtttccaagaatcgtaagctatgggaaagtcttacccaaccgtgagcgctgattaccagaaggccgttgagaaggcgaagaagaagctcagaggcttcatcgctgagaagagatgcgctcctctaatgctccgtttggcatggcactc

SEQ ID NO: 125642 - DNA, 232 bp, Glycine max
  unsure (1)..(232): unsure at all n locations
cgtacgtacactcggctaagaacgaaatatagcgcctacagcgcattcttgacaagtccattagccctgcgaaggccgacgagttaactctanagataaatatcttgtcgacatatgctgcttgacttattggtgcattgttaaccaactctcatggaagctcgtgatccaccgcagctgccgatgattgtttgactttgatatcgaaattgctgggagatattcaacgtgg

SEQ ID NO: 125643 - DNA, 201 bp, Glycine max
cgcatcttgaatgtctccctcttcctccttcaccgagagacgatgccatacaactttacgctgctttcaaaggatttggatgcgatactagcgttgtgatcaatatacttgctcatcgagatgctactcagcgtgcctacatccaacaagaatacaaagcaatgtattctggggatcttctcaaacgcttatcttcagagt

SEQ ID NO: 125644 - DNA, 246 bp, Glycine max
caatgccagtgttcccgaaatcgtgggcggcgattctgttatcattcgataacgttggggtgtggaacttgaggtccgagcttgctgagaatcgctacttgggacaacaattgtacatcagtgttctacactcctgagcgttctctgagggacgagtacaacatcccggagtacgcgttgctttgtggcgtagtgaagggtctgccaaagccagagccatatcactgatgttgggccactatgaag

SEQ ID NO: 125645 - DNA, 237 bp, Glycine max
cgcgtcgctccgcaccagtttcaccgcacgaatatcttattgtttggagcgatccgagaaaaactctgtaaacatgttggtttaccaggacctccttacaggtgatgagcttctctctgactccttccgttacaaggaaattgagaatggaatgctgtgggaagttgaggggaagtgggttgttaaaggagcagttgatgtagacattggtgcaaacccgtctgctgagggtggagg

SEQ ID NO: 125646 - DNA, 244 bp, Glycine max
acgaaacagaaaatgccaggactcacagcaccttccgattactcccaagaacccccccgccactcttctcttctcatcaacgccaaggaccctttcaatgcggagccaccgcgtgctgcgttggttgcttcctacgtcaccccttccgatttcttctataagaggaaccacggtccaatccccatcgttgagaacatcaacagatattccgtgaacgtgtccggcttggtggagcgtcccaaac

SEQ ID NO: 125647 - DNA, 244 bp, Glycine max
ctctttctctcttcatcatcgtcccctctctctcttcctttgccttgtctccgtgtgaaagatcacaactccaccgtcaccgatttccaaggtttcttggtgctgctggtgtattatacatgcttacatctgcatgtgctggtgagatgtgcttgcgttggaaattctccttcattctctctattccccacttttctgtagcactttacccttcacggatcttttcaagcattttttggttatg

SEQ ID NO: 125648 - DNA, 236 bp, Glycine max
aaaaaatgggttcttctctgtggacctgtctgattttgttatcacttgcttctgcttccttcgccgccaacccaagagcaccaattgatgtgtcatttggcagaaactatgtgcctacctgggcctttgatcacatcaaatacctcaatggtggttctgagattcagcttcatcttgataaatacacaggtactggcttccaatcaaaagggtcctacttgtttggtcacttcagc

SEQ ID NO: 125649 - DNA, 237 bp, Glycine max
gcacgaacaaacaatcacattacacacttctctctcttcaatggccggaatccgcttgctgccggaagactcccacgtctcccaacaatcccgcgcggtgcctctctccgccgccgatctggtctccgacgacgaccgctccgtcgccgctgactcctggtccatcaagagcgagtatggcagcactctcgacgacgaccagcgccacgccgacgccgccgaagctctctccaacgc

SEQ ID NO: 125650 - DNA, 240 bp, Glycine max
gtttactctggttatacttgttatactggcgttgcagggtttgtgcctgctgacattgaaactgttagataccgagtattcttgggacacaaacaatactttgtatcttcagatgttggtgcgggaaagatgcaatggtatgcatttcacaaagaacctcctggtggtgttgatgagcccaacggaaaaaaggtcaggttgcttaggatatttgagggctggtgtgataatgctgtagat

SEQ ID NO: 125651 - DNA, 237 bp, Glycine max
aggaggaggatggtgtccccgatgtcaacggttctggtgacgggaggggcaggcttgatcggatcccacacggtgcttcagcttctgaagcagggcttcagggtttccatcatcgacaaccttgacaattccctcatcgaagccgttcacagggttcgccgcctagtcggtcctcatctttccaacaacctcaccttcttccacggagatctccgcaatgttcaggatttggaggca

SEQ ID NO: 125652 - DNA, 226 bp, Glycine max
gaagagggggtcagagtgagaaagagaaagagagaattcgtaaaccctaatttcggaaagatcggcgatgactgcctccaaggatcgcgagaacttcgtctacatcgccaaactcgccgagcaggccgagcgttacgaagagatggtggaatcaatgatgaacgttgcgaatctcgacgttgaactgacggtggaggagcggaatttactttctgttgggtacaag

SEQ ID NO: 125653 - DNA, 233 bp, Glycine max
tccgggcagacattgctcttgagttggcctggatgaacaatatgattgactttgccttaccatatctcctgcagtttatccgtgagtacactggcaaagttgatgaactggtgaaggataaaatagaagcgcagaaccaagtgaaagctaaagagcaagaagagaaggaagtaattgctcaacagaatatgtatgctcagttgttgcctcttgctttgcctgcaccgccaatg

SEQ ID NO: 125654 - DNA, 235 bp, Glycine max
ggtaaatggggttctcttcactggtggatgggctaaaagtggtttatattttgaaactgtcacaaaaatatttaagaaaattttagagaagaatgatgctggagatcatttcccattatttgccacctgcttaggctttgaactcataacgatgatcataagccaggacaataatattcttgaagagtttagtgcatcaaatcaggcaagtactcttcaatttgtggagaatgca

SEQ ID NO: 125655 - DNA, 234 bp, Glycine max
cgtcaggttcatcgtcccactttcttctccttttagggtttcctttttgtttctcctttccagatctgcatcttccattttttaggattaagcggtgagattcgtgaatctgagaaatgtcggattcttctcgggaggagaatgtttacatggcgaaattggcggacaggccgagcgttacgaggagatagttgagttcatggagaaggtagcacagactgtggaggttgagga

SEQ ID NO: 125656 - DNA, 240 bp, Glycine max
agtctgtaaaagatattacgaaccttataaaagagccatagtgagtcctactttgtggatgctcagcctcatgacaaagagcatggagacccgggaagaaagggccctttttcttcaattttgagggctttttactgaataagtttgtagtactaaaatgtatgctgtaatagctcatattgagcgatggaaagtatcgggctatttaactatgacttgagctccatgctagtataaata

SEQ ID NO: 125657 - DNA, 234 bp, Glycine max
tagggcgtatggtcgacgcgttgcgagtacctattgatggaagaggggctctaagcgatcacgagcgaagacgtgtgcaagtgaaagcccctgggattattgaacgtaaatctgtgcacgagcctatgcaaacaggcttaagagcagtagatagcctggttcctataggccgtggtccacgcgaacttataatcggggaccgacacactggctaaacagctattgctatcgata

SEQ ID NO: 125658 - DNA, 231 bp, Glycine max
cagactcgtgaacatgctctgctttcattcacccttggtgtgaaacagatgagttgttgctgtaacaagatggatgctactacaccaaagtactccaaggccaggtatgatgaaattgtgacggaagtttcttccgattcgaagaaagtaggatacaaccctgacaagatgccttttgatcctatatctggttttgagggagacaacagagtgagaggtccacaaaccttg

SEQ ID NO: 125659 - DNA, 229 bp, Glycine max
cagtcatgcgatgcatcactactgttagcgacggtgaacgatgtagtgtcggagcaggcgtcggatagaagtgttgggatgagaaaccgcaagtacgtaaacaccatcaaagcagcggttgagaaagaatgccccttgacggtttcatgcgctgacattcatgctctttctgctaaagatggcattgccttcttcggaggaccaagcattgacatgaagacagggcgaa

SEQ ID NO: 125660 - DNA, 234 bp, Glycine max
attctcttcagtttaaagttacatagtttgtcaatgtgttacttaatctacaatggctgcttcaacagtggctctctcttcatcatcagtggctggtcaagctatcaagcttactcccctccaaccctgagctgtgtgttggacgggttagcatgcggaaaacagcctccaaaactgtttcctcaggaagcccatggtacggacgagaccgtgtcacatacttgggcccatgct

SEQ ID NO: 125661 - DNA, 223 bp, Glycine max
caaacatcgaggaggagatgggtcaactgttgcaaattgctatggcgtgcgcttccgccgtgctggatcagaggcctagcatgctagacgtggtgcgtatgattgaggacattatccgtggcgaggcttatgatggcttgggataagcggcggatgagccttcctaaggatccgagggtcaggcaccagccccagagtcaaggactccaactagggcactcag

SEQ ID NO: 125662 - DNA, 223 bp, Glycine max
gcggcttctttcgccaagattaagtttcaccagtaatgggtaagccgaaggttcacatgaacatcgtggtcattggccatgtcgactctgggaagtcaaccaccaccggtcaccttatctacaagctcagaggtattgacaagcgtgtcatcgcgagattcgagaaggcagctgctgagatgcataagaggtctttcaagtatacctgggtgcttgacaagct

SEQ ID NO: 125663 - DNA, 230 bp, Glycine max
tgtgattccagaccttaatttttctctcattcgcttcaaatgtcaggaaatcaagtatggctcaaccctccacaagagtaggccttgctggactggctgttatgggcccaaatctagcactcaatattgctgagaaaggctttcccatttctgtttataaccgaaccacttccaaggttgatgagactgtagaacgagcaaaacctgaaggcaatcttccagtttatggc

SEQ ID NO: 125664 - DNA, 233 bp, Glycine max
gatggagtgaactagatgctgcaattttagtacgaggagacatattcagcatcaagttaggagagatcattccggctgacgctcgtcttcttgagggtgatcctttgagtgttgatcagtctgctttgactggagaatctcttcccgtaacaaagagcccctcggatgaagtgttttcgggatcaacagttaagtagggtgagatagaagcagttgtgattgctactgggggg

SEQ ID NO: 125665 - DNA, 235 bp, Glycine max
cgtatatccattggagaagttgaccgtggaaggcgagttttaccgcaaatcatgctttaggtgtgcacatggaggatgtttcctgaccccttcaacctatgctgctctagatggatatctttactgcaagccccacttctctcagttgttcaaggagaagggtagctacagttatctgtccaagcaagcttcattgaagaaaagtgaaatgcaacaacaagaacgcgaggctgtg

SEQ ID NO: 125666 - DNA, 230 bp, Glycine max
caagatttctgatttctatgtgcagaaaggtcgtctatcagaggatgaggcacgattctatgcagctgaagttgttgatgctctcgaatacatacataatttgggagtcatacagcgtgatattaagccagagaacttattacttacagctgccggacatattacaatagccgattgtgggagtgtgaagcctatgcaggatagccctataactgtccttccaaatgcag

SEQ ID NO: 125667 - DNA, 234 bp, Glycine max
gaattgttgatcagaaaaggttgagggtgaagaaagagactagtgaaaagcaagtatggggatggactactatgggattttggaggttgacaggaatgcctcagatgaagagttgaagagagcctacagaaagcttgcaatgcaatggcaccctgacaagaacccaaccaataagaaagaggctgagactcaattcaaacagatatctgaatcctacgaggttcttagtgatcc

SEQ ID NO: 125668 - DNA, 231 bp, Glycine max
atgtgaactctgaggatataaaggaaactggatacacctatattatgccaaagaacattttgaaaaagttgatatgcatagcagatcttcgaacacaaatttctgggtacatgtatagcgtaagtcctccagataatcctcaggttaaagaacttcgctgcattgtgatgccaccacaatgggggacacatcaacaagttcatctgccatcagctcttccagagcatgatt

SEQ ID NO: 125669 - DNA, 233 bp, Glycine max
agaggatgggtgcagaagcaaatggcggcgagaagcaattgaaatttctgatctacggtcgcagcggttagattggtggtctactggataagcgctgcgaagagcgcgggatccaatatgagtacggcaccggcagattggagaaccgctcgtcgttagaggcggacatagcggctgtgaagcccagccacgtgttcaacgccgcgagtgtcacgggtagaaccagtgtggac

SEQ ID NO: 125670 - DNA, 157 bp, Glycine max
ctcagtgaaagagaatccgaggcgaagagaagagaaaaattaagatggaggggaaggagcaggatgtgtcgctgggagcgaacaagttcccggagagacagccgattgggacggcggcgcagagccaagacgacggcaaggactaccaggagccggc

SEQ ID NO: 125671 - DNA, 149 bp, Glycine max
gtggaattcatgcctttcagtttgtccttctttttgaccataaatgctgtcatgtggttcttctatggccttctcctcaaggactactacatcgcactcccaaatactcttgggtttctattcggcataatccagatggtgctgtattt

SEQ ID NO: 125672 - DNA, 148 bp, Glycine max
cagaacgatgaggatggtaaggtggaggatgtcaatgaggagaaggagaaggaagaaaaaacacaaaagaagatcaaggaagtgtcacatgaatggaccttggtgaacaagcagaagcctatttggatgaggaagcctgaggagatca

SEQ ID NO: 125673 - DNA, 135 bp, Glycine max
gagcaactcaccatgaatgatcggcgtggaccacccccggccgcactatcaccaattgatgcaatgcctactattaagataacacaggcgcatcttcgcttggattcacactgtccagtttgtaaagaaaaattt

SEQ ID NO: 125674 - DNA, 143 bp, Glycine max
accaatttactagggttgtatacattttccgatggcttctgcagatgttgagtaccgttgctatgtcggtgggctcgcttgggccactgacgaccatgccctcgagagaggcttctctcagtacggcgaaatcgttgaaacga

SEQ ID NO: 125675 - DNA, 148 bp, Glycine max
gaaggctcaggtggcaaaactaactgttggaccaccagaggatgactgtgatatcaccccggttgtgtcagaatcatccgccaatttcattgaaggcctggtcttggatgctaaggagaaaggagcaacattctgtcaggagtacaaa

SEQ ID NO: 125676 - DNA, 149 bp, Glycine max
gataactagaaacagtgtgatgaaaatgaaggtccttgttttcttcgttgctacaattttggtagcatggcaatgccatgcgtacgatatgttccctctccgaatgaacactggctatggtgcccgtactccggaggtgaaatgcgcaa

SEQ ID NO: 125677 - DNA, 143 bp, Glycine max
ctcataacgcaaagcacaaagcaaagctcatccttgagttaaaaaatggcagcagcttcttccatggctctctcatccgcagccttggctggcaaggccgtgaagctgggcccatcagccccagaagtgggaagggtgagcat

SEQ ID NO: 125678 - DNA, 142 bp, Glycine max
atcagatctaccacctcgcgtgtcccgcgtcgccggtagcactacaaatacaaccccatgaagaccatcgacgaatgtgatggacacgcttaacatgcttggccttgcgaaaagaattggggctaggtttctgcttactagt

SEQ ID NO: 125679 - DNA, 140 bp, Glycine max
actaactcctcttcacacattttcttagctctctccaacaatccctctcgttcacatgattcagattgtgtgaagatgggggctggtggtcgaactgctgttcctcctgccaacaggaagtcagaggctgaccctttgaa

SEQ ID NO: 125680 - DNA, 145 bp, Glycine max
ctagtaacctcttgttggggcaagcagtcaaaaaatgaaccagagcaaatgaaattcgaatggctattcctcacgattgctccttgcgcggcggtcaccattaacagtccgctggatcgatttgagataatcccattgattgata

SEQ ID NO: 125681 - DNA, 140 bp, Glycine max
agcatcacttgggtcaatagatttcatcacctctttatgtcaatctgaagatgagtcagaaaagatcaaggaagctgttaatacatcttcttatggaagtgaatatcttcatgctgccctttcagttaatcagaaggtaa

SEQ ID NO: 125682 - DNA, 141 bp, Glycine max
tacaaacatggcaatgaagcagttcttgtgggttgttctgtccctttctttggtccttggagtggccaatagctttgattttcacgacaaggatttggagtccgaggaaagcctgtgggacttgtacgagagatggaggag

SEQ ID NO: 125683 - DNA, 148 bp, Glycine max
gcaagaatggcacttcgttgcatggtgatgtcgcttctgttctcttcactcttggtcttgcgagagaaagccatgccaaagacgaagatttttggcatgctgtttggccaaacactcccattccaagttcattgcgagatcttctaaa

SEQ ID NO: 125684 - DNA, 140 bp, Glycine max
gtgaactatgcctgagcggggcgaagcagaggaaactctggtggaggcccgcagcgatactgacgtgcaaatcgttcgtctgacttgggtataggggcgaaagactaatcgaaccgtctagtagctggttccctccgaag

SEQ ID NO: 125685 - DNA, 148 bp, Glycine max
ttggatatctgctgtacttctaaaaagaatggcatgctgttgcttcatggacttgggatgcccaggatgagacctgtgggatttgtaggatggcctttgatggatgttgtcctgactgtaaacttcctggagatgactgcgcattgat

SEQ ID NO: 125686 - DNA, 252 bp, Glycine max
caccatagttggtgtagctagcgagggagggatatagggggaagcgtttattcattcattaagatggcatcggagcttcaattgcccccaggcttcagattccatccaacggaccaggtgctggtgttgcactatctctgccgtaaatgcgcatcgcagcctatcgccgttcccatcatcgccgaaatcgacctctacaaatacgacccctgggacctacccggattggcttcctacggagagaaagagtgg

SEQ ID NO: 125687 - DNA, 253 bp, Glycine max
  unsure (1)..(253): unsure at all n locations
gttcagtgtgtcgtttanaaatgtcgcagttgctggataaagccaagaacttcgtgtcggagaaggganatgatatggccaagccggaggcgagtgtcactgacgtggacttcaagcgcgtgagctaagataatgtcgattacttggccaaggtctctgttcgtaacccttattcaacttccatacccatttgtgagatcaactactctttcaaaagcgcatccagggagatagcatcagggaaaattccaga

SEQ ID NO: 125688 - DNA, 341 bp, Glycine max
cttccttataaccaaaaccaacaacaactatggcaagttatcagaagcactacgatgatcagggtcgcaaggtcgacgagtatggcaatgttgagaggcaaactgacgaatatggcaacccggttcatgccactagtgtcacttatgtagccactaaaagtgttggtggctacaatgatgacactaataagcaacatgataccaccggtgtctatcctgagaaagataccggtaggcatcattttggtcgtggttacgaggtgacactaataagcaacaacatgatgctattggtgtttatcccggaatagacattggtagagatcatgagactaccggtg

SEQ ID NO: 125689 - DNA, 247 bp, Glycine max
gtgactttgactttgagccatgtggttattcaatgaactctgttgaaggtgctgctgtttctaccattcatgttaccccagaagatggtttcagttatgcaagctttgagactgttgggtatgacttcaaagtggtgaatctgaacgaaatggttaagagggtattggcatgttttctcccaactgagttctctgttgcagttcatgtggatggtgcaagcaagttgtttgatcagacgtgttttct

SEQ ID NO: 125690 - DNA, 196 bp, Glycine max
tgtccagataaattaaagccttgggagtgaaaatggtactttctggagaaggttcagatgaaatatttggaggttacctgtattttcacaaggcacctaacaagaaagagtttcatgaagaaacatgtcgaaaaattaaagctcttcatctttatgactgcctgagagccaataaatcaactgcagcatggggtgt

SEQ ID NO: 125691 - DNA, 255 bp, Glycine max
  unsure (1)..(255): unsure at all n locations
atgattagcacctcaactcctcacatggttctccagcaatccgtgtaccaggctttcactcaggtgtttgctcagcagctaccanagcaagcacaggtgaaatctgtggcaccatttgggttatgcttcaactccaacaagatcaatgcatatcctagcgtggaccttgtgatggacaagcccaatggtcctgtttggagaatctctggtgaggacttgatggtgcaggcacaacctggggtcacgtgtttgggt

SEQ ID NO: 125692 - DNA, 360 bp, Glycine max
  unsure (1)..(360): unsure at all n locations
cgaagatgagtcaggagcagccaaggcgcccccaaggccaagaccccatcaaatacggggacgtttttccacgtctacggtgaccttgcacagatgcccattgcaccggaagatgctgccatgatgcaaagcgcggaagctcgagtactcggaaaaacccaacccggcggnacttcttccgtcatgcaatccgccgccacaaggaatgaacaggctggtcttgtcggtcaccaggacgtcaccgacatcaccggcgaccatggcgtcagtcacagaaactacattccatggaagacgcataataaccgaggctgttggtggccaggtagtggaacagtatgtggagccagatccagttga

SEQ ID NO: 125693 - DNA, 186 bp, Glycine max
  unsure (1)..(186): unsure at all n locations
ganagagagtgttgcaaagtctcttcctgatcagcacaaggtctatgagttcgttgtggagataagaaagaagttagtcatcgagtaggtttcatgttggatcttaatagccatagtgaagtattggtcgttcttgacctttcaactaaataatatttgtgtaataaaaaggcatttggatgtgcc

SEQ ID NO: 125694 - DNA, 248 bp, Glycine max
tatttttcttcctcagtagtgtcatttacgcttctcttctctgcagcaactatgcctaaccctaaggtcttcttcgacatgaccatcggcggtcaatctgctggccgcatcgtgatggagctctacgccgacgtcactccccgcaccgccgagaacttccgcgcgctttgcaccggcgagaagggcgtagggcggagcggcaagcccctccactacaagggctcgtccttccaccgcgtgatcccgag

SEQ ID NO: 125695 - DNA, 247 bp, Glycine max
gcagaggcgtttctcggacacgcggtgaagaacgcggttatcactgtccctgcttacttcaacgactctcagaggcaggcgacgaaggacgcaggggcaatttcgggtttgaatgtgttgaggattatcaatgaacctaccgctgctgccatcgcgtatggattggataagaaggcttcgagaaaaggtgaacagaacgtgcttattttcgaccttggtggtggcacttttgatgtttcaatattga

SEQ ID NO: 125696 - DNA, 346 bp, Glycine max
ctccgatggctaatctctcactcttgttcttcggtctcctcctattctccgctgccgtagccaccgtcgaacgaatcgacgatgaagacaaccttctgatccgtcaagtggtgccggacgcggaggaccaccacctgctcaacgcggagcaccacttctccgccttcaagacaaagttcgccaagacctacgccacgcaggaggagcacgaccaccgcttccgtatcttcaagaacaacttgctccgcgccaagtcgctcagaaattggacccctccgccgtccacggcgtcaccaggttctccgatctcactccgtctgagtttcgcggccagttcctcggcctg

SEQ ID NO: 125697 - DNA, 246 bp, Glycine max
gtattctcctttctctgctctttgccatagctgacacatttggtgccttgtagagcgtgctttggcaggatggtggtatggcgaaggacgttgaggttgctgagcgtggctccttctctgggaaggactaccaggaccctccaccagcaccactcattgatgctgaggagctcacaaagtggtccttttacagggctctcattgctgaattcattgccactttgctcttcctctacattactgtgc

SEQ ID NO: 125698 - DNA, 247 bp, Glycine max
  unsure (1)..(247): unsure at all n locations
ctcgagcnngatgtctttgatccaaaattcaacattgtctcccctggagctgatcaaaccatttacttcccccacactgaaaccagccgtaggttgacatccttccaccctgaaatcgaagaactcctttacagctcagtggagaatgaagaacacatatgtgtgctgaaggaccgcagcaagccaattatcttcaccatggcaaggttggaccgagtgaagaacatcacaggacttgtggagtggt

SEQ ID NO: 125699 - DNA, 252 bp, Glycine max
tgcataataaccgtcctaagtttattgagagaattttgcaagtgtgagaaacatggcatctcgtcaaaacaacaagcaagagcttgatgaaagagcaaggcaaggagagactgttgtcccgggtggaactggtggcaagagcctggaggctcagcaacaccttgctgaaggaaggagcaagggagggcaaacaaggaaggaacagctgggtacagaagggtccagagaaatgggacgcaaaggagggttgag

SEQ ID NO: 125700 - DNA, 246 bp, Glycine max
gcatatctcatttgaatacattgcttgtagtctatactgaaagatgggtttgaagatggcgttactgatcctaggcctttccctcatgctccttttggtctcctctgaggtggcatccacgaatacaaaagaggaggcaaatggagtggatgatgccaaatatcccggtggaagctatggagggggttacccaggtcatggcggtggcggttatcctggccatggcggtggcggttatcctggcca

SEQ ID NO: 125701 - DNA, 247 bp, Glycine max
cgttgtaccaactccaccggtggttactccacccgtggttacaccaccaagtcctccaagtgaaacaccatgtccaccaccaccaccaccagtggtgccatacccagcaccagcacaaccaacatgccccatcgacaccctaaaactgggggcatgtgtggatgtgcttggtggcctcatacacattggcataggcagcagtgcccagcagacctgctgtccggtgcttgcagggcttgtggacttg

SEQ ID NO: 125702 - DNA, 337 bp, Glycine max
  unsure (1)..(337): unsure at all n locations
tgcacatgagctgccacgatatggtcttgaagtagggcttacaaattatgctgcagcttattgcactggtctcctgttggcccgaagagtcctcaaaacacttgaaatggatgaggagtatgaaggaaatgttgaggctactggagaggattattccgtggaacctgctgagagcaggaggccattccgtgctctccttgatgttggtcttattaggactacaaccggtaaccgtgtgtttggtgcccttaagggactctggatggggggttggatattcctcacagtgataagaggtttgctgggtttgataagganaagaaggagcttgatgctg

SEQ ID NO: 125703 - DNA, 344 bp, Glycine max
ggaattgctacattcataatgatgcttctaagtcaatttatatttgacaaatatgggtggggagttgctgccaagatcacccccaccgtcctgcttttgacaggagttggtttcttttctcttatattatttggtggcccaattgctcctgttattgcaaagtttggaatgactccactgctagctgctgtatatgtgggtgccatgcagaacatattcagcaagagtgctaagtacagtttattcgatccatgaagaaatggcctacatacccttggatgaggataccaaggtcaaggggaaggccattgatgtgttgtgtaccctcattggggatatctgga

SEQ ID NO: 125704 - DNA, 346 bp, Glycine max
cgcttcgcaaatctcaatcgaatctcagaaaaatgagagacatcatcagcattcacataggtcaggccgggatccaggtcggaaactcctgctgggaactctactgcctcgaacatggcatccagcccgacggcatgatgccttctgactccaccttcggtgtagcccacgacgccttcaacaccttcttcagcgaaaccggatctggcaagcacgtcccccgtgctgtcttcgtcgacctcgaacccaccgtcatgacgaggtccgctgcggcacctaccgtcaactcttccaccccgaacaactcatttccggcaaggaagacgccgccaacaacttcgcccgc

SEQ ID NO: 125705 - DNA, 347 bp, Glycine max
ataaatatgaggagttttttttcaaaaagaaaatacgaaagataaatacttaagtcatagtttaattgatttgatgattttattgatctatttgacatcataattttctacatacattataattttttattttctcgagccgtacgaggataaaacttcttatacgtttctagggggggggtgcattatttatctatctctatcccaatgagccgtttatcgaatcgttgcaatcgatgttcgatctcgaagagaggaagagatcttcggaaagtgggtttttatgatccaataaagaatcaacctatttaaatattcctgttattctatatttccttgaacgaggc

SEQ ID NO: 125706 - DNA, 326 bp, Glycine max
gcaccagtttcaccgcacgaatatcttgttgtttggagcgatccgagaaaaactctgtaaacatgttggtttaccaggacctccttacaggtgatgagcttctctctgactccttccgttacaaggaaattgagaatggaatgctgtgggaagttgaggggaagtgggttgttaaaggagcagttgatgtagacattggtgcaaacccttctgctgagggtggaggagaagatgagggagttgatgatgcagctgtaaggttgttgacattgttgacacattcagacttcaggagcaacccgcattcgataagaagcagtttgtta

SEQ ID NO: 125707 - DNA, 350 bp, Glycine max
  unsure (1)..(350): unsure at all n locations
cctggatcctgaactacatccgggagacncagccagcctcggagaacctcgccgccgccgcgaagatcacctcgccgaggcggtggagtacgtggggcagaagacgaaggaagtggggcagaagaccaaggaggttgggcaggatattcagagcaaggcacaggatacaagggaggcagctgcaagggatgcaagggaggcagctgcaagggatgcaagggaagctgctgcaagggatgcaaaggtggaggcaagggagtaaagagaacaacagtgacagcaacaaccgcaaccgcatgatgagtaattctgatattagagggagcattaatgtgttgttgtgatgtggt

SEQ ID NO: 125708 - DNA, 248 bp, Glycine max
  unsure (1)..(248): unsure at all n locations
gtntgttttgtattacaataatgcatgtgctgattattcgcggcaaaagatggcaagttctagctttaagctggatggcaacacnccaactgtcacatgggcagatccaaagaactcacctgaccattctgcttcttcacaggttaaagctctatacgtcaaaaacataccagagaatgttaccactgaacaattgaaggaactattccgccgtcatggagaagtaacaaaagtggtcatgccacctg

SEQ ID NO: 125709 - DNA, 325 bp, Glycine max
  unsure (1)..(325): unsure at all n locations
cacaactactacaagtacttccttacaatcaaaaccaacaacaactatggcaagttatcaaaagcactacgatgatcagggtcgcaangttgacgagtatggcaacgttgagaagcaaaccgacgaatacggcaaccctgttcatgctgctagtgtcacctatgtagccaccagaactgctgctggtggttacagtgatgacattaataagcaacatgataccaccaatgcctacggcgtagacactggtagacagcttctagtggtggctacgatggtgacactaataaacatcatggaattactggtggctataatgatgaca

SEQ ID NO: 125710 - DNA, 350 bp, Glycine max
  unsure (1)..(350): unsure at all n locations
tgcttctagaattagagcaaaagcagtttctttgtcattaggcacacattggatctccaacttcgtcatcggcctctacttcttgagtgttgtaaacaagtttggtatcagctccgtgtacttgggattctcggctgtctgtgttcttgctgttttgtacatagctggtaatgttgttgaaacaaagggtcgatcattggaggaaatagaacgtgctctcagtgcttcaacatgaaaatcttccaggaaatgcttngttcataattcctatgctgctcanagaactgttttatgctcttactagttccacacatttgtctggcacgagtgatgactgggataacttgttt

SEQ ID NO: 125711 - DNA, 245 bp, Glycine max
gagtaaagtagtgtattaagactacaaattttcaatttttcaatggcgtcgaggcaacaaaaagaggatcgagctgaggcagctgcgaaagttgctgcgaaagaactcgaacaactcaaccgagaaaaagaccgtgatttcagtgttggtgttgcagaccaacaccaacaagaagaacatcagttagatcaacaaaagcgtggtgtaatcggatccatgttcaaggcggtgcaagacacctacga

SEQ ID NO: 125712 - DNA, 343 bp, Glycine max
  unsure (1)..(343): unsure at all n locations
ganaggggtggtggctgcttcgaaagcttaataatttgtttatttccagaacatcatagttttcgcagcagcaaactaacaaattactcatatcatataataagatggcccgttctctctcgcaagccaaacgtattggtgtccttgttgctcaatctatctccctaattcccgttcatcggcgaggttacgcagtggcatccgatgtatcggtaagagttggattgggtaatattgggcgaaggaatggaatgtgggaggtgtagaagagaagcctgatacaagagatggttcaaaagcctactcaactgattggtgacccagaccagtaacaggttactat

SEQ ID NO: 125713 - DNA, 324 bp, Glycine max
  unsure (1)..(324): unsure at all n locations
gtatgatgacctcgctgagcagtctttctacatggttggtggcattgaggattgattgctaaggctgaganaattgccaaggagtctgcttcataaggtggcttcttgcttgttcatgcctgtacaagttccatttttggattttaagcgtttatttatgcttatcccagttaggcatgacgagctcgatgatccatctcctgctgagagatgtntgttttacccttctttgcttcctccaccttacacccataagcaactgcagtgacgttggttcggctagcaccaaactacatgactgaagatattgtggctgtgtaagcg

SEQ ID NO: 125714 - DNA, 360 bp, Glycine max
gaatcgctcgagctcgagcgtggaaaattagcctcacaaaattaaagatcaaacaaaccaaggacgagaacacgatgttgcttgatattgcacttggtttattggttttggctctgtttctgcacttgcgtcccacacccactgcataatcaaaagcacttcgccatctcccaaacccaccaagcccaaagcctcgtcttcccttcataggacaccttcatctcttaaaagacaaacttctccactacgcactcatcgacctctcaaaaaacatggtcccttattctctctctactttggctccatgccaaccgttgttgcctccacaccagaattgttcgagctcttcctcccaaacgc

SEQ ID NO: 125715 - DNA, 331 bp, Glycine max
gctttcacatagcttttctggcaatgaaaatatactcacctttggtacacagcatgctctggacccgctaacgctgttgaaagctcgggtgaacaactatggtcgtgcaagtgctctgatccagcacgactggactccaagaactcgattttcgcttgttggtgaggtggatactggggccatcgaaaagagtgcaaaggttggtcttgctgtggccttgaaaccatagaccaagtcgttttgtgagtgatataggatgcttctcgtggtggaggataataagttgttgtagacttcatttccgatgaacatctagtgctcatttggagct

SEQ ID NO: 125716 - DNA, 247 bp, Glycine max
aaccttgctctatactacacagtacacacactagaagaataatggcttccatcctccactactttttagccctctctctttcttgctctattcttttcttcttatccgactcagtcacccctacaaaaccaataaaccttgttgttctacccgttcaaaatgatggttccacagggctccattgcctcaacctccaaaaaagaacccctctaattcaagtaccagtcctggtggacctcaatggaaa

SEQ ID NO: 125717 - DNA, 242 bp, Glycine max
ctagagtcttcagtttctcctcgttgttcttcgctttcctgtattcaatttcgattctttcgttaatttaataagatgtttgggagggcacgaagaagagcgataatacgaggtactacgaaatcctcggcgtctccaagaacgcttcgcaggatgatctgaagaaggcttacaagaaagccgccattaagaatcaccccgacaagggcggtgatcccgagaagtttaaagagctggcgcaa

SEQ ID NO: 125718 - DNA, 337 bp, Glycine max
cggctcgaggactttggggaagcatgggatcatttgcgttgaagatctgatccatgagatcatgactgttggacctcacttcaaggaggccaacaattttctgtggcctttcaagctcaaagcacccctgggtggtctggagaagaaaagaaatcattatgttgaaggaggtgatgctggcaacagggaggattacataaatgagcttatcagaaggatgaattagttttttttccccataccgttagtgttatttgacgctaaaacactctttttgtttatgcttttattattttgaatgatgtatgtgctgattgagatattaattcgttgcttg

SEQ ID NO: 125719 - DNA, 240 bp, Glycine max
  unsure (1)..(240): unsure at all n locations
gtcctagatcgcgagcggccgcgcgcgatctaggactagttctacgtcgcgatctagacctcatatcactgaangantggctctgagggctgagcacgggggtcccagtcccgaacccgtcggctgacggtggactgctcgagctgcttacgcggcgagagcgggtcgtcgcgtgccggtcgagggacggattgggaacgggcccttcggggcctcttccccgggcgtcgaacagtcaac

SEQ ID NO: 125720 - DNA, 348 bp, Glycine max
  unsure (1)..(348): unsure at all n locations
caaagctcgtagttggaccttgggttgggtcgatcggtccgcctccggtgtgcaccggtcggctcgtcccttctgccggcgatgcgctcctgtccttaactggccgggtcgtgcctccggtgctgttactttgaagaaattagagtgctcaaagctagcctacgctctgtatacattagcatgggataacaccacaggattctgatcctattgtgttggccttcgggatcggagtaatgattaacagggacagtgggggcattcgtatttcatagtcagaggtgaaattcttggatttatgaaagacgaacaactgcganagcatttgccaaggatgtattcattaat

SEQ ID NO: 125721 - DNA, 346 bp, Glycine max
ctatggcaagttatcaaaaccactacgatgatcagggtcgcaaggttgacgagtatggcatcgttgagaagcaaaccgacgaatacggcaaccctgttcatgctgctagtgtcacctatgtagccaccagaactgctgctggtggttacagtgatgacattaataagcaacatgataccaccaatgcctacggcgtagacactggtagacagcattctagtggtggctacgatggtgacactaataaacatcatgaattactggtggctataatgatgacaccaatagacatcatggaactaccggtgtctatggtatagacaccgataggcaacaacatgggact

SEQ ID NO: 125722 - DNA, 239 bp, Glycine max
gcggatgttgaataccgatgctttgttggtgggctcgcgtgggccactgacaactacgatctggagaaagccttctctcagtacggtgacgtcgttgaatcgaagattatcaacgatcgtgagactggaagatccaggggatttggatttgttaccttcgcctccgaggattcaatgagggatgcgatcgaagggatgaacggtcagaaccttgatggacgcaacatcactgtgaacga

SEQ ID NO: 125723 - DNA, 346 bp, Glycine max
aaaacagtaaagctaacttcatcacctttaattttctaaaagtaattcagcggctgaataccaagcggagaagatgagtcaggagcattcacggcgtcccaaaggccaaaaccccatcaaatacggcgacgtttttgtcgtctccggcgaccttgcacagaagcccgtcgcaccggaagatgctgccatgatgcaaagcgcggaagctcgagtgctcggacaaacccaacccggcggagcagcttccgtcatcaatctgccgccaccaggaatgaacaggctggccttgtcggtcaccgggacgtcaccgacgttaccggcgaccgtggcgtcacagtcacagaaa

SEQ ID NO: 125724 - DNA, 219 bp, Glycine max
cgaatacgacgagatatccagggttttgttgggagaggaagatgagcagacgctgcaagagggagtgatcgtcggaactctcataggaacaaattcggcaactgagcagacgtgccaaatctagttcaaggaaaaccatttcctccgaagatgaaccgatcaacttgagaagccgcaaccccatctattccaacaactttggaaagttctttgagatca

SEQ ID NO: 125725 - DNA, 241 bp, Glycine max
tgtgatcagtaacaagtacaatggcagtattcagcataacaaagagatcaacaacaacactggcaacaacatcaacaccaatgaaagcaacaacacaaatgcaactgacaaaaggtttaagaccttgcctgctgcggagacactcccccgcaatgaggtgcttggaggatacatctttgtctgtaacaatgacacaatgcaggaagacttgaaacgtcagctatttggtttgcctccaagg

SEQ ID NO: 125726 - DNA, 241 bp, Glycine max
ctagcatgtcgcacatcacgctggaatcttgtgacaactgcaacaaatgcagacactcaagcaactcgcttcgtcaaacgcaacatcgcactacgaacaacccatcataggtggcgccatcccgtagatgactaatgagtaatagtgcactaatacgaggcggatgtctcatgtgcgtcgcttcgcagatctacggcagcacattcctactcatcctaaccgtgatcatcatcattggcat

SEQ ID NO: 125727 - DNA, 242 bp, Glycine max
cacaactactacaagtacttccttacaatcaaaaccaacaacaactatggcaagttatcaaaagcactacgatgatcagggtcgcaaggttgacgagtatggcaacgttgagaagcaaaccgacgaatacggcaaccctgttcatgctgctagtgtcacctatgtagccaccagaactgctgctggtggttacagtgatgacattaataagcaacatgataccaccaatgcctacggcgtag

SEQ ID NO: 125728 - DNA, 243 bp, Glycine max
ctcgttcttcttcttttgttgttctgtgtttgtgtttgttttttctctcacctgaaaatgtcttgctgcggtggtaactgtggttgcggaagctcctgcaagtgcggcaacggctgcggaggctgcaagatgtacccagacttgagctacactgagtcaaccaccaccgagaccttggtcatgggagtggcacctgttaaggctcaattcgagggtgctgaaatgggtgtgcccgctgagaac

SEQ ID NO: 125729 - DNA, 236 bp, Glycine max
ggctacttcaaagttgaaaacccagaatgtggttgtatctctctccctaaccttaaccttggtactggtgctactgaccagcaaggcaaactcagcggaaactgtttctttcagctggaacaagttcgtgccgaagcaaccaaacatgatcctccaaggagacgctattgtgacctcctcgggaaagttacaactcaataaggttgacgaaaacggcaccccaaaaccctcgtctc

SEQ ID NO: 125730 - DNA, 346 bp, Glycine max
cggctcgaggaagcagtgaaagatgacatgaagattcatataatagattttgacatcaatcaaggaagtcagtacataaatctaatccaaacacttgcttcaaggtcaagcaagccaccccatgttaggttgactggagttgatgatcctgagtctgtgcagcgatctgttggaggcctacagaacataggacaaagactagaaaaacttgcagaggcacttggtttgccattcgagtttcgagcagtggcacaaggacttccattgtcaccccatcaatgctcgactgtagtcctgatgaagcacttgtggtgaactttgcattccagcttcatcacatgcccga

SEQ ID NO: 125731 - DNA, 169 bp, Glycine max
caacgaagagctaggtacttgcccagtgaggcagattggtggatgctctgtcttctacatgaggatcagtaatgtctacctagtcattgtagtcagcgacaacgccaatgacgcttgcgcaatcgacgttgaagttgaggctgttgcattgctccgatcagacctgggt

SEQ ID NO: 125732 - DNA, 168 bp, Glycine max
gctctatactacacagtacacacactagaagaataatggcttccatcctccactactttttagccctctctctttcttgctcttttcttttcttcttatccgactcagtcacccctacaaaaccaataaaccttgttgttctacccgttcaaaatgatggctccacag

SEQ ID NO: 125733 - DNA, 331 bp, Glycine max
gattgttgtgactcgttcttcttcgtcgttatcttcttcttttgttgtttgtgtgtttgttttttctctcacctgaaaatgtcttgctgcggtggtaactgtggttgcggaagcgcctgcaagtgcggcaacggctgcggaggctgcaagatgtacccagacttgagctacaccgagtcaaccaccaccgagaccttggtcatgggagtggcaccagttaaggctcaattcgagagtgctgaaatggtgttcccgctgagaacgatggctgcaaatgtggagctaactgcacctgcaacccctgcacttgcaagtgaggtgttggagagct

SEQ ID NO: 125734 - DNA, 190 bp, Glycine max
  unsure (1)..(190): unsure at all n locations
ganaaaaggtgtcatcacncaagtanagtaccaagggggctgtggaagcggttgggcgttttctgccacgggagccatagaagcagcacatgcaatagcaacaggagaccttgttagcctttctgaacaagaactcgtagactgtgtggaagaaagcgaaggttgttacaatggatggcactatcaatcg

SEQ ID NO: 125735 - DNA, 209 bp, Glycine max
cagtctgcgccacatcctcaacctcctcgactccaacctcgtaccctccgtcttcgccagcgagtccaaggtcttctacttgaagatgaagggcgattaccaccgctatctcgcagagtttaaggttggggatgagagaaaaaccgctgctgaggataccatgttgtcttacaaggctgcccaggacattgcttctggggatcttcccc

SEQ ID NO: 125736 - DNA, 355 bp, Glycine max
  unsure (1)..(355): unsure at all n locations
cctgaaacttgctattgttcncaattttctcaaattgctttcggttttcgttctgattctgcaaaatcatggagatggagcgcatcgttgaattccctcacacatacatggtatcgacccccgagaaagagagcgcgtttaggctgggacatcgctgaggtccccaagataagattcatggcaaaatgggcgaaggaacttttgggcaggtcttggagtgctgggacagagaaaggaaggaaatggtcgccataaaaattgttcgtgggataaagaaatatcgagaggcagccatggtagaaattgaggtactgcaacagcttgggaaacacgataaaggtagcaatcgttgtgt

SEQ ID NO: 125737 - DNA, 354 bp, Glycine max
  unsure (1)..(354): unsure at all n locations
ctaacttcaacacctttaattttctaaaagtaattcagcggctgaataccaagcggagaagatgagtcaggagcagccacggcgtcccaaaggccaaaaccccatcaaatacggcgacgtttttgtcgtctccggcgaccttgcacagaagcccgtcgcaccggaagatgctgccatgatgcaaagcgcggaagctcgagtgctcggacaaacccaacccggcggagcagcttccgtcatgcaatctgccgccaccaggaatgaacaggctggccttgtcggtcaccgggacgtcaccgacgttaccggcgaccgtggcgtcacagtcacagaaactanagtcnctggaagacg

SEQ ID NO: 125738 - DNA, 348 bp, Glycine max
cacgatctcaacggagcacctctcttcaggtcacaatctagactgcaatcatggctgatggaccacagcatccatcagttgttcagaagctagctggacagtcttacctggtgtccaggctaagccccaactttaactctgggaattattcctcgactgtttcttacttcaatggaggactgcactcttctgggttggctgttgtgtcgcctggatctccagttactgtgcatgctccagcagagaaaggagtgagtggatttctagtggattttctgatgggtggagtgtctgctgctgtgtcaaagacagctgctgctccaattgaacgagtcaaattgcttatcc

SEQ ID NO: 125739 - DNA, 196 bp, Glycine max
tcctagtacaccgtattaaagaatttaagatatactatgatgagagcgcggttcccattactgttgctggaagttgttttcctggcatcagtttctgtctcatttggcattgcgtattgggaaaagcagaaccccagtcacaacaagtgcctccgaagttgcaatagcgagaaagactcctacaggaaccaagcat

SEQ ID NO: 125740 - DNA, 254 bp, Glycine max
tggcgaagaagcatggcctcaaggtgcaggctgttatttcatttcaccaatgtggcggtaacgtcggagactcttgcactattcctttgcccaaatgggttgtggaggagattgataatgaccacgatcttgcatatactgatcaatggggaagaagaaactatgaatatatatcacttggatgtgatactttgccggtgctcaagggacgatccccagttcaatgttatgctgatttcatgcgtgctttcaga

SEQ ID NO: 125741 - DNA, 252 bp, Glycine max
gagcaacatcagcatgatgagaacaaacccggtgtgattgggtccatgtttagagccgccaaggaagccgtggttgggaagcctcaccagagagaagtttatgcaaaggaaacaaagatgggtgaatattcagattatgcgactcagaaggcgagggaaacgaagcagaaggctggggagtatacagactatgcagctcagaaagcaaaagaaaccaaagactatgctgctgagaaggctaagaatgctaaa

SEQ ID NO: 125742 - DNA, 366 bp, Glycine max
ctcggaatcggctcgagcgcaagcaaaaagaaagaatcccaggcgaggagaaagatggaggggaaggagcaggatgtgtcgttgggagcgaacaagttccccgagagacagccaattgggacggcggcgcagagccaagacgacggcaaggactaccaggagccggcgccggcgccgctggttgacccgacggagtttacgtcatggtcgttttacagagcagggatagcagagtttgtggccacttttctgtttctctacatcactgtcttaaccgttatgggagtcgccggggctaagtctaagtgtagtaccgttgggattcaaggaatcgcttgggccttcggtggcatgatcttcgccctc

SEQ ID NO: 125743 - DNA, 340 bp, Glycine max
agcacatgaaggaaggaagcagcattatcaacacgacatcagtgaatgcatacaagggacatgcgaaactattggactacacgtccaccaagggggcaattgtggcctatacaaggggtcttgcccttcagctggtgagtaagggaattcgggttaatggggtggctccagggcccatttggacccctttgataccagcctctttcaaggaggaagaaacggcccaatttggagcgcaggtcccaatgaagagagctggtcaacctattgaggttgctccttcctatgtttttcttgcttccaaccaatgctcctcttacataactggacaagtccttca

SEQ ID NO: 125744 - DNA, 334 bp, Glycine max
ccaaccttgactggtacaagggaccaactctccttgaggctcttgactaaatcaatgagcccaagaggccctcagacaagccactcaggcttccattgcaggatgtctacaaaattggtggtattggtaccgtgccagtgggacgtgttgagactggtgtcgtgaagcccggtatggtggtgacttttggtcccactgggctgacaactgaggttaagtctgttgagatgcaccatgaggctctcacagaggctcttccaggtgacaatgttggctttaacgtgaagaacgttgcagtcaaggatctcaagcgtggttttgttgcatccaactc

SEQ ID NO: 125745 - DNA, 183 bp, Glycine max
cacaactacaagaaagaacttccttataaccaaaaccaacaacaactatggcaaattatcagaagcactacgatgatcagggtcgcaaggtcgacgagtatggcaatgttgagaggcaaactgacgaatatggctacccggttcatgccactagtgtcacttatgtagccactaaaagtgttg

SEQ ID NO: 125746 - DNA, 347 bp, Glycine max
  unsure (1)..(347): unsure at all n locations
ganagaacttccttataaccaaaaccaacaacaactatggcaagttatcagaagcactacgatgatcagggtcgcaaggtcgacgagtatggcaatgttgagaggcaaactgacgaatatggcaacccggttcatgccactagtgtcacttatgtagccactaaaagtgttggtggctacaatgatgacactaagaagcatcatgataccaccggtgtctatcctgagaaagataccggtaggcatcattttggtcgtggttacgatggtgacactaataagcaacaacatgatgctattggtgtttatccggaatagacattggtagagatcatgagactacggtg

SEQ ID NO: 125747 - DNA, 253 bp, Glycine max
ttacacacacacacacacactaagaataatggcttctatcctccactactttttagccctctctctttctttctctttccttttcttcttatccgactccgtccccattccccaacaccacactaaccctacaaaacctataaaccttctggttctacccgttcataatgatgcttccacagggctccattgatacaacctccaaaaaaggacccctctaatgcaagtaccagtcctggtggacctcaatgga

SEQ ID NO: 125748 - DNA, 350 bp, Glycine max
  unsure (1)..(350): unsure at all n locations
tgtanaagtttgaccagcattggtgagaagctgggtgatgcaaaacagagagaggagctgttagacaacgtcactggcaacatcaccgagggaggaggcgaggtgttgggagcagtaggtgaaaccgttgctgagattggacagaacatgatgaagccagcggagatagttcaggaacgcgctcacgttcgacaagcgggtggggtcttggatgccattggtgaaaccattgctgagattgctgaaacgactcgagtcatggtttctggagaggacgagagagtgctgaggcagagcgtggtgttggagctcgcgtaactggtcgtgccaagcatgaagaagggtcgcac

SEQ ID NO: 125749 - DNA, 338 bp, Glycine max
tgttgatcactttggttttgaggattgtctaaatgacccccgtgagtcagagactttccggccattagacatgcatcatgggatggaagttcgccttggtctatctaagggaccagtgtacccaagtattatataattaaatttgactgttattctagtaccagaaaacagtattttgtgatcgaagcttcttgttattcattaaaatggaagtgtccgaggattctccatatgtagtcgtggacttgtgttttcctatgctttggatgctagaaatgttatggtccatataaacagagcatgtctttcaaattaaagcagaatttatgcatgaggca

SEQ ID NO: 125750 - DNA, 246 bp, Glycine max
ctctctaataagggttcctctttccttctctagcacaatttacaatctcaatggctggaatttgctgtggtgtcattggagaaggtgacactccggctccactcgagcccactcctcgcccctccaggcgccggagtttggacatcttacctttaaaatatatcgccgacatgcccatgccgccgccggaggctttacggaagcgtcccaagctcaacctcagggactgcgataacgcaattgaaa

SEQ ID NO: 125751 - DNA, 342 bp, Glycine max
  unsure (1)..(342): unsure at all n locations
ganatccacatatagcagggataggaatctttggcaccttagccatgagggagatatttttgaagacccgagtaatgaacctaaaaaggacatgtacatgatgtctgtagaccctgaggatgctcctgatcaaccagaatatgtggaaattgggttagagtcagggcttcctgtttcagtcaatgggaagagtctttcaccagcgtctttacttgctgagctcaatgagattggtggaaggcatggaattggccggatcgacatggttgagaatcggcttgtaggtatgcgaagccgtggagtttatgaaactcctgggggaacaatcctgtttgctgcagc

SEQ ID NO: 125752 - DNA, 211 bp, Glycine max
atataagagagtcagaaattgaagatctattctacaagtatggccgtataatggatattgaattgaaggttcctccccgccctccatgttattgctttgttgagtttgataatgctcgagatgccgaagatgcaattcggggtcgagatggatacaactttgatggttgtcggttaagagtggagcttgctcatggtggtagagggccatc

SEQ ID NO: 125753 - DNA, 213 bp, Glycine max
cggattcggctcgagatcaaacttgctctatactacacagtacacacactagaagaataatggcttccatcctccactactttttagccctctctctttcttgctcttttcttttcttcttatccgactcagtcacccctacaaaaccaataaaccttgttgttctacccgttcaaaatgatggttccacagggctccattgacacaacctcc

SEQ ID NO: 125754 - DNA, 191 bp, Glycine max
agcgaacgctcttcgttatcttttctcagactccgcggcgtagatccgaggagttcgggaaatcctaactcatcatctcaactcaagtcatggctggacttgcacctgagggatcacagttcgatgctcgtcaatatgagtctaaaatgagtgacttactttcatctgatggacaggacttcttcacatcc

SEQ ID NO: 125755 - DNA, 348 bp, Glycine max
cacacaactactacaagtacttccttacaatcaaaaccaacaacaactatggcaagttatcaaaagcactacgatgatcagggtcgcaaggttgacgagtatggcaacgttgagaagcaaaccgacgaatacggcaaccctgttcatgctgctagtgtcacctatgtagccaccagaactgctgctggtggttacagtgatgacattaataagcaacatgataccaccaatgcctacggcgtagacactggtagacagcattctagtggtggctacgatggtgacactaataaacatcatggaattactggtggctataatgatgacaccaatagacatcatggaact

SEQ ID NO: 125756 - DNA, 346 bp, Glycine max
  unsure (1)..(346): unsure at all n locations
tgggcaatgtgaacgtgactcctgaagaagaagaagtttctgcaagtgcaagggcaaccgatgagaacgccatgcctcagtctcctcccacctctcctacggctatccatttccccctcatattcgctcctcaggttccggtggttccgctacaaagacctgatgagatgcatgttccaagttgttcctggatggagacaacttcagggtatgaagatgtgtaccgcgaagtaggaattccaacagtgattacttggagttatgatggaaaggaagtagctgtggagggatcgtgggataattgganaacaagaatgctcctggagagatcagggaaggactttgc

SEQ ID NO: 125757 - DNA, 335 bp, Glycine max
tggtgttagatctgtacctgcctagccattgatttggaaaagtccaagcttcaaagatgagtaagcttcagagtgatgctcttagagaagctatctcaggaatcatgactgattccaaggaaaagaacaggaaatttgtggagaccattgaactccaaattgggctgaaaaactatgatccccagaaggacaagcgttttagtggctctgttaagttgcctcacattcctcgccccaagatgaagatttgtatgcttggagatgcccaacacgttgaagaggctgagaagataggattggactacatggatgtcgaggccttgaagaagcttaac

SEQ ID NO: 125758 - DNA, 335 bp, Glycine max
  unsure (1)..(335): unsure at all n locations
attatttaagacttgctctataatacgaagtatacatactagatgaataattgcatacatcatacaatatatnttagccctctctctttcttgctcttttcttttcttcttaaacttctcagtcacctctacaaaaccaataaaccttgttgttctacccgttcaaaatgatggttccacagggctccattggtccaacctccaaaaaagaacccctctaatgcaagtaccagtcctggtggacctcaatggaaatcacttgtgggttaactgtgagcagcagtactcatccanaacgtaccaagcacccttctgccactccacccaatgctcta

SEQ ID NO: 125759 - DNA, 349 bp, Glycine max
tgtgggtttggccaaaggactgagaaaggccaaaagcatgtaccctttggtggttgctgtgttaccagatgttcctgaagaacatcgtgagattctcaaatcccaaggttgcattgtcagggagattgaacctgtgtaccctcctgagaaccagacccagttcgccatggcctattatgtcatcaattactccaagctacgtatttgggagttcgtggagtacaagaagacgatatacctagacggtgacatccaagtatttggaaacatagaccacttgtttgatctgcctgataattatttctatgcggtgatggattgtttctgcgagaagacttggagccacacc

SEQ ID NO: 125760 - DNA, 148 bp, Glycine max
  unsure (1)..(148): unsure at all n locations
gcgagtaccagtgctggtggacctcaatggaaatcacttgtgggttaactgtgagcagcagtactcatccaaaacgtagtaagcacccttctgcaaacacanacaatgntcaggatncaacacccaccaatgcctcagttgccccgcg

SEQ ID NO: 125761 - DNA, 230 bp, Glycine max
  unsure (1)..(230): unsure at all n locations
gagataccaacaagaaaagagaaaaagaagagttgagatgcnctttgaagaaaagatggcatcccataggcaaagctatgaagctggtcaaactaagggccgaactgaggaaaatgcgaaccagacgatgggcaatattggagagaaggctcaagctgcaaaggagaagacccaggaaatggcccaagctgtaaaggagaagacccaacaaacagcccaagctgccaagg

SEQ ID NO: 125762 - DNA, 329 bp, Glycine max
catatgcagaatggtgacatgtatggatccagcgagtcacccatcaaacctcaacaactgactgatgatacctgggattatattttctgtggtggaccatatcccaagtcaactgatatatcatcatccctttaagaaagaatgaagcgtgagtttgaatattggtatccatttgatcttcgagtctctggtaaggatctcatccagaatcatcttaccttctgcatttacaaccatacagcaattatggccaagcatcactggcctcgtgggtttagatgcaatggacacattatgctcaattctgagaaaatgtccaagtccactgg

SEQ ID NO: 125763 - DNA, 202 bp, Glycine max
gaaatattttcattctaggtgatgtatcatgtatgtaccaaaatattttggtacgtaagtcttttaaaaagtttgcatctcctctttggttttccttagttctgaaagttatctcctaagaagacaatcatatgtactgtacgtagtgtgaagatatagtattgtatgctgcagaatatgattgtctaataaggtggactag

SEQ ID NO: 125764 - DNA, 260 bp, Glycine max
ctgcgagttctagtcaggtcacgcgttctctctctccttgtaacagaatatctcactacacgtgggacgaggaacgcaaccaatcgcagagcaacaaagccgactcgctttctaagacttccaggagatggaggctcactgactttttgctgttccgcagcgcctccgaaggaagaggttccagcaaggaccccttgagaaagttccccactttctacaagaagcccgaagacccaaaagcttccaacccaggcccaaag

SEQ ID NO: 125765 - DNA, 242 bp, Glycine max
acactactctttcaaaagcgcatccagggagatagcatcagggaaaattccagacccaggatcgttgaaggcaaaggacacaacaatggtggatgtgccagttaaggttccatacagcatattgatgagcttggcaaaggacattggtgctgactgggacatagactatcaattggatcttggtctggttattgatgttcctgtcattggcatcttcaccattcctctctctcagaaaggag

SEQ ID NO: 125766 - DNA, 240 bp, Glycine max
  unsure (1)..(240): unsure at all n locations
gaaaccctaagagatgaagagaactcctatcttgttcnctctcttctttcttctttgtgccttcacctcatatctaccttcagccaccgctgatgatgatcatgtgtacgacactgacggcgataagcttcaatacggtgtcaattatttcgtgttgccagtgataagaggaaatggcggtggaatacaagtagcaaaagcaggaaacgaaacttgccctctgactgtggtgcaatctgg

SEQ ID NO: 125767 - DNA, 329 bp, Glycine max
tgtacggtgggagaagggaaggtgagtagtaatggtcatggatgttgcagatcagggccaggctatgcttctccactggaagccatttctggtcccagagagtctctcatttatgtaacctctgtctacacagggaccggaatagagaagccagactatttggcgacagtggatgtggatccaaactctccaacttattccaaagtcatccataggcttcctgttccttatttaggtgacgaattgcatcacacaggctggaattcatgcagctcttgccatggagaccctcagcagacgacgattctcatcgtactgcatcgtatcag
